United States Patent Application Publication US 2014/0141044 A1 - sequence listing, part 7

SEQ ID NO: 1412 - DNA, 423 bp, BradyrhizobiumColbertium
atgctagaagaacctgctgcggttccaagaagtatcgaaaaggttaagcacatcctgatgcggatcgtccgtaccatcctggcattcgccatcgccgtatccttggcgatgctgccggctggcgtgtccgcttcaagcctcgccatatcgtcggatcagatgcatgcgaccatgcagatgggcggcggcggcgatatgtcggtggacgattgctgtcccgacatgaaaggaacgggttccgacaccggcggctacatgtgcggcatgggcttctgctgcgtcggcagcaccatcgcactcgcagacatccaccccctggcgcttgcgttacttgccatagcggcgggaaaaaccgccattcccgccgaccaggtcgtctccttccgcggcggcagccctcccttccggcctcctcgaatctga

SEQ ID NO: 1413 - DNA, 393 bp, BradyrhizobiumColbertium
atgctctccagattcagcaccgcggctcttgccgccaccctttcgctcgccgcatcaggtgccatggccggcgcgggtgactacgctttcgagccggtcaatcccgagatgaagaagggcgacgacgtcacgctggcccttcgcttgaccaacaagcggaccggcaagccggtgccggacgccgtcattttccgaacgcgcgtggacatggcgcccgacggcatggccgagatggagtcggacgtcacgccgctgccgtcaaacgagccgggcatctacgtcttcaagacggatttgtcgatggcaggccgctaccaggtcacgctttccgcgaaggtgcagggcgagcccgacaccgtcaacggcaaggtcatcatcaaggccaccaagtga

SEQ ID NO: 1414 - DNA, 138 bp, BradyrhizobiumColbertium
gtggacggaccaaggtccatcgatcaagaacaaggaggcgcccagggccaggctgccggtgagcgcgagtgctgtgagaagacgttgcgtgttcatcgccagataccgcgcgccgcgggcgcgcgtccatgtgaatga

SEQ ID NO: 1415 - DNA, 1350 bp, BradyrhizobiumColbertium
ttgatcgatggaccttggtccgtccacgccgaggtcgcctcggcgaccgcagacggcgctactccgctctattaccgcgatccgagcggtgcgccgctttggtcggccgggcccaggaaggacgaggacgggcgggactatctgccggtctacgacgacgatcaggctgccccggcggagccgaagccgcaacagccggcaggatcgcgcaagatcctttactaccgcaatcccatggggttgcccgacacctcgccggtgccgaagaaggatccgatggggatgaattatgtccccgtttacgaaggcgacgatgtcgacgatgggacggtgaagctttcgcccggcaagatccagcgcagcggcgtgaagtccgaggccgtcgagcggcggtcgatccgggtcctggtgaaggcgcccggcacgatccagctcgacgaacgccgcgtctcggtgatcgcgatgcgcgcagaaagcttcgtgcagaaggtcgcggacgtcaccaccggcacccgcgtgaaggcgggccagcccttgatggaaatctacagttctgcggtcgcctctgccgccgccgaatatctctcgacgatcaattccaaaacaaccggcggggtcgaggcctacggccgcggctcgcggcaacggctggtcaatctcgacgttcccgatcaggtcattgccggaatggagagaacgcgcgtcgcgcccgtcaccatccagtggtcggcgccgcgcgacggggtcgtgcttgagcgcaacgcgatcgaaggcatgcgcgccaatcccggcgacgtgctgttccgcatcgccgatacctcgctggtgtgggctctggtcgacgttgccgagcgcgatctcggcaatatcgcggtggggcagtccgttgcggtgcgcgcgcggagctttcccggccgggcattcaccggcaggatcgcggtgatctatccgcaggtgaaccgcgaaacgcggacggttcgcgtccggatcgagctcgccaatcccgacgcggcgctgctgccggacatgtatgtcgatgccgagatcgacacggccgatacgacgccggtcctggcgatcgaggacagctcggtgctcgacaccggcacgcgccaggccgtgctcgtcgacaaggggagcgggcgtttcgagccgcgcgaggtgaagctcggccggcgcggcggcggctacatcgaggtgcgggacggacttgccgacggcgaggccgtcgtcacctccgccaacttcctgatcgatgcggaaagcaatctgaaggccgcgctcaagggctttgccgaggctgctcctcaagcttccgacgcgggccatgcgaccggagagcacaaatga

SEQ ID NO: 1416 - DNA, 1632 bp, BradyrhizobiumColbertium
gtgctgcgcgccaagacgccggtgatcctggcatcgctcgtcgtgctcgccgtcacgatatggccggcgcggcagctcggcaccgagttcatgccgacgctggacgagggcacgctgctctacatgccgacgacgctgcccggcatctcggtcaccaaggccgccgagctgatgcagacgcaggaccgcatcatcaagtcgtttccggaggtcgcgtccgtctacggcaaggcgggtcgggcggcgaccgcgaccgatccggcgccgaccgagatgttcgagaccgtcgtgaacctgaagccgaaggagcagtggcgccccggcgtcactgtcgacagcctcatcgcggagatggacaaggcgctgcagtttccgggcgtctccaacgcctggaccatgccgatcaaggcgcgcatcgacatgctgtccaccggcatccgcacgcctgtcggcgtcaaggtcatgggaaccgatctcgtcgaaatcgaccggctggcgcggcaggtcgaacaggtgatcaagaccgtccccggaacgtcctcggcctatgccgagcgcggcatcggcgggtactatctcgagatcgtcccggaccgcgaggcgctcgcccgctatggcatcctgatccaggacgttcaggacaccatcgcggccgcgctcggcggtcagacggtgacgacgacagtggagggccggcagcgcttcacggtgaacatgcgctatccgcgcgatctgcgcgacaatccgaaggccatcgccagcgacatcctggtgccgatgccggccggtggcgcggtgccgctcggcgaggtcgcgaaggtcgagccggcgcgggggccgacgtcgatccggaccgagaacggccagctcgcgacctatgtctacgtcgacatccgcgatcgcgacatcggcagctacgttaaagacgcgcaggctgccgtgagcgacagcatccagtttcctgccggcacctatgtcgtctggagcggtcagtacgagtatctgcagcgcgcggcagcgcgcctgaagatcgtggtcccggtcacgctgacgatcatcttcctgctgctgtacctgaacttcagggccatgaccgagacgctcatcgtcatgctgtcgctgcccttcgcgctggtcggcggcatctggatgatgtggtggctcggattcaacctgtcggtcgccgtcgccgtcggattcattgcgctcgccggtgtcgccgccgaaactggcgtcgtgatgctgatgtacctcgagcacgcgctgaccgagctgaaggccaggcgcagcgccgaggggagcgtcttcacccggcgggatctcaacgaggccatcatggtgggcgccgtcgagcgtgtccgtcccaagatgatgaccgtggttgccatcatggcgggcctgctgccgatcatgtggagcaccggaaccgggtcggagatcatgcagcggatcgcagtgccgatgattggtggcatgatctcttcgacgctgctcacgctgatcgtgatcccggcgatcttcgggctggtgaaaggcttcggcttgcctcccagggccgaggacagcggacaaccgaccgaaatgtcaaagtcgattggtccgggattgcggctgctggagcctgccgaatga

SEQ ID NO: 1417 - DNA, 132 bp, BradyrhizobiumColbertium
atggcgcacgacatcatgtcggcgatgttcgggatcatggaattgatcgccacatcggtcgttttcgttccaatattggggcggcgccggcaagatgggcgatcgtgcggaggggatctttgccgcacctga

SEQ ID NO: 1418 - DNA, 612 bp, BradyrhizobiumColbertium
atgggcttctacaacgacttcattcttccacggctttgcgaccttgcgatgcgcaacgaagagcttgcgccctatcggcaacgcgcgacccgtgcggctcacggccgggtactcgagatcggcatcgggtccggccgcaacctgccgttctacggagctactgtgacgcagctcgtggggcttgaacccgctgcaaagcttctcgagatggcgcgagccgctccacagccggaaactccagtcgatctcgttgaagcttcggccgaggcaattccgatcgacgaccgcagcatcgatacggttctgacgacctggaccatgtgcagcattccgaacgtcgatcgcgcgatgacagaggcgcggcgcgtgctgaaaccgggagggaagctggtcttcgtcgagcatggccgcgcgcccgaaccgcgcgtgcgctggtggcaggatcgactgacccccgcatggatgcgcatctccggcggttgtcatctcaatcgggacattgccgacgtcttgacccggaacggctttcgcatcgacgagatgcgcaccgggtacatgaatgggctgaagccaatgacgtttatgtacgagggccaggcgggccctcgttga

SEQ ID NO: 1419 - DNA, 483 bp, BradyrhizobiumColbertium
atgaaggaacgcgcacatgtgatgacccgccggtcgttcgcagggctgatggcggcggcattccttgccgggcctgccgacgcggcgcaggccgacgaaactgtcgtcagggtccataaggatccgaactgcggctgctgcgatggctgggtgcggcatctccgcgatagaggattcaccgtccaggtggaggagaccgccgacctcgacgcgattcggagccgtctcggtatccccccggacttggccgcgtgtcacacagcggaggtcgccggttatgtcgtcgaggggcatgtgccggcgacggccgtacggcgcctcctgttggagcgtcccaatgcgcggggcatcgccgtgccgggcatgccgatcggatcgcccgggatggaaggcggcaggccgcagcgttacgaggtcgtgctgtttggtgccgaggggcaaaggccatacatgcgctttgtcggctcgcaggcgatcgattga

SEQ ID NO: 1420 - DNA, 531 bp, BradyrhizobiumColbertium
atgaagcttctcgttttgatcatcgctttgctcgtgccggccgccgtttcggcacagacatcgtatgccggcatgcagtcccggcacatcaaggcgctctcggagcagcagattgatgatctgcaggcgggacgcggcatggggctggcgctggcggccgagctcaacggatatcccgggccctcccacgtgcttgagctcgcagacaagctcgggttgaatcaggagcagcggagcaaggtccaggagatgttctccgagatgaaggccgagaccacgcccatcggtagtaaattgatcgagaaggaagcggacctggatcggcaattcgccagccgcacgatcaccgccgagactctggctcttgccatcgcggccatcgcgacgacgcagggcgagctgcggcaagcccatctcaaataccacctgcgcactgcggtgcttctcgaccaggcgcaactggcaagatacgccgagctgcgcgggtacacgtccagcgacgctgcgcgacggcaccaccaccatcgctga

SEQ ID NO: 1421 - DNA, 408 bp, BradyrhizobiumColbertium
atgagcaccatcaccggcggctgtcactgcggcgcaatccgctacgaagtcgagggcgacgcgattgtgcatgcgctgtgccactgccgcgattgccggctccacgccggcgccccggtcgtcggctggacgatgtacccggacaatgccgtcaaggtgatcaagggcgaaccgaaggtctaccactcctcggaacacggccgacggcagttctgcggcgactgcggcaccggcctgttctacttcaatgccagcatgctgccggggatcatcgacgtccagagcgcgacctacgacgatcccgaagccgtgccggcgacgatgcagatccaggtcgccgagcgtcttcgctggatggagcatgcgcacgaattgccggcgttcgaccgctatcctccacagccttag

SEQ ID NO: 1422 - DNA, 789 bp, BradyrhizobiumColbertium
atgagccgtaccttccctcgtctcgcgcacacgctgctcgcaaccgggcttgttctcggatcgacagcatccgcctcggcacatgatgtctggctcacgttctcggggccagccagcgcacgttgcgccatcgtcaattacggtcatccggacgaccgcccgcccgctttcgcggacaaggtcgtggacctcttcatgatcacgccgaaaggccgcagctcgctgctcgacgggcttgcgatcgcatccgacaagggcatccagatcgcacgaacgaaaccgttcgacgatgccgggcatacgctgctcgcggcgcgttacgacaacggtttctgggtcaggacgacagacggcctctatcgcaacgcaacccggcggctcgtgcctgacgccgccgagagcttctggtccggcaagtttgcaaaagcgatcacgggggctgacgcaccctggcaggaggtgcttggacacgacctcgagctcgtgccactcaccgatccagccaaggcgaggcctggtgaggcgctcaaggtcaaggtgctgtttcgcggcaagcctctcgccggagcggaggtcgaacgtggcgacggcaagaccgcggctgcggagaaggacattccaaaattcaagacggacgcggaaggcgtggcggctgtcaccatcgtcaagccgggtccccatctgctggtgatcgatcaccgtgcggcgccgtcagtcacgcccgatcaggcaagggccgacctctacaatgcgacattgtggttcagcacggccgccaagcagcgctga

SEQ ID NO: 1423 - DNA, 1935 bp, BradyrhizobiumColbertium
gtgaccgcgctgccggcggccgtaacggtgatggacgcaccggcgatcagccggctggcggttgcaacctatggcgacctgttccgctcgctgccaggcttcaatgtgtccaactatggccagggcggaatcggctacgggctttcgctgcgcggctataccgaatccgaacacggccgcgacatcgcctattacatcgacggcgtcccgctcaacgaggtttcctcgctgcatacgccgaactatgccgacctcaacgtgctgtttccggagacggtcaagagcatcgagatcgtgcgcgggccgttttcggtcgagtacggcgactccaatatgggcggctcggtcaacatcacgaccaagcaggccgaactctttgcgagcctcggcatctccggaggcacgcaaggcacggcccggggcgtcgcgacctacagcacgacgcagggcgcgtggctgccctatctcgcgttcgagggctatcacaccgacggctaccgcgataacagcttcatcaatcgctacaactcgttcaacaaggtcacgacgacgcttccggacggcgccaccgtgtcgttccgtgcgcaggcctacggcaccgaatacggctcgccgggctatgccagtcgcgacgccattgccgcaggaacgatctccgaacgctcggcgaccaatccgaccgacggcggcaacaagcagctcgaaaacctcgtcaccaattacagctccggtgcacaggaccaggagctgaaaggcaccctgttcgtcagccaccaattctcgaaccggttcgcggatttcggcggcggccagcgcgtgcagcacgaggatcgcacgatggttggcggccgcgtcagcaagacctggagcggagccatcggcgacgacatccccgtgcaggtcctgctcggcagcaattggcgcaccgacttcatcgaggcgttccaggcgccgaccctcgcccgcgccgtgtccggcccggccgcggtcaatgtcgggttgaccgagacgaacatcgccggcttcggtcaggtccaggtcaagccgttgccctggctcaagttcacggccggtgggcgttacgaccagtactactacgacatcaacgaccgcaccacgcctggcggcacgccgaatcattcgaacggcattgcaagcccaaaggccggagtcgccatcgcgccgttcaaatggctggagctgttcgccaattacggcgagggtttccgcagcatcgacgtacccgcagagctgatcggcaatcccggcattcagccattcaggatcgtcagccgcgagggcggcgtccagttcacgttcgatcgcttcaggctgctggcgagctattggacgacggactcggccaacgaagcgttccaggcggcgcccggtctgcccgtgacgttcctgggcaaagcccggcgcaacggatacgacgtcgatgcccgctggttcgtgatcaaggatcccgtcaacaacgtctcgttgttcgccaactatggcggcgtctcggctcgcctcgtcgacgctgcgccctcctacttcgtcccgaacgtgccgagctacgtcgccaatgtcggcgttgatttcaacgtcgcgacggtcaatgcgcaagtcctgtccggctcggtctatgtgaccttcgtcggcaagaagaacctcacgcaggacggtctcatcaccacctcaccctactcccgcgtgaccggcaagctcgcctattcctggcccgaggggtggaccgcgttcacgcaggcgacctggtatcccggcgatcgcctcagcgaaatcgccatcaattttggcgatccagtcgacgcaaggacatccgacatcttcgtcagcgcgcagccgacaatcgccgtgcttgcgggcgtttcgtatcgtttcccgaccgtaatagcgggggcaactccaaggctggtgaccaaatga

SEQ ID NO: 1424 - DNA, 198 bp, BradyrhizobiumColbertium
ttgctgcggcgatgcgcgctgcgtgacgggcgatcgctgcgcctgacgcgcggcgtttgtccttgccgagagctctgggcgccgcacgcgtctgagcgccgtctcgggcgccgcgacagtgaccggcggcaacgcccccgccgcagatccgccaggtcccgtctgcgcgtgaactggatttgcggcagaagcgcctga

SEQ ID NO: 1425 - DNA, 2415 bp, BradyrhizobiumColbertium
gtgcgcgcagagctcgagcgggcttggccatcgctcatttccgacatcatcggcagggccgccagcgcgcgccccgcttccgtcatgcgccggcgtgatcgctggcctcacatagaaacgctcatgtccaacacatcaaccagcctgcgccggtccatcctggccgcgacgacggcgctcatctcacctgccctgccttgtgcgacttcgctgcttccgcctttcgtcacaacggcctccgcgcaatcggcggagcggctgccacccgtgacggtcaattctccgcaacaacgcaaacgaaagccgcgcggcgtcgtcgcggccgccccacccgcggcagcacaaagcggcgacatctctgcgccagatcagagtccgagttcagtgcccgcatccgccagcctgccgccgagggcgggtttcgatcgcggcctttcgtcgagcgactccgcctctctcgtcactgccctgcccggcggtgcggcatggggtgccggcggcgtctcgagcctgcccgccatcaacggatttggggccgaccggctgcaggtcgcgatcaactcgatgctgatcagccccgcctgtccgaacgaaatgaatccgcccctgtcgttcgtcaatccggcgatgattgcgaagatgcgggcctatctcggcgtcggacctgtatcggtcggaggcgactatatcggcagccgtatcgacgtcaccactgcgccgccggctttcacgccggcacaggccggctgggttgccagcacccggctttcgagcttcttccgcagcaacggcaacgcctatggcgtcgatgcaactgcaaccctggccaaccacgacacgagcgtcacctacacgggtggctgggtccgctcgggcaactacaaggccggcgacggaacgacggtcaagtcaacgctctacgagacgcagaaccatgccatcagcatctcgaagcaggcgctcggcaatctctttgctttccagattggcggtcagttcattccgtaccagggctatgtcaaccagtacatggacatggtctataaccgcggcctctatgcaaacggccgttacgagggcgtgttcgactggggcaagttcgaagccagcgccttcgtgcaccagatccggcacaccatgggattcattgcgcccgacaagatcggcgagatgccgatggacacgaaggctctcgacgccggctattcgatgaaggcgacagtggccctctccggtcatgacctgcttcgcatcggcaacgagctggccgtcaaccggctcgacgattggtggagccccgtggccggatcgatgatgatgagcccgaacgcgttcatcaacatcaacggcggcacgcgcgatcgcctcggcacgttcgtcgagtgggaacgccactgggatcggcagtggacatcgatcctcggtttgcgcaacgacgtcgtgtggatgaacaccggcaacgtgcagggctacaatgcgatgagctacggcgcggatgcggctgccttcaacgcgctcgaccgtgcccgcgccgacgttcatgtcgacggctccgccctcctccgctacgagccgaacgacatcagccaatacgaattcggcttcgcccgcaagacgcgctcgcccaatctctacgaacgctacgcctggtccaccaatgcgatggcgatgaagatgatcggctggttcggcgacggcaacggctatgtcgggaatctggacctcaagcctgagaaagctcacaccgtcagcttcactgcgggctggcacgatcctgcgcaacgggtctggggcgtgaagctcacgccctatgccagctatgtgcacgattacatcgatgtcgatcgctgctcgactgcgagctgcctcgcgagcaatcccgcgaacctgacggcgaacaccggctttgtatacctgcagttcgccaatcacgacgcgacgctctatggcatcaatgtcgaggggcggctgaccgtatgggacaatccaatctatggtcaggggcaggtgcgcggcctgatcggctatgttcgaggtcaacgaaccgatggcgttgacctctatcacatgatgccgatcaacgcaaaattcgcgctcgaccatctccttggcggctggaccaatagcatcgaactgcaactcgtcggctcgaaggatcaggtcagccaggttcacaatgagctcacgacaccggcgtatgcgctgctcaatttgcgtacgggttaccagtggcagcacgtccgactcgacctcggcatcgataatctgttcaaccagaattaccacctgccattgggtggcgccgacctggtcgactacaaggtcgactcgatgatggggtcctcggccgcctacggctacaacgtgaagggaccaggccgctcgttcaacgcgcggctcagcgtcaacttctga

SEQ ID NO: 1426 - DNA, 318 bp, BradyrhizobiumColbertium
ttgaatgtcatcctgtccggcatgctggtcgcaagcatctcccctctggccggcgcggcggctcaagagctctgcatcagcggcgacaacggagatgccgctcggaccgatgatgcggacaagcacggcaagaagacgaacgtacactgcccgctctgcgtgggacaccacgtatccggcgctctgccgccgcctcaacccacgttgaccgatcgcattccgctcacggcaagtgctgcctattggtttcggcagcggatcgtcgcctatgcgcgatctttcgaccatttgtcgcgtggaccacccgcactgacctga

SEQ ID NO: 1427 - DNA, 585 bp, BradyrhizobiumColbertium
atgatacgactcgcattcacgatcgtcgcgggcgtggtgctgggcctcgtggtccatctcgtcagcgtgctggcgctgccgcggatcgcgacgcaggatgcctattcgcggctgacgccgatgacgaaggtgaacgcggtcacccagcttcccctcgccgaccccagcacgtcaccgatgccgttcatggatcctgcctttgcgctggcgatctgccgctacgatctgtcgagcggaccgatcaagctcacggtgccggtgagtcaggcctatacctcgctgtcgttctacacccgcaacgagatcgcctattacgccatcaatgaccgctcggcgggccgcaaggtcatcgagctcgacctgatgacggaagcgcaacacagcgagctgcccgaggacgaagaagtcaccgcggccgaccgcctgatcatcgattccccgaccacgaccggcctgatcctgatgaaggcgctcgcccccgagcccggcctgatggcgcaggcgcaaagctcgcttcaggctgcaacctgcaccccgcagaccgagccgccggccaaggccgaggcgccgcgccgccggcggtga

SEQ ID NO: 1428 - DNA, 579 bp, BradyrhizobiumColbertium
gtgcggctgatcctgatcacattgacggcgcttcttctcgcgacggtggtcggcctgggtgcgacctggatgacgacgacgcgcggcaccgagatcggcgcgctgaccatcggcccctggaccgcccgcccgcgcaccggcaccgccgacgtcgatccctattcgcgcgccaccattgtgcgcaatggcgagttgccgatcggcaccggcgacggtgtcgccttcaccgccacgaccgacgacaagaggaaggcgctcgacggccgctgcgacgtgatcgtctccggcgtgacgccgccggcgcggttctggacgctgacgctgtatgaccgcaagggccatctcgtcgccaattcgctgcagcgctacggcttcaccagccaggagatcgtgcgccagtccgacggctcgttcgagatccgcattgcctcgcgatcgcgcgccggcaattggctgccgaccggcggcatcgagcgctacgccttgatgctccggctctacgacacgccggtcggggttgcgacgcgcacccagcgcgatgcgccgatgcccagcatcacgacggtgggctgctcatga

SEQ ID NO: 1429 - DNA, 2154 bp, BradyrhizobiumColbertium
atggaccggttctatgtcggacgatggaagcgctgggtgttcatcgagccgctctccgaagctgcgacgctcgggctcggcggcctcgtcgtgatgctcgccctcgccatccccgcgttccgcgaaaccgcggacgaggactggctgaagaagtccgacctcgccgtgagcttcctcgaccgctacggcaatccgatcggcagccgcggcatcaagcacaacgactcgatcccgctggaagattttcccgacgtgctgatcaaggcgacgctggccaccgaggaccgccggttctacgagcatttcggcatcgacatcgccggcaccgcccgcgcgctcgtcaccaacgcccaggccggcggcgtccgccagggcggctcctccatcacccagcagctcgccaagaacctgttcctgagcaacgagcgcaccatcgagcgcaaggtcaacgaagcattcctcgcgatctggctggaatggcgcctgaccaagaacgagatcctcaagctgtatctcgaccgcgcctatatgggcggcggcaccttcggagtcgacggcgcggcgcacttctacttcaacaagtccgcgcgcgacgtgacgctggcggaagccgcgatgctcgccggcctgttcaaggcgccgaccaaatacgccccccacatcaacctgcccgccgcccgcgcccgcgccaacgtcgttctcgacaatctcgtcgatgccggcttcatgaccgagggccaggtgttcggcgcccgccgcaatccggcgttcgccgtcgaccgccgcgacgaggcctcgccgaactattatctcgactacgccttcgacgagatgcgcaagctggtcgacaccttcccgaagtcctacaccgagcgcgtcttcgtggtgcgcaccgcgatggattccaacgtgcagaaagcggccgaggacgcagtcgagaaccagctgcgccagttcggccgcgactatcacgcgacgcaggccgcgacggtcgttgccgatctcgacggcggcatccgcgccatggtcggcggccgcgactacggcgccagccagttcaatcgcgccaccgacgcctatcgccagcccggctcctcgttcaagccttacgtctacaccaccgcgctgctgaacggctacacgccgaactcggtcgttgtcgacggtcccgtctgcatcggcaattggtgcccgcagaattatggccattcctattccggctcggtgacgctgacgcaggcgatcacgcgctcgatcaacgtcgtgccggtgaagctgtcgatcgagattggccggcgggaacagccgaaggcgccgaacccggccaaggtcggccgcgccaagatcgtcgaggtcgcccgccggttcggtctcaaggcgccgctgcccgacacgccgtcgctgccgatcggctcggacgaagtcaccgtgctcgagcatgcggtcgcctacgccaccttcccgaaccgcggcaaggcggtgacgccgcatgcggtgctggaggtgcgcaccggcgcaggcgatctcgtctggcgctgggaccgcgacggcccgaagccgcggcaggcgattcccgcctccgtcgccgccgacatggcgggcatgatgagccacgtcgtcagcgagggcacggcgcgccgtgctgcgctggacggcattccgaccgcgggcaagaccggcaccaccaatgcgtatcgcgacgcctggttcgtcggctacaccggcaatttcacctgcgcggtgtggtatggcaacgacgactattcgccgaccaaccgcatgaccggcggctcgctgccggcgcagacctggcacgacatcatgcttgcggcgcatcagggcgtcgaggtcagggagatccccggcgtcggcatgggccagaagctgccgccgcatcatgtgagcaacgcgcacgccaatgcggcgccgaaggtgctggagaccaagccgggtcctccgccggtgctgaccaagcgtggcgccgacattctggtgcgcgtcgagaggctgctcgacaatgcggccaggactgcgaacaaatcgacggatgccgacagcaatccggccaagccgtcctcgtcgacgagcgcgctcgccttcccgcagaactatgcggaagagaacgccaacacttccgccccgcgcaagaactga

SEQ ID NO: 1430 - DNA, 198 bp, BradyrhizobiumColbertium
atgcggtggtatgatctggcgcccctagaacccttgaggcttgcttcgaaagcgttcaagcacccggccggggcggcatcgagacgtcttgagggaatgttgcggcaaacccaaggcgcccggccagcatccgagggacttgctgtttcttctagccgagcggggcccataaaccaatggtcacgctcgcgattttga

SEQ ID NO: 1431 - DNA, 516 bp, BradyrhizobiumColbertium
atgaccgcagctcccaaacgaccttccggacaggaaggattcttctggaaaaccaagacgttggaagagatgtcggggcccgaatgggaaagcctgtgcgacggctgcgggcgctgctgcctgaacaagctggaagacgaggacaccggtcagatttatttcacccatgtcggctgcaagctgctcgatggagccagctgcgcctgcaaggactacccgaatcgttccgacaaggttccggattgcgttcgcctgaccccggccaatgtccgcaccctgaactggctgccgccgagctgcggctacaagctcgtcgccgaagggcgcgacctctattggtggcatccgctggtctcaggcgatcccaacacggtgcatgaggccggcgtctccgtgcgcggccgggtcgaaggcagcgaggagcagatcccggacgaggagctggaggatcatatcgtgcaatggccggcgaccttgccgaagcgggctcgcctgaagcgacgtccgaaggactga

SEQ ID NO: 1432 - DNA, 1578 bp, BradyrhizobiumColbertium
atgaacaagttcgaacggcagagcgctgccgacgtccagacgttgcctgacgatatcgccgaagagctgtcccggcttcccagcgaggtcatcagcgtcgatgacgccccgtccatcgcgccgccggtaccgctgtcgcaggacgaggtccgcaccatcgtcatcagcctgatgctgacgatgttcctggccgcactcgaccagaccatcgtggcgactgcgctgccgaccatcgggcgccagttccaggacgtctcgaacctgtcttgggtgatcaccgcctatctgctcgcctcgaccgcggtcgcgccggtgttcggtacgctcagcgacatctacggccgcaaggccatgataatcacctcgctcagcctgttcgtcgcgggctcggtgctgtgcgcggtcgcgccgaacatgcccatgctgattctggcgcgcggcctccagggcctcggcggcggcggcatcatgccggtggtgcagaccgtgatttccgacgtggtgagcccaagggagcgcgggcaataccaggcctatttctctagcgtctggatggtcggcggcattctcggcccggtcatcggcggcgtcttcgccgagcatctgcactggtcgatgatcttctggatcaatctgccgctttcggccgctgcgatcgcgctcttgctgccgaagatgaagaagatcccggtgttccaccgcaagcgcaaggtcgactggctcggcggcgtgttgctgatggcctccgcggtcgtcttcatgttggtgctgacctggggcggcacgcgttttccgtggctgtcgccgaccgtgctcgcgatggtgggcggcgcggtcgcgctcgccgtcaccttcgtctggcacgcccggcgcgcggacgagcccttcctgccgctgccgctgctgggtggaagcgtcgtgccgttcgggctgatggcggggggctgtgcgctcggcgccatcacgggcctcacggtccagctcccgctctattacgaatcggtctaccgcctcagcgccagcgaggcgggcctagcgctgatcccgcttgcggctgtctcgacctgcggtgcggcgatcgccggacgtacgatggcgcgggccaagcactacaagcgtgtcgccatcatcgggacgtcctgggccgcgctgtgcggccttggtctcacgctcacgacgctgccgctgtggggcctgttgacgctgatggccgcgtttgcgctcggcctcggcacaacctttccggtctgcgtggtctcggtgcagaattctgtcgcacgtccgcaggttggcacaatcaccggcgcgttgaacttcttccgctcgctgatgtcgtcgttcacggttgcggcgttcgcggccatcctgctgatcgcgctcggtgcagacattccgctcggcgagcatcacgccgcaggtagcgtcgctattcccgccgaggacatgcggcacgcgttccgctacgtgttcggcgcggccactgcgctgatgaccgctgctgctctctgcctgatcgcgatggaggagcggccgctggccggtccttcggcgaagcaatccgccgagatggtggagtag

SEQ ID NO: 1433 - DNA, 1956 bp, BradyrhizobiumColbertium
atgattaaccctccgacgaacagcgccgatgagctcgccgccgagagcgcgcggctgcgcagcgagcttgcgattgcgcgggatcgacagagcgccagcgccgagatcctccgcaccatcgcggcctctccttccgatgcgcggccggtcttcgcggcgatcgcctccagctccaagcgcctgctcggcggcttctcggcgaccgtgctccagttcatcggcgacgagctgcacctcgtggcattcacgccgaccagcccggaggcggacaaggggctcgaagcgtcgttcccgcgcaagatctccgacttcccgacctttgccctcgtgcgcgacggaaagacgatccagtttcccgacagcgaggcggccgaggttcccgagctgaaccgggagctggcacggcttcgcggcttccgcagcgtcctgttcatgccgctgatgaaccggggcacgccggtcggcatgatcagcgtcacgcgcgccgaacccggtgcgttcgcgcctgatgtcgtccagctgctccagacctttgccgaccaagcggtgatcgcgatcgagaatgcgcggctgttcaatgagacacgcgaggccctggagcggcagaccgcgacagctgacatcttgaaggtgatggccgcctcgccgtccgatatgcagccggtcttcgacgccatcgctgccaatgccaaccggctgatcgatggcttctccaccgcggtgttgcgctatatcgacggcgccgtgcatcttgcggcattcacctcgaccgatcccgccggcgatcgcgtgctccaggcctcgttcccagtacagttcgcacgattcccgccccaccagctcgtggcccatggtcacgcggcgcaattgcccgacaccgaactcgagcccgccgcgcgcgacatcgcgcgcgcccgcggctatcgcagcatgctgttcacgccgctaatgagcgagggcgaagcgatcggcatcatcatcgcaacgcggcgcgcaacgggcagcttcgccgatcatcatgtgcggctactccagacctttgccgatcaagccgtgatcgcgatcaagaacgtcagcctgttcaacgaggtcgcgacccgcaccagcgagctggccaaatcgctggacgatctgcgcgcggcgcaagaccggctgatccagaccgagaagctggcttcgctcggccagctcaccgccggcatcgcccatgagatcaagaacccgctcaacttcgtcaataacttcgcatcgctctccgcagagctgacggacgagctgaacgagttgctcgcgccggtcacgctcgcagacgacgtccgcagcgaagtcgatgagctgacgggactcctgaaggacaatctgcaaaaggtcgtgcagcacggacggcgcgccgattccatcgtcaagaacatgctgctgcattcacgcgagggcggcggcgagcacgggctgagcgacatcaacgcactggtcgaggagagcctcaacctcgcctatcacggtgcccgcgccgagaagccggggttcgatgtgaggctgaagcgcgagctcgatccggcggccgggcaagccgaagtgtttccgcaggagatcacccggatgctgctgaacctgatctcgaacggattccacgcggtcaccagacgcaaggccgacggcgtggccggttacgagccggaggtgaccgccgcaacgcgcgaccgcggcgacagcatcgagatccgcattcgcgacaacggcaccgggattgcggacgaggtcaaagagaagatgttcgatccgttctttaccaccaagccggccggcgaaggcaccggcctcgggttgtcgatgagccacgacatcgtggtgaaacagcatggcggaacgatcgacgtcgcgaccgtgccgggcgaattcaccgagttcacgattctgctgccgcggaagagcagctttgcgggcggacggggctag

SEQ ID NO: 1434 - DNA, 1635 bp, BradyrhizobiumColbertium
atgaagctcggcaccgccattgcggaaatcatgaggcgcgagggaatcgagatcctctgcggctatcccgtcaaccatctgatcgagcatgcggccaaagccgagatccgccccgtgatggtgcggcaggagcgcgtcgggatccacatggcggatgcgatctcgcgggtgacgtcggggcgcagcatcggcgcgttctgcatgcagcatgggccgggcgcggagaacgcgatgggcggcgtcgcgcagtgtttcggcgaatccgtgcccgtcctggtgctgccgatgggctatcagcgccggcttgcgcatatcgagccgaacttcaattccagcgaggcgatgaagccgttttcgaaatcgtcggagccgatcattctcgccactgaagtcgccaacatcttccgccgcgccttcaccaggctgaagaacggccgcggcgggcccgtcatcgtggaaattcccgcggacatgtggaatgaggaggtgccggagccgctcgactatacgccggtgctgcgcacccgctatggcgccgaccctgttcacgtcaaggaagcagccagcctgctcgtgaatgcaaagcggccggtgatctatgccggccagggcgtgcattacgcgcaggcgtggccacagctgaaacggcttgcggagcggctggcgatcccagtcaccaccagcttgggcgggaaatcctcctttccagaaacgcatccgctctcgctcggctccggcgggctcgccgtgccgcgcgcggtgccgaaatttctgactgaagccgatgtcatcttcggcatcggctgctccttcaccgaaaccaacttcggcattgcgatgccgaagggcaagaccatcatccattccacgctcgatcccaatcatctcaacaaggacgtggaagccaagatcggcctggtcggcgacgccggcctcgtgctggacgcgctgctggaggagatcggcaggaccgtcacatccgatcgtgacgcctccgcggtcgccgccgagatcgcggcctcgcacaaggagtggctggcgaaatggatgccgaagcttaccagcaacgacgcgcccctcagcccttatcgcgtgctctgggacttgcagcacaccgtcgacatccgcaacacgatcatcacgcacgatgccggcagcccccgtgaccagctctcgccgttctggaaatccgtcgagcccctcacctatctcggctggggcaagacgacccagctcggctatggccttgggctcgcgatgggcgccaagctggcaaagcccgacaaactctgcatcaatatctggggcgacgcagccatcggcttcacgggcatggatttcgagaccgcggtgcgggagcgcatcccgatcatgtcgatcctgctcaacaatttctcgatggcgatcgagttgaaggtgatgccgatctcgaccgagaaatatcgctcgaccgacatttccggcgattatgccgcgatggcgcgcgccttcggcggctatggcgagcgggtgacgagcccggaggacatcatacccgcgatcaagcgcggcattcagaagacgcaggaaggcgttccggtgctgctggagttcattaccagcaaggagaccgaggtgtcgcggccgggcacatga

SEQ ID NO: 1435 - DNA, 255 bp, BradyrhizobiumColbertium
ttggtccggctgattaaaggtgagaggatcaggaattcgttgaggcgtaaagcgggagcggccaacagcccggtaggtcagctatgcaacgagctgcagcgaagcatccaaagcccctcggcggaaagattctggatcgcttcgcagcaagggctccttgctatgacgaatgttgggagtaacgctgagagctatctcggccatcagcgttgctctacgcgttttcctccaacgcgcggcgcagccttcggatga

SEQ ID NO: 1436 - DNA, 1596 bp, BradyrhizobiumColbertium
atgagcatcaccgttcgattctgcggtgccgcccgcaccgtaaccggctcgagctacctgttccagacggcggccggccgtttcctggtcgattgcggcctgttccagggccagaagacgctgaaggagctcaactacggcccctttccgtcccgccccgccgatatcgatgccgttctgctcacgcacgcccacatcgatcatagcggtctcttgccaaaactcgtgcgcgcgggattcgaggggccgatcctggcgacgcgtggcacgatcgacctttgctcctacatgctccccgacgccggcagcatccaggaatcggaagtcacgcagctcaaccggcgcaacgcctcgcgcgggcgcaagcaggtagcgcccatctacacacaggccgatgcgatcgcatcgctccagtcgtttcgtccggtcgattacgaacgctggaccgacgtgatcccgggcgtccgcgcgcgctactggaacgccggccatctgctcggctccgcctcgatcgagctcgagatcgccgagcgagcctcgacgcgtccgctgcgcgtgctgctctccggcgacgtcggacccgaggccaagctgctccagcccgatcccgaagcgccgaccgacttcgattacgtcatctcggaagcgacctatggcgaccgggtacgtgaggccacgacacctgcgctccgccgcaagcacctcgccgccgaggtgcgcgatgctgcggcggcgggcggcgcgctgctgctgcccgccttcgcggtcgagcgcacccaggagctgatcgtcgacctcgtcgacctgatggagcacggcgagataccgacggcaccgatcttcctcgattctccgctcgcgatccgcgcgaccgaggtattccggcgacatgccgagagcctcgacccgtccgtcgacgtcacccgcctgctcaactcgccgcatctcaaattcaccgagacggcggacgagagcaaggccatcatgcgcctgtccgggttccacatcatcatcgccgcgagcggcatgtgcgatgccggccgcatacgccaccacctgaagcgctggctgtggaacgagcgtgcgaccgtgctgctcgccggcttccaggccaacggcacgctcggccgcttcctccagaacggctccaaggccgtgcggatccagggcgaggagatcaaggtcgccgcccgcatccgcatgatcgacgaatattcgggccatgccgacggtgccggcatggccagctggatcgcggcgcgccggcccatctcccgcgggctgtttttggtgcacggcgaggaagaggcgattgccgggctggccgagcgcgtggccggacgcatcataccggcagccaaggtctaccagccgatgctggacgacatttatgagctctccgcaccggaaccgcgcgtgctcgacccagatcatcgccggcggctctcgccggaggccgtgacccgtctcgactggcacaacgagatgtccgagctcatgctcgatatcaacgatcgtattgccgccgccgccgacgaccgcgtccgcggggtcatcatccgaaggctgcgccgcgcgttggaggaaaacgcgtag

SEQ ID NO: 1437 - DNA, 921 bp, BradyrhizobiumColbertium
gtgagcacgatcgcgctccagacattgtcgtgcggcgccgatgcggcgaagcggctcgcagcgcggcttgggctcgcctgcggcgagatcgcggtgcatcgttttcccgacggagaactgcgcgtcgccgtcgcgccggcgaccgacacgacgattctctacgccccgctcgatcaacccaacgacaagctgatcaccctgctgttcgcggccgaagccctgcgacgtaacggcacgaggcggctggtcctggtcgcgccctatctctgctacatgcggcaggacgcagcatttcatgccggcgaggccatcagccagcgcgccatgggccgtttgcttgcaacgacaatggatcgcgtcgtcaccgtggatgcgcacctgcatcgcactcccgacatcaggtctgtttttcccggcatcgaagcggagaatctgtcagccatgccggccgtcgcgaatgcactggcaaaggacagcgtcggtccgtcgaccgtcgtaatcggccccgacgtggagtccgagccatgggtgagcgatgtcgcgaggcgattgcgattgcagcacacagtggcgcgaaagacccggcacggtgaccgttccgtggcgctcagctttgccgatcccgctctgctcttgggacgaccgacgctcttggtcgacgacatcgtctcctccggcacgaccctgatcgccgcggcaaaggcgctgacagcaatgggcgccatctccgtcgatgcagtcgtgacgcatgccctgtttccagccgcgatggtggctgcgttcgctgaggccggcatacggtctgttcgctcgaccgacagcgtaccgcatccgaccaatgcgattgcgctcgacgaaattctcgccgccgctttgcggtccgaactgacgacgacacatcttccgggaaggacgacatga

SEQ ID NO: 1438 - DNA, 870 bp, BradyrhizobiumColbertium
gtgaacatcggcgtcgaggagatgaaggcgatcgtttcggactgcaacggctgcctgatctggggcgggcacgtgaacctgtcgccggccgacgacgtcctgatctctgtcgaacgcccgctgagtctcgacacccgcgagcagatggtcgcctccatcatgtccaagaagatcgcggcaggctcgacccatctgttgatcgacattccggtcgggccgaccgccaaggtcaccggcggcgtcgaggccatgcgtctgcgcaagctgttcgaattcgtcggcgaccgcttcggccgcgccgtcgaggtgatcacgaccgacggcagccagcccatcggcaacggcatcggcccggtgctcgaggccaacgacgtcgtggctgttctcggcaacgagaaggacgcgccgcgcgacctgcgcgagaagtcgctgcggctcgccgcccatctgttggagtacgatccgaagctgcgcggcggggccggctatgcgcgcgcgcgggagctgctcgacagcggcgcggcgctgaagcagatgcagaagatcatcgaggcccagggtccctccacctgcagcaccgagctgggaccgctcagcttcgacgtcaaggcaacgcatgatggcgtcgtatccgcaatcgactgcctgcgcatgaatcgccttgcccgcaccgccggcgcgccgctcgacaagggcgcgggcatccgcttgttcaagaagatcggcgaccgcgtcgagcagggcgagccgctctatcgcgtctacaccttcgatagccccgagcatgatctggccgcagcggccaccgcagaggagaccggctacctgatcaacggtcatgagacgcccccgggcaagacgacgccgtga

SEQ ID NO: 1439 - DNA, 708 bp, BradyrhizobiumColbertium
atggagatccaactccctgctgccggcccgcccatgcatccagaccttccgcactcccgactgaaaatccgccgtgtccgcctcgataccggccgcgagaacgtcgtcgtcgtctccaggcattcgaaggcgctgcgcgcggagatcttccgcggcttcagccgtgtcgagcttcgtcagggcggcaaggttctgctggcaacgttgctgatcacggacgacgagatgctggccggtccggacgagatcggtctctccgagcctgcgttccggcgctttgcggagcccatcggcacacttgtcacggtcaggcccgcctcgcctccggagagcctggaagccgtgcgcgcaaagatccggggacgaaccttgagccaggccgagatcggcgcgatcatcagcgacctcgcgcattatcgctactccgacatggagatcgccgcgttcctgatcggttcggcgagcttcatcaccagcgacgagcttctcgccctcaccggggcaatggcgcaggcagggacgcaactggtctggccgacccctgtcgtcgtcgacaagcattgcatcgggggcattcccggcaatcgcacctcgatggtcgtggtgccgatcgtcgccgcccatggcctgccgatcccgaagacctcctcgcgcgccatcacccgcctgccggcaccgccgacacgatggaggtgctggcccgggtga

SEQ ID NO: 1440 - DNA, 165 bp, BradyrhizobiumColbertium
atgcgtctgatcaggtgtttccttgccgatgagaatggcgcaaccgcaatcgaatatggcttgatcgccgccggcattacgctcgctatcgtcaccgtcgtgaacagcacgggcggcgccctcctgaacaacaagttcaactcgatcagcgcagcgacgaagtag

SEQ ID NO: 1441 - DNA, 237 bp, BradyrhizobiumColbertium
atgccgtggtcgaccgcgttcgacgatcccgttcgcgtgagcaacaaaatcaagctgctcacgcttcaagatgcggctgactacatcatgcagctgcccgacgacgttcagcacgaggcgcactggcagaccgcgatcgaaaccttgatcaatgcggccgagacgggcggcggctgggtgatgttcgcccgcatcgcgacattgcgggcgctgaatgcaacgggccggcgcggatga

SEQ ID NO: 1442 - DNA, 984 bp, BradyrhizobiumColbertium
atggccccccgcgccaattggaagggttttctgcgtctgtcgctcgtgacctgcccggtcgcgctctatccggccacttcggatacggagaaggtctcgttcaaccagatcaatcgcaagaccggccaccgcatcaagtatctcaaggtcgacgccgagaccggcgacgaggtgacctccgaggacatcgtcaagggctacaaggtggacaccgacacctacatcgagatcacaaaggacgaactcgacgacattgcgctcgactccacccacacgatcgagatcgacgagttcgttccgaaggccgacatcgacagccgctatctgatccgtccctattatctcgtgcccgacggcaaggtcggccacgacgcctatgcggtgatccgcgagaccatccgcagcatggacaaggtcgcgatcggccgcgtggtgctgaccaaccgcgagcacatcatcgcgctggagccgctcgacagcgggctgatgggcacgctgctgcgctatccttacgaggtccgcagcgagaaggagtatttcgacgacatccaggacgtgaagctgaccaaggacatgctcgatctcgccaggcatatcgtcgagaagaaatccggcaccttcgagcctgagctgttcgaggatcattacgagactgccctgatcgatctcatcaacaagaagcgcagcggcatgccgatcagcgcgaaggctgcgccgaagaccggcggcaacgtcatcaacctgatggacgcgctgaagaagagcatcgcgaacgagaaggacgctgcgccaaccgcgaaagccgccaaggaaactggcaaggaaactgccaagaccaagaaaccgaagaagcgcgtcgagggtcagcgcgagatgctgctgccgatcgccggcaagggcggcaaggatgctgcggcgaaaacgccggcgaggaaggccgacaagccggtacgggcaccggcgcgcgcgaagaaagccggctga

SEQ ID NO: 1443 - DNA, 153 bp, BradyrhizobiumColbertium
gtgcgaatcatagcaaccgccggcgcggaatcttgcaacggcgttaatcgccgcctgcgccgagttgcccggcggctccatggttcggaacatcgcccgcgatcacgcgttgccccgccaataagacgccgcgaggaagtcgcggccacctga

SEQ ID NO: 1444 - DNA, 156 bp, BradyrhizobiumColbertium
atggcaaccacacgagagcagaagcgcatcgtggaaactccgaccgaggcgcgccagggcgagcccgggccgtccgtggcagcgttgctcgccatctcgaccggccttgcaatcctgattctcgccgtcgtctggttcgtcttcttccggacctga

SEQ ID NO: 1445 - DNA, 675 bp, BradyrhizobiumColbertium
gtgcgcctgctcgttgttgaggacgaccccgatctcaatcgccagctcaccaaggcgctgaccgacgccggctatgtcgtcgatcgagccttcgacggggaggaggggcattatctcggcgacaacgagccctatgatgccgttgtgctcgacatcggcctgccgaagaaggatggcatctcggtgctggaggcctggcgccgcaatggccgtaccatgccggtcctgatcctcaccgcgcgcgaccgctggagcgacaaggtgcagggcttcgatgccggggccgatgactatgtcgcaaagccgttccacctagaggaggtgctcgcgcgcatccgcgccctgctgcgccgctcgaccggacacgcccagagcgagctcagctgcggtcctgtcacgctcgacaccaggaccggccgcgtcagcgtttcaggcaatcccatcaagatgacctcgcacgaatatcggcttctggcctacctgatgcaccattccgggcgggtggtctcgcgcaccgagctggtcgagcatctctacgaccaggattttgaccgcgactccaacaccatcgaggtcttcgtcggccgcatccgcaagaagctcgacgtcgacatcatccagaccgtccgcggcctcggctatctcctgacgccgccgcctgcgcccggcgcgtaa

SEQ ID NO: 1446 - DNA, 1377 bp, BradyrhizobiumColbertium
atggccgctagctcgcttgcgaaccgactgttcttgtcggcgacagcctggctcgtggtgatcctcgccatcacgggcgtcgtgctgtcgtcggtctacaaggatgccacggagcgcgccttcgaccgccggctcaatctctatcttcggacgctgatcgccgaggtcgcgaccccggacgagccgccggaccgccagttccagtccctcggcgagcccttgttcgagctgccgctgtccggctggtattggcagatcacgcgcatcgacaccgagaagccggaggtgcgctcctcgcgttcgctctgggacaagaagctgccgaagctggaggaccagggagccgagctcaccgccgccggcatccggctcgcttacgtcgatgggccggaagggcagaacctgcgcatggtggagcggccggtcgatctcggcgccgacggcaagtttctcgtcagcgtcgccggcgacgacaccgagatcttcgacgagacgcggagcttcgattattatctcggcggcacgttcaccgcgctcggcatcgtattgctgctgacgaccgtgttccaggtccgcttcggccttgcaccgctcaagcgcatctcggaagcgatcgccgacatccgctccgggcgggcggaacggctcgagggtgaattcccggtcgagatcgcgccgttggcgcgcgagaccaacgcgctgatcgacgccaatcgcgagattgtcgagcgcgcgcgcacccatgtcggcaatctcgcgcacgcgatcaagacgccgctctccgtcatcgtcaacgaggctggcgctcacgccgccgatccgttcgcggccaaggtgctggagcaggcggacgtgatgcgggaccaggtcacccaccatctggagcgcgcgcgcattgcggcgcgggtctcggtggtcgcgacggtgacggaggtcgcgccagccatcgaggcgctgcggcggaccatggagaagatccatcgcgaccgcggcatcacggtggaggccaaggccgatccatccgcgaagttccggggcgagcggcaggatctcgaggagatggtcggcaatctcgtcgacaatgcctgcaaatgggcggcatcgcgcgtcttcatcgaagtcgtggtccagaccccgcaccaggccggcgccagcccgcatttgcggatcatcgtcgacgacgacggccgcggcctgtcggaagccgagcgcgcgcaggtctcccggcgcggccagcggctcgacgagtccaagccgggatcgggactggggctgtccatcgtggtcgaactcgccgcgctctatggcggcagcctttcgctcggcgctgctccgaccggcggcctgcgggccgaattggtcctgccgggactgtag

SEQ ID NO: 1447 - DNA, 1401 bp, BradyrhizobiumColbertium
atgagccagacatcgatcgagcggctgagggaatatctcgcgcagctcccgccgcagtcgcaggcgctgctgatgcgggagttcgagcgtgcgctggaacgcggccaggatacggcggttgcgaccctcgtccttgagcaattgcgcaagatcgtccgcaagagcgaagccgatgaagcgcccgcgccgcgcacggacgatctgtcgcggctgctgttccaggtcctggaaccgttcctggtcgaggcaggcaccccgatccgggccggccagatccgccgctcctcgctgcagccgatctggcaatggctcggccgtgacggagcgccggccaaggtgaacgaattcgaggcggcgctggcgcgcatgcctgccgatgctgcaggccaggtcgaggccttggcgcagaagctccaggcggtagccgcggacgcgattttcgagctgaccggacctggcggcggcgacaagacgcgcgcgctggcccgggtcggcccgcccaatgtcatcgaggatctctattcgatcggtgcggtgcttcaggtccgggaggccatcgccagcctgaacgagaggctcccgcgcttcctgcgcgcattcggcgattcccagatcgcctcggtgacgtcggcgctcaacattccggtgctgcaaacgccgcagatgctgcccttcgcgctctcgatggtcgtgcagcggatgaccgcgccctggcagatcatccgcctcgcgatcaagattgccgcgtccgacgacgagatccgcgtcgcggcgacgccttatggcgttgcggtcacgatcgcgctgcatgatctgtcctgcgttgccgcgatccttcgcatggacatcaagcgcggccatttcgacaacgtcgccggcaatctcaagacgctgcacgatggcgtgcgcggcctgcgcaccgagctcgatctgcgcaacgattctgcctggggcaagcagttgacctcgatccgggccgacatctccaatgccctgcaatccgagatcgacagcgttcccggccgcgtccgccgcatccttcgccagcgcccggagaaggacattccgccgggcgcgcggatcgacagtaccgaggtcgaggaagcggtcgcgctgatcgacttcgtcgcgacgtgccgcaattatgcaagcgagcttgccatcaacgaggtgacgctgcgcacctattccgatctccagcaatatgtggaacggtcgaccgagcagctggtgcagtctctgcgcgccgccgatcacaaggtccgcacctatcggcagcagcaggtgcaggccgctatccgcttctgccaggttctgttcggcgacgattatgcctccctgatgagtcgcgcggcagagaatgcgctcacgggcgagcgcaaatcgtcacgcgcaagctga

SEQ ID NO: 1448 - DNA, 270 bp, BradyrhizobiumColbertium
atgaaacccgtcatcagctctatcgaaatcgagaaccgagtcatcgtagccaagtaccgcaggctgatggttggcgccaaagtggtgctggtcgagaaggcaagcgatcggcaactgcctgagacgatcacgcgggttgcatctcgggttccggtcggcgcggtgcgcatcagattgccggatgcgatcaagccgggaacatacttcctgagggccttcaacgggcacggcgaggacgcggcgcaaagcgcggatttcgagatcggctaa

SEQ ID NO: 1449 - DNA, 1113 bp, BradyrhizobiumColbertium
atgacgctatggttcgtgttcgcgctgatgacggtcgcggcgattttcgccgtgctctggccgcttggccgcggtagccgcgcgccggaccagggcagcgaggtcgcggtctacaaagaccagttggccgagatcgagcgtgatctcgccgcggggttgatcccagccccggaagccgaggccgcgcgcgtcgagatcagccgcaggctgcttgcggcggcggccagcgagcctgcaatggcgccgaagtcgaacctcaaatggcgccgtgcggcggctgtgctggcgctcggcggcctgccgctcgtcgccatcggcgtctacatgccgctcggttcacccaggcttcaggattttccattggcgcagcgggagcgtgggacggggtccggcatggcccagtcgctcgagaccctcgtcgcccaggtcgagcaacatctggagaaaaatccgaccgacgggcgcggctggaatgtgctcgcgccggtcctggagcggctcggtcgcttcgatgacgcggtgcgcgcctatcgcaactcgctcacctataatggcgaaagcgcggagcgccggtccgatctcggcgaagcgatctcggctgcagcgggcggcgtggtgacggccgaggccaagactgaattcgagcgtgcgcacgccctgaatgcggatgaccccaaggcgaactacttcctcggtctcgccgccgagcaggatggccgcaaggacgaagcagccaggatttggcgcgccttgcttgcaaaggcgcccgcggatgcgccgtggcgcgctttggtgcagtcctcgctggcgcgggtcggtggaggcgatacgatgcctgcgctgtccgacgagacgattgccgcttccaaggatttggccgaaggcgatcgcaacgcgatggtgcgcggcatggtcgatcgtctggccacgcggctgaagcagaacggcgatgacgtcgacggctggctgcgcctggtgcgcgcctatctcgtgatgggcgagcgggacaaggcgaagggggcctccgccgacgcccggcaggcggtcgccagcgacgccgaacggctgcgccagctcgacgaaggacttaagactctcgggctcggcggatga

SEQ ID NO: 1450 - DNA, 525 bp, BradyrhizobiumColbertium
atgacgcgcaagcagcgacgtatgaccatcatcggcggctcgctcgccgtgctcgcgctcgcagccgcgctggtgctcaacgcacttcgcgactccatcgtgttcttctcgacgccaaccatggtcgccgagaagcacgtcgagccgggcaagcggtttcgcctcggcgggctggtacagccgggctcgctgcagcgcggcgacaatctcgcggtgaccttcgaggtcgccgacggcaatgccaagctgccggttgcctacaagggcatcctgcccgacctgttccgcgaagggcagggggtcgttgccgaaggcgcactcgacggcaacggcgtgttcaaggccgataccgtccttgccaagcacgacgagacctacatgcccaaggaggttgccgacgccctgaagaagcaggggcactggaaggacgattacgatgccaaggcctcggacaccaaggcctcgggcgagagcaaacctgcggccacgaccgcacaaggcaatccgcagggagcgatgcggtga

SEQ ID NO: 1451 - DNA, 1983 bp, BradyrhizobiumColbertium
gtgatcgcagaatccggacattacgcgctggtgctggcgctggcgctcgcactcatccagtccatcgtgccgctggtcggcgcgcggctgcaagatgccgccttgatgaacgtggcgcgctcgacggcgctggcgcagctgctgttcgtgggcgcctctttcaccgcgctcgtgatgctgcacgtgaactcggatttctccgtcgccaacgtctacgagaactcccactcgatgaagccgctgctctacaagatcacgggagtctggggaaaccatgaaggctcgatgctgctgtgggtggcgatccttgcgttattcggcggactggttgcagccttcggcaacaatctgccgttgtcgctgcgtgcgcacgtgctcgcggtgcaggcctgggtcgccagcgccttctacctcttcatcctcgtgacatcgaacccattcctgcgcatcgccactccgccgatcgagggacgcgatctcaatccggtgctccaggacatcgggctcgccgtgcatccgccgatgctctatctcggctatgtcggtttctcgatctcgttctccttcgcaatcgcggcgctgttggaagggcggatcgatgcggcctgggcccgctgggtgcggccgtggacgctggtggcctggatattcctcacgctcggcatcgccatgggctcgtactgggcctattacgagctcggctggggcggctggtggttctgggacccggtcgagaacgcctcgctgatgccgtggctcgccggcaccgcgctgctgcattcggccctggtgatggagaagcgcaatgcgctgaaggtctggaccatcctcctgtcgattctgaccttctcgctgtcgctgctcggcactttcctggtgcgctccggtgtcatcacctcggtgcatgccttcgccaccgatcccacccgcggcgtgttcattctgctgatcctctgcctgttcatcggcggaagcctgttgttgttcgcagggcgcgccacctcgctgaagcagggcggcctgttcgcgccgatctcgcgcgagggtgcgctggttctcaacaatctgctgcttacggtcgcatgcgcggtcgtgctgttcggcaccctctatccgcttgcgatggagatgctcgccgacttcaagatgtcggtcggcgcccccttctacaatctcaccttctctccgctgtttgccctgttgctgcttgcggtgccgttcggaccgatgctggcgtggaagcgcggcgatctgcttggcgtggcgcagcgcctgctcgcggcgggcgtggccgggctcgtggtggttgccatcgtctggggctgggcgcgcggcggcagcgcgctggcgccgctcgcgatcgggctgggcgtcttcgtcatcgccggcgccgtgaccgacatcgtcgagcggaccggcctggtccgcttgccgttcgcaagtgtgctgcaccgtgcgcgcggcctgccccggtcggcctggggcaccgcctttgctcatgcgggcctcggcgtcgctctgatcgggatcgtctgcgagaccacctggaacagcgaatacatcgcgaccatgaagcagaacgacgtcgcccatgtcgccggctacgatctgaagctggacgggctgtttcaacgccagggcccgaactatcgcgagatgatcgcggagttcaaggtcagccgcgatggcgagccactcacggtgatggcgccctcgaagcgcagcttcacgacgcgcggctcctcgacgaccgaggccgcgctgctgaccagcggcgcgagccagctctacgtctcgctcggcgacgccaccgccgaaggcgccattgccgtgcgcatctatcacaagccgctggtgctcctgatctggtgggggccggtgctgatggcgttcggcggtgtgctgtcgctctccgaccgccgcctgcgggtcggtgcgccgaagcccgcgcgggccaggcagcgcctccagccggcggagtga

SEQ ID NO: 1452 - DNA, 483 bp, BradyrhizobiumColbertium
atgcgcaggatgatggccgccttcgtcgcgttgctgctgctggccctacctgcggcccacgccgtccagcccgacgagatcatggcggaccccgccaaggaatcgcgcgcgcgagagctgtcgcgcgagctgcgctgcatggtctgccagaaccagtccatcgacgattccgatgcgccgctggcgcgtgacctgcggcttctggtgcgcgagcgcattgcggccggcgacagcaactcgcaagtgctcgacttcctggtcgcgcgctacggcgagttcgtgctgctgaagccgcgcttcgagcggcagaccatcctgctgtggctccttggacctctgctgctgattgggggtggtctggcactctggctgcaaatccgacggcgctcgcggaatggtgttgatgtaccggcggcgcccctcacgcccgaggaagaggcgcggctcgcggccttgatgtcggacgacgccaagtcctcctga

SEQ ID NO: 1453 - DNA, 399 bp, BradyrhizobiumColbertium
gtggtcgcctccgaggtgaagaatctggcccatcagaccagcaaggcgacggaggaaatcacctcccatgtcgccagcattcaggggatcaccgcggagacgcgcggcgcgatcgacggaatttcaaagacgctttcagagatttcgtcgatcatgtctggcattgaggtcgatactgacctgcaacgcaatgccacgcaggagatcacgcgcagcgcccaggacgccgcgcacggcactctcgatgtctccaaccatatcgtccagatcacctcgacctcggccgagacgggccgcatggcggccgaggcgcgagattccgcggtcgacctgtcgcagcaggccgagaccttgaagcgcgaagtcgacgagttcatcgccagtgtcagggcgagctga

SEQ ID NO: 1454 - DNA, 1584 bp, BradyrhizobiumColbertium
atgaccgaccgtatcgacctctcgaaccttccgtcgtaccggcagccgcgccggtcggtgttctccgcgcgcaggctcgcgctgatggcttcggtcgtcgcggggctcggcgcggccgtctatggcttcagtccgtcgacgtcaccggccgacctgttctccagtccggcgcatgcgcaggtcaacaacgaggttcgcaaggtcgaacgcccgatcggcttcgccgatatcgtcgagcgcgtgaagccgtcggtgatctcggtgaaggtcaacatgaaggagaagaccgcgagcaatgatgacggcgacgattcatcctcgccgttccagccgggctcgccgatggagcgcttcttccgccgcttcggcggaccggatggcttcccgggaccgggcatgaggggcggtcggggccgcgtcgtgcagggccagggctccggcttcttcatctcggctgacggctatgccgtgaccaacaaccacgtggtcgacggtgccgacaaggtcgagatcaccaccgatgacggcaagacctataccgccaaggtgatcggcaccgaccagcgcaccgacctcgccctgatcaaggtcgagggcggctcgaacttcccgtttgccaagctcgccgacggcaagccgcggatcggcgactgggtccttgcggtcggcaatcccttcggcctcggcggcaccgtgaccgcgggtatcgtttcggccagcggccgcgatatcggcaacggtccgtacgacgacttcatccagatcgacgcgcccgtgaacaagggcaattccggcggtccggccttcgacaccaacggcgaggtgatgggcgtcaacacggcgatctactcgccctcgggcggcagtgtcggcatcgcgttctcgatcccggccaacaccgtgaagagcgtggtcgcgcaactgaaggacaagggttcggtcagccgcggctggatcggcgtgcagattcagcctgtgacgtcggacatcgctgacagcctcggcatgaagaaggccgagggcgctctggtggcggagccgcaggccaacggtccggcagcgaaggccggcatcgaatccggtgacgtgatcacctccgtcaacggcgaacccgtcaaggatgcccgcgagcttgcccgcaccatcggcggcatggcgcccggtgcgaccgtgaagctcaacgtgctgcacaagggccaggacaaggtcgtgaacctcaccctcggccagttgccgaatacggtcgaggccaaggccgacaccgacaaggatagcggcaagggtgccagccgcggcaccgacgtgcccaagctgggcatgacggttgcgcccgccaattccgtggccggcgccggcaaggaaggcgtcgtggtcaccgaagtcgacccgaagagtgccgcggctgaacgcggcttcaaggaaggcgacgtgattctcgaagtcggcggcaagagcgtgagcacggccagtgaagtccgcgaggccatcagcacggcgcggaccgagaacaagaacagcgtcctgatgcgcgtgaagagcggcggccagtcgcgcttcgtcgcggtgcccctcgccaagggctga

SEQ ID NO: 1455 - DNA, 681 bp, BradyrhizobiumColbertium
atgcgcctcctcatcatcgaagacgaccgcgaatccgccgactatctcgccaaggcgtttcgcgaagtcggacacattgccgaccacgccgccgacggcgaggaagggctcgccatggccgagaacggcgattacgacgtgctcgtggtcgaccgcatgctgcccaagcgcgacggcctgtcgctgatcggcgcactgcgcgacaagggcaacacgacgccggtgctgattctctcggcactggggcaggtcgatgaccgcatcaagggcctgcgtgccggcggcgacgactatctgccgaagccttattcgttcgccgagctcctcgcccgggtcgaggtgctctcccgccgccgcggcggtcctgccgaggatacgctgtatcgtgtcggcgatctcgagctcgatcggctgtcacatcgcgttgcccgcggcaaggacgagctgacgcttcagcctcgtgaattccgcctgctcgagtacctgatgaagcacgccggccaggtggtgacgcgcaccatgctgctcgagaacgtctgggactatcatttcgatccgcagacgaacgtcatcgacgtgcacatctcgcggctgcgctccaagatcgacaagggcttcgatcgaccgctgctgcacacgatccgcggcgccggatacatgatccgtgacggcattcggtaa

SEQ ID NO: 1456 - DNA, 1461 bp, BradyrhizobiumColbertium
gtgacggcattcggtaaactcgtccgcaccacggcgttccggctgacgctggtctacctgctgctgttcgcgatgttcgcggcttcgctgctcggctatttcgcctggaatacgcggcggctcatcaccgaagagatcacgcagacggtcaacgccgagacctcggagatcaacgagatctacggtcgccgcggcttgcgcggactcgtgctcgcgatcgagtatcgggcgctgcggccgggcgccaacctctatctggtgacgacgccgacggggcaggcgatcgccggcaatgtcggttcgctcgcgcccggcgtgatggcgacgcgcggctggtccgagaccgcctaccggcggctcgaggacgccgatgaccgcgatcatcgtgcgctggtgcgcgtcaccgaactcgagaacggcttccggcttctgatcggccgcgacctcgccgagcggcgtcgtttgttcggcatcgtcgccaaggcagcgcaatggtcggtcctgatcgtcgtcgtgctcggcctcggcggcggcatcttcgtggcgcggcgtgtcttgcgccgcatcgacgccatgaccggcaccacgcagcggatcatgagcggcgacctcagcgagcgcttgccagtggggcgcagcggcgacgagctcgatcggctcgccgagaacctcaacgccatgctggagcggatcgaagcgctgatggcggggctgaaggaagtctccgacaacatcgcgcacgacctcaagacgccgctgacgcgcttgcgcaaccgtgccgaggaggctctggccaagtccggctgcgaggcggactaccgcgccgcgctggagcggaccatcgaggaatccgacgggctgatccgcaccttcaatgcgctgctgatgatcgcgcgtgccgagtcgggccaggcgcgcggcaacatggatgatttcgacgctgccgaagtcgcgggtggcatccacgagctctacgagccgctggccgaagaggacggcatgaccctgaaggtcaaagccgagccgacgccggttcacgccaatcgcgagctggtcagccaggcgctcgccaatctcgtcgagaacgcgatcaaatatggcaagccggcggcacaggcagcgggaaccgtggtcagcatggacgccaggcagatcacgattgaggcgaggcgggaaggcgagcaggtgctgctcagcgtcaccgaccgcggcccggggattcccgaagccgatcgcaagcacgtcgtcgagcgattcgttcggctggaggccagccgcacgctgccgggctccggcctcggcctgagcctcgcctcggcggttgcgaccctgcacggtggcgaactacgcttgggcgccgcccaccctggtctcgtcgccacgctcgtcctgccggcgcgtacgggcgcgggcgacagggttgctccgccgctgcaggatgtgccacagaaggtggcatga

SEQ ID NO: 1457 - DNA, 2970 bp, BradyrhizobiumColbertium
atgaaccactccgcgccgggaaacgcggacaagcatggtgagagactggccgcgcgctttgcggaagctccccatattgccgcttccgcaaccgacgaaagacgccttgagaattggctggccgaactcgagccggctcaatcggctcgtctcgaatccctgctggctcatcctttcgcgcgggatatcttgaccggcatcgcggaattctcgccctacctgttcgatctcgtgcgggccgatcccctgcgcctgatccgtctgctcgactgcgatccggatgtgcatctggcggggctgatggcggaggcgagggacgccgtgctcgcagcccccgacgaagccgaggtaatgcgcctgcttcgtcgcatgaaggcggaagcagcgctgctgatcgcgctatgcgacatcggcggcgtctggccggtgatgcgggtgacggcggcgctgacagacgttgcagtgttctcggtgcaggcggcgcttcggtacctgctgcggcaggaagccgcacgcggcaagctctctccgtccgatcccgaggctcccgaagagggctgcgggctgatcgtgctcgcgatgggcaagatgggcgcgggcgagctgaactattccagcgacatcgatctcatcgtgttcttcgaccccgaggcgaccacgctcgcgcccgatatcgaaccgcagccgttcttcgttcgtgtgacccaggggatggcgcgcatcctccagcagcgcacctatgacggctacgtctttcgcgtcgacctgcggcttcggcccgatccgtcctcgacacaggtggcgatctcgcgggacgccgcgctgaactattacgagcgggaggggcgcacctgggagcgcgccgccatgatcaaggcgcgtgcctgtgccggcgatgccagggcgggcgaggcgcttctgtcagagatcgcgcccttcgtctggcgcaagcatctcgactttgccgcactcgccgacgtgcacgacatgaagcggcagatgcagacctatcgcggccagagcgaggtcgcagtcgaaggccacaacgtcaaggtcgggcgcggcggcatccgcgagatcgagttttttgcgcagacccagcaattgatagcgggcggccgccatccggaattgcgggtgcggccgacgctgaaggcgctggatgtgctcgcctccagcaactggatcacccacgcggcgcgcgacgagctgaccacggcctacgagttcctgcgccgcgtcgagcatcgcctccaaatgatcgctgacgagcagacccacacgttgcctgaggacaggcaagcagtcgagcgcttcgcgtggttcttcggctatccggatcgcgaggcctttgcgcgcgacctcttgcaccagctgcagatcgtgcaggggcactatgaaaagctgttcgagggcgatgatccgaccgggacggccaagctgccggcgctcgactatagtgccggccccgaggacccgcgcctgcttcagcacctggcgacgctcggcttcaagaagccggccgccgtcgcgcagacggtgcgcgactggatcaccggcgactatcgggtgttccgggttgaggcgacccggaatgctttcgtcgagttcgtgccggctcttatcgacggacttgcccatgccgaggaaccggaccgcgcggtcgtggcattcgatgatttcctcgcggcgctccagcgcggcggccggctgatcacgttgctcggccagaaccgcgatctcgtcgcgctggtggcgctggtgctgggcgcggcgccccggctgggcgaaatgctggcgcggcagccgcagttgatggacggtctgatcgatccgcgcttcttcggcgccatgcccgaccgggaggaattgtcgggccggttggctgcgaccgtgcaggacgccggctcatacgaagagttcctcgatcggctgcgcctgttcgggcaggagagcctgttcctgatcggcacgcgcatcctgtccggcaccgtctctgcgcaacaggccagcacggcatttgccgacgtcgccgaaggcatcgtccacaccgtgcatggcctcgtcgccgatcgcttcgccgcccagcacggccgcatcaaggggcaggagaccgcgatcatcgcgatgggccggctcggcagccgcgagatgacggcctcgtccgatctcgacctgatcctgttgtacgatttcgacggcgagcatccggactcggacggacccaaatcgctgcacggcgcgcattatttcgcgcgcttcacgcagcgcctgatcagcgcgttcacgacgcgcaccaattacggcgtgctctacgagatcgacatgcggctgcgtccgtcggggcgcgccggcccggtggcctcgagtctcgtttcattcgcggactaccaggccaacgaggcctggacctgggagcatatggcgttgacgcgcgcccgcgtggtgtcggcgtcggacgccttccgggagcggatcgagcgcgtcatccgggacgtcctgacccgccgccgcgatcccgccatcaccgccaacgacgtcgccgacatgcggcgcgcgatcgcccaggaaaagggcgaggccgattgctgggatctcaagcatgctgccggcggcatggtcgacatcgacttcatcgcgcaatatctccagctcgtgcacgctcacgacaagccggacatcctcgatgtcagcaccgtgcaggtgctggagaacgcatgcaggatcggcgtgctcccgcaatcggagaccgagatcttgcgtgcagcagcccggctctatcacgacctgacgcagatcctgcggctctgcgtcagcgaccggttcaagccggaaacggcgggcactgatctccagcgcgtgatggcgcgcgccggcgatgcgccggatttctcgtcgctggaggcgcgcgtgaaggaaacccagagcgaagtgcggcgcgtgttcagggcgctgctggaagggacgtag

SEQ ID NO: 1458 - DNA, 894 bp, BradyrhizobiumColbertium
ttgatcgacaagctcgaactattgctggcgctggcgaaggagcggcatttcggacgcgctgcagaggcctgcggcgtgacgcagccgacgatgtcgacggggctcaagcagctcgaggagattctcggcgtgatgctggtccagcgcgggtcgcggtttcagggctttacccctgaaggcgagcgggcgctcgactgggcgcggcgcatcgtgggcgatgcccgcgcgatgcgcgacgagatcaacggtctgaagcatcagctctccggcgagatccgcatcgcggcgatcccgaccgtgctcggcatggtcgccgcgctgacgacgccgttccgcgccaggcatcccgaggtgcggttccgcatccagtccaccacctcgtccgaggtgctcgggctgctcgaaaacctcgaggtcgatgcggggctgacctacatcgagaacgagccgatcggcaaggtgcgcaccattccgctctataatgagagctaccgcctgctgaccgcgccggacgcgatgttcggtgatcgcgagacggtgacctggaaggaagtcgggcaggtgccgctctgcctgctgacgcccgacatgcagaaccgccgcatcatcgaccgcgcgctgcgctcggtcggcgcggaggcaaccccgacgctgacctcgaactcgctgctggtgctgttcacgcatgtgaagacaggacgctgggcgagcgtgatgcccgccaagctcgccgagacgctcggcctgtccgacacggtacgctcaatcccgatcgtcgaacccgacgtcaactacagtatcggcatggtgatcccgcaacgcgatccgatgacgccgctgatcgcggcgctggtcaacgtcgcgcgagaggtcgcgccttcgctgcaattgtag

SEQ ID NO: 1459 - DNA, 2388 bp, BradyrhizobiumColbertium
gtgattcgaaagcgacgtggggctgctttcgaagctcgttttcagggggccgaaggcatggcgcgcgcagacgccgcgaacgcgtgcgtccaatccgattcgatcaagggattggcgcaatcgatcgcgaaacctgcctatcatcggctgctggtcgcagagccggcgctgcgccgcgccgttccgacgctcatcatcgccttcctgatcacgatctgcctcggtgcctttgtgcaggtggtcgatcaaacgcgccagaagcggctggtgatccgccaggatatcagcgcgctcgccgacctgctcgccgagcgcatcgaccgcctcacctcggtgcgccacgaccgaccaaagaccatcgacagcctgccggcgatgttgccggatctcattccgtcctggggcatggcctcgggccgccacgtcatcgtcacctcggctggcatcgaccgccgcgtcctcgcccgcatcccgatcgacagcgatccctccggcaacgaccggctgctcgatgcgatcacgaccgcccaattgctcgcggcgccgacgcgcgacggcaacatctccgacatgacattgccgaacggcaatgcggcgatggcgacctcgcggcagatcaagtcgctgccgggcttcgtcaccgtgatccaggagcgcaacgagccgatctggggctcggacgccgcgctctcggtgacgctgtcggcaaccaccggcttcgtcgtgctgatcctcggcttcgccttccactggcagtcgacccgcgcccgcgagggcgacctcatcaacgatgccgtgcgcgggcgcatcgacaccgcgctcaatcgcggccgctgcgggctgtgggactgggacttgtcgcgcggccggatcttctggtcgcaatcgatgttctcgatgctcggcctcgacggccgccacgagctcctcactttcggcgaagtcaacgcgctggtgaagtccgacgacatcgacctgttcgagatcgccgaccagctcatctccgagaagatcgaccatatcgaccagaccttccggatgcagcatgtcgacgggcactggatctggctgcgcgttcgctgcgagaagacgcgcggggcgaccgattcaagcgttcacctgatcgggatcgccgtcgacatcaccgagcagaagagccttgcggaaaagacggtggaagccgatctacgcctgcgcgacgcgatcgagaccattccggaagccttcgtgctctgggacgcgagcgaccgcctggtgctctgcaactcgcatttccagcgcctgcacaagctgcccgacacggccgtcattcccggcacctcctacgagacggtgctcgaagtcggccgcatgcccgaggtgcgcacccgccacaacgagaccggagtccagggcccgggcgcacgcaccttcgaggcgcaactcgacgacggcagctggctgcacatcagcgagcgccgcaccaaggacggcggctacgtctcggtcggtaccgacatcacccgtatcaaggagcacgagcagaagctggtcgacaacgatctgcgcctgcgcgccacggtcatcgacctcaagcgctcgcaagccgcgctcgagcgccaggcggtcgagctcgccgacctcgccgagaagtaccagcgcgagaagacccgcgccgaggaagccaaccagaccaagtcgaagttcctcgccaatatgagccacgagctgcgcacgccgctcaatgccatcatcggcttctccgagatcatgggctcgggcatgttcggggagctcggctcggagaaatatcaggaatactgtcaggacatcctgaccagcggccattatctgctcgaggtcatcaacgacatactcgacatgtccaagatcgaggctggccggatgaaactcgacatggaggagctggacctctccaagacacttgcggaatccttgcgggtcgtcaccggccgtgcccaggacaagcacctgacgctcgacgccgacatcgcaaaatcgatctcggtcgtcgccgaccgccgcgccaccaagcagatcatcgtcaacctgctctccaacgccgtgaagttcacgcccgacggcgggcgtgtcgtggtgcgcagccggcagctcgacgacaggatcgtgctgatgatcgccgacaccggcatcggcatcgcgccgcattcgctggcgcggctgggccgcccgttcgagcaggtggagagccagctcaccaagacctatcacggctcgggccttggcctcgcgatcgcacgctcgctggcgcagctccacggcggctcgatgcggctgcgctccaagctcgaggtcggcaccgtcgtgcgcgtgaccctgccgcgcgacgcgatcaaggcagcggccgggatctcggccgcggcttga

SEQ ID NO: 1460 - DNA, 1374 bp, BradyrhizobiumColbertium
atgacctcccagcacagcaaaacctcggtcgcggcgatttcgatcttcgccagcggcggcatggcggcggcgaagttcgcggtcgggatcgcaatcggctcgctggcgctgatctccgaagccctgcattcctcgatcgacctggtcgccaccatcatcacctgggcggtggtgcgggtgtccgacaagccggcggacgaggagcatcattacggccacggcaagctggagagcatctctgcccttggcgtcaccgccctgctctacgtgcttgccggcggcattctggtcgaggcctatagccggctgagcgagggaaccccgccgccgaccatctcggccgtgcccttcgtcgtgctggtgatcgacatcgtcgtcaatctctggcgcgcccgcgccctgcagcgcgccgcgcgagagaccaggagccaggcgctggcggcggatgcgctgcatttcgcctccgacgtcatgggctcattcgcggtaatcgcgggcctgatcctcgccgcgctcggcttctggtggggcgacgcggcggccgcggccgcggtcgcggtcatgatcgcagctctcggcctgcgcctggccggctcaaccgtgcagacactggtcgaccgcgcgccggaaggcgcgcaggagaaggccaccgccgcgatccgcggcgtgccgggcgtgatcgacgtcgaccggctgcgcgtgcgcatggtcggagcgaccacgttcatcgacaccatcgcaaaggtcccgcgaacctatccgatcgaccgcgtcgaggagatcaagcgcaacgcacaggccgcagtgaccaaggcattcggagacgccgacctcacgttcgctgcggtgcctgtcgctcgcgacaacgagaccgtccacgaccgcatcatggtgatcgcgcataattccggcctcgcggtccaccacgtcaccgtgcacgacctcggcgccaagctgatcgtcagcatcgatctcgaggtcgacgccgcaatgcagctcgaggccgcccacgacatcgccaacacgctggagcgcaagatcaaggaagagttcggcgaggacgtcgaggtcgacgtccacatcgagcccatggaaccggaactgccgttcggggtcgatgccgcacctgacagggtgcagaccatcgcggctgctctgacggaatacgccgccggcagcgagatccacgacatccataacgtgcgggtccgcaacacggacgccggcgagatcgtcaacttccattgccgcgcagcgccgtcgatgagcgtgatcaaggtgcacgagcatgtcgacgcgatcgagcgcgcgttgcggcgtgcattcccgagcgtgaagcgcgtcatcagtcacgcggaaccgccgcgcgcgtga

SEQ ID NO: 1461 - DNA, 969 bp, BradyrhizobiumColbertium
atgaaagcttatgtctatggtcctgacggcgctcggatttccgacgtcgctcaaccaaagcccaaaggcacgcaggtgctggtgaaggtccgcgcttgcgggctgaaccgggcggacaccggcatgcgcaagggacacgcccatggggcggccggcggcgtcggcaccgtgctcggcatggaatgggccggcgaagtcgccgagctcgggccggacgccaaaggcgtcaaggtcggcgaccgcatcatgggctcgggcggtgcggcgttcgccgaatatacgctggccgatcacggccggctgttccacgccccctcgaacatgaatttcgaggaggccgccaccctccccgtcgcactcgcgaccatgcacaacgcggtcgttaccgttggcggaatgcaggcgggtcagagcgcgctgatccagggcgccagctccggcgtcggcctgatggcgatgcagattgccaggctcaagggcgcaaagctcgtgatcggcacatcgaccgatgcctatcgccgcggccggctgaaggaatatggcgccgatctcgccgtcgacagctccgatcccaaatgggtcgacgaggtgctgagggcgacgaacggagaaggcgtcgatctcatcgtcgaccaggtctcgggcaaggtcgcgagccagaatctagccgcgacgaagatcaagggccgcatcgtcaatgtcggccggctcggcggtacccatgccgatttcaacttcgaccttcatgcggcccggcgcatcgactatgtcggcgtcaccttccgcagccgcaccatcgaggaggtccgtgagatcttcgaggaggtgcgcaaggacatctggggcgctgtggaatcgcgaaaactgcagctgccgatcgacaaggtgttttcgttcgacgacattgaaaaggcattcgaccacatggaggcgaacaagcacctggggaagattgtggtcgcgttgtag

SEQ ID NO: 1462 - DNA, 996 bp, BradyrhizobiumColbertium
atgttgcagacacggttcaccaagctcgtcggcgtcgagcacccgatcgtccagggcggaatgcagtgggtcggccgggccgagctggttgccgccgttgccaatgccggagcgctcggcttcatcacggcgctgacccagcccacgccggaggacctcaccaaggagatcgcgcgctgccgcgacctcaccgacaagccgttcggcgtcaatctcaccatcctgcccgcgatcaagccgccgccctatgccgaataccgggccgccatcatcgagagcggcgtcaaggtggtcgagaccgccggcaacaagccgcaggagcatgtcgaggagttcaaaaaacatggcgtcaaggtcgtgcacaaatgcaccagcgtccgacacgcgctgtcggccgagcgcatgggcgtcgacgccatctcgatcgacggattcgaatgcgccggccatcccggtgaggacgacacgcccggcctgatcctgatcccggccgccgcgaacaaggtcaagatcccgatgatcgcctcgggcggctttgccgacgctcgcggcctcgtggcggcgctggcgctgggcgcagaagggatcaacatgggcacgcgcttcatggcgaccaaggagagcccgatccatcagctcatcaaggagaagatcgtcgccaacgacgagcgcgagaccgagctgatcttccgcaccatgcgcaacacctcgcgcgtcgccaagaacgccgtctcgaccaaggtcgtcgccatggaaaaggaaggcgccaagttcgaggacatccgcgagctcgtcgccggtgcccgcggcaagatggtctatgccaccggcaattccgacgaaggcatctggtcagccggccaggtccagggcctaattcaggacatcccgagctgcgccgagctcgtctcccgcatcgtgcgcgaagcggaggcaatcatccgcggccgactggaaggcatgatcgttcagccgcaacgcgaagctgcggaataa

SEQ ID NO: 1463 - DNA, 651 bp, BradyrhizobiumColbertium
gtgacgaagaaagctgatcgatcgggatcctgcatcctcgcgggcttcgctcttgcggctatgctctcgtgcacgacgccctcggcttcggcccacgaggcaaacaagcgcgttgccgatgccaacgcgcttgcgacggcggacaccgcctcgcgacctcagccgcaagcggcgcggcgctccgtcgcgcgcgcggagaagggcccctactacgtcgacttccgcgcgcggaccgccgcgagctggggccatgccttcgtctggtacggcaagaccagcgagaaagcggtcgaggtcgcgggcctcacgcccgccggcgacacgctcgcctatgtgctgggtcacatcaccttcgtgccatccgagaccggcgcaagctacggcgatctcgatccggaatatctgaccgcgaactatcgggtctatctcaatgaggccgacgccaagcgcgtgttcgcctacatcaaggagttgcaggccagctctccggtgtggaatgccgagaccatgaattgcaccggcttcatcggcgacatcgcggagttcatgggattgaaggtgccccatcgctggcagcgcccggaaaacttcgtcaacagcctgaagcaaatgaacggcggccgccagatggtgcggctgtcggcggagtaa

SEQ ID NO: 1464 - DNA, 204 bp, BradyrhizobiumColbertium
atgactgtgaagaaaatcgtaatcgctctgggtgctacgcttgctctggtgacggctgcaaacgctgcggatataccgcgacgccagccggtgccggtctatccggccgagcaggcgccgatcggcaagatgccgattggcaagagcccggttggaaaggccccgatcggcaaggcgcccggtcccgtcgcggcgcgctactga

SEQ ID NO: 1465 - DNA, 252 bp, BradyrhizobiumColbertium
atgcgcatcctcatcgccatcctgttcgccctgattggcctggtcgccggctggtccgcgctggccgcgctggtgattgctctcgccggaccgggcaacgatggcggcatcgccatgggcgcggtcttcgccatcggtcccgtcggcggcctggccggcctgatcgcaggcatctggctgttcaggcgtttcggcccaagcaacgatcaggatgcaccgctgcccgcgtcccgcggcgaggactctgcctga

SEQ ID NO: 1466 - DNA, 426 bp, BradyrhizobiumColbertium
atgctggtcggagacatcctgcgcaagaagacgccgcgtgtcgtcacggtgcgcatgaatgaaacggtgggtatcgccaccaagctgatgcgcaccaacaacatcagcgcgctggtggtgaaggacgtcgtccgctccgagggcaacaccgcggtcggcatgttcaccgaacgcgacgtggtacgcgccgtcgtcgagcacggcgccaatgccgtcaacgtcaaggtctcgcagctggtgtcggtacagcaactcgtttcctgcacctcgagcgatacgatcgagcacgtgcgccatctgatgaaccgtcatcacatccgtcacctgcccgtaatcgacgattacagcctcgtctcggtgatcagcatgcgcgacatcgccgccgcgctcgacgaagccaccaactcgacaccgcaagcagcctga

SEQ ID NO: 1467 - DNA, 1290 bp, BradyrhizobiumColbertium
atgacggacatggtgcagtcggctgcggcccctagtgcaacacgtgtgagcgatgcctatcgctggttgcaattgtcgatcggcgtggcggcgatggtgatgatcgccaactatcaatacggttggacgttcttcgtcccggacattcagaaaacattcgggtgggatcgcgcctcgatccagtgggctttcaccctcttcgtgttgttcgagacctggctggtgccgatcgaaggatggttcgtcgacaaatacggcccgcggatcgtggtgctggtcggcggcgtgctctgcgccgtcggctgggcgatcaacgcgcaggccacctcgctcaacggctactatctcggcatgatcatcgcaggcatcggcgccggcggcgtgtatggcacctgcgtcggcaatgcgttgaaatggtttccggacaagcgcggtctcgccgcgggcatcaccgccgcgggcttcggtgccggctcagcgctgaccgtcgcgccgatccaggccatgatcaaggacagcggcttccaggccacattcctctatttcggcctcgggcaaggcattgtcatctgcatcctcgccttcttcctgctcgcgcccaaggcgggacaggtgccgaacgtggtcgcgaacgccaatctgctccagacccggcgtaactaccagccgaccgaggtgctgcgtcagccgatcttctggctgatgtacttcatgttcgtgatcgtcggcgccggcgggttgatggtgacggccaacctgaagccgatcgcggccgactggaaggtcgacaacgtgccggtcacgctgatggcggtgacgatgacggcggtgaccttcgcagccacgatcgaccgcgtgctcaacggcctgacgcgtccgttcttcggctggatctccgacatgatcggccgcgagaacacgatgttcatcgccttcggcatggaaggcttcgggatctggatgctctacctctggggccacgatccggtctggttcgtgctgctctcgggcttcgttttattcgcctggggcgagatctactcgctattcccctcgacctgcaccgacacgttcggcgccaagttcgcgaccaccaatgccggcctgctctacaccgcgaagggcaccgccgcgctgctggtgccgatcgccaactacatgcagcagtcttcagggacatgggacagcgtgttcatcattgccgccggcgccaacatcctggcgtcgttgctggcgatcgccgtgctcaagccctggcgcaagatcgtggtcgcgaaatccacgatctga

SEQ ID NO: 1468 - DNA, 159 bp, BradyrhizobiumColbertium
atgtccgtcattcaaaaccctcccgaacgcgccgatcatttttatgcctgcgccggcgcgcagcttggtatgcattatgccaagattcaagcgaagggcggcgaggtgcggcgaaatggcgcagccttcttcacatgcgccatgagcgcgggcttgtaa

SEQ ID NO: 1469 - DNA, 1500 bp, BradyrhizobiumColbertium
atggaagagttggccaatctgtttcacggcttcgcggtcgccctgcagccctacaacatcatgctgatgatcatcggcatcacgctcggcgtcatcatcggcgtgctgccggggcttggcggcgccaacggggtggcgatccttctccccctcaccttcagcatgccgccgacatcggcgatcatcatgctgtcctgcatctattggggcgccttgttcggcggcgccatcacatcgatcctcttcaacatacccggcgaaccctggtccgtggcgaccaccttcgatggttatccaatggcgcagcagggcaaacccggcgaagccctgacggccgccttcacctcctccttcgtcggcgcgctgttcgcggtcatcatgatcacgctggttgccccgctcgtcgcgggcttcgcactgcggtttggcccggcggagaagtttgcggtgtatttcctcgccttctgctccttcgtcggcctcagcaaggagccgccgttcaagacgatcgcggcgatgatgatgggctttgccctcgcggcggtcggcctcgattcgatcacgggccagttgcggctgaccttcggcgtcaccgagctcctcaacggcttcgacttcctgatcgccgtgatcggcctgttcggcatcggcgagatcctgctgacaatggaggaagggctggcgttccgcggcggcaacgccagcatcaaccttcgcgtggtgctgcatacctggcgggaactccccgcctattggatgacctcgctgcgctcctgcctgatcgggtgctggaggggcgtcacgcccgccggtgctacgcccgcatctttcatgagctacggtatcgccaagcgcctggcgcgacgcggcaacaatttcggcaagggcgagatcgaaggggtgatcgcgccggagaccgctgcccatgccgccggcactgccgcgctgctgccgatgctctcgctcggcgtgccgggttcccccaccgcagcagtcctgctcggtggattgttgatctggggtctgcagccgggtccgatgctgttcgtcgagcagaaggaattcgtctggggcctgatcgcgtcgatgtatctcggcaatctcgccggcctcatcgtcgtgctcacctgcgtgccgatctttgccgccatcctccgcgtgcccttcggcatcatcgcgccgctcatcctggtgctgtgcgcgatcggcgcctattcggtgcacaacagcaccttcgacgtgatgctgatgctggtgttcggcgtgctcggctatctcctgaagaagtgcaactacccgctcgcgccgctggtgctcgccatcgtgctcggcgacaaggcggaggagtccttccggcaatcgctgctgggatcgcagggctcgctcggcgtgttcttctccaacggtctcgtcagcacgatcatggcgctcggcctcgtcgccctgttctggtccgcgatccaggaaggctacagccgcctgcgcacgtcgatggcctga

SEQ ID NO: 1470 - DNA, 441 bp, BradyrhizobiumColbertium
atggcgctgctgatcggtgtcttcggcctcgtcgtgatcttcggcagcgtgaaggccggcatcagctggggcgcggagggcccgcgtgccggcttcttccccttctatgtcggtgccaccatcgtcgtcgcaagcgccatcaacctctggcatgcgcagcgcgacgacgacggccgactgttcgccgaatggggacagctgcgccaggtcatgagcgtcgtcgtgccgaccgcgatctatgtcggctcgatgccgttcatcggcctctacgtcgcctcgacggtctttatcgcctggttcatgcgctggctcggcggctatcgctggctgacgaccgtcgcggtcgcgatcgggatgccggtgttgacctatctcgtgttcgagcgctggttcctggtcccgctgcccaagggcccattcgaggaatggctcggtctgtaa

SEQ ID NO: 1471 - DNA, 1008 bp, BradyrhizobiumColbertium
atgaagccgttcgttctgaatgtcgctttggcggcaatcgcgatgtcatgcgttggcagtaccgcaagccacgcagcctgggagcccgtccgtccggtcgagttcatcgtgcccgcgggcaccggcggcggcgccgatcagatggcacgcaccatccagggcatcgtcaccaagcacaatctgatgaagcagccgctggtcgtcatcaacaaggccggcggggcgggcggcgaaggtttcctcgacgtgaagacgtcgtcaggcaatcctcacaagatcatcatcacgctgtcgaacctgttcaccacgccgctggcgacgggaattccgttcaactggaaggatctgacgccggtggcgatgctggcgctcgacgaattcgtgctctgggtgaatgccgagaagccgtacaagacggtgaaggattacgtcgacgctgcgaagcaggcaccaagcggctcattcaagatgggcggcaccggctccaagcaggaagaccagatcatcacggtcggcatcgagaaggcgatcgaggcgaagttcacctacattccttacaagggcggcggcgaagtcgccgtccagctcgtgggcaatcacgtcgattccaccgtcaacaatccgatcgaggcggtcgcgcaatggcgcggcggcaagctccgtccgctctgcgtgttcgacgcccagccaatggcctatgacgagccgatcgccgacggcaaggcctggaaggatgttccgacctgcaaatcgcagggccttgcgatggaatatctcatgctgcgcggcgtcttcatgtcgcccaaggcgacgaaggatcaggtcgaatattatgtcgaactgttcaagaaagtccgcgccacgccggaatggcaggatttcatgaaaaacggcgccttcaacacgaccttcctgacaggcgccgactacgccaagtgggtcgcggcggaggagaagcgccacgaaggcctgatgaaggatgcaggcttcctcgcatcgggaaattga

SEQ ID NO: 1472 - DNA, 138 bp, BradyrhizobiumColbertium
atgtcaaagaccgcttccgctgcgctcgccccctcctcctcgcttttcgcccgcctggtggccgcgatcgacggcctcctgatggccagcgccgagatctcgaaccgcaacggcgacctgccgcgctttggcctgtag

SEQ ID NO: 1473 - DNA, 1305 bp, BradyrhizobiumColbertium
atgtcgagcgcctcgtccgccgtctcgatcggcatcgatttcgggaccagcaatacggtcgtcgcgctcgcggcggacgatcgtcgggtcgaggccatccgtttcgatcatggcggacagcgccacagcgtctatgtgtcggcgctgtgcttctgggaggaccggccgggcgccggggcccaggccgagggcggcccatgggcgatcgagcagtttctggaagggcgccatgtctaccgctttctccagtcgttcaagacgttcgcagcgagcagcagcttcaacaccacccaggtgtttcggcagcgctacaagttcgaggatattctggcggcgttcctgcgcacgctggcgcgccatggcggggagaagttcggcttcgaggccgcgaacatcacggtcggccgtccggtgcgcttcgccggtggcaatcccgacgaggcgcttgcgatgcagcgctacagggccgcgttcgagcgcctgggcgccggccacgcgcgctatgtctacgagccagtgggtgcggcgttctcgttcgcacgaaggctcgagcgcgatgccaccgtgctggttgccgatttcggcggcggcaccagcgatttctccgtgatgcgcttctcgcgcgcgggaggtcggcttcgcgccgagccgctcgggcatgcgggcatcggcatcgccggcgacacgttcgactatcgcatcgtcgaccacatcgtctcgccgcgcctcggcaaaggctcgagcttccgctcgttcgacaaggtgctcccggtccccagtggccattacaccaacctcgcgcgttggcatcagctcgcgatgatgaagagcaacggcgatttgcgcgaactgagggagcttgcgcgcaccgcgttgaagccggagctgctcgaggatttcatcaccatcgtcgatctcgacctcggctttgcgctttaccgttccgtgtccgacgccaaggtcgcgctgtcggcgcaggacgaggtggacttccgcttcaagggcggcggcgtcgagatcggcgcggacatcacgcggaagcagttcgaatcctggattagcgacgacatcgcccggctgggagccaccgtcgacaaggtgctggcggaggccggcatcaccgcgcgcgacgtcgagaaagtgttcctgaccggcggcacgtcctttgtgccggccgtacggcgcttgttcgccgagcgcttcggcaacgagcggctgatgtcgggcgaccagttcgagtcgatcgcctacggcctcgcattgatcgggcatagtcccgacccggaccgctggacggcaagttag

SEQ ID NO: 1474 - DNA, 450 bp, BradyrhizobiumColbertium
atgatgagatctgctgtcgaatggttgatcattaccggtcttgccgtcggtttcgctgcttccgctcaggccgaagaagtcgacatcggcaaggcggagttccagtcttcgtgcgccagttgtcacggcgccgacgcgaaggggaaaggaccggtcagcagtcagctcaagacgccggcttcggacttgaccctgctggccaagaacaacaacggggtgtttcctgccaacgccgtctatgagatcatctatggatcgaaatcagttccggctcacggctcgcgcgaaatgccgatctggggcgaacggttcaacccgatcgtcagcctgcctcacgccgtcgatccctcctattggcaaaaggccggcccgcagcagagcccggaagtcgtggtgcgcactcgcatcctcgcggtgatcgattacctgaaccgaattcagcagaagtag

SEQ ID NO: 1475 - DNA, 1284 bp, BradyrhizobiumColbertium
atgagaccattccagacgttgcggatgcttgcctgtagcgcgctgctcgttgcggctacgggtccggcctgggccgaagggactttcgagattcccgccggggcccgtttcaacaaggacaagctggcaaaaatcgacgagtttttccgcaacgaagtggcgactgggaaaatccccggcgcgatcctgctcatccagcagcatggaaagccggtttatcaccaggccttcggcgtgcaggacgtggtgtcgaaggctccgattaccgaccacaccatcttccgcctgttttccatgaccaaggccatcaccagcgtggtcgcggtgcagatgctggatgagggaaaattctccctcgacgatcccatcgcgaaatatatcccatcgttcgcgaacgtgaaggtcggcgtcgagaagcaagcgagcgacgggaccaagacgctcgagctggtgccgccggagcgtgcgccgactgtgctcgacctgatgcgccatacttcgggcatcacctacggcttctacggcgacagcctcgtgcgcaaggcctacagggcggccgatatttatgccggcgacttcgacctcgccgagttcgccgagcggatcgcaaaattgccgctgcacaatcaacccggcgcgctctggcagtatggccattccaccgacgtcctggcgcggatcatggaaatcgcagccggcaagtccctgatcgagatcgagaaggacaagctgttcgaaccgctcgggatgaaggataccggcttcctcgtcaccgaccccgacaagcggaagttgctcgccgagccgatgccgaacgacagcaatttccgggtgggccgggagaacgacccgacaaagccgaagaagatgatgtacgccagcggcggcatggtctccacgatggccgactacgctcgcttcgctcagatgctgctcaatggcggcacatacgagggcaagaccattctcagtcccaaggcgttcaagctgttgacgacggattatgtcgggccggattcgggcgtcgagcgggacttcttctattttccgggcgacggcttcggcttcgggctggggctcgccgtccgcaccgatccgggcaacgccaaaccgccgccgccgggcaatctcggcgagttgaaatgggacggcgccagcggctgttatttcgtgatcgaccgcaagcaggacatgttcttcattttgctccagcagaccccctcggagcgccagcgcatccagaaaaccgtgaagcagctgatctacgaggccatggagaattga

SEQ ID NO: 1476 - DNA, 231 bp, BradyrhizobiumColbertium
ttggttcgatccgagtttagccgtccgctcgaccggcacaaggggcatcgaattgcggggagcgtctgtcgcaggcgggggcggtccgccgcggaccgccgcacactccttgcccagaggggcccgcctacggcgggcgtccccagggatggtcatggagaaatcgccttcaaacgcgattgtcggcccaggcgggtggctgaacggcccgcgtctcggatcacctattga

SEQ ID NO: 1477 - DNA, 444 bp, BradyrhizobiumColbertium
atgcccagcactgtccgcctgcaccgcgttttcgccaccagcccggagaaggtctatcgcgcgttcctcgaggccgacgcgatggcgaaatggcttccgccaaacggcttcacctgcagcgtgcaccacttcgagcccaaggtcggaggcaccttcaagatgtcgttccggaatttcaccacgggcaacagccattcctttggaggcgaatatgtcgagctcgtgcccggcgaacgcatccgctacacagacaagttcgacgatcccaatctgccgggcctgatcgaggtgaccgtggtcctgaagaaggtctcggtcggcaccgaaatcgacatcacgcagaccggcatcccggatgtcattccgccggaggcctgctatctcggctggcaggaatcgctgcgaaatctggcgaagctcgtcgagcctgagatcaatcaatag

SEQ ID NO: 1478 - DNA, 690 bp, BradyrhizobiumColbertium
atggcactgctcggcaaggccgccgttgcgatgtggtggagtgttcgcgccgagcagcgcggcgagttcggcgattggcattcgcatgaacacttccccgagcggatgagcattcccggcttccggcggggatcgcgctggagcagcacgaccgatgccgaaggcttcttcgtgctctacgagctcgagcaatacgaagtgctcacgtcgaagggatatctggaccggctcaatgcgccgacaccgtggtcgaggaagatgatgccgcatcatctcggcatggtgcgcagccagtgccggatcgtggcgagctttggcggtgggatcgcggactcgcttgccaccatcaggctctcgccgcgcgcgggactcgcggcagagctacaggcacatctcatcgatacgctcgtcgccctcccctcgaagccgggattgacgggcgcgcaccttctcctcaccgacacgcccaggacgagtgcgcccaccaccgagcagcagatccgtggcaacgatgatgctgcggactggatcgtgctgctgtccgggtacgatgccgacgcaatcgaggacgtgatcgccggcgggctctcgccgccatcgcttcacacggccggcgcttgcgacaactccacaattggtcactacaggctggcattcacgatgacgtctcaggatgccgcaaccatctaa

SEQ ID NO: 1479 - DNA, 135 bp, BradyrhizobiumColbertium
atgctgatctccatgttctttcgccggctatcgcatttgatagcgtttccttgcggctatccttcggacgcccgcttcaggcagactcctcaggctgaggaccgagtgcgcggcaacagtttcaacgagcactga

SEQ ID NO: 1480 - DNA, 207 bp, BradyrhizobiumColbertium
ttggaggccgaagccacaattccgctgccgggcgatccggccggtggcaaaggcgcgtggcgggataacgttttcgtcgagcggttatggcgcagcgtcaaatacgaggaagtctatctgcgatcctacgaaaccgtcggcgacgcccgaagctcgattggtcggtgtttcgacttctacaacggacaacgacctcacgagtcttga

SEQ ID NO: 1481 - DNA, 1161 bp, BradyrhizobiumColbertium
atggagattgatcgcagagcctatctcggcgggatgggtgctgttctgggtgccggactgcttccggacctcgctgcagcgcagacgaaatcgctgcccgatctaccgccgaccatgatttggagcgtctacgacgttggcgcctccggctacgtggaggcctcggccatagcggatgcactcggcaagacgtatggcacgcgcgtacgcctccagccctccggcacatcgatcggccgcatccagccagtgaaggaccgtcgcgtaacacatggctggctggcgaccgaggtcttcttcgccgccgagggtctttacgagtatgccgcgccgaactgggggccgcaggatctgcgctgtctgctgggtcgcgtgaattcgctgtccatctgcgtgacgaagacgagcggcatcaagacactgaaggatctcaagggcaagcggtacgcgatcgcaaaggcgaatacgtccgtcaacgcgaagatcgagcctattctcgacgctggtggcatctcttacagcgatatgcaggtcgtcgagttcccgagttacggcgcttcgcttaaggcgctcatcgagggtcgtgcggatgccgccggtgcggcgctgacgaccgtgtcgctcaaggaacttgaggcgagttcttacggcatcgattggatcgagcttccagcaaccgacaaggatctgtggagcaagatccagcgcgccattccgctcgcggcgccctacaccgagacgttcggctcgggcgtgtccaaggaaaatccccgggccgtcatgggctacaggtatcccatgattaccgtctacggcgatgccaaggtggacgaggtctacgcggttacgaaggcgatcgtcgacacctatgacacctacaaggccgcctcacccatcatggagcgctgggaagtcaagaactccggcgcctacccgatggacgcgcccttccacgagggtgccatcaagctcctcaaggagaagaacgtctggactcccgatcaccagaagtggcaggacggcatcgtgaagcggcacgcactgctccggcaggcttgggccgacatgatggccaaggagcccgccgcaagggaggccgatgccgccaagctgcgtgagctttggatgccgcgtcgtgccgaggttctcaagtccctctag

SEQ ID NO: 1482 - DNA, 1950 bp, BradyrhizobiumColbertium
atgacgaccgaacaggctgaggtcgcgacaccgatagttgaagaccccgaagcccgctcggcgcggctggaggggcgcgcattttgggcaacgttcgtcctgacgttgcttggactagcgctctcggtcaatcaggtctttaatctgggcatcggcggctttcggccgatcagcacggcttactactacctgatcatcggcatttttggtgcgatcggcttccttgcctttcctgcgcgcaagccgtggcacggtcccgtgccctggtacgattggatttgcggtgctgccctgctgggcctgaccatctggattgcctcgcgggcgcaatacgtcatcgacgcgggctggaacacgactgggccactcgaagcgcagatcgtggcgggcgttgtcactgctctggtcctcgaagggctccggcgcacgggcgagaccattctcttcgtcttctgtctcatctttgcgtcgttcccgctctatgcgggccacatgcccggctttctctggggcgtgcaactcgatctcggccagaccctcagcgaacacgtctatggcctcgagagcctgatcggcattccgatgcaggtcgttgcggacacgctgatcggcttcctcgtgttcggtgtggtcctggcgtcgaccggcggcggcgccttcttcatggactttgcgtccgcccttctggggacggcgcgcggcggtcctgccaaagtggcaatcatctcatcgggattcttcgggatgctgtccggcagcccaacgtcgaacgtgctcaccacgggcacgctcactattcccaccatgaagcgctgcggctacccggcggcctatgccggcgccgtcgaagcctgcgcgtcgacgggtggcgcgctgatgccgcctgtcatgggagcggcggccttcatcatggccaacttcctgaacgtgccctacgccgatgtcgtcgtcgccgcattcctgccggcggtgctgtatttcttcgcactgttcatgcaaacggacttctacgcggcgcgcaacgggctgcgtggaaccggtgccgacgacgtgccgcccctcacgcgtactttgatcggcggctggtactacattggcgcgctggttgcgctcaccctgctgttgctcgtctggcgtcttgagggcgaggcgcccttctgggtttcgctcttcctggtgctgatcgcgatctttcgagcacccgcgctgggcttcacgccccgctacttcgccgggcttgtcgtcgatgtcggccagaccgtcgcgcagatcgtcggactgattgccggcataggtttgatcatcggcgcattgtcgatcaccggtgtcgccaactcgttctcgcgcgaactcgtgcagtacgccggcaacaatatcgtgctgctgcttgctaccggcgctctcacgagcttcatcctcggcatgggcatgacggcctccgcctgctacatcttcctcgccatcgtgctcgcgcccgcgctgatcacgaccggcctcgatcctatggccgtacatctctatgtattctactggggacttgtgtctttcatcacgccgccggtagccctggcagcgatcgccgccgcgtcgatcgccaaggctgacgcgatccaggtcggactgcgcgccatccggatcgggtgtctcctgttcctgctgccggtgctcttcgtgttgcagccggcgctcatcctcaagggcgagttgatggagattctccaggtggcgaccacggccgtcgcagccgtcgttctcctcgcagcgtcgttcgagggatacttctactgggccgggcggctgcccgtttggtcgcggataatcgtcggggctggcggattattgatgctggtgcccgagggaatgaccgatctcatcggctttgcgatctgcgtcggggcgctcgtgctaaccaggctcgtttcaggctggcgcacggtgccagggacatag

SEQ ID NO: 1483 - DNA, 1278 bp, BradyrhizobiumColbertium
atgaccaaagcgctcgagggcgttcgcattctcgacttcacccacgtccagtccgggccgacctgcacgcagttgctcgcatggttcggcgccgacgtgatcaaggtggaacgccccggcgtgggcgatatcacgcgcggccaactgcaggacatcccgaacgtggacagcctgtatttcaccatgctcaaccacaacaagcgttcgatcacgctcgacaccaagaacccgaagggcaaggaggtcctcaccgagctgatcaagaagtgcgacgtgctggtcgagaatttcggccccggcgtgctcgaccgcatgggcttcccctgggagaagatccaggagatcaacccgaagatgatcgtcgcctcgatcaagggctttggccccggaccgtacgaagactgcaaggtctatgagaacgtcgcccagtgcaccggcggcgccgcctcgaccacaggattccgcgacggcgtgccgctcgtcaccggcgcacagatcggcgattccggcaccggcctgcatctggcgctcggcatcgtcaccgcgctcttccagcgcacccacaccggcaagggccagcgcgtcaccgcggcgatgcaggacggcgtgctcaacctctgccgcgtcaagctgcgcgaccagcagcgtctcgcccatggcccgctcaaggaatacagccaattcggtgaaggcgtgccgttcggcgatgccgtgccgcgcgccggcaacgattccggcggcggccagcccggccgcatcctgaagtgcaagggctgggaaaccgatcccaacgcctacatctacttcatcacccaggctccggtctgggagaagatctgcgacgtgatcggcgagccctcgtggaagaccgatccgaactacgccaagccggcggcgcggctgccgcgcctcaacgagatcttcgcccgcatcgagcagtggacgatgaccaagaccaagttcgaggcgatggagatcctcaacaaggacgacatcccctgcggcccgatcctgtcgatgaaggagatcgccgaagaccagtcgctgcgcgcgaccggcacggtcgtcgaggtcgaccatcccacccgtggcaagtacatctcggtcggcaacccgatcaagctgtcggatagcccgagcgacgtgcagcgctcgcccctgctcggcgagcacaccgacgagatcctgcgctccgtgctcggcttctccgaccaccaggtcgccgagatccacaagtccggcgccctcgacccgccgcagaagcaggcggcggagtaa

SEQ ID NO: 1484 - DNA, 1734 bp, BradyrhizobiumColbertium
atgctgaataccgcgaccaagtccgaggcaccgggcaccgagcaggaactgacggatggcttccatctcgtcatcgacgcgctcaagctgaacggcatcaacaccatttataatgtgccgggcatcccgatcacggatttgggccgtatggcgcaggccgccggtattcgcgtgatctccttccgccacgagcagaacgccggctacgcagcaggcatcgccggctatctcaccaagaagcccggcgtctgtctcaccgtctcggcccccggcttcctcaacggccttaccgcgctcgcgcacgccaccaccaactgctacccgatgatcctggtctccggctcctccgagcgcgagatcgtcgacctccagcagggtgactacgaggaaatggaccagctcgcgatcgcaaagccgctgtgcaaggcggcctatcgcgtgctgcacgcccaggacatcggcatcggctttgcccgcgccatccgcgccgcggtctcgggccgtccgggcggcgtctatctcgacctgccggcaaagctgttcggccaggtcatgaacgcagaggccggccagaaatcgctggtcaaggtcatcgatgctgcgcccgcgcagatcccctcgcccgcttcggtcaagcgcgcgctcgacgtgctcaggagcgccaagcgtccgctcatcatcctcggcaagggcgcggcctacgcgcaggcggatgaagagatcaaaagcttcgtcgagaagagcggcgtgccgttcctgcccatgagcatggccaagggcctgctgcccgatacccatccgcaatgcgccggcgccgcgcgctcgaccgtgctgaaggattccgacgtcgtcatgctgatcggcgcgcggttgaactggctgctctcgcacggcaagggcaagagctggggcgaggcgcccaagaagttcatccaggtcgacatcgagccgaaggagatggactccaacgtcgagatcgtcgcgcccgtcgtcggcgacatcggctcggtcgtctccgccttcaaccaggcgcttgcgtcagggtggactgcgccgcccgccgaatggaccaaggccatttcggccaagcgcgaagagaacgtcgccaagatggcgccgaagctcatgaacaacaaatcgccgatggactatcacggcgcgctcggcgtgctgaagaacgtcatcaaggagtaccccgaagcgatcctcgtcaacgagggcgccaacacgctcgacctcgcccgcggcgtcatcgacatgtaccgcccgcgcaagcgcctcgacgtcggcacctggggcgtgatgggcatcggcatgggccaggcgatcgcggccgcgctcgagaccggtcatcccgtgctcgcggtggaaggcgattccgccttcggcttctccggcatggagatcgagaccatctgccgctacaacctgccgatctgcgtcgtcatcttcaacaatgacggcatctatcgcggcaccgacgtcaacagcgccaacgccgaccccgcgacgacggtgttcgtcaagggcgcgcgctacgacaagatgatggaagctttcggcggcgtcggcgtgaatgcgacctcgccggacgagctgaaacgcgccgtgaacgaggccatgaagtccggcaagccgacgctcatcaacgcggtgatcgatcccgccgccggctcggagagcggccgcatcggcaacctcaacccgcagagcgttctgcagaagaagaagtaa

SEQ ID NO: 1485 - DNA, 732 bp, BradyrhizobiumColbertium
gtgtcactacggaaaccaaccaaggcattgccgaacatggccgaggcagacatcgcaatcgttcgtattgccccggagagcagcttcaagaacaaggcgtacgacgcgttgaaggaagccatcctcaagatggacatctattcgacgcccgagccggtcatgctcgacgagcgcgcgttgtccgaacggctcggcgtcagccgcaccccgatccgcgaagcgatcgcgatgctcgagcaggacggtttcgtgaagacggttccgcgccgcggcatcatggtggtgcgcaggaccaagagcgagatcgtcgacatgatccgcgcctgggcggcgctggagagcatggccgcgcgcctgatcaccaccaccgcgcgcaagaaggacatcacggcgctgcgcgacttcttcaaggatttcggcaaggaccgcctgcccgaggatcacgtcgaggaatattcgcgcgccaacatcgcattccaccaggcgctgatctcgctgtcggaatcccccgtgctggtcgatctcaccaacgacctcctgctgcacgtgcgcggctatcggcagctcaccatcggacgcaaggaccgcaccgcgacgtcgctgcccgagcatctcggcatcatcgaagcgctggaagcgcgcgacaccgagctcgccgagaagcgcgcccgcgatcacaccctcgggcttgccgcttacgtcgaagcgcacggccaggaactgttcacttag

SEQ ID NO: 1486 - DNA, 2130 bp, BradyrhizobiumColbertium
atgtccaattccaaagatgccgtccgcaaggtgcttgaccaggtcaaggcggacaaccgcaccagcctgacggcgccggaaggcaagctggtctgcgacgcctacggcattccggtgccgaaagagggcgtggcgaaatcggccggcgaggctgggaagatggcctcgtcgatgggcttcccggtcgtgatgaagatcgtctcgccggacattctccacaagaccgaggccggtggcgtgatcgtcggcctcaagacaactgaagaagccgagaaggcctacgagaccattctttccaacgccaagaaatacaagtccgacgccaagatcgaaggcgttcaggtgcagcagatgctggccggcggcaccgaagtgatcgtcggctcgatcaccgacgcctcgttcggcaagctggtggcgttcggccttggcggcgtcctggtcgaagtcctcaaggacatcaccttccgcctcgcgccagcaaccagggaagacgcgctctcgatgctcgacggcatccaggcacatgagattctgaagggcgtgcgcggcggcgagccggtgaaccgcaacgccctcgctgacgtcatcgtcaaggtttcgcaactcgtcaccgatttccctgagatcgtagaactcgatctcaaccccgtgttcgcaacgccgaaggatgcgacggccgccgacgtccgtatcgtcgtcgacttcgcctatgtacccaagcccaagccgcgcccgaccgaagagatcgtcgcggccatgaaccgcatcatgcagccgaaagcggtcgccgtggtcggcgcctcggccgaagacggcaagatcggcaactccgtgatgaagaacctgatcaacggcggttacaagggcgacatctatcctattcatccgaaggccgccgagatcctcggctataaggcctacaagagcgtcaaggacgtgccaggtgtgatcgacgtcgcggtgttcgcgattcccgcgaagttcgtcgccgcggcgctcaccgaatgcggagagaagaaaattccgggcgcagtgctgattccgtcgggcttcgccgaagccggtgcgccggagctgcaggccgagatcgtcgaggtcggcaagaagtacgacatccgcctgatggggccgaacatctacggcttctattatacgccggccaatctctgcgcgaccttctgcacggcttacgatgtgaaaggccacgcggcactgtcgtcgcagtcgggcggcatcggcatggccatcatcggcttctcgcgctcggcgaaaatgggcgtctcggcaatcgtcggcctgggcaacaagtccgacatcgacgaggacgatctgctcgcgttcttcgagcaggatccgaacaccaacctgatcgcgcagcactgcgaagacctcaaggacggacgcgcctttgctgaagcggcaaaacgggtatccaagaagaagccagtggtcgtgctgaaggccggccgcacgtctgcgggggcgaaggcggcctcctcgcacaccggggcgcttgctggcaacgaccgcatctatgaagacgtgttcaagcagtccggcgtgatccgcgcgcggagcttgcgtcagctgctcgaattcgcccgcggcgtgccagtgctgccgacgccgaagggggagaacgtgctgatcatcacgggggccggcggctcgggcgtgctgctgtcggactcctgtgtcgacaacggtctgtcgctgatgtcgatgccaccggatctcgatgctgccttccgcaagttcatcccgccgtttggtgcggccggaaatcctgtggacatcaccggcggcgagccgccgatcacctacgtcaatacggtgaagctcggcctgtcggacgagcgcatccacgcgctgatcctcggctattggcacaccatcgtcaccccgccgatggtgttcgcccgcaatatggttgaggtgaagaaggagatggaggccaagggcttcgtgaagccgatggttgcctcgctcgccggcgacgtcgaggtcgaggaagccgccgaatatctctaccagaacggcatcccggcctatgcctattcgaccgagctcccggtcgaggtgttgggcgccaagtacagatgggcgcgcggggcagggctgctctga

SEQ ID NO: 1487 - DNA, 969 bp, BradyrhizobiumColbertium
atgttccgatttcccacgcgccttctcggcgcagccgtcgcgctgggccttgcggcagccaatccggcctttgcccaacagctcgagctcaagctgatggcgccggcggctccgggcgggggctgggaccagaccgcgcgctcgatgcagcaggctctggtggcttctggcgtcgcgcgcagcgtgcaagtgaccaatgttcccggcgcgggcggcagtgtcggcatcgcgcagttcgtcaacggagccaagggcgacggcaaccagatgatggtcaacggcttcgtcatggtgggcgcgcttgccatgaacaagtcgccggtcacgctggagcaggtgacgccgatcgcccggctcaccgaggagatccaggtcatcgtggtgcccgcgaattcgccgatcaagaatgcgcaggatctggccgccgcggtgaaagctgatatcgccaaggtgactttcgccggcggctcggctggcggcgtcgaccatgtgatggctgcattgttcgccggcgctgtcggcgccgacccgaagaagatcaactacattccgttctccggcggtggcgagtcgctggccgcgattctcggcggcaaggtcaccgctggcatttccgggctgagcgaatacgaagggcagatcaagtccggcaagctgcgcgcgctcggcgtgacatcggagaagcgcattgccggcagcgatattccaacgtttcgggagcaaggcgtggacctcgtgatcgccaactggcgttcggtggtcgcgcctcccggcatcacgccggagcagcgcaagaccttgagtgatgcggtcgagaagatggtgaagtccgacgcctggaaggagatcctcaagcagaagggctgggaggacgcctatctcggcggcgatgctttcgccgatttcctgaagaaggaagccgtgcgcgtcaccgacgtgctgaaatcggtcggcctcgtcaaatcgtga

SEQ ID NO: 1488 - DNA, 486 bp, BradyrhizobiumColbertium
gtgacctcaggcgattccacccaatcgccccggcgcgtcgatcccgccggcctcgtcatcgctgcgctgctagcaggtctcgccgcggtgctggtctgggatgcacgaggcctgcaatctgtcgcgatgtacgggatggggccggaggccatgccgatcgtggtcgccaccgggctcgcgctgctcgcgatcggcaatttcatcaacgcgctgcgcggcaatctgccagcgcgtgagagcgccgatccagttccggtgcttctgatcctcgtcggcctggcgctgctgattgccgtcatcggcttcggcggcggcttcatcctggcgacctcggcactgttcgtcacgacgtcggcagccttcggacgccgagcgatcctggtcgattctattattgccctcgtgatgtcgacgctcatctatctcgttttcgaccggttgttgacgctgagccttccggccggcccgctggagcgcctcctgtga

SEQ ID NO: 1489 - DNA, 1503 bp, BradyrhizobiumColbertium
gtgatcgacacttttgccgcgctggcccacggcatggcggtcgccatccagccgatgaatctgctctatgccctgatcggcgtgttcctcggcacggccgtgggcgtgctgcccggcatcggcccggccttgaccgtcgcgctgctgttgccggtcacgtacaagctcgatcccggcggctcgctcatcatgttcgccggcatctattatggcggcatgtatggcggatcgacgaccgcgatcctcatcaatacgcctggcgagagcgcgtcgatggcgaccgcgctcgaaggcaacaagatggcgaaggccggccgcggcggcccggcgctggcgacctctgcgattggctcctttgtcgccgggaccatcgccacgatcgggctggcgttcctcgcgccatggctggtcgatgtcgccgtgcgctttggaccggaggattatttcgcactgatgtgcgttgccttcgtcacagtgtcggcaaccttcggcgattccccggttcgcggtttgaccagcctgttcattggcctgacgctgggcctcgtgggaattgacaagctgacaggtcaggcacggcttgcattcggcgtccccgagttgctcgatggtgtggaggtgaccacgcttgctgtcggcctgttcgcggttggtgaagccctttacgtcgcatcgcgccgccgccacaccgaggagaagctcgagccggtgcgcggctcgctgtggatgacgaaagaagactggaagcggtcatggaagccgtggctgcgcggcacgatgtttggctttccgatcggcgcgctgccggcgggcggtgcggagatcccgaccttcctctcctattcgaccgagaagcgcctgaccaaacatcccgaagaatttggcaagggcgcgatcgaaggtgtggcggggccggaagcggccaacaacgcctccgccgccggcacgctggtgccgctcttgacactggggttgccgacctccgcgaccgccgcgatgatgctggcaggtttccagcaatacggcctcaatccgggaccgctgctgttcgctgagcgtcctgacctggtgtggggcctgatcgcgagtctctttatcgccaattgcatgctgctggtcctcaacttaccgctggttggcctgtgggtgcggctgctcgcagttccgcagccttggctctatgcgggcatcctcgtcttcgcaaccatgggcaccatcgccgcgaagccgtcggcaatcgaattgtcgatgctggcgggctttggcgtgctcggcttcttgatgcgccggttcgattttccgatcgcgcccgtcgtcgtgggtcttatcctcggcccgatcgccgaaagccagttgcgcagagccctcgcaatcagcctcggcgatcccatgacgctggcgcagagcccgatctcggcgacgctgcttgcagtcgcgttgatcgcgctgctggcgcccttcgttttgaaggggctcgggcggttcaaggcgaacgaagattag

SEQ ID NO: 1490 - DNA, 384 bp, BradyrhizobiumColbertium
atgaaaacccgtcttgcgatttcgttggctgccgcctcgctgctggcgtcgagctcagcctttgcccagtcgacgaccgcccagggcgccgcggacggcgcgcgcgcggggggtgacatcggtggaccgatcggtgcgatggtcggtgggaccgttggggcagccgttggcgcaggtctcgaaatcccgaatgcgattctgggcgggatcccgcgcagtgactccgtcgtggtccaggagcgcgtcgtcgtcggcgaaccgcttccttcaacggtcgtgctgcgcccggtgccgaactacaccgagtatcgctatgcggtcgtgaacgatcgccgcgtgatcgtcgagccgcgcacgcgccgcgtggtcaagatcatcgactga

SEQ ID NO: 1491 - DNA, 378 bp, BradyrhizobiumColbertium
atgtccattttggttcgttccactgcctggctgctggcagccgccgtcactttcgcaaccctcggcccgccgggcctgcgaccccattccaatcttggccaggacggcgaacatgcgctcgccttcatcctggtgggacttgccttcggcctcgcatatcggaggcgacgtttgctgattgcggcggcatcggtcatcctcatcggcttgctggaactgatgcaattctgggcacccgggcgtcatgcgcggctggaggactttctggtcgatgcatccacggcctgcctcggctttgccctcgctgccgctgtcgactgggccatgacccggcttcgcccaaattcgaccctgacgagcgaaggccccgcggagtga

SEQ ID NO: 1492 - DNA, 597 bp, BradyrhizobiumColbertium
gtgagcgcgcgcaataccaaggtgatgaaccgcttcgatgtgacctcgcggctgatcacgaaactcaagcacgaagaagcggtgatcggcggtatcggcaacaccaatttcgacctctgggccgccggccaccgtccgcagaatttctacatgctgggcagcatggggcttgctttcccgatcgcccttggtgtcgcgctggcgcagcccgagcgccgggtctttgcgctcgaaggcgacggttcgctactgatgcagctcggcgcgctctcgacgatcgccaccctgaagccggaaaacctcacgatgatcgtgatggacaatggcatctaccaaatcaccggtgcgcagccgacgccggcagcgaacgtcgccgacattgtagccatcgccatcggctccgggctcgccaacagcgcctgggccgcggacgaggaggatttcgagcggctggtcgaagaggcgttggccgccagggagccccgcctgatcgcggtccggatcgatgacaagccaggcgtcggcaccacccgccgcgaccccgtgcaaatccgggaactgttcatgcacggcctcggcgtgcgcgagccactttaa

SEQ ID NO: 1493 - DNA, 567 bp, BradyrhizobiumColbertium
atggcggttgcggaacagcagacctcgcgccaaccgacacaggaatccggcggaagaagctggcacaccatcgtcctgcaaaccctgaagcggaacgagatcagcctcatcccctacgtgcccgatcgcgttctgacgccgctgatcaagaacctgcatgctgatcccttcttcaccacctttgccaccgcgcgcgaggaggaagccgtcggcatcgtgtcgggcgcctggatgggcggccggcgcggcgcggtgctgatgcagacgtcgggctttgccacgctcgccaatgtgctggcctcgctcgcggtgccctaccagattccgctcatcatgtttgtctccgagcgcggcacgctcggcgagttcaactacggccagtcactggtctgccgcaccatgcgtccagttctggattctctggcgctggagcaccacaccatcacccggctcgacgagctcgaattcatcgccgaccgctcgatcaaacaggccgtcaccacgcaggcgccggtggcgctgatcctcaacccgctgctcaccggcggcaaggtgttcgacaagtga

SEQ ID NO: 1494 - DNA, 1050 bp, BradyrhizobiumColbertium
atgtccgtcaacaacaaacgcgtcttctacgtcaaatacctggccaatccgatctatatcgacatcctgaaggcgcggcccgacgtcaggctcgatcggatcgagaacgagagcccggaagatttctacgcgccgatcctgagcgccgcccatgtctaccagatcggcgcggcccgtgacgagctggcgccgcatttccacgtggacgcggccttcctgaagcggacgccgaacctgctgctggtctccagcaacggcgccggcttcgacccggtcgatgtcgaggcttgcacggacgcgggtgtcgtggtcgtcaatcagtccggcggcaacgcccattcggtcgccgagcatgccctggcgatgatgctgaccctctccaagcgcatcatccaatccgaccgtcgcttgcgccgtgagcgcgatgtcaaccgcaacgaactcgtcggaaacgaggtcgagcacaagaccgtcggcatcatcggtctcggcaatgtcggccggcgcattgccgctctgtgcaaggggctgctcggcatgaaggtgctggcctacgatccgtacctttcggccgaggtcatggccgagcggggcggcgaaaaggtcgagctcgacgagctgctgcgccgctccgatttcgtatcgatctcctgtccactcaacaagggtagccgcaacatgatcagcgttcgagaattcgcgctgatgcagccgcatgcctatttcatcaccaccgcgcgcggcttcatccacgacgaggacgcgctgctccaggcgttgcgcgacaagcgcatcgcgggtgccggcctggacgtctggtccaaggaaccgccgccgccggaccatccgctgcttcagttcgacaacgtgctggcgagcccgcacactgcgggcgtcaccatcgaggcccgccagaacatgggtcgcatcgcggccgaacaggtgctggacgtgctcgacggcaaacgtccgcctcgcatcatcaatcccgaagtctggccgcgctatgcggagcgcttcaagcaggccttcggcgtgaccccgggataa

SEQ ID NO: 1495 - DNA, 213 bp, BradyrhizobiumColbertium
atgtctctctatgtcgtcaggttcatgaaggacgtgctcggcgagtatggccggcagagcgagatctgccagggtacactcgagatcgaggccgccgacgagaacgaggccagggaacgggccaaggcgaagttctgcaaggaccaggcattgcatcactggtcgctgcatgccgaccgcattcatgtgaaaccggcggactttccgtcctga

SEQ ID NO: 1496 - DNA, 576 bp, BradyrhizobiumColbertium
atgaacgaaacggctgtgcgcgcgagtgacgaacccgttctggtcaggtcgtctcgggaaagcgatgtcgaggccatgctggcgatctaccgccatcacgtccgcgctggcgtcccacgcgatgtcgagggaaccggtgcgccggagccggacgatctgcgcgaccggcgcaagaacctgaagcagacccgcctgccgcacctggtcgcgacctatcgcggcgacatcgtcggctatgcctatgccgtgctgttccgcaagcgtccggcctatcgctacacggccaagcattcgatctacgtccaccacgcgcatctcggccgcggagtcggacggttgttgctccaggaattgatcgattgctgtgcggcagccggctttcgccaaatgatcggttacatcgacgccgacaacgccgcctcgctggcactgcatcaaaaattcggtttcacacgcgccggcctgctctgcggcgtcgcctatcgccacggccgctggtcggacacggtgatggtgcagcgatcgctcggcgcaggcacgacgacacctccgccaagtgcgacgccgggccggtga

SEQ ID NO: 1497 - DNA, 2385 bp, BradyrhizobiumColbertium
gtgtcttcgccatattcgggacccgacatggactatttcaagcgcttcaatttcctgttcgccgcacctgtgttcgacagcgacgacctcgaaggcatccgcttcaaccagatcatcgaggaaatccagcgctccggcttcgaagtggtccgtgcccgcaagctggaagatgccgagatggcggtgcagaccgatgcagcgatcggttgcatggtggtggattggggcaagaaggggctcgaagggaagacctcggcgctgatcaatctgatgcgccgccggggcctcgacttccccatcatcctgctgatccgccgcaagcggttcgaggatctgccggtcgaggtgctcgatttcatcgacggctatgtcttcctctccgaggagacaccgcccttcatcgccaagaacctgatcagccgcctcaagcaatatgccgagacgctgaagacgccattcttcggcgcgctggtcgattatgccgaggaaggcaaccagctctggacctgtccgggccacaacggcggcgtgttctataaccgcagcccgatcggacgcgtcttcgtcgagcatctcggcgaatccgtgttccgcgacgacctcgacaattccgtgctcgaccttggcgacctcctcactcatgagggcccggcactgaaggcgcagaaggaagcggcggcaatcttcggcgctgagaagacctatttcgtgctcaacggcacttcgacctcaaacaaggtggcgctcggcgccctggtcaccgacggcgatctcgtgctgttcgaccgcaacaaccacaaggccgcccatcacggcgcgctcatgatcaatggcggcatcccggtttacgtccccgccgtccgcaatgcctggggcctgatcgggccgatgcgttgggacatgctggacgagaaggccctgcgcgaggcgatccgcagccatcctctcgtgaatgaccgcgatgcctggcgcaaggagcggccgttccgcgtggccgtggtcgagcagtgcacctatgacggctcgatccacagcgccgagatgatcatcaagcgcatcggccatctctgcgactacatcctgttcgacgaagcctgggccggcttcatgaagttccatccgctgtatgccggccgcttcgccatgggtcttgccaatctccctccggaagcgccgggcatcatcgcgacccagtcgacccacaagcaactcgcgagtttttcgcaggcttcccagatccacatcaaggatcggcatattcggggccagaagcgacgggtggagcaccgccgcttcaacgaaagcttcatgcagcatgcatcaacgtctcccttctatcctttgttcgcctcgctcgacgtcggcgcacagatgatgaagggccgctccggtgaagtgctgtgggacgacacgatccggctgggcatcgagctgcgcaagaaaatccgcgcgatgcggcgggagttcgaggagaacgagcagaagacggatcgccgctggttcttcgagcccttcgttcccgatcgtgtcgccattcccgacgtaagccgccccggcgccgcccataacgtcgcctgggagacgctctccaccgacgaactcgcgagcaatcccgcgcggtggcagctctctccggtcagcaactggcacggctttcccgatctagaggaaggctttgccatgaccgatccgaacaagctgaccttgctcacgcccggatttgatcgtgcatccggcgcttatgccgagcacggcatccccgcccccgtcgtcgcgcagtacttgcgcgagaatcgtatcgtcccggagaagaacgacctcaactccctgctcttcctgcttacgcccggcgtcgaggcgagcaaggccggcacgctgatctccggcctcgtcgcgttcaagcgtctgcacgacgacaatgcgctgctggccgaggcgatcccggaattccatcagcggcggcaggcgcgctacggcggcgttcgcttgcgcgatctctgcggcgacatgcaccgcttcttccgcgctgccgatgtcagcgcgctccaggcgcggcagttcatgcccgagcacatgcccgagatcgcaatgtcgccccgcgatgccgcgcgccatctgttccgcaacgatgtcgattatctgccgatcgaggccctcgcgggccgcatcgccaccacgccgttcgtggtctacccgcccggcatcgccaccatcgtgcccggcgagaggctgacggagcgggccaagcccatgatcgattatctcaagatgttcgagacctgcttcaacacgttccccggcttcgatgtcgaaatccaaggtgtctacaaggaggtcgatgcgaaagggcgcatcgggctctacacttacgtcgttgccgagtag

SEQ ID NO: 1498 - DNA, 2202 bp, BradyrhizobiumColbertium
atgaacgcctatgtcggaacaccaacgtcgcgaatcgacggccgcgccaaagtcactggcgccgcgaaatatgccggagaattctccgccgatggcctcgtccatgggtttgtggtggaggctaccataccgcgcggtcggatcgtgcggctggatgccaccgaggcgctgaaggtggccggagtgctcgaggtgctcacgcacgcccatcgtcctcccctcgccgacaaggatgaggcctggaaggacgaggtggccccggagggcttgccgttccggccgctgtatgacgacatgatcaagttcaacgggcagccgattgctcttgtggtcgccgaagaatgggagaccgcgaagttcgccgccacgctcgtgcggatcgactacgagcaggatgggtttgccaccgacctcgaggccgagcgcggcagggcaagcgaaatggacaagccgcacaagccccgcggcgacgccaaagcagcgcttgcggccgcagccctgcggcacgaagcggactacctcgttccgaccgagcatcacaacccgatggagctttatgcgacgacgacggtctgggaaggcggcggcaagctcaccgtctacgacaagacgcaaggcgtccagaacgtgcaaaagtttctctgcgctgtgttcgacaagaagcccgaggagatccgcgtgctttcgccctatgtcggcggcgcgttcggttccggcctgcggccgcaataccaggtggtgttggcgacgctggccgcgctcgcactcaagcgctccgtccgcgtcgtgctgacacggcagcagatgtacgggcttggatatcggccgatgaccatcgagcatgtcgcactgggggcgaggcccgacggcacgctcgatgcgatcagccatgaagccattgccgtaacctcacgctacgaggacttttcccgcaatgacaccggctgggccgagcagctgtacaaaagctccaacagccacttttcccacaagctggtcgacctcgacgtctcgacaccttgcgacatgcgcgcgccgggtgcggcttcgggcgtctgcgcgctcgaatgcgcgatggacgaattggctgtcgcgctcaaactcgacccgatcgagctgcgtctgaagtgctactcggatcgcgaccagagcgagggcctgccctacaccagcaagcagttgcgccaatgctacgcccgcggcggagaagcgttcggctgggcgcggcgtaaccctgcgccacgttccatgcgcgagggcaaggaactcgtgggctggggcatggcgacgggggtgtgggaggcgctgcagatgccggtcgccgtccggatcgtgctgacggccaacggccatgccgaggtctcgtgcgcggcatccgatatcggcaccggcacctacaccatcgtggcgcaggtagcggccgatgccctcgggctgccgatcgagaacatcagcgtccggctcgctgattcgaccctgccgcaggcgccggtcgagggcggctcctggatggcggcctccagcgcgcacgccgtgttgggagcggcggaagaaattcgccgggaactcgtacacctcgccaaggcaatcccgggctcgccactcgccgacctcgacgcggccgccgtcaccctggtcgatggcatgatcgccggtaacggcaagagcggggctgccgtctcgattccggatgccatgcgccacagcaagctcgagcggatcgaaaaggagaagctcaaccagttcgcggaagacaaatcacacgcccgcaacacgcattcggcggttttcgccgaggtgaagatcgatgaggagctcggcgtgatccgcgtcacgcgtgtcgtgagcgcggttgcggccggacgcatcctgaacaccaagaccggccgcagccagatcatgggcggcgtggtctgggggatcgggatggcgctgcacgaagagacggtgatggatcaccgcttcggccgcatcatgaacgcgaacattgccgagtaccacattcccgtgaatgccgacatccgcgacatcgacgtcattttcgtagacgagcccgacgaccggatcaacaggcttggtatcaaggggctcggcgaaatcggcatcgtcggcgtgcctgcagcgattgcgaacgccgtctatcatgccaccggcaagcgcatccggcgcttccccatcacgctggacaagctgctggactga

SEQ ID NO: 1499 - DNA, 1017 bp, BradyrhizobiumColbertium
atgaacaacttccagtattcccgcgcaggcgacgtcgcagatgccattcgcctgctcgccgccgatccaggcgcgaagctgattgccggcggcaccaacctgatcgatctcatgaaggagaatgtcgaacggccctcccggctgatcgacatttcccgtctgccgctccgcgacatcgaggagacggccgacggcggcttgcgcatcggcgccttggtgccgaattcggacctcgcctaccatcctttgatcaaccagcgctatcccctgctcgccagcgccatcctggccggagcctccgcgcagctgcgcaacatggcctcggtcggcggcaacctgatgcagcgaacgcgctgcccctatttctatgacacggcgacgccttgcaacaagcgacgtccgggcacgggctgctcggcactcgacggcctcaaccgcaaccatgccatcctcggcaccagcaagtcctgcatcgcgacgaacccatccgacatgagcgtggccttggccgcactcggcgcgctcgtgcacattgcggggcccatgggtgcgcgtagcgttgcgctgacggacttccaccggcttcccgacgacaagccaaatctcgatacgatactgggccgcagcgagatcatcaccgcgatcgagctgccgccgcacagctttccgaggaactacagctatcttaagatccgcgaccggctgtcgtacgccttcgctctcgtatcggtcgcggccgcaatcgagctggagggcaacgcgatcagcgaggcccgcctcgcgctcggcggcgtggctcacaagccgtggcgaagcatggaggccgaggcggccctgcgcggtcaggcggcaacgccggatcattttgggcatgccgccgacttgttgctgcagggagcaactcctcgcgcgcataacggcttcaagatcgcgctcgcgcgcagagccgtcgtgcgtgcgctgatccaggcggcaagcgccacaccacaatcacaagctcacaagaagatcgcgtga

SEQ ID NO: 1500 - DNA, 492 bp, BradyrhizobiumColbertium
atggccgacatcacggatcagatccccgaacgcattccgatcaacctcgttgtcaatggcgcaaggcgcacactcgaggtcatgccgtggaccacgcttctggatgccctgcgtgaccgtctggacctgaccggcaccaagaagggctgcgatcacggccaatgcggcgcctgtaccgtgctggtcgagggaagacgggtcaattcctgcctgaccctcgccgtcatgaaggatggggccgaggtcacgacaatcgaaggcctggtcaaggatggcgcgctgcatcccctgcaacaggccttcatcgaccatgatgccttccagtgcggctattgtacgcccggacagatctgctccgccgcaggcctgctggccgagggccgcgcgcgggatgccgacgagatccgggagctgatgagcggaaatctctgccgctgcggcgcctatcccaacatcgtggccgcgatcgagcaggcaatgagccggtcatga

SEQ ID NO: 1501 - DNA, 480 bp, BradyrhizobiumColbertium
ttggccctcgaccggaaagacctcgccatcctggcggaactgactacgaatgcgcgggccagccataccgagcttgcgaacaagatcggcctgtcgagcacggcgctggcgcggcggcagaaaacgctagaggacgacggctacatccaaggctaccaggccgcgctcgacctcgcccagttcggcctgaccacgacggttctggttcgaatagccctggagagccagagcgatgacgcactcaaggcgttcgaggcggaggtggtgaaatgcccctccgtcgtgcggtgcttcctgatgtccggtaccgacgactacatcctgatcgtgctggcccgcgacatccaggacttcgagcgcatccaccgcaccgagctatcccgcctgccgcgcgtcgcgcgcgtgcaatcgagcttcgcattgcgcgagatcgtcaaccgagcggtgccgaccgtggtgttcggcgagacgaagcgctga

SEQ ID NO: 1502 - DNA, 1155 bp, BradyrhizobiumColbertium
atgaagagcggaatcaaggcgttggcaagggagatcaagatgcgcgtcggtgtgcccaaggagatcaaggtgcaggaatatcgcgtcgggctcaccccgggcgcggtccgcgaatatgttgccgccgggcaccaggtcacggtcgagacaggcgccggcaatggcattggcgcgcccgacgaggtgtatcggcgggcaggggcgtccatcgccgagacggcgcgcgagatctttgccaagtccgagatgatcgtgaaggtcaaggagccgcaaaggagcgaatgggtccagcttcgtgaaagccagatcctcttcacctaccttcatcttgcgccggatcctgagcaggccaagggcctggttgattccggctgcaccgcgatcgcctatgaaacggtcacggacgcgagcggtcacctcccgctgcttgcgccgatgagcgaagtcgccggccgcctcgccatcgaggccgccggcgccgcgctcaggcggtcggccggtggccgcggactgctgttgggcggggtgcccggcgtgcagccggcaagaatcgtcgttctcggcggcggcgtcgtgggcacgcaggccgcgcgcatggccgccggcctcggtgccgaggtcaccgtgatcgaccgctcgatcccgcgcctgcgcgaactcgacgatctgtttgccggacgcatgcgcacgcgtttctcgaccatcgagtcggtcgaggacgaagtgtttgccgccgacgtcgtgatcggcgcggtgctggtgccgggcgcgagtgcgccgaagctggtcacgcgcgcgatgctgaaatcgatgcgacccggggcggtgctggtggacgtcgcgatcgaccagggcggctgctttgagacctcgcatccgaccacgcatgcggatccaacttacgaggtcgacggcgtcgtgcattattgcgttgccaacatgccgggcgcggtgccggtgacatcgagccaggccctcaacaatgcgaccttgcccttcggcctgatgctcgcgaacaaggggtttgcggcggtgctggaaaacccgcatctgcggaacgggctgaacgtgcatcgcggccggatcacgaacaaggcagtcgcggagagcctcgggctggaatttgctcccgtggagagcgggctcgcggcctga

SEQ ID NO: 1503 - DNA, 1938 bp, BradyrhizobiumColbertium
atgaacatcgtatcacaacacaagccgcttgatcttgcctccgcaatagccgagggcgatatccgctgcctgctgatggtgctcgtgcacatgacgggcgacgagaaatggctcgcaccgctctatctgcccaagcgtgacatccgcctcattcctgatccggaggccggcgttccccgcgagatccaggacgaaatccgcgccgccgtggtcaagctcttcgcagacggaacgccgaatcctgtcatcaacgatcccggcgaagagctattgctgaggatgatgcgagcctgtctcggcgagaacgtcgcgccggaatatgcgccgctgatgcgcgaggagatgggcttcgtgccgcgcgaggcgcgctggacgacacgcccttccgaccacaagctcgccgaccaacatgtgctgatcgtcggtgcgggcgtctgcgcgattgcgctgggcgtggcgctcggccatctcggcatcccctacaccatcgtggagaagaacgaagagctcggcggcacctggtggatcaaccgctatcccggatgcggcgtcgacacgccgaaccactcctattcctattcattcggctcgcgcaacgcatggacgcgctacttctgccaacgcgaggagctgctcggctatctgctgaaggtcgcggacgaatacggcattcgcaatcatctgcgcgtcaacaccgagctgacctcgtcgcgctgggacgaaggcaagcggcgctggatctcgacgctcagtacgaaggatggcgaggaagccttcgaatccaccgcgctggtctcggccatcggccagctcaacgatccctcccgcgcgcacttcaagggcgaggagagcttcaggggcacgatcctgcattcggcgctgtggaccgacgacatcagactcgacggcaagcatatcgccgtgatcggcaccggcgccacctcgatgcagctcgtgccctcgattgccggccgcgccgcgtcggtcacggtctatcagcgcagtgcgcaatgggctcgcccggtcaagggctatgccgatccgatcagcgagggcgcacgttggctgctggcgcatctgccattctacgcgcagtggtaccgcttcaacatgttctggcgctacggcgacggcctccttcctttcctgcgcaaggacccggcctggccccatcccgagcgcgccgtcaacaaaggcaatgaccggcaccgtcaggagctgaccgacttcatccactccgaattgcagggccggccggatctgatcgagaaatgcgtgccgacctatccgccctacggcaagcgcatcctgctcgacaacaactggttcaagaccttgaggcgagacaatgtcgagctcgtcaccgatgcgatcgaccatttcgatgagaatggcatcgtcaccgccgacggcaagcagcgtggggccgacatcattgtcgtcgcgaccggcttcaaggtgacggagatggcggcgcgcctcaacgtcaccggccgtcacggcaaggatttgcgtgaggcctgggccaacgacaatccgaccgcattccttgggctgaccgtaccaggctttccgaacttcttctgcatgctcggtcccaactccgggccagcgcatggcggcagcgtcatcttccagtccgaatgccagagccgctacatctccgcgtgtctggtcgacatgatcgagcgagacatcgcggcgatcgatgtccgccaggacgtgctggacgattatgtccaaaaggtcgacgccgagcacgaggcgatgatttggacccatccgggcatgagcacctattatcgcaacagcagcggccgcgtgttctcggcgatgccgtggaggttcgtggattactggcgcatgactcacgatccggacctggggcagtacaggctgacgaagcgtgactccagtgccggcgcggatcggctttag

SEQ ID NO: 1504 - DNA, 648 bp, BradyrhizobiumColbertium
atgacgcaaagctccgccaccgccaaggtaacaaagctcaagcgcgtcgagcgcaacgcctggaccaagcagaggatttttgaggcggccacgaaggtcgtgggcaagcatggctatgcggaagcttcggtggcgcgcatcaccgaggaagctggcgtcgcgcaaggtaccttctacaatcatttcgagaaccgccaggaattgctcgaccagctcctgcccaagatcggcctcgacatggtcgagttcatccgcgcccgcaccggcacggcggatgcggcacggcaggagatcgcgcggttctgcgccttcttcgacttcatccgcgaggtgccggaattcctgcgcatcctcaacgaggccgagttcttcgcaccgatcggctaccagaagcatctcgacaacatcgcgacggcctatgtccgcatcctgcgccgcgcccggcttgccggcgcgatcgaggactacagcgacgaggaattcgaggcgatcgttcacatgctgatgggctcgcgcggctatctcagtcgccgctattcctattccgaaaacggcgtcactgccgtaccggaccacgtcatctccgcctatcgcaagctgatgacgcgcggcctcttcactgcgttggaagatcaggacacgccatga

SEQ ID NO: 1505 - DNA, 309 bp, BradyrhizobiumColbertium
atgatcatctccggcggcgagaacattgcctcgtccgaagtcgagcgagtcatccacgaattgcccgaggtgcgcgaagtcgccgtcatcggcctgcgcgatgcgcgctggggcgagcggccggtcgcggtcgtcgtgctggcggacggcgcgagcctcgagctcgctgcatttaccgagcactgccgcgcacggcttgcgagcttcaaggtgccgaagcagatcgtcatccgcgacagcctgccacgcaatccatccgggaagatcctcaagcgcgtgctgcgcgctgaattggaggctgcggaatga

SEQ ID NO: 1506 - DNA, 1260 bp, BradyrhizobiumColbertium
atgacgaaaacccgcaggccgggcatcagccgccgttcaacactggcgctgatgggcgccggtgcgatgagtgttgccgcgccctgggtggcgcgagcgcaagccaagaccatcaagatcggaatgccgacgattttgtcgggacgcgtggcgcagctcggcacgtcctcgcgcaatgcggtgatgctcgaggtcgagaaggtcaacggggccggcggtcttgctggccggcagatcgagatggtgatccgcgactccaagggccaaccgcaggaagccgcgcgggtcgcgcgcgaactcgtcaacaccgatggctgcgaattgctgctcgatggcgaagcgtcgtccggatcgttcgccgtgcatgaggtggcgcgcgatctcggcgtgctctgcatccacacctgctcggaagcttcctcgctgacggccgacccgaagcagcgcatcccgaatgcgttccgctgcgtgcgtcaaggtatccacgattccatcgtcggcggcagctacgccgcttcgatcgccaaggcgaagggcttgaagaaatgggcgacctgctcgcccgactacgcttatggccgcgacactaccggcgagttcacgctctacctcaagcgcttcgcgcccgacatcgagatcatcagcgagtcgtggccgaagctgttccaggccgactacaccgaagtggtgacgaagatcctgcaggccaagccgcaggcgctgtattcctgcctgtggggcggcgatctcacttcctatatcgaccaggcgaacatctacgcgatgttcagccagatggaggtgttcgccgtcaacatggccgactacaccgcgctcaccgtggtgaagaacctgccgaagggcatccactccggcaaccgctacatcaagacgtttccgaccacgccggagaacgcggcgtggggcgatgcctacaaggccaagtacaacgaatacccgaccaattggtcgtggcagaacgcgaccgcggtgatgttcctggccgaagccgccaagaaggcgaactccgccgacggcaagaagatcgccgaggtgttgaagggcctcaccatcaagtgtccgttcggcgccgacggcaccgtcacgatgcgtggcgacgatcacaccctggtcggctacgccatcggctggggcaccacgatcccgcaggagccctatgtgcccgaggtgaaggccggagactggaagaccatcttcgagctcgaagccgagtggaagaagagcaagggctatacctga

SEQ ID NO: 1507 - DNA, 903 bp, BradyrhizobiumColbertium
gtggatcttgacgcgcttgccggctgcctctccagttctgcttgcctggtgacgcagaccaccagcggcctcatcatcggcatgctccttttcctggtcgctgtcgggctgaccctgatcttcggggtgctcaaggtggtcaatttcagccacggcgccttctatatgttcggcgcctatttcgccatgacgacctatcagctcacggagagcttcgcgctggcgatgctcgcgggcgccgctggcaccgccattcttggcctggtcttcgagcgcgtcttcatgagccgcgtctacggcgctgacgtactgatgcagctcctcgtctgctatgccttcgtgctgatcttcgacgatgtcgtgcgcatcatctggggacccgagttcaaggccatgggcatgccggcggcattccaggtgatgccgctgttcatcgccggcggcgtcgtgccgccgtattacttgctgctgatcggggttgcgcttgtcgcggcgatcgtgctcggccttgggctgtcgcgcagccgcatcggcaaggtgatccgtgccgccgcgcacaatccaggcatggtctccgcgctcggcatcaacaccggtttgatctatggcggcgtcttcgcgctcggcggcatgctggcggggcttgccggcgcgctggctgcgccggtgcggtcgctcaccccggggatgggattctccgtgctgatcgaatccttcatcgtcactgtcatcggaggcatgggctcgatcctgggcgcgctgatcggcgcgttgctgctcggcctcatcaggtcgtttggctcgcaaggctttcccctgttcgtggaagggctgatgtatttgttcatggtgatcgtgctggtctccaagcccaccggcctgttcggcaaggaggcggcatga

SEQ ID NO: 1508 - DNA, 1020 bp, BradyrhizobiumColbertium
atgaccgaactcgaggccggacgcgcgcagacgctggtgccggcgcgcagcggcgcggcgcttcagcgctaccgcgacgtgttgattgcgctgattgccttcgcggtgcttgcgagcttgccgctgttcacgggcagcaaggcgctgctcgatttcgtcatccgctgctcggcctatggcctgttcgcgacctcgctcaatctgctggtcggctacaccggcctgacctcttttggtcatggcatgttcttcggcctcggcgcctatagcttcggcctgatcatgcagaagctgggcgttccaattccggtggctttcgtcgcgacattggccatcacggcggtcgttgcggcgatcatcggcgcgatctgcgtgcggctgaaggagatctattttgccttcgtcacgctcgcgttccagatgctgattcattccacgatcctgtcctgggcctcgttcaccggcggcgaccagggtctgcgcggcggcattccgcggccggtctttctcggcatcgatctgtccgatcacgtccatctctatgtcacgagctgcgcgctgctcatccttggcctgctcgcgatgcaccagatcgcgcagtcgccgttcggctatacgctgcgcatgatccgcgacaacgcagcgcgcgcgagcttcctcggcattgacgtctggcgcgccaagctcaccgtgttcgtgctggcagcgctgtttgcctcgatgggcggaatggtgatggcgttgttcgtctcgggcgcttacccggaattcgcctattggacgatctcgggggagggcatcttcatcaacatgctcggcggcgtctcgactttcctggggccgatggtcggcaccgtgctgctgctgctgctcaatgacaccgtgacgcgcttcaccgaatatcacggcatcgtgcttggcgtggtcatcctgttcttcgcgctgggcctgcgcaagggcctgctcgatttcgtcgccgattggcttgcgcagcggcgtgatgcaggcgaggggcgttag

SEQ ID NO: 1509 - DNA, 756 bp, BradyrhizobiumColbertium
atgctcgagatccgcgacctcgcaaagtccttcggcggcgtgaaggcgaccaacgatgtctcgctcgccttcccggacggctcgctcactgccgtgatcggccccaatggcgccggcaagagcacgttcttcaacctgatcaccggggccttgaagccggattccgggcaggtcctgctggacggcgtcgaccttgccggccgctcgccgccggagatcgtacgctacggcatcgggcgcgcctttcaggtcgcgagcatcttcaaatcgctgacggtgcaggagacgatgctcgctgccgtcagcgccgaccagcgcacgtccgcggtgctgcacaagcgctttccgctgccggagacgcgcgaccgcgcagagcatgtgatggaactcttgggcctcgccggcaaacgacatcgcaccgccgcaacgctgtcccatggcgatcagaaactgctcgatatcgcgctggctttggtgctcgatccaaaggtgctgttgctcgacgaacccaccgccggcatggggccggaagagcgctggcgcatgatcgacaaggtgcgcgagctctgggagacccagaagatcaccgtcgtcttcatcgagcacgacatggacatcgtattcaagatcgccccgaagatcgtcgtgctctgctatggccgtattctcgcgaccggtacgcccgatgagatccgcaagaacagcgccgtgatcgatgcctatctcggcaccgaacatgcgggagctgctgcatga

SEQ ID NO: 1510 - DNA, 711 bp, BradyrhizobiumColbertium
atgagcgccgtcatcgaagtcgccgatctcgacgtctattacggcaccagccagatcctgttcggcgtcggtctctcggtgcggcagggcgagaccatggcgctgctcggccgcaacggcgccggcaagtcgacgacgatgaaggcgatcatgggacttgcgccgccgcggcggggcagggtcagcctgcgcgggacggtgatttccggccagaagccgcatcgtatcgcgcgtgccggcctcggcttcgtgccggaggatcgccaggtgtttccggagcacacggtcgaggacaatctcgtcatcggcaggaagaaggggccggaaggtcaggacgaatggccgatcaagcggatctacgaggtctttccgctcctcgaaccgctgcgccatcgcatcgccgggcgcctttccggcggcgagcagcagatgctggctatcgcacgtactctgatgggcaatcccgcgctgctgctgctggacgagccaagtgagggcctcgcgccgatcatcgtgcagcggatcggcgaattgttgcggcagcttcgccaactcggttcgaccgtgctgattgccgagcagaacatgcatttctgcctggggctggcgagccatgcgacgatcatcgacaagggccagatcgtctatgcagccgggatcgacgaactgaaggccaacgaggccatccggcggcgttatctggccctgtag

SEQ ID NO: 1511 - DNA, 219 bp, BradyrhizobiumColbertium
atggaacgcactggatttgagcccttcggcgagcaattggtgtccgcaacggacagccagccgaagttgagtgcctcgaagctcctgctgcgaactggcacgacgctgttctggtcgctggtcgccggcatcgtgctcgcgcgtgcggccttcttcgagccgggcgtctatgacggcttcagccgggttgcctcgctcgccaagagcctgatcttctga

SEQ ID NO: 1512 - DNA, 1059 bp, BradyrhizobiumColbertium
gtgtcgcagaatcaagcatccagcccggccgatacgaagccggcatccgccgcgagccgcattgcggcgctgattcccggcatccttctctgcgttttgctcgccggtgtctcggccctgctggagcacgccgagttgggcatgttcgagcatccctatgtcgaggcgctggtgatggcgatcctgctcgggatggcgttgcgcagcttctggaagcccgcgccgcgctggcaagccggcatcgccttcagcgccaaacaactgctcgaagtcgcggtgatgttgctgggcgcctcgatcagcttcgcggcgatagcggcctcaggcatcgcgctgctggcgtcgatcgcggccgtcgtcgtgattaccctcggtgtctctttcggcctcagccgtatgctcgggctgtcgacacgtctgtcgatcctgatcgcctgtggcaactcgatctgcggcaattcggcgatcgccgccgtcgcgccgatcatcggcgccaacaacgacgagatcgcatcttcgatctccttcaccgccatcctcggcgtgatgatggtgctgggcctcccgctgttaattccgctgttgcagttgtctgcgacgcaatacggcatcctcgcaggcctcaccgtctatgccgtgccccaggtgctcgcggcgacggtgccggccggactggtctcgacgcagattggcacgctggtgaagctgatgcgagtgttgatgctggggccagtcgtggtgggcttttctctgattgcctcgcgctggcaaaccgatgccaagaagaccaatgtcggcttcttccgccttgtgccgtggttcatcctcggcttcctcgccctcgcgacgctgcggtcgctcgagatggtgccggcgactgtggtcggccccgtgaccaagatcaccggctttctcacggtggtctcgatggccgccttgggcttgggtgtggacgtccgcgtgctggcgaacgtcgggggcagggtgaccgccgccgtgacgctgtcgctgatgctgctgctcggcatcagcatcgcactggtgcactggttcaagtga

SEQ ID NO: 1513 - DNA, 873 bp, BradyrhizobiumColbertium
atgagcgaagtccttgcggccaaggcaaagggccacatcgaggtcaagaacttctccctcgcctacgagaccatcgagggagcggtgcaggccgtcaccgacacccagatccatgtgcggcccggcgagttcgtgtcgatcgtcggcccgtccggttgcggaaagtcgacgctgctcaatgccgtcgcaggcttcctcaaaccgacgacagggatcgtcaccgtcgatggcgaacgcgtcaacggcccgagcgccgaacgcggcatggtgttccagcaatattcgctgttcccctggaaaaccgtgcgcgagaacgttgagttcggcctcaagatgcgcggcatgccccgctcgcaacgcgagcgtgccgcgcgcacgctgctcgggcttgccgggctcgaggcgttcgagaaacattatccggaaaggctctccggcggcatgaagcagcgcgtcggcatcgtacgcgcgctcgcgacggggccgaaagtgctgctgctcgacgagccgttcggcgcgctcgacgcgcaaacgcgcgtcatcatgcagcagatcctcaccaatatgtggcaacggctgaagatctcggtgctgttcgtcacccacgacatcgacgaggcgattttcctgtcggaccgcgtctactgcatgaccgcccggcccggctcgatcaaggcggaaatcccgatcccgctggagcgaccgcggcagcaatccatgatgatgtcgtcggaattcctggccctgcgccgcgggctgatgtcgctgatccgcgaggagagcctgaaggctatgggcggcgagatcaacgacctgggcatgcagggactcaacatcgaactccacggccattcgctggccgacgtgatctag

SEQ ID NO: 1514 - DNA, 837 bp, BradyrhizobiumColbertium
gtgcccgccgtctcgccagccgccgcaccgccctccttcggcacgctcgtcctacgctggtaccgcctgaaccagggccggttgcgcgcgaccgcgatcggcgtcatctcgctgctcgcgttcctcctggtctggcacctgctcacgacctatcgcgtcgtattcttcgtgcgcttcaccaatgtgccctcgccgctcgcggtttatgcgagcttcaccaaggcgatccacgaccccaaattcctgatgcatgtgctgctcagctgccgccgcatcttcatcggcttctcgctcgccgccatcgtcggggtgccgctcggcctgatcatgggacgcttcaagctggtgcacgagctggtcttcccggtggcggaggtgctgcggccgatcccggcgatcgcctgggtgccgatggcgatcatgctgtggccgaccaacgagcagagcatcgtctacatcacgttcctcggctcgttctttccgatcctggtcaacacgctccacggcatgtcgctggtcgatccggtgctggtgcgtgccgcgcagtgtctcggcgcgcgcgagcgctcgatcttccgcgaagtgtactttccggcctcgctgccgcacatcttcaccggcctcactgtcggcatgggcgtcgcatgggtgtcgctgatcgcggccgagatgatctcgggccagtacggcatcggctatttcacctgggaagcatattcgctggttcaatatgccgatatcgcgctcggcatgatcgcaatcggggtgctcggccttggatcgagcctgctgatccgcggcgcgggacaattggtgatgccatggagatcgacatga

SEQ ID NO: 1515 - DNA, 1422 bp, BradyrhizobiumColbertium
atggtccgccgtcttcccacgctctcgatcgcgatgtcggtgacgtcgctggcgctaatcgtcacacagccggtgtcggcggaaacgatcacactcggcatcggaacgcaggacaccacgacaaacacggtcaccgccggcgtcgtcatccgccagttgcgtctcctcgagaaatatctgccgaaagatggcaggtatgccaacatcaagttcgagctggagtggcagaatttcacctcaggcccgcccgtcaccaatgcgatgatggcgaacaagctgcagatcggcatgatgggcgactatccgctgatcgtgaacggcttcaccttcgagagcaaccccgagagcaagagccggctggtcggcatcgccgcctacagcctctccggctccggcaacggtctcgtcgttcacaaggactcgccctactacgatctcgccgatctcaaaggcaagctcgtcagcgtccccttcggctccgccgcgcatggcatggtcctcaaagcgatgcaggaccggggctatcccgctgacttcttccagctggtcagccagagtcccgaggtcggatccacaaatctccaggagaagaagatcgacgggcatgccgacttcgtccccttcgccgagctgctgccgttccgcggcttcgcgcgaaagatcttcgacggagtcgagacgaacttgccgaccttccacggcatcgtcgtccgcaccgatttcgccgagaagtatcctgaggtcgtcgtcgcctacttcaaggcgctgatcgccgccaatcagtggctgcgcgacaatcccaagctcgccgccgagaagattcaggaatggaccggcatcaataaggaagtcgtctacatcttcctcggtcccagcggcaacatgaccaccgatcccacggtcaagccagcgttgatcgatgccgcgacgaccgacgtcaaggttctgcagaatctcggccgcatgaaggagttcgatccgaagaagtgggtcgacgacagctacatccgcaaggcctatgccgagatgaagctcgactacgacgcgcagctcgcgagcacgaagaactatgaaatctcgggcgaagacgccttctgcaagaagcccatcgccgatccgcgcaaggccggcgaagtctgggtcgatgacgccggcatcatgcccttctcgtccgccacctgcacactcggcgcctatgccgactacaaggccaagggcaagaagatcaacgtggcctacgtgttcgataccacccgcgggatcaagctgttcgccgatcaggccttcttcgccgtgggcagcggcgaagtcgcaccattcctgctgaagaaggatgccgaggcctacgcggcgaagatcagcggcaaggtgctcggcttcgacgatgcggtgaaagcgtcggtcggcggaggcaagacgtga

SEQ ID NO: 1516 - DNA, 774 bp, BradyrhizobiumColbertium
atgttgcaggcggcgaatgcggttcgcgggaccgttcccggagcggtgcggcccaccggcagttcgtcgctgctgctgaccgagaaccagcaatggatcggcggcccgccgccgctcatggacaagctctctccgcgtgagcgcgagctggtgctgaagcagggccgtcgcaaggtgctcaatcgcggccagactctgttcagccagggcggcaagcatgacggcatctggctgatcgagagcggccgcatccgggtgttctacacgtccccgcttgggcgcgagatcacgctggcttactggcacgccggcaatttcgtcggcgggcccgaagtgttcgaaggcaccatgcatcaatggtccggcgtggcatccagcaattgcagcgttgtgcacctaccgggaaaggagctgaggtcccttgccgcggagatcccgaatctcgcgatcggcctcatcgaaggcctcactttcaagggcaagtgctattctgcgctggcacaaatgctgggaacgcgctcgatcacgcagcgtcttgcgcacctcctgctgcatctcgtcgagctctacggtgtcgaggatgccgacggcaccgtgatcgctgcagcctttactcatgccgatattgcccacatggtcggcgccacccggcagtgggtcacgatcagcctgaagcgcatgcaggagaagggaatcgtgctgaccaagcggtcgcagatcgtgatctgccggaccgacgtgctggaagagatgcgcggtcacgcagctgactag

SEQ ID NO: 1517 - DNA, 297 bp, BradyrhizobiumColbertium
ttggtcgcgccgaccgtagccggctatgaagccagcaccgatctcgcttcgctgctcgtccgcaccacgcaggacgttgcgctgagcatcggcgccgaaacactccgcatctcctgcaaatgcgcccactgcacccgtgcacgcttcgatggccgcttccctgaagcatttcccggcattgccatcaccgagatcggcgacctcggctacgggctgaacatctcgttctcggatgggcacaaccggggcatttacccgaagccgtatttgctgagcttggccgggactgccgcataa

SEQ ID NO: 1518 - DNA, 774 bp, BradyrhizobiumColbertium
atgagcgcatttcagaaggaaacggttctgtctgtcagacactggaccggctccttattcagcttcaccgcgacgcgagatcccggcttccggttccagaacggtcaattcgccatgatcgggctcgagatcgagggcaagccgttgatgcgggcttacagcatggccagcgccaaccatgaggaggcgctcgagttcttctcgatcaaggtgcagaacggcccgctgacctcgcgcctgcagaagatcagggaaggcgacatcatcctggtcggccgcaaggcgaccggcacgttgatcaccggcaatctcattccgggaaaacgcctgctgctgctctcgaccggcacggggcttgcgcccttcgccagcctgatcaaggaccccgacgtctacgagaactacgagaccatcgtgcttgcacatggttgccgccaggtctccgagctcgcctatggcgagcacgtcgtcgacggcttgcgcaaccacgaattcttcggccccctgatccgcgacaagctggtctattacccgaccgtcacccgcgagccgttccggaaccgcggccggatcaccgatctgatcgcctcgaatcaggtttttgacgacatcgggcagtccggcctcgatattgaggccgaccgcatcatgctttgcggcagccccgcaatgctcgaggaactccacgcgatgttctccgcacgcggcttcgtcgagggcaaccacagccagcccggccatttcgtgatcgagaaggctttcgtcgaacgctga

SEQ ID NO: 1519 - DNA, 1743 bp, BradyrhizobiumColbertium
atggcactagatgagatcgtcgacggactttccgaggtttcctgcgacgtgctggtcatcggcggcggcacggccggcccgatggcggcgctgaaggcgaagctgaagaacccgaaggccaatgtcgtcctgctcgaaaaagccaacgtcaagcgctccggcgcgatctcgatggggatggacgggctgaacaacgccgtcattcccggctatgcgacgccggagcagtacaccaaggaaatcaccatcgccaacgacggtatcgtcgatcagaaggcggtctacaaatacgcgcagaattgctacaagatcatcgaggagctcgatagcttcggcattcgcttcctgaagaacgagaacggcgactatgccgtcaaaaaggtgcaccacatcgggacctacgtgctgccgatgccgaacggcgaaaccgtgaagaaggcgttgtatcgccagctccgccgcgcccgcatcctgatctccaaccgctacatggcgacgcggctcctgaagtctgccgatggccgcatcgcaggggcggtcagtgtcaatacccgcactgccgagatgctcgtcatcaaggccaaggccgtgatcctctgcatgggcgccgccggccgcctgggcctgccgacctccggctacatgttcggcacctatgagaacgcggccaattccggcgatggctacgccatggcctatcatgccggcgccgcgctcgcgaatctcgaatgctttcagatcaatccgctgatcaaggactataacggtccggcctgcgcctatgtcgccggcccgttcggcgcctacacggcgaacaacgagggatcgcgcttcatcgagtgcgactattggtccggtcagatgatgctcgagttctacaacgagctcctgtccggcaagggccccgtgttcctccagctcaagcacctccaccccgacaccatctccgagatcgaatccacgctgcacaaggtggagcgtccgacgcgcgggctgttccagcaggggcgcggagtcgattaccgcagcgaatcgatcgagatgcacatctccgagatcggcttctgctccggccacagcgcctcgggcgtgttcgtcgacgataatgcgcgcaccaccgtgccgggtttatatgccgccggcgacatggccagcgtgccgcacaactacatgctgggcgccttcaccaacggggcggtcgccggcgtcgatgccatggagttcgccgatagccacgatttcgcggagttcgacgcgaccgatgtcgcgatggagcgcgaccgcgtgatggcgccgaccaggcgcgaggacggcattccgcccaatcagatcgagtacaagacccggcgcctcgtcaacgactatctgcagccgccgaaggtcacgcgcaaatacgagctcggcatgcggcgtctggccgaagcacgcgaggacatgcaggagcgcatgatcgcgcgcaacgcgcacgaactgctccgcgccctcgaagttcagtcgatcatggactgcgccgacatggccgcgcacgcctcgctttaccgcgaggagagccgctggggcctctatcactggcgcacggattttccggagaaggacaacgagaactggttctgccacacgctgctgagcaagcgtgacggcaagatgaccagcgagaaacgtgccgtcgagccttatgtcgtccctatcgcggacgacgagaaagacctctacgacaagcagcgcatccgcgcctccgcctga

SEQ ID NO: 1520 - DNA, 201 bp, BradyrhizobiumColbertium
gtggtcgtcgacgacgcgaaatgcatcgccgacaagggctgcaccgtgtgcgtcgatgtctgtccgctcgacgtgctgcgcatcagcgacatgaccaagaaggcctacatggcctatgacgaatgctggtactgcatgccctgcgaagcagactgcccgaccggcgccgttaccgtcaacattccctatctgttgaggtga

SEQ ID NO: 1521 - DNA, 978 bp, BradyrhizobiumColbertium
atgtcgagcccgttcgaatcctatgacgatctcgaagacgccgacgagcggctgcaggccgccgatcccgccgagcgccgcgtcgccatcatcgcgctcggccattccggcgatcctgcggccgtcgcgcatctcgccaacatggtgtctgaccccgatgccggcgtgcgccagcaggtcgcgatggcgctcggcgagttcgatggaccggaggctgcggcggcgctggtgaagttgctggtcgatcctgagaggatcgtcgcagcggctgcggctgacagcatggccgagttcaaggatcctgcctgcgccgagatcatcctgcccctggtcaagcacgcccacgccttcgttcgcatgggcgcgctgcgtgctttgaaggaattgcgctgcaaggacacattgaagccggcgctggaagcactccaggattccgatgccgccgtgcgcgtgcaggcgatcggcgtgatcgggttcctcaagctcgaagaatcgatcccggcgctgaccgcgctgatcaacgatcccgatgcccatgtccgccgcgcggcggtcagcgcgttggcgttctcgcacatgaagcccgcggcggagacgatcacgcgcgcgctgaaggactcggactggatggtgcgcgaaatggccgcggagacgctgggcctcaacgccaacggctcgctggccgcggatcaactcatcggctcgctcggcgacgagttctggcaggtacgattgaaggcgatccgcagtctcggcaagatgaaggtcgagcgtgcggtgcgcccgatcggcaattccgtcaaccacgaacaggcgaacctgcgcaaggaggcggccgccgcactcggcgagatagcccatcccgatggggaagcgttcctggccgtcattgccgatgatccggatcctgatgtgcgcaagaatgcacgttgggcgctgcagcagaccgcggcccgcaaggcgcgggcaggggcatag

SEQ ID NO: 1522 - DNA, 1173 bp, BradyrhizobiumColbertium
atgacgactttgatggtgaaagacctactccccgaggacggaacgaaggggacgctggttggccgcgtctggctgccgcaggtcaacggtcccgccgtcgtcgccgtgcgcggagatggcgtgttcgacgtcacggcgaagtttccgacggtcagcgcgctctgcgaggaagacaatccggccaaggcgctggcggcagtcaagggcgaacgtatcggcgatcttgaagccatcgttgccaatacccctcccgacggccgcgactccagcaagccgtggctgctcgcgccagtcgacctccagacgctgaaagccgccggcgtcactttcgccatctcgatgctggagcgcgtcatcgaggagcgcgccaagggcaacccggcgtcggccgaggcgatccgcaaagaagtcacccggctgatcggcgacgatctctccaagctcaagccggggtcggaccaggcgatgcacctgaagcaggtactgatcgatcagaacgcctggagccaatatctcgaagtcggcatcggccccgatgccgaggtcttcacgaaggcgccgaccatgtcgtcggtcggcaccggaatggatgccggcctgcatccgaaatcgacttggaacaatcctgaacccgagctcgttctgttcgtctcgagccggggcaagatcgtcggcggcgcgctgggcaatgacgtgaacctgcgcgacttcgagggccgttcggcgctgctgctgtcgaaggccaaggacaacaacgcgtcctgctcgatcggcccgttgctgcgcctgttcgacgacagcttttcactcgacgatgcgcgcaagctggacatcagcctgaatgtgaagggcaccgacggcttcgtcctcgacggccactcgtcgatcagcaagatcagccgcgatccgaccgatctcgtggagcagacgatcggaaaggtgcaccaatatcctgatggcttcgtgttgttcctcggcacgatgttcgcgccggtgaaggatcgcgatgcgccggggcaggggttcacccataagcgcgacgacatcgtcacgatctcggcgccccaacttggcaagctcgtcaaccgcatgcgcacgagcgacgagtgtgagccctggacgttcggcatcggcgcgctgatgaagaacctggcgcagcgaaagctcatatag

SEQ ID NO: 1523 - DNA, 777 bp, BradyrhizobiumColbertium
atgacctcgcgcatcgtcgtcatcccgacgcgacgggctcactccaaccatgccgaggtggctcgctcgatcggcgtcgacatcatcgccggccgctacgcggaggggacccgcctgcccggcgatgccgagatgatcgcgatgttcggtgtgtcgcggccggtcctgcgggagagcgtgaagacgctggtcgccaaggggctgctcaccaccaaggcgcgggttggcaccgtcgtgcgcgagcgcggcgcctggaacatgttcgatgccgacgtgctggcctggcacctcgacgccggcatcgacaagcgcttcctcaacgacctcgcggagatccgcctcgccgtcgagccgcgcgcggccatgctcgcggcggcgcggcggtcggaggacgatatgaccgagctccggcgcagcatggagcgcatgcggcgtgaagcctccgattcagcgggctttgccgatgccgatctcgcacttcatgtggccgtggcccgcgcctccggcaatctcttcatgcgctcgatcgggcatgtcattgaagccgcgcttcgcgcctcgtttctgctcagtgccccggtcgagccgaaggatcgcgacaccgtgctgctctggcatcagaagatcgtcgacgccattgccgcgggcgacgcggacgcggcctccgaagcgatggttttcgtcattcacaacggcatgcatcgccacgacggtgccgcgaccgagacggtgccggccgaggtgctgccatcgggggaacctggaggacgatcgtga

SEQ ID NO: 1524 - DNA, 927 bp, BradyrhizobiumColbertium
gtgaccgagcttcgcatcgccattgtcgggttcggcaagatcgcgcgcgatcagcatgtcgacgccatcgccgcggtttccggcgcgacgctgaccgcggtcgccagccgcaacgcttcgctgccggaattgccgcatttcgcaacgatcgaggaattgctggagcaggggccgccgatcgatgcgatctcgctctgcacgccgccgcaggtgcggcggacccaggccgcagccgcactcgccgccggcaagcatctcatgttggagaaaccccccggggcgacccttgtcgaactcgatccgctgatcgcgatggcggcggaggcgaagtgcacgctgtttgcgacttggcattcgcgccatgccccggctgtcgagccggcgcggcaatggctgaaggcgcgccggatcaaatccgtgcacatcagctggaaggaagacgtgcgggtctggcatcccgggcagcgctggatctgggaacccggcggcctcggcgtattcgatcccggcatcaacgccctgtcggtcctgaccaggattctgccgaagcctgtgttcgtcaccgcagccgagctggcctttccagccaattgccaggcgccgatcgcggcgaacctgaccctggcggatatcagtggtctgcctgtgaccgccgagttcgatttccgccagaccgggccgcagagctgggatattgtcgtcgaaaccgatcagggccggatgactctgtccagcggtggcgcgcgcatggccgttgacggcgaggtgctcgccgaagcgccggacgaggaatatcgcggactttaccggcgcttcgtcgaactcgcggcgtccggcgccagtgacgtcgatctgatcccgctgcgtctcgtcgccgacgcattcatgctgggcaggcgcacgatcgtcgaaccgtttgtggattga

SEQ ID NO: 1525 - DNA, 1077 bp, BradyrhizobiumColbertium
atggccgcgtcgagagtcacgaacgacgtattcgggacgctgccggatggccgcaaggtccggcgcatcgtgttgcgcggggcaggcggcttcgaggcgcggatcattacctatggcgccgtgctacaggcgctgatcgcgccggacgccaaaggcggatacgacgacgtcgtactcggccatgacgcgtttgccggctatctcgccgaacgcaagttcctcggtgccaccgtcggtcgttacgccaaccgcattgccaagggggagttttgcttggacggcgagacgattcagcttgcggtcaacaacggccccaatgcgctgcacggcggcctcgatggcttcgaccgcaagctctgggagatcgcggacatcgacgagggcccacgacccgcgataacgctctcccatgtcagcccccatggcgaggagaactatcccggccagctcgatgtgcgcctgacctatcgggtcacgggcccggccgagctgtcgctgatcatggaggcgcgaaccgaccggcccaccatcgtcaacctgaccaaccacagcttcttcaaccttgagggcgcgacgtcaggtacatccgtcctcgatcatagtttgacggttgctgccgggcatttcctcgccatcgatcccaccgccattccgttgccggagccgccacgcccggtagccggcacgcctttcgacttccgcgagccgcggccggttggcgagcgtatccgcgagagcgatcagcagctgcgaagcggcaggggctacgaccacacctactgcttgaagcgcaacggcgagctcgcgcttgcggcccggctcgaggcgccgcgctcgggacggatcatggagctgctcaccaatcagcccgggcttcaggtctattccggcaattatctcgacggtacgatttcagggaagggcggcaagctcatccgtcaatcggacgccatctgcctggagcctcacatctggccggacgcgccgaaccggccggacttcccgagcccgcggctcgatcccggcgaagtctatcgccatcacacggtctatcgtttttcagcgaggtcgccatga

SEQ ID NO: 1526 - DNA, 879 bp, BradyrhizobiumColbertium
atgactgagcaggtgcccacgactgtcctctcggaccatccctgccacctcggcgaaggcccgacctacgacgcctccaccgacaccgcctggtggttcgatattcgtgaagggctgctgttcgaggcgcggctcggcggcagtatccgcgttcacgaactcggccggatggcgagcgcgctcggacgcatcgatgccgagcggcaattgatcgtcgccgaggatggtctttacattcgcaagcccgtcgatggtgcgatgacgctgtttctcccgctcgaagcggacaatccggcgacgcgctcgaacgattgccgcgtgcaccaatccggcacgttttggatcggcaccatgggcaagaatgccgagccgaaggcgggcgcgatctacgcgctccatcgcggcaagatctcgacgctgttcgacggcatcagcattcccaactccatctgcttctcgccggacggcgccaccggctatttcaccgacaccccgcgcgcggtgctctatgccgtgccgctcaatcccgcgaccggccttccgcgcggcgagccggaagtgctgttgcgccacagcggcgtcggcgggctcgacggctcggtgtgcgatgccgacgggcagatatggaacgcctgctggggcgcgagccggatcgatgcctattctccgcaaggcgagcgtctgcgctcgttgagcgtgccggcaaggcaggcgagctgtcccgccttcgtcggcgccgatctgtcgcgcctcctcgtcacgtcggcctggcaggatatggacgcggccgcccgcgccgccgatccgcaagccggctgcacgtttctgttggaggcatccgcgcgtggccgcgccgagcccgacgtcaagctcgcatag

SEQ ID NO: 1527 - DNA, 534 bp, BradyrhizobiumColbertium
atgagcgtgctgaagccctatatcgacagcggcaagctcgtcgtcgtctccggccagatgggcatggacaaggttgcgacgttgcgctgggacggcgccacggcgcaggcccgcatggacaatctgctcagcgcctactacggcaacaagaagatcaatgccgtgctgtcgccctatgacggcatctcgatcggcatcatctcgtcgctgaagggtgtcggctatggcagcgccgaccagccgatgccgatcatctcgggccaggacgccgaggtgccctcgatcaaggcgatgctgcggggcgatcagtattccaccatcttcaaggatacccgcgacctcgccaaggtgaccgccgacatggtcgacgctgcactcggcggcaaggaggtcaccgtcaacgacaccaagacctacgagaacggcgtcaagaccgtgccgtcgtatctgctcaagccggtcgtggtctacaaggacaattgggagcaagtgctggtcgacagcggctactacaagaagtcgcaattccagtag

SEQ ID NO: 1528 - DNA, 126 bp, BradyrhizobiumColbertium
atgttcctggaaaccttcgtcattcgctccggcgtcattccggggcaatgcggagcatcgaacccggaatctcgaggttctcaggtgcgcaagagcgcaccatggttcacgcctcgcgtgccctga

SEQ ID NO: 1529 - DNA, 1578 bp, BradyrhizobiumColbertium
atgaccgccatgctggagatgcgcaacgtcagcaagagctttgccggcgtgcaggcgctgcgcgacgtcaacttctcggtccgcgccgggcagattcacgccctcgtcggcgagaacggcgccggcaagtcgacgctcatgaaggtgctgagcggggtttatccgcacggcagctacgagggcaccatcgttttcgagggcgaggagcgacgcttccgcgacatcaacgattccgaggcgctcggaatcatcatcatccaccaggagttggcgctgatcccgctgatgtcgatcgcggagaacatcttcctgtcgcatccgccgtccaggctcggcgtgatcgatcgcgacgaggtgtatcgacgcacgcgggagctgctggcgcaggtcggcctgaaggaatcgccgaataccctgatcaccgatcttggcgtcggcaagcagcaattggtcgagatcgcaaaggccctctccaagcgggtgcgcttgctcatcctggacgagccgaccgccagcctcaacgaagccgacagcgccgcgctgctcgagcgcctgatggccttccgcgagcaaggcatcgggtcgatcctgatctcgcacaagctcaatgaggtcgccaaggtcgccgaccacatcacggtgctgcgtgacggccgcaccgtcgacagcatcgattgccatgtcgaaccgattcaggaagaccgcatcatccgtagcatggtcaaccgcgatcttgcgcaccgcttcccggagcgcagcgcgaagattggcgaagccgtgctcgagatcgcgaactggtcggtctatcaccccatccatcccgagcggcaggtgatcaagaacgtcagtttcaacgtcaagcgcggcgaagtcgtcggcctcgccggcttgatgggggcaggacgcaccgagttcgccatgagcctgttcggcggatcctggggcaccggtatcggcggaagcctgcgacttgagggcagggaggtggtgttgccgaacgtcgccgccgcgatcgatgccggcctcgcctatgtcaccgaagaccgcaagcagctcggcttgatcctcgccgacgacgtgcgcaagaacatcacgcttgcgagcctcgaccaggtcgcgccgcggcgggtgatcgacgacattgccgagctgaaggtcgccagcgactaccgcaaccgcatgcggatccgctgctccgatgtctatcaggagaccggccagctctccggcgggaaccagcagaaggtggtgctgtcgaaatggctgatgaccgatcccaaggtcctgatcctggacgagccgacgaggggcatcgacgtcggtgccaagtacgagatctattgtatcatcaatgaactggctgaagccggccgcggcgtcgtcgtgatctcctcggagatgcccgagctgctcggcatctgcgaccggatatgcgtgatgaacgacggcgcgttcgtcggagaattcaggggagccgaggcgacgcaggagaagatcatgcgcgccatcatgcgcaacgaacgaagtactgggaacgccgcgcccgcggccgcggagatgggaggatcgcagccatga

SEQ ID NO: 1530 - DNA, 1191 bp, BradyrhizobiumColbertium
atgaccgacaagacggtgtcgctgcccgaggagcgccggcacggcagcttcatcaagaacaatctgcgcaattacggcatgctgatgtcgctgatcgcgatcatgctgttcttccaggtcgtgaccggcggcacgctgctgcagccgctcaatctgaccaacctggtgctccagaacagttacatcgtcatcatggcgctcggtatgctgctggtcatcgtcaccggccatatcgacctctcggtcggctcggtcgcgggcttcatcggcgcggtggccgcggtgctgatggtgacctacaaggtcgactacacgctcgccttcatcgcctgccttctagttggcgccgccatcggcgccgcgcagggctattgggtggcctacttcaagatcccgtccttcatcgtgacgcttgcgggcatgctggtgttcaagggtcttgcacttgccgtgctgcaggggcagtcgctggggccgtttccgccgacctttcagaaactatcgtccggcttcattccggagctgctgcccgaagccggcacgctgcatccgacctccatgctgatcggcaccgtgctcgcgctcggcctcgtctacgccggcgcgaagggcagatcgcgcgaacagtcgcacggtatcgaggtcgagccctacgcattctttctcggcaaaagcatcctgctggcctgtgccgtgctctatttcacctatctgatcgcctcccaccgcggcctgcccaacgtgctggtgatcatgaccgcactgatcgcgctctacggcttcgtcacccgccgcacggtcattgggcggcagatctatgcggtcggcggcaacgccaaggcggcaagcctgtcgggcatcaagaccgagcggctgaccttcctgaccttcgtcaacatgggcgtgctcgccgcgctcgccgggctcgtcttcgccgcgcggctcaataccgcgacgcccaaagcggggctcggcttcgagctcgacgtgatcgccgcctgtttcatcggcggcgcctcggcctatggcggcgtgggacgggtcggcggtgccgtggtcggcgccatgatcatgggcgtgatgaacaacggcatgtccatcctcggcatcggcatcgactatcagcaggtgatcaaggggctggtgctgctgggggcggtctgtatcgacgtgtataaccagcggcgctga

SEQ ID NO: 1531 - DNA, 156 bp, BradyrhizobiumColbertium
atgagcgatgcacaaatcgggctgatgaccgcgacaccgatcatcatcgcgtttgccatcgcactccggcgaatgggcgtgctttcgacggtggcgaccgtttccgcagtgagcctctccgtcgcgatcgcggcggtgctgttcacgacgcagtag

SEQ ID NO: 1532 - DNA, 585 bp, BradyrhizobiumColbertium
atgcagatgtcggcgacggattgcgaacagcaagaaaccggctggggaatcctcggagatcttcctggcgatcccatgatctgggtgctgatcttcagcgagctcgccgctttcggcctgtttcttggcgctttcgtcgtggctcgcgcgcttcatccggctgtcttcgcggccggacaggccactctcgatacgcatcttgccggaatcaacactgtcgttctggtgacaagtggctgggccgctgcccgcggtacggccgccgcgcgtgcgcggcgccggccagccgcgcggggctggatgttcgtcgccatggcgctcggcgcgctcttcatagccatcaagctgttcgaatattccggcgagatcgcgttgggtaacggcttggagacgagcccgtttttcacgctgtacttcctcctcaccggattccatctcctgcatgtcggcctcggcatcgtgattctcgccgtagtttcccggagcgccggtgctgcgggcgttgagaccggaaccgctttttggcacatggtcgatctgctctggatcgtgatgttcccgatcatctatctggtgcatcagtga

SEQ ID NO: 1533 - DNA, 264 bp, BradyrhizobiumColbertium
gtgattccggatcgtctcgacatcgcatggatcgcgcttattggctttgccctcgcgaccattctgctctcgtcacttgccgcacgtccattgctcggcaatgccctgttgctgacgctcgcggccctcaagggccgccgcgtcgtgctcgattttctcgatcttcgcgccgcgccggcgctttggcgaggcctcgtcagcgcctgggtcgtcatcgtggtgctgtttgcctggctcgcatccgccgtcgttgccctgatctga

SEQ ID NO: 1534 - DNA, 453 bp, BradyrhizobiumColbertium
atggctgaacgcctgaccaagtcggccgctcgaaacgtcttctacggcggatcggccttcttcttcgccattttcatagggctgacggcgcacagccactactacatgaccacgacctccaccgacgccgccacgctgacatcgtcggtcgcccgcggcaagcacgtctgggagaagaactcctgcatcaactgccacaccctgctcggcgaaggtgcctactttgcgcctgaagtcggtaacgtctgggaccgctggggcggcaacgaggatccggccgccgcgcgcgagacgctgaaggcctggatgcagtcgcagccttcgggtgcgcccggccggcggcagatgccgcagttcaacctcaccgaccaggaactcaacgatctcgccgacttcctgcaatggacctctacgatcaagcgccaggagtggccgccgaacaaggccggttga

SEQ ID NO: 1535 - DNA, 1347 bp, BradyrhizobiumColbertium
atgaaataccagacccagaaagtcgcgatgctgtacttctacggcgcgctgaccctgttcctcgcgcaggtcctgttcggcctcgtcgccggaacgatctacgtcctgcccaacacgctatcgaccctcctgcctttcaacgtcgtcaggatgatccataccaatgcgctgatcgtctggtcgttgatcggcttcatgggcgccacctacttcctgcttcccgaggagaccgagaccgagctgtacagtccgctgctggcgaaggttcagttctggatgttcttcggcgcagccggcgtcgccgtggtcggctatctcttccactatcatgagggccgcgagttcctcgaacagccattcatcatcaaggtcggcatcgtggtcgtctgcctgatgttccttttcaacgtgacgatgacggcactcaagggtcggaagaccacagtcacgaacatcctcttgttcggcctgtggggcgttgcgatcttcttcctcttcgccttctacaatccgatcaatctggcggtcgacaagatgtactggtggtacgttgtccatctctgggtcgaaggcgtctgggagctgatcatggcctccgtgctggcgtacctcatgatcaagctcaacggcatagaccgcgaagtggtcgagaagtggctctacgtcatcatcggccttgcgctgttctcgggcattctcggtaccggtcaccacttctactggatcggcgcgcccggctactggcagtggatcggatcgctgttctccacgctcgaggtagcgccgttcttcaccatggtgatcttcacggtgcagatgacctggaaggccggccgcaagcatccgaaccgcgcagctctgttgtggtcggtcggctgctcggtgatggcgttcctgggcgccggcgtctggggtttcctgcatacgctgtcttccgtgaactattacacccacggcactcaggtcaccgccgcgcacggtcatctcgccttcttcggcgcctatgtaatgctgaacctggcggtgatggcttacgcgatcccgcagatcaaaggacgcgcgccctacaatcaatggctctccatggcgagcttctggatcatgtgcacggccatgatggtgatgaccttcgcattgaccttcgccggcgtggtccaggtccatctccagcgcgtgctcgggcagggctacatggacgtgcaggatcagctcgcgatgttctactgggtccggctcggctcaggcgtgttcgtggcgatctcggctctgatgttcgtctgggccgtgctggtcccgggtcgcgtcaagcagccggtcattaccggcgcgttgcagccggctgagtaa

SEQ ID NO: 1536 - DNA, 813 bp, BradyrhizobiumColbertium
atgaacgcagcactcctcgccgtggcggcgtccgaacccgagctgccggcctatgtcgcaaccggcaacgaatgcgcgttgttcgagcacgcctggcgaaatcagctgccggtcctcttgaagggcccgaccggctgcggcaagacgcgcttcgtcgcccatatggcggcgcggctcggattgccgctgcacaccgtcgcctgccacgacgatctcaccgcggccgatctcaccggccgctatctgctgcggggcggtgacacggtatggacggatggtccgctgacgcgcgcagtgcgtgggggcggcatctgttatctcgatgaggtcgtggaagcgcgcaaggacgtgaccgtcgtgctgcatcccttgaccgacgatcgccgcatcctgccgctcgagcgcaccggcgaggagctggtggctcccaacagcttcatgcttgtcgtatcctacaatcccggttaccagacgctgctgaaggcgctgaagccgtccacacggcagcgcttcgtcgccatcgaattcggtttcctgccggccgatcaggagatcgccgtcgtgtcgtccgaaagcggactggcgccagagcgcgtgcggccgctggtcgggttggctggccggctgcgcgcgctgaagggccacgatctggaggagggcgtctccacccggctggtcgtctattgcgcgacgctgattgccgccggtacgccgatcgccgacgccgtgctcgccggcatgatcgagcccctgaccgacgatgccgacgtgaaggcggcgctgctcgacgtcgcgcgcgccatgatcgggtga

SEQ ID NO: 1537 - DNA, 1920 bp, BradyrhizobiumColbertium
atgctcgacttcctcgaactggaggagacggtcggccgcgcctggcaccggatggtcggcggcaccgggagctatccggttcacgacgatcacgccgtcgcgctcgcggggatgaagagccggctcgcggtgatgttccgcgcgctcggcggcgagacgggcgtgcagatcgcgagcgccggcgcacgcagggcaggccatcgtctcggctggcgacagcgcatcggcctcggggacgagcgactagagcagccgggccgcgacgccgcgaccatcttcctgcccgatcgcatcgcgctctttccggaccgggccttgaacgcagcgctctatcgctggcttgcggcctggttcgcggtggctccaatcgagaccatcatggaaaccgatccgctgcggcgggatcttctggttttgcgccgggcgagcgcgacgacggtcttcgtgctcacgcaatttccagggctcgccgccgactacgcgcggctcgccgccgccaccgccgaggcccggcctcgccgacctctgccgcgcaccgagcaggacatcgagctggtcgtcctggccctgctcggtgcgagcaaggggccagcgggcaagttgtggccggccatgatggggatggagccgttgccggacaaggcgccgccgggctatcgctcgatcctgccgtgcccgctctggggcgattgctggacgcgtgaactatcgcctacccatgcgggcgaggatgaatgtgccgatggtgcggagcccgccggccaggacgatcgcaagcgcttcgcgactcgcgagcgcgaggacaatgccaaccgccgcgatccgttcgtgctcaaccgcttcgagaagatcctcgcaatggcggagatggtcaatgtcgatcgtcccgctgacgacagcgaggatgaggatgcgcagaaagcggccgacgatctcgaggagatcacgctcagccgacgtaccggcaagccggcgagccggttcaaattcgatctcgacctgccccccgaggcccttgatgcctcaccgctgagtgcggacttcacctatcccgaatgggactaccgcagcggctcctatctgccggatcattgccgcgtgctcgccggcgcggcctccgaaaccggagagagctgggtccccgacgattccatgcgccggcacgtccgccaggtgcgccgccgcttcgagatgttgcggccccgtcacgaactgatgcgggcgcaggccgacggacacgacctcgatctcgatgcgctggtacgtgcgcggtgcgacctccgtgccggcagcggcggcagcggtctcgatcgcatccatgttgccatgcgcccgcaagggcacgatctcgctgtcacgctccttgtcgatgtctcgttgtcgacagacgcctgggtcgacggctaccgcgtgctcgacgtcgagaaggaggcgctgctggtgctcgcccacgggctctcggcctgcggcgatcaccacagcatcctgaccttcacctcgcgccggcgctcctgggtgcgggtcgtaacggtcaaggccttcggcgagccgatgggcggaacggtggagcgccgcatcggcgcactcaagcccggctactatacacggatcggggccgcggcgtggcgcaccgcggccgagctcgcgcaccagccgcaacgcaagaggctgctgctcgtcctcaccgacggcaagccgaacgatgtcgatcattacgaaggccggtttgcactcgaagacacccgcaagtcggtgcaggaggcgcgccggctcgggatcgcggtgttcggtgtgacgatcgacgcggcggcacaatcctactttccgacgctgtttggccgcagcggttacgccatcgtcggcaacataaagcgattgcccgcggcgctgccggcgatctaccggcaggtggcgcattga

SEQ ID NO: 1538 - DNA, 936 bp, BradyrhizobiumColbertium
atgctgattgcctgcggcgatgcgttgatcgattttctgccgacgcggaccccggacggatgtgaggcggcgctgccggcagtcggcggctcctgcctcaacgtcgcgatcggcttggcgcggctcggcgcgccgacgggcttcgtcggcggcatctcgaccgacctgttcggacggatgatcgcagatcacgccgccgcctccaacgtcgatctcggtctcgtcacccgcagcgacgaccagaccacgctcgctttcgtccgcaccgtcgcgggcgactcgcagtacgccttttacgatgccggaaccgcgacgcggaactggacctatcggcgcggctcgatcgcgttcagcaaggtcgaagccgtccatgtcggctccacgaccctggtcaatgaccaaggcgcggcggagacgacagcgctgatcgaggatgcgcgtgcgtcctcgacgatcgccttcgatccgaactgccgaccgaacctcgtcaaggacgagccggcctatcgcgcgcgtatgtccgagttcgcggcacgcgccgatctcatcaagatgtcggacgccgacttcgcctatctcttcggtgaggagtcgtatgagctgcgggcgaacgtgctgctcgggcagggcgcaagccttgtcgtgatcacccgcggcgagaccggcgccgtcgcgtggcacgcaaaggtggggcagatcgaagtctccgcgccgaaggtcgaggtggccgacaccatcggcgcgggcgacagctttcaagctgccttgctctttgctctctacaagcaggggcatctcacccggctgcgaatgaaggacatcggtgcggacgagctgcaccgcgcgctctcttttgccgcccaatgcgccggcctgacctgcacgcgtgcgggcgccgatccgccctggctgcacgagctcggctggacgctctag

SEQ ID NO: 1539 - DNA, 378 bp, BradyrhizobiumColbertium
atgggagacagatgtgcggcgcgcttgctgatctcggtgctgggactggcggtcatcggcgctggcgaagcagcggcggcgggccctgacaatttcagcggcgacgcacgccgcggtgccgatctggtcaagacctaccgttgcggcggctgccatgacatccccggcgtcgcgggcgccaatggtaacgtcggcccgccgctgcatcggatcggcacgcggacctacattgccggctacatccagaactcgccggacaatatggcggcctggatcgaagatccgcagaaggcgctgccgggcaatgcgatgccgaaaatgggcattccgcaaaaggacgcgcgcgacatcgcggcgtttctctatacgctgaaatga

SEQ ID NO: 1540 - DNA, 636 bp, BradyrhizobiumColbertium
atgtcagctcaagcgctgcgcgcgagcgccatatccctgctgctggcggtcgcgctgcatggtcccgcacttgcccagcagaccctgccgcaatcgcaggaggcacaaatgccgacgctggcgccacggccgaacttcggcggcagcgtcggtaacggcagtcccggcgtcttcatgcaggttccggtcagtcacctgcatccgggcgcgcggcccgatccgcctcagatcaagaaccccatgcagggcgatcccaacgcggagcaacgcgggatgacctactacatcaatttcaactgcgtcggctgccacgcacccaatggcggtggcggcatgggacccgcgttgagcaacaacaccttcatctacggctcgcagcccgagaacatctttctctcgatctaccagggccggccaaacggaatgccggcctggggcggcgtgctgccagacagcgtgatctgggatctcgtcacctatatcggcaggatcagcaacgagccgaaccgtcaatggggccgcacgttctcggcgaacccgttgtcacctgaagtcgaacaggtgccgaccgagcaggtctcgaccaccgatccctggtccgccaccaaggctttcaacttcggcaagaaaccctga

SEQ ID NO: 1541 - DNA, 834 bp, BradyrhizobiumColbertium
gtgcgcccgcgaaatagcgctatcgcccttgcattcctgctcgccctcacggccacgccagcggccgcatcggatggcgaccttcgcgtctgcgccgatccgaacaatctgccgttctcgaacagcgcgggggcgggcttcgagaacaggctcgccgcgatgatcgccgagcatctcggccagaaggtcgcctacacctggtgggctcagcgtcgcggcttcatccgcaacacactgaaggccgggaggtgcgacgtcgtgatgggtgtgcctgcgggttatgatctggtggaaacgacgaggccctattaccgctcgacctacgtcttcgtcacccggcaagaccgacagctcgatctgtcgtcgctgctcgacccgcggctgcatgatctggcaatcggcgtgcatctgatcggagacgacggcagcaatccgccgccggcgcaggcgctcggcgagcagggcatcgtcgacaatgtccacggctattcgatctacggcgactacagggaagctaatccgccggcgcgcctgatcgaggcagtcgagagcggcaagatcgatgtcgccgccgcctgggggccgatgggcggctatttcgcgaaaagctcgcccgtgccgctcacggtcgcgccgattcaggactacgagggcttcgcaccccagcaattccagttcgccatcgccatgggcgttcgcaagggcgaccacgccttgcgcgaccggctgaacgcgttcatcgacgcgcatcgatccgaaattgcgtcactgctgcgaagttttggcgtgccgcttgtcgagcagccggtcaccgcatccggaggacataagtga

SEQ ID NO: 1542 - DNA, 1836 bp, BradyrhizobiumColbertium
atgctagtgcgtgttctcgcgcgattgctgagcgtgccttgcgccctcgttgcgttgctgtcctccgctttggcacagagcgatctggcgagccgcatgaaggaccccagccaatggccgatggcggcacgcgactacgcgaacacccggtacagtgaactcgaccagatcaacacgaccaacgtggcgcgcttgcagctggcttggactttctcgctcggcgccgatcgcggccaggaggcggcaccgctcgtggtggacggcacgatgtatgtggtcggtccctatgcaggcccctatcccaaccgcgtgtttgcgctggatgcgacaacaggcgaactcaaatggtcctatgcgccgaagccggagcccgccgctgccggcgttgcctgctgcgacgtagtcaatagagggctcgccttcgacgacggcaaagtcttcctcaatacgctcgataaccacaccgtggcgatcgatgccaagaccggcaaggagctttggcacaccaagctcggcgaaatcaacaagggcgagacgatcacgatggcgcccgtcgtcgtgaaagggaaggttctggtcggcaacagcggcggcgagctgggcgtgcgcggctggatcaccgcgctcgacgagaacaccggtgccatcgtctggcgcgcctactccaccgggcccgacaaggacgtgctgatcggagacgacttcaagccattctatgagcatctcaagggcgccgatctcggggtaaagacctggcctgccgatcgctggcaggtcggtggcggcacggtctggggatggatctcctatgatcctgacctgaacctgatctattacggcaccgccaatccgagcccatggaatgccaaccagcgcagcggggacaatctctggagcgcatccatcttcgccagggaccccgacaccggtcgtgcgaagtggggctatcagttcatcccgcacgatctgttcgaccatgatgaggtcaacgagaacgtgctggttgacctcgagctcaatggccagccgcgcaaggtgctgattcatcccggtcgcaacggctacatgtacgtcatggaccgcgccaccggcgaagtcatctcggctgacgcctatgagttcgtcaacgtctacaacggtgtcgatctcaagaccggcaagatcatcccgaacgaggaaaagacgccgctggtcggcaagacagtcgagaacatctgccctgccgccccgggtgcgaaggactggcagccgagcgcatggtcgccgcgcacgaaactgctctacgtgccgcatcagcatctctgcatgaacttcaaggcctcgcaggtcggctacatcgcgggcacgccctatatcggcgcggacgtcgacatgtatgccggacccggcggccatcgcggcgagttcatggcgtgggaccctgtcgcgcgcaagaaggtctgggagatcaaggagaaactgccggtctggagcggagcgctggtgaccgccggcgacgtcgcgttctatggcaccatggatcgcctgttcaaggcggtggatgccaaggatgggcgtgtgctctggcaattccgcgccggctccggcttcgtaggccagccggtttcctaccgcggctccgatggacaacagtatatcgcgatcctgtcgggcgtcggcggctggcccggcgtcgtcgccaacgccgaggtggatcaacgtgtgcgcaacggcgcactcggcttcaccggcgcgacgcaggacttgccgttctataccgccggcggcagcgaactgctcgtgttcaggctgggcggcgcaactggcgaggatccaagtcgtgcgcccgcgaaatag

SEQ ID NO: 1543 - DNA, 834 bp, BradyrhizobiumColbertium
ttgaacgttcgcctgctgaccgagatatcgaagggatcgcacatgggccaacgatgcgtcacggggacggctgccgtcctggcggcggcattatcgatgccggtggccgtgaaagcacaagaccagccccggcccgccttgtcgtgcccggtcgaccacgatcagctcgtcgacatcctcaagaagagcgtgaagcctggcggcggccccagtaacggcggcctggacaacaacgagtgggctgcggtcgtcaaccggcagggcatcgtctgcgcgatcgcctacagtggcagcaaggttgacgatcaatggcccggcagccgggcgctcgcagccgagaaggccaacacggcgaatgcgttcagcctcaaggacaaggcgatggcgacggcaaatctctacgcgggcgcgcagccgggcggcatcctgttcggcgcgaccctgagcaacccgccgtcgccggaggtcctgtacggcggcgctccggaggagttcgggacggcgcatgatccgatggtgggcaagcccgtcggcggcgtgatcgtattcggcggcggactggcgctctacgatggcaacggcatcgccggcgcgctcggcgtcagcggcgatagctcctgcgccgaccacaatgtggcctggcgtgtgcgccacctgctcgggctcgaccgtgtcccggccggcgtcagtccgaacatgaaagacgcgatcatctatgacattggcccggatggcaaaagcgcgtcgggcttcggccaccccaaatgcaacggcaaggaggaccagatcgccgtcgatctcggcgcaggcgtatccgggaatgtggtgaggtag

SEQ ID NO: 1544 - DNA, 924 bp, BradyrhizobiumColbertium
atgcctgcgctgagactcgcggcactgctgcttgcgctgctcgcgcagccggcatccgcccatggactctcggatgtcgattcgggatcgctctggagcttcgatccctggctcatggccccgctctatatcgttggcatcggcttttatgttggtacgcagcggttgtgggcacatgcgggagccggtcggggcgcgagtttcttccaggtcggcgcgttctggagcggctggctggtcgcggcgctcgcggtgacatcgccactgcactggctcggcgagcgcctgttcactgcgcatatggccgaacatgagctcctcatggtggtcgccgcgccgctgatggcctacgcgcgtctcaacggtccgctgctgtggagcctgccggcatcgttccgccccacagccgggcgtatgctgaatgccccacccgtggcactcgcttggggcttcatcggtcatcccgtgagcgcgacggcggtgcatggcctggcgctctgggcctggcacgcaccgccactctatgcatgggcgctcgcgaacccggcggtacatcggctccagcacgtcagcttctttgcaacctcgctgttgttctggtgggtgctgctgcatggccgcggcgcgggccgcagcacccgcatgcgcgacggcatcgccgtggcctgcctgttcatcacgatcctgcactcgggcgtgctcggcgctctcctcaccgtctcgccacgtgtctggatccccggtcagggcgcgctcgccggcgaattcggtctgtcaccgctcgaagaccagcaactcgccggcatcctgatgtgggtgccgatgggaatcctctacaccggcgctgcgttgttctttgctcaccgctggttgacggtgaacgatagccgggcgccgctcgctcccacgcaatatccagggtga

SEQ ID NO: 1545 - DNA, 354 bp, BradyrhizobiumColbertium
atgaccgaagccgatcgaaatggcaaactgctctattgggccggcgtggcgctcggacccgtctcctgggggctcaacctgcaaggcatctacgtgctcgcacatttctcgtgcgagacgacgcgcgtgagcggcacgatcgtcagcgtcgtgctggccatcgtcgccctggcgggaacggcgatatcggcccgcgcgatgcgccgcggcgctggcgcggaatgggttgacgcccaaggcggcggacccaggtcattcatggcctgggtcggcgtcggcatgggcgcgctgtttgcgctggtcatcgccaatcagttggccgcctcgctcctgatcagcccatgcctgcgctga

SEQ ID NO: 1546 - DNA, 600 bp, BradyrhizobiumColbertium
gtgaggcagaccatcgtacgcaacgtctcggacctgccgacctacggcttcggtccgcgcagcggcccctggtggggagccatgggcttcatggcgctggaaggcatgggcttcgccgtcgcgatcggcgcctatctctatctctacgccgtcaacccgacttggccgatcggcgcgccgccgcccgatctctggcccggcaccgccgcgaccgtgctctatctgctcagcatcatcccgaaccaatataccaatcgcgtcgcgcaccggcaggatctggcgaagacccgcatttgcctgatcatgatggcgctgatcggcatcgcccttctggtgctgcgcggcttcgagttcgcgcatctcaacacgcgttgggacaattccgcctacggctccatcgtttggctgattctgggactgcatacggcccatctcgccaccgacctcggcgacaccgtcgtccttgcggtgctgatgttcacccgtcacgccaagccgcgccgcttcagcgacgtgaccgacaacgtgttctactggaacttcgtcgtgctcgcctggctgccgctttacgtcctgctcgattgggtgccgcgcctatga

SEQ ID NO: 1547 - DNA, 1914 bp, BradyrhizobiumColbertium
gtgagcacggccgcggaagagcgcaacttgcgggacgacgtcctgaacggatttcagctgacgagacagctcgaacgtgtttggcgcaccccgtccggcttcctcggtgccttgatgtcggtcgaccataaggtcgtgggccgccgctacatcctcaccgcttttgtctttctgcttctcggcggcatccttgcggccctgatgcgcattcagcttgccgggccggagaagacgtttctctccgcagacaagtacaaccagatcttcacgatgcacggctcgacgatgatgttcctgttcgccgtgcctgtcatggaagcattcgccgtctatctcgttccactgatggtcggcacgcggaacatcgcctttccccgcctgaacgccttcagctattggatgtttctgttcggcggtgctttcctctggctttcgttcctgctcaacgtcggccccgacgtcggctggttctcatacgttccgctctccaacctgcaattctcgccgagcaagcgcaccgacgtctgggcgcagatgatcaccttcaccgaggtcgcagcgctcgccgtcgcggtcgagatcgtcgtcaccgtgttcaagcagcgcgcgccgggcatgacgctcgatcgcatcccgctgttcgtttgggcaatgctggtgaccgccttcctggtgatgttcgcgatgccctcggtgatggtcgcctcgacgtcgctgatcctcgaccgcctcgtcaacacccgcttctacgattcttcctcgggcgggcatcccctgctctggcagcacctgttctggttcttcgggcatcccgaggtctacatcatcttcattcccggcaccggcatggtctcggcgatcctggcaaccttcgcgcgccggccggtggtcggctatccgatcgtcattctgtcgctcatcgccaccggattgctgtcgttcggcctctgggttcaccacatgttcgtcacgggcctgccccaactcggggccgggctgttcacggcctccagcatgctgatcgcggtgcctagcgggctgcagatcttctgctggctcgcgacgctgtgggacgggcgtcccatttaccggaccccgttgctgttcgtgatcggcttcatcgtgatcttcgtgctcggcggtctctccggcgtcatggtggcctcggtgccgatcgacacccaggtgcacgacacctatttcgtggtcgctcacttccattacgtgctgatcggcggtgcggtatttccgctggtgggcgccgtctattactgggttcccaagatcgccggccgcatgttgagcgagaggctcgggcaatggaatttctggctcgccttcatcagcttcaacgtcgcgttctttccgatgcacttcctcgggctgatcggcatgccgcggcgggtctatacctataccgccgacatggattgggctcatctgaacctggtgtccagcgtcggctccttcctgttcgcgctcagcttcgcgctgcttctggtcaacgtgatctacagtctgcgacggggtgagctcgcaggcgacaatccctggaacgcctcgacgctggaatgggccacgtcatcgccgccgcccccgcagaacttcgatcgcattcccgtggtcaagcatcgcgatccgctatgggccgacagcgaaatcctgccagtggccgccggcctcagcgcggaccggcgcgaggtgctcgtgacctcgctcgcggaggctgagccgcaaatccgagaagcctcgccggagcccagcatctggccgctgctcacggcaatcgcgacggcgatcttcttcatcgggtcgatcttcactccctgggcggtgctctggggcacgccgccgatcgccgtggccctgatcggctggttctggcccaccggcagcaaggaggacgagtcgtga

SEQ ID NO: 1548 - DNA, 969 bp, BradyrhizobiumColbertium
ttgccgctgagcgcatgcgccggacgtcagtcggcgctcgatccacaagggctgcaatccgagcagatccgctcgacattgttcatcttcctcgccgtctcggctgtcgtgtggatcggggtcgtcgtggttctcgcggccggaatgctgcgtaccaagcgcgcggccggtcggccgctggatctccaccaggggtacgaagaccgcgccggacgcgtcgtgctctggctcgggacggccaccgcactcatcgtgctcggactttccttcgtcagctatgccggacagcgcaccatcttcgccaaggacgagaaggccctcacgctgaaggtcatcggtcaccaatggtggtgggaggtccgctacgaggccgacagcccgcataagagcttcgtcaccgccaatgaaatccgcatcccaaccggcaagcccgtcagggtcgagctggaatccgccgatgtgatccacagcttctgggtgccgagcctgaccggcaagatggacctcgtcaccgggcagaagaacgagctgcagttcacggcgaaaaacgccggcgtctatcgtggacaatgcgccgaattctgcgggctccagcacgcccacatggcctttgccgtgattgcgctgccgcccgacgagttcgagcgctggcgcgagcatgaaaaccggagcgcccacagccccagcgatccgctcggcaagcagggcgaggccctgttccgggcacgcgggtgtgctctgtgccacaacatcagcggcacgctggccggaggccagcttggcccagacctcacgcatatagcaagccgcacgaccatcgccgcgggaacgctgccgaacacgcctgcgacgctcggcgcctggatctccgatccccagcacatcaagcccggcaacctgatgccgaaaatgccgctgcaatcgggcgaactgatcgcgatcatccattatctggagcagctcaagtga

SEQ ID NO: 1549 - DNA, 123 bp, BradyrhizobiumColbertium
atgcttgaggatctgcgcgtgcttgcccagcccggcgccatcgttgcggttgccgcggtcctgctgctgatggctgccggaggcgtttccatcctggtcgccgccaagggctggccgttctag

SEQ ID NO: 1550 - DNA, 627 bp, BradyrhizobiumColbertium
atgaccgatactgcattcatccatcgtttcgagcccgcgaccagcgcgggctctcctcctctgctgctgctgcacggcaccggcggcgacgagaacgacctgctcgggctcggcaggatgatcgcgcccggcgccgccctgctctcgccgcgcggccgcgtgctcgagcgcggcatgccgcgcttcttccgccgcctcgccgagggcgtgttcgacgaggatgacgtgcgccgccgcgcgcgcgagctcggcgacttcgtcgcggaggcgcggcagcgctatggcatcgccgcgccgatcgcggtcgggttctccaacggggccaacatcgcggcggccctgttgttgctgaagccggagctgctcgcaggcgcgatcctgctgcgcgcgatggtgccgctgtcggatccgcccaaggccgatctcggcagcaagccgatcctgctgctgtccggacacggtgacccgatcgtgccggcgaccaattcggcgcgactcgcggcacttttcacggaagcaggcgcgcgtgtgacccacaaggtcctgccggcaggccaccaactgtcgcaagccgatgtgacgctcgcccgcgactggatcggcaacgccgagtcgagggcggcctga

SEQ ID NO: 1551 - DNA, 939 bp, BradyrhizobiumColbertium
atgtctggactgcatcatgtcaccgcgattgccggcgaccccatccgcaatttcggcttttacacgcgggatctcggcctgcgcttcgtcaagaagaccgtcaatttcgacgatcccggcacctatcacttctattacggcgacgagaccggccgccccggcaccatcctgaccttcttcccctgggccggcgtgccctcggggcgccgcggcgtgggagagacgcatcagaccgccttccgcgtgccgcagcgctcgctcggctattggacgcaacgcttcatcgagaagggcatcgctcacgaggcgctcgaaaagcgcttcggcgaatccgtgctgccgttcactgatcctgacggcatggcgctcgcgctggtcggcgtccccggggccgagaacgagcccggttggagcaatggcgacgtgccggccgagcatgcgatccgcggcttccatggcgtaacgctgctgctcgacagcgcagcaaggacggcttccatcctcaccgacgtgttcggcttcgccgagactggacgcgagggctccgtgatccgtttcaaggcgtcgggcgacgccgaaggcagcgttgtcgacatctacgaggccaagggcttcctgcgcgggcatcagggcggcggatcggtgcaccacatcgccttccgtgcggctgacgatgccgagcaggcccagatggcgcagaagctcgtgagcaatcacggcctgcacccgaccgagcagagggaccgcaattacttccgctcgatctatttccgcgaacccggcggcgtgctgttcgagatcgcgaccgacatccccggcttcgccgtcgacgagcccgtcgcgaccttgggacgcgacctcaagctgcctgttttcctcgagcagcatcgcaagcagatcgaggacgtgctgccgagcctcgaagagaccgtgtcatga

SEQ ID NO: 1552 - DNA, 912 bp, BradyrhizobiumColbertium
ttggataagctcggcagcctgcgggctttcgtcaaagtggtcgagagcggcagctttgccgaggccggccgacagctgcggctgtcacgctcggcgatcagcaagtacatcgccgacctcgaggagagccttggcgtccagctcctgaaccggaccacgcgtcacgccagcccgaccgagaacggtcagcgctatttcgagcgcgcggtcgtgatcctgtcggagatcgaggctgccgaccaggcggtcacgcaagcccagtcgtcgccgcgcggattgttgcgcgtcaacgcgccgatgtcgttcggcaccatccggctcggaccggtgctcgccgatttcatggcgcgacatccggagcttcagcttcagctcgtgctcagcgacgatctgcttgatcccgtgcaggacggttttgacgtcacgctgcggatcgcggaactggaatcttccagcctgatcgcgcgcaagatcatgccggtggcgcgcatgatctgtgcttcgcccgattatctcgcgcgccacgagacgccaagacatccgcaggatctgcgcgagcacgccgcgctgacctacggcttcctgctgacaggcaaccagtggaagctcaccggcgcagatggcgaccattggatccagccggcctggtcgctctgcgtcaacaacgccgaggtgctgcgcgacgtcgcgatcaagggcagggggctcgcgctgctgcccgagttcattgccgccgatgccttgcgcaaaggcgaactgcgcgccgtcttgcaagactatgccgcgccgcccctcgcgctctatgcggtctatccgccgacccggcatctgtcgttgaaggtgcggctgttcatcgactttctcgtcgagcggttcgggcgggaagacggggcgagcgcgcaagcgcgctga

SEQ ID NO: 1553 - DNA, 786 bp, BradyrhizobiumColbertium
atgcaacagatcactgatgcgatctcgagcccgaaagtgaagcgcgccatcgagctggcgacagggccgctgctgctgtttgccctgtggtggctcgccttcaaggggcaactggtcaacaaggatctgctgccgtcgccgatcgacacactgcgcgacaccggggccagcatcgcggccggcaagatgaccggcgatttcgtccacaccatcgcgcgcgtcggctactccaccttgatcgcagtggtcgcaggcgttccgatcgggatcgtgctcggcgccaaggccgcgatttatcgctcggtcgaattcctggtggacttcttccgctcgacgcccgcgaccgcattgtttccgctgttcctgctgctgttcggcctcggcgatttcgccaagatcgcggttgccgctttcgccgcctggctcgtcatcgtcttcaacgtcgcctacggcgtgatgaatgcccgccagacccgcatccttgccgcacgctcgatgggcgcctcgtcgctccgcatcttcaaggacgtcatcttctacgaaaccctgccgcagaccttcgtcggcctgcgtaccgcggtgtcgcttgcgctggtcgtgatcatcgtcgccgagatgttcatcggcgcgaccgacggcatcggtcaccgcatcatcgatgcacagatctcgtactcgctcaccgacatgtacggctccatcctgatcgcgggcgcgatgggatacgggctcaatctcatgctcctggtgatcgagcgctcgttcattcactggtccggcagatag

SEQ ID NO: 1554 - DNA, 996 bp, BradyrhizobiumColbertium
atgcacatgaagagattcctcgcggcgttcgcagcttccacgttcctgctcggcgcgaccggcgcggatgctgcctgcgacaagaccgagaaggtgacggcagtctggctgccgatcatgcagaccacggcctattatgtcgcactggaagagaagctattcgaaaaggcgtgcatcgagatcgtttccaccaagatggaggcgccgaaccagatcatcgacgctctgatcgcggagcgcgccgacttcggtcctccgggcgcggccgccggcatcgcgatgatcgcggaagccaagttccccggcaagctgaaggtgttcggcctgcagggcgggggcatcgcggtcgaccgcatcaatgacggcttgatcgtcaagccggacagcccgatcaagggcttcgccgatctgaagggcaagtcgctcggtcacgtcccgggcatccagtggcgcaccatctcgcgccacatggttcgctcggcaggcctcgatcccgatgcggacgtcaagctggtcgacctcgccgtcgccatgcaggtgccggccgtggtcggcgggacggtcgatgcgacgctgtcgctggagccggtcggatcgatcgccgtcgcttcgggcaaggcagcccgcgccatgaccaatccggtcgcgcatgtgatcgccgaccccttctactccggggcctcgctgatgacgacgaagttcctgaaggagcggcccgaggttgcgcgcaaggtcgttgccgtgatcgacgaggcgaccgacctcgtgaactccgacttcaagaagtacaagccgatcctcaccaagtacacgccgatcaaggaagatcagctcgaactcctggcgcagccttatctgcgcgggttcaaggatctcaacgacaccgacatgaagtcgtaccaggcgctggtcgacgtcttcatcaaggaaggcgtggtggcggggccgatcaacgtcaaggacaagctcctcgccaagtccgatctcggaaactga

SEQ ID NO: 1555 - DNA, 849 bp, BradyrhizobiumColbertium
gtggatattccgatggggaaggtgacagcgatccgcagcgtagaccggccagccgccgaaagcccgtcgcctgctgcgtccccgaagtcgcggcaggcctacgtcaccgtgcgtggcctgagcaagagcttccacggcacgacgatctacgacgacttctcgatcgatctgccgatggggaagttcatctcggtgttcggcccgaacggttgcggcaagagcacgttcatcaacatgatctccggcctgatgccgatggatgcgggggatgtgctctacgacggccagaccatccgcgataccaggatatcgtatgtcttccagaactacagggaggcgctgttcccctggatgcgcgcgatcgacaacatccattatcccctgagggtgatcgggatagagcgcaaggagcggcgccggcgcgtcgaaaaactgctcgcggatttcgacgtgccgttcgatctcaacgcctacccctacacgctgtccggaggccagcagcagacggtttcgatcctgcgcgcgctcgtgaccgaaccggaggtgctgtttctcgacgagcccttctccgcgctcgactacgagatgacgctgttcatgcgcgagcggcttcagcacatcttcatgaagcttaagaccacgatgctgctggtgtcgcacgatctcgaggaggccatccagctcgccgaccaggtcgtgctgctgacgcgccggccgacgcgggtcgcggagatcgttccggtggatctgccctggccgcgcgatctcgacgtcacgaccggcgaggggttcatcaacctgaaacgccattgcctcgaccgcttctggcgcgaggtcaagcgcgactga

SEQ ID NO: 1556 - DNA, 1689 bp, BradyrhizobiumColbertium
atgatggagaccaacatgacgaagcgccgtttccgcgctgccgccgtccagacgcttgcccgtctgggggactttgaccacaacatcgcgctggccacacagtatgtcgaggatgcggttcggcagggagccgagctggtggtgttcccagaatgcatggacaccggctatctcttcgactccgccgaccattgtcgcgaacttgccgagaccatgaaggacggcccgttcgtgacggcattgtccgcgctcgccaagaagcaccgcatttacatcgccagcggcgtcacggaatgggatccggacaaggagaagatattcaataccggcatcatgttcggtcgaaatggcgagaccgtttgccactatcacaagcagtttctcgccactcacgaccagaactggttcgcgttcggcgagcgcggctgtccggtggtggaaaccgacctaggaaagatcggtcttctgatctgcttcgacggccgcattccagaaatcttccgcgccatggcgatgcagggcgcggaggtaatcgtcgacatggcgaacttcttcgccatggatcaggcggacatgtgggggccggctcgcagctacgagaacggtttgtggctagtggctgccaccaaggccggctacgagcgctcgatctattatcccggcggcagcatgatcgtcgatccgaagggacgagtgctctcgaaagtgccgtacgatacgcacggtatggcgattgccgacgtcgatctcgaggccgcgcatgacaagtcgatctactcggccaacgacaagattgccgaccgtcgtcccgagacttacggcctgatggcggtgccgtatgagaagacgtcggtttaccggatcgcggagcagccgctgatcccggcgaaatccgtcgccaaggtcgcggccgtgcagatgcacgtcaccaaggactgcccggccgacgaggtgctcgagatggtcgatcatgcggccaagctcgggatcaaggttctcaccctgccggaatatgcgttctgcccatcggccattccgaacgctgcagaggccgcggcactggccgaccagacggcgtctctgctggccaagacggccgcgatcgcgtcccgctatcaatgcctgattgcgtttcccacggtggagcgggccgcggccgggctgtacgtcacgacgttcctgatcgggcccgacgggaaggaggttggaagatatcgcaagacgcatctcacggccgaggagcggaaatgggcgaaggcgggcgacgagtatcccgtgttcgaaacgccgttcgggcgcatcggcatcatgtccggctatgatgcggtattccctgaggtctcgcgttgcctcggcatcgcggcggccgacatcatcctgtggcccgcctcgttgcgcgagccgttcgaacgggagctgctggcagtcccaagagccgaggacaatcgtgtggcggtggtgctggcgaaccgcgtcgattcgccctatccgggcggcagcctcgtgattccgccgaccggctttccgctctgggacatcaacgtcgtggcgccgcgcgtgttcaagcttggcgccgtgatgcccaagcacatcgatctcgcggtctgccgtcagaagctgatgatcccgaaggtcgacatgttcgccaatcggctggtcgagacttacgcccccatcatcgccgcctga

SEQ ID NO: 1557 - DNA, 987 bp, BradyrhizobiumColbertium
atgccgaagctcgcgaacgggcatgtcaggacggccgagatggcgaaggctgcgcgaacgctgcgctacaattgggacgacgtcatcttcttcctggaggtcgcgcgtacccgtaatctcgttcgcgccggccagaagctgaaggtcgaccacacaacggtcagccgtcgggtgagggagctcgaacgcagtctcaacacgacgctgttcaagcgcagcaagtcaggtttcgccctgacggaggcggggctgcggctgctccagtttgccgaaggcatggagaacaatgccaatgccatcatcgagaccgtggtcggttccgagaaggcggatgccgccggcgcggtgcgaattgccgccatggaaggcatcggcagcatgtacctgacgacctgcatggccgccttcagcaaggcatggccctcgatccaggttgaactgatcacagatacgcgcctgctcgacatgacgcggcgcgaggccgacgtcttcatcagctttttcaggccaaagggaaggaggctttcgatcaagaagatcggcgagttcaggatctttctctacgcgtccagcgcctacctgcaacgcgcgggacggccgtcggacctgaaagacctcgacaatcacgatttcatcgatttcatcgacgagcacatccagctcaaggagaaccgctggctgtcggatatcctgcgaccggcccatgtcgtgttccgcagcaccagcctggtctcccaatacgtggccgcgtcgaacgggctcggaatcgccatgctgccgtcctacgtggctgcccacaacaatgacctgtgcccggtcctgccaagctatttctccgtgcgcgacatctggctatccgtccacgaggatctgttgcacatcgcccgcatcaaggcggtgatgggcttcctcgaaaagcgcgttgccgccgacgtcgactacctcatgtcggcgacgcatcacgccaagggaaaagcggtgggttga

SEQ ID NO: 1558 - DNA, 633 bp, BradyrhizobiumColbertium
atggtcgagttcgacgacaccttccgccagcatctgcgcgaactgttcgtgtggcgccgagacgtgcgccgttttcgaactgacccattgccggccggcgccatcgatcgcctgatcgagactgcctgtctttctccgtcagtcggcctcagccagccctggcgctttgtcgtcgtcgaggacgaggcacgccgccacgccgtgatcgacgatttcaaatcgtgcaacgccgacgcgctgaaggcctattccggcgaacgcgcggcgcgctatgccacgctgaaactgtcgggcctcgaacgggctccgggccacctcgccgtgttcgccgacaaggccagcgacatcggccacggcctcggccgcgcgacgatgcccgaaacgacggaatattccgtggtcgccgcgatcaccgcgatgtggctcgctgcacgcgcggaaggtatcggcatcggctgggtgtcgatcctcaatccggaccgcatccacgccgttctcgaagtgccgccatcctggaaattgatcgcctatctctgcatgggctacccggaagtggaatgcgaccggccggagctggagcaggcgaactgggagcatcggcgcagcgccgacgacttcacgctgcggcggtag

SEQ ID NO: 1559 - DNA, 783 bp, BradyrhizobiumColbertium
atgatatcgcgtgccgaacttctggaagatgtggtcgccgatctcaggatggcgacgtccttcgtcacgattcttcccgtcgcatcgtcgaagcctgcaggtgacggcgcggtcgcgcgcgcgacctgggcgctgccggtcgccggactgctggtcggcctcttcggagcgctggtctacaagatcgccattggcttcggactgacgccgagccttgcggccctgctcgcgctggccacgaccgcgctcatcaccggtgcgctgcacgaggacgggctggccgacaccgccgacggacttggcggcggtcgcacgcgcgagcgcaagctcgagatcatgcgcgacagccgcatcgggacttatggcgtctgcacactgatcctgtcgttcggcctgcgctggagcgcgctcgcgaccatcgccgatccctgggcggtgatgctggcactgtgcgcggcacatgctgcggcccgcgcgggtgtgccggccttcatgtcactggtcccgccggcgcgggccgatggtctgtcggccagtgcaggatcgccgccgggccgcagcgtcgccattgccagcgtgcttggaacgctcgcgcttgctctggcgttggggccagccaaggcgctcgtcggcctggtcctgctgtctctcgccggcctgctgctggcgcggctcgccgtccgtcagatcggtggacagaccggcgatatcctcggcgcgttcgagcagatgggggagatcctgatcctgctggtcgccgcgtccttccagatggtgcgatga

SEQ ID NO: 1560 - DNA, 504 bp, BradyrhizobiumColbertium
atggccgtcatcttgatcacgggcggagcgcgatcgggcaagagcacgcgcgcggaagcacgcgcgaaggcttttcccggccggccggtctacgtcgcgacggccgaggcgctcgacagcgagatgggggcccggatcgccaggcatcgtgcgcgccgcggaaccgactggctcgaacgcgaggtgccgctcgatctcgtccccgcgctggtcgcgaccgatggcggcggcgcaaggctggtggactgcctgacactgtggctctccaacctgatgcatgccaatcgcgactgggagagcgatgtgaatgcgcttgtcgatgccctgcgccgactgcaaagccccgttgtgctcgtcagcaacgaggtcgggctgggtatcgtgcccgataacgcgctggcgcgcagctttcgcgatgccgccgggatcatgaatcaggccattgcggctgctgccgacgaggtcgagttcgtcatcgccggcttgccgatgaaattgaaatga

SEQ ID NO: 1561 - DNA, 942 bp, BradyrhizobiumColbertium
gtgggctttgcgggcgcgatgatggtggcgatggcggtggatgccctgctgggctggccgtcgtggctgttcacgcggatcggccatcccgtgacctggcttggccggctgatcgcggccatcgatcgcagctggaatcgcgcctccgatccgccggcgttgcgccgagttgccggggccgccggcgcactcgtcgtgatcgcgatttccgttgcgctcggctggctcgttcagtcggcgcttccctccggttggatcgagaccgcgctggtcggtgttctggcctggcccttggtcgcgctccgctccctgcatgaccatgtggcggctgtcgccacccccttgcaggacggcgacatcgccgccgcgcgagacgcggtgtcccgcatcgtcgggcgcgatcccacggcgctcgacgaagccggcatcgctcgcgcggcgatcgagagccttgccgaaaatgcctccgacggaatcgtggcgccggtgttctggggcgcgctgttcggcctgccgggcatcctcggctacaaggccatcaacacgctggattccatgatcggccatcgcagcgagcggcacgaggccttcgggtgggctgcggcgcgcatcgacgatgtcgccaatttcgttccggcgcgcgtgacaggatttctcttcgtgctgctggcgccgcaccggtcggaggcgctgtcatgcatgacgcgggatgcgcgccgtcatcgctcgcccaatgccggctggccggaagcggcgatggccggcggactcggtgtgcggctcagcggtccccgcatctaccacggcagcgccaccaacgagccctggctgaacgaaggcgcgcgcgatccgcgcgccgccgatatgatcgaggcgctgacggtctatcgccgcgccatgctgctgctcgcaggcatgcttgcgatcctggctttcacgtga

SEQ ID NO: 1562 - DNA, 966 bp, BradyrhizobiumColbertium
atgcgcgagcacggtggaaatctcgatctggcccagcagcaatttggcgggcgtgcggaagattggatcgacctgtccaccgggatcaaccgggtgccttatcccgtcggcgaggtgagcgcacgcgcgtggagcgcgctgccgtcgcgcgccgagatcgaggcgctgcatcaggcggcgcggcacgcctatcggacgcgcgcgcctatcgttgcggtgggcggcgcgcaggccgccatccaattgcttccgcaattggcgccgcgtggttatgcgcggatcctggcgccgacctataatgaatatgccggcgtgctgtcggccgccggctgggacgtggaggaggtcacggagctcagcgagctggtgggagcgagccttgccatcgtcgtcaatccaaacaatcccgacggccgccgttatgccccgaacgatctgctcgatctgttgccgcttgtcgatcgcctcgtcgtcgacgagagtttcgttgatgccgttcccgagctctcgctcgcctcggacgcagagcagcccgggctgctgatcctgcggtcgttcggaaaattttacggtcttgccggcctgcggctcgggttcgtgatcggcaattcgtcggacatcgcgagggtcgtggcggcgtcgggcccgtggccggtgtcgggcgcggccatcgcgatcggctgccgcgcattgcgtgatgacgcttgggccattgcgaccacagcgcgcctcttgcgagactgtgctcgcctcgatgacatggtgcagtcgcaaggctggcagcttctcgggggcacgccgctgtttcgactgtacgaaacgcccgacgcacgtggcgcgcaggagaagcttgcgcgcaatcagatctggtcgcgcgtgtttgcaggagcgccgacacggttgcgcctcgggcttcccggcaatgaagctgaatggatccgcctctccgaggtcctagcgcgctag

SEQ ID NO: 1563 - DNA, 1449 bp, BradyrhizobiumColbertium
atggcacgagcgctgatgatccagggggccggctcggacgtgggcaaatcgctcatcgtcgccggcctcgcgcgcgccttcacgcgccgcggcctgcgcgtgctcccgttcaagccgcagaacatgtcgaacaatgccgccgtcaccgtcgatggcggcgagatcggccgcgcccaggcgctccaggcgctcgccgcgggtgtcgagccgcataccgacatgaacccggtgctgctcaagccggagaccgatgtcggtgcgcaggtggtcgtgcatggcaagcgcattgcgacggcgcgagcacgcgactatgcggcgatgaagccgtcactgatgggcgcagtgctggagagcttcgagcggctgaaggcccgcgccgatctcgtgctggtcgaaggcgccggcagtccggccgaggtgaatctgcgcaaggccgacatcgccaatatgggctttgcgcgcaaggccggcgtgccggtcgtgctggtcggcgacatcgatcgcggcggggtcatcgcccagctcgtcggcatcaagacggtgatcgactccgatgatgccgcgatgatccgtggatttgtcatcaacaagtttcgcggcgatcccacattgttcgacgacggctacaagctgatcgaagcaaggaccacatggcgcggccttggcgtgctgccctggttcgcgcgcgccggcgagctgccggccgaggatgcgctgggcctcaccgacgcgcgcaagccgggccgatgcaagatcgcgtgcctggcgctgtcgcggatcgccaatttcgacgatctcgatccgctcaagctcgaggcgggcgtcgatctcgtcatggtgcggccgggcgaagcgattcccggcgacgttcgtctcgtcatcgttcccggctcgaagtccacgcgcggcgacctcgccttcctgcgtgcacagggctgggacatcgatctcctcgcacatcatcgcaggggcggccacgtgctcggcctctgcggcggttatcagatgctcgggcgcaacgtcgccgaccccgatggcatcgagggccctgcgggcgagacaccaggcctcggacttctggacgtgacgacggtgatgagccccgtgaagacgctaacgcgggttgctgccgtgcatgtctcaacgaaccagccgatcgaggcctacgaaatccacatcggccgcaccgatgggcctgattgcgcccgtcccttcgcgacactgaacggcaagccggagggtgcgatctcccgcgagggacgcgtgcaaggcagttatctgcacggtctgttcacgtcggacgcgttccgcaaggcgtatctggcaaagctcgacattcccgcaggcgacgagccctatcacgccagggtcgagagcgcgctcgatgccctcgccgatcacatcgaaacgcatctcgatgtcgacagtttgctcgcgctagcgcgctag

SEQ ID NO: 1564 - DNA, 636 bp, BradyrhizobiumColbertium
atgacgcctgaaccggagacccaaacgaccgaggaaagcgaggcccgtcacgcccagaaaatggcaaagaagaaggccgcccgcgacaagatcatggcgaccaagagcggcgaaaagggcctgatcatcgtccataccggcgcgggtaagggaaaatcctcctcggcattcggcatgatcgttcgctgcgtcgcgcatggcctgccctgcgcggtggtgcagttcatcaagggcgcctgggacaccggcgagcggcgcctgctcaccgggcatttcggcgatctctgccagttccatgcgatgggcgagggtttcacctgggagactcaggaccgcgcccgcgacatcgccgccgcacgcgccggctgggagaaggccaaggaactgatcctcgatgagagcctgcgcatggtcgtgctcgacgagatcaacatcgcgctgcgctacgattatctcgatatcacagaggtggtcgaattcctgaccacgcggaagccagagatgacgcatgtcgtgctcaccgggcgcaacgccaaggacgagctgatcgagatcgccgacctcgtcaccgaaatgacgctggtcaagcacccgttccgctccggcatcaaggcgcaggccggcgtcgagttctga

SEQ ID NO: 1565 - DNA, 375 bp, BradyrhizobiumColbertium
atgaccgtcacacttcacgtctgcatcacctgccgcgccggccagacgctcggcgagggcgaggccacgccaggcaaccggttgcacgctgcgatcctcgaggccggcgtgcccgacggcgtcaatgtggttcccgtcgaatgcctctcggcgtgcagccagggctgctcggtcgcgctcagcgcaccgggacgctggtcctatgtctatggccgcttatccgatgtgaatgcgcgcgacgtggtcgctggcgctgcggcctatgcggccgctcccgacgggctcgtgccatggcgcagccgccccgagatcttccgcaagcagtcgcttgcgcccattcccccgattcccgccgtgccggaggccgccgaatga

SEQ ID NO: 1566 - DNA, 1035 bp, BradyrhizobiumColbertium
atgaattcgcttgcaaaagtccccgtcacggtggtcacggggttcctcggctccggcaagaccacgctgatccagcacctgctcagcaatgcaggcggcaagaagctcgccgtgctcgtcaacgaattcggcagcgagggcgtcgatggcgagatcctgaaatcctgcgccgacgccaattgcccggaagagaacatcgtcgagctcgccaatggctgcatctgctgcaccgtggccgacgatttcattccgacgatggagcagctgttggctcgcccggtgcggcccgatcatatcctgatcgaaacgtcgggcctcgcgctgcccaagccgctcttgaaggcgttcgactggccggagatccgctcgcgcatcacggtcgacggcgtcgtcgcgctcgccgacgccgaggccgtcgcggccggccgcttcgcgccggacccggctgcggtcgaagcgcagcgcgccgcggacgacaatctcgatcacgagacgccgctgtccgaagtgttcgaggaccagatcgcctgcgccgacatcgtgctgctgaccaaggccgatcttgcggggaaggccggggtggaagctgccagggccgcgatcaccgccgagatgccgcgccgcgtcccgatgctcgccgtgacggacggcgcgatcgatgcgcgcgtcatcctcggccttggcgccgccgccgagaacgatctcgccgcgcgtccctcgcatcatgacggcgaggaggagcacgagcatgacgacttcgcctctgtcgtgatcgatctgcctgaggtggccgacatcgatgcgctggtcgcctcggttcagaagctggcgcgcgagcagaacgtgctgcgtgccaagggctatatcgcggtcgcgggcaagccgatgcggctgttgttgcaggctgtcggcgagcgcgtgcgccatcaattcgacaagccctgggggccgggagccaggcagtcgaggctagtcgtgatcggcgagcacggcgacatcgacgaggccgcgatcaaggcgggattgggagtctga

SEQ ID NO: 1567 - DNA, 3246 bp, BradyrhizobiumColbertium
atgcacgtcgtcttccgcgagagccgcggtctcgaggagaccgcgacgccaagggacatcggtcaggacccggccgatctcgtggtgctctcgtattcggattccgacctcgccgcgttcgcagccggctggcggcgtggccgcaacagcctgccgtcgctgcggctcgccaatctcgcggagctgcgccatccgctgtcgatcgacacttatgtcgagcgcacgctgtcgtacgcgcgcggcatcctggtgcggctgatcggcggtgagtcctattggtcctacgggctcgcggccctccagcaattggcgaaggatcgcgacatcgtgctggcggtgctgccggccgatggccgcgatgacatacggctcgatgcgtactcgaccttgccggtctcgacgctgcggcggctcaaggtgctctgcgacaccggcggtccggtcgcggcgcaagctgcgatcgcgcagctcgcgctggcctctgggctctatgccgggccggtcatcggagagatgaccgtgcccgagatggggttctacgatcccgtgcgcggcgtcattgcggcgccagcaagcgacgggaagccgcgcgcgctggtgaccttctatcgctcctatctcactgccgccgataccggctcggtcgacgctctgatcgcgtcgctgcgcgacaagggatttgacacccatggtgccttcgtcacctcgctgaaggcgccgggcgtcgcggattggctgcgcgcccatcttgcgcaaaatcttccggccgcgatcgtcaatgcgacggcgttctcggcaatgggcgacgatggcacgacgccgttcgatgccgcgacctgtccggtgttccaggttgcgctctccacggcgcggcgcgaggattggacgcagtcgttgcgcggcctgtcgcctggcgatctcgccatgcatgtggtgttgcccgaaatcgacggccgcctgttcgcaggggttgtgagcttcaagtccgctgcgatgcgcgatcccgagctgcaattctcgcatctggcgcacaggccggacgaggagcgtgtgagcgcgatcgccgcacgcgtagctgcttggcggcgccttgcggagaagccggcggccgagaagcggctggcgatcgtgctgtcgaactatcccggccggccgcaccagatcgcgcacgccgtggggctcgatgcgctggcgtcggttgaggccttgatctccgatcttgcggaagtcgggttcgacgtcgcgcgggtcgatcggctcggcgaattgctgctcaagcgcggttcgacctggagcattgccgattatcgcgcggcgctgtcgcgactgccccaagccttgcaggacgatctcgcgcaggcctggggcgcaccggaggatgatccgagctgccgcgacgggtcgtttcgtttcgccgcgatccgatgcggccggtcgatcgtcgcagtccagcccgagcggggagctgcggcctcgcgcgatgccgactatcacgatctcgcccgcacgccgcgccatggctatgtcgcgttctatctctggcttcgcgagcaggcccttgatgcggtcgtgcacatgggcgcgcatggcacgctggaatggctgcccgggaaatccgtagcgctgtcgcaagcgtgctggccggaggcgctgatcggcgatctgcccatcatctatcccttcatcgtcaacgatcccggcgaggccgcgcaggccaagcggcgcatcggtgcggtcacgatcggtcatttgccgccgccgctcgcaacatccgcggtgccggaaggcctgcgccggctcgaacgcctgctcgacgaatattcgaccgccgatggtctcgatcccgcccggcgccagcggctgatcgcggcaatccgcgaggaggcccgcgccgcgggcctcgaagacgatctcggcctcgacgcatcggcagcagcagccgaagccattccgcggattgatcgcttcgtgtgcgatctcaaggagagccagttcggcgacggcctgcacgtgttcgggcgcggcgcatgcggcgaagcggagcgcgatgcgctgcgtgccgcgctcgccggcgagcgcgttgcgcctgggccgtcaggctcgccctatcgcgggcgccaggacgtgctgccgacggggcgcaatctcttcgccgtcgatccgcgcgcggtgccgacgccgtcggcgcatgcccagggcataaagctcgctgaagagctgctgcgccgtcacctgcaggatcatggcgactggccgaagggcctcgtggtcgatctctggggctcggcgaccatgcgcaccgccggtgaggagttcgccatggcgttgcatctggccggccttgccccgcgctgggatcacgtctccggccgcgtcaccggctacgacatcatcgcgccggccgagctcggccgtccgcgcattgacgtgacgctgcgggtatccggcctgttccgcgatgtctttgccggccttgcgcaattgttcgaagccgcttccgaggcgctcgcggcgcgcgaggacgagggcgatgaaaatccctattgcaatcgcgcatcgcgcgtctttgcgccgcggcccggccaatacggcgttggcctgtcagcgatccccgacgccttcacaccggagacgcggggcgctgccggggaagcctggctgtcggcatcgtcctgggcgttctcggctgatggcacgatgcagccggaccgcgccggcatcgcacagcggctcgcctccgcagacgcgttcgttcatgtgcaggacctgcctgaaaccgatcttctgctcgccgctgactatgctgcgcatgaaggcggcgtcgccgctgctgcggcgcatctccgcgtcacgggaccatcgctttatcacctcgacacgacacgccccgatcagcctcatgcacgtacgttgactgaggaaatatcgcgcgtcgtccgcgcccgcgctgccaatccggcctggatcgccggcatgatgcgccacggctttcgcggcgccgccgagatcaccgcgacgctcgagcacatggccgccttcgcgcatctcgccggcgccgtgccgccgcatctgttcgacctctattacgatgcgacgctcggcaacgacgacgtccgcaccttcatggcccatgagaatccgtccgcgctcgccgcgatggagacctgcttcacgcgcctgcacgaagcctcgctctggcgaacccggcgcaattcgatcgccgcggcgctgcgggaggcctcatga

SEQ ID NO: 1568 - DNA, 1164 bp, BradyrhizobiumColbertium
atgagcgcggcctcggtcaagggctggtgtcccggcgcgctgcgcccgatgcaatcgggggatgggctggtcgtgcgcgtccgtccgttcggcgggcggcttgaagcccagcaaatcgtcgggctggccgaactggccgagcgcttcggcaatggtctgatcgacgtcacacgtcgggccaatctccagatcaggggcgtcagcgcagatggccaccggccgttgctcgacggccttgcgcggctccagctgctcgaccccgacgccgacatcgaagctaggcgcaacatcctggtgacgccgttctggggcagcggcgacgagacgcagtcgctcgctgcagagctcgaggaggcgctggccgattccgacctcgcgcttcccaccaagttcggcttcgccgtcgatgacggcaggtcacgggtgctcgccggtgattccgccgatatccgcatcgagcgcgaccgctcgggccgtctcctggttcgggccgacggcgcgaggctcggccactccgtcgcgcgcggacaagccgtgagcacggcgctggcgctggcaagctggttcatcgtctccggcggtgcgaggggtgggcgagggcgcatggcagcccacatcgcatccggcgcggcgctgcctcgatcgctgcgcggcgagactgagcccgcgcccgtggtggccgcatcgcggccaggtcactatcggcaaggcgcgctggtcggcgtcgcgttcgggcagatgctgcacgagaccctgcaccaactcgccggttgcggacatgcgctgcgcatgactccctggcggatggtgctcagcgaaggcaagcgcgagatgccgagcgcggcgggcctcatcaccgagccccacgatcccgcgctgcgcgtgattgcctgcagcggagcgccgcgctgcggcgaagcccatgccgacacgcgtgcgctcgccgcagcgctcgcgccgcgcattagcgcggatacgcgacttcacgtctccggctgcggaaagggctgcgcccattccggtgcggctgcgatcacgctgattgcgacgaacaccggattcgatctcgtccgcgatggctcgatccgtgacgcgccggccctgcgcgggctcgacggcgccgacatcgtcagcgatccctccgtcctggtcggagggaactga

SEQ ID NO: 1569 - DNA, 630 bp, BradyrhizobiumColbertium
atgcctcacacctacgagaccgacggcgcggcgatctaccggcaatcattcgcgaccatccgggccgaggccgatcttgcgcgcttttcgcctgacgaggagccggtggtggttcgcatgatccacgccgccggcatggtcggtctcgaggcgcatatccgcttttcaccgggcatggcagcaaccgcgcgcgccgctctgcaaggaggcgcgccgatcctgtgcgacgcgcgcatggtctcggaaggcattacgcgcgcgagacttcctgcggccaatgccgtcatctgcacgctaggagacgagtccgttcccgcgctggcgcaatccatgcacaacacgcgctcggccgcggcgctggagctgtggcggccgcacttgggtggcgcgatcgtcgcgatcggcaatgcgccgaccgcgctgtttcatctgctcaacatgctggaggatcgcgactgcccgcggcctgcggccatcatcggctgtcccgtcggcttcgtcggtgccgccgaatccaaggccgcgttgatggccgatccgccggtacctgcgatgacggtcgagggacgccttggcggctccgcgatcaccgttgccgccgtgaatgcactggcgagccggagcgaatag

SEQ ID NO: 1570 - DNA, 732 bp, BradyrhizobiumColbertium
atgggacgcatcatctgctgcggtctcggtcccggtgatcctgatctgatgagcgtgcgcgcggaccggaccgtgcgcgccgcgcaacacgtcgcctatttccgcaagaaaggcagggcgggccaggcgcgccgcatcgtcgagggcctgctggtggccggcgtcaccgaatatcccatggaatatcctgtgaccaccgagatcgccttcgacagcgcggaatatgttcagctgctcgccggcttctacgacgaatgggccgagcgcctggcgcggcttgcgcgcgccgtcgatgtcgtcgtgctgtgcgagggggatccttatttctatggctcgttcatgcatctgcacacgcgcctgcagggccgcaccgagatcgaggtgatcgcggggattcccggcatggtcgggtgctggaacggcgtagcccagcccatcgcgctcggcgacgacgtcacgacggtgctgatgggaacgcttcccgaagacgagctcgaacgccgcatgcgcgattccgatgcactcgtcgtcatgaagaccggccgcaatctcgccaaggtgcgccgcgcgctcgcatccgccggccggctcgatgacgcctggctgggcgagcgcggcaccatgccgggcgagcgcgtggtacggctcgccgagatcgacgccatcgattgtccttacttcgcgatcgtgctcgtgcacggcaagggccggaatctggacgcggccgaatga

SEQ ID NO: 1571 - DNA, 735 bp, BradyrhizobiumColbertium
atgacgggcacgctgaccatcgcgggcctcgggcccggcagcgacgcgctggtgacgccggaagtctccgccgcgctcgcagccgcgaccgacattctgggctatgcgccctacgtcgcgcgcgtgccaccgcgggcggggcttacgttgcgcccgtcggataatcgcgaagagctgcagcgcgcgagcgaagccctgcggcttgccgccgaaggcgggcaggtcgtcgtcgtctcctccggcgatcccggggtcttcgccatggcctcggccgtgttcgaggcgctcgaacgggcgccgcaatggcaggcgctgccgatccgcgtgctgcccggcatcacggcgatgctggcggctgctgcacgcgccggcgcgccgctcgggcacgatttctgcgcgatcaatctttcggataatctgaagccatgggcggtgatcgagaagcgtcttcgccttgcggcagaggcagactttgccatcgcgctgtacaatccgcgctcggcgagccggccggaaggatttggccgcgcgcttgcggtgctgcgagaggccggcgccggcgcgcgtctcgtgatcttcgcgcgcgcggtcagcgccgctgatgaaaagatcgagacggtgacgctgaacgaagcgacgcccgggatggccgatatgcgcacgctggtgatcgtcggcaactcgcagacacgccgcgtcggccgctgggtctatgcgccgaggcgggcagaatga

SEQ ID NO: 1572 - DNA, 747 bp, BradyrhizobiumColbertium
atgatgcgcgcgctcattctgggcggaacggccgatgcgagcctgctcgccgcggagatcgcgcgcgccggcatcgaggcggtctattcctatggcggccggacgcgcgcgccggccgagcagccgctgccgacccgcatcggcggcttcggcggcgtgagcgggctggccgactacattcgccgcgaaggcatcacgcatgtcatcgacgcgacgcatccgttcgcggccgagatgagccgccatgcgatcgaggcgtgcgcggacgccgatacgccgctgatcgcgctggagcgcgcgccctggaccagggtgtccggcgacaactggatcgatgtcgaagacgtcggcgccgcggccgctgcgctgccggaggcgcccgcaaacgtgttcctcgccatcggccgccagcatatcgcgccattcgcgagcaagccgcagcacagctacacgctccgcttcgtcgatccgccggaagtcgacctgccgttcgccgcggatgtgatcgtggcgcgcggaccgttcacgcttcgaagcgagcttgagatgatgcgcacacgtggcatcggctggatcgtcgcccgcaattcgggcggcggcggcgcgcgcgcgaagatcgacgcggcccgaagcctcggccttcccgtcatcatgatcgcgcgaccgcagttgcccgagcggccacgggtcgagagcgtcactgacgtgatgcagtggctcggtcattctgcccgcctcggcgcatag

SEQ ID NO: 1573 - DNA, 1182 bp, BradyrhizobiumColbertium
atggctaatccctggctgaccatcatcggtatcggcgaagatggccttgctggcctatccgaggcaagccgaaaggcgcttgccgaggcggaaacggtgttcggcggcgagcgtcatcttgcgcttgccgacgctggcagccgcggccgtccatggccggtgccgttcgatgcgaacgtcgtgctgagctgccgtggccggccgaccgtcgtgctcgcttccggcgatccgttctggcatggcgccggtgcgagtctcgccgagaagctcggtggcgaggagtggatcgcacatcccgcgccgtcgaccttctcgctggtcgccgcgcggctgggctggcgcctggacgccgtcacgtgcatcggcctgcacgccgcgccattcgaacgtctcgtgccgcatctggcgcgcggtgcgcgcatcatttgcctcgtgcgcgatggcaaggccgccagcgatcttgcgaaatggctgacggaacgcggctggggcgcttctgcattctggactctcgccgcgctcggcgggccccgcgagactgtccggcagtattgcgcaatggacttcgctgatgatctcgctggcaacctggttgcagtcgcggtggaggcgaggggcgcacagggcattccctgcagctcgggcctgccggacgatctctttgtccatgacggccagatcaccaagcgactggtgcgcgcgctcgcgctgtcggcgctggcgccgcgaggcggcgaacggctgtgggacgttggcgccggttcgggttcgatctcggtcgagtgggcgctttgtggaggggcggccacggcgatcgaggtgcgcgaagatcgcgttgccaacatccgcagcaatgcggccgcgttcggactggcgcatcggatcgctgtggtcacaggagcggcgcccgaagctctcaccgcgttggacccgccggacgccgtcttcgtcggcggcggcttcgataacgcaatgttcgatgcgatctggccgcggctccctatcggggcgcggctggttgcacactcggtcacactggagacggaagcgctgctcggcgaacttcatcagcgccatggcggcgagctgatgcgggtggagattgcgcaggccgctccgctcggccgctaccgctcctgggaggcggcaaggccggtcgtgcagtggagtgccgtccgatga

SEQ ID NO: 1574 - DNA, 369 bp, BradyrhizobiumColbertium
atgaaggttgccggactcggattcaagcaggatgtgacgctggcctcactgcgcgaggctctgcaggcggccggcggtccggagggcctcgcggccgtggccaccgtcagcgacaaggctgacgcggaggtgctgaagcagctcgcgcgcgaatgcggtgtgccgatcagggccgttccagccgatgtgcttgcgaaggtggacacgccgacccggtcgaagcttgtcgcggaaaagttcggcaccggatcggttgccgaagccgccgcgctcgcagtcgcgggttctcgcgcgcggctcattgcaacgcgcgtggtttctcaggatcgcaccgcgaccgcggcgatcgccgagggagatggcgcatga

SEQ ID NO: 1575 - DNA, 783 bp, BradyrhizobiumColbertium
atgacggtccatttcatcggcgcgggacctggcgcgccagatctcctgacattgaggggacgcgatctgatcgcagcctctccggtctgtctctatgccggctcgctggtgccggagggcgtgctggcgcattgcccgcccggcgcgcgcatcgtcaacaccgcgccgctgtcgctcgacgaaatcatcggggagattgccgccgcgcacgcggcaggcaaggatgtcgcgcggttgcattccggcgatctctcggtctggtcggccatgggcgagcagctccgccgtctgcgtgcgcttcgcattccctattcggtgacgccgggcgttccctccttctcggcggcctcggcggcgctggaggccgagctcacgctgcctggccttgcccagagcgtggtgctgacgcgcacgccgggccgcgccagcgcgatgcctgagggcgagaagcttgcggcgttcgcagccaccggcgccgtgctcgcgattcatctgtcgatccatctgctcgaccaggtcatcgcggagctgacaccgcactatggcgcggattgtccggtcgcgatcgtctggcgtgcaagctggccggatcagcgcattattcgcgccacgcttgcgacgctcgatgcggccgtgggcagcgaaatggagcgcacggcgctgatcctggtcggcaagaccctgggcgctgcggatttcgacgaaagccgcctctatgccgccgactacgatcggcgctaccggccggtcggcgccgagccgcgctttccggaggcgacgtga

SEQ ID NO: 1576 - DNA, 1311 bp, BradyrhizobiumColbertium
atggcggccggtcttgtcatctctgctccggcctccggcgtcggcaagaccacgctgacgctggcgcttgcgcgcgcctggcgcagtcgcggcctgaacgtgcagtgcttcaagagcggccccgactatatcgatcccgcctttcacgccgccgccacgggacgcgcgtcggtcaatgtcgatagctgggcgatggaccgcggcgccatcgcgcatctcgtcagtcgcggcgtggacgccgatgtcgtgcttgccgagggctcgatgggcctgttcgacggcgttgccgcgcgcggcgtctccggcaccggcgcgactgccgacattgcggagatgctgggctggccggtggtgctggtgatcgacccctcgggacaagcgcaaacggcggctgcgattgcggccggcttgcgcgattatcgcgccggcctgcgtcttgccggggtcgtgctcaaccgcgtcgccagcccgcgtcacgaggctctcgtgcggcgcgcgcttgaggaggccggcatcgccgtgttcggcgcgctgccacgtcatgccgagatcagtctgccgaagcggcatctcggcctggtgcaggccgaggagcaggccgagatcggcaagctgatcgacgaggccgcgcgcttcgttgccgcgcatgtcgatctcgatggagtgctccgagccgccggcaattggtcggcgcagcccgcggcgaacggcctgaagataaccccgcccggtcaacgcatcgcgctcgcccgcgatgcggccttctccttcgtctatccgcacatgctggaggcctggcgcgcggcgggcggcgagatcgtgccgttctcgccgctggccgacgaagtgcccgacgcgagcgccgacgtctgctggctgcccggcggctatcccgagctgcacgccggcaagctggcggccaatgcacgctttcgcagcggtctttgcgccttcgccacgacgcggccgatgcacggcgagtgcggaggctatatggtgctggggaccgctttgacggatgccgacggcgtccgccatcagatgacgggcctgctcggcctcgagaccagctttgccaagcgacggatgcatctcggttatcgtctcgccacgctcgcatcgccgatgccgggatatcaggccggtgcgcgcctgcgcggccacgaattccactattcgaccattctcgcgcaacctgatgcgccgctggcggtggtgcacgacgcaaccggcgcggtcatcgccgagaccggctcgcggcggggacacgccaccggcacgttcttccacctgatcgcggaggaccggtga

SEQ ID NO: 1577 - DNA, 729 bp, BradyrhizobiumColbertium
gtgagcggcttcgtctccttcgtttccgccggccccggcgaccccgagctgctcaccgtgagaggcgccgcgcggctgcgcgaggcggacgtcgtgctctatgatgacctcgcctccggcgcgatcctcgatctggcgcgacccggcgccaatctcgtcgcggtggggaagcgggcggggcgaccctcgaccaggcagcaccacgtcaaccgtctcctggtcgactatgccgcgaccggcgcgcgcgtggtgcggctcaagtccggcgacgccggcattttcggccggctcgaggaggagctggagacgctgcgcgaggctggcatcggctatgagatcattcccggtgtcacatcggcctgcgtcgccgctgcgcaggccggcattcccctgacccgtcgccacacctcccgccgggtgcagttcatcacgggtgccgacgtcaccggcgagctgccgcccgacctgaactgggcggcgctggccgatcccgaggcgacgaccgtcgtctatatgggccggcgcacctttccggcgctggccgcaaagttgatcgcacacggccttgccccggacactccggcattggttgccgaatccctcggccgtgccgacgagcggctggtccgcaccaccattgccgagctcgccgatcagcttgcgcgcggtggcgcgccctcgaccgccgccgtcatcctgttcggtgcactggcgggggactatcggtga

SEQ ID NO: 1578 - DNA, 678 bp, BradyrhizobiumColbertium
atgcatatcgaacccggaatcgtgacgggcggcaagctcgtgttgagttacgcaaccggcatcgccgcaggcggcgttgcgttgaagctcgcggtcgagaccgtgcgcgagcagggaatcggctcgttcgcggcacgtacgctggccaccacggcgctcgtgttcgtcttcttcgagatcctgccgcacttcccggtcggcgtgtcagaggtgcacttcatcctcggctctacgctgttcctgctgttcggtgccgcgcctgctgctttcggtcttgcgttcggtctgctgcttcagggcatgctgttcgagccggccgacctgccgcaatacggcatgaacgtcaccaccctgctggtgccgctgttcgcgatccaggcgatcgccacgcggatcattgcccgcaacaccgcctatgtcgatttgaagtacggtcaggcgctggcgctttcgacgacctatcaggccggcgtgatcgcctgggtcgcattctgggcgctctatggctctggctttgcgatgaccaacctcgccaacatcgcaacgtttgccgcctcctacgcgctggtcatcgtgatcgagccgctggccgatcttgccgtgctggcgctggcgaagtcgctgcgcggcgtcaccgcgcctggcctcgtcaccccgcgcctgcacaacgcggcctga

SEQ ID NO: 1579 - DNA, 774 bp, BradyrhizobiumColbertium
ttgcggccgtccgtcgcgctcgcgatgctcacgctctccctgataggcatcggctgcggcgatcccgcgcagctcacgcgcgctgcagtcgccgccatcaacgcggccgatctcgtcctcatcccgcgcaagggcacggcgaaatccgatctcgcggatctcaggcgaacgatctgcgcggacgtgctcaccagcggcagaacgcagatcgtcgagttcgatcttcccgtgcgcgacgccggagaagctgattaccgcaagggcgtggacgattggcacgatgcggtcgccgcgacctggtcgaagacgatcgcggatcatctcgaaggtgatggcaagatcgcgctgctgatctggggcgatccgtcgctctacgattcctcgctgcgcattgcacggcggctcgatccgttgccgaagatcgaagtcgtgcccggcatcacctcgatccaggcgctgtgcgccgcccatgcgctgccgctcaacgagatcggcgagccgttcctggtcacgacggggcggcgcttgcgtgacgagggctggccgcacggagtcgataccgtggtggtgatgctcgacggcggcacggcgttccagtcgctcgatccggcggatcttcacatctggtggggcgcctatctcggcatgcaagatcagaccattctctccggtgcgctcgccgaggccggtccgcgcatcgtcgcgctgcggcaggaggcgcgcgagcggcatggctggatcatggacagctacattctcaagcgccggcattga

SEQ ID NO: 1580 - DNA, 1053 bp, BradyrhizobiumColbertium
atgctccccgaatgggtctaccgagagtgccccgagatttccgtccgtcatcgcgaggcggcgatcgtgcggcaggcgcaactcacaaagccgaccggggcgctcggccggctggagcagctcgcaatcgagcttgcgggtctgcaggcgacagagcagccccgcgcttcgcgggcgccgatcatcatcttcgccggggatcacggcatcgtcgcgcagggcgtgtcggcctatccgcaagaagtgaccatcgcgatgatggcgaatttcgcctccggcggtgctgcgatctcggtgctggcgcgcgagcttggctcgcgtctggaggtggtcgacgccggcacgctggcgaccgagccgacggcggggatcgtcgttgacaagccgcgccatggcacgcgcgatttcagcgtcgaagctgcgctcacgtctgcggagttggcattcgcattcgaagccggccggcgcgccgtggtgcgggcggaggccggtcagcctgatctcctgatcttcggcgagatgggcatcggcaacaccacgacctctgcggcgattgcggcgagcctgcttgcggtgagcgccgaggagatcgcgggcagcgggaccggcgtcgatgcggccggtcgcgcgcgcaaggcgcgggtgatcgatgcagcaattgcacgccacgggctcgcgggaggctcggccgaggagatcctgtgcgccgtcggcggcctggagatcgcagcgatcgcaggcgcgaccattgcggctgcgcaagcccgcattcctgtattgatcgacggcttcatcgtatccgtcgcagcgctggcggcggcgcgcctcaatccgtcatgccagccgttcctgttgccgtcgcaccaatcggcggagcagggacatcggctggtgctgcgcgccctgaacgtgcagccgctgatcagcctcgatctcaggctgggcgagggatcgggtgcggccatcgcgttgccgctggtccgctcggcctgcgcacttcacaacgatatggcgacgttcgcgcaggccaacgtgcctgacaggcctagctga

SEQ ID NO: 1581 - DNA, 573 bp, BradyrhizobiumColbertium
atggaaggcgagaccttcctctggctgatacggcatgcggtcgtcgagggcctggccgggacgatccatgctgccgatgcgcgggccgatctcggcgaccacgcaaagttggcggcgctgcgacaccgcttgccgcgggacggcaccagctatgccagcccgtcgcgacgcacggtcgagacggcgcgcgcactgggactcgaaccggcgctggtcagcgagttccgcgagcaggatttcggcgactggaccggccatcggcatgacgaactcgcggcgagcggtggcgagacttacgcgcggttctggcgcgacccggcgcgcgggcggccgcccaacggcgagagctttgcggatcaagtcgcgcgcgtccggtcaggcctggcaaggattgacgcaggctccgcaacgctggtcgtgcattccggcacgatccgcgcggtgctgtgcatcgcgctcgatctcacaccggacgccgcgctgcgcttcgtgatcgatccgttgtcgctcacccggatcgaccggctcgcacgcggctggcgcgtcgtctgcgtcaatcagcaggtcagctag

SEQ ID NO: 1582 - DNA, 1602 bp, BradyrhizobiumColbertium
atggatcgcaggaccgtattgaaggggctggccggcgcaggcggtctcgcattgaccggcctctcggcaccggcgatcgcgcaaggcgcatccgcccggaccttgcgcttcgtcccgcaggccaatcttgccaatttcgacccgatctggggcacgcaatatgttgtgcgcaatgcggccgcgatggtctgggacacgctctacggcatcgattcctcgctccagccgcagcgccagatggtggaatccgaggaggtgacggacgacggcacgacgtggaccttcaagctgcgtcccgggctcaagtttcatgacggcgagccggtgctgagcaaggatgttgtcgcgagcctcagtcgctgggcggcccgcgatccgatggggctgatgatcaaggctctgcagcaggaactcaccgccgtcgacgaccgcactttcaaatgggtcctgaagcagcccttcccgaagatgctttacgcgctggcgaagaacaactcgccgtgctcgttcatcatgcccgagcgcatcgcgcagaccgatccattcaagcagatcaccgaatatgtcggctccgggccgatgaagttcgccaagggcgagtgggtgccgggcgcgaaggcggtgttcgagaagttcaccgactatgtgccgcggcaggagaaggcatcctggctcgcgggcggcaagcagatcctggtcgatcgcgtggaatggatcgtgatgccggacccggccacggcggccgccgccttgcagaacggcgaagtcgattggtgggaaagcccgatcgccgatcttgtgccggtcctgaagaagaacaagaacatcagcgtcgatatcggcgatcctctcggcaatatcggctcgttccgcatgaaccatctgttcgcacccttcaacgacgtgcgggcgcggcgtgcggttctgatggcgctcagccaggaagactacatgcgtgccatcgtcggcgacgacactgcgctctggaagccgctgcccggctttttcacgccgggtacgccgctgtacagcgaagcgggtggcgagatactgaagggcaagcgcgacttcgatgccgccaagaagctgctcgccgagagcggctattccgggcagccggtgacgtgcctcgtggcgcaggaccagccgatcaccaaggcgcagggcgacgtgaccgccgacctcctcaagaagatcggcatgaacgtcgacttcgtcgccaccgattggggcacggtcggctcccgccgcgcgcagaagacgccgccaggtcagggcggctggaacatgttccacacctggcatgcgggcgccgactgcatcaatccggcgccgtacaccgccattcgcgccaacggcgacaaggcctggttcggatggccgaacagccccggcaccgagaaggaggtcgcatcatggttcgaggccaagaacctcgacgaggagaaggctgccatcggtcgtctcaacaaggcggcgctcgatgacgtcgtctacgcgccgacgggcttcttcctgagctacaccgcgtggcgcaagaacgtctccggcatcgccaaggggccgctgccgttcttctggggcgtgtcgaagtccgcatga

SEQ ID NO: 1583 - DNA, 942 bp, BradyrhizobiumColbertium
atgctctcctacatcctccgccgcatcgtcgcgaccctgccggtgatggcgatcgttgcgctgttcgtgttcagcctgctctacatcgcgccgggagatccggccgtggtgatcgcgggcgaccaggcgagcccggaggatgtggagcgcatccggcagagcctcggcctcgaccggcccttcctggtccagttcggaggctgggtctggcgcatcctgcacggcgatctcggcacctccatcttcaccaacctgccggtttcggcgatgatcggccagcgtctcggaccgacgctgtcgctgatgatcgtcacgctgatgctcaccatcgtggtggcggtgccgctcggggtcgtggcggcatggaaggccggcagcctgatcgaccgcgtcatcatgggctttgcggtgttcggcttctcgctgcccgtgttcgtggtcggctacatgctcgcttacatcttcgcactcgagctggaatggctgccggtgcagggttacacgccgctgacgcaaggtttctggccgtggctggagaacctgatcctgccggcgatcgcgctcggctgcgtctacatcgcgctggtcgcgcgcatcacccgcgccgccatgctcgaggtcttgcagcaggactacatccgcaccgccaaggccaagggcctcggccagggcggcattttgttcattcacgcgctcaagaatgcggcggtgccgatcgtcaccgtgatcgggatcggcatcgcgctcctgatcggcggcgcggtcgtgaccgagagcgtgttcgcgatccccggcctcgggcgcctcacgatcgacgcgatcctgcgccgcgactatccggtgattcagggcatcgtgctgctgttcagcttcgtctacgtcctcgtcaatctgatgatcgacgtcgtctacacgctcgttgacccgaggatccgctattga

SEQ ID NO: 1584 - DNA, 924 bp, BradyrhizobiumColbertium
ttgaccgatacgacagtcaatccgcaatcgctaccggccggtctcgttctcgcgccgcagctgcctgacatcctgcggccggtcgcgatccggcgtggcttcgtcggcctcttgcgcggccatccgacggtcgcgatcggcggcgcgctgctgctgacgctggtcctgatcgcggtctttgcaccctatctcggcacggtcgacccgacggcgcttgcacccgccaagcgcacaagggcgccgtcggccgatttctggttcggcaccgacgtgctcggccgcgacatctattcgcgcgttctctacggcgcccgggtctcgctcacggtcgggctgtcggtcgcgatcttcgcgtccgcagttggcctcgccatcggcatgatctccggcttcatccgctgggccgacggcatcctgatgcgtttcatggacggcctgatgtcgataccgcccatcctgctggccatcgcgctgatggcgctgacccgcggcagcgtcggcaacgtcatcctggcgatcaccgtcgccgaaatcccgcgcgtttcgcgcctcgtccgtagcgtggtgctgtcgctgcgcgagcagccctatgtggatgcggccgtggcctgcggcacgcgcacgccgatgatcatcctgcgccatatcctgcccaatacggtggcgccgatgctggtgcaggcgacttatatctgcgccagcgccatgatcaccgaggcgatcctgtccttcatcggcgccggcacgccgcccaccatcccgtcctggggcaacatcatggctgaggggcgcgcgctgtggcaggtgaagccgtatatcgtgttctttcccgcggcgttcctgtcggtcacggtgctcgccgtgaacctgctcggcgacggccttcgcgatgcgctcgacccgcgcatggccaagagtctgtga

SEQ ID NO: 1585 - DNA, 435 bp, BradyrhizobiumColbertium
gtgacgatccaggcccagatcctgaagctgatgctggacctgaagcgccgggttggcgcggccatcatcctgatcacccacgatctcggcgtcgtcgcggaaatcgccgaacgggtcatggtgatgtatgccggccgcaaggtcgaggaggcgcccgtcgcggaactgttccgttcgccgcgacatccctacacacaaggtttgcttggcgcggtaccgcggctcggctcgtcattggtgggcaccgcgaggcggcttgccgaaattccaggacaggtgcctgatctccgcaagcccattgttggctgtgtctttgcgggccgctgtgcgcttgcgaccgatctctgccggcaatatgcgccgggacttgaagagaagggccctcgccatattgccgcatgccactacgcggccaagggagccgttgcggcatga

SEQ ID NO: 1586 - DNA, 990 bp, BradyrhizobiumColbertium
atgagtcctccgctactccaggtcaacgacctcaagaagcattttccggtcaagaccggcctgttcagccggaagtccgagttcgtctacgcggtggacggcgtgtccctcgagatcgcccgcggcgagacgctgtcgctggtcggcgagtccggctgcggcaaatcgacggtcggccgtgccatcctgaggcttttcgacatcacctcgggccaggtcatcctggacggcaagcgtatcgacgatgccgcaccaggcacgatgcgccagatgcgccgccgcgtgcaggtggtgttccaggatccgttctcgagcctcaatccgcgcatgcgcgtgcgcgacattctggctgagccgatccgcaatttcggtctcgccaagtccgccgaagacctcgaggtgcgggtcaccgcgctcatggacaccgtgcgcctgccgcgcgaggcgctgaaccgccggccgcacgagttctccggcggccagcgccagcgcatcggcatcgcgcgggcgctcgcggccgagcccgaattgatcgtctgcgacgaggccgtctccgccctcgacgtctcggtcaaggcgcagatcgtcaatctgctgcaggatctgcaaagcgagttcgggttggcgctattgtttatcagccacgatcttgccatcgtcgagcacatgacccaccgcgttgcggtgatgtatctcggcaagatcgtggaagtggcaccgcgccgcgacatattcgccgcgccaagacatccctacaccaaggcgctgctttcggcggtgccgctgcccgagcccggggcccagcgcaatcccatcattctcaagggcgatgtgccgagcccgatcaatccgcccagcggatgccgcttccacacccgctgcccgttcgtcttcgaccgctgccggaccgaggagccgacgctgcgcgtggcgggagccgagcagtgggtggcgtgtcatctggaagagggcgcgccgacggcggcgtag

SEQ ID NO: 1587 - DNA, 288 bp, BradyrhizobiumColbertium
atgctgttcgccattcacgccctcgaccgcgccggggcgctgccgacacggcttgccaattacgacgcccacaagacgttcctgagcgacacctcgcgcttcggcgtccagatcgtgatgtcaggaccgctcgtctccgacgatggccagacgatgatcggcagcctgttcctgatcgaggcacccggccgcaaggaggtcgaagccttcaacagcgccgatccctttgcctcggcggggatctgggaaaaggtgacgatcacgggcttcctgcgccgccagggctga

SEQ ID NO: 1588 - DNA, 975 bp, BradyrhizobiumColbertium
atgaaaacgaaactgggacatctggcgctgccgttgctgatggcgactgcgttcacaacaggagcgcgtgccgacggcgagaccatcgccgtcttcaccaagaaccagaccaacccgttcttccagacggtgcgggtcggcgccgacaacatggcgaagacgatgaacgcgaagacgctgcaatacatcccgaccaagccggactcgatcccggagcagctcagccagatcgaggacgtcgtggtgaagaagccgagcgcgatcgtcttcacgccggtcgactacaaggcgatggtgccgggcgtggagaagatcaacgaggccaagatcccggtcgtcaacatcaccgaccgctccgccggcggcaagttcctctccttcatcggcgccgacgattacagcctcgggctcgagaccgcgcgcttcctgctcaagaccctcggcggcaagggcaacatcgtcatcatcgaaggcgtcaagggttcactgaccaatgtcgaccgcgtccgcggcttcaatgacgcattgaaggaggctccgggcgccaagctcctggcctcgcagcccgggaactatcaacggctccaggcgctccaggtgatggagaacctgatgcagtcgaacccgcagatcgacggcgtgctcgccgccaacgacgccatggcggtcggcgcgatcgaggcgctcgatggtgccaaccggaaagcgcaggtgatcggcatcaacggcaccaaggaggcgatcgacgcgatcaaggcgggcaagctgctggcgagcggcgactacaacggtttcgcgcaaggttgcctcggcaccatgatggcgatccgcgccttgcgcagccagcctgtcatcgccgagatcgtactgaagccgaccgtcatcaccaaggacaattacaagcccttcgacgtgccgctggaacagcggacctgcccgaccttcgaggatgccggcaagctcagcgcgaagtag

SEQ ID NO: 1589 - DNA, 978 bp, BradyrhizobiumColbertium
atgaccgacatcactaagggcgccatcgcgccgccccgctccttcctgtcacaggacgcgatccagctgttctatcgcctgctcgcggcgctcctgatctgcgcggtgctcgccgtgctgagcgactccttcctgagcctcggcaacatcctcaatgtgctcaggcaggcgagcctcaccttcttcatcgcctccggcctcacgctggtcgttctgacggcgggcctcgatctctccgttggcgccaatgtcgcgctgtcggcctgcctcgccgggaccgtgatccatacgacgggctcgccggtgctcggcatcctcaccgggctcgcctccggcggcatcgtcggcctggtcaacgggatcatggtcaccgcgctgcgcatcccctccttcatcgcgacctacggcatgctctgggtgctgaacggcctcacctattggtacatggccggcgagacgctgcacggtttccccgccggcttccgccagatcggcagcggctatctgttcggcctgccgatcccggtctatctgctgctggtcttcctcggcatcggaacgttcttcgcgcagcgcacggtctggggccaggagatctatgcgatcggcgccaatccggtcgcggcgcgcctgtcgggcattccggtcgcgcgccgcctgctgctggtctacgcggtctccggcaccatggcgggattagcctcgatcatcttcctgtcccggctcaattcggcggaggccgacattggcgaaagcctgacgctgcccgcgatcgcggccgtgctgatcggcggcacctcgctgttcggcggtgtcggcaccgtgttcggcaccttcatcggcgcgctgatcctcaccctggttctgaacggcatgaacctgctcgcggtcagcgccaactggcagccgctcgtcacaggcgtcatcgtcattctcgcggtctggctcgacatgaagacccgccgccgcgcgcaatga

SEQ ID NO: 1590 - DNA, 951 bp, BradyrhizobiumColbertium
atgcgtgaggccgctgtcgtcgctcagcccaatccgctgcaacgcattcccggcgttgccatggtgctggcgcttctgatcgccctgttcagcgtgatcgcgcccggcttcctgtcggtcgccaacctctccaacgtgctggtgcagtcgaccatcctgaccatgctcgcactgccgatgaccttgatcatcatgactgaaggcctcgacctgtcgatgggcgcggtgctgacgctgacctcgctctgcgtcgcgatcgtatcgcttgcaacgaaatcgatgctgctgggccttggcgccggcctgcttgtcggcacggtcttcggcgttgccaacggctggctggttgcgatcgtgggcatcccgcccttcgtggcaacgctcggcacgctcggaatggcgcagggcctgtcgctgatcgtcagcgacggccagagcgtggtcggcattccccacagcgtgcgcgatatctactcggcgacctttctgggcatccccgttccgatagtgatggcgctggtgacctacgccgccttccacgccctgctctatcacacccgcttcggcacctacatcttcgcgctcggcggcaatcgcgaggcgctgcgctatgcgggtctttcgccgaaccgcctcctgatcgcggtctatgcaatcggcggcgccatggcaggcattgccggcctgttgatgaccgcgcggatgaattccggccaccccaccgccggcctcgggctcgaattcgatgccatcgcggccgtcgccgtcggcggcacctcgttcgagcgcggcaatggctggctgctcggcacgctgctcggcgtgctctccgtcggcgtgctgcgcaacgggctgaacctgatctcgctgccgtcctcggtgcaggtcgcaagcgtcggcgttctcgtcatcctcgccctgttcctcgatggcctcaggagccgcgcatga

SEQ ID NO: 1591 - DNA, 1524 bp, BradyrhizobiumColbertium
atgagcgacgcgctccggatcgaagtcacctcacccacgccgctgctggagctgcgcggcatcagcaaggaatttcccggcgtcaaggcgctcgacgacgtgtcctttgccgtctaccctggcgaagtgcacatgctgctcggcgagaacggcgccggcaagtcgagcctgatgaaggtgctgtgcggcgcctaccgcgccgacgcaggcgagttctactacaagggcgagacggtcgcgatcgagtccgctgccgatgcgcagaaactcggcattgccgtaattttccaggaattctcgctggtcccccatctcgacatcgcccagaacattttcctcgggcgtgagccgaagggccgtattcccggcaccatcgatcgacgcaagatactggccgacgccaaacgcgtactcgacaccatcggcttcgacatcgatccctccaccaccgtcgacaagctcggcgtggcgcagcaacagatggtcgagatcgcgaaggcgatcagccagaacgcacgtatcctcgtgatggacgaacccacggcggcgctgtccgaccgcgagaccgagctcttgttcgccttgatcgggcggctcaaggccgacggcgtgtcgatcgtctacatctcgcatcgcatggccgaggtgttcgcgctcggcgatcgcattactgtcctgcgcgacggccgccgcatcgacggcgtcaaacctgccgacgtgacgcctgagcagttggtgcgcatgatggtcggccgcaacgtcgacatgacctatccgcgcaatttcgccgacaagccgggtgaggtgctgctggaagtcaagggcctcagcgcttcgaccggcatttccgacatcaacatcgaggtgcgccggggcgagatcgtcgggctatgcggcctggtcggctccggccgcagcgaggtcgcccgcgccatcttcggcgccgatcccgtgacgtcgggcgagatcatcttcgacggcaaggtcatttccggcgagcccgacctcgccgcccgccgcggcatcgccctgatcccggagagccgcaagagcgaaggcctcgcgctgctgcgctcggtcagcgacaacctcgtggtgtccgcgctcaagaagctgtttccgagcggcctgttcgatcaacgtagcgcgcagcgtaccgccgacggcctgatccgccagttgcgcatcgcaaccccgagcgctcgccagaccgtcggcctgctctcgggcggcaaccagcagaaggtcgtgatcggcaaatggctggcggccggctcgaagctgttcatcttcgacgagccgacgcgaggcatcgacatcggcgcgaagtccgagatcttcgcgctgatcgaccgcctcgttgcggaaggcgcggcggccctgatgatctcgtccgagcaggtcgagatctgccatgtctgcgaccgcgcctatgtgatgcgcgaggggcgcatcgccgggcatctgacacgcaacgaactgaccgaggagaacatcgtgcgattggggatgcatcatgcgtga

SEQ ID NO: 1592 - DNA, 1395 bp, BradyrhizobiumColbertium
atgggaccgccggtcagcacgggcatattggccgagcgcctcaccggcatgatcggctggcgcgcgagcgtcgcgcgcggcgtgctcgatcaacatggccagagcgaatcgcattatcggagcctgccgcccgacatcgtcgtctttcctgaaaccacgcaggaggtcgccgagatcgtcaagctctgcgccggtgcgggcatgccgatcgttccgttcggtgctggtacctcgctcgaaggcaatgcggccgcggtcgccggcggcgtctgcttcgacttcgcacggatgaacaaggtgctggcggtccacgacagcgacatggacgtcgtggtgcagccgggcatcacgcgcaagcggctcaacgcggaactgcgcaatacaggcctgttctttccgatcgaccctggcgccgacgcctcgatcggcggcatgacgtcgacgcgcgcctccggcaccatggcggtgcgctacggcaccatgaaggacaacgtcatggcactggaggtggtgcttgccgacgggcgcgtgatccgcaccgcgaagcgagcgcgcaagtcggcggccggctatgacctgacgcgcatgttcgtcggcgcggagggcacgctgggcgtcatcaccgagatcaccttgaaagtccatcccgtgccgcatgcgatctcggcggcggtctgcagtttcgacaccctgcacgacgccgtggacaccgcgatctcggtgatccagtccgcgatcccggtggcgcgcatcgagctgctcgacgacgtcatgatgcgcggcatcaacgcctacgccaagctcggctatcgcgagagccccaccctgttcttcgaattccacggctccgagagttctgtcgccgagcaggccgaggccgcgcaggcgatcgccgccgaccatggcggccacggcttcgcctgggccaaggcgccggaagaccgcagccggctctggcacgcccgcgacaacacactttatgccggcctcggcctgcgccccggcgcacgcgcggtgatcaccgatgtctgcgtgccgatctcgcgcctcgcggaatgcctgaccgagacgcggcgcgatgcggacgcgcacggctttaccgcgccgatcgtcggccatgtcggcgacggcaatttccacatgctgatcctgatcgatccggccaagccggaggaggtcgaaggcgcaaagtcgctgcaggcccggatggtcgcccgcgccatcgccatggacggcacctgcaccggcgaacatggcatcggtctcggcaaaatcggttatctcgtcgacgagctcggcgaggctgtcgacgtgatgcggtcgatcaagaccgcgctcgatccgaatggtctgatgaaccccggaaagatctttgcaggcggagccaaggcatga

SEQ ID NO: 1593 - DNA, 885 bp, BradyrhizobiumColbertium
atgcgcaacttcaacgagaacacgatcacggacgcagtgctggagcggatcgccggggcaaccgacccccgcgtcaagcaggtgagcgaagcgctggtgcgtcaccttcacgctttcgttcgcgaggtgcggccaacccagaaggagtgggaattcggcatcgacttcctgacccgcactggacacatgtgtaacgacaagcgccaggagttcatcctgctgtcggatacgctcggcgtctcgatgctggtcgatgccatcaaccacccagtgccggagggcgcgaccgagaccacggtgcttggcccgttcttcgttcaggcagccccggaaaaggatagcggcgccgatatctccggcccgatggaaggcgatccaatgctcgtcaccggctcggtctcgaccgtggacggcaagccgctcgcgggcgccgtggtcgacgtctggcactccgacgatgacggctattacgacgtgcagcaactcgacaagatcggcgatctcgcgatgcgcgcccgcttccacaccgacgccaacggccgcttccatttctggtcgatcaagccggcggcctatcctattccgcatgatggcccggtcggcgagatgctggagggacagggccgccatccctggcgtccagcccatgtgcacttcatgatctcggcgcctggtttcgagcagctcgtgacacacgtgttcgttgcgggcgaccagtatctcgacagcgacgtggtgttcggcgtcaaggacagcctgatccgtgaattcgttcgccatcccgccggtcgtgcgccggatggtcgcatggtggagcgcgagtattttcatctcaactacgatttcggcctgaagacgctcgcgagcaacgcgagagccgcttaa

SEQ ID NO: 1594 - DNA, 903 bp, BradyrhizobiumColbertium
atgaccgacgctttggggaacgttgccttcatcggaatcggcaagatgggcctgcccatgtcggtcctcgtcgccaaggccggttttgccgtcactgcgttcgaccagagcgcggtgcggatcaacgaggcacgcgcgcaaggcatcgcggtcgccgcatcgccggcggaggccgtgcgcggcaaggcggctgtcgtgacgtccttgccagatgacgctgccctgcgtggggcgctgctcggccccaccggcctcatcgccgcgatgacgcccggtgctgttctcatcgagaccagcacggtgagtgtcgaagcctccgccgagatcgcagctgccgcgcaaagccgcggcattgcctatcttcgctcccccgtgtccggcaatgccagcatcgtgcatacgggcgcgctgacttgcttcgtatcagggccgaaagaggcgttcgagggcgcaaagccgctgttcgccgccttcacccgggcccagacctatctcggcccggccgaggaagcgcgctacgcgaagctctcggtcaatctgatgatcgccgtatccgccgcgatgatggcggagagcctggcgctggcgcgcaagggcggcattgcctggcaggacatcctgaaggttctcgacgacagcgccgtggcttcgccgatggtgaagtacaagaccgcgccgctgcggacccgtgatttcgagtccaccttctcctgcaggcagatggccaaggatctcgacctcatcctcggcgccgggcacgccgtcggcgtgccacttcagctggccgcgcaggtgcgcgagacctatggcgcgcttgtcgcgcagggcgatggcgagaccgacttcattgcgaccgtcaagcatctcgagcggctgtccggcctcgacgaaccgaagctgtga

SEQ ID NO: 1595 - DNA, 1368 bp, BradyrhizobiumColbertium
atgcgacgcacgctgatcagatcagccaccgtcatcagcatggatgacgcgatcggcgacctccgcaccggcgacgtgctggtcgaaggcgaccgcatcgttgacgtgctgccgtccatcgacctcggcagcggcgaggcggagatctttgatgggaccggccgcatcgtcgtccccggtctcatcaacgcgcacatgcacacctggcagacaggcttgcgcggctttgccgcgaactggacgctgctggaatatttccgccgcatgcatgccgggctcgcgaccgtattccagcccgacgacatctacatcgccacactcgtcggggcgctgaatcagatcaaccatggcgccaccacactggtcgactggtgccacaacaacccgacgcccgatcataccgacgctgccgtccgcggcctgctcgagagcggcatccgcgcagccttcttccacggctcgcccaagcccgaaccgaagccaggcgagccgcatttctcggaggtgccgcatccacgccgcgaggtcgagcggctgctcgcaggcgccctcgccgaccgtgacggtctcgtcacgctgggacttgctatcctgggaccgcactattcgaccctcgacgtcgccatgcacgatctccgccttgcgcgtgagctcaacctgatcgcatcgatgcatcagggcggcggcccggccaagacgcccggcggctgggagaagctgatcgaggccgggttcgtcggtccgggcgtgaacatcgtccatggcaacgatctggccgatgaactcctggaccggatggttgatctcggcgtgtccttctcggtgacacctgagaacgagatgatccagggccacggcttcccgatcaccggacgcctcctgaaacgcggcgtgcggccgacgatcggcattgatctggaatccgtgctggccggcgatcttctctcggccgcccgcgtcgcgctctccatgcagcgcgcactcgacaatgcggagtcgagaaagacgagcggcacgataccggtgacgaccacaattccggtccgcgaggcactgcgctgggtcacgacagaaggtgcccgcatgctcggccgcgagcaccagatcggatcgctgacgccgggcaagctcgccgacctcgtcatcatcgacgcctcccatctcaacctcgtcccggtgcatgatcccgtcgcgaccgtcgtgatgcagacgagccttgccaacatcgaggccgtcatgatcggcggcagctggaagaagcgaaatggccgattgctggttgacgggctggagtcgaagaaacagcggcttgcgcaatccggcgagcggctggtgcaagacatcaaacgacagggacgcgctgcctga

SEQ ID NO: 1596 - DNA, 1080 bp, BradyrhizobiumColbertium
atgatcggttcgttcacctttgaaaacttgccctcccgcgtcgtgttcggcagcggaacgcttgcgcaagccgcggccgaaatcgagcggctcggcggcaagcgcgcgctgatcctgacgaccccgcagcaggagaatcaaggcaggaacctgggcacggctctcggcccgctctatgccgacatctttcccggcgccaccatgcacacgccggtggaggtcacggaacgcgcgctcgccgtgatgaaagcctgtgcggccgactgcgtcgtcgcgctcggcggcggctcgaccaccggcctcggcaaggcgctggccctgcgcaccggcgtcaaccagctctgcattcccaccacctatgccggctccgagatgacgccgatcgtcggccagaccgagaacggcctcaagaccacggtgcgcgatgcggcgatcctgccggagaccgtgatctacgatgtcgatctcaccctgacgctgccggcgagcctcgccgccacatccggcatcaatgcgatcgcgcatgctgtcgaggcgctctacgcacgcgataccaatccagtgacgtcgctgatggcggaagaaggcatccgtgcgctggcgcgcgccctgcccgcgatcgccacgaacagcaacgatcgcgaggcacgcaccgaagcactctacggcgcctggctgtgcggcgtctgcctcggcacagtcggcatggcgctgcatcacaagctctgccacacgctcggcggcactttcgacctgccgcacgccgaaacacacaccatcgtgctgccgcattccctcgcctacaacgcaccggccgtgcccgatacgatgacgcgcatctcgcgcgcaatcggcgccactgacgcatcccaaggactcttcgaactggcgaggcggctgggtgccacgctcgcgttgcgcgatatcggcatgcccgagagcggaatcgataaggctgccgatcttgcggtcaccaatgcgtactggaatccgcgcccgcttgaacggaacgccatccgcgacctgatcgcacgggcctgggccggcgagccgccgggcgccattaaagctgcggcttga

SEQ ID NO: 1597 - DNA, 324 bp, BradyrhizobiumColbertium
atgtcgggcccgatcaggcacatcgtgatgtggcggctgcgcggggagaccccagaggagcgctccgccgcacggctcaaggtcaagaccctgttcgagggcctgatgggtcggatcgacggcctcacccacgtcgaggtcggcatggacgtcagcgcggtcgattacgcatgcgacgtggtcctgctctccgaattcaaggaccaagccgcccttaccgcctacgccaaccacccggaacatctgcgcgtgcgcgaggcgctgggcgacttgcgcatcgggcgctaccaggtcgattatcccatcgaagagaccggcgcatga

SEQ ID NO: 1598 - DNA, 924 bp, BradyrhizobiumColbertium
atggaccgactgctccagctcgaggtcttctccaaaaccgctgaactcggcagtctctccaaagccgccgaagctctgcggatgtcgaacgcggctgtcagtcgtcacctcagcgcgctggaggagcggcttgcggtccggctgatcgaacgcaacacccgccggcaatggctgactgaagccggacaggagctactgcagcgctgcagcacgctcttgaacgaattggccgaggccgaggacgccgtctccgaccgcgcgctgtcacccaagggcatgctgcgcgtaacgagctcgctctccttcgcgatgatctatctggcgccgatgctgcccgccttccgcgcgctctaccccaatctcagcgtgcagatcatcagtgcaaaccgctatcccgacttcatcgaagccggcattgacgttgcgatccgcacgcgcgagcacgagccggattccaacatcatcgtccgccgcatcggccagatgcatcgtgtgcttgcggcagctccctcttacctggagaagcatggccggccggagcatcctgctgatctcgcccgccacaacatgctgatctacaaccttgccaacgatccgtattcgctgcggctcagccagggcagcaccacgcagaccattcgcatcgcgccgacactcgacagcaatgacggccagatcatctgtggtgcggcgcgtgcagggctcggcatcctgatccagccgctctacatcgtgcagggcgacatcgcggcgggccggctggggccgggcctgatggggtgggggctgcctctgctcaccatgaacatcgcctatcaaaaccgcgtcaggctgcccgcgaagatcagggtcttctcggacttcctggtcagccacatccgcgagcattcacctccgggtatctggatcgacgcggccaagtga

SEQ ID NO: 1599 - DNA, 1536 bp, BradyrhizobiumColbertium
atgatcatcgagtttcgctgtgagcgcgagtacgcgcggcaatggatggaccgcgagatgctgtccgtcgatggccgagacgttccggttcagatcgtatggatgccaacggcggaggcgcggcccgcaggtctcgatgccctgttcgagctcgaacgcatggtgttgcgcaagggcaagcgcagcggcgccgacagactgaaggtcattccggaacgggcatcggctgacggcgacgcggcggacgtgatcgtcgattttacgagcgccgcgcgggatcccaactgctctgcccgactgtatcttcgtccgctcttcaatgaagccgcaggcgaaaacgccgcgctggccgccattctcgccggcgacctgcccgtgatcgacatcatcaacgagatcgacggttcagttctcgaccgcggccatccatcggcggagattgccgcgggcctcagcggcgcgcttgaaacggtcatggcgcgaaccctgaccatggtggcggcgatcctgtcgggaaggccgcgcattgtcccgcagttggcccggccggccggaaatggcccacgccgcggacccgccggctttgttgctcgcggccttgccgtatcgatcgcaaaagagatttatcgtctctgctgctatgctccgcattggcatatcggctggcgcttcaatgatggcgcgggcgtctggcagaccggagatctgtcgggcccaagctggacggttctgggagatcctggaaaccacttctacgcagatccctttcccatcacgtggcagggacgaactttcgtcttctttgaggatctcgatcaccgcgtcggaaagggcatcatttcggcgatcgagttcaacgacgcgggcccggtgggagaagtcgtgcctgtgctggaggagccctggcacctctcctatccctttctgatcgagagcgacggcgccctgtggatgatcccggagagctcgcttaacggcgacgtcacgctctacaagtgcgttcgttttccggacaagtgggagcggcacgcgacgctgctgtccggacttgaactggcggacgcgaccatcacgcagcatgacggcctgcattatctgtttggcgcttggcgcgacggaaccggcggttattcggattcgctcgcgatctattgcgccgatcgtctcttgggaccctggtcgccccacgccagcaatccggtcctcatcgaccgcgcaagcacgcggccggcggggaatttcgtcaccctcaatggcaaattgtggcgaccggtccaggactgttccgatggctacggcgcagcccttgcgctagcggaggtcgtcgaactgtcgccgacgacattcaggcagatcgtccgccactcgctgaggccaggaccgctttggccgggcaggaagctgcacacgctgaaccgctgcggccggctcgaggtgatcgacggatcgcgcgttcaacccaaaactcgcgcattcgcaagtcaatttccgtcgatggtctcgtctgcacgaaccagcccgagttcgactgtttga

SEQ ID NO: 1600 - DNA, 1095 bp, BradyrhizobiumColbertium
ttgcacgtgcttctcgcgcagacccaggcagagaacgccggtgcgcaggagatatcccggcttctcggcgccggcctgaccgctcgcggctatcgggtcaccaatctgttcttctttcgcaaatcagattcgttcgatgagccgcccgatacactgtattgcgcgccgcgccggccgggcaatccggtggcattgctgcggatgctgtggacgctcaggcaccatctcaggaccacccggcccgacgccgtcctgacgttccagcatttcggcaacgtcatcggcggcagtgtgacgcgcctcgtcagccgcgcgcctgtcgtcgcaaatcaggtctcgtccgcgctgtcgatgagctggcccgtccgtaccgccgatatcgtgatgggcagcctcggcttctttgaccgcatcacgctcaattcgaaggacatggaacgcgagtactcgcgctatcccgcggcctaccggtcacgcatggtgcatgtgccgcatggcttcgacgacaaggccctcacgctgtcgaaggaggttgctcgacaagagttcaacctgccgcaggattgcatcttgctgggctgcgcagcacggctgcatccgcacaagcggctcgatatggcgatacgtctgctgcctgagcaaccgtcctggcaccttgcgctcgccggccagggcgccgacgaggcgcggctgaggcagcttgcgcgtgacatgaaagtatcagaccgactgcatctgctcggggaaatccctcccggccggatggcggacttcctcgcctgtctggacgtcttcgtatttccgacgcaggcagaaaccttcggtctggccgcggtcgaggctgcgaatgccggtgttccctccgtcgtgactgatctccccgtcctgcgcgaagtgttgtgttacgaaggacgaccgactgcgctcttcgtcgatgcctccgaccatgcacagctctccgcggccgtctccaggctgctgacggacaagcaactgagcgtcgagctgcgacaaaacgccaaaggcctgcgattgcgctattcggtagatgctatggtggaggaatacgttcgcattctcgagcaggtcacttga

SEQ ID NO: 1601 - DNA, 1347 bp, BradyrhizobiumColbertium
atgatcgaatccatcctccagttcatgcggcgcgacgtcacgcgcggtgttgtcggaaccatcctcctcaaggttggcagcggcgtgctcgcgtttgcattattctcgctcgcggcacgaacgatgtcgcccgatgggttcggtatcttcgcgacctggctttcggtcgcccagatcgcagccgtcatgggactggtcggccaggaatcgctgctggtcagattcctgaacgagtatcaggtcggcggccggccagatcttaccaaaggcgtcctgctgtcgagcttcaagatcacttcagccgcaatgctgatcgtgatcaccgggatcgccgtcgtcgcgggcgcgcgaggcgatgggtggctgctgatcattgcagtgtcggcctacacggccgtcaatgccggcgtaatgctcgggagccagatcgcacgctcgctcgtcagcatcctcatgggggaaggcaatcgcgagttcttctggcgagccatcgtggtgctgtttctactggtcatgctgctcggccatcggcaactcgatcccactgaattgttcgcggtgatgacagtggccatgtcggtaggcctgcttgcgcagatcgtttcgatcgcgcgagtgttgccggacttgcgcaacacgccggcgcgatccgaaacgccccgctggcgatcgagcgcccttcacttctggctggcatcgatcctcgaagcggcgaaccagtatttcgacgtcattctggtctactggatgctggatccggcgacggccggtgtctactttgcggcctcgcgactggccaacatcttcgccatgctgtccgcagcgctttacacgttcggcgcgcgtcgacttccttcactgtatttcagcaagaaccatcgggagttcgagcgaaccttgcgattgatggcggaagtgacagcgctttgcgttgtcgccggcctcgccatcatctggattggcggcccctatctcctcaacctgttcggaccgcacttcaccgcacagcatgcggtcttgatcgtgctcgcgatcggaaccgccatccaggcagcaggcggccccgccgctgcgatcctgcaactgaccggccatgaacgaatctatgttccggtcgtcgccgtcaacgtcgcgttgcggctcgcaggattcctcgtcctcatcccctggctcggcgtgcttggcgcagcgatttcggcgaccgtgtcgctctcgcttgcaaccattgccctgaacgtcctctgccgccgccggtccggagtggatccttcaattctcgtgctcctgcgcttctctggatggaggcgcggcaactatgctgtccgcggcgcggagacgcgtgattag

SEQ ID NO: 1602 - DNA, 120 bp, BradyrhizobiumColbertium
atggacgacttgcaggaactcgcccgcggcgacgatgtcgcggtggcgccggctgcttcagtctggaacatcgccgtcctcattgtcccagatcgtgcaaggtccagctcaatcgattga

SEQ ID NO: 1603 - DNA, 1212 bp, BradyrhizobiumColbertium
atgacgacggatagacccgtaaccgagccagccgatggcggcgagaacgcggagatcgtgatcgtcggcggcggccttgcgggatcgcttgcggcggccgtgttggcgcgggcagggcatcgcgtcgctctcgtcgacaagcgcgcggtctatccggacgagttccgggtcgagaagatcggcggccatcaactggatttgattcgcaagctcggctttatcgatgcgctcgagcatgtcgcttgccgatatgaccgggtgctgaatatccgcgaaggcaaggtggtcgatgtcagtgtcggtcaggcgtatggattttcctatgccagcctcgtggccacggcgcgtagccagatccccgattgctccaatctgatcgtcgacgaggtcatagcgatcagcaacggcgacgatgttcagcatgtcgaactggcctccggccggcgcttgactgcgcgcctcgtcgttctggccaccggcatggcgggagtcctgggttacaagctcggcatcaggcgccgtgtgctggccgagcgccactcggtgtcgttcggcttcacgatcgctcgccgggacggcatcccgttcgatttcgaagcgctcacctgctatggcgaacgtacggcggacggcatcgactatctgagcttgtttcccgtccgtgacggcatgcgggccaatctcttcatgttccgcgatccgacccacccaatcatgcgcgaactgcgccgggaaccggaagcgacaatcttgcgcctgctgccgggattgcgctcctacctcggcgatttccgcgtgaccgacagggtccagaattgggtgatggacctgaccgtcgtagaagggcatctgctgcccggcgtcgtgctcatcggcgatgcgttccagaccaactgtcccgccgccggcacgggcgtcgcccgcctgctggtggatgtcgaccggctctgcaccgaatacgcgccgcaatggctcatgagcgcgggcatgggccgtgagaagatctcgcagttctattccgatcgcgagaagattgcagcggaccagcagtcgctgaagatggcgcgcttccgtcaagccctgacatcccgcaatggtgtcggctgggacgtgcggcgacggttgcacttcctgcggcgaagtctgacacaccgcgtcgatcaaatgcaccccggttggattgggcgtatccgcggcgcattgcgcgcctga

SEQ ID NO: 1604 - DNA, 1143 bp, BradyrhizobiumColbertium
ttgctcatgaacaagcctggcaacacgttcgacatcgtcatcgagcagtctttcgactttctatctccggaatatgcagagctgtttgatcgctcggctgctacggccttccagcacccgatctggctgcattgcctctacaccaggctcgcgccggaagcgggtgcaacgcctctggtcgtcgtggtccgccaccgcgcgacgggggcccttgcgatggtgctgcccctgctcagaatccggcgcggtccaatacgaacggtcgagttcgccgacctccgcgtttccgactatctggtaccggtctgcagcccggacgtgttttcacaactgctcgacgatgcaaccgcaagctcgcaaatccggcggcttgtgcgccccttcgatctgctccgactgaccaagttgcctgacggacggcttccgatcgaaaaactcctcgctgcgtcccgccgtgtgtcgatggacacgaattcctacgcgacgattctcatggcaccgttcgagcaatggcgggccagtgcgatggaccgctcctaccagaaggagctcgcaaagaagtatcgtcagctccagaagaagggctcgctgagcttctcatgctgcggcgacagcgcctccgtcctcgaggcactggacgtgatgcgcaagtttcgcggcccgcgctttcacgcacagggcgacggggacctgctccagcgccctgaatactacggcttctattccgacgtagcgcttcgcggccttggctccttcgtccgcctctacgccatgaagatggacggcgaagtgattgccgccgtgctcgggctgtgtcatcggggcagcttcctcatcatcatgagcgcattcgacattgctgggtacaagagccagtctctcggcgcgctgatgttcgagcaggtggcgcgtgattgtatcgagcgcggagatcggatgctcgatttcaccatcggcgacgagccatacaagaaattgttcggcgggcagccttcgccggtgtgggctgtcacgaaagccggcagtcccgtgggcgcggtcgccctcttcgccctgaagcaggctccctggctcaagttggcggtcaagcggctttcggacctgaggctccagcccgctcgtaccccagctcctacgcgttga

SEQ ID NO: 1605 - DNA, 123 bp, BradyrhizobiumColbertium
atgaaggctttcgtacttggctgcgttgctgccctggtgatcgccgttgcaggaatggtgatcctgaaccgcgttcaggagccggtcgcccaagcgttcacgacgagcgcggtacggctctga

SEQ ID NO: 1606 - DNA, 1257 bp, BradyrhizobiumColbertium
gtggccgtagcgctgttgatcatctttgctgcatcatccgtgcaagccgacctggtcgggcatggcggccccatacgcgctctagccgtttctccggatggcaacagccttctctccggcagtttcgacacggcggccattcgctggtcgctcgagacggagaccgcacggcaagtgctgcggtaccatgcggacggcatcaacgcggtcgcctttctgaaggacggtcgcatgatcacggccggggccgatgcgcgaattgcggtatggactccgggccggccggagccggaccgggtgctggagggacatctcgctccgattatggcgcttgccgtgtcgcccgatggggcgcttctcgcatcggggtcatgggaccgaacggtgcggctctggtcgctggcggacggcacgtcgcgcgtgctcgaagggcatacgcagaacgtgaacggcgtcgctttcctgccggacggcagactggtcagcgtcggctacgatcttgctctgcgcatctggcgtttgccggacggccagcccgacaccgtgacgctgtcggcgccgctgaacgccgttgccgtggcgccggatggtgagatcgtcacaggtgcggtcgacggcaagctgcgcatgctgacgaaggatggcaaggtcggcggcgaggtcgcggccggtcccgcgccggtggtggccttgacggtgtcggcggacggcatgctgatcgcagcggccggtgtcaatggcacggtggcgatcgtcgatcgcaagtcgcgcaacctgctccgcacgccggttgggcccgggttgccggtgtggtccgttgcgtttctcccggatagcgagacgctgctcacgggaggtgcggacggcaggatcaggcgttgggatgcgcggaccggtactcccgtcggttcgactccggtgggatccgatccgcttgccgcttacgcgggcgaccacggtgcggatgtttttcgggcgtgtgttgcctgtcacacgctgtcggacaaggaggtgcagcgggcgggtccgaccctttcgggactgtatggccgcaggatcggttcactcccaggctatcgcttctccgacgcgctgaagaccatggacatcgtctggacgccggagacagtcgcaaggctgttcgaaatcggaccgaacgcctatacgccgggcaccaagatgccggaacagcgtatcggctcgcccgaggaccgacgcgccctcacagacttcctgggccgcgcgacgtcgcgatag

SEQ ID NO: 1607 - DNA, 273 bp, BradyrhizobiumColbertium
gtgatccttaaggaggaagaaccggcgctctgcgtccgctgcggcacgccattcggagtgaagagcacaatcgagcggatcgcggccaagctcgaaggccggcactggatgtatccggctggcgacaagcggctcgaggcgctcaggatgtgcgccgactgccgcgtcatcgtcatgagcgaacagcaattcgatccgttcaagggagttccggaacgaacgccgccgcgcacgacggatgactatctacgtcaacgcaacggcaaggactag

SEQ ID NO: 1608 - DNA, 1002 bp, BradyrhizobiumColbertium
atggcgtcgtttggaaggttcattcgtctggcggtgggagcctgggcgctgcttctcttggtgacggcggcgcccgcgggtgcgcagcaagtcaacccgaccgcaagcgcggtcaaggagcagcagcttctgcaggagcttaaccggatccagggacgcgtcagcattcccgatcagcgctccggtgttctcgagcagccgcagggacgcgaatggcgggaattccgcgatgtgacgctgcgatggatcggcggcattgccatcctcggcatgatcgccgccatcgtgatcttctatctgaccgtcgggatggtgcgtctcgaagccggacggtcaggtcgcaccatcgtgcgcttcaacgcgtttgagcggttcgtgcactggctgacggcaagctgcttcatcgtgctggccatttccgggctgaacatcacgttcggccggccgttgctgctaccgctgatcggcttcgaggccttttcggaatggtcgcaatgggcgaagttcgctcacaattatctgagcttccccttcaccctcggcgtcgtcctgatcttcctgatgtggatcggcggtaatatcccaagcaaggtggatgtcgagtgggccaagcgcggcggcggcctgatcgggcacgaccatccgccggcctaccgcttcaacgccggacagaagatgatctactggatcgtcgtgatcggcggcggtctcgtcgcggcaagcggctacgcgctcatgtttccgttctacggcaccgggatcgagggcatgcagatggcccagatcgtccactccatcgtggcggtcctgttcgtcgccgcgatgatcgcgcatatctatatcggcaccatcgggatggaaggtgcttttgaagccatgggctcgggcgaggtcgacgtcaactgggctcgcgagcaccatagcctctggctggacgagcagaaggcgcgaaccggaccgaacgacggacagccgcaacccgcaaccgcggcggccgaatag

SEQ ID NO: 1609 - DNA, 597 bp, BradyrhizobiumColbertium
atggctcggatgaaatttctctgcgacgctgatcgctgcatcgagtgcaacgcctgcgtcaccgcctgcaagaacgagcatgaggtcccctggggcatcaaccggcgccgcgtcgtcaccatcaacgacggcaagccgggcgagcgctcgatctcgatggcctgcatgcattgcaccgatgcgccttgcgccgcggtgtgccctgtcaactgcttctacaccaccgcggatgccgtggtgctgcactcaaaggatctttgcatcggctgcggctattgcttctatgcctgtccgttcggtgctccgcaatatccgaaggttgggaacttcggatcgcgcggcaagatggacaaatgcacctattgcgctggcggtccggaggccgacggcagcaaggccgaatacgagaaatacggcgcgaaccggctcgccgagggcaagctgccgctgtgtgctgaaatgtgttcgaccaaatccttgcttgcgggcgacggcgagatcatcgcccagatctacaaggagcgcgtcatgaagcgcggctacggctcgggcgcttggggctggaagaccgcctaccgcgagacgatcgagtcctga

SEQ ID NO: 1610 - DNA, 2943 bp, BradyrhizobiumColbertium
gtgcttatcaagcgaacaaaccagcgttccgatcgccgaggctccgttgccgagtccctcgcaggccaggccggcggactggatcgccgcacattcctgcgcaggtccggtctggctggcggtgctctcgccgcgctgggtgccatgccggtcggcagcgtgcggaaggctgaagcggctgctgccggcccgcttgccgctggcgctgtcgtcaagaagagcatctgcacgcactgtgcggtaggctgcaccgtcacggcggaagtgctcaacggggtctggatcgggcaggagccaagctgggattcgccgatcaaccgcggctcgcactgcgccaaaggcgcatcggtgcgcgagctcgtgcacagcgatcgccgcctgcgctatccgatgaagctcgtgaacgggcagtggacgcgcgtgtcctgggacatggcggtgaacgagatcggcgacaagctgctccaggtccgagagaagtcgggcagcgattccgtctattggctcggctccgccaagatgaccaacgagggcgcctatctgttccgcaagctcggtgcgttctggggcaccaacaacacggatcatcaggcgcgaatctgccactccaccaccgtcaccggcgtcgccaacacgtggggctacggtgccatgacgaacagcatcaacgatatgcgcaactccaagacgatgctgttcatcggcagcaacgcggcggaagcgcatcccgtcagtatgcagcacctgctcgaatccaaagagctcaacaaggcgaacttcatcgtcttcgatccgcgcctgacccgcaccgcggcgcacgccaccgagtatgtccgtattcgccccggcacggacattccggtgctctacggcatgatgtggcacatcctgaagaacggctgggaggacaaggagttcatcgcccagcgcgtctacggcttcgacgatctgcgcaaggaagtcgagaagtggaatccccaggaggtggaacgcgtcaccggcgtgcccgcagcccagctcgaacgcgtcgccaagatgttcgccacgcaaaagccggcgaccatcatctggtgcatgggacagacccagcacacggtgggcaccgccaacgtgcgggcaagctgcatctcgctgctgatgacggggaacatcggcaaggcgggcgccggcgcaaacatcctgcgcggccatgacaacgtgcagggcgcaaccgatgtcggcctcgatatcgtgacgttgccgttctattacggccttgcggaaggcgcctggaagcactggtctcgagtctgggaggtcgattacgactatctcgtctcccgcttcgacgagaagaagctgatggagacgccaggcatcccgctgacgcggtggttcgatgccgcgctgttgccgaaggcagatgtcgcacagaaggacaacgtcaaggccgtattcgtgcagggccacgccagcaacagcatcacccgcattccggagtcgctgaagggcctgaaggcgctggagctgttggtgatcgccgatccgcacccgaccacctgggcgtctctggcggtcgaggcgggacgcaaggacggcgtgtatatcctgcctgtggccacgcagttcgaatgcacgggatcgcgcgtcgcttccaatcgctcgatgcagtggggcgagcagatcgtcaagccgatcttcgaatcgaaggacgacctcgagatcatctatctcatggcaaagaagttcggcttcgccgacaagatgttcaagaacatcgaggtcgagaacaatcttccggttgccgaggacgtgctgcgcgagatcaaccgcggaagctggtcgaccggctattgcggccagtcgccggaacgcatcaaggcgcacatgaagaaccagcacaagttcgatctggtgaccatgcgcgcgcccaaggacgatccggaagtcggcggcgactattacggcctgccgtggccgtgttggggttcgcccgaggtgaagcatccgggatcgccgctgctctacaataacaacctgcatgtgatggatggcggcggcgcgttccgtccccggttcggcatcgaacgcgaggagaagctgccggacggcacgacgcggaaagtcagcctgcttgccgacaagtcgttttccaagggctcggaaatcgaagacggttaccccgagttcacgctagcgagcctgaagaagctcggctgggacaaggacctcaccgaggctgagatggcgaccatccagagggtcaatcctgccaatcccgatgcggtgtcctgggcgatcgatctctcaggcgggatccagcgggttgcgctgaagcacggctgcgtgcccttcggcaatggcaaggcccgcatgaatgcgttcggtctgcccgatccgattccggtgcaccgcgaaccgatctatacgccgcgcgtcgatctggtggaaaagtatccgactctgcccgatgccaagcagttccgcctgcccaacatcggcttctccgtccagaaggcggcgatcgagaagggcatcgccaagcagtttccgctcatcctctcctcgggacgcctggtggagtatgaggggggcggcgaggagacgcgcacgaacccgtggctcgccgagttgcagcaggacatgttcatcgagatcagcccggccgatgccgccgatcgcggcatcaaggatggcggctgggtctgggtgagcggcgccgagaacagttcccgtgccaggatgaaggcgctggtgacagaacgcgtcggcaaaggcgtcgcctggatgccgttccatttcggcggctggttcggcggcaacgacctgcgcaagaactatcccgccggcaccgatccgatcgtgctgggcgagagcgccaacacgatcacgagctacggctacgatcctgcgacgggcatgcaggagccgaaggtcacgctttgtcagatcgtcgcagcctga

SEQ ID NO: 1611 - DNA, 210 bp, BradyrhizobiumColbertium
atgagtgacgagacgaaagcaaaggtcggacgtcgcgacttcctgcgccaggtcgggatcggcacggtcggcgccggcgcgacgcttgcgaccccgttggtcgggaccgcccaggcggatagcgagaacaacgatgagaagcgcaaggcgcgctacaaggaatccgatcacgtgaagacgttctaccgcgtcaatcgttacccggcgtga

SEQ ID NO: 1612 - DNA, 780 bp, BradyrhizobiumColbertium
gtgcgggatgaggggcttgatcgcgcgatcgatgccgcaggcggcattgctcagcttgcacgcaaaatcggcatcagccagccctctgtctcgaattggacccgcgtgcccgcacagcgggtgattgcggtcgaaaccgccactggtgtttcccggaacgatcttcggccggatctctacaacgaacaagccggcgcagcgcagcccgtcgatccggtcgatgctgcgcgcgcgcaggaatactcgcttctggcaacgttgctctcagcgccgccgtcgaagcgattgctggagcagcttgcggcattgaccagcgatgcgacgccgctcggccgtgcgcatgcagcgctggccgacgccgcctcgagcgccgttgccgcgaaggtggagcgggaatatttcgacctgttcgtcggtctcggccgcggcgaattgctgccctatgcctcctactatctcaccggctttctgaacgaacggccattatcccgcctgcgcggagacctgacgaggctcggcatcgagcggattgccaacaattccgagcccgaggatcacgtcgcgatcctgtgcgagatcatgtcgggccttgctgacggccgcttcggtgcttcgcccgaggcgcagcgtgccttcttcgacaaacacgtatcgccctggatgggacggctattcgcagacatggagagcgccgggaatgcgcgcttctacggtgcggtcggcgcgctcggtcgcaccttcatcgagatcgagacggaagcattcacattcgccaattga

SEQ ID NO: 1613 - DNA, 609 bp, BradyrhizobiumColbertium
atgagtgaggaggacttccttgcacgttggtcccgccgcaaacgcgaatcgcgggcggagccgacgaagcctgctgcagcgcaatccatgccgccgtccgaggccgaggacggcgagaccgagttcgatctctcgacgctgccttcgatcgacgacatcaatgctgcgaccgacgtcacggcgtttctggccaagagggttccacaggagttgagtcgtgcggcccttcgccgcgcgtgggcgaccgatcctgccattcgcgacttcgtcggccttgcggagaatgcatgggacttcaacgaccccactgcgatgccgggctttggcccgctggattgctcgtcggaggagctggccgcgctggtcgatcgcattgttggtggagtgcgcgaagcggtccaatctcttcccgatgcgtccatcgaaatgccggtttcagcggatttgcatggcgccgatgtgacaatgatttccaatagcgttgagccctcggccccgccggagcaaccgcagatctctattgcggtgcaaccgccggcggttggtcattcggacgagacggccgagcccatcagactccgcacgcacggtggtgcactgccgcgctaa

SEQ ID NO: 1614 - DNA, 519 bp, BradyrhizobiumColbertium
atgagctccgcggcgtcgccgtctctctcgattgccgtcggtgtcgtggtcgagcggcgcagatctacctcgccctgggtcgatttcgtctggcgcggcatcgcggtccttccggacgagccggcgacagaaccctggaccgtgctccgcgagcaggacggttcgaccctgttttatgccggcagtgcgaccgtcgatctctatccgtccgagacggcacgctatcgcgacaatctcgtctccggcagtccgagcatctggactgtactgtcgcctgcggaaggcgcctggccctatgccgtgacggcggtgaccgccgaccccgcagagggcgaggggttcaccgaagccgccgacaatctcgtcgaggcggtgccgatgcccgaggcgctgcgcgaagcaattgaaagattcgtcgccgagcgccatgtggagcgggaattcgtcaagcgcaagcggcgccgcgccgacccggaggcgttggcacggcgcgatcaagaaggcgacaggaatgagtga

SEQ ID NO: 1615 - DNA, 1008 bp, BradyrhizobiumColbertium
atgaacgatttctggattgcctgcggccatcatctgctcgaccgcgacgagggcggtgggctccgtgtcaccgacgaattcctcaaggcctattttgcgcgtcccgagctgatgccgccggacgacgcgtgcccggtcgaacgccggctgcaccgcgaattgctcgcccacccgcgacaagcggtcggtaaggacgagatcgccgggattgtcgatgcggatgcccgggagaactggcagttcgtactcgcgtttcgcgatcttttgctgcggcatccgacgctcgaggccgcgtatcttgcctcggtgcgatcagggacgaacgatctgccgccgctgttcgtcaaccagctctcgcatgtcatcctgcggaacgctctcgatggctgcgatgacccgttcgtgctgcgtgcggccgaattgttcttccggacccagcgaatcctgccgcacgagcacgccttgttgctcggcgacgaggagatcgtcggtggccggagcccgaccccggtgctctccctgatgtcgatgctgggcgccaccaccgatgttgtggtcgacgtgctcagcgaggagaatgccgaggcctattggcagcgcagcgaccagttcgatctggccctcgacctgacggccggcggccgcggaccggcggcgctggcgcaggcgatgacgcgctgggtctcccatctgctcggcatcgaggtcgtgatcgagccgctgcgcgcgctgcatgaggcaaagttcacctggtatgtcgggctcgatgcggatgccaccaggcttggcgatcgtctgtggcacggcgaagaaccaggcgagcgcgacactgatcgtgtgctcgcgctgttccggctgaccttcctcgattcgagctgcgcgcttgacgacctccggggtgaaccggtctacctgatcctgtcgatgacgcccgatcagaagcttcggatgaaaccgcagaatctgttgataggattgccggtgaagcgtctggagatggcgacatga

SEQ ID NO: 1616 - DNA, 540 bp, BradyrhizobiumColbertium
atgaagctcctgcgtacgatcgcactcgatccctccgacaccttcgtattcgaagtggcggcagaaccgggcgaatgggccgtctccggtgctttccgcttttgggattgtgacgggtcgaagctggaaggcaaggcgcgcgcggcgtttcgcggcggcttcctcggggtgcagtcctggggctggtcgacgctggcgcagatcgttccggcgaccgaagacgactaccgcagcctggtcgatctccttgcgcggcaactggtcgagcgcttcggtgcgcctgacatgtcggcggcgaagacggccgccgaagaggaggtcgctttcgcacaatcgctgtgtagccatccgatcagctctcttgttgcagtgcaccgcacatcgagcgacggcgaggtccgcgagtcattccgtcgcctgcagctgcgcgaagggcaggggcatagcaaggcgttctcgttcatggagttggacgacgatgtccagcctgaccacgagctcaaactcgcggaactggggcgggggccgatcctcagatga

SEQ ID NO: 1617 - DNA, 741 bp, BradyrhizobiumColbertium
gtgagtcatgtttccctggcggaaccggtccatctgccgccgccgttcacattggtgcggctgcgcgagagtggcgacgctttcgcccatgcatgccgcattgcgccggagagcggcgccggaacactcgtctatgtaggtcgtttcgacctcgcagagttcgccgtggtgctggagccattcgagccgttgcgcagcgcgcggcgcgcgttctacgccggcatggtcgcactgaccgatgcgcttcgcgcctatgcgccgccgagcaagccgatcacgatcgactggccggatgcggtcaggatcgacgggggactggtcggcggcggacggatggggtggccttttgccgctgacgaggatgcgccgccgcgctggctggtattcgcagccatgatccggactgttgcgatgaacgaagatgaacccggcgttcacccgctggcctcggcactcgatcaggaaggctttggcgaggctggcgcggcgcagatcacggagagctttgcccgccacttgatgctagcgctcgacggctggcgcgtcgatggctttgacagcgtcgcgcgcgactatctcgctcggatgccgcgtgaaaggcagacagttcagcgcattgatgattgcggcgatctgctcacgcgccgcctcggtacggacgagaccgagcggagcgatctcgtgcaggcgcttgcgatgccatcctggctcgatgcggcgctcggaggaccgcgctcatga

SEQ ID NO: 1618 - DNA, 1242 bp, BradyrhizobiumColbertium
atgccgtgcgagggcatcgatcagaggcgtgccgtgcgggccgtcgtgaaacagcagcactgcatccgcgccaccggcctcgcggtaggcgagcagcatggcgcgaagtctctgaagctgcgtatcggcgggtggcagcgcgtaggacagcgcgccggtcgggcaggccgccgcgcattggccgcagcccgcgcagatattcggatcgattgcgacatgatcgccgacgggcgtgatcgccccggtcgggcagagatcgaggcagcgatggcagccggtgcgtttcgagcgcgaatgggcgcagagcgtcggtgcaacgtcaacatatttcggcttgtcgaagctgccgacgagatcgcgcgcggtcagcacggcgcgcagcatcgcggcgggatcccccgggtcggcgcgcagatagccgtcgcgcaggtcgtgagcgggaaacagcggcatatccccggacaggtcgagcacgatgtcgcagcgcgaagtgactccgcttcgcggcggatccagcacgaagcgctcgcgcgaggagggccggggacgcgcatagtcgtcgatcgcaagctcgaaggcgccgaaatgtcccttcgcggagcggatcctgcccttgacgacggggaaggccgttgcagtcggccgcacggtgtcgtcgaactgcttcagcatcaccgtgacgtcgagatggtcggcaagcaggcggccggcctcgatcgcggtctcatcgcgcccgtagatcaggatcacgccctcgctcgacagggtgacgagcggatagtccggggacgggatggaggcggatgcgagcagggcggccatcttcgcacctgctcgtgcgccgtctttcgaccatccggccgtttcgcggatgttgacgaagctgatcgcatcggcccgttcgccggcctcttccgaaaactgcgccgcctgctgcgtgcaggcgacggtcaacgcgccgtctgtcgcggcaatcttgcggaaatgatcgagttcggcaccacagagatggcgaaagctcttgacctcgctgccggggcatccgcgccgcattgcggccacgtcgagacgcatcgtgtcttcgcacgagcagatcaggacggtcttcgctggttgctccaggttaatccctccgccattcggatgccgacgacggactcgcgccgacccttcgtctcgtatagacattatccatcgggaagaaaaggaaagcggaggacggcctgccgtcgaccccagtga

SEQ ID NO: 1619 - DNA, 114 bp, BradyrhizobiumColbertium
atgatcgacaggagcaagggaatggctgagctcagccagtgcctgggtttcgattctggccataagccggcacaatacgtcatcaaagaccttgacctgctcgtctgtcagtga

SEQ ID NO: 1620 - DNA, 249 bp, BradyrhizobiumColbertium
gtgtcgtccgcgatcgcggcggccgtcgaagagcagggcgcggcgacccaggagatatcgcgcaacgtgcagcaggcctcgatgggaacacgacaagtgtcctcgaacatcaccgacgtgcagcgcggcgcgatcgagaccggttcggcctcgacccaagtgctctcggccgccaagtcgctggccaatgacagcacccgcctcaaggtcgaggtcgcgcagttcctggactctgtgcgcgcggcctga

SEQ ID NO: 1621 - DNA, 270 bp, BradyrhizobiumColbertium
ttggggcgttcgtcctcgacgacgtaccccaaggccgcgatctggcggctgaccgtctcccgctggatagccccctcatgttcgaccgaaacgcttccgccggtcaccgagacctcgacgcctctcactccgggcattcgcgagacggcgttctcgatcttcgtggcgcaggccgcgcagtccatcccgccgacccgaagtctcatcttctgggctgcttcggtcatgcgtggctttccacggcagcgccttcgacatcgtccggcttag

SEQ ID NO: 1622 - DNA, 969 bp, BradyrhizobiumColbertium
ttgcgcgacgtcaccgtcgcctgcttcgacaagacgggaacgctcaccgcgggcaagccaaaggtcacggacgtcgtcgggttcggtcacggggaggtcgaggtattatcggttgccgcgtcgctcgagcgcggctccagccatcctctcgcggtcgccatcctgcaggcggcctccgacaagaacgctcggccgcagccggtcgaggacttcgtaaatctggcgggagaaggcgtcagggcgaatctcgggggacgtacggtcttcctcggctcacccgctgcggctgaacggatcgtcccgctggccgaagaccagcgaaagctcgtcgaggcgctcaacgaacggggcaagacggtatcggtactcgtcgtcaatggcgagatcgccggctgcattgccatgcgggacgagttgcggagcgatgccgtcgccgcgctgcgtcgcctggccgactccggggtccgttcggtcatgctcacgggcgacaatccccgtaccgccgcggcgcttgcgcgcgatctcggcatcgaccatcgcgcgcaaatgatgccggaggacaagcagcgcaccgtcgaggcgtacaagaaccagggtgaggtggtgctgaaggtcggcgacggcatcaacgatgcgccggccctcgccgctgcggacgtcggcgtggcgatgggtggcggcaccgacgtggcgctcgagacggcggacgccgcagtccttcacggacgcgtctccgacgtgccggccatgatcgagctgtccaggcggaccatgggagtcatccggcagaacatctcgatcgcactcggactgaaggcggtctttctggtcaccacgatctcggggatcacgggactttggcccgcaatccttgccgacaccggcgcgaccgtattggtcaccatgaacgcgctgcggctgctttcgataccgggcagcggtggggcgggcgaggggacgtccgcatga

SEQ ID NO: 1623 - DNA, 1038 bp, BradyrhizobiumColbertium
gtgttcgtgtccggatatactgccgccttcggcattctcggcagagcctggcagctctacgtcgcctacctcctgcttttcgtcttctacgtcgtcacgatcggatacgtcgcccagcggtacggccacgcccacctgctcgacgagttcaacatccggcttctcattcgggatccggtcgagttcctgaagcacggactcctgctcgagtacaagccgctgaacctcgacgtcctgccgctctacattgcgttgatgatcgcgtttccaccgctgctttgggttcttatgaggtggcccaacgtcgcgctggcgatctcggcaggcgtctacgtcgccgcacagacctggggatggaatctaccggcgtatcccgccggccactggtatttcaatccgttcgcgtggcagtttctgttcgtcatcggtgcgtgggccgccgtcgggggcgcgggtgcggtaagggcgctcatcaactcgaagacaacactcggtgccgccggcttccttctcctgttcgccgccatcgtcacgctcgcggcgcggaccggcaatcataacctgatccccgaatccgtccgctcggcgtttattccgaacgacaaaacgaatctggcgccgtaccgcatcgtccattttctcgcgctcgcgatcctcgtctcacggttgattccgaaggaggcgccgttcctgtcggctccttggcttcggccgctgcggctgtgcggagagcgatcgctcgaagtcttttgcgcgggcgtattcctggcgttcgtcgcttacttcgccatcgacctcgtctccgagtcgctcgccttccagatcgtcgtcagcgtcgcgggcatcggcatcatgatcgccgtcgcctatttcaagacatggacccgggactatcgcgccgcaaccggccgaaagacccgtcgagcgcgacattcagcagccacgactggcacgaagggagcgatgggatggttttcgatcaataccacgaaccgccgcaggagctttcgcaagaggtccgcaccttcgcgcggatga

SEQ ID NO: 1624 - DNA, 249 bp, BradyrhizobiumColbertium
atgatagcttcgctgatcgaagaagccgaggccatcaatcggtacgaacagcggatgtccgtcgaaaaggacaagacggcgaaagccatcatggccaacgcgcagaaggaggagttcaagcatttcggcatgaacctcgaattcctgttgcgacgcaagaaggagtggcgcgaggagctcaagggaatcctcttcacgcagggcgacatcgtcaagctcggcgagaaggccgagaaggcagtcgactga

SEQ ID NO: 1625 - DNA, 522 bp, BradyrhizobiumColbertium
gtgggtaatccggcggtggaggcgcagatgaggaagcatgcggtattccaggcgctcggaagcatattgggtttgatcgctatagtaggcgccgtcgaagcgcggggcagcatcgcgagcgagcgtccctatgccgctgagcacatcgatctgctcccagccgatatccgtcacggtctgatccgtctggagcgtcaatgcggcgggaaagccgcagcgacgcactacttttccaccaccatcggagccggcgggttgcacttcaggtcgctgcatttcgaaaatttcgcctgcgagcagcgagaggcgatctgtcgggccgatcaatgccttcatgaagtctacctggaacgggccggccattcgcgccgggtcttcagcgcctatgtcgacgacataaagctgatcaacgaggccgggatcgtcggactgcagttcgcgggagaccggccggctattctacgttggaacggacgcacattcgtgcccgttcattcattcggaaagggtgtcgagcggtga

SEQ ID NO: 1626 - DNA, 861 bp, BradyrhizobiumColbertium
gtgacgacgtcgatcatctcccatcttcacttcggtggcgctgatatctccctctggaagaggttccggctattcttcaccgtgggagtcgttgtgctgcttctgagcgcagcgaaggtcgcggtccactacttcggactcgagttcctcgatctcaaccgtctgctgaccagcggcatcggcggctccgtcttcatcgtcggctttctgctgtcgagcatccttcaggactacaaggaggcggagaaaattccggccgacctcaggaattccatcgaggccatcgacggcgatctcgcgtgcttcgcgcagaccaacgatgccttcgacctacaaaaggctcggcagttgctgctggccgtcatcgacaggcttcgcgagggtctcgggcacaaaaacggccacaaggacgttcctcccgccctcgatgagctggccaagctgacgccgatcttgggtcggctcgagagcatgggtatggccgcgaatttcgtcgttcgcctccggacaaatcaggacgtgatccggagagccttgctccggatctacaccattcagcgcgtcgagttcgtgccgtccgtccacgttctggtgcagaccctcgtcgggtcgatcgtgctccttctgctgctgttgaagaccgagggcgatcccgcttccgcgctgctattcggcttcatcacttacatgttcgtctacgtcctctacctcgttcggctcctcgaacaacccttcgccaagggacacggctcggtggacgacgtcagcttcttcctgctcgacgagctcgagcgaaacctccgccgagcgctagaagatccggacgaccgcgcgcagaaggcggctacgaccggagattga

SEQ ID NO: 1627 - DNA, 291 bp, BradyrhizobiumColbertium
gtgacccacatcctgatggaaggaactccacccaacgtcgatatcggcgccatcgaaaagcagctactcgccattccgggaaccgtcgccgtccacgatctgcacgtctggaccgtgacgtccggcttcgacgccatgagttgccacctcgtcgtcgccgacatgtcggccgggcgtgcggcgctgcgggcggcccgcaacctgatgaagagcgacttcggcatcgagcacacgacaatccaacttgaggacgaggccatgagagccgaggagaccgtgctccatgtctga

SEQ ID NO: 1628 - DNA, 1005 bp, BradyrhizobiumColbertium
atgtctgaggcaggtgatcgcagcgccggcgccgccgaccatgactaccggcgtcatggccgccatgatcatggcggcgagcagcatggccatgatcacgatcatggcgggcttgggcatgtccatgctccggcgagcttcggcaaagctttcgccatcggcatcgggccgaacaccgccttggtcgcggccgaagccgtctatggctacctcgggaactcgacggcgctgctggcggacgccgggcacaatctgagcgacgtactcggcctggtcgtggcttgggccgcgtcggtcgcagcgaagcgggcgcccagcggtcgcttcacctacggtctgaagggggcgtcgatcctggcggcgctcgcgaacgccgtgtttcttctcgtcgcaaccggcgccatcggctgggaatccatactccggctgtacgaaccggagcccgtcgccggcctgaccgtcatggtggtcgccgccatcggcatcgtcgtcaacggcgccaccgccatgctgttcgcgagcggacgcaagggcgacatcaacatccagggcgcatttttgcacatggctggagacgccgccgtttcggccggcgtcgtcgcgtctgccgcgctcatcctctggaccggctggctgtggctggatcccggcatgagcctcactatctgcgccgtgattctttggagcacctggagccttctgcgtggctcggtcgcgatgtccttgagcgcggcgccagcagggaccgacatggatgccgtccgctcgtttctgctgcagcgcccgggggtctccaagatccatgacctgcacatctggccaatctccacgacggaaacagcgctcacgtgtcatctcgtcatgcccgccgggcatcctggcgacgagttcctgatggagtcggcccgactgctccggacggagcacaagatcggacacgcgaccctgcagatcgaagtcgacgagaacaacgcgtgcgcgctggcgcccgacgacgtggtttga

SEQ ID NO: 1629 - DNA, 216 bp, BradyrhizobiumColbertium
gtggatgaggccgagaacaagctcgagcgcctccatcgtctcaagtcggcactcgacatcgagatcggcggaggaaaagaaagagggagggtggcatgcccgaactgtccgcacgacggcgactggcgaaccgaggtcggcggttgggttttttcctgcgaggaatgcggtgtgcgcctagacggcaggtttcccgccagacgcatcgcgaattga

SEQ ID NO: 1630 - DNA, 1329 bp, BradyrhizobiumColbertium
gtgacgaaaacagctcggaacggcaatcggtccacggagagaatcgacaccggaattcttgcgaagggactgaggttgctttttgcggcgtccagtctcctgatgctgtgcttgctggcttcgccgtcggccgctcagacctcacgtgagttcgcgcgggaagcgttcgcggccaaggaccggaaacagtttccactggccatccagttgttcaacgaagccatcaaacaagggcaattcactccggaacaacgtggctttatcctgtacgggcgaggggtctcatacgacgcgctcggtctgcgcgatctcgctctgggtgacttcgacgcggcgatagcgctgttgcccgacttcccgaactcctacgtgtatcgcgcgctagcgtggagcgatcgacgggagttcgacaaggcacgtgacgatctcatgcaagcccttcggttgaatccgaccagcgcgctcattcacaacaatcttggatcggtctacgaacgcaagggcgaggtggaccgggccatcgaaagctacgaagaggcgatccggctcgatcccaagtcggcacaagccttctacaaccgggcccacgccttcatcgcgaggcaggactatcgggccgcaatatcggactacgaccgggcgatcgaactgcagcgcgacttcgcggacgcctacagcaaccggggcggcatgtatctcctgctgggcgacactgacaaggcgatcggggatttcgacgaggccatccggctcaagggcaccgatccgattttctggtcgaacagggcgagcgcctatatgacgatggggcgctacaaggatgcgttggccgatttcgaccgcgcccaatcgatcgatcccggcaaccccgcgacctatctcgggcgaggaagagcgcggctctattcggacgagatcgcgggagcgatcgaagatctgcgtatcgctgcgaggttgaggccgacgaacgcctttcccgccatctggatgcacatcgcccgcattcaccagggcaacccggatcgagaggaacttgaacgcaacgcggcgagggtggatcgctcccagtggccgggtcaggtcctagacttctacttgggcagactcgacatggaccgggtgcgcgaaaatgccggcggcagtgcgggcgccgagggcgaaaggcggctttgcgaggcggacttcttcgtcggtgagttcctgagccatggccgacagaaggatgatggccgcaggatgctgcggaccgtcgtagatcggtgccggccggtggacatcatcttcgccgccgcgcaagccgagctgcgcgaggaaaagacttcaaaatag

SEQ ID NO: 1631 - DNA, 138 bp, BradyrhizobiumColbertium
ttggttattggcgctgatagcgttgtcatcgacggcgattgggattttctgcatcgtgcatttcccgagagcctgtcgctcaccctcattggtccgctcggcgctacagctgcggtgattgtcaccttgttcggctaa

SEQ ID NO: 1632 - DNA, 621 bp, BradyrhizobiumColbertium
atggccgtgcccgcgcttgatgacgacggtccggttgccgtgcatcctcatgccgcgatgcatgtcgccgccatggtacccgcgcatctcggcccgcgcgccatgtccaccatgatgtcccttcttcacaatcaccgtctccgccgaagccggcagggcgaacgacacggccaagccgattaccaaaagaccaagcttcttcatcttcaattccctttctccagtgtttacccaagtcacacgtcgtcgtggcgttcccttcggcggacgactgcggttgcgaacgcaagggaaaaggatcgagccgggcacttgccgtcgggcaactttgcatcgatccgcgcgtttcaaactgttcaattcataggaggctttccgatgccgggcacgacgcagatcaaggaacatatggatgtcatctcgtccgacaagaaaatcgtcggcaaggtcgaccacatggaagggaccgacaagatcaagctgacgaagcagtgctcgcccgacggcgaccatcaccacttcattcctgtgtcctgggtcgatcatgtcgaccagcacgtccatctctccaaatcaggcgacgaagtcacggcgcactggcagcacgaaggtcgcaagtag

SEQ ID NO: 1633 - DNA, 1860 bp, BradyrhizobiumColbertium
atggcatgggtagttcccagtattccttcgccggatcagggtcaggccccgtcgtccggatcgatcgacctgtcgaactccatcaatgcaatgaaagggacgggctcctacgcaatcggactgggcgccggctacaactacatgctgccctcgcgcgtggtcctgggcgtcgaaggcgatctcaccttcccgaacacgatttccggaaccgctcccgtcctgggcgcgcagggttccgcatccctcaccgagaccgtgctgacctcaggcacgctgcgggcacgcctcgggtactcgcccggcgcctggttgttctacgccaccggcggcctcgcatggagctacgaccgggcaacgctcggtccgcccgacggcactctgggcgagaagatcgggttcactcgccttggtacagcatggggtgtcggcgccgaagtcgcgctctcggcgaactggtcggcgcggttcgattatctctacaccgacttcgggtcgaaggagaaagcgttcagcggcacggagcgcctgtccttcgatctcgctgtgcagaccgcccgcctcgccgtcaactaccgcttcgggcagaacggacagaaggcccttcaagacggcctgacgccgttcgacacggaccagttcagcatccatgggcagacgacctatctgcagcagtacgcagccccattccgctcgccctacactgggacgaacagcctcattccgaaccagacccggcagacctgggacgtgacgctctacgccggcttcagaccttgggccggcggagagttctgggtcaatccggagattgatcagggattcggcttgagctcgaccctgggcgttgcgggcttcccgagcggcgaggcctacaaggtcggggccgcagcgccctacgcccgcattccgcgcgccttcttccgccagactttcgatctcggcggagagaccaagaaggtcgacgccgacatcaaccagttcgccggcacgcagaccaccgaccgtgtcgtcctgaccgtcggaaagttcgcggtcacggacgtgttcgacaccaacaggtacgcccacgatccccgcaaggatttcatgaactggtcggttatcgacaccggcacgttcgactatgcggccgacgcctggggcttcacatacggcgcctccctcgagtggtacaagggcgactggaccttccgcggcagcatattcgacctttcgatcgttcccaacagcaccgaattggatccgagcttctcgcaattccaatggatcggcgagatcgaacatcgccacgaaatctggggcaagcccggcaaggtcgccgtgacggggttcttgacgcgcaggcgcatgggccgcttcgatgacgccgtggccctcgcgcaggccacgggcactgccaccgacgccgcgctggtccggcgttaccaaagccgcgccggcatcagcgtcaatttggagcaggaggtcacgaaagatctcggcgtcttcgctagagccggcctcgccgacggcaccaaggagtcctacgaattcaccgacatcgatacgacggtcgcggcgggcctctcgctcgcgggatctgcctggaacaggccgaacgacacgtttggcctcgccggcgtggtcaacgggatctcgcaagcccgccggacgtatctcgatgccggaggtctcggcattctcgtcggcgacggtcgcctgccgaactccggcccggagaagatcctcgaaacctactacagcttcccaatgtggtcgtggcgcgcgacgctggactaccagcttgtcgtcaacccgggatacaaccgcgaccgcggaccggcgtcgatcttcggcgtgcgcgtgcgctcgcagttctga

SEQ ID NO: 1634 - DNA, 459 bp, BradyrhizobiumColbertium
atgacgatgccagcctacgctgaagagctgggaggtactcgcctgccttccgcgagcgagaaggcggcagccaaccagcttcgtcagatactcgcttcgcatgcgacgggagatgccaaactgcgagtgctcgacgatgcacagcaggctgctgagataaccttgtcgccggccctgtcgagtctcttgatggaattgctgcggcatatcggtcgcggcgatgcggtgacgcttgtgcctgtgcatgagatgttgactacgcagcaagctgccgacatcctgaatgtctcgcgtccgtttctggtctcgctgctcgagaaggacgaaattcagcacgtgacagtggggcgtcatcgcaggattagggcagaggatctattcgcctataagcgcacgcgtgatgaaaagcggggcaaagcgcttgcgaatctcgctgagcaggacgcggagcacctgtaa

SEQ ID NO: 1635 - DNA, 591 bp, BradyrhizobiumColbertium
ttgtttgcaaaccgcttcaccgcattcgtcgatgcgtgcgcgcttgcaagcgagctcaaaaggaatctgcttctctccttggcggaggcggaattttttcgtctccgctggtcgagccccgtcctggatgagtccgaaacagctatcgaggaaattttgaccggcaagggcttcgccgacgccgcggcgcgcgcagagcgggcgcgcgccagcatggaagctgccttcgaagacgccatggttacagattttgataacttcttgccggttgcggcgggtctgcccgatcccaacgatcaccacgttgttgctgcggcggccaagacggaagccgcaatgatcgtaacggaaaaccttaaggactttccggcggcaattctttccgacctgaacatggaggcgaaatcggccgacgctttcattgcggatactatcgcactcgacgaagctcgcgctgttgcagccattcggcgtatgcgcgaacgcttcaagaaaccggaaatgacgccggcggagctcttgctcgtaatggaagctgcgggactgattgagacggttgacgtgctaaggccgcacgtggaatccctctag

SEQ ID NO: 1636 - DNA, 906 bp, BradyrhizobiumColbertium
atgacaaagcttgtactggttaccggggcggccggactcctcggtcggtttgtcgtcgaagaattgttgtccagtggatatcgcgtccgcggcttcgatcgccgacgcggcaaggctgatatcgactggcgtgtcgcggatgtcacggatgcagttgcggtcgccgacgcgctaaaggacgtcgaggccgttctccatatcgccgccgtgccgaatatctggtcgggggacgggcagaccatcatgcgtgtcaacgtgcaaggtacctacacggtgctcgaggctgccgaggccgcccggatcgagcgcttcgtattctgttcgagcgattcggtagcaggctatacggtgcgcgaaggtcgcatgttgcagccactctatgcgccactcgatctcgaccatccgttgctggccaccgatccctatgccgtcagcaagatattgggcgaagatctctcccgagcttacgcattgcgcggaatgtcggtcgtggctctccggacggtctttgtcgcctacccggagatggcaccggagattgtcgcccgtgctaaggatccggagaactatcatgggccagcggccggggggccgtcatcggccggaggaggcccgcttcaccatcacatcgatgcccgtgatctcgcccgcgcattccgtctcgccatggagatgaggatgccgaaaggcggcttcgagaaattctatctctcgtcgcaggtcacgctttcacccgagccaacgcttgatcggttgcgtcttctgcacgggagcgccgtcgagatccgcagtccggaggtctatagacggcagccgtttgcgccgctgtatgacctttcgcacgcgcaacagcgcctgggattcgttgccgagtacgatcaacggcacctcatttccagggtatag

SEQ ID NO: 1637 - DNA, 150 bp, BradyrhizobiumColbertium
atggctctgagggatcgcggtccccggatcatccgcgaggatctcgagcatcgttggtccgtggtagccgatctccttgagggcggcggcgacctcagcgaacggcaccgtgccggtgccgatcggatcatgacgccaaatcttccgtaa

SEQ ID NO: 1638 - DNA, 1443 bp, BradyrhizobiumColbertium
atgagcagaaaccataaaaacgatcaccgcgggaacgatgacgcgataattcagaccttcgatgactatcagctctatatcggcgatggcagctcaaaccatttttccggcccgagcagcgacatgaacatcacattcggtcggggcggcaacgatcaactatccggcgcgtccatggatgacgatttgatcggaggagccggcaacgatgtcctcacgggtggtgcgggcgccgatcatcttgtcggcggtgccggcaacgaccgactggttggcggggaccaagctgacatgctgatgggcggtcccggcaatgatgttctcaacgaaggcgccggtcacggcgatctggaaggcgggccgggcaatgacatgctgaccggcggtctgggagccgacgccttcgtcatctccccagatagcggcaacgatatcatcaaggatttccgcgccgggcccggaatgttcgatcatatcgcagtcatgaatctcgaacccgagcaactgcgctttgcggataccaaggccggtgtcctgatcagttgggatacgggcaaaggagatggttcggttctgttggaaggcgtctacaagaaagatctggcccaggacgacttcatgtttaccgacgaccgccacctgctcaatccggcggatgcgcattctgatcgtttctccgctgagcacttaggcacgaccggcggcaacgaggccggcccaggtccgactggcgcgcccaccaatgcgtcattcaccagttcttttgacgacaacaacgtgaaattcggaactgacgctcaaaatgacatgcttcttggcaccgccaagaacgatttttactttggtctgggcggcaacgattatctgtctggcggtgcgggcgacaatcacctcgacggcggggccggtaatgacaccctcgtcggaggatctggacaggacgacctgcgcggcggtgatgggaacgacaagctctacggcggcgccatgggcgacaacttgatgggcggagccggtaacgattatctcagcggaggtgcggggcacgacatgctggatggtggcgcgggcaacgacgtctatagcggcggggccggagccgacgcgttcattgtcgcgcatggcagcggtaatgatgttgtggtgggtggctttgatccaggtcccggagcgttcgatcacatcgcattcaccgacatcatgccaaacgaagtcaatgtggcggattctgcctcgaatcacggagatgctcatacaggcgtgctcgtcgcatggggcgatggatcaattttcctggaaggcatcgccaaaggccagatggctcaggatgatttcatgttcaacgccgtcgaaggcggggcgtttgttcctgacccccaaatcagcacggaaggaagccgcatgctgtttcagaatgggcaccccgattggccgatggcgtga

SEQ ID NO: 1639 - DNA, 849 bp, BradyrhizobiumColbertium
atgcagatccgcaacttgtcaccgcacacgcaggaatcctatctgctgcaggtttcgcagttcgcccgccattttgcgaagtcgccggctttgcttgggccggaagatgtccgcgcctaccaagtctatctgacgaacgagaagaagctggcgccgaagtcgatccacgtgaccgtctcagcgctccgtttcttgtaccgtgtcacgctcggcttcgaatgggatttcgacctcatcattccatgtccaaaggtgcccaagacgctcgccgtcatcctcagtcccgaagaggtgctgcacttcctcggctgcgtggagagcctcaagcatcaagtgatcctgacgacatgctacgccgccggtctgcgcatttccgaagcggtacgcctaaagccgggggccatcgaccgacagcggatggtgctacgcgttgatcaaggcaaggggaagaaggaccgttacgtcatgctctcggcccggttgctggagacactgaccgactattggcgcgccgtccggccgagcacgtggatgtttcccggcggtatccccaatgagccgatatcgaccaacgcggtgcaggacgcctgcagcaaggcacatcggttaacgggccttgccaagcccgtaacgccgcattcgctgcggcatgccttcgccgtccatctactcgaggccggcaccgatcttcgcaccatccagctcttgcttggccatcgcagcctgtccacaaccgcgcaatatctccggatagccacgaacaaagtctgcgcggcgaccagcccgctggagctgctgccgcgcccaatccctaaggcaccaccaccgccgccgcctgaacatttctga

SEQ ID NO: 1640 - DNA, 846 bp, BradyrhizobiumColbertium
atgttccgcacagctgcagagactttgcggactatcgctgccgaccccaagcacctcggtgccgagatcgggttcttttctgtccttcatacttggggccagaacctccttcaccatccccacctccattgcgtcgttcctggaggaggactgtccccggatggcagccgctggatcgcgtgccggcccggcttctttcttcccgtggccgtgctttcccgtctgttccggcgcctatttctcagcgccttgcaaaagtcgttcgataccggcgagctacaattcttctcgtcgctggaaccgttgcgtgatccggctgcgtttcagcgttatctgaacgaggtccgcagaatcaattgggttatctacgccaagccgccatttggcagcgccgaacaggttgtgcactatgtcggccgctatacgcatcgagtagcgatcagcaacagccgtgtcatcgatatcgaagacggcaaagtacgctttcgatggaaggattaccgccacggaagccagcagaaagtaatgacgctggacgccggggagttcattcggcgtttcctcatccatgtcctgcccgaaggcttcaaacgtattcgctactatggttttctgggtaaccgctaccgcaagcaaaagctcgctcgctgccgtgaactgctcggaatgatatccgccgatgctcattcggagccggaagagccatccgattgccccgagaaggctgagcactgcaatgccgcttccttgcgtcaatgtccatcctgtcatcaaggccacatggtgtgcgtcgaggtcttgcagccaggttcgttcagcgccgctcgttcaccggacacttcttga

SEQ ID NO: 1641 - DNA, 1410 bp, BradyrhizobiumColbertium
atggacgttgccccatccgcctcggattcggtactcgaccacgtgccgatgcgcaatgaggacggcgagattcgtcacgaattcgtcgaggaaattgcccgtgcgatcgaggccggcaacagcgcggcgctgcgttcctgcgtcgcggagctgcacgaagccgatctcggcgatctgatcggcgcccttgagccggacgaccgcgtccgcctggtcgagctcacgggccgcgacttcgacttctccgcattgaatgaggtcgacgaggccgtccgcgaggagatcctcgaggaactgccgccggaaacggtagccgagggcgtccgcgagctcgagtcggacgacgcggtcgagctgctggaaaccctcgatgaggccgagcaggaggagattctcgaaaagctgccgctcaaggagcgcgtcgcgctcgagcgcagcctgctgtacccggagaattccgccggccgccggatgcagaccgagttcatcgccgtgccccaggattttaccgtcggccaggcgatcgactacatgcgcgagacgccggatctgcccgaccgcttctacgagatctacgtcgtcgacaaggaccagcactggctgggcgccgtgccgctcgacgtgctcttgcgcacgcgccgaccggtggcgttgaccgagctcaccgacgaggaccgccgccgcgtgtccgtcctggaggaccaggaggaggtggcgcgcatgttcggcaagtacaacctcgttgctgcacccgtgctcgacacccaggaccgtctcgtcggcgtcatcacggtcgacgacgtcgtcgacgtcatcgaggaggaggcggacgaggatctcaaggcgctcggcggcgtcaccagcgacgaagaattgtcggacaccttcctgacgattgcgcgtggccgcttcaactggctgctggtgaacctcgccaccgcgttcctggcgtcctcggtgctgggcctgttcgaggggcagctggagaagatggtggcgcttgcggtgttggcgccgatcgtggcgagccagggcggcaatgctgcgacccagaccatgacggtagctgtgcgggcgctggcgacgcgcgagctcggctcctccaacgcctggcgcgtggtgatgcgcgaggccctggtcggtctcgtcaatggcctggccttcgccgtgatcacgggcatcgccgcggtcgcctggttcaagatccctggcctcggcatcgtcatcgggctggcaatggtctgcaacctcattgccggcgcgctcggcgggatcctgatcccgatggcgctcgaacgtgtcagggccgatccggcggtcgcctccggcaccttcgtgacgaccgtgacggatgtcgtcggattcttctccttcctcggaatagcgacgctctggttcgggttgaggtaa

SEQ ID NO: 1642 - DNA, 297 bp, BradyrhizobiumColbertium
atgcggttgcggctgaaggcggacgggcggattgtcgaattgcgggacggacatgaatttccggtccagtccgcagtcaatgccgcgcccggggataccggcccgctcgcggtgcgcgatttgcgccgccgcgcctgcctgacccagatggagttcgccgccaagctcggcgtgcccgtcgaaaccattcgcaactgggagcagggcaagcgcgccccgcgaggcccggcacgcgcgctcctcgccgtgatcgcgcacgcgccggacacggtgttccaggcgctcgccaaggtctga

SEQ ID NO: 1643 - DNA, 819 bp, BradyrhizobiumColbertium
atgctgttcgtcgaggccaatggggcaagaatccccgcgatcgggctcgggacctgggagctgagcggaaggcctgcggcgcgcgtgatcgagcaggcgctgcggctcggctatcgccacatcgacaccgcccaggcctacgacaatgagcgcgaggtcggcgacggcatgcgcgcctccggcgtgcgccgcgatgacgtcttcctcaccacgaaggtgtggaccaaccatttcgcgcccaacgatctcgaacgctcggtcaaggagagcctcgcgcggttgcggcttccctccgtcgatctgttgctgctgcactggcccaattcgcacgtgccgctcgcggagacgctgggcgcgctgtcgcacgccaagaccatggggctgacccgccacatcggcgtctccaacttcaccgtggcgctgatcgagcaggcggtggcgctatcgccggagccgctcgtctgcaaccaggtcgaatatcacccttatctcgaccaggcgaaggtgagggcggcctgcgaccagcacggcctcgcactggtcgcctacagcccgatcgccaaggggcgcatcaagaccgaccagaccctcgcggagatcggccgcgcccaccgcaagacgccggcgcaggtgtgcctgcgctggctcttgcagcagaatgtcgccgcgatcccgcgtaccatgcgggtcgaacgcctgtcggaaaacatcgacgtcttcgatttcgagctttcggacgacgagatgggccgcatcgcctcactcgccaatcccggcggacgcctgaccgactttggctttgcaccgaaatgggattga

SEQ ID NO: 1644 - DNA, 921 bp, BradyrhizobiumColbertium
atggaactgcggacaatcatacggacggacgttgcggcgtcggcgatcgcgcatctgaccctggtaggactgatcatcctgatcagcgaagtccatccgtttcaggccggcgcgcccgagacggtgacggtcgatatcgtcacgccggagcaagtgaagcaggaggaagccaaggccgagcagaaggaacaggcgaaggagaagccgccggagccgactcccgatctgagattgccgaagctggatctcaccgacaagtcagaggctgcggccaagcagcaggccgccgcgccatcgccgtcgccgcaggcctcgcctgagccacagcagagacagccgcaaccctcgcagctgccgaagcagcgcgaggctgatgtgcaaccgcagcctcgacaacccttgactcaacaaccgccgccgcagcagctgcagtcccagccgccacctcaggcgatgccgcagcagcaaactgtgccgccgccggcttatccattgccgcagccggacgtcaccgtgaaatacggcgtcatgctgggtctgccgcccgaattgccggtggagccgaagggcgcacccaaggacgacggcggcgacgccaaggactcgtttgctgcgaagcttccgcccgaaatcatcgcggagcttcgccgtcatttgagaagctgcgccaagctgccggccggagtggcgccgaccgacagcgtccatgtcaagctgcgcgccgtgttcgccaccgacggcacgctggcgcgcgagccgatcctgatcgaagctccgccatctgcgaagggcgtggccatcgtgaagtccgcgatgaatgcgctgcagagctgccagccctacaagatgctgccggccaatctgtatcaggagtggaaggtgatcgacctgccgttcagcccccgggatttcggaagctag

SEQ ID NO: 1645 - DNA, 858 bp, BradyrhizobiumColbertium
atgccgatgctcaatgtgatcttcgatcgcatggcggcatcgtgcaccgacagcctgcagccgatggccggcacgccttgctatttctcggtcaacggcatcaccaacgatcgtgtcggcgatatcatcaaggactacgaggccaatgccgtcgcggcggtgctctatgccgagcagtgggactcccgaatcatcatcatgctcgatcgtgatttcgtgttcacgatggtcgaggcgatgttcggttccgacggcgccgaaccgccgctcgatgtcgagcgttccttctcgaatattgagcttcggctcgtacaaacgttgtttgaaaagttcgccaaggcgctgcaatccgccttcgccggcacctcgaacgtcacctttcgcgtggagcgggtcgagacggccatggcttcgctggcgatcgggcggagcggaaacatgtcgatctgcgcgaacatcatgctgcaggcgctctaccgtggcggccagatgttcctcatcattccgcactccgcgctcaatccgctccgccagaagctcgctcacgtcgtcgtcagcgacggtcgagcggccgacccacgctggcgcgagcagatggaaagcgaggtccagcggacagtggtgacgctcagcgccgtgctcgacgagaaaatggtgacgctcgaggatgttgtgaagttcaaggtcgggcaggtgctcgagctggaggccacgccacgcacgctggctcgtctcgaaagcaacaaccaggtgctgttctggtgtcagatcggccagctcgatggctattacgccatgcaggtggcggatcccatcgatcagaagcgggagttcgttgatgatatcctatctcgttga

SEQ ID NO: 1646 - DNA, 315 bp, BradyrhizobiumColbertium
atgatatcctatctcgttgatgtggtgctgctgattgcgctcgccttcaccagcatgcgggtgaccaggatgcaccgcgagctggcgcggttgcgcagctatcagggcgaattctccaccatcgtgcatgagacggcgggtgccttcgatacagtgatcaccgcggcgcaagattccacggcaaatctcggacggctcgccaacgtgctgagtacgaagatcgatcaggcccacgatgtcatcgcggcgctcgatgcgcggagcgggcccgcctccgccgcgcccgcaggcggggccgacttggacaagcattga

SEQ ID NO: 1647 - DNA, 375 bp, BradyrhizobiumColbertium
atggcgcaatccttcgactatgagtctgcacctgcatcggcagagtccgagacgtctccgctggagcggctggcggagatcgcccagcgcacggccgaggagaccggcaagttcgccaatgtcgatgccatcctgcgcattcccgtcaccatgcaggtggtgctcggctccgcgaccattcccgtggcaaacctgatgaagctcggacgcggcgcggtggttccgctcgatcatcgggtcggagagcccgtcgacgtcgtcgtcaacggccgcatcgtggcccgcggcgaagtggtcgtcgtcgaggaagacaattcccgcttcggcgtctcgctcacggagatcgtcggaccgctggggcagggtgatacctga

SEQ ID NO: 1648 - DNA, 1041 bp, BradyrhizobiumColbertium
atggcggcaccggtcggcatcgctcccgtcaagcagcgaggcgttaccacgctgggcggcacggaaaaggtcgccgcgctcctgctggcgatgggccggcaggcggcggcgagcgtgctgcagcagttcgagccgcaggagatccgcatcgtcaccaaggccgcggcggagctgcggccgatcaccgcgcaggaactcgagggaatcgtcgaggagttcgcccagcagttctcgatgggcgccaatattctcggcacccttggcggcctggaggccgtgcttggcgacgtccttccggccgaccaggtttcgcagatcatgtcggatctgctcggcaattcgagccggtcggtgtgggaccgcgtctcgtcggtgtccgagaactcgctggcgagctacctgtccaaggagcatccccagaccgcggcgctgatcctgtcgaaagtcaagccggcctgtgccgccaaggtcatgagccagctgcccgcgagcctgcgcaacgaattgatgcggcgcgttctgagcctcaagccgatcgtcgacgatgccatgcgcatcatcgagaagacgctgcacgaggatctgacgctgaacttcgcccgcaacctcggcgccgacacctacgcccgcgtcgccgatatcatcaacaagatggaacgcggccacatcgaggacatgctgaagagcctgtcggagaagcggccaaaatcggccgaggtgctcaaggagctgctgttcactttcgacgacgtgatcaacctgacgccgaaggcgcgcaccatgatcttcgatcaggtgccgaccgaccgcattgtcgttgcgctgaagggcaccgacaagcatttccgcgaactgatcctgtcctcggtcgcctcgcgcgtccgccgcgtcgtcgagcacgagcttgccatcggcgagccgtcgaaccagcgcgacgtgctggaggcccgacgcgtgatcaccgatcttgcactcgacctggcggagaaaggtgagatcgagctcaatccggagcaggaggatgagctggtcttccgctga

SEQ ID NO: 1649 - DNA, 1086 bp, BradyrhizobiumColbertium
atggcagaaaaatccgatcaggagagcaagacagaagagccgaccgagaagaaagtccgtgatgcgctcgagcagggcaagattccggtctctcgggaggcgtccattttcgcctcgatggccgcgctgatggtgatccaggcattcctgatcggccagggcgtgcagcgattgacgccgacgctgaagagccttctcgacgatcccgagggctttcccctctctaccggggcggatgcgcagaacctgcttaccgtggtcggtctccaggcgctgcgtttcctggtgccgctggtcgtcatcctggcggtgttcgggctcgcggcgtcgttgctgcagaacacgccccgtctggtgctcgatcgcatcaagccggatttggcccgaatctctccggtcagcggctggggccgattgttcggaacgcagggcatgatcgagttcgccaagtcgctgttcaagctcgccgcggttacggccgtcgtcgccttcgtgctacgctcgtcggaagcgaaggcgttcgaggcgatgtacaccgatccggtcgcgctgccggagatgatcctcagtatcgcgatgcgaatcgtctcagcgatctgcattgcgacgatcgtgctggtggcgatcgatctcgcttgggcgcgcttccactggcggcgcgagctgcgcatgaccaagcaggagatcaaggacgagcacaagcaggcggagggcgatccgctgatcaaggcgcgcctgcgctcgctggcgcgtgaccgctcgcgccagcgcatgatcgcctcggcctcgcgtgcgacgctggtcattgcaaatccgacacacttcgcgattgcgctgcgttacaagcgcgaggagaacgcagcgccgctcgtcgtcgccaagggcatggacgtgatcgcgctgaagatccgtgaagttgccgagcaaaaccgtatccccgtcatcgaaaacaaggcgctggcgcgcgcgctctacgaggcggttcaggtcgaccaggcgatcccgacggaattcttccggcccgtggccgagatcatctacttcctgcagtcgaagcaggcgccgcggaccgagaaggtccagtag

SEQ ID NO: 1650 - DNA, 402 bp, BradyrhizobiumColbertium
atgaatcagaatggggctgtcgtgggaccgctttatctcttcgaactcgcatcgtcgcaggcgcgctacctcgagctccgccagtcgaccattgccaccaacgtcgccaacgcaaacacgcctggctttcgggctcgcgacgtcgagcccttcaacaaggtgctcgacggcatgccggtgaggcttgcgacgacatcgccgtcgcacatgcagctatccgcaaccgagaccgacacgcggaagactgcgaagagggacagctgggaagtggttcactccggcaactccgtcagcctcgagcaggagatgatcaagggcagcgacgtcagccgcgactattcgatgaactcggcgatcgtgcggtcgtttcaccgcatggtcctgtcgagtgcaaaagcctga

SEQ ID NO: 1651 - DNA, 417 bp, BradyrhizobiumColbertium
atgctggactccctgcaagcgtcattgacggtcgcatcctcagggctcgaagcgcagtcgacgcgcatgcgcatcgtctcggagaatcttgcgaacgccacctcgacggggcgcaccgccggtgctgatccgtatcagcgcaagaccatcaccttcgacgccgccatggaccgagcttcgggcgcgcagctcgcgaaggtcaaggagatcggggtcgataccacgccgtaccgcgtggagtacgatccaggacatcctgctgccgacaaggccggctatgtcaagctgccgaacgtgaacatgatgatcgagatggctgacatgcgggaagtcaaccgatcctatgaggccaatctccaggtcgtgaaacaggtgcgatccatgctcggcatgaccatcgacctcctgaggagctga

SEQ ID NO: 1652 - DNA, 330 bp, BradyrhizobiumColbertium
atgcttgaggcgatctcatccactgcgatttccgccgggcaggcggcgtcccgcgccaccgagacgcaggtcgccgcgcccgcggcgaccactgcaatccagaccggtgacgaggttggcttcgaatctgtgatgaagcaggtgacgaacgacgcgatcgggacgctgaaggcgggcgaagcagcctcgatctcggcgatgcagggcaaggaatcgacgcgtcgcgtcgtggaagcgctgatgtcggccgagcaagcgctgcagacggcggtcgcggttcgcgacaaggtggtgcaggcctatcaagaagtggttcggatgtcgatctga

SEQ ID NO: 1653 - DNA, 789 bp, BradyrhizobiumColbertium
gtgaaatcgctcgccattgcggccacgggcatgaacgcccagcagaccaacatcgaagtcatcgcgaacaatatcgccaacatcaactcgacctcatacaagcgggcgcgggcggagttcaccgatctgttctaccagatggaccgcatgcagggcgtcgcgaacgtcaacggctcttcgccgatcccggaaggatccaatctcggtctcggcgtcaagtccgcggcgatccgcaagctgcacatccagggcgcgctgacgcaaaccggcaacccctacgaccttgcgatcaacggtcgcggctggtttcaggtgctcggccccaacaacgaggtgcaatacacccgcgccggctcgttcaacaccaatgccaacgcccagctcgtcacgatcgacggctatctcctcgatcccacgatcacggtgccgcagggaacggtggaagtcacggtcaacgccaccggccaagtgtttgccaagctggacacggaaatcaacccgcggcagatcggccagctcaacctcgccaatttcgccaacgaggccggcctggagccgctgggcggaaatctctatcgcgagaccacggcgtccggcacaccggtcgtcgggctgcccggcgatgccggctacggcaagatcaatcagaaatacctcgaagcgtcgaacgtcgacccagtcaaggagatcaccgaactgatctcggcacagcgtgcctacgaaatgaatgccaaggtcatccaggcctcggatgaaatggcccagacggtctcgaagggcatgcgctag

SEQ ID NO: 1654 - DNA, 465 bp, BradyrhizobiumColbertium
gtgggcctgatcatgcgcgggttggccgccgtgctgctggttctcggcgcgacgcgggccgctgcggccgaggagaagcggcttcccgtgcccgccgtctcgatccgcgccggcgaactgatccgggaggagatgatcaccgagcgcgccttcgcgccgaccctgctcggggtcgccatgttcatcgaggggcgtcaggtcctgatcggccgcatggcgcgacgcgcgctgttgccgggccaaccgatcccgaccaatgcggtggaggatccctggacagtcgcccgcggcgccacggtcaaggtcgtggtcgaagacagcggattgtccatcgtcacttatggctcggcgatgcagtcaggtgccgccggtgcgctcattccggtacgcaataccgacaccggcgtgatcatcaggggcgtcgtccagccggacggcaccgtcaaggtcgtggacggctcatga

SEQ ID NO: 1655 - DNA, 1131 bp, BradyrhizobiumColbertium
atgacccggctcctgcttgcgctcgtcctgctcgtgtcggccgccagcgcccaagctgcggtccgcatcaaagacatcgcggacatcaaaggcctgcgcgaaaaccagatcgtcggctatggcctggtcatcggcctgaacggcacgggcgacacgcttcgcaatgctcccttcacggaacagtccctgcaatcgatgctcgagaacatgggcatcaatgtcaggaacgaggccacgagcaccaatgcccccctgcgtccgaccacgctgcgcacgcgcaatgtcgctgcggtcatggtgacggcggacttgccgccctcgattgggcctggagagcgcatggacgttaccgtctcgtcgctcggcgatgcgacttcgctgctcggcggcacgctggtcatgacatcgctgcgcgcggcggatggcgccgtctacgcggtggcgcagggcgcgatcacggtcgccggctacagcgtcggggggcaggcgcagaacgtcagccagggcacgccgaccgcgggccgtatcccgaacggtgcgctggtcgaacgcgaggtgccgggaagcctccacgagatggagttcctggtgttgcagctgaagaaccccgatttcgtcaccgcaacgcgcatcctcgacgccatcaaccgctacgccggcggacgctaccgtgcgcagatcgcgttcgagcgcgactaccgcaccatcgtgctctcgaagccgcgtcacatcggccccgtccgcttcctcgctgagatcggcgagctggcggtggagccggacacgccggcgcgggtcgtgatcaatgaacgcaccggcacggtcgtgatcgggcgcgacgtgcggatctcgaccgttgccgtgactcacggcaatctgacggttcgcgtcacggagatgcctgtcgtgtcgcagccggcgccattctcgcgcgggcagacggtggtcgtcccgcagaccatggtcgaggcaaacgaggccggagcgcaagtggcgatcctgagtggggtcgatctccagcgcctcgtgcgcggtctgaaccagatcggcctgaagccgtcggggatcatcgcgatcctccaggctatcaagaccgcaggcgcactccaggccgacgtcatcgtgcaatga

SEQ ID NO: 1656 - DNA, 765 bp, BradyrhizobiumColbertium
atgctgaagctggatcacaaagccaaactcctcctgatggccgcggcctcagttctcgcgagcgcatcgcccgtgctggcgctggaggaggcaaagccgaccaagccgctcaacctgctctctttcgcgcgtgcccgcgtggtccgatcgcagaagccgcagctgccggccagcacgatcacaagcgacaatgcgtctgtccgggcgacggcgtgggcagccgaagagttaggacccgcggtcaccggtgcggtgccggagacgccggcagccgcgcctgctcccgcaccggtgcgtccggcgaagcccggcagcgtcacggcgccgccgaagccggcggcggcgcaggccgcgccggcccctgacaacgacattgccctgttctgcagcaacgtcgccgatcccgccgtcgatgcaaggctggcctggcagctcaaggagctggagaaggccgagaacctgctccgcgaacggatcgccgaagtcgaggccaagcgggccgaatacgagaagtggatggcgctgcgcgacgacttcctgaagaaggccgaagcgagtgtgatcgagatctattcgcgcatgaagcccgaggctgcggcgacgcagatcgcgggcatgagcgacgagaccgccgccgccgtgctggccaagctcagcccgcggaactcaagcgcgatcttcaacgagatggacacggcgcgcgcggcgcacctcgccgacctgctgggcgggatgcgtcgggtagatgacggaaagcccaaatag

SEQ ID NO: 1657 - DNA, 708 bp, BradyrhizobiumColbertium
atgaacaagccggtcctcatcctcttgcacctgctggcgtccgtcgtcttggccggatgcttccatgatccagccgaagtcctgatcggcccgcaaatgtcgcctgtcggcagcggcctgaggacgccggcggatccgatcccggtgacgccgcgcatgcgcacgcccgtcagctatcgctcgacctgggacgacggcaccgatctcttccgggatccccgcgcccggcgcaccggcgacgtggtgacggtgatcatctccatgcaggacaaggccaagctcgacaacaagaccggccgctcccgcgattcccaggtcaagttcgggctcgactggctgatggacgtcgccggatggaacgacacgggttcagccaatgccaatctcagcaccaacacccagatcaagggcaatggccaaatcgaccgcaccgaggacatcaagttgtcgatcgcggcgatcgttactgacgtgctgccgaacggcaacatgatgatcagcggctcgcaggaatttcgcgtcaacacggaaatgcgcgtgctcaacgtcggcggtatcgtgcgcccgcgcgatatctcgcgggcaaacacgatcacgtatgataagatcgccgaggcgcgcgtgtcctatggcgggcgcgggaaactgtcggacgtacagcagcctggatggggacatcggatctatgacgccgtggcaccattctga

SEQ ID NO: 1658 - DNA, 447 bp, BradyrhizobiumColbertium
atgcgcctgatcgcctccatcctcgtgctgacactgatcgcgatcggcgcaggcgccgttgccggcctgcatctgatcgcgaccgccgagcgcgtcgccgctgacgcgaagaagagcgctgcgcccccgccgatcgcgtcgagctacgccggcagcgcgcggctgaggaaattgtcaccgatcgtgaccaatctcgccgcgccggcaaacaactgggcgcgaattgaagcctccatggtgaccgacagcatgagcgacgaggacgcgggcattctggccgcccacatcagtgaggacatcgtgacctatctgcggtcgacgacggttgcgcagttcgagggatcgcgcggactccagcatctgcgcgatgatctgaccgagcgcgccaacatccgctcggccggcaaggtgcgcgaattgatcatcgagacgctggtgattcagtga

SEQ ID NO: 1659 - DNA, 735 bp, BradyrhizobiumColbertium
gtgaaaatcctgctgctggcgttgatactggtggtgctgcccgaagcggcgtcggcacagattccggacctgaattccttgttgcctccgggaaacggctcgaccagcggtcggatcatccagctgatggcgctcatcaccgtgctgtcggtggcgccgggactgctcatcatggtgacgagcttcacgcgatttgcggtggcgttgtccttcctgcgtgcaggtctcggcctccagaccacgcctgccaacctggtgctgatcagcctcgcgctgttcatgactttctacgtgatggcgccgaccttcgacaaagcgtgggagtccggcgtccagccactgatgaagaacgagatatccgaagagcaagcctatctgaagatcaccgatccgttccgcgagttcatgctggcccatgttcgggacaaggatcttcagaccttcgaagcactcgccgcggagagcttccgcaagaagttcgacgacaagcgggtcgatctgcgcgtgatcattccggcgttcatgatttccgagctcaggcgctcgttcgagataggctttctcatcatcctgccgttcctggtgatcgacatgatcgtggcgacgctgaccatgtcgatgggcatgatgatgatgccgccgacgatcctggcgctgccgttcaagatgctgttcttcgtgctgatcgacggctggaacctgctggcctccggactggtgcgttcattcaattga

SEQ ID NO: 1660 - DNA, 909 bp, BradyrhizobiumColbertium
atgtcaagcctgcttacgaactcgactgccatgaccgcactccagaccctgcggtctgtgagttcgcaactctccaccacgcagaaccggatttcgaccggccagcgcgtggccaccgcttcggacaatgccgcctactggtcgatcgcgacgtcgatgcgcgcagacaacgccgcgctgtcggcagtctcggactcgctcggcctatcggccgcgaccgtcgacaccgaatacaccgctctgacctcggtgatcggcgacaaggaatcaggcttgaccaagctccaggcgctcctggtggaagccaagaccgcgggtatcgaccgtaccaagatccaggcggacatcacgcagatccagcaggacatgaagctgaaggccgactccgccaccttcaacggcatcaactggctgagcacgacgaccggcaccacgccgacgagcttcagccttgtctcgtcgtactcacgtgtcggcggcacgcccacgatcggttccatcaccgtgacgaccgccaactacacgctctattcgaccacgcagaccggcattctggacacggtgagcggcagtgcttccgtcgacacgatcaacatctccgcactgaccgactcggccgccgaccaggccacgctcgatggctacatcgcgcaggtcactactgcgatcaactcggtgagctccgccgccgccaatcttggtgccgtcaagaaccgtatctcgaccaacaccaacttcgtgaagtcgctgatggactcggtcgaccgcggtgtcggtcagctcgtcgacgcggacatgaatgcggaatccacccgcctcgccgcccttcaggtccagcagcagctcggcgttcaggcgctctcgatcgccaataacagcagccagagcatcctgtcgctgttccgataa

SEQ ID NO: 1661 - DNA, 915 bp, BradyrhizobiumColbertium
atgggttctagtcttctcaccaattcctccgccatgaccgcgctccagaccctgcggtctgtcagcgcgcaactcgccaccacgcagaaccgcatctcaaccggtcagcgcgtggccaccgcctcggacaatgccgcctactggtcgatcgcgacgtcgatgcgctccgacaacgccgcgctctccgcggtctccgattcgctcggcctgtcggccgcgaccgtcgataccgaatacaccgctctgacctcggtgatcggcgacaaggaatcaggcttgaccaagctccaggcgctcctggtggaagccaagaccgcgggtatcgaccgtaccaagatccaggcggacatcacgcagatccagcaggacatgaagctgaaggccgactccgccaccttcaacggcatcaactggctgagcacgacgaccggcaccacgccgacgagcttcaacctggtgtcgtcgtattcgcgggttggcggcacgcccaccatcggctccatcacggtgacgaccgccaactacacgctgtactcgaccacgcagaccggcattctggacaccgtgagcggcagtgcgtcggtcgacacgatcaatatctccgccctgaccgactcggccgctgaccagaccacgctcgatgcctatatcgcgcaggtcaccgccgcgatcaactcggtaagctcggccgctgccgatctcggcgcggtcaagaaccgcatctcgaccaactcggaattcgtcaagaccctgatggattccgtggaccgcggtgtcggtcagctcgtcgacgccgacatgaacgcggaatcgacccgcctccaggccctgcagacccagcagcagctcggcgttcaggcgctctcgatcgctaaccagaacagccagagcatcctgtcgctgttccgcggctaa

SEQ ID NO: 1662 - DNA, 135 bp, BradyrhizobiumColbertium
atgatcggcggacgcagcacgggacgagccagcaatcagcctccgctgcgcgaattcatgcactacaccgcggccgagcgcgtcatgcgcccgagcgccgcttttggctgcgagacctattgcgtcgcgcaatag

SEQ ID NO: 1663 - DNA, 1626 bp, BradyrhizobiumColbertium
atgctcagtcgtgcgcaggtacagcaactgctcaacaatctgctggagcttgggccgcgccgcctgatggccttggggttgatcggctttgcggttctcgtcaccgtagttggcggaacctactatctcagccgccccgaattcgaaacgctctacacaggcctcacccgagaagacgtgacgcgcatcggcgcagcgctgcgcgagcagaacatcgccttcgatgtcaacgccgccggcgatgcggtttcggtccgcccgagccagaccatgcaggcgcgaatgctgctcgccgagaaggggctgccgaccagcgccaattccggctacgagctgttcgacaagatcggctcgctcggcctgacctcgttcatgcaggaggtcaccaagctcagggcactggaaggcgagatcgcccgcacggtgcaattaatgaaaggcgtgaaggcggcgcgcgtacatatcgtgctgccggtgcgcggctcgtttcgcgcaacgcagcagccgccgtcggcgtccgtcgtgctccgcacggacagtgcgatcgaggcgcgcacggctcagtcgatccgtcatctcgtcgccgctgccgtccccggcatgagccgcgacaaggtgactgtgctggacgctgacggatccatgttgctcgcagaagaggatgaggcgagcgccgcgccgagcaagatggcgagcctgcagaagactgtcagcggaatggtgcaggagaacatccgcaaggcgctgacgccgtatctcggcctcgacaatttcgaggtgagcgtcgctccgcagttgtccaccgacaagcggcagatcaacgagaccgtctatgatcccgagaaccgcgccgagcgctcggtacgggccgtgcgcgagaaggaatcctcgcagaacgcggaccgatcgacgccgaccacggtgcagcaaaatcttcccgaccagcaggtgaatgccggcggcggcaagaactccagcgaggacaagacccgccgcgaggacgtcaccaatttcgaggtctcgtccaagacgacgacgacggtgagcgacggctattccgtcaagaagctgttcattgccgtccttgtcaaccgagcgcggctggtcgcggatctcggcgacaagagcaaccaggcgattgtcgacagcaagctcgcagagataagccagctcgcggcgacggcgggcgggctggacaagacgcgcggcgaccagatccaggtgacggccgtcgactttatcgagggttcgcgtgagctggccccagtgccgccgatcagcttcgtcgagatgatcaacaagcagctcggcagcgtcatcaacgcggtgacgattctggccgtcgcttcgatgctggtgtggttcgggctgcggccggcggtcaacgggatactgacccatcgcgcggagcaggagcaggtcgaggcggctgaggtcgcccaactcgaggctgcggcagcgagtgctttacccgagggcgaggagacggagctcaacctcgtcgaagacctcgaaggcaagatgcagcgtacgccgcagaagcggctcgagcagatcgtccgactcgaccagatgcaggcggcagcgatcctaaaggactggatgcggcgtgaggaggcggcatga

SEQ ID NO: 1664 - DNA, 699 bp, BradyrhizobiumColbertium
atgaacgcggcaatcggaaaactcctgacgcagttcgatgcgaatggccgcgtcaagtcgccgccgcctccgccgccgaaaatccaggacgtgctgaccaggcagaaggaagcccggcgcgagccgccgcctcgatcgcatgctcaggctgagccgcagccacaaccgcaggcgtccccagcgccgcccgcgacggaggctccgtcggtcaatctcctggacgatgcctatcggcgcggccatgcggccggcgtcgcagagagcgacgccaagctggccgaggaacgcgtgcgcagcgcaatccgactgggcgaggagcgggcgaaatggtccgaccagcaggctgtcgcaatcgtcagcggattcgaggcagcctgccgtgagatcgagaccaacatcgcaagctccgttgcgcggatattgctgccgttcctcacggacgcggtgcgcgacaaggcgatcggatcgctggtcgagcaaatcgcggcgctaaccggcaactcttcggtgccggccttcaaggtcacgggccgaagcgatctgctcgatctcgtcaagacgcaactcgaggcgtccagacgaaccggcattgtgtatgaggcggccgagactctcgaggtccgcgtcgtcgctgaccaaaccgtgatcgagacgcagatctccgcatggagtgaacgccttaaggaggcgcgccggtag

SEQ ID NO: 1665 - DNA, 1314 bp, BradyrhizobiumColbertium
atggaagaggtcaagcatgagatcgtgatcgtccgccggcgcagcgccttcgccgaggaggcacatcacggcggcgtctggaagatcgcctatgcggacttcatgaccgcgatgatggctttcttcctggtcatgtggctgctcaatgcgctcaaccaggaccagaagcaggtggtcgcgagctatttcaacccgatcaagctcgcggagaacgcacccgccccaaaggggctcaaggacctctcaaagaaggagccgtcatcgttcgaaggccaggatggcaagcgccagccggccggaccgaatgaagaacgccgcggcgactccccaactgccgagaagccggcctcctacgaggaaaaggttctgttccgcgatccctatgcgactcttgccgaaatcgccagcagcgcgaaccagtcttcgggccagcggcgtgccggcgctctgacatctgccgaagaggagggcctcaaaggtggcgatgcctaccgtgatcccttcgatcccggctattggaggctggcgccgcaagcgtccaaggatgcggatcgcttcatcgagagcgagcccaggccgaatgcttccgcgcgcgatgtctccgtagccgctcagagtgagccgccggcgcatcgtgccaaggtggacgagaccggcggaagcatggcgccaaacgcggatatcccgtccgcgagcctgtcgcctctgctgccgccggggcctgcgccgacgcaatcctcacgggagggcagcgctgctcaagctggcgtccaggccaataccgccgcgcaggcgcgatccaacgacaccgcgaaagagtccgaaccgcatgatgcagcgcaagcgcagcagccgaccctcaagcaccttcagtccgcaatcgcggacgcgctgtcggatatcaaggcgggcgcggggccagcggccgaggtgcgtcaggttgaggagggtctgctgatcagcctgaccgacgatgcgagcttcggcatgttcgcggtcggctcggccgagccgcggcccgaactgatccgcgtgatcgacaagatcggcccgctgctgacgaagcggcagggcatggtcatcgtgcgcggccataccgacaatcggccgtatcgctcggaaacctatgacaattggcggctgtcgaccgctcgtgcgcagatggcctattacatgctggttcgttccggggtggacgcgcggaggatcgagcatatcgaaggttatgccgaccggcggccgaagcttccgaatgatccggcggctgcacagaaccggcggatcgaaatcctgatccgggagaaacgcccttga

SEQ ID NO: 1666 - DNA, 1176 bp, BradyrhizobiumColbertium
ttgatcaggctgctgcgccacgccgccctgctgctgctctttacggcggcgaatgcgtttgctcaatctgtgccccggctcgatgaaccctatgagctcgtgcgcgcgctacaggcggtacaggacggtatctccaacggtgacaccgccgcacataacagccacatcgcgctgattcggcagatcggcgacaaatttctcgctgccgatcccggcgtatggagcaatccacagaacggacaggccgtcgtcatctacctgctcagcggcggagcgccgcaattggttcgcaagctgccgcgcgacaagatgaaggtcgacgagcggctgctcaatggtgcgcttgcctatgtcgagggacgtcaggaggaagcgcgggagctgctcaaggacatcaagccgagaacgattccctcgggcctcggcggacaggtcgcgctggtccagggcgcactgttcgcgcgtgcagaggcatcgttcgcgatcgagcgtctggacgaggcgcgcctgctgttgcccggcacgttggtcgaggaggcggcgctgcggcgcgagatcctgttggtggggcaagcggaggatttcgagaagtttgagttcctgacgctggcttacatccgccattaccgcaactcgatctatgcaggcgatttctggcagcgcttctccaccgggctgacgcaatcgaacctggcgctggacgagcgccgatttgcgcggatcgccgcgctgctggagcagatcgatcgcgcaagccgcctcacgctgtatctggtgatcgcgcgcgcggccatggtgcgtggtcggctgcccgtgacccggcttgccggcgagcgggccctcacgctcagcgccgacgcatcagtggaacgcgagcgcgcccatttcttccgcggcgcttcgcgagtgctcacagacgaatatgacggcggtctcgccgagctgaaggcgctcgaccgcgcgaagctgcccgagcgcgacgttcctctcctgaatgccacggtgcagctcgcgctcgacgtgcggaagccgttcgcaagcggatccgccgcggcggccgacaaacctccggcaacgccggcgcgactcgatctggcctcgtcgaccgggatgctcgcgcgcgcgcagaagcagctgggcgagctcgaactcctcaccagggaccgccgtccatga

SEQ ID NO: 1667 - DNA, 1347 bp, BradyrhizobiumColbertium
atgaccaaactcagtggaacctccggacagctcttctcggcgcttgccgagagcctcaatgtgcgcgagacgtcgcgttcggcaaaaggctccggggtcaagtcgcaggcaagttcgtcgttcaacgatctgctccacaccgtctcgaatctcgccaaacaagccctgggcgatgatggcggcgataccaccgcgagcgccggagcgctgcgcacgcatctggcccatccggccgagcaggcgaagaaggctacggcgctgcacgaacgcatcgcagcgtccgagcggccagagtctccagaggattcctccgagaagaaggccgacgggtcgtccgagaggccacttccggtggatcatgccaccgggacagatatccagggtcagtcgagcaccgttgcggtgctcgggcaggaggtcgccgccgcgcccgctgtgaaaacgcagatggcgttgcagtccaccgacaaggatgcccccgcgcgcgacgagcgctccggggcggctaagcgcgacccgctcaccacgggtgcggcgaagacggcgccgtccgatagcactccgcccagcaccgcagcaaccgccgcgcgctcgcaggctgccgtctcgcaaacgatggcgccgcagcccgcgtcgacacaaggtggggagtcttcgagcacaatgccggcttcacccggcttcgaggcggttacggcaaacgttgagcgggccgccaaaacctcggcgcgcgccgcgctccctgagacgaccaagctcaccgtggtccagcaggagacccatctgcctccggcccagttcaacgctccgcaacaggtcgccaatgcggccgtcaccgagctgaaagagtcctcgggaccgaccatggccgcggcgcctgatctcgcagcatcccagaccaatgcgccggatcagccgctcaagatactgaccgtcaatctcgagccacccgcgctcggcaatgtcaccttgcgcctgcgcctcgtcggcactgaagtgtccgtccagcttgcggccgagcgcaaggacacgagccagctgctcgaccggcaacgcgatcagatccgcgacctcatgcagtcggcgggctatgtcgctgatgttgcgccggtccagcacggctcgctggacgccttccaaagcggctccggccagtcgcagccgcagctcgcgggtcagcatcaatcgtcaccgcagtcgcaaggcacgtttggcggcaccggaacgtcgtcggggcaatcggacggcggcgccaagcaggctcgccaggagcgccagttcagtcaggagacgcgtcatgatcaggacgtggcgccgcatcttcgtcgcggccctgtttatctctaa

SEQ ID NO: 1668 - DNA, 582 bp, BradyrhizobiumColbertium
atgatcaggacgtggcgccgcatcttcgtcgcggccctgtttatctctaatgcaggcgccgcccaggcggccgccgaaactgcgcgcccctgcgagcgcgagatggcacgcgcggcgcgtcagcacggcattccgctcggcattctctatgcggtcggcctgaccgagaccggccggcgcggcgcactccatccttacgctctcggtgccgccggccagacggtgttcgccaaggacgtggatgacgcaatcgcgaatttcgacgcgatgcgcagcaaaggcatcaagctgatcgatctcggctgtatgcaaatcaaccactattatcacggcgacaagttcgcttcggttcgggccatgttcgatcccgcgaggaacgtcgagtacgccgcgcgcttcctcaaggagctgaagcagcgcgaaggcagctggaccatggccgtcgcccgctacaatgcaggccccaacaaccagccggcccagaagcgctacgtctgtcacatcgtcgctcatctcgtctcgagcggcttcggtgcgtggaccgacaaggcgcgctcgttatgtcagccgagaacgacctga

SEQ ID NO: 1669 - DNA, 1233 bp, BradyrhizobiumColbertium
atgagcctgtatggcgttatgcgcaccggcgtttccggaatgaacgcgcagtccaacaagctgtcgacggtctcggataacatcgccaacgtcaacacaaccggctacaagcgggcctccacggagttctcctcgctaatcctgaagagcggctcgggcaattacgattctggcgccgtcgagaccacgatccgctacgccatctcggatcccggacatacgcagttcaccacgtcgagcacggacctcgccgtccagggcaacggcttcttcgtggtgtcgaacgccaacaacacgcagcagtttctaacgcgcgccggctccttcgtgccggacagtcagggcaatctggtcaatgcggcgggctactatcttcttgggcagcctggtctggtgaccaacttctcgcagaacagcctggccggcatgcaaatcgtcaacattgcccagattccgcaagtgcctgtgccgtcaacgacggcaacgctcacgaccggcaatctggatccggaagcagccatcatcgcaggtccgcccagcccggcatcgtattcatcgaaaagctcgatcgtggcctacaacaatatcggccaggccgttacgcttgacgtttatatgtcccacaccgcgaccgctgccggctcggatacctggcagatagaggtctatgactccgcgacgggcacctcgctgggggccgccaccactttcaccttcgacaccacggcggccggcaggggcgcgctggccgcggcaagcccgaccggtctcacagtgactgtccccggcggtgcggcactgaccatggacctgtcgaacatgacgcaggtcgggaccgacttcagcttcaaggccaccgtcaatggcagcgttcccgcggccatcgataaggtcgacgtcgacgatgcgggccacgtgacggcgatcctcaagaatgggcagcaactgacgctctacacgatcatgctcgccgacgtcgcgagccccgacaatctgacgcccgagccgggcaacgtctattcgaccaacctcaattccggcaacgcgcaggccggaaatgccggcaccggcggactcggcacgatccagtccggtgccttggaggcctccaacgtcgacctcgcggacgagctcactgggatgatcgaggcccaacgcggcttcaccgcgaactcgaaatcgttccagaccggcgccgatctgctggatgtcgtcgtcaacctgaagcgctga

SEQ ID NO: 1670 - DNA, 1476 bp, BradyrhizobiumColbertium
atgtcccttaccgccgctctcaactcggcccgctcctcgctcatggcgtcgagcatccagtcgtcggtcatctcgcgcaacatcgccggtgccagcgccaccggctactcgcgcaagctgaccgagctggacaatcttcccggcgccggcgtctatgtcgcggcgatccagcgcgccgccagctccgggctctacgacaacgtcctggtcgcgacctcgtcatcggccaagcaaagcgcgatctatgatggcctccagagaatcgccgccgcgactgtggacgatccagagctcgagcaatcgccgaccgcacagctcaatgcgctgaagcaggcgctccagaagtatgccaacgcccccgacaacaccacgctggcgcaggcggccgtcgcatcggccaaggacatggcgagcgctctcaaccaggcgaccaagaccgtgcagtcggtccgcgagagcgctgatgccgacatgaggacgtccgttcagaacatcaaccagctgctctcccagttcgatgccgtgaacactgcgatcgtgaagggcacgatctccggcgacgacatcaccgactacctcgaccagcgcgacaacatcgtctcgcagctgtcgcaggaggtcggcgtcaccatgtcgatccggcccaatggcgacgctgcgctctatgcggatagcggcgtcgttctgttcgacaagacggcgcggacggtcagctttgcgccgacgaatgcctacaccgccgcgaccacgggcaatgccgtctacatcgacggcgtccccgtgaccggcgccaattcggtgatgccactgaagtcgggcaagctcgcgggtctcgctcagctccgcgaccaggacgccgtcacctaccagagtcagctcgacgaaatcgcgcgcggcctgatcaatacgttcagagaaagcgatcaaacggccgcagcgctgcccgacgttcccggtctcttcacctatcccggtgcgccggcgatgcccgcgagcgccaccgtctcggtaggactcgccggtacgatttcggttgcagcctccgtcgatccggccttgggtggcaacccgaacctgctgcgcgacggcgccatcagcggcaatcctgcctaccaatacaacaccgccggcgacggtggctattcggcccggctgcagcagctcatcggcgacatggatgcgtcgcagccgttcgatgcgaccacgcaaggcaagccgagcggcagcctgatcgactttgcatcgtcgtcggcgagctggatcgaaaaccagcgcaagaccgccaacgacaactccgagtaccagagcacattgctcaaccgcagcatcaccgcattgtcgaacgtcaacggcgtcaacatggacgacgagatggcgttgatgctccaggtcgagcgcacttattcggcgtcgtcaaagatcatctcgaccgtagatgagatgctgcaaagcctgctggctgccgtggggaattga

SEQ ID NO: 1671 - DNA, 1047 bp, BradyrhizobiumColbertium
atgatgagcgcgaactacgtttccaccctgatgttgtcctcgtcgttgaggtattcgatcacaggcaatcaggcggcactcagcagggcctcgatggaggcgaccaccgggcgcttctacgacgtcggcctcgagctcggtgcgacgacggggagcgacctcacgctgcgggcggactggagcttcgccgatcagctcgtcgataccaacgggctggtcgcggggcgcttggacgtgacgcagaaccggatcacccagctcagcgagaccgccacggacttcctcaaggatttgatcgcggcacgcagtaccgacggcggcggccgggtcatcctgccgcctgcagcctccaatctccaggatctgatcggtgcgctgaacgtctcatataacggctcgtatctgttctccggcatcaacacgcagaacgcgcccatcacgccctacaccgcgggctcggccagcaagaaccaggtcgacgccgactttctcgcggccttcggcttctcgcaatcctcgcccggcgtgggtaccattacccccgcccagatgcagaccttcctcgacacgaccttcgatgccgagttcgcgagccccgcctggaataccaactggtcatcggccaccgaccagaccatgcaaagccgcatctccacgacggagatcaccgatacctcggtcagcgccaatcagatcggctttcgcaggctcgccgaggcgtacacgatgatggccgacctggggaacgtaagcctgagccaggagacatttcaggtcgtcgtggacaaggcgatcggcctcgtcggtaacgccatcaacgatcttgctgcgctcggaggtgccgtcggcacggtgcagcagcggatcaccaccgcaaccgccaagctgaagacgcagcaggacattctgaacaatcagatcgtcggaatggagaaggtggacccgaccgaggcttcggtccgggtcaacacgctgcagacccagatccagacggcactggcgctcacctcgcagctccagaagatcagtctcatcaattatctctga

SEQ ID NO: 1672 - DNA, 345 bp, BradyrhizobiumColbertium
atgacgtttgaagcctatgaagcagtcgttgacgacagtgcctatgaggcgcgcagccgcgagcggcaggcactcagcctcggcatcggccggctcgagcggatccagaaggatcgcttcagtgtcgaggatctggtcgaaagcctgctctatgtgcggcgactgtggacgatcttcatcgaggatctggcgcacccggagaacgcacttcccgaaaagctgcgtgccgacatcatctcgatcggcctgtgggtcgtcaaggaagccgatcggctccgggaacaacggtcgaacgacgtggagcagctcatcgaaatcaaccgcctgatccgagacgcgctctaa

SEQ ID NO: 1673 - DNA, 411 bp, BradyrhizobiumColbertium
atgaagatctccttgcgcgccggcgaacgaatctacgtcaacggcgcggtgctccgcgtggaccgcaaggtctcggtcgagctcgtcaacgacgtgatgttcctgctcgaagggcaggtcatgcaggcttccgacgccaccacggcactgcggcagctctatttcatcgtccagctcatgctgatgaacccgactgacgtccgggacgcggctacgctctacgctcagcatctcgccgccctgtttgccgtgtgcgagaaccgcgagatgctggatggactaggcgcagtcgatgagctggttacggccacccgctacttcgaggcgctcaagcggattcgcgccctgtttccggtggagcaggccatcctggccggctctgccaccgtttccccattcgaggctgcctga

SEQ ID NO: 1674 - DNA, 414 bp, BradyrhizobiumColbertium
atgaacgtcaccagcgcgaccgagaagtcgtccagttcgaacggcacgacgtcggcgacgtcgagcaacagcgtggactacaatacgtttcttcagctgctcattgcacagatgaagaatcaggatccgaccaacccgatggataccgcgcagtatatgagccagttcgcccagctctcgacggtggagcaggcaatgcagacgaatgcaaagctggacgcactgctgtcgtcgcaatccttgtcgcaagccaacgggctgatcgggaagacggtcagcttcacggactcgaccggtgcgagtttcagcggcaaagtcgtttccgtctcgatcaacagcgacggctccatcgcaactctcgccgatggcacgaaggttgcggtcggccccgggctcacgatcagccagtcatga

SEQ ID NO: 1675 - DNA, 267 bp, BradyrhizobiumColbertium
atgaacgagcgggacgccctcgacatcgtccaggcggcgatctggaccatcatcgtcgcctccggacccgcggtcggcgccgcgatgctggtcggcaccgtcatcgcgctgatccaggccctgacccagatccaggaggtgacgctgaccttcgttccgaagatcatcgtcatcctcctggtcgtcgccatctccggctccttcatcggcgcgcatctgtcgaccttcaccgagctggtctattcgcggatcgagcgcggcttctga

SEQ ID NO: 1676 - DNA, 2082 bp, BradyrhizobiumColbertium
atggccgataccttagctgccagcctgcccagcccgcgccgcctcggagcggacgccttcttcgcgggcggcatcgtggccatgctcacgatcctgttcctgccgattccgccgatcttgatcgatctcggcctcgcgttctcgatcgcgctgtcggcgctgatcctgatggtcgcgttgtggatccagcggccgctcgacttctcggcctttccgaccgtgctgctgatcgcgacgatcctgcgcctggcgctgaacatcgcgaccacgcggctgatcctctcgcggggcggggagggcgaacacgcggccggccacgtcgtcgccggcttctcgaaattcgtcatgggcggcgacttcgtcatcggtctgatcatcttcgctatcctcgtcaccgtgaacttcgtcgtgattaccaagggcgcgacgcgtatcgccgaagtcggggcccgcttcacgctcgacgccattcccggcaagcagatggcgatcgacgccgacctgtccgcaggcctgatcgacgacaaggaagcccagcgccggcgccgtgaactggaagaggagagcgcgttcttcggcgccatggacggtgcctcgaagttcgtccgcggtgacgccatcgccggcctgctcatcaccgcgatcaacatcttcggcggcatcgtcatcggcgtgacccatcacgggttgaccctctcccgcgctgccgacgtctacaccaagctttccgtcggcgacggcctggtgtcgcagatgccggcgctgatcgtgtcgctgtcggcaggccttctggtctccaagggcggcaccaggggctctgcggagcaggcggtgctgcggcagctcggcggatatccgcgcgctgtgtcggctgccgcgctgatgatgttcgtgctcgccttgatgccgggtctgccgatggcgccgttcgttttgctcggaggcgttatggccttcgtcggctattcgctgccgaagcggcaggccgcgctgaaacagaaggaggatgcgcgcaaggccgacgagcgcgcccaggcggaggccaaggaatccgtcaaggagcagctcaagaccgccgagatcgagctggcgctcggcggccacctctcggtccatctgctgggctcgcgcaccgagctcgcccaccgcgtcgccaagattcgcaagaagttcgccaagcaatacggcttcgtcattcccgagatcaagctcaccgacaatctgtcgatcgaccccaagtgttaccagatccggatccacgacacgcgcgtcgcccatggcgaactcaggctcggcgaggtgctggtgctggtcgacaaggatggcaagcccgacgtacccggcgacgaggtcatcgagcctgctttcggcatgaaggcgctgtgggtgacggaagccttcaccgacgaggtcaagcggcagggctgcaagccggtcgacaatctgtcggtgctgctcacccatctgagcgaggtgatcagggcgaacctcgcccagctcctctcctacaaggacatgcgggccctgctcgaccggctcgatcccgagtacaagcgcctggtcgaggatctctgcccctcgcagatctcctattcgggtctgctggcgatcctgaagatcctgctcgccgagcgagtctcaattcgcaaccttcacctcatcctcgaggcaatcgccgaaatcgcgccccatgtgcgccgctccgagcaggtcgcggagcacgtgcgcacgcggcttgcgcagcagatctgcggcgacctctccgacaatggcgtgctcaacgtgctccgtcttggcaaccggtgggacctcgcgttccaccagagcctgaagcgcgacgccaagggcgacgtcatcgagttcgacgccgacccgcgcctgatcgagcaattcgcgaccgaagccagcaccgcgatccgcaagttcaccgagatcggcaccagcgtggtcttggcggtgactcccgaagcccgaccgtatgttcggatgatcctggagcgggtgtttccgaccttgcccatcctgtcgcatgtcgaagttgcgcgcagcgccgagatcagggcgctcggggccatatcgtga

SEQ ID NO: 1677 - DNA, 456 bp, BradyrhizobiumColbertium
atgggtgatgcctgtgcactgaacaccgccatcgtgctcgttccatgcgtcgcctcggtgatggatctcgaccggctgcgggtcgccgccgaccagagcagcaccctgcgcacgctgctcacgcgccacgggctggcggtctacgcccaggtgcagcagaccgcgggctgcaatgcctcccatccggtggagtcgcggctgtcgcgatgccttttgcagacacatgatctgtcgggcgactcccggctgctgctgacccaggagaccatggcacagatgatcggggcgcggcgcaacagcgtgtcgctagccgccaactcattgcagcaggccaatgtgatccactacagccgtggacacatccagatcaccaacctggacggcctgcgtcagacagcatgcgaatgctacgcctccgtgaagggccagtacgaccggctggtccgggtgtcctga

SEQ ID NO: 1678 - DNA, 411 bp, BradyrhizobiumColbertium
gtgatcaaggcgggcaagcccatgttcgaagcaaccgctgcgccggcgcagaaggcgcccgatgccgatcccgcgcgcgagccgggcgcgtatgaagcgctggtgcgcgagatcggcgaggacggtgcctgtgaagtccgcgaagtgttctggagcgagacctgcgcgcgcatgcaattgttccgcacgctctcgctcgcgcagcaccacgccaggatcgcccgcgaagcgcattcgctgaagagcgcggctggaacgttcggctatgtcaggctcgccgcgctggcgctgcagctggagaagaccgcgggagatcttggcgaggccgagttccgtgcgctgctggacctgatggaggccgcctacgccgccgcgcgcgcgcaggagccggaaggtccgatcccctcttga

SEQ ID NO: 1679 - DNA, 249 bp, BradyrhizobiumColbertium
atgttcacttacgagaccgcagaccagaaggaggtgcgccgattccgcatcgcacagttcaacggccgcatggcgaccgtgaaggccggcgagtcgacggtgaccggtttcgtgcgttcggtgctggagcaagaatcgagcgtgccgccgcgctggaccatcacgatcattccgaacgcgccgaaggaacagatcaagccgctgcgtcccgcctcgcgcgcacgtccgttcgccgaagactatttctga

SEQ ID NO: 1680 - DNA, 624 bp, BradyrhizobiumColbertium
atggggtcacggaacgatacggccactgattcgcggtcttcggaatggcacgaagacagcgctgcttcagccgatgagcccgatctcgtccgcctgagcgccgtccgtgccaaggcggccgacgaaatggcggccgccatcgcccgcgagctcaacggccccctgactgcgctcctgctctacatgggcgagatcaaacatcacagcgatcaactcgcgcctgtcacgggcgatcgtgcctacttgcagcgggtggtcgagaacgcgctggcgcagactgaacgcgtttgcgggttggtgaagcagcttgccggccctcacaagggcggcctgccggtcgcgtccagcaccgaggaggcggaatcgaaggtcacccgcgtgctacagccgcagcgcctgccgggggccgagccactcggcccctcgggccagaaacgcctgaccaagcgcgagcgcgaggtgctgaggctgatcagcgaaggctattcgaacaagcagggcgcgcttcgcatgcagatcagtccgcgcaccttcgagagccatcgcgcggaagcgatgcgcaagctcggggcgcgcaacaccgcggacctggttcgtgcggcattgctgcattcgatcgactaa

SEQ ID NO: 1681 - DNA, 1164 bp, BradyrhizobiumColbertium
atgaacgagatcgatcggctgtcggaatttctgcagaggctcacgccgctgtcgcgcagctgtctgctcagcgagctcgaacggctcgagctgtgcggcatcgacatgccgggttcggccgagatccagtcccgcttgcgcgccgagttccgcaacgacggatcgacccaggcgcgcgccaccaatccttcgcgcaatttcttcgcgcctctcgagctgctgctgatcgacggtgcacccgagcatgccaatatggggcggatctcgcgcaacaccctcaccccgatctgggagtggatctgccgcgacctgctgccgaccatggcgcgcgactacatcaaggccatcaacgatcaggtcgccgccaacaatccgaaggaagtgcagaagatcgcctcgaccttccagaccaaggtcgtcaaggttctcgagaacaccctcacctcgcccgagagcaccgaatccgcgcgcgccaagctcgcgcaatacacggcctcgcgcaccgccttcgacgatgtcgtgaagatgcttcacgtgttgcgcgccggcgacgcgctgcccaagttcaacgagaagctgcctgagaagatcgcgaagttcgacgacggccaggtcgcccagatcaccgcgcagctcgacgccttcaagaaggcccatcccgaggcgctgcccttcgcgctggcgctggtggcgcggcgcgtgaagccgttctggcaattggcgcggcttgccaccaaggccgcggcgggcaaggccgccgcagacgtcgccgcgacgccctatgcctgcgtcgtccacatggttctcgaccggctcgacgacaagcgcctcgcgcttcgcgtcgcgctccggaacaaccgggtgctggtcgcccgcgatctgctcgccgagatctacgacaccgaatatgcgctcaaggtccgcatcgacggcttcgagcactgcgagtggggcgtccgtctccagcaattgatggacgcgatcgcggcgctggtctcggccgaggtgagccgcttccccgacaatgtcggccacattctcggatcgcgtcgactgcgcagccacgacacactcggcggcaagctgacctatctggcctggaaggggcgcgatgcgatgcaggacggcgctgccgcgttccgcaaactgatcgggcaaacctga

SEQ ID NO: 1682 - DNA, 156 bp, BradyrhizobiumColbertium
gtggcgcttgctgtcggccacgcaggcgcgcggcgtcacctttcgccgtccgaaggtcacaggcctccgtccgacgagttcactcatcccatcgctcatcctacaccactcccgttccgtgacggtttcttaaacgcggagcgtgggttcaaataa

SEQ ID NO: 1683 - DNA, 1137 bp, BradyrhizobiumColbertium
gtggccgacagcaagcgccacttgcgcgcctttctcagcgaggtgctcgaggatctcggcttcgtcacctgcgaatgcgccagcgctgacgagctgcaaaccgtgctcgccaccgaactgccggacctgatcctgctcggcgtcgccgccgacggcatcgagccgggacgattcctcgaagtattggtgcgcgagggattcggcggcagggtcctcgccgtcggcgcccgcgattcgatcatcgtcaaggccgtgcggcaggtcggcgaggaatacggccttgcgatgctgccgccgctcaccacgccgtttgccgcggagacactgcgcgagcgcgttgcgatgctgctgccggacgagccggcgccgagcccggccgtgcatgtcggcgaggccctgcacgccggctggctcgaactctggtaccagcccaagatcgacgcgcgcacgctggtgcgcagcggcgccgaggcattggtgcggatgcggcatccgacctggggcgtggtgccgccggcctatttcatcccggagccgcacgatccgcattttcgcgagctgtcggagttcgtggtcgatcgtgccgtgcgagactggcattatcttctcgaacaacaaagccccgtgaatctgtcgatcaatcttcccgcttcctatctcagggagccgcaggcggtgcgcgatctctgtcgccgcgttcccacgcatccggctttcggcggactgacggtggagatcgacagcgaggaggcgatccgcgagctcgacctcctgaccgaggttgcgcgcgaggtcggcctgcacaatatcggcctgtcgatcgacaatctcggcgccaactggccgtcgctgatggagctggacaggattcccttcgtcaagttgaaggccgaccggcagttcgtcaccggcagcggcggcgatcggctgaaacgcacggtgtgccgtcacatcgtcgagctggcgcagggctttggcgcgcgcgcggtggcgcaaggcgtcgaaagccgcgccgacctcgtcgcggcaaacgagctcggcttcgacctggtgcagggcttcctgttcggcaagccgatgccgctgaagaagttcgcaaggagcgcgctgacgcggacggtgatggggcagcagtga

SEQ ID NO: 1684 - DNA, 861 bp, BradyrhizobiumColbertium
atgcactcttccgccagcggctggggcaacgggcttctcggcgtcatcatcttcagcggctcgctgccggcgacgcgggttgcggtcggcggcttctcggcgctgttcctgacgtcggcgcgcgccgtcatcgcggcgctgatcggggcggcggtgcttggcttgttgcatcaggcccggccggcacgccaggatctcgcctcgctcgtcatcgtcgccatcggagtcgtggtcggctttccgctgctgaccgcgctggcgctccagcacatcacctccgcgcattcgatcgtcttcatcggcctcttgccgctggcgaccgcgatcttcggcgtgctgcgcggcggcgagcggccgaaaccgctgttctggctgttcgccgtgctcggcagcgccacggtggccggcttcgccttctccagcgacggctcggcctcgctcaccggcgatctcctgatggtggccgcgatcgtgctgtgcggcctcggctatgccgaaggcgccgcgctgtcgcgccgccttggcggctggcaggtgatctcctgggcgctgctgctggcgctgccgccgatgctggcgctggcgatctggacgtggccatcggactggagcggcgtcggcgcgcccgcctggatcgggctcgcctatgtctccgtcttcagcatgttcgtcggcttcatcttctggtaccgcgggctcgccgccggcggcatcgcccgggtcggccagttgcagcagctgcagccgttcttcggcctcgcgctcgcgggcttcctgctgggtgagccggtcgcggccagcatggtcgccgcgaccgcgctcgtcgtcgtctgcgtcttcctggcgcggcggtatgcgtga

SEQ ID NO: 1685 - DNA, 1722 bp, BradyrhizobiumColbertium
atgggcgcgaagatcgacaagcagaggctgccgagccgtcacgtgacggaaggccctgcgcgcgcgccgcatcggtcctacttctatgcgatgggtctgaccaccgagcagatccaccagcctttcgtcggcgtcgcctcgtgctggaatgaagcggctccctgcaacatcgccctgatgcgccaggcgcaggcggtgaagaagggcgtggcatcggccggtgggacgccgcgcgaattctgcaccatcaccgtgacagacggcatcgccatgggccatgacggcatgcgctcctcgctgccgtcacgcgaatgcatcgctgattccgtcgaactgaccgtgcgtggccatgcctatgatgcgctggtcgggcttgccggctgcgacaaatcgctgccgggcatgatgatggcgatggtccgtctcaacgtgccctcgatcttcatttacggcggctcgatcttgcccggcaatttccgcgggcagcaggtcaccgtgcaggacatgttcgaggccgtcggcaagcattcggtcggcgcgatgtcggacgaggatctcgacgagatcgagcgcgtggcctgcccttcggcgggcgcctgcggcgcgcagttcacggccaatacgatggccacggtgtccgaggcgatcggccttgcgctgccatactcggccggtgccccggcaccctatgagatccgcgatgcgttctgcatgaccgcgggcgagaaggtgatggacctgatcgcgtccaacatccggccgcgcgacatcgtcaccctcaaggcgctggagaatgcggctgccgtggtcgccgcgtcaggcggctcgaccaatgctgcgctgcacctgccggcgatcgcacatgaggccggcatcaagttcgacttattcgacgtcgccgaaatcttcaaaaagacaccatatgtcgcggatttgaagccgggcggccgttatgtcgccaaagacatgtttgaagtaggtggcataccgcttctgatgaagacgctgctcgacaacggcttcctgcacggtgattgccttaccgtcacgggccgcacgatcgccgaaaacctcaagagcgtgaagtggaatccgcaccaggacgtggtgcacccggcagacaaacccatcaccgtcacgggcggtgtggtcggtctgaagggaaatttggcgccagaaggtgcgatcgtgaaagtcgcgggaatgtccaacctcaggttcaccggtccggccaggtgcttcgaccgtgaggaggatgctttcgaggcggttcagaagcgcacttaccgcgaaggcgaagtgatcgtgatccgctacgaggggccaaagggcggccccggcatgcgggaaatgctccagaccacagcagcgctgaccggccagggcatgggcggcaagatcgcgctcatcaccgacggccgcttctccggcgcgacccgcggcttctgcatcggccatgtcgggccggaggcggcggtcggcggaccaatcgggctgcttgaggacggcgatatcatcgaaatcgacgcggtcgccggtacgcttaacgtaaaattgagcgacgccgagctcgcccagcgcaagaccaaatggagcgctcgcgcgactaatcatacgtcgggtgcgctctggaagtatgctcagcaggttggaccagcggtcggaggggcagtgacccatccgggcggcgcgcacgagaaacagtgctatgcggacatttag

SEQ ID NO: 1686 - DNA, 789 bp, BradyrhizobiumColbertium
gtgttgggggcggccgcgctggccgcgccggcgctcgcctttgacggtgcgccggtcaaccccaaggatgcggccatcccggtcgtgaccaacttgccgggaaccgcgacgaccttgcgcggcaaggtcgcgccggtgacgcaggaaacctcgctcagcgccctgcaatatgctgccgagggcggtcacccgatcgcgcagtggaagctcggccgcatgtacgccaatggcgacggtgtcgctcaggacgatctgcgcgccttcgaatatttcagccggatcgccaacgcgcatgccgaggacagcccgtcggccccgcaggcgcagatcgtggccaacgccttcgtcgcgctcggccgctactatctggccggcattccgaattcgaaggtcaaggccgatccggaccgggcgcgggagatgttctcctatgccgcctcctatttcggcaacgcggacgcgcagtacgatctcgcccgtctgtacctgaagacccccgacgcctcgcgtgaggacttccgctacggtgcgcgctggcttggtctcgccgcgcagaagggacagcaccaggcgcaggcgctgctcggccagatgctgttcaacggcgaccgcctgccgcggcaggccgcacgcggcctgatgtggctgaccctggcgcgcgacagcgcaggtcccgacgaggtctggatcaaggaaagctacaaccgcgccttcgccaaggcctcggacgacgaccgcgccatgtgcctgcagatgctggagcagtgggtgcagggccgccgggagtaa

SEQ ID NO: 1687 - DNA, 798 bp, BradyrhizobiumColbertium
atgtccatcagagtagccacctggaacgtgaactcggtccggcagcggattgatctcctcctgacctggttgaaggagtgccagcccgacatcgtctgcctccaggagatcaaatgcgtcgacgaggccttcccgcggctggagatcgaggcgctcggctacaacgtggtcacgcacgggcagaagacgttcaacggcgtcgccctgctctccaagctccggttcgacgagaccaagtcggggctcgccggcgacgaggaggatacgcatgcccgcttcctcgaaggcgtggtgaccctcaagcgcggggtactgcgtatcgcctgtctctatctacccaacggcaatccggtcgggacggagaaatacccttacaagctcaaatggatgtcgcggcttcttgaatattcgaaggagcgtctcaaggcggaggagccactgatcctcgcaggcgacttcaacgtcatcccgcatgcccgcgacgtgcacaatccggccgcctggaccgaggacgccctgttcaagacggagacgcgggagagctttcagtccctgctcggcctcggcctgaccgatgccttgcgggccgtcaccgacgagccggggctgtacaccttctgggactaccaggccggagcctggcagaagaaccagggcctgcgcatcgaccatctgctgctgtcgccacaagccagcgaccggctcgccaatgtcggaatcgacagctatgtccgcggctgggagaagccgtcggaccacgtgccggtatgggcggatctggatctggaggcggcctga

SEQ ID NO: 1688 - DNA, 2310 bp, BradyrhizobiumColbertium
atgaagcgaattgagccgcgtgacggcctgatcggcgcattcctgtattggctcggcggcttcgagatcgaggacggcctgatcgccgatctcagcgagcggcaggtccgccgcatccgcgccaagcagatcgacgccgtgacgcggttgatcccggtcaccatggcggtgacgatgctcaacgtcgccatcgtcctgatcatgttctggggcaggggctggaacgacttcctcgcgatctggggcctgacgctcgccgccaccgcttcgcttgcggtgcgctcatggcgtcggtcgcatcaaaatccgccgcaggaagcctccacccgcgctggccgacagatgctgcggcaggccttcttcctcgccgcaatctggggcgcgctgccgctcgccctgttcagccgcatcgagccgaccggccagctgatcctggcctgcctgatggtcggcatgatgtcgggcggcgccttcacgctctcgacattccctcgtgcgggtctcgtctatctcgccaccatgaccgtcgcctgcgccggtgcgctgctcctgtgcggcaccgggccctatctggtgacctcggtgttcctgctattgttcgcattcttcatggcgcgcaacatcgtctcgcagggcaacctgttccttggcaatctcaaggcccagctcgagctcgagcgccagaccgagatcatctcgctgctgctgaaagacttccaggagaacgccagcgactggctgtggcagaccgatgccgacgggcatctggtcgacgtaccccaacgcttcgcggacgtcgcgcagctgccgcttccactgctgaagggatcacatttcgccgatgtgctcgacatgctttgcccagaggacaagcgcgcagcctacaacgtcgtcggcctgatggagcagaatgaaccgctgcacgagatgaacctcacggtcgtcgccggcggcgaggcgcggctgtggtcgctgacggccaagccggcctatgaccgcgacggccagttcctcggttatcgcggcttcggccgcgacgtcaccgaacgctggcgcgctgaaaaggccgaggccgaaagccgcgccaagtccgacttccttgcggtgatgagccacgagatccgcacgccgatgaatggtgtcctcgggctcgccagcatgttgcttgaaaccacgctcgaccccgagcaacgcgaagccgtcgccacgatccgcgactccggcgataatctccagcgtatcctcaatgacattctcgacttgtccaagcttgaggccgggcgcttcaccttcgaggcgatcgatttcgccccgcaggcgctggtcgaagctgtcgcaaccgttgttcgcgcaggcgccaagagcaggggactgaccgtcaacgtcgagctcgatccaaacctgccgccgacgctgcgcggcgacgtcgcgcgcatccgccaggtgctgctcaatctcgcatccaatgcggtgaagttcaccgatgaaggcgaggtgacgatttcggtcacctgccaggcgcggcgcgacttgctggcgaccgtcgaatggacggtcaccgacagcggcatcggcatcgccccggaaaagctgggccagctcttcagcgacttcgcccaggctgacgcttcgatcagccgccgctttggcggcaccggcctcgggcttgccatctcacggcggatcatcgagcagatgggcggcaccatcggagtcacctcgacgccgggcgagggctcgagtttccgcttcacgctggtgttgccttggagtcaggtgccggtatcggaccaggccacaggccgcgatgaggccgaggagctcaaggcccgtatcgccactctcgaccggccgctgaaggtgctggtcgcggaggacgatgcagtcaatcggatggtcgtaagcaagatgctgggcgcgttcgaggtcgaattgcgtgtcgtcaccgatggtgtcgaggccgtcgcggcggcatccgagagcgattacgatgtcgtgctgatggacgtgcgcatgcccgatatggatgggctcgccgcgacgcgggcgatccgggcgcaaggcgggagctgcaaagccttacccatcatagcactcacggccaatgccttctcggaggatgtcaagatctgccgcgaggcgggcatgtcggacttccttgccaagccgctgcgcaagccggcgctggtcgcggcgttgctgcgtgcgctcgacggctacaccatgtcggaggacgcgccgctccagccggagctggcgccgatcgaggtggagtggacggaggaggaaaggcagataaccggagcgtaa

SEQ ID NO: 1689 - DNA, 330 bp, BradyrhizobiumColbertium
atgacgactgccgtgaccatcagtgaccgcgccgcacgccggattggggagatcctcaagggcgaaggctccggcgcgatgctgcgcatctccgtcgagggcggcggctgctccggcttccagtacaagttcgacatcgaccgggcccgtaccgacgacgatctcgtgatcgagcaggacagtgcggtggtgctggtcgattccgcctcccagccgttcctggcggggtcgcaggtcgatttcgtcgatgacctgatcggcgcctcgttccgcgtcaacaatccgaacgccactgcgtcctgcggctgcggcaccagcttctcggtctga

SEQ ID NO: 1690 - DNA, 180 bp, BradyrhizobiumColbertium
atggatgacccggtcgcaatcccgccggaacgggctgcgggtccggctcgggggctcggtgaccagccggcctcggctgcgatcggggtcgcaggcatagggcgcgcggggggctgccattccgacggacacgacgaatttagtccctatccatttgattctgcgtatccttgcacttaa

SEQ ID NO: 1691 - DNA, 1041 bp, BradyrhizobiumColbertium
gtgttcgtgttccatgaaggcgaccattatcgcaccaggctgacccactcgctggaggtggcacagatcgcccgagcgctggcccgacagctcgggctggatgaggaccttacggaaaccctggcgctcgcccacgatctcggccatccgccctttggccatgccggcgagcgggcgctggatgcctgcctgagggagtttggcggcttcgatcacaacgcccagacgctccgcgtcgtcgcttcgctcgagcaccgctatcccgagttcgatgggctgaacctgacctgggaggcgctggaaggaatcgtcaagcacaacggtccgctcaccgatcgcagcggcgccccggccggacgctatcgtgagcacggcattcccgtcgggatagccgactacatcaagacctatgaccttgaattgtggagcttcgcctcgctggaagcgcaagtcgccgcaatcgcggacgatatcgcttacgatgcccacgacatcgatgacggcctgcgggccggcctcttcaatctcgacgatctgaaggtgatgccgctcaccgcggagatcattgccgagacttcggcgcactatcccgatctcgaagacgtcaggcgcggtgccgaactggtgcgcgagctgatctcgcatctgatcggtgcggtgttcaccgaggcccagaggaaccttgcggcgctcaagccgcaatcggcccaggatgtccggcagcagagcagggcgctgatcgcgtttcccgccgaggtcgccgaggaggaagccgccatcaagggcttcctgtatcagcacatgtatcgccacgagcgcgtgatgcgggtgatggggcaagcggagcagatcctgttcgacctgttcgcaaggtatttgaaggagccgtccgaactgccgcctgaatggctgctgggcgcggaggcggacaatgagggcgaccgggcgcgccggatcggcaatttcatcgccggaatgaccgaccgtttcgctctgaccgagcaccagcggctttttgactcgaccccggatttgcgttag

SEQ ID NO: 1692 - DNA, 1791 bp, BradyrhizobiumColbertium
atgccccagacctcctcatccctacatctgttcgccgacgtgctggcgcgcgtgcacgccgcctgccgcgcgctcgccgcggaagccaattggcccgagggcatcgatttctcgcgcgtcgttgtcgagccgccgcgcgatgcctcacatggcgacatggcgaccaacgcagccatggtgctggcgaaggaggcgaaggccaagccgcgcgatcttgccgagaatatcgccgagcggcttcgtgccgacacgctgatcgccaaggtcgacgtcgccggacccggcttcatcaacttgacgctgaagccagcagcctgggccgaggcgctgcggacggtgctgcgcgaaggggccgattatggccgtgtccgcggcggcgccagagtcaatgtcgagtacgtctctgccaatccgactgggccgatgcatgtcggccattgccgcggcgcggtgttcggcgacgcgctggcgagcctgcttcagttcgcaggtcacgacgtcacgcgcgaatattatatcaacgacgccggcgcccaggtcgacgtgctcgcgcgctcagcgttcctgaggtatcgcgaggcgctcggcgagaacatcggcgccattccggaagggctctatcccggcgactacctcaagccggtcggagcggcgctggccaaggagcatggcgacaagctcctggcgaagagcgaggccgaatggttgccgacagtgcgcgccaaggcgatcgggatgatgatggacgagatcaaggacgatctcgccgccctcaacatccgccatgacgtattcttctccgagcgctccctgatcgagaccggaaacaacaaggttgccgagaccatcgatttcctgaaggccaagggcgacatctatgaaggccgactgccgccgccgaagggcgcgccggtcgaggattgggaagaccgtgagcagctgttgttcaaggcgacggcctacggcgacgacgtcgatcgtccgctgatcaagtcggacaattcctacacctacttcgcttccgacattgcctatcacaagaacaagttcgaccgcggctttgccgagatgatcgacgtctggggcgccgaccatggcggctacatcaagcgcatgcaggcggcggtgaaggcgacgacgtcaggcaggggggcgctcgacgtcaagatcgtgcagttggtgaagctgctgcgcaatggcgaaccggtgaaaatgtccaagcgaagcggggacttcgtcaccttgcgtgaggtggtggatgaggtcggccaggacgccgtccgcttcatgatgctctaccgcaagaacgatgcggtgctcgatttcgaccttgccaaggtcatggaacagtcgcgcgacaacccggttttctatgtccagtacggccacgcccgcggccattcgatcttccgcaacgcgcgcgccgaggtgttcccggagctgcctgaggataccggtactcggatcgcctggctcggtgagtcggcggtcgagcggctgtcggacccggtcgagcttgaacttctcaagcgcctcgcaatatatccacgtgtgctcgaagccgccgccgcggcccacgagccgcaccgaatcgccttttatctctatgatttagccagcgaatttcatgcactttggacgaaggggcgcgatttgccctatttacgcttcattatcaataatgatgcagatctaacgaaggcgcggctggccatggtccagggcgtcgtctcggtcctggcatcgggcctcgccatcctcggcgtccatgccccggacgagatgcggtag

SEQ ID NO: 1693 - DNA, 1644 bp, BradyrhizobiumColbertium
ttgaaagccttgtgggtcgaaagccgtgccttggtcgaggggcgcgcggctttcccgaagggacgcatcatcacgatggccgaacgatatcaggacagaccgtttccttccgatgactatggtcgcggtggcgatcagtatgggaaggcggagagcgatcccttggccgagctcgcccgtctgatcgggcagaccgatccgtttgcggcgcagggacggccggctgcgcgctccccggccgcgcccacgcaaagctatggggaagacgggtaccgccagcacgacgaccggcaggactacgccgagcaggcctcgccgcctgggccaccctcatggatgcggcgcgccaatgtgcagccgcagccggcacccgcgccggagcctgactatcccgtctcggtaagcccggttcatccgctacatcgctattcggccaggtccgccgcgcccgaacctgttcatcagccgcaggcctatcaggatcacggccaggagaatcagtcttaccaggatcagtcctaccaggatcaggcctaccagcagcaccgtccgtcttaccaagagcagtcctatcaggagccgtacgcgccggatccttcgcgctacgatgatgcgctctacggccgcctcgagacaggtgagcaggactatcagcgcgatccgtcctatccggacgatccttatgcgttccagagcgactatcccgaagccgaactcgacgagccgaagaagcagcgcggcggcatgatgacagtcgcggcgatcctggcgcttgccgtggtgggcactggtgcggccttcgcgtacaagacctatatcggctcgccccgcagcggcgagccgccgatcatcagggccgacaatgcgccgaccaagatcgtgcccgcgccgagcgattcctcggccaaggtgccggaccggatggtcagcggtgacggcactgagaagatcgtgccgcgcgaggaagccccggtcgacgtcaacgcaaaggcgggcggtccccgagtggtgttcccgccactgaaccagaatgcgaacccaccgtctgtggcgagcgtctcgccgtctgcaattcccgcgccgagctcgggagccgtcccgagcaatggaacgttgccaagcaattcgccgcgcccgatccggaccgtggccgtgaagggagaccagaccgacagcgcgccaccgcaatcggctgcagtcaagccgacgccagcggcgccgaagcctgttgctgcacccgctgtgccggccacgccgcgcaatccgccgacctcggccaatgccagcgtccatcagccgatgtcgctggccccgcaaccggcggccgagccttcgcagaggatggctgcgactagtccgactccgctcgcgcccgccagcagcggcggcggctacatcgtacaggtctcctcgcagcagagcgaggacagtgccgccgcgtcctaccgcgtgcttcagagcaagtacggcaacgtactcggctcccgctcgccggtgatcaagcgggtcgacctcaccgacaagggcaaggggatcgtctaccgcgccttcgctggcccgtacgcttcggccgaggaggcgacgcaggcttgcaacagcctgagggccgccggcttgtccgcctgcttcgtccagaggaattaa

SEQ ID NO: 1694 - DNA, 1029 bp, BradyrhizobiumColbertium
atgagcacgcgggccttcattaccggcgtatccggaacggaactcaccgccgccgagcgggagtttatccgtgaccagcgcccgtggggcttcatcctgttcaagcgcaatgtcgcgacgccgacgcaagtcgctgcgttggttgcggaattgcgctttgtcgcgaatgctcccgacgcgcctgtcctgatcgatcaagaggggggacgggtgcaacggctgggcccgccgcactggccggtctacccggcgggcgccacgttcgcggccttgtacgacactgattcggccctcgggcttaccgcggcgcgtctcagcgcacggcttatcgcggccgatctcgccgatctcggcatcactgtggactgcctgccgctggccgacgtgccggtgccgggcgccgatgcggtcattggcaaccgggcctacggcactgagccgggcaaggtcgcggctattgcccgggcggtcaccgaggggctggagcagggcggcgtgctgccggtgctcaagcacattcctgggcacggccgggccaccgccgacactcatttcaagctgccgacggtcgacacgcctcgggccgaactggaacggaccgatttcgccgcgttcaagccgctcgcggacctgccgatggccatgactgcacatgttgtgtttagcgccgtggaccccgcccatccggcgacgacatctgcgacaatgattgctgacgtgattcgcggcgcaatcgggttccagggtttgttaatgagtgatgacgtgtcgatgaacgcgctgtcggggaatatcgccgagcggacccgcgccatcttcgcggccggctgcgacgtggccctgcattgcaacggcaacatcgaggagatgcgcgacgtcgccggccaggcacccgaactgtccggcagggcgctggagcgcgcgaacgccgcgcttgcggcccgcaagccgccgcagccgttcgatcgggcggccgcacgcgcggaactggacgcattgatcgcacgggcaaacacggcatccgcatga

SEQ ID NO: 1695 - DNA, 840 bp, BradyrhizobiumColbertium
atgaccgcagaaatcctatcgttcgaaaccgggcggccagcagagctcgccgagggtgagccggcgttggtggtggatgtcgagggctatgaagggcctctcgacctgctgctcgcgctggcgcgtcaacagaaggtcgacctcgccaagatttcgatcctggcgctcgccgaccagtaccttcacttcatcgaggccgcgcggaagattcggctggagctggcggctgactacctcgtcatggcggcctggctcgccttcctgaaatcgcggctattgctgccggagccgccgagcgcggaggggccgagcgcggagcagatggcgacggcgctggccaaccgcctgcgccgcctcgaagccatccgcgaagccgccaaccggctgatgaaccggccgcaattgcagcgcgacatcttcccgcggggcgagcccgagcagatcgccgagatcaagcatccgaaatacacggcaaagctctacgatctgctgaccgcctatgccgcgcagcgccagtcgcgcgtgctggcgagcgtgcatctggccaagcgcacggtgtggtcacttgccgaagcgcgcgccacgctggagcgattggttggcagcctcaacgaacaggatgactggggcgtgctggacgatttcctgatccgacacgtcgccgatccgacgcagcgggcaacagtgttcgcctcgagcttcgccgccgcgcttgagctggtgcgcgaaggccagctcgagctgaaccagaaagaggcgtttgcgccgatctatttccggaaagggcgccaaaaaccggtcctggacgcagctcctgcgcctgatgcgccggtcgcctaa

SEQ ID NO: 1696 - DNA, 774 bp, BradyrhizobiumColbertium
atggcaagcctggctgaagtgcgcgtagaagaggccgagccgatggagaacgaatcccaggcgcgtccggaggaattgcggctgctggaagcgctgctgtttgcgtcgagtgagccgctggataccgccacgctggccaagcggatgccggagggcgtcgatgtcaaggccgcgctcgagcagctgcaggccgactatgccctgcgcggggtaaacctcgttcgcgtcgccaacaaatggaccttccgcactgccggcgatctcgcttggctgatgacccgggagagtaccgagacgcgccgcctgtcgcgtgccgcgatcgaggtgctggcgatcatcgcctaccaccagcccgtgacgcgtgccgagatcgaggagatccgtggcgtcgtcacctcaaagggcacgctcgacgtgctgctggagaccggctggatcaagccgcgtggccgccgcaagacgccgggccgtcccttgaccttcggaaccactgaggaattcctgtcgcagttcacccttgaacagctcggcgatctgccgggcctggaagagctgaagggcacgggtctgttggattcgcgcctgccgaccggatttagcgtaccgacgccgtccgatgatccggcgctgcgcgaggacgaggatccgctggaaccaggcgacctcgatcttgcgctggcgccagcggtcgagcccgagacctcgcaggagccgccggcaagtggcgatgagggagccggcgagggtagcagcgaaggtggcaccaacgagtga

SEQ ID NO: 1697 - DNA, 234 bp, BradyrhizobiumColbertium
atgggttcactcagcatttggcactggatcttggtgatcgcagtggtcctgctgctgttcggccgcggcaagatttcggatctgatgggcgacgtggcgcagggcatcaaggcgttcaagaagggcatgcaggacgacgacaagcccgcagacaagcccgagccggcgaagtccatcgagcacaatggcgcgccgaccgcgtcccggtccgacgtcggcagcaaggccgtctga

SEQ ID NO: 1698 - DNA, 504 bp, BradyrhizobiumColbertium
atgttcgacatcgggtggagtgaactggtcctggtcggggtcgtggccctgatcgccatcggcccgaaagagctgccgggcgtgctgcgtatggtcggacagtggatgggcaaggcccgcaagatggccgccgaattccagggccagttccaggaagctatgcgcgaggcggagatggccgacctcaagaagagcttcgacgaggtcaaggaagccgcgaccggcttcaccagcaacaatccgctcacctcgctccagaaggacgtcagcgacgcgcttcgtgttgatgcgctggacaagccggcggagacgtcgacgacgacagccgtcgatccgccttcgacgcccacgaccccggaagcgccgacacccgcgaccttcatggaagccgaggcccatgcagctgcgaacgagccgctcgcgatcactcgtgaggtcgaacaggcggcggttgcgcaggacaccgcaccatccgaggcaatcaaggacgccaaagcgtcatga

SEQ ID NO: 1699 - DNA, 813 bp, BradyrhizobiumColbertium
atgaccgacgccgatatcgaggccagcaaagccccgctgatggaccatttgatcgagctgcgttcgcggctcatcaaggcgctgcttggcttcggcattgccttcatcttctgtttcttcttcgccaagcagatctacaacgtgctggtctggccgttcgtgtgggtggcggggcccgagaattcgaagttcatctacacggcgctgctggaatatttcatcacgcagctgaagctcgcgctgtttggggcaggcttcatctcgtttccaatcgtggcgacgcagatctacaagttcgtcgcgcccggactctacaagcacgagaagcaggctttcctgccatatctggtcgccacccccttcttcttcgtgctgggcgcggcgctggtctacttcgtcgtgttgccgatgctggtccgcttctcgctcggcatgcagcagaccggcagcgacgagacagcacagatccagttgctgcccaaggtcggcgaatacctgtcgctgatgatgtcgctgatcttcgccttcggcatcgctttccagcttccggtgattctgacgctgctcgggcggatcggcatcgtcagctcgacgatgctgcgcgagaagcgccgctacttcatcgtcttggccttcgtgatcgcagccgtgctgacgccgcccgacgtgctcagccagtgctccctcgcgtttccgctaatggcgctgtacgagggctcgatcctcgcggtggcgatggtggagaggaaggcggccgccgcacaggctgcgaccggtaccgacgtctcgacgccggccaatccggcggagtag

SEQ ID NO: 1700 - DNA, 1332 bp, BradyrhizobiumColbertium
atgcacgacatcaaatcgatccgcgacaatccgcaagccttcgacgccggcctcgcacggcgcggtttgaagccgatgtcggcctcgctgctggcgatcgacgagaagcggcgcgcggccatcctcgcctccgagcaggcgcaggcgcggcgcaatgcggcctccaaggagatcggcgacgccaagaaggccaaggacgaggcgcgcgcagcgaagctgatggccgaagtggccgagctcaaaaccacgatgccgcagctcgaagccgctgcgaaggcagccgacgaggaactggcgaaagagctgtcggcaatcccgaacattcctttcgatgacgtgcctgatggggtcgacgagcacggcaacgtccagcaccatgtgttcggtaaaaagcggaactacagcttcgcaccgaagctccatgacgatctcggcgccgcgctcggctacatggacttcgaggcggccgcaaagctctctggtgcgcgtttcgtcgtgctcaagaaggcgctggcgcggctcgaacgcgccatcggccagttcatgctcgacctgcacacgacagagcacggctacaccgagatcaatccgccgctgctggtccgcaatgaggtgatgttcggcaccgggcagctgccgaaattcgaggacgatcagttctgggcgatcaagggcgaactgctcgcatcgccggaccatgagcggctgaagacggagcgcctcggcctgatccccaccgctgaagtctcgctgaccaatcttgcgcgcgaatccatcctcgacgagaagcagctgccgatgcgcctcacggcgctgacgccgtgcttccgcgccgaggcgggcgctgcgggacgggacactcgtggcatgatccgccagcatcagttcaccaaggtcgagctggtctcgatcacgacgcccgagaccagcaaggacgagctggagcggatgctgtcctgcgccgagcaggtgctgcaacggctcggcctgcattatcgcgtgatgacgctgtgcgcaggggacatgggcttctcgtcgcagaaaacctatgacatcgaggtctggatgcccgggcagggcgatggcggtatgttccgcgagatctcgagctgctcggtctgcggcgacttccaggcccggcgcatggatgcccgctcgcgcgggccggacggcaagccgcgcttcgtgcacacgctgaacggctccggcaccgccgtcggtcgggcactgatcgctgtgatggagacatatcagcaggaggacggctcgatcgctgtgccggacgtgctccaaccctatatgggcggcctaaaggtggtcgcgcgcgagtag

SEQ ID NO: 1701 - DNA, 363 bp, BradyrhizobiumColbertium
atgcccttgcaccgcgacatcttctgggtcggccgacaatgggcggtgactggtgccggaatccaggccatcgatcagcgccttcgcggtgtgctcgacatcgcgatcgcgcggctctgggacgatgatctcgtgcagagccgacgggccaagcctggtgtcaatgctgccgacttcgacaaggcgctgacggtggcacgcgaacgctttccgaaggcgccggtgtctggtccggtcgtcgcccagcgggggacgctcggcgcgatcgagactcccgtcgtaagtcctgtcgtgccggcgatgagcctgcgcgcggaaggccggctcgcgcgcttcctgccgcaatggcggattcgtcgctag

SEQ ID NO: 1702 - DNA, 393 bp, BradyrhizobiumColbertium
atgcgcattctctgcaccaatgacgacggcattcacgccccagggctcaaggtcgtggaggagatcgcgcgtgccttgtccgacgatgtctgggtggtggcgcccgagctcgaccagtccggcgtgtcgcactcgctgtcgctaaacgatcccttgcgcctgcgcgaagtcggcccgcgccactttgctgtgcgcggcacgccgacggactgcgtcatcatgggagcccgccatatcctgggggccaagctgcccgatgtcgtgctgtccggggtaaacaaagggtcgcaacgtggccgaggacgtggtctattccggcaccattgctggcgcgctggagggcaccatcctggggctgccgtcgtttgcgttgtcgcaagagttcagcgttga

SEQ ID NO: 1703 - DNA, 399 bp, BradyrhizobiumColbertium
ttgtcgcaagagttcagcgttgagacccgcgaccggccgccgtgggacaccgcgcgcaagttcggacccgacatcgtgcgcaaggtgatcgccgccggtgttccaaaggacacggtgatcaacgtcaacttcccgtcatgcgcgccggaggatgtgctgggcgtccgcgtcacgcggcagggcaagcgcaacctcggcttcctcaggatcgacgagcgcagggacggccgcggcaatccgtatttttggatcggcttcgagcggacagcaatgctcgacacgcccgacgccggcaccgatctggcggcgctgcgggagcgctacgtctcggtcaccccgctcaggctcgaccgcaccaatgaggcgttttcggagcagctcagcgcgacgctgaaatag

SEQ ID NO: 1704 - DNA, 390 bp, BradyrhizobiumColbertium
atgggcaaggactcacctatgactgcgacagggctttcgggccgctctgttttcctcgtcgaggacgaggtcatgatcagaatgatggtcgcggatatgctggaggagctcggctacaaggttgccgctgaagcgggcgacatcgccgaggccatgcggctggcgcagaccactgatttcgacctggcaattctggacgtcaacgtcaacggcaaggtcatctcgccggtggccgatgtcatcatggcgaagggctgcccgttcatcttcgccaccggttacggctcctccggcctgcccgaacagtaccgcgaccggccggcgcttcagaagccgttccagctcgacgcgctcggcaagaccatcgaagccgcgcttcgcggcggctag

SEQ ID NO: 1705 - DNA, 618 bp, BradyrhizobiumColbertium
atgtttcagctgacgctgaggcgtcgcggcatcagcgatcaggccgtgctgcggacgatggaggaggtgccccgcgagcttttcgtcgacgaagccgatcgtgacggcgcctatcgcgatagcgcgttgccgatcgcctgcgggcaaaccatcagccagcctttcgtcgtcgcctatatgaccgagcagctccagctccagaagcagcaccgggtgctcgagatcggcaccggctccggctaccaggctgcggtgctgtcgcggctcgccggccaggtgctgacggtcgagcgctatcgcaagctcgccgatacggcacgcgcccggcttgaaaagctcgattgtcacaatgtcgaggtgatgctcggcgacggtctcaatctgcctcccaacattggtccattcgatcgcatcatcgtcaccgccgcgatggatcagatcccggagaacctggtcgagcggctggaggtcgggggtatcctgattgctcccgtcggcccgcatcagggcgtacagacgctgacccgcctgacccgcaccgacaccgggatcgagcgcaaggaactcgtcgaggtccgcttcgtgccggcgctgcctggcgtcgcgcgtgagctgtag

SEQ ID NO: 1706 - DNA, 1365 bp, BradyrhizobiumColbertium
atgtccgctgtcgccgagttgctttactcgcgccgcgtgccgcaggtcgcggtgctggcgctgatctccttcagctttgcaggatgcagcgccgacatgtcgtcgcggctgtcccagtcgaacttctccaatcccttcgcctcggaatccacgggctcggtgcagcaggccccgccgccgcagcgtgagttgccgcaatatgcgcggccgcagacgcagcctggctatcatcaatcgcagcctttgccagcgccggccgtagctgcgccgcaatcctatccggtctcgtcgggcgggggagtctctggcggtgggcgcggggtcagctcctatgcgcctccggcgcagccgcatctggaaaccacggccaccgtgccgccgcgctcggttgcggcggcccagccagccggcggaaccaagatcatcgtcggcaccagcgatacgctcgatgtgctcgccaagcgctaccgcgtcaccccgcaggcgatccttgccgccaatggctacaaggggccgcgcgcgctgtcgccgggccagcagctgatcatcccgcatccggcgacggcgcctgccgcggctcccgtcaccgccgcagccgctaccaagcccgttgcggccgtggctgcgccgtcgagcacccatttcgtcaatcagggcgacacactcgccagcattgcccgcaagaaccgtatctcgacagctgagctcgcccgcgtcaacggcatcgatccatcggcaaaactcaagcttggcaccaggctgaccgtgcccggtgccaagaccgcggccgtcgctgcgcctgcggctccggtcgcagctgcgcctgttgcgggaacgcttcagcccgtcgccgccgctcccgcacctgccaccaagatggccgccgtcgcgccggtgcagagcgcgcgtttggctcaggcgacgtccaatgtcgaagagaagcccgccgagacgcctgcgaaggcggcggaagctaccggcgcgctgccgaccttccgctggccggtccgcggcaaggtggtcacgagctacggcgccaagaccaatggcaaatccaacgacggcatcaatctcgcggtgcccgaggggacgccggtcaaggcggctgaagacggcgtcgtcgcctattccggcaacgagctgaaaggttacggcaatctggtcctggttcggcactccaacggctacgtcaccgcatatgcccatgcgagtgagctgttggtgaagcgcggcgataccatcaagcgcggtcaggtcattgccaagtcgggtcaatccggtgaagtggcgtcgccgcagctccacttcgagatccgcaagggatcgagcccggttgacccgcttcaattcctgaacggggcgtga

SEQ ID NO: 1707 - DNA, 879 bp, BradyrhizobiumColbertium
atgcccaaaaaccttagcaaaagcccggccggcaaaggcccccgcacccctgccagaaaggccgcccgcgtcgcggcaaaacgccccacggcagcctccaaagcgatcaaggcagccccagagcttgcgcaggaacgcatcgtccgcgcgctggagaccatcgcggcgcacctctccgcccagggcaaaccagccgtcgagcgcgagtcgttcgaacggacggatgcttatgtctggcatcccaacgggcggcttgctgccgtgccgcgggtcagccgcgtcgagctgttcctgctgaagggcgtcgaccggatgcgcgacatcctgatggagaacaccgagcgctttgccaacggcctgccggccaacaatgcgctgctctggggcgctcgcggcatgggcaagtcgtcgctggtgaaggcggcgcacgccagcatcaacgcgcagcgcaaacaggccgacaggctgaagctgatcgagatccaccgcgaggacatcgagagcctgcccgcgctgatggaccaattgcgcgcttcgccgttccgcttcatcgtgttctgcgacgacctctccttcgacggcaacgatgcctcctacaagtccctcaaggctgtgctcgaaggcggcatcgaaggccggcccgagaacgtcatcctctatgccacttcgaaccgccgccatctgctggcgcgcgagatgatcgagaacgagcggtcgaccgcgatcaatcccggtgaagcggtcgaggagaaggtctcactgtcggatcgcttcggcctgtggctcggctttcatcgctgcagccaggacgaatatctcgccatggtgcgcggctattgcagccatttcggcatcaagattgacgatgaagcgctgtag

SEQ ID NO: 1708 - DNA, 378 bp, BradyrhizobiumColbertium
atgctgattactcctgcgtatgcccaggctgcggccgccggcgacaccaacagcatgttgatgtcgctgctgccgttcgccctgatcttcgtgatcatgtatttcctgattctgcgcccgcagcagaagaaggtccgcgatcatgccgaactcgtgaagaacatccgccgcggcgacaccgtcgtgacttcgggcggcctcgtcggcaaggtcaccaaggtcgtcgatgacgaccagatcgagttcgagatttccgacggcgtgcgcgtgcgtcagatgcgccagatgatctcgggtgtgcgcgccaagggcgagccggccaaggagtcgaaggacagcgcgaaggaaaccgccaaggacgacgccgcgtcgaagtga

SEQ ID NO: 1709 - DNA, 1605 bp, BradyrhizobiumColbertium
atgttgtatttcacgcggtggagggcgctgggggttatcctgacggcgctgatcgtgtgcctctgcgcggtccccaacttcttccccgaggagcaggtcaagacctggcccgcctgggcgcagcgcaggctcgtgcttggcctcgacctccagggcggctcctatctgctgcttgaggtcgactcggcctatgtgaaaaaggagcggctcgatcaggtccgcgacgaggttcgccggacgctgcgcgatgccaagatcggcttcaccggcggcgtcactgtgcgcaacgacgctgtcgaagttcgcatcaccaaggaaaccgacgtgcagccggcgctcgccaagctgcgcgagctgtcccagccactcggcggactgatgggctcgagcggtcagcgcgacctcgaggtgaccgatgcgggcggcggtgtgatccgcctgaccgttccgcagccggcgacacttgatcgcctgcgcaggaccatcgagcagtcgatccagatcgtcgagcgccgcgtcaacgaactcggcaccgtcgagccggtgatccaacgccagggcaacgatcgcatcctggtgcaggtgcccggtcttcaggacccgacgcgcctaaaggagctgctgggcaggaccgcgaagatggaattccggatggtcgacacctccgtgccgccggatcaggcgcagcagggcagggtgccaccggaatccgagctcttgatgagcgcctcgccaccaccgacaccgtacgtggtcaagaagcaggtattggtcgccggcggcgatctgaccgatgctcaagcgagcttcgatcagcgtacgggtgagccggtcgtcagcttcaaattcaacacgtcgggcgcccgcaagttctcgcaggctacgaccgagaatgtcggactgcctttcgcgatcgtacttgacaacaaggtgatctcggcgcccgtgatccgcgaaccgatcaccggcggccagggccagatatccggcaatttcaccgtgcaatcggccaacgatctcgcgatcctcttgcgcgccggcgcgctgccggcaccgctgacggtggtggaggagcgcacggtcggtccgggcctgggccaggactccatcgagaagggcgagcttgcggcttacgtcggctcgatcctcgtcatcattttcatgctcctgacctatcggctcttcggcgtgttcgccaacatcgcggtggccatcaacgtcgccatgatcttcggcctgctgtcgttgctcaatgccacgctgacgctgcccggcatcgccggcatcgtgctcaccgtcggcattgcggtcgactcgaacgtgctgatctacgagcgtatccgcgaggagttgcgcggtggccgcaacgcgatctcggcgatcgatgccggcttcaagcgggcgctcgcgaccatcctcgattccaacatcaccaccttcatcgctgccgcggtgctgttctacatcggcaccggaccggtccgcggctttgccgtgacgctcggcatcggcatcatcaccacggtgttcaccgccttcaccctgacccggctgatcgtggcctggtgggtgcggtggaagcggccgcagagcgtgccgatctag

SEQ ID NO: 1710 - DNA, 1020 bp, BradyrhizobiumColbertium
gtgactcacaccgttctcatcgggctcggcgtcctcattgccattctcaccgtggtctcggcgctcggcctgctgccgtccctgcgcatcgtcccggacgatacgcatttcgacttcacgcgattccgtcgcatcagctttccgatctcggcggcgctgtcgatcctcgcgatcgtgttgttcttcacccacgggctgaatttcggcatcgacttccgcggaggaacgctgctggaggtcaaggccaagtcgggcgccgccgacatcgcggcgatgcgcacgacactggattccttgcgtctcggcgaggtgcagttgcagcagttcggcggacccgagaacgtcttgatccgcgtcgcggagcagccgggcggcgacgccgcccagcaggaggccgtgcagaaggtgcgcaccgcgctcggcgattccgtcgaatatcgccgcgtcgaggtggtcggcccgcgtgtctccggcgaattgctggccttcggcatgctcggcctgatgctcgcgatcctcgggatcctgatctatctctggttccgcttcgaatggcagttcgcgctgggcgccatgatcgccaacgtgcacgacatcgtgctgacgatcggcttcatgtcgatcagccaggtcgatttcgacctgaccagcatcgccgcgctgctgaccatcctgggctattcgctcaacgacacggtcgtcatctacgaccgcatccgtgagatgctgcggcgctacaagaagatgccgatgccgcagctgctcaacgagtccatcaactcgacgctatcgcgctcgatcatcactcacgtcacggtgacgctggcgctgctcgcattgctgttgttcggcggtcacgccatccacagcttcactgcggtcatgatgttcggcgtggtgctggtcggtacctacacctcgatcttcatcgcggccccgatcctgatctatctcggcgtcggcgagcaccgcgaggatgctcccgacacggctgcgccggctaagaaaagcaaggcatga

SEQ ID NO: 1711 - DNA, 384 bp, BradyrhizobiumColbertium
atggccggcgatccaaacgctccgcatttcccgcgctcggcgcccatcgaggcctacggcaagggcggtttcgctttcgccggcatgtcgcatcggggctcgctgctctgcctgcccgacgcgatctgggcctgggatgtgacggaccccgaaaagatcgaccgctactcgctggatcgggtcttcgcggccgccaacagcattgacacgctcctggtcggcaccggaaccgggctgtggctgccgccgccggaactgcgtcacgcgctcaaggcggcgagggtggtgctggacacgatgcaaaccgggcctgccgtgcgaacctacaacatcatgatcggcgaacggcggcgggtggccgccgcgctgatcgccgtgccatga

SEQ ID NO: 1712 - DNA, 864 bp, BradyrhizobiumColbertium
atgagccgcccggcaccgccagccgactccgccgccttctgcgccgatctcgtgcgcagccatgactttccgcactatgccgcgaccttgttcgcgccggccgccgagcgtcgcgcgctgctggcgctgtacgccttcaacgtcgagatcgtccgcgttcgcgaccaggtgagccaacccctgcccggcgagatccgcctccaatggtggaccgacatgctgtcgggccatgtccatggcagcgccgagggcaatcccgtcgcagccgagctgctccacgcaatccacgatttcgacctgcccgtcgagccgctgtcgctgcttgccgacgagcatcagttcgatctctacaacgatccgatgccgaccatggctgcgctggagggctatctggccgcgacctcgtcggcgctgttcggtctggcggcgcgggttttggcaccgccgtcggaagtggtcgagcatctcgcccgtcatgccggactggcgcagggcatcgtgcaggtcatcgccaatttgccgcgcgatgccgcgcaccggcaattgttcctgccgcagcagctcttggagaagcacaattgcagcatggaggatgtgttcgccggcaaggatacgcctcaactccatgcggtgctcacgcagctctcgggagaagcccggcagcacgtgaccacggcttcctcgctgctgacgcaggtggcgccgtccgtgcggccggcgttcctgccgctgagccaggtgcgggccgatctaaagcgcctgtcgcatcctgggcgcaatccgtttacgctgcagccgccgtcccggttgcgcaccctctggaccttgtggcgcgcctcgcgatcacgtgagtttaccaaatag

SEQ ID NO: 1713 - DNA, 1245 bp, BradyrhizobiumColbertium
atggctgagttgtcccaaagcacgtcatccggtctcagcggctttccggtcgcacccggcgacattcatgccgccgccgagacgatccgcggcgccgtcgtcgagacggcctgtagccatagccgcacgctgagcagcatctgcggctgcgacatctggctgaaattcgagaacctccagttcacatcttcgttcaaggagcgcggcgcgctgaatcgactcaccgcgctggcgccggaagagcgtgcgcggggcgtcatcgcgatgtccgcgggcaaccatgcgcagggcgtcgcctatcacgccaggcggctcggcattcccgccaccatcgtcatgccggtcggcacgcccatggtgaagatcgagaacacccggcatcacggcgccgaagtggtggtcaccggcgcgacgctggaagaggcggccgcctttgcgcgaagccacggtgaagcgcgcagcatgatcttcgtccatccttacgacgatccactcgtcattgccgggcagggcacggtcgggctggaaatgctcaaggcggtgccggagctcgacacgctggtcgtcccgatcggcggcggcgggctgatcagcggcattgcgatcgccgcgaaggcgatcaagccgtcgctgcggatcttgggcgtcgaggcctggctctatccctcgatgtacaacgccatccatggcggcaatttgccggtgcgcggcgacacgctcgccgaaggcatcgcggtgaaatcgccgggtaagatcactacggaagtggtccgccgcctcgtcgacgacattgcgctcgtcaacgaagccgagctcgagcgcgcggtcgcgacactgatctcaatcgagaagacagtggtcgaaggcgccggagccgccggcctcgccgcgctgatgtccgatccgtcccgctttgccggtcagaaggtcggcctcgtgctcagcggcggcaatatcgacacgcggctgatcgcctccgtcctcacccgcgaactggcgcgcgaagggcggctgacgcaactgtccctcgatattcctgatcgcccagggcagctggcagccgttgccgcgctgctggccgaagccggcgccaacatcatcgaggtctcgcaccagcggaccttctccgaccttccggcaaaggcgacgctgcttcaactcgtcatcgagacccgcgatggcgctcatctcgatgacgtcatggccagactcagcgcgtccggattgagcgcgcgctgcacctga

SEQ ID NO: 1714 - DNA, 1179 bp, BradyrhizobiumColbertium
atgatcgacatcggccgggtacgcgatgacacgcctgccacagcgcggcttgcgtatctgcataacgccggcgcggctctgatgccggcgcccgttgtcgcggcgctgaaggggcacatcgatctcgaaagcgaaatcggcggttatgccgcagccgaccaggagtccgaacggctcgacgctgtgtatggctcggtggcgcgcctgctcaatgccgcccccgacgagatcgcgctgatggagaatgcaacggttgcctggcagatggcgttctacgcgctgccgttttgcgagggcgaccgcatcctgacagccgaggcggaatacgccgccaactatgtcgcgtttctacaggtcgcgaaacgaaccggcgcgacgatcgacgtcgtgcccagcgatgccagcggcgagctcgacgcccacgcgctcgaacggatgatcgatgagcgcgtgaagctgatcgccgtcacctgggttccgaccaatggcgggctggtcaaccccgcagccgcgatcggcaagatcgcgagagcgcacggcattccctatctgctcgacgcctgccaagccgttgggcaaatggaggtcgacgtcgatgcgatcggttgtgacatgctgtcggccaccgggcgtaaattcctgcgtggcccgcgcgggactggcttcctctacgtccgccgggcgctcctgcagcagcttgaaccaccaatgatcgaccactttgcggcgccctgggtcgcacgggacgcctatcggctgcgggacgatgcccgtcgattcgagacctgggagaacaattacgcggcccggcttggcctcggtgctgccgtcgattatgcactcgacatcggcatgggtcccgtcgagcagcgctgtcgcctgctggcgggccgccttcgtgatggcctcgcctccatccgcggcatcaccattcgcgacctcggacgcgcgccgggtgccatcgtcagcttcacgatggaggggtacgaggccgacaccattgttcgtagcgccgcggcgtcgggcatcacgatcggcgcgtcagacccgtcaagcacccgcatcgatgccgagcaccgggctctgccgccgctcgtgcgcgcttccccgcattactacaatacggaagccgagatcgatcggctgatcggtcatctcgcggctctggcgtcgcgatag

SEQ ID NO: 1715 - DNA, 630 bp, BradyrhizobiumColbertium
ttggcgatcgagaagcgttcagacaacgcagggccggcaaagaacatgggcgttcgggggatcgtaatgcatcgtgtgcttgggggaatgatcgctggccttctgctgctgacaggcgcgcccgcgctggcggactccccggccgagctgatctcgaacttccgcctcacgcatggtgaggttcgcgtcgtccgcgatgccacgctcgatcgcatcgccatggaccaggcccgcgcgatggcggccaaggacgaacttagccatgacgcgctcggccctttcaaccgccgtgtcgcaccggctggcgcgggccgcgccgccgagaacatcgcctacggctacgatagtttcgagaagacgctgagacagtggatcgactcgtcggggcaccgcaagaacctgttgctgcacaaggcttcccgcgtcggcattgccagcgctaagaatgccagcggcaaacgaacctattgggccatggtgattgccggcgattacgagccgaagggcaagggcaagggtaagggcaagaaggacaaggagccgctggtcgcggtgaaacgcgaggctgctccggcaagcaagcccaaatccagcagctgccacatcaagctgctcagcctctgcatttga

SEQ ID NO: 1716 - DNA, 1095 bp, BradyrhizobiumColbertium
atgagcctccctgaagacgacgccgcggcactctcggcgcgatggaccgagggcgtgctgctcaagcgcgacgtgttctcgacagtcgagcgcggccgcttccgcaccgagaccggcgaggtcgatgcggtgctgcgccggctcgacgaggtgccatggtggtcgttcctgctggcacgccatctgttcgcccgcgagaagcgcgcgctggttcgtgccaagggccttgatgccggtcccgagctgctatggaccggacgccgcgcgctcgtgcggggcttcgtcgacggcgttgcgctgcatctggcaaagccgcatggcgatctcgcctatttccgctccgccaaggccgtgctgcgccggctgcgacgcgccggcatttgccacaacgatctggccaaggagcagaactggctggtcgggcgcgacggccgagcctatgtcaccgacttccagctcgccgcgtgctttgatcgccgcggtcgactctatcgaatcctggcctacgaagatctccgccatctcctcaagcacaagcgctcctacgcgccggaggcgctgactccgcgggagcggaagatcctggcgaagaaatcgttcgccgcgagcctgtggctcgccaccggcaagaaggtctatcgcgcaatcacccgcggcctgttcaacttcaccgatcgcgagggcggcggccgccggctggtcaacgacgcgcccgtgctggcagagctgatccgcaggaaccccgcggtgcgcgataccgccatcgtcgccttcgccgaccgccgttccggtgtcgggctctatgccttcgtcgaagccgatcaagccgcgctcgaaggcgagctccgcagcgagctcgtagccgcaaagggcccgaaaccgccggaacacatccaggtcgtccacgccctgccgcgcgataccagcggcaagccgcgcaccgaggttcttcagctggtcgccatgaaccagctcgatctgatcgagccaatgatgaagaacgaccaggaccgtgccttcctcaaggacatcctcgagcagcgcaagaacctgcgcgaccgcttcaatttcgaagcgaacctgccaaccagctag

SEQ ID NO: 1717 - DNA, 1428 bp, BradyrhizobiumColbertium
atgacaggaccccaatccaacatcgtacacgtcatcggtgccggcctcgccggttccgaagctgcttggcaggtggccaaatctggcgtgcccgtcgtgctgcacgagatgcggccgactcgcatgaccgaggcgcaccgcaccgatgggcttgccgagctcgtctgctccaattcattccgttcggacgacgctgccaacaacgccgtcggcctcctgcacgcggagatgcgccggctcgattcgctgatcatgcgagcggccgacgcgaaccaggtgcctgctggcggcgcgttggccgttgaccgcgacggcttctcggcggccgtgaccaaggctctgaacgatcatcccctgatcgagattgcccggggcgagatcgccggcctgccgccggcagactggagcaacgtcatcgtggcgaccgggcccctcacctctgcaccgcttgccgacgcgatccgtgaactgacggacgagagcgcgctcgccttcttcgacgcgattgcaccgatcgtttaccgcgagtcgattgatatgtcggtggcatggttccagtcgcgctacgacaaggtcggccccggcggcaccggcgccgactacatcaactgccccatgaccaaggagcagtatgacggcttcattgcggcgctgatcgcgggtgagaagaccgagttcaaagaatgggagaccaacacgccttatttcgacggctgcctgccgatcgaagtgatggcggagcgcggccccgagacgctgcgccacggtccgatgaagcccgtcggcctgaccaatcccaatgatccgaccactaagccttacgcggtcgttcagctacgccaggacaacaagctcggcacgctctacaacatcgtcggctttcagacgaaattgaagtacggcgagcagcagcgcatcttccgcaccattcccgggctggagaaggccgagttcgcccgcctcggcggcctgcatcggaacaccttcctcaactcgccaaaactgctcgatggcgaactgcgtctgcgcgcacagcaacggctgcgcttcgccggtcagatgacgggctgcgagggctacgtggaatccgccagcgtcggcttgatcgcaggcctctacgccgccgccgacgcacggggcgagacgctcgtcggcccgccgggcacgacggcgctgggatcgctgctcggccacatcacaggcggtcatatcgagacgatcgagccgggcgcgcgctcgttccagccgatgaacatcaatttcgggctgtttccgccgcttgcgactgcgccgacgaagaagccggacggcacgcggttgcgcggcaacgagaagacggtggccaagaagcaggcgctgagcgcacgggcgcttgccgatctcgatcgctggatcgccgatcacctgcgctttgccgccgccgcatga

SEQ ID NO: 1718 - DNA, 153 bp, BradyrhizobiumColbertium
atgctgctctcgctcatccgcatgatccaggctttccgggactatcagcgcaatgttgccgagctgtcacagctcagcgatcgcgagctggccgatatcggccttgatcgctcggacatcccgcgcgttgccgccggtcagtatcagggctga

SEQ ID NO: 1719 - DNA, 825 bp, BradyrhizobiumColbertium
atgacctcgacgatttctcgtctcgctcttgctgccctcgccctctccgcctcaatcctgtccgcccagccagctctggccgccgtcgcctgcggttcgggcaatttcgacgcttggcttgcggatttcagaaccgacgccgcggcgaaaggcatttcgcaacaggcgatcaacgccgggctggccggcgtgacgctcgatgagagcgtgcttaaccgtgaccgatcacaaaaggtcttcgcccagagcttcgacgagttttcaggccgcatggtgccgccacgcctgcagcgcggctcgaacaggatgaagcagtacggctccgttttgtcgcgcattgagcagacctatggtgtacccggcgagatcctcgttgcgatctggggtctcgagaccgatttcggcgtcaacaccggcaagttcgcaacgatccgctcgctggcaacacttgcctatgactgccggcgctccgagatgtttcgcgccgagttgatggatgcgctgcgcatcgtccagcgcggcgatcttgcgcctgccgacatgaagggcgcctgggccggcgaactcggccagacccagttcatgccgtcatcctggatgaaatacgccgtcgatttcgacggcaacggcaagcgcgacctcttgcacaacgcgcccgacgtgctcgcctccaccgccaattatctcgccggctatggttggcagcgaggaaaggattggcagccgggcagtccgaactttgctgtcctgcagcagtggaacaagagcgaggtctactccaggaccatcgcctatttcgcagcccagcttgcacgcgccccctaa

SEQ ID NO: 1720 - DNA, 909 bp, BradyrhizobiumColbertium
atggccacactctatcagggcaatgtccccacgatggcccagccctccgatgcggctggaccggtgatccgaaccatccagctgtccgatctccacgacgcgctcaggcgaggctgggaagacttcaaggctgttccgagccacgccatcatcctctgcgtgatctatccagtgctcggcctcgtgcttgcccgcgttgtgatgggctattcggtgctgccgctgttgtttcctctggcggccggattcgcgctgattgggccgttcgctgcgctcggactctacgagctatccagccggcgcgagcgctacgaatctgccagcgcctgggatgccatggatgtgctgcgctcgccttcattcggtgcgatgctcggcgtcggcacgttgctgctcgctctgttcgtgacctgggtcgcgaccgcgcaggcgatctacatcgcggcgttcggctacgagggcgcggccgggatctcggatttcctgacgcgcgtcctgacaaccgagcagggctggtggctgatcgtggtcggctgcggcaccggcttcctgttcgcgctcgctgcgctgtgcgtaagcgtcgtatcgttccccttgatgctcgatcgtcatgccggcgcgttcgaggcgataagcacgtcgctgcgcgtcgttgcaagaaacccggtgccgatggcggcgtggggcttgatcgtggcggtgctgctcgcgctcggcaccattccggcatttctgggactcgccgtcgtggtccctctgctcgggcatgccacttggcatctctaccgcaaggtgatcgtctcagagccgggcgcaaatccggtgccgcccccgccgcatcgtccgcgcaaaccggccgccgacttcccggccaacctcttcccttggcgcaaccggatcgacgtctga

SEQ ID NO: 1721 - DNA, 399 bp, BradyrhizobiumColbertium
atgagcattttcgggaaaatcatgggcgcgatcttcggcggcccatcggcctccgccgcgcccgccggtggcgccgcttcgcccagcgcgcccgcagggacgccgggcgcttcggcgcccgccgccgcgcccatgcccgcggtcgacgtggctgcaatcgtcgacaaggcggcagctgcacacaagggcgagaagctggaatggcgcacctcgattgtcgacctcatgaaggcactcgacattgattccagcctcgctgcgcgcaaggatcttgccaaagagctgggctacagcggcgacatgaacgactcggccagcatgaacgtctggctgcacaagcaggtgatgtccaagctcgccgccaacggcggcaagctgccgcccgagatcaagcactga

SEQ ID NO: 1722 - DNA, 276 bp, BradyrhizobiumColbertium
atgaccgcatcggtacgggacaacaaggacagaagccgcttcgagctggatgtcgggggtgacgtggccttcgccaattatcgtctgacgccctcggccgtgatcatcacccacaccgaaacgccgcgcgcgctgcgcggccgcggtatcgggtccgaattggtcaagggggcgctggacctgatccggtgcgacggcaggaaagtgatcgccggctgcagcttcgtcgtcgactatatcgatcggcatccggaggatgcggatctggtcgcctga

SEQ ID NO: 1723 - DNA, 345 bp, BradyrhizobiumColbertium
atgctggtcggcgcgctgatcgtggtttcgccgtggtttcccgtgcaggatcaggcggcgatcgccggaaatcagacggcggttctgaatacgatcgcggtcggtctggtcgtgtttggcgtcagccagctcgagtacgtcgccttgcagcgatggcaagaggtggcgacaattctcgtcggactttggctcatcgcctcgccctacgtgatcggctattccggtgacggctttctccgcgtctatcacacgggcctcggtgcggtggtggtgctgctcggattgctccagctgtggcaggactgggacctgactgaccaggacatgctcaagcatggacaatag

SEQ ID NO: 1724 - DNA, 369 bp, BradyrhizobiumColbertium
gtgcatctcatgatcaaagcgcccgtcattctcctgttcacgctggcgctcgccggatgtgccgcgactccgcaggcgcctctggtcaagaaccccgctttcaagcctgcgcgctatgcttgggatggcgccgggcaagatcccaatcggccgcgccctgccgcgcaagcgacgcggaccgctgcgcgctccgcgcacaacaggatgcaagccggcgttcagccctattcgaaggaatggtggcaggcgcaggacggcatcgaggccgagcaggacgccagggtcaaccgctccttggtcatctgccagggctgcctccgcccgcagccacggcccgaggattccaggctcgccaaagcggccgattaa

SEQ ID NO: 1725 - DNA, 405 bp, BradyrhizobiumColbertium
gtgcagaaggcggtccgctacgccaacgaggaatgcgacagccaggagggcggcgaagtgactttcgcagcgaacaccgtgcgcaagatcgatctgaccggcgacggccgcgtggactacatcgtcgatttccaggacaccaagtgcggcgatcgcgagacgacctattgcggaactggcggctgtgtcgtgaagatcctggtgacactgcccgacggcggcgtacgcgaggtgttcgaaggccatgtgctccgctacaagatcatgggcccgccgatgaagcgcggcgctgggcgcatcgtccggttcgatctgcacgggagcttttgcgggggctacggcgcgcaggcctgccagaagacgaaggccatcacggcgacgccgtttgccttcgagcagccgtag

SEQ ID NO: 1726 - DNA, 1578 bp, BradyrhizobiumColbertium
atgaatctcgcctacatgctgacgcagaacgcgcggcggcacgcatcgcgccccggcttcgtctggggcgacaagtcctggacctggcgcgagatcgatgcacaggtctcggcactggcagccgcgcttgcggcgcgcggcatcgccaaaggcgatcgcattctcgttcattccaagaacggcgaagagatgttcgtttcgatgttcgccgcgttccggctcggcgcagtctgggtgcccaccaatttccgcctgatgcccgacgaggtcagttatctcgcgcaggcctccggcgccaaagcgttcctgtgccatgtcgattttcccgagcacgctgcggtcgtgaagggcggcgcattggagttcacctggagcatcgacggcaaggccgcgttcggcgagcgatcggtggctgacgcgatcgcctcgcagcaggatgctgccgtggagaacgtcgccgtcgagcacgacgatccctgctggttcttcttcacctcgggcaccaccggccgctcaaaggcggcggtgctgacccacggccagatgggattcgtcgtcaccaatcatctcgccgatctcacgccgggggtgacggagcaggatgcctccctggtggtggcgccattgtcgcacggcgccggcgtccatcagctgatgcagaccgcgcgtggcgcacgcaccgtgctgctgccgaccgagaagttcgacatcaacgaggcgttccgcctcatcgaggagcatcgcgtcagcaatctcttcaccgtgccgaccatcctgaagatgatggtcgagcatcccgccgccgacaaacacgaccattcctcgctgcgtcacgtcatctatgcgggcgctccgatgtatcgcgaggaccagaaggtggcgctgaagaagcttggcaacgtgatcgtgcagtattttgggctgggcgaggtcaccggcaacatcaccgtgctgccggcggcgctgcacgatcccgaggacggcccgcacgccaagatcggaacctgcggcttcgagcgcaccggcatgcaggtctccatccaggacgacgagggccgggagctccaagcaaaccagagcggcgagatctgcgtcatcgggccagcggtcttcgcgggctactacgacaaccccgaggccaatgcgaaggcgtttcgcaacggctggttccgtaccggcgatctcggccacatggacgaggagggcttcgtctacattaccgggcgcgcttccgacatgtatatctcgggcggctctaacatctatccgcgcgagatcgaggagaagatcctgacgcatcccgcggtcggcgaggtcgccgtactcggcgtgcccgatgcgacctggggcgaggtcggagtcgccgtttgcgttgcgcgcgaaggcgcgaagccagtgagcgaagcggagatggcggcgttcctgtcgccgaaggtgccgcgctacaagatgccgaagcggtttttcttctgggaggcgctgccgaaatccggttacggcaaagtacccaagcgcatggtgcgtgatgaactcgaagcgcgcgggctgctcgatctcaatgaaaagcaggcgggctga

SEQ ID NO: 1727 - DNA, 861 bp, BradyrhizobiumColbertium
atgcggagcatcaagcagcccggcttgccgtcccccgaacgcgttcaatgggtggaggcgaggggacgcgcgttcacgttcacgcttcaagccggcctgccgctgctcgaggctgcgctgcgcggcttcgccgccgagggttttgcgggcggcgtgctgaactttcgccgcggcgcgctcggaccgttcgcctatgtcatgccggcgctgtcgaagaccggcgaaaacgcggcattctacagcgacacgttccggccaaagggcgtgacgcgcgtgcggctcggcagcatgacgctcggcatgcgcgacggcgcgccgttctttcattgccatgcgctgtggacggaggcggacggtaagacaagcggcggtcacatgatgccggatgagaccgtcgtcgccgaaccgttcgaggtcgaggctttcggcatcgatggcgcgatgttcacggccgaacccgatcccgaaaccaatttcaagctgttcgggccggtgtcggccgagagcaccggcgctccgacgacgagccgtgcgtttgccatgcggctgcgtccgaaccaggactttgccggctgcttggaagatttttgccgggcgcgcggaattgcacgcgccaggatccgcggcggtgtcggctcgaccatcggcgctcgcttcactcatggtggagtaattgagccgtttgcgaccgagcttgcggtcaaggccggcacgatagcgccgggcagcgccggcgcgcttgaggccatcctcgatgccgccctgatcgactataccggcggcatcgccgagggctgcctgatccgcggggacaatccggtgctgatgacgatggaactggtcttggaggtggtggattag

SEQ ID NO: 1728 - DNA, 753 bp, BradyrhizobiumColbertium
atgcgagggcgacagcgggacatcaggctgccggctccctatcttcggcgcgtctggctcgaccgcacgctggtccccgactgggaaacgtatccgtactgccttccgatcttccgccaagaattcgatctgagcttcgacaccgcgatcaccatcatcgtcggcgagaacggcaccggcaaatcgaccatcctggagggcattgcagcgctcgccggttatgacgacgccggcgggggcaaaggctatcgcgcggtcgatcattccagtgcgcgcgagatcatgggcggggagttgtcggccgcgcttcgcgccgggtgggtgccgaagatcaccaacggctggttcttccgcgccgagactttcttctccgttgcgcgatatctcgacgaagtctccgacatgccgcccgattttctgtcctactcccacggcgaaggctttctgcgcttcttccaggagcgatgtcagaagcagggcatcttcatcttcgacgagccggaatcggcgctgtcgcccgcgcgccagatggagttcttgaagctgctgcaccgcatggacacctccaggaattgtcaggtcatcatggcgacacattccccgatgctgatggcctatcccaacgcgcggcttctgcagttgacaaagcatggacttgaacccgtgacggtggaggagacggatcactaccgcctgatgcgggagttctgcgcagatccccgtgggttcgtagaagcgacgctggccgagtga

SEQ ID NO: 1729 - DNA, 558 bp, BradyrhizobiumColbertium
atgagaagcggagcggcgatcgccggggtggcggcgctggtggttgcggggatgactctgacggctgcctttgaaccggttcgggcccacgggccgacacggcagaaggtacgggaagccatcgagatcaatgctccgcaggagaaggtctgggccgcgatccgcaattttcaggacatgagctggcttccacccgtcaccaagaccacgggcgaaaagggcaacgagatcggcgcgacacggacgctgacccttgcgggcggcgcgacggtcgaggaggagctctataaatacgagcccgacatgttgagctattcgtatcggatcaccaaggtggacgtgaaggtgttgcccgtcaccaattattcctcgacgttgacggtgtcgcctgcatccgatggcaaggcgaaggtggaatgggccggcgcgttctaccgcggctatcccaacaacgatccgccgccggagctgaacgacgaggctgccaaggctgcagtgagcgggctgtacaaggccgggctcgaggccctcaagaagaagatcgagagcggtagctga

SEQ ID NO: 1730 - DNA, 954 bp, BradyrhizobiumColbertium
gtgcgcgcgctggctctggcggcgctagccgccggccttggcggccttgcgctcggcactgcagtcgccgaagaggcgttcgtcaccaaccagctgagcgatgatctgatggtggtggatctcgcgacgtcgcgcagcgttgcgacgatcccgatcggcggcaagccggcgggcgtggccgtcagcacagacgggcgttttgcctatgtgacgagtcccgacgccaaggcggtgacggtggtggacgcggccgcgcggcaagtcacggggcggatcgaggtcggcggcggaccgctcggcattgccgtcgcacccgatggccgtaccgcctatgtcgccgactggtatgccgctgcggtgcgggtgatcgatacggcctcgcgcagcgtcacggccagcatcgcagtcggcgcctcgccatcgggcctcgcggtgacgccggatggcgagctgctgctctcggccgaccgtgacgacgacagtgtctcggtggtggacaccgcgacgcgccagcgcaaggccataatcaaggtcggtacgcgcccgttcggcatcatcatcgacgccgatggcaggcgcgcctataccgccaatgtcggctccgacgatgtctcggtcatcgatatagcggaggcccgcgaaatcggccgtgtaccggcagggatgcgcccctatgcggtggcgctgacgcagggccgcggcttcgtcaccgaccaatatggcggcaccgtcaccgtgttcgacttggcgagcttgaagccgatcaagcgcatcagtgtcggcgattatcccgaaggcatcgcggcaaccgcggacggcaagcgcatcatcgttgcctgctgggagagcaacacgctcagcatcatcgatgcggccgaactgaaagtcgtgggtgagatcaagaccggcgacggcccgcgcgcgttcggggtgtttttgcgcaggaccgagtag

SEQ ID NO: 1731 - DNA, 816 bp, BradyrhizobiumColbertium
atggcggccggttgcgcggccgccccgctcgaacgcgccgggtcgctcgcctcatacgacaatcttacgccgtccgatggtctgctgacgaagtcgcagctccggatcagcaaggccgatgttctcgcagcgaagacggctcgcatcgagccgaccgccttcacggcagccgcggcgagccggccgttctcgcagcagcagcgcacgctgatcaagaatgcggtcaacagatcgatgtgtcttgcgctgagcgagcgcttccggatcgtggccaccacggaggctgcggacttgaatgttcgcgcgatcatcacacacattgcgccgaccgatgcgacggcagcgggcgtctccaaggtcgcgagcgttgtgccgtccatcgttgctcccggcgtgcccattccggtgccgcggcttccaattggacttgggagcctgtccgtcgaggccgaggcccgcgatcgcagcggcaaccaacaggcggccatgatctgggcgcgcggggcgaattccttcaccagctctccgcgtgtatcgagcgatggcgacgcctatgatcttgccgacgctttcggaagcgatttcgggaggtttttggtgaccgcggagagtccgttcgggaaggtcccagcgcctccgtccgccgacagattgagcgcctcgctcggtggcgcgcccaaggaagcgatctgcgagacattcggccgagcgccgggattggccggcctcgtcggagaacggatcggcttgccgccggactggaccgatcggggtgcgccagaggacgccgtgtcagaggcgcagaacgtcaattga

SEQ ID NO: 1732 - DNA, 1113 bp, BradyrhizobiumColbertium
atggtgaaccggtcgggcggcgacactccctctcggcatgttcgatctgcgcgcagcgccggcgaagcaatcgctcctgaaaatatgacgcgacggcgcctcggcaccatgctgctcgcagccgcggttacagcggcgctcaccgcacatccagcgcaagcgcagtccgctccgcccgctttcatcgatttcgactgggccgatcccgcgcgttcgcggcccgttccggcgcgcctgcactggccgacggatgccgcgccgggatcgcgtgtgccgctcatcgtgttctcccacggcctcggtggctctcgccgcggctacagctatctggggcgatattggtcggcccgcggcattgccagcttgcatgtccagcatgcgggcagcgattcgtcgctctgggcgggcaatcccctcgccgtcgtggaccgcttgcagcgagccgcccatgagagcgaggcgctggcgcgagccttggacctgcgcttcgccctggatcgcatgctgtcgagtccctatggcgcccacgtcgatcgccggcgcgtcgtagcggcggggcattcatatggagcgaacaccgctcttgttgccgttggcgcccgcgtgatgcgcgaagggagatgggtggaggcccgggacccgcgctttggagccgccatcgtcatctcggcccctccattctatggcgagtccgatcttgcctcggtgctgagcaggatcaccgttccaacccttcatgtgacggcgacgaacgacgtcattcagattcccggatactactcgcccgctgccgaccggttgaaggtcttcaacgccatcgccacaccgcgaaagctgctcgccgtgttcgaaggtggttcgcacagcgtcttcaccgatcgcgccttcacgggtggtccggctctcaaccccaaagtcaagctcgcgaccgccgagctcagtctggcctttctcgacctggttttcgaaggcaacggggcaacgctggcgcgctggaatgtcacttggcagccgttgctggcgtcggcgccgggggccgcaccttctcccctgcccgccgcgcattcccggcgcatggcccagggagcgaccgatctcgtttcctcgccatga

SEQ ID NO: 1733 - DNA, 645 bp, BradyrhizobiumColbertium
atgaaaaattcgccccgaaaggaggaaggcctgcgcgaacggaagcggcgcgaaacgcagcatcgtatcgccgagcaaggcctgaaattgttcctgaccaagggctacgacgccaccacgctggacgcgatcgcggaggcggcggggatctcgcggcggacgttcttctactacttcaagtccaaggaagagatcctcctggcctggcaggacggcgggttcagcgagacgctgcgtgccgccgtgctggagcaaacgaccaggcagtcgcctctcgatgccgtgaagagcgccttgctggacctgacggcccgctttcaggtcgactacaagcagaccaaggtgatcgaacgcgtgatgtctgcgaacgaggcgcttcgcatccggcagcaggcgaaatacgtcgagaaggaagaagccgtattcgaggcgctgcgccagatgtgggcgcagccccatcgccaggctgcgctgcgcgtggtcgctatgatgtcggttggagcgctgcgcctggcgatcgacaattggaatcgcgaccagggcaagcgacctctggccacccacgtgaaggaggcttttgcgtgcctggacaaggaaatcggaggaggggcgtcgcgcaaggctgccggtcgatccggcgagtga

SEQ ID NO: 1734 - DNA, 228 bp, BradyrhizobiumColbertium
atggacaataaatgggtcgaactcgcggtggcgtggctgccgttcgtgcttctgatcgggttctggttctggttctcgcgacgaaacggcatgcaggcgcgcggatcgtccggtgcgaccttgatcgagctttacgagcagcaggtggccgagacccggcggatgaacggcttgctggagcggatcgcggtctcgatggagaagcacgatccgccccgcggcagctaa

SEQ ID NO: 1735 - DNA, 663 bp, BradyrhizobiumColbertium
atgaacaaggccaacccgccctactccctcgccatcttcgacctcgacggcaccctcgccgatagcttcccgtggttcctgcgcaccatcaacgacgtcgccgatcacttcaattttcgccgcgtcgcgcaagaggacatcgaggagctgcggcatgcctcgagccgcgaaatcctttcccggctcaaggtgcccttgtggaagctgccggcgattgcgcggcatgcgcggcggctgaaggcggaggcagctggcgagatttcgctgtttgcgggcgtcgaggcgatgctgcggatgctcgccgacaacggcgtgcagatggcgctcgtgacctccgacagcgaagccaacgcgcgcgagaagctcggagacgccgcggcgctgttttcacatttcgactgcgcggcttcgttgttcggcaagcccgcgaaattccgcagggtcatccgccgcgccggcgtcgcgcctgcccgggtgatttcgatcggcgacgaggttcgtgacatcgacgccgcgcgggccgtcgggatcgcttgcggtgcagtgtgctggggttatgcggcacccgcggcgctgcaagcgcttcggcccgaccatgtgttcgagcagatcagtgacatcgcgccggccctgatcggtgccagaaatcccatgcaggcttag

SEQ ID NO: 1736 - DNA, 2979 bp, BradyrhizobiumColbertium
atggacgaagtgatcaaggcgaagcgccaacaacagaacgcgggctccagcctgcgcgcaattacgatccgcggcgcgcgcgagcacaacctcaagaatatcgacgtagagattccccgcgacaagctcgtggtgttcacgggcctgtcgggctccggtaaatcctccctcgccttcgacaccatctacgccgagggccagcgccgttacgtcgaatcgctgtcggcctatgcccgccagttcctggagatgatgcagaagccggacgtcgaccagatcgacggcctgtcgccggcgatctcgatcgaacagaagaccacctcgaagaacccacgctccaccgtcggtaccgtcaccgagatctacgattacatgcgcctgctctgggcgcgcgtcggcataccctattcgccggccacgggcctgccgatcgagagccagactgtctcgcagatggtcgaccgcgtactggcgctgccggaaggcacccgcctctatctgctcgctccggtcgtgcgcggccgcaagggcgagtaccgcaaggaactcgccgaatggctcaagaaggggtttcagcgcgtcaagatcgacggcaccttccatgagcttagcgaggcgccggcgctcgacaagaaattcccgcacgacatcgacgtcgtggtggaccgcatcgtcgtgcgcgcagatatcggtcagcgcctcgcggaaagctttgagaccgcgctgaagctcgccgaaggcctagccgtcatcgagttcgccgatgcacccgcgaccgcgcccgcggaagagaaaaagaagacggcgaagatccacgacaagagcggccccgagcgcatcctgttctcggagaaattcgcttgcccggtctcgggcttcaccatccccgagatcgagccgcgcctgttctcgttcaacaatccctatggcgcctgtccggcctgtggcggcctcggtgtcgagcagcatgtcgacgaggacctcgtcattcccgagaaggatctgacgctgcgcaagggcgcgatcgcgccctgggccaaatcgtcatcaccctattacgtgcagacgctgaccgcgctcggcaagcattacaagttcacgctcgacaccaagtggaaggatctgccgaagaagacgagagacgcacttctctacggctccggcgaggacgagataaagttctcctacgaagacggcgttcgctcctacgacaccaagaagccgttcgagggtgtcatcaccaacatcaaccgccgctatcgcgagaccgagagcgagtgggcccgcgaggagctggcgaaatatttccacgacgtaccctgcgaaggctgcaagggcttccggctcaagccggaggcactttgcgtcaagatcgggggcaagcatatcggcgaaatctcggagctgtcggtcaagaaggccggcgagtggttcgaaggcgtgcctgatacgctgaacaagcagcagaacgagatcgccggccgcattctgaaagagatccgcgagcgcctcaccttcctgctcgacgtcggcctcaactatctcacgctgtcccgctcctccggcacgctgtcgggcggcgagagccagcgcatccgcctggcctcgcagatcggctcgggtctgacgggcgtgctctacgtcctggacgagccttcgatcggcctgcatcagcgcgacaacgcgcgcctgctcgatacgctgaagcggctgcgcgacctcggcaacaccgtggtcgtggtcgagcatgacgaggacgccatccgcctcgccgactacgtgctcgacatcggccccggcgccggcatgcatggcggcaacatcgtcgccgaaggcacgcccgccgagatcatgcgcaacccgaaatcgctgactggcaagtatctcaccggcgaactcgaggtcgaggtgccggagcggcgcccgccgaaccatcgccgcaccatcaaggtggtgaacgcgcgtggcaataacctcaagaacgtcaccgccgagatcccgctcggcctgttcacctgcgtcaccggcgtctccggcggcggcaagtcgacgctgctgatcgacacgctctatcgcgccatcgcccgcaagctcaacaacgccagcgaaggcgccgcgccgcacgatcgcatcgaaggcctcgagcacatcgacaagatcatcgacatcgaccagtcgccgatcggccgcaccccgcgctcgaatccggcgacctataccggcgcgttcacgccgatccgcgaatggttcgccggcctgccggaggcgaaagcgcgcggctacgagccgggtcgcttctccttcaacgtcaagggcggccgctgcgaggcgtgccagggcgacggcgtcatcaagatcgagatgcacttcctgcccgacgtctacgtcacctgcgacgtctgcaagggcaagcgctacaaccgcgagacgctggaagtgctgttcaagggcaagagcatcgccgacgtgctcgacatgacggtcgaggaagccgccgagttcttcaaggcagtgccgcgcgtgcgcgagaccttcaacacgctgcaccgcgtcggcctcgactacatccatgtcggccagcaggcgacgacgctctcgggcggcgaagcccagcgcgtcaagctcgccaaggagctgtccaagcgcgccaccggccgcacgctctacatcctggacgagcccaccaccggcctgcacttccacgacgtcaagaagctcctggaggtgctgcacgagttggtggcgcaaggcaacaccgtcgtcgtcatcgagcacaatctcgaagtcatcaagaccgccgactgggtcatcgacctcggccccgaaggcggcgacggcggcggcgagatcgtggcgtggggcccgcccgaggacatcgcgaaggcgccgcgcagctatacggggaagttcctggcgccggtgctggagaaagcgcggaagccgaagcgaaggcgtgcggcgagcgaggcggcggagtag

SEQ ID NO: 1737 - DNA, 693 bp, BradyrhizobiumColbertium
atgaaaaaggttttgttggcttcggcctgcttgttcgccctggcagctcctgcttcggctgctgatctcgcggctcgcccctataccaaggctccgatggttccggccgctgccgtctacaactggacgggcttctatctcggtatcgtcggcggcggcgcctgggaagcctcttcgggcgacccgaagatgcagggcggcttcgtcggcggcaccgctggctacaactggcaggccggcaacgtcgtgttcggcctcgaggccgatggcgcctgggcagacgtcagcgcctcggcggctggcaccgttttcgtcgccggcgtcggcggcgtccccgcttcggtgtcctcgaggaccgacgcgatgggcaccgtgcgcggtcgcatcggctgggccgtcaacaacgtgctgctgtacggcaccggcggttacgcctggatcgacaacaaggtcaccgccaccctgggcgctgcctcgatttccgacagcaagtttcactccggctggaccgttggcgcgggtgtcgaggcgttctttgctccgcagtggtcggtcaagggcgagtacctctatcgcagcctcggcggcgagacctacttctcgggtaccgttcccagcggcacgctcaaccttcacaccgtgcaggtcggcgtgaactatcacttcggcggcccggtcgtcgcgaagtactga

SEQ ID NO: 1738 - DNA, 651 bp, BradyrhizobiumColbertium
gtggctgcgcccgcgccgatctacacctggaccggtttctatgctggtattcagggcggtggcggctggggcgacagcgacgagacgttcttcctccttccgaacggcccgggcttcgcaggaactcagaactacgacatcagcggcggtttcgtcggtggcgtgttcggctataattggcagtcgggcccggtcgttttcggcatcgagggcgactatcactggtctgatatcagcggccgttcggcggaaatcaatgccggcctaggcgacacctacttcacgaagatccgcagcttcggcgatatcaagggccgtctcggctattcgaccggtcccgctctgttctttgtcagtggcggtgccgccgttggcgacctgcagcatcgctatgatgttcctctcgtcggcagtgtcgtgcggaatgactggcgttggggctggaccgtcggcgccggcgcggaatacatgttcgccccgaactggtccgccaaggtcgagtacaactacatcgatttcggcacaagcacgctgcagtacaccgctccggctgttgccgcgaaccgctccgagtggaccgacaccgttcacacggtcaaggctggcgtgaactatcacttcaactggggcgcgcccgctccgaggtactga

SEQ ID NO: 1739 - DNA, 492 bp, BradyrhizobiumColbertium
atggcgggaagcgtcaacaaggtcattctggttggaaatctcggcaaggatcctgaaatccgccggacccaggacgggcggccgatcgcaaatctgagcatcgccacctcggagacgtggcgtgacaagaacaccggcgagcgcaaggagaagaccgagtggcatcgcgtcgtgatcttcaatgaagggctttgcaaggtcgccgagcagtatctgaagaagggcgcgaaggtctacatcgagggcgcgctgcagacccgcaagtggaccgaccagagtggcgtggagaagtattctaccgaagtcgtgctccagggcttcaactcgaccctgacaatgctcgacggccgcggcggaggagggggcggcagcttcggcgatgagcccggcggcgatttcggctcctccggtcccgtcagcagtgcgccgcgccggccggttgcagccggcggcggtcgcaacagcgacatggacgatgatatcccgttctga

SEQ ID NO: 1740 - DNA, 2730 bp, BradyrhizobiumColbertium
ttggctgacgacgacgacaagcccggcgaccagccggcgcaaccctcggatattcgccccgtctccatcttcgaggagatgaagaagtcctatctcgactacgccatgagcgtgatcgtggcgcgggcgctgcccgatgcgcgcgacggtctgaagccggtgcaccgccgcatcctgtactcgatgaacgagcaggggcacacacccgacaagaagtacgtcaagtccgcccgcgtggtcggcgacgtcatcggtaagtaccacccgcacggcgaccagtcgatctacgacgccatggtccgcatggcgcaggacttctcgatgcgggtgccgctgatcgacggccagggcaatttcggctcggtcgacggcgatccggcggccgcctatcgttacaccgaagcgcgcctgacgaaggcggcgctggctctgctggccgacatcgacaaggataccgtcgacttccagccgaactacgacaacaacgagaccgagccgtcggtcttgccggccaagttcccgaaccttctggtaaacggcgcgggcggcatcgcggtcggcatggcgaccaatatcccgccgcacaacctcggcgaggtcatcgacgcctgcgtcgctctgatcgacaaccctgcgctcaccattgacgaactcatcaacatcgtgccgggacctgacttcccgaccggcggcgtcattctcggccgcgcgggcatccgcgccgcctatcacctcggtcgcggctcggtcgtcatgcgcggcaaggtcgcgatcgagaccatccgcaaggagcgcgaggcgctcatcatcaccgagattccgtaccaggtgaacaaggcgacgatggtcgagcgcatcgccgagctggtgaaagaaaagaagatcgagggcatcggcgacctgcgcgatgaatccgaccgcgaaggctaccgcgtcgtcgtcgagttgaagcgcgacgccgtgccggatgtggtgctgaaccagctgtaccgattcacgccgctgcagacgagcttcggcgtcaacatggtggcgctcgacagcggccgtccgcggatcatgcatctgaaggacctgctgacgatcttcgtagacttccgagagcgagtcgtcacgcggcgcaccaagtacctgctcgccaaggcgcgcgatcgggcgcatatcctggtcggtctcgcgatcgcggtcgccaatatcgacgagatgatccgcgtcatccggagctcgcccgacccgaccgccgcccgcgacactctgatgtcgcgcgactggccggcccgagacgtcgaggacatgctgacgctgatcgacgatccgcgccaccgcatcagcgcggacggcacgatccggctgtcgatggagcaggcgagggccattctcgacctgcgcctgcagcgtctcaccgcgctcggccgtgatgaaatccgggaggagctcgacaagctcgccggagagatcgccgattatctcgacatccttcggtcgcgcgaacgcgtgctgggcatcatcaagaccgagctcgccgaggtgaaggcggagttcgccacgccgcgccgcaccgtgatcatggagcaggaaggcgaggtcgaggacgaggacctgatccagcgcgaggacatggtcgtcaccgtgtcgcacgccggctacgtcaagcgcgtgccgctgtcggcctaccgggcacagcgtcgcggcggcaagggccgctccggcatgcagacccgcgacgaggatttcgtgtcgcgcctgttcgtggcctccacgcacacgccggtgctgttcttctcctcacgtgggcaggtctacaaggaaaaggtctggcgcctgccgatggcggcaccgaacgcgcgcggcaaggcgctgatcaacatcctcccgctcgagcagggcgaacggatcaccaccatcatgcccttgcccgaggacgaatcgacctgggctcagctcgacgtgatgttcgccacgacaggcggcaacgtcaggcgcaacaagctgtccgatttcgtcgacgtccgccgctccggcatcatcgcgatgaagctcgacgacaacgaggcgatcgtcgacgtgcagatctgtaccgagcgcgacgacgtgctgctgacggcggccggcggccagtgcatccgcttccccgttaccgacgtgcgcgtgttcaccgggcgcacctcgatgggcgtgcgcggcgtcgcgctcggcgagggcgacaaggtgatttcgctggcgatcctccgtcatgtcgagaccacgtcggatgagcgctcggcgtacctgaagatgcgacgtgcggtggcgggcgaggctgcggtggaagaggctccggccgatgccgaggccgaggagacctcaggcagcttccagctgtcgcaggagcgttatgccgagatgtcggcgcaggagcaggtcgtgctgacggtttccgtcaacggctatggcaagcggacctcgtcctacgagtaccgcaccacgggccgcggcggcaaaggcatcgttgccatgagcgtcaacaatcgcaacggcaacctggttgcgtccttccccgtggaagaggccgatcagatcatgctggttacggacaaggggcaactgatccgctgcccggtcgaaggcatccgcatcgccggccgctcgacccaaggcgtcatcgtgtttgacaccgccgaggacgagcacgtggtgtcggttgagcacatcaccgaagaggcggagagcaacggcgcgaacggggagtag

SEQ ID NO: 1741 - DNA, 258 bp, BradyrhizobiumColbertium
atgctcaagactctttcagcgatcgctctgtctgcgtgtgtcgccgcggctctcaccctcctgcccggctttgccccgaaggtcgaagccagcgtgccgcagccgctggccaagggcgaccggctcgatgtccgcgccattggcagggactgctcgcatcaggcatggccgaacttcgaggcctcgtgcctgcgtcgcgccggcaccaaggccaacatccgcgaagcccgtctcgtcaccgcggatcgcaccccgtag

SEQ ID NO: 1742 - DNA, 495 bp, BradyrhizobiumColbertium
atgtcgcgcatcgccttttacccaggttccttcgaccccatcaccaacggccatctggacgtggtccgtcacagtgtgccgctgtgcgacaagctcgttgtcgcgatcggggtccaccccggcaagaagccgctgttctcgaccgaggagcggctgaagatgcttcatgacgtctgtgggccagtggcggcccaggccggctgcgtgctcgaagccgtcacatttgacgatctgtcggtcaccgcggcgcgcaagcatggcgcaaccatcatgatccgtggcctgcgcgatggcaccgacctggattacgagatgcagctcgccggcatgaacgaggcgatggcgcccgaggtgcacactgtcttcctgcccgcttctcccgcggttcgcccgatcaccgccactttggtgcgccagatcgctggtatgggcggagacgtctcggccttcgtcccgccgctggttgctgcacagctcaaggccaaattcgcctga

SEQ ID NO: 1743 - DNA, 1647 bp, BradyrhizobiumColbertium
gtggctgatgttcatcccgcggcgggcaagcaggcctcgccggacgcgctcaccaacattccgcggctggtcacggcttatttcgccggcaagccggatgcgtccgatcctgcgcagcgcgtggcgttcggcacgtcggggcatcgcggcacttcgttcaagaacacgttcaacgaaggccacatcctggcgaccacgcaggccatttgcgattaccggcgcgagaagggactgacaggaccgctgttcatcggcatcgacacccacgcgctggccgagccggcgctggtcagcgccatcgaggtgttcgccgccaacggcgtcgagatcatgatcgacaaggacggcggctacacgccgacgcccgtcatctcgcacgccatcctcacctacaacaagggccgcaccagcggtctcgccgacggcgtcgtcatcacgccatcgcacaatccgcccgaggacggcggctacaagtacaatccgccgcatggcggtccggccgatacggacgtgaccggcgtggtcgaaaaacgggccaacgcctatctcgccgacggactcaaggacgtgaagcggatcgattatgccagggcgcgcaagtcgtcgaacgtccacgcttacgacttcgtcacgccttatgtcgccgacctcggcaacgtggtcgatctcgacctcgtgaagtccgccggcgtcaagatcggcatcgatccgctcggcggcgccgccgtgcactactggcatccgatcatcgagtgctacggcctgaatgctactgtcgtgaacgaggcgatcgatccgaccttccgcttcatgacggtcgattgggacggcaagatccgcatggactgctcctcgccctacgccatggcaagcctgatcggcatgcgcgaccgcttcgacgtcgctttcgccaatgacaccgacgccgatcgccacggcatcgtcacgcgcaccggcgggttgatgaacccgaaccattatctcgcgaccgcgatctcctacctgtttacgcatcggccgaactggggcaaggacgccgcgatcggcaagacggtggtgtcgagctccatcatcgatcgcgtcgccaagaagctcggccgcaagctggtcgagacgccggttggtttcaaatggttcgtcgacggcctcgtcaccggcggcttcggcttcggcggcgaggagagtgcaggggcctcgttcctgcgccgcgacggcacggtgtggaccaccgacaaggacggcgtcatcctcggcctgctcgccgccgagatcatggcgaagaccggccgcgatccgagccagttctttgccgatctcaccgccgagttcggcatgccccattacgcccgcatcgatgtcgccgcgaccgggccgcagaagaacatcctgaaatcagtcacgccggagcagctcggcctgaaggaactcgccggcgatccggttcgctcgacgctgagcaaggcacccggcaacggtcagcccttcggtggcatcaaggtcgaaaccgatttcggctggttcgccgcaaggccctcgggaacggaggatgtgtacaagatctatgccgagagttttcgcagtccggagcacctgaagcggatccaggaagaggcgcaggcgggcttggcgaaggtgttcggggcgtaa

SEQ ID NO: 1744 - DNA, 795 bp, BradyrhizobiumColbertium
atgctgtgggatcggccgcacttcgggctcggcgcgatgtggagacacgtcgcggtcgtcctgcttttgtcgatgccgatcggcgcacatgccagcgacggcgatatcgacgggccgcgcacgacctcgacgatcgccgacgccagcacagagctcggcgctggcgagactccgtcatcccgggccatgatccggaggatcatcgagagagaaaccgcaagcaccgatctaccggctgctgttgccgaggcggtcgtcttcgtcgaaagcggctacaacccgtccgtcatcggcagcgggggcgagatcggcctgatgcaggtacggcccgagacggcggcgatgctgggctttcgcggaagcaacgcggaactcgcagaacccgacgtcaacattcattacggcgtgcttgctctcagcctggcctggcgtgtggccggcggcgatctctgccgcgccctgatcaaataccgggcaggtcaggatgaagaaaagccgacggcccggtcgcaggtctactgcaaccgggcccgtaaccgtctcgttgcgatcagcgcaatgccgttaggcaccgaagctgcggctacgacagatgcggcgcccgcgattgcagctgtggccccggcaaaaccggcgacccgatcgaaaacgccggtgcagcccaaagccgtctatgcccgccaccggcaaggcaccgcggccgccagccgcgcctactgggccgcacacgaggcgaggatcagccagatcaaggcgcgcatcgaaggcagaagaaagcgcgtggcgtcacgttga

SEQ ID NO: 1745 - DNA, 810 bp, BradyrhizobiumColbertium
ttgaaggacagcagcatcgagtttctttggcaggccgggccggagtggccgcgtcacgcgccgctgctgtttccgatcgtcggacgcctcgccaacgacgaactgcggcatcggggcaaggcctatcggatgactcagcatggctttgcccgcgacagacgctttatttgggcagaacgcggcgagagtcgttgcgccctggtgctcgtagacgatgaggcgacgcgggcgctctatccgttcgcattccgccttacggccgcctatgcgatcgatcagctcgggctcgacctgacactcacgatcgcgaacaccggcaaggaagtcttgcccgcgtcgatcggcggccatcctgccttcaactggccgctccagcctggcgcggccaaggagagctatgcgctgaccttcgatcgcgcagagcagtctcctatccgccgtctcaatggtggactgttgcggccggaagcggagccgagcccggtcaaaggcgcctcgctccctttgtccgaatccctgttcaccgacgacgccatcatcttcgaccggatcgagagcaattccgtccgctacggcgcgaggctgggcgcatcgagcggaccttggctgaagatgtcctggcgcggctttcgcgagctcggcatctggtcgaaaccatcaggcgcgccgttcctctgcatcgagccctggcacggccatgccagtcccgccggcttcgacggcgaattcaccgacaagccggggctcatgcatatcgcgccggacgcggaagagtccttgtcgtaccggatcgaagtcggatcgtcgtga

SEQ ID NO: 1746 - DNA, 1104 bp, BradyrhizobiumColbertium
ttgaagatcttcatcaacggccgctttctgtcgcaaaagctcacgggcgttcagcgctatgccgctgaaatggtcaaggcaatcgacgcgctgcttgcgtcggagcagacttcggcctcgttgcgcaatgccgattggcagttgctgacgcctgcagatgcaactgaacatctcgatcttgatcggatcaagattcgcgctgtcggccggttgcatgggcacgcgtgggatcaaatcgaactggcgcgcgccgctgccggcggccgcttgatcagcctctccaattccggtcccgtcttccatcgcgaccacattgtcgtgatccacgacgcccaggtctttcgccggcccgatttcttcgattggcgctatctggccgtgcatcggacgatggggcggttgctctcccggcacgcagccatcgcaaccgtgtcggccttttcccgcagagaactcgccgacgtgctgaatctatcggcatcgagcattccggtcttccccaacagcgccgaacattttgcggctaccaagccggaccccggaattctcgcgcggcttggagtcaggccgcagaggttcttcctcttcgtgggctcaaggaccaagaacaagaatctttccgttgcgattcgcgccgtccagttgctcgatcgacccgacgttccattggtcgtcgtcggaggcgataacagcaaggtctttcaggataattcgggcgaaggatctgccggcctggtgctcgccggtcgtctcaccgacggcgagatcgcggcgctgtatgctcaggcgtcggcattcgtgtttccctcgctctacgagggcttcggtgtgcctccactcgaagccatgatcttcggctgtccggtgatcgcatcgacggcagatgccgtcgtcgagacgtgtggtgaggcggctgcgtattttcgcgccaacgacgctgaagcgctgaagcaactcatgctcgaaagattggcaatcggcacgatctcggaccaggaacgcaggcggcagcaggatcgcttggcattctattcgtggaagaaatctgcgaaggcgctgctggatcaccttgcgacaccagcaagcgtcgccagcgctgcttga

SEQ ID NO: 1747 - DNA, 1134 bp, BradyrhizobiumColbertium
atgaaagtgctgcacatcgccgagacgatccgcggcggcatcgccagttacctgaatgaactgcatccacagcaacaggcgagcttcggcgccgacaacgtgcactatgtcgtgccctcggatcatcgacgcgatctcggcgcgatcgatgacaatcagattacgacgttcgagcggtccagccgcagcatctcgggattattccagatgctgcgcgcaagcatgcaagccctcgacgcctttcgcccggatgtggtgcacctgcactcttcctttgcaggactcgtgcttcgccctgcgctggcagcccgctcggacggtccgcgggtcgtctattgcccacacggctgggcgtttgcgcgcgagaccggtcgtctcagccatgtcgtgacgaaggccgcagaaactcttctcgcgcgaacgtcggaccgcatcatctgcatctcgggtgacgagtatagcgaggcgatccgcgcgggaatttctgccgaccgcctcactgtcgtccacaatggcatcgcgaagagccgcaatccgcagcccgttgcggccgactggacgtccaagaaggtcaaggtcctgttcatcgggcgcctggaccgacagaagggcttcgatctcctgatcgaagcagcgcgctcgctcgaggatgtgctggacgttcgcatcatcggcgcctccgtcgtcaataaatacgaagggccgacggtgccttccaatgtctcgctgctgggctggctggatcgccccgccatcgagactcagctcgaggccgccgacctcgtcgtgattccgtcacgatgggaggcgtttggtctcgttgcccttgaagcaatgcgagcggccaagccgatcctggcgttccgcagcggcgcgctgcccgagatcgtcgtcgacggtgtgacgggggtgctttgcgagcccgtcgcggtccagccgctcgtcgatggtttccggcgcgcgctcgatctcgacctcaaggtgctgggacagcgcggctacgaccgcttcaagcagctgtatgacgttcagaagacgcatgcacaattgcagcaggtctatgtcgagcttctccagggcgacggggtcgaggcgaaggcgggactgcagtcggatctttccaagaatttctga

SEQ ID NO: 1748 - DNA, 1314 bp, BradyrhizobiumColbertium
ttgcttcgcgacagtcttcgggtcgcgagcctcatcgcatccattctcctgccagcctccgtctgcgcgcagcaggcgcagccgctcgatgcccgattcctgctcggggtcggcacgcatcaggggcttggcggcccagtgagcgcgcgcggatatgttcctgccgagaacatcgcccagatcaagcaactcggcttgaacgctttccgcgacgatttcccctggtccgatttcgagatgccaggacgccggctggggttcaaccccagacttggcaggctcgaggcgcaagtcaggtccggcgtcgcacgccctctcctgattctggccttcggccatcatctcatcccgaattcctcgccaccgacgaccgatgaagcccggcagcgcttcgcggagtatgccgctgcggcggcgcgatcggtcgtagcgcaagatcccctgtttgagctctggaacgaatggaacctggcgtcgaagaaagatgctgcgttctcgccggaaaattatctggcgctcgcgcaggtcgcacgaccggcggtcaagcgcgttgcgccgaatgcgcctttcctggtcggagcactcggcgacgatccgggctggatatggacggagaagatgctgcgcaccggcattctccagtacgcggacggcgcttcgatccatctctataatttctgcatgggcccgagcaaacgcacctcggccgaaatcatcgacaggctgacggcgtttcaccgcctcgtcagccaggcgagcggaaaccccaccttcccgatctatgtcaccgagaccggctggaccaccgccagcaacaagtgcggcgtcaacgaacaggcccaggccgacaatacggcacaactgatcctgtgggcgtcgactgcaacgcgctggctcaagggaatgtggctctacgagctcaaggacagcggaacgaatccgtcggacctggagcacaatttcggcctctatcgtttcgacaattcgccgaagccggtcgcctgcgcggcccagggcgcctgggccttcatccgctccagcctgagtgccgagcgacgagagctcgccagcggcgtcgtgtcgatcaacgcatcgacgacgtccggcggcagagttgcggtctggtccgaggccccgggccgacgctacgaaatccggatcaaggacgatcagcaaggcgcgagctttgcgatgccgtgcaatgcgaccgcaaaaccggcttccggaatctggattccggtttcgagcactccggttctcattgcagccaatgacagtgccattcccgccctggagatacgtccggtgcgatag

SEQ ID NO: 1749 - DNA, 1275 bp, BradyrhizobiumColbertium
atgaaagttcttttgacatccacgctttatccgacgcctcaggcgccaaagatcgtcggcggcgcagagatcttcgcgcgacgtttcgccgaaggcctggcgcaacgcggagacgaggtcgaggttatacgcgcagcacccgcgccccagcaggctcgcgagacctgcaacggcatcaacatctattctgcgcccgtgcggaatatctatctgcccttcacggagcagaaaaacgtcgcgttgcgcagcatctggcacgccatcgacgattggcagatgcaggcgcccctgatcgcggagcgcatccgggccttcaagccggacgtactgcactccaacaatttgtcgggtctcaccaccgcgatctggcgcgttgccgcccagctcgaggtcccggtgctccatacgcttcacgactattacctgacctgcccgcggtgctcgcgcttcgacaagggacattcctgcgggcacacttgcacgagctgcgggatcctgacctttcatcgcaagcgcgccacgcactggctcagcgccgtggtcggtgtgagcgagcgcgtcctgtccattcataccgacattggcatgttctcggagacgccgatccgtaccgtgatccgcaacgcctcgaccgagccgccgcgtgagccctatccacgtcccatctgcaccgcggaagtgacgttcgggttcatcggccggcttacggaggaaaagggcatcgataacctcatgctggctcttgctctgctgccccgcgaccggatccggatgctgatcgccggtcgggtcagcgaccaagagcaaggacgtctccgggctctctcgggagatgcacgaattgagttcatgggcttcgtggcgcctgacgatttctacaagcaagtcgacgtagtggtcgcaccatcgatctggcacgaccccggcccgctcgtcgtcgcggacgcaaaggcggccggcaggcccctgctcggaacccgctttggcggcatgcccgaagtcattcagcatggcgtgaccggctggctcactgaagccgacccgcaatcgctggcggacagcatgctcgcggtcgcggcggatccgcacaagatcgatgagatcagccggcgcctgatcgcggacaccaataaatgggtatttgccgacgtgctgtcgtcatacaagaacctgtatgaacaattgcgggagcaacggatgtcgcgcctgcacgcggcaacggccgatgcgccgctgggacgggctgtggccaaggagcgcctcattccgagatga

SEQ ID NO: 1750 - DNA, 1395 bp, BradyrhizobiumColbertium
atgacacgcctcttcgcgatggcgggctacgtctatcagagcgccgcggcgatcatcctgatcttcgcagtcagccatctgctgcccgccgccgcctacaccaatttctcgctggcactggcctcgagccaattgctctgcgttctgatgttcgagtggctgcagctctccggactgcgtttcctggcggcagccaacgaagacgaggcggctcggctgaggtggtcgctctttgcagcaggcctgtcgagtgctggcgcgctgatcgtgggcggcagctgcgcatctctggccagtgtcctgccgacggcgatcattgcactgggtctcggcatttccgtgcttcagggcctgacggatctctattttctgacggtgcgtctgtccgaccggttgggagtggcctcctctcttctcgcactccgtgcaaccgcgcttctggccggaggcgcgttgggagcagcgacttcaggaacggcggaggcagcgctgctcggtatcgcgtcgggtcacgtcctgggcctccttgccggcatggccgtctatcgcacgcctgtagagcgtacttcgttgcagacgatgctggccgactggaagagcttcgcccgttacggcatgctcgccgcgggcgcgtccgtcatccatctgtcggtgcccgttctgctccggatcatcatcatcggcaggctgggcgcgaccggcgcaggtgccggattctcgatcgcgctcgatctgctgcaacgcccgttctgggttctcaatgcggcgatccacaccgtaagttatcccgacgtggtcaaagagttcgaacgccggccggtcgtgaagtcggttgaatcggcccgacggatgttcgaattcatggtctgcaccacccttgtgctgctcggtgggctggtaggcttcattcctgatgccgcccgcatggtggtgccacgcgagagccttgacggctttctggcgacggcgccggcagtcgccgtcttctatttcctgcacacccatctgcaggccacagctgccgtcgttccacacctggagaagctcgcgaccaggcttgtggtcgtcgccgcggggcagctcgcaaccgtcgcagctgtcgtgtttgccgcaacatgggcgggcctgtcgccgcggcaggctgtcggctgcgcttcggtcgccacacttgcgacgatcctcgctgcgctcggtccgaccctgcgcttcgacgcattcccgcgctggtcgttggtcgcgcaggcggtggcggctgcggtcctgatcggatcactcggcgcaattccgaccgagcccgcggcatggctcgccggcaagatcgtgatcgcggcgatcgcgactgcgatcgtcggatggcgcggagacttcctgatgctggcccgccgaggcagatag

SEQ ID NO: 1751 - DNA, 201 bp, BradyrhizobiumColbertium
atgccgcgcgatgtgcgcatagtttcagcagcatgggtcgcgcaattcttgaaagcgccttcctcgtgccatcctgcgcgggcatcgcatcagcattcggctgcaactcgagtcgacctgttcctgcacaaggaacctcattcgctcgcgatttgtagctacgatttttatctgaaattcacactcgacaatgaagcttga

SEQ ID NO: 1752 - DNA, 3909 bp, BradyrhizobiumColbertium
atgcctgatcaaaccatcctgtccgccagcggcttcatcaactccatcggcgtcaacacgcatgccggcttcgggtggaccggctacaacaatctcgcgctgatggtcgacgacctgaaatatctcggcgtcacgcatctgcgcgactcgatggggacaagccccgccgcgcaaccggtggtcgacggccttgccgctgccggctacaagttcgatttcctggtgtcgtccgccctgccccaatcgggtacggccgggcttcagaagtatatcgcgtcgctcgagaagttcgcaacgagccacccgggcagcatcagcgccatcgagggcctcaatgaggccaatcatcagcccttcagctacaatggcagctcgagcctcaccgccgcggctcaattccagagcgccctctatcaagcagtcaatgccaatgctgcgctcggcagcatccccgtctacaatctgtcactggcctacaacgatcctcagggctacagccagctcggcaacatgtcggcctccgtcgactacgccaacgcccacgcctatgtcagcaccagcctcaatccgagcagctcaattgcggcaactctgagcgccgtcatgactgcggcgccgggaaagcccgtggtcatcacggaaaccggctacaccacgcaagccaacacgcaatatctcggcgtcaacgagacggtgcaggccaagtcgatcctgaacaccctggtcgatgcctacaaggccggcgtgagccagacttacctctacgagctgttcgaccgcgactcctccgcaagcaataccaatccggaagccaatttcggcctgttcaactccgacggcacgcccaagctcgccgcgacggcgatccacaacctgaccaccatcctggccgacgacggcaagggcggccagcagccgaccgacccgttgaactacaccctgggcaacatgccggccacaggcaacagcatggtcctcggcaagagcaatggcgcctacgagctcgtcgtgtgggccgagccgaagctctggaacgacgccaccgacaccgagctgaccaatgcggcccagaccgtcactgtgaatctcggcgccgtgcatcacactgtgaaggtgtacgacacgctgacggggaccacggccattgccagctacaccgacgtcagcacgatcaccattcctgtcagcgatcaccccgtgatcatcgagatcgatgcgcccccgaccacgaccacgccgccggacagccggaccagcattacgggcgctgctgccgaaatcgtgccgcaactgtccgacctgagcgactcgacggcgctgcagaccatcacgctgaccgactcgcacgtcctgccggtcgcttcgaaggcgaccatggactacatcatcgcccattacggcagcgccctctccaagatccagggcggatattcgttctcggtgaccaatacggccgcgacctggaccaacacgaagacctacgattcgagcggaaagctgctctcgacatccgacaccggcctgaatgcgagcgggcagccgacgtcgaccaacgtcgtccacagcgacggctcccaggacctgatcagctacaccggcggcgtgaagacgaaattcgttcacgtcggcaccgacgccgtccgtaccacagatacctacaatacggcgggaactcttctcagcgagatcgtgcagaagccggacggctactactccacgacgctatacaccaacggcgtcaagaccgccgcctatatcaagaacgctgacggttcgcaggacaactattcctacaacgtcgtcggaaagagctttaccacccaggttcagcaccttgacgcatcagggaagattacttcggtcattcgcagccatgccgacggctcgttggattcaacccaggtctacaagaacgatggcagcagcgtgatcacgctgtatagcgcctccggagtaaagctggtcgagaccgactaccatgccgatcgcagcaaggacgtgtggacgtacaacatcaagggccagaactatacgacccagcacgacgtctatgacgcgtccggattcctcacgaccctgacgcgcctgcatgccgacggcagcctggctttcaagctaatgcagaccccggatggcaccaagacgaccaactggtacaatgccgtcggcagccttaccagcgaggtggttgaaaaggccgatggctttacatcgacgaccctctacagcaacggcgtcaagaccaaggcctatatcaagaacgccgacggcagtctggacaactatgcctacggcgtcaccggccagagctacaccacgctgattcagcacatcgatccgaccggaaaggtcacggccgtgactcgcaagcacgccgacggcacgctggattttacgcaggtcgtcaacaatgacggcagcagcgtcgccacctattatgacgcaaagggagtactgacgaagcaaagcgaaagtcacgccgatggcagtaaggacgtcttcctgtttaacatcaccggccagaactacacgaccgagcacgacatctacgatgcaaccggcttcctcaccacgctgatccgcaagcacgcagacggcagcatggcgttcaagctggtgcagagcaaggacgggatcaagacgacggactggtacgatgccaagggcgtccttaccagcgaggtgattacgaaggcggatggttacagctcgaccacgctctataccaacggactaaaaactgcggcctacatcaccaatgccgaccggagccaagacaatttcacctacaacatcaccggccagagctatgccacgcagcaccagcatctcgatccgaccggcaagacgacagaggtgacccgctggcacgctgacggcacgctcgactttacccagatcgtcggcagtgacggcggcagcgttgtgaccaactacgacgcctccggcatcaagaagatgcaaaccgactatcaccccgacggctcgagggatgtttatctttccaacattgtcggtcagaactacacgaccgagcacgacacttacgattcaacgggcttcctcacaaacatcgtgcggacccacgccgacaacagcctggcgttcaccctcgtgcagagcgtcgacggcaccaagacctcggagtggtacgacgccaaaggcgtcatcaccagcgaagtcacgaccaagaccgacggttacagttccacgactgtgtacacgggcggtatcaagactgctgcctacattaagaacgccgagggtacgcaggacaattggaactacaacgtcaaaggccagtcctacacgacccagcaccagcacctcgatgcttcgggcaatatcgtcgagatcacaaggacccacgccgacggcactctggactttacccaggtcatgaacgatgacggcagcaaactgaccgacatctataacagcgccggcatcaagacccaggagatcgccagccacgccgacggctcgagggacgtattcctgtttaacttcaacggacaggccggcatcacgcagcacgagaactacaacaccgccaatgcactgcagttcatcgatcagaccaagaccgacggcacccataacgtcacggccgttgggagcggcgtgacgatccagggcggagccggcaacgacgtgttctcggccgcgccgaattcgaccaccatcgcctatgatcacggccaggaccagatcctcaacttccaggccggcgacgccacgacccacgacgtgatccagatctcgaagctcctggccgcggactacagccacctgcagatgacgcagtcgggcacgaacgcgctcatcacgttctcggagaacgactcgatcctgctgaagaacgtctatgtcaccagcctgacgagccacgacttcgtgttcgtgtga

SEQ ID NO: 1753 - DNA, 198 bp, BradyrhizobiumColbertium
ttgcaccgcagcggcgggatctcgtcgctgatgctcgcgatcatggtcgcgctgccttatggagtcgtcgcccatgctcacctgccgatctggcaggaccgctcacagatgtacggggcaaccttcgattctcgggatcttaaggggtcggcgacgtccggtcgaagatcgacggtgcgactcttccgagcttcctga

SEQ ID NO: 1754 - DNA, 489 bp, BradyrhizobiumColbertium
gtgctgttcaggctctcaagcgattatcgcaagaagccagtcgcattcgccggaatagcactgtttgccgtctcgatcatggtcctcaacttctttgccaagcccgacctcgcaatcacactgttttctcttgcgatccgggtcacagccaccggcgaaagcgccttcgcccggtttcccggctctgactggcttggccgcctcggcaacacgtcatacgcgatctacatggttcacgaagtgctgctgatcctgcttttcaagccggcgtggcactatttcggatttcaaccaagcatgtttccagtgtttgcgttggtctgctgcatcattctgacggtcgtcgccgacgtgacgtatcactacttcgagaatcccgctcgaaaattgatcaaccggcttgcgccgggcgatgcgaggtcggcccacatcccgaaggccgagccgctcgatccttcggggacccgaccagcggccaatgcgagctag

SEQ ID NO: 1755 - DNA, 1467 bp, BradyrhizobiumColbertium
ttgcgccacgagaatatcaagccgcgctcgatcgtttcgggcgtcatttggtccgcactcgattccgcagtcgggcaggctctcacgctcgcgatctacatgatcatggcgcggctgctgtcgccgcagattctcggcatcgtggcaacgggggcgctggcgcttgaattctgccgggcagtcttgatcgagagcatcgcgatcgcggtgcaggcgcgtgccgagccgaaggacgaggattacactgcctcgttctggctcatcgcaggtctctccttgtttgcagcgctcgcactgttcgcctcgagcggcgcgatcgaacgattttcgggtctttcggacattgccatcgttctcaaggggttctgcatcgtggtggccgtacagggcctgtcacggacgcacgaagcctggttgatgcgcaatcaactgtttcgatccctcgccatccgctcgctttcttcaatatcggttggcggggccgttgggatcgggctggcgatccaggggtacggggtcgttgcgctggtcggacagctcgtttcgacgtcgttgatctcgctggtcagcctttgggtcctgacgccctggcgtcctcggctccgggtcagccggcaggctgttgtcgaactcctgagctatgcgcgctacgtggcgctgacggggatcacgaacttcgccaatgccaattccgatctgattttcgttacctggtataccggcgccgccggcgcgggcttgtacagcctggccaagcgcctggtcaatgccgtgagtaccgtgattgggaatgcgttgaaccgggtgttctttgcgaccatcgctggcctccagcatgaccgggaagcatcgcgttcgacgctggttgccttcgtcctgtacacgtcgctgctgacggctccgatcttcgccggcatagcggttctggcgccggatctgatcactgctttcttcgggtccaagtggagcggggccgcgcctctgctcgcgatcatgtcggtcaccggattcctgaccacgatcggcctctacaatcactccgttatcctggcgttcggcaaaccgcactggcaaacctggctgacgctgatctacgcggtctcgaacatagcaatcttcatcctcgctgcgccgtttggccttatcgcgatcgctgtcggctacgtcgctcgcgccttgttgctgtatccgctatccgccggagcttcgatgcggatcctgtcgctcggtatcaggccctatgccgcggcgctgatgcccgcacttgcgggctctgcggtgatggcatgcgcggtggctggtgcctccgttgcgatgccggccacgtcgccatggctgcgtctcgccgcgctcgtgctgctcggttcttcggtatatcttgtcgttgttgtcgcgatcgcccggccggccgtggtgcggatatgccaggaaatcctgagccgagtgcggcgatcgtcgaaaatctag

SEQ ID NO: 1756 - DNA, 834 bp, BradyrhizobiumColbertium
atgaattttcggaccaatctacgacggttgatgaacgaggtcggttgcgactttattcatcagctgccgtatccgcacgtggacttgttcttctggcgtcctgacgatggaacgataaatttcggcgactatctttcggtcgtcgtcgttgaccatctcttgcggcatttcggctatacgctcgccgacgaggtgccgcggcaaacgcgcttgttcgcgatcggctccgtgctccattacgcgcgaaatgacgatgtgatctggggcagcggcgtgaacggacgccccggccaggatgacctcaatcgccgcgtgcagaacctggacgtgcgagcggtgcgcggccctcgtacatgggagattttgcggcgccggggcatcgcggtacccgaagtgttcggggaccctgcgttgctgctccctcagctgtttccgaatcgctttcgccccaccgccaagaagccgtgggtgtttgtcccgaatttgcacgatttgagtctcatcgaccgtggcgccgatacggtggtctcaccgctgggatcatggaaccgacgaattgacgccattctcgaagcggagctggttctggcaagctcgctccacggcatcattgtcgccgaggcattcgggataccggctcgctacgtgcgcctgagcagcggagaatccgagttcaagtatcgtgactattacgagggcaccggccggtttgccgtcgagtttgcctcgagcattgacgaaggtcgcgagatgggtggggctgcgcgcctcaacttcgatcatcgtgccttgatgagtgcattcccgatcgacctctggagcggaaacagctga

SEQ ID NO: 1757 - DNA, 1116 bp, BradyrhizobiumColbertium
atggccaagcgcctccgcgtcgcgatctacgcaccgcattttgcggaatattcctaccgtctcgcgtcgggattggctcgccattgcgacgtccggctggtgctcaaccgcaaggacgccaatcagcaatgggagctggccgatatcgccgtgacagctccgttcgaaacgagagttcgcgacctgagcctgcgccgcggtggcgcgatcggcatcccggcctcattcctcgacataatttcgtttcgtcccgacgtgattcattgtcacgaagttccggagatctacacgtccgggctgatccagcttcttcgtccgctcggcattccgctggtgttgaccgttcacgatgcgatcccgcattcggaaggcggctccggtacgtcgccgcgtgaagatgcatggcgcgggcgcatgcgcgcagccgcgtcggtcgtcaccacgcatggcaagagctgcatcgccgattttcgccgtgcctcgcctgacttcaaaggggaagcgatctccagcatgcacggcgtgctcatggttccaccggccgggggcgcggtcaccgcgccggaggccgcgcgcatcctgttttttggacggatgtgggcctacaagggcctcgacgtcttcatcgatgcgatcgacatgttggcccggcgcggtgtggcccatgaagcgatcgttgccggccgcggccccgagatgacacggctcggagcgcgcatggaggcgatgccgaccgtcaagaccatcaacgcctatattgcgcctgccgagaccggacgactgtttcagtccgcaaccgtggtcgccctgccctataaggatgcaacgcagagcggcgtgcttgcatccgcctatgggaattcccgccccgtggtcgccagtgccactggcggcattcccgacgtcgtgaccgataacgtcaacgggctgctggtcccgcccggcgatgccactgcgctggccgatgcgctcgagcgcgtgctgacgtcgaagcctctcgccgcaacgttgaccgagggcgcatggcagaccgccgtcggcatcctcaactgggatcgcatcgctgaaggactgctggggtcctatcacaagctcgccggtcgcaccgtgagctga

SEQ ID NO: 1758 - DNA, 1089 bp, BradyrhizobiumColbertium
gtgatcaaggcaccccaccagccgggcgccgcgcatgatggatcgttcgttccgtcggtccagggccttcgcgccatcgccgcgctgagcgtgctgatggaccatttctacgacatgccgaagggagggatgtacgacatcccggatcccggcttcctgccgccgctctggccctggctgcaatcggtgatcaatgtcggcgggcacggcgtcgagctgttcttcatgatcagcggattcctgatcccggcaagcctggtgcggcacgggtcgctgtcacggttcttcttcgaccgcgtgctgcgcatcatgccggtgttcgtcgtgctgcatcttgcgctgttcgcgatcggtccgatcgtggcctacaaattcttccgcgggatcgatctcaccagctatctcgggatttttgcggccaatctgttcttcgtgcaggacgcgctcggcctgcccatcgcccagcagaacgcctggacattgacctatgagtgggcgttctacatctggtttgcgctgacgttctcggtgtggcgcaccggtggcagattgctggcggcgcccctgatcctgcttggcatcgcctgcctgatgcactggccgatcaccgccttcttctgcatcggcatgctgttcagtgccacgggattccgcatctcgattccgggacgcatcggcttgctcgcgggcattgcttgcggagcggcgctgtatgcgagcctggtgctgtttcaccccttcgtcgggctcattcccggatttctgctgttcggcatggtgctcgctccggactcgggcctcggcagggctctgagcctaccggcgctgcaatatgtcggcaagatcagctacagcctctatctcgttcaccccttcgtgctgtttcccctgcaggtgatcggcttgaagctggtcgccgccggcgtcgaccgctggctgctgtggaccgccttcatcgggcttgggctggtgatgtcgctggttgcaagcgcgatcagctatgagctaatcgaggtcaggctaaggcgactgctggacggcgcgatcagcagcatgttctcccggccgcagatcgagcaatcggtttga

SEQ ID NO: 1759 - DNA, 1110 bp, BradyrhizobiumColbertium
atgatgcacaaaaggctcgcattcatcgacacgctgcgcggcattgccgtgttgtcggtcgtggtccagcacgtattcgaggtgatcgtcgaaaagcacccgacgggcgcatattactggccgatccatgatctgttcggctactacatgaattttggccggttcggcgtcgtgttgttcttcttcgtcagcggattcgtcattccgttcagctttccggacagcgccacgcccgtgcgcgactttacgatcagccgcttctttcggttgtatccggcctactggacctcgctcgtggtcgggctcgtggcgatgtaccttcttgattcgaaggtctatccgctggggcaggtcgtcgcgaacctgacgatgttccagaccttcgtgaacgtcccgaacctcttggtattctactggacgctggcgatcgagctcttgttctacgtcggatgcaccattctctttgccatggggctgctgaaccggcgcttcacggcggtgagcatcgtcgttgcggcggcgctggtcggaaccgcggccgcactcttcgtcgagaacaggacggtctcctcggtgatggaggtcgggctgaacctgtcggcgatgttcctgggcaagatcatccgcgacaccgtcatcggcggaaagctgcggtggagccatgtgacgatctgcactctgatgtatgcgatcttcgccatcaccctgtcggaccgcaggttcggaggcgtgtatcatgagaatttcttctacagctattcgatcggatcggcctatgtctgcgcggcgctggtcttcatcggatttgccgtgttcggcgaacgaatggcctggcgccccatggctttcgtcggagtcatcagctactcggtctacctgatgtcgccgttcgtgatgggcttcatcgatcgcctcgtctggttcggcgacggacctctcggctggtcgatcttcctggccgtgaccctggtgttgtcgatcctcgtcagctggatgacattcgccttcatcgagaagcccagcatttccttcgggcagaggttccgctcggcgcgaagaaggcctgtcgtccccgaaccggccctcagcatccagggtgccgcggagtga

SEQ ID NO: 1760 - DNA, 1338 bp, BradyrhizobiumColbertium
atgagcaccttcgcgctgcagccccgcaggatgatgctgatcagcctcaatatcgaggcgatcgcgctcgcggcctatctggtccgggacgccttcggtggcgtgatgcggtattacacaagcatcatgcatttggacgcgctgtggttcgcgccggatggcattgcgcttctgtgcctggttcagttcatcgtgcattgtatcttgcgcaatcgcagcatcatggctgcagttgtactggtgcagatcatgctgtcgctagtgctcggctatttcatgctgggcacgacgaatgcggcgatgtcgtcgttcaagatgatgctcccggtgttcgtcggattctgtttctgcgacaccagcctgggctcctacaagaagctgcggtcggtcattgccgtgacgttctatctctcgctgatcggcgtgctgctgacgaaattctacctgatgccctgggtcggctacaaatatgagtccttcggcgccgttcgtgaggcgggccgcctatggtgggcctatggcggcgacgatcagcgtctcactggctttgcggcagaaagcacaatggccgccttcttcatactcgtgtccttcgcaattacgtcgatccgtaagagtacgacttggtgcatcgtgttcggttccatcgcgatctatgtgactcgcctgaccacgagcaagacgaccatgatcgtcctcgtgctctacctggtcttgctggtgtgcgtgcggatgcttccggagagatcgcgcttcgccgcgatccggaccattgcactgtggtcgtttgccgcgatactcgtacccttcttcatgatcgtgctggcttccggtaccgccgcagtgccgcacacgaccctgttcagcatcgttgaccgcatcaacaacagctggcagctgccgttcgtctacctgagccagctcatgcccgttggtctcgtgaccggctgcggcgtgggctgcttcaactatccacagaagctgttctcgccgcttgcgcacttctgggttcccgtcgacaatttctatatcggcacgtacctgatgttcggcctcccgttcgtcgcattcatggtgatggtattccgcgcgacgttcgggacgaccgacgtctacaagctgacgctgatcttcgtcgtcaatatgttcacgatcacggtcctgaactacggcccggcgtccgggctgctgatcatcgcgttgagcttcagcgaggtgttctcacggcgcgcagcctccgcacgagcaggcgacgccgtgccaatcgtcatgcggccgccgatgccgtcattggaaggcttccgcccggatatgccggcggcgagcggaggcaggtga

SEQ ID NO: 1761 - DNA, 1212 bp, BradyrhizobiumColbertium
gtgacggagttggttcatcgtgagaaggcgcacgtcgtgccgctcgacagtattcgggggatcgcagcgacttcggtggtgatccaccatctgttgctgatgccgacctttcttgcggcatttccgcataacgcctggatcaattgctccttcttcaggagtgcatggctgcttgtcgatctgttctttgttctcagcggaatggtgatggcgctcagttacgtcgagaacgacttttcgcgtttctcgctgcgcgagttcatgatacggcgcctggcgcgagtttacccactgcatatcgtcatgctgctggctaacctcgtctttcgcctgctgcgcattggcctggtcatggggggtgtggtggtggccgcgcctgcggcgttcgaagtgaacaatgcctattcgttcggcctcaacgtcgtgcttctccactcgatggggttcatcgactatctgagctggaatgcgccgagctggagcatcagcgtcgagttctacacttacctggtgtttggtctgatcgttctctttgccctgcgcatgcgctcgctgtcgtggttttatgtcctctccgggctgctcgcggtcggaagtcttgtctccatcatcttcgtgctcgaaaagaaaagcatcgagcttcagacggatttcggtcttctgcgctgcttcgttggctttttcctgggcgtgttgatggtgaggatcgtcgattgcctgccggccaggccgcaccctgccgtgcagggcgcgttgcaattcgtcgccatgatcgcgagcttagtcctggtatcattggcggagaccaatcctgcggcgactttcctcgcgccagtgatgttcgcggtcttcctcggcagcctgctggcctttccggatgcgctgctggtgccgcgcatcctggtggccaaaccgttggtctggctgggacgccgttcgtactccatctatatggtgcacgcgctcgtggtgctgctggctgaatatttcgtgcggggcgtgggagcggggcgaatcgccgccctggattcgatctgggcaggcctgccggcgacgctgaatctcgtcgtttcactggccgccgtgctggcggtttcgcacctcacctatctctacgtcgaaattcccggcggcaggctcctgcgaaatgcattcggaagccccccggactttgcgccatcccccgcccgatcggcgcggctgagcaactga

SEQ ID NO: 1762 - DNA, 321 bp, BradyrhizobiumColbertium
gtgttgccgtccgtgcagacgttgatctccacgtcggcctcagccgaacggtcagccattggcggcgcgctgcgatttgccgaagcgcgctgcacgtcgacgaaacctgcggcggcacgcaagatcagggatttcgcgcagcggatcggagatctccacgtgcaagcgggctattccgcagcgggagaggacagctcgggcgtccaggcccaatcgcaaggcaagcgtctggcaccgccgccccgagccggagcccttctcgagggcgaatggaagaccaagctggccaacccattcaagcccgttccccttccgaattga

SEQ ID NO: 1763 - DNA, 2226 bp, BradyrhizobiumColbertium
ttgtcaaaggcagcaaagtttcagatgtaccagcctagagaacatttccagtcggggcaacgcttcggcatcgaattcggcggagcggtgctcagcttcgagcgcgtggctgacgtgctgcggcgccagtggccgatcattgcggcttgcgtcggagcttcgttggctctggtgatggtatacctggcttcggcgcaaccgatgtatacggcgaatgcccggatcatgatggatacgcgtcaggcgcaggtgctggacaaggagagcaacaccagcagcgctttgatagataccggctatgtcgacagccaagtcgaaatcatcaactcggatgacttgatcctgtccgtcgtccgtcgcctgaaactgaccgaggacccggagttcaatggctccaatcctggcctcctctccctcattctcggcaaagtcatgtcgccgtttcgctcggacgagccggcgtcccaggagcgaatcgaacatgccgtggtgcagcaggtgcagaaaaacctcaggacggagcgcgtcctgacaacctatgtcctgtccctgagctatcgcgcgcgaaccccggacacggctgccaagatcgccaacgccatcgccaatgcgtacttggtcggcgcgctggaagcgaaatatcagtccaccaagcgggcgaccgagtggctccagcagcgcagcttggaactgagcgagcaggcaacagccagcgaccgtgccgtgcagaccttcaaagccgagaataacatcgtcggaaccagccgcggcctgatgtcggagcaacaattgtcggacctgaacagtcagctggttcaggcgcgggctgcgactgcggaagccaaggcgcgtcttgaccggatcgaggcaatctccgatcaggatctcacgcagccgacagtaacggacgccctcaacaattccgtcatcacccgcctgcgcgcgcagtttctcgacctccaggcccagtacgccgattggtccaggcgctatggcaagacccaccttgcgacagtcaatttggccaacaagatggaggagctgcgcaagaacatcgccgacgagctgcgtcggatcggagacgcctatcgcagcgactacgagatcgcaaagagccgagaggcatcgctcgacaagagcgtaaaggaactcgttgcccaggcaggccacactggccaggcggaggtcaagctgcgcgatctcgaaagtgccgccgatacttatcgtaatctctacaacaatttcctcgaaaagctgcagagcgccacccagaatcagagcttcccgctcagcgaggcgcgtctgatcagcaccgccaccaaaccggaccgcaagagctcgccgcgcaccgtcctcgcgctggtgggcggcctcgtcggcggtctctgtctcggtttaggcgtcgcatttgcgcgcgagctgctgagcgacgtgctgaggacccccggagaagtcgaagacgagctcggcgtgaagtgcctcggcgtgctgcccgatattcgctcgccaacgaaggccagcttatccgatctgtcccgctacgtcgtagatcatccattctcgcggtttgccgagacgttgcgcaacatcaaggtgtcgatcgacgtcgcgcgcctgacccgcgagatcaaggtgatcggcatcgtctcttcccttcccaaggaaggaaaaacgacggtcgcagccaatttcgcacaattggtcgccctcactgggcaccgcacggttctgatcgacggcgatctgcacacgcgctcgctgacccgagagctcgcgcccgatgccaaaagcggacttgtggaggcactcaacgaccccgcgagccttggctatcacgtccaacggagcaaggagacgggtctggatttccttccctccgtcgtggcttctcgcatggtgaattcggccgatgtcatcggatcgaaggcgatggccgagctgctcaagatgttgagagagcactatgaatatatcgtgatcgacctggccccggtgatgccggtagcggactcgaaggctgtcagcctgctgatcgatgccatggtctacgtcatcgaatggggccagacgacacgaagcgctcttcaggagtcggtttccgggtcggaagtcctgcaaaagaagctgctcggcgccgtgctcaaccgcgccaacccaaagatgctcaagcgtatcgaggcctataagggtaagcaccacaacagctattacgtcgagcacgcctag

SEQ ID NO: 1764 - DNA, 288 bp, BradyrhizobiumColbertium
atgctgatcgtcctcacgattctaattatttgggttctgctcaatattcttttcgtggtgatcgtggttcctccacgcaagccgcttcggcagcctgtggcgacgacgctctcgccggcgcccatcgacccgagccggcgcgaaatcgaccaggacgagcccttctcgatccgccacgtcatcgtctccgtcgccatgggagcgttcttcgtgctcgtaccgccgctgctcgccctgcgcgatgcgatcatgcggctcttcggcaggccgccgcggaatggaacctga

SEQ ID NO: 1765 - DNA, 1431 bp, BradyrhizobiumColbertium
atggctgttgcaacttatggttctgaaagtgctcatgcgctgtcatccgcgcgcggcagcgctcttcagaggccctttcagatcgtcgtcatcgccgccgactttctgttgatcctgttaagttatgtggcgggggcttcgctgtatggtgtggtcgtcggttcgccttccgacagcgcgtcggcgggagcggggttgtttgtcggcgtggtgttcgtcgggatcgcctatttccgggacgtctattccacgtaccgtctgctcaacgtcgtatggcagcttcgaatggcggtgttcatttggctgacatcactcacgatccttgccgttgccgccttcctgctgaaatcgacggacaatctatcgcgcggcaccgtcatcgtcttcgccgtgatcggcgggctcggcttgatcagcctgcgcttcgcctggcaggccgtgttcggtaccacttttgcgagaagccggctggtcgatcgcaaggtgatcctgctcagtctgaagccgctcgacttcacctccagccgcttcaaggatttgcggaggaatggcttcgacgtcatgcgccatttcgtgctcggagcagaccgggaggatggccagtgggaacgacagattcgcgacgtcatccgtcagtcgcgatcggctgatgtcgacgaatatctgctcgcgatcgactggaacgagttgccgatgctgcgtaagctgggaccctatttgcgcgccgtcccgcagcccattcgcctgctgccagacgactccgttgccgatctcgtgacccgtccctttctgccggtcagcggaaccgtagcggtcgagatccagcggccgccgctcaccattctcgagcggttgcagaagcgctgtctcgatgtcggcgtcgctctgttcgcgctcgtgatgctgacgccgcttctgctgactgtggccgtgctgatcaagctggattccccggggaccgtcatattccggcagtcgcgtcgtggcttcaacggcaggccgttcgagatctggaaatttcggacgatgaccgtcagcgagaacggcgagacggtgacgcaggcgaccaagagggatgcccgggtcacaaagatcgggcgtttccttcgcatgacgagcatcgacgagctgccgcagctctggaacgtgctgcgtggagacatgtcactggttggaccacgcccacacgcgctcgcccatgacaattactatgacgagctcatcagcaagtatgtctaccgccatcacatgaagccgggtctgacaggctgggcgcaggtaaacggattcaggggcgaaacgccgacgatcgatctgatggagaagcgggtcgagtacgacgtctggtacgtcagcaactggagcgtctggctcgatctcaagatcatggcccgcacagcgtctgcggtgatgttccaggaagcgtactag

SEQ ID NO: 1766 - DNA, 681 bp, BradyrhizobiumColbertium
gtgcgcatctatgccatctcggatatccacggctgcgcacatttgctccagcccatgctgcgggtgatcgacgccgacgtcgagcgcagccggccgcgccatgctgtcgaagtcttcatgggcgactacatcgatcgcggcccggatacgcgctccaccctcgacatcctggtcgagcggagccgccggggaaacgcggttttcctcaagggcaatcacgaggcctttctggtgagggtgttcgaagacccttcactgttcgaggactggattgctttcggcgggacccagacattgatgtcctacgggcttgccccgccggatctcaagcgcgacgagccggcatcgatcctccgcgacctcattcgcgcaatgccgaccgagcatctggaattcctggacaatctgaggctgagcttcagttgcggagacttcttcttcgtccacgccggcgttcgccccggcgttccattggccgagcaaacggagcgcgatctgctctggattcgcgaggaattcctgcaaagcgaggagcagttcggcaagtatattgtccacggtcatacgccggtccgcagtgcggagttcctggccaaccgcgtcaacatcgacaccggcgcctatgcgaccggcaacctcaccctgatgagcatccagggaagccgcatgctcgccgtgtga

SEQ ID NO: 1767 - DNA, 954 bp, BradyrhizobiumColbertium
gtggcaaacgcacggtttgaactgaaaggcaagagcgtctatgtggccggccatcgcggtatggtcggcagcgctctcgtgcgccgactccatcaggaagatgcgcggctcgtcacggttgaccggcacgagctcgacctccgcgaccaagccgccgtgttcgactggttcgcgaaaacacggccgcaggtcgtcttcctcgccgccgccaaggtcggcggcatagtcgccaacaatacgctacgcgccgagtttatctacgacaacatcgcgatcgcggcgaacgtgattcatgccgcgcacgttaacggcgccgagaagctgatgttcttgggctcctcttgcatctatccgaagctggcgcttcagcctctgcgcgaggactcgatgctgaccggtgctctcgagccgaccaacgaaccatacgcgatcgccaaaatcgccggtatcaagatggtcgaggcctatcgcagccaatatggatgtgacttcattagcgtgatgccgaccaatctctatggtcccggcgacaattaccatcccgagtacagtcatgtggttgcggccctgatccgtcgctttcatgaggcaaagctgacgggcgccgggagcgtccttgtctggggtacagggaggccgcggcgcgaattcctctatgtcgatgatctggcggatgcctgcatacatctgatgaagatctattcgagtgcggaactgatcaatatcggcacaggcgaggagatcacgattgccgaattcgcgcgtgtcgtcgcagacgttgtaggttatgatggcgagatctctttcgacacctcgcgtcccgacggcacgccgcgcaagctgctcgacgttagccgcctcgctaagctcggctggcgggcccaaaccgcgctgaaggatggagtacgattggcttattcagccttcttgtccagccagcaggacccgaagtag

SEQ ID NO: 1768 - DNA, 1071 bp, BradyrhizobiumColbertium
atggctgagcgtatcgcgctcattacgggggttacggggcaggacggcgcctatctcgtcgaacatctgctgtcgctcggctataccgtgcatggcatcaagcggcgctcgtcttcgttcaataccgctcgcgtcgatcatctgtaccaggacccgcatgttgggaacgtcccgtttctgatgcactatggcgacatgacggactcgaccaatttgatccgcctggtgcagcagatccgcccgaccgagatctacaatctggccgcccagagtcacgtcgccgtcagtttcgagagtccggaatacaccgctaacgctgatgctgtcggcgtgctgcggctactcgaggcgatccgcatcctcggcatggagaaggagacgcggttctaccaggcctcgacctccgagctctacggcctcgtgcaagaaatcccgcagaaggagacgacgccgttctatcctcgctcgccatacggcgtcgcaaagctctacggctattggatcacggttaattaccgtgaagcctatgggatgttcgcgtctaatggcatcttgttcaatcatgagagcccggtacgcggcgagacgttcgtgacccgcaagatcacccgcggcgtcgcccgcatcgaggtcggtctcgaggacacgctctatcttggtaacctgtccgccaaacgcgactggggtcatgcgcgcgactatgtcgagggcatgcacatgatactccaggccgacaaggccgacgacttcgtgctcgcaaccggcgagatgcgctccgtgcgggagatggtggagctctcgttcgcgcagatcgagcgccgtatcgaatggcgcggcgaggggatcgatgagaccggcgttgacgtgaagagcggcaaaatcgtggtacggatcgatcccacatatttccggccgaccgaggtcgatctcctcgtcggagacgccagcaaggcgcgcgagaagctcggttggaagccgaagcggacgttcgaccaactggtcgaggagatggtggcgagcgacctggcagaggcaaagcgggacgcggcccgtggcaaacgcacggtttga

SEQ ID NO: 1769 - DNA, 420 bp, BradyrhizobiumColbertium
ttgctcgtcaacggccaggacgatcggggtacggctctgaacaaccacaccagtcagtacggcacgatgcacaatttcggccaggtgaacgccggtgatatcctggtcttctacatcgacgtcaagacgacggggcatacctactactctgacatttcggagaatagtgatggcgtgaaccacgtctactcgacagcattcgatggcgacgggaagattccgacgggaacctatgttggcttcgaggatctcagcctgcatcagaccgggtggacggatcacaactacaccgacgagcagttcgttttcacggtcgcggccgtgcctgaaccttcgacttgggcaatgatgatcctcgggttcgccggcgttggtctccttgcatatcgtcgccgcaatttgctgccgaccgccgcctag

SEQ ID NO: 1770 - DNA, 129 bp, BradyrhizobiumColbertium
atgctgacgaggtatttcgtatggctcgccgcgctggaattcttgcgccgccgacctcaagaaggagaaagaggaagcacgccgaatagcaggcatctcgaacaccgcgagatgcagacctcgatctaa

SEQ ID NO: 1771 - DNA, 135 bp, BradyrhizobiumColbertium
atgggaccttccctcgatttcgtcgaggtcgctcgcaatcttctcaagagcctcctgaaggcgtcgcagatgagaaaggtgcatcgcggcatgacccatcagatctctccccatagtaggcccgacgaggattga

SEQ ID NO: 1772 - DNA, 372 bp, BradyrhizobiumColbertium
gtgacgaaattgaccattaccgagctcgtcgccgtacagcctcccgatcttctcgcggtcttccttgatctcaatggctacctgccagtcggcgtccccatgctcaagcgcgtattggcgctccccggacaaacggtctgcagaaacgggttggcgatcgccgtcgatggcatcgacgtcggagacgcacgcgaccgcgacgggcacggccgcccgcttccggcctggcacggatgccgcgtcattgctgatggcgatgtctttgtcatgaactggcagtcgcaggactcgctcgacggtcgctattttgggccactccctgcatccgccgtcatcggcaaagcggtacctgtgtggactgacgaggagtga

SEQ ID NO: 1773 - DNA, 1731 bp, BradyrhizobiumColbertium
atgagcggcaacgacgattttcgcgttcgcccaggcaaaatccgatcgacacgcgggccgcggacaaagccgtttctgacgcaagcccttcaggcggcgcagaaggccggcggtctctcgcgcgccgccggcggccacggcggcagtcggttcgggcgagggcgctcggcaagccttgccgcgacacggatgctgcaagctcggggccgcggcgcgatggtcaaggcgcgcgtcgttcgccagatgcgttcacccggagcgctccgcgcccatatcggatatctcaagcgcgacggcgtcactcgtgacggttcgcccggaaagttgttcgacgccgccggcgatgaagcggacggccggtcctttgccgagcgctgcgaaggcgaccggcatcatttccggttcatcgtctcgccggacgatgccggcgagctatccagcttgcgaaccttcacgcgggaattgatggaccaggcctcgcgcgatctcggcacgcggcttgattgggttgccgttgaccactggaataccgagcatccgcacatccatatccttgtgcgcggccgtgccgacgatggcgccgaccttgtgatcagccgcgactatatcggatcaggtctgcgcgcccgggccgctgacctcgtgacccgcgagcttgggccgcgatcggagctggagattcgacgcggtctcgaggcggaagtgagcgcggaacgctggaccaagctcgatcgggtgcttgcccgggaagcgggacggaccgaaggggtggttgatcttcgtccccaacgcgatgcagcgggcgatcctttgcgagaggtccggattggccggatgcggaccctcgagcggctgggtttcgccgaacccgccggccccgcgcgctgggttttggcgccggacaccgaacagcggttgcgtgcgctcggagagcgcggcgatatcatcaagcggctgcacaagacaatcgccaaggatggcgcagctcgcgcgccttcatcgtgggcgctggagggtgagtctcatggcgagccgatcgtcggccgcctcatggcccgcggcctggatgacgaactaagaggcacggcctttgccattgttgacggggttgatgggcgcgtgcaccacctcaagcttccggctatcgacatggccggcgacggtccaatcggcggaatcgtggagttacgccgctttgaggacgcaagcggccggcagcgcatcgcacttgcggttcgctcggatcttggcctcgatcagcaggtcgcggccgaaggcgcgacctggctcgaccgacgcctggttgcccgagaccctctcgagctttcgcgggcaggtttcggcgccgaggtccgtaccgcactggatcggcggatcgatcatctggcggggcaaggacttgcccgacgagacggagacaaggtcacgatcggacgcaacctggtcggcaccctgcgcgaccgggagctcgaagcggtcggccgcaaactcgcctcggaaacaggtcttgcgcattttcctgctcaaacgggggagcaagtctcaggggtttatcgccagcggctgtcacttgcctcgggccgcttcgccatgatcgacaacggtctgggctttcagctcgtaccctggatacccacgctggaacgcgaactcggccggcaggtgaacggcattgccgggacaggcggcgttgactggagttttggccgcaagcgcgacctctcgctctga

SEQ ID NO: 1774 - DNA, 1977 bp, BradyrhizobiumColbertium
atgtccgcaacgaagattctttgggggcagcttctcttcgcgtcgctgctcgtgctcgcctttctctggacggccaccgagtggaccgcctggcggcttggcttccagccgcagctcgggccggcctggttcatgatctggcactggccgatttatcaaccactcgccttcttcatctggtggttcaaattcgatgcctacgcgccgaccatcttccttcagggcggctgtattgcggcaagcggcgggatcgccgccatggccgtcgccatcatcctctcagtctggcgcgccaaagaagcccagcatgtgacgacctatggatcggcgcgctgggccgatacaaaggaggtacgacgtgctgggcttcttgggccggatggcgtggtgctcggtcgctttggtgccatctatctgcgacatgatggtccggaacatgtgctgtgttttgcgccgacgagatcgggcaaaggcgtcggtctggtcatcccgacgctgctgacatggccttattccactgtagtccacgacatcaagggcgagaattttcagttgacgtcgggttggcgtgcacggtttggatcggtgctgttgttcgacccaaccaaccctttgagcgccgcctacaatccgttgctcgaaatccgcaaaggcgattacgaggtccgtgacgcgcaaaacatcgccgacattctcgtcgatcccgaaggcgcgcttgagcgccgcaatcattgggaaaagaccagccattctctgttggtcggcgcgatcctccatgttctctacgcggaagccgacaagacgctcgccggcgtcgccaacttcctgtcggatccttcacgagccatcgagacgactctgaatgcgatgttggcgacgccgcacctcggcgaacgcgttcatcccgtggtggcctcagcggcccgcgaactgctcaacaagagtgaaaacgaacgttcaggcgtgctatcgacgacgatgagcttcctggggctctaccgcgaccccgtggttgccaaggtgacggggcaaagcgattggcgcatccgtgatctcgtcgatggagatcaacccgtctctctgtaccttgtggtcccgccgtctgacatcgcccgcaccaaacctctgatgcgcctcgtcctcaatcagatcggcaggcggttgacggagacgttggataccgttcgacagcggcaaaagcttctgttgatgcttgatgagttcgcggccctcggccgtctcgatttcttcgagagccagcttgccttcatggcgggctatgggatccggagtttcctgatcacgcaaagcttgaaccaattggagcgcgcctacggccctaaccacgcgatcctcgacaactgccatatccgtgtcgcgttctcgaccaatgacgagcggaccgccaagcgcgtatccgatgctctgggaacggcgaccgagatgcgcgccatgaagaactatgccggccatcgcctttcgccatggcttggccatctgatggtcagccgccaggaaacgtcgcgtccgctgttgacgccaggtgaggtcatgcagctctcgccgaacgaagcggtcgtcatgatttccggggttcatccggtacgcgcccgcaaggtccggtactatgaagatccgcagttccagtgtcgtgtattgaagccatcacgcgctgtcccggtcgagctggtcatgcgaccggacgaatggtcgggacacgcgcccattcctccctcggccaaattgcttgcgtcgctcaccaagaaaccgcgtgatcacaatggtggcattcgtcgcgagccggaaatgcaggaacacgaggaagtcgttctcaagtcgccttcggttgatagcgaattcgattcggggacggacgagagcgacgccgaagccgtgcaagcctcagctttgaaccgatctatgcagggtctcgcacgcgctgttagtctcgatccggacgacaagatgggtctatga

SEQ ID NO: 1775 - DNA, 435 bp, BradyrhizobiumColbertium
atgaaaaaggctcagctcagtatctacctcgatcaggagatattccgcagtctggaggcttacgccgaacgccagggtaagccgaagtcgttggtcgccgaagccgcgatcggatcgtttctgtctcccgatgattccgatcggcgggaggctgcgatcgccaaacgattggatcgcatcacgcgcgtgctcgagcggctcgaactcaaccacggtgtcacgctcgagacaatagctctgttcatccgattttggctgacgtcaaccccggcccttccggagcaatcgagcccggccgcgcgcgcgaagggcgcagaacgctacgatcgatttgttgaagcgctcggccgacgtttgtcgagtggatcgacggtcctcaaggaagtcagcgtcgagtttcccgaagctggaaatgccgagcaagccaagagctag

SEQ ID NO: 1776 - DNA, 1998 bp, BradyrhizobiumColbertium
gtggcgcgtcgcaaggtgacggtccggttgagtgaacgtgtctccggtcggctcgacgtcgctagcgaccgaccgggcgtcggcaagagcatgctcgttgaggcggctctcgagcaattcatggatcccgccccgtcggtcgaagctgtgctccgcgagcaactcgatcacgtgcacgccagattcgaccatcttgaacgtgatatgcgcatgatcgccgaaaccgtcgcgctgcacgcacgctatcacctgaccgttgtcccgccactgccggggtcgcgacaacgcgaggcggtagtcctcggcgatgcacgcttcaaaatcctggccgagcaggtcgatcgacgcgttcgtcagtgccggcctctcatgcaggagacgatcgaccgcctgaactctgccgaacacgaacagtcgggaccgacagcaggagagggcccgacggacagctcggagccaggccgcgacaatgcgagttctgtttcgaaaggcgtgaatttcgagcagaggctggccgcaccagccgggaccgcgaacgacattccaaactttctccggcatccaaaggcggctaccggccaggccaaacctgcctcccgcgcgccgcaaaacctaagcgtggcagaaagctcaaatccagcatcctcgaacgagaagtcaggggctgcgcaggagcagccatcaacatggcggctgatcctctccgtctttcttccttttgccgcgggctattatctctccttcttgtttcgcaccatcaacgcgtcgatttcgccggtgctggcatccgattttgggctcggcgcggccgagacggggttgctggcgtcggtttattttcttgtctttgcgggcgcccagattccgatcggcgtgctcttggaccgttacggtccaaggcgagtgcaaagcgtattgcttgtacttgcagttggcgggacgtcgctgttcggcaatgccgatagttttgctgagcttcttgtcggccgcgccctgatagggcttggtgtcgctgcttccttgatggccgggctcaaggcgatcgtcatgtggtttccgagagaccgagtagcactcgtcaacggcggcatgatcatgttgggctcgctcggtgccgtgaccgcaacggcgccgacggattggttgctgacttggattggctggcgtagcctgttcgaagttctgactatgctaacgctcgcggtcgccgcgttgatctatcttgtaacgccaagagcggagggcagctctaaacggtccacctcttccgagaagccactttcattgggctccatcttttcggatccgcgctttttgaggattgcccctctctcggcaacctgtatcggatcatcctgggcgatgcattcgttgtgggcggcatcctggctctctgatgtcgaagggttcgaccggaaaatcgtgataaatcagctgttcgcgatggctatcgggatcagcgtgggcgcattgctcctgggggcgattgcggaccgcttgcgcaagcgtggcattgcgactgaggttctgttggtggtcgttggcgtgctgtttatgctggccgaactcgccatcgtcctgcggctgccgctgccgtccgtattgccatggtctattgtgtcggtggtaggagctggcaccgtactgagttacgcgatcatcgcggattactttcccgtcgaaatcgccgcgcgtgccaacggcgctctcaacctgctgcacttcggctgcgcgttcgccgtccaatacgggatcgggctcatcgtggcgtcatgggtgcccgaggctggccattatccgctcgtcgcctatcaagctgcattcggtctcgccctcttgctacaggcggttgcgttagtgtggtttgccgtgccgtggcttgggcaattcttcagacttctccgctctccgcctgcgaggccagataacgaagtcacgttcgtgcagccagcagctgagggaatgatccttgagggctcgcaaggggtcgaatggtaa

SEQ ID NO: 1777 - DNA, 297 bp, BradyrhizobiumColbertium
atgttctctttcaagaagtcgtttcgtgttgccgccatagtcacctcagacaagctgcaggcctgcaaccagtcggcccagttctgtccttaccaaatttatcggattaacaagcgagcgctcgggcgcacccgcgaatacgaggccggcgatcttgtgctcgtccgtgatcagggcgcttccgctatccccgctttcgctaaacctccctgtgttgtcgaccgttaccttgacgatgatctgatcgtcaaatgtcgcccgccctccagcgaaatcgacgtccacgacgccatttag

SEQ ID NO: 1778 - DNA, 555 bp, BradyrhizobiumColbertium
atgtcgacgacgatgacaccagagcagcgcgaagatgccgaaatgaatgcacgcgaattcttcgataagctcgcgccgtcagataagcttcccgacccgcgcgatcctgcttcaattgaacaatatacccagcggttgggagaaatttcgcaaacgtcattctccgatgcggtttcgacccttgcttcgactgtcgacaaatcaacggctgaatcacttcaggctgccggggatcgacggaacctaggctcgtacgtcatcaaggcgtttcaaaagaagatttgcggaaatcctgaggtcaccgaagaggtaaaaaaagcgctggctgcagcagaaaaacagggcggagtccagatcaccacgccgacagcaacgggaattacgactggtgttgcgacgctcgtatcaatctcaatcctaacggctttcagcggtccggtcgctgtggtagtcgcccctttggcagccggcgtcgcgcttctcgtgatgcagtgcggccttgatggcttctgtgcctggtccgcaggtgaccggacggagcgcaggtcgggctga

SEQ ID NO: 1779 - DNA, 1686 bp, BradyrhizobiumColbertium
ttgctgatccgcggtctggccccgcagtttccgagcttggccgctgttttgataaaccattttcttttggacatcatggcatcaaaacgatcacgcaagagcaagaaggcgccgccacgcccaaagcgtcgggtcacggctgctgaaaaagcggcgcctagctccgaaaatgccggcaagacggctcgcgcgagccgccgatcgaaatctttcgccgcggcgctgtggtatgcgccgggtctcgatgctcacatcaagggaaaccgagctctaggcaaggcggcgcgcaccctcgccgaacgagtcgttctcacagtggcaccgaagaccgtatcgggcgaacttattcaatcttaccgcggaaggctgcacgagcgcgacatcgaggatttccggccgcgtgccgatgcggtcgagggagctgtcaggcgcctcaagcggctcggcttcgaggtcctgcgccgtggtcgttttggtatcacgattgccggccactgcgagcttgtttccgaagttctgggtgtacagctcattgtgcaggctcggccgcaaaggacgagcgtgcgctccacacagaattttgcagtcagctaccaagcgccgcaagcggtcgacctttacgtagccccgtccgactcgttgacggtgagctccgcagttagccctcatatcgatcatttcgttttcacaccgccgccgcaactctttgtcgagctcagcgacaccccgcctcactgcaactacttcaccctcgatggagctgcgatccgccggttgctcaacgtaccggaaggcgtatcgggcgagggtgtcaaggtggccatcgtcgacaccggatttttcaagcatccattctacacgtcgcacaatttcgactaccgcccgatggcgagcgcaacggcaccggatccagagaaggaccggatcggacacggcaccgccatctcattcaatgcgttgaccgtagccccgcgagcaacacttctcggcttcaagcagaccgaacctccacaagacgctctggaagccgcatccgacgcgggagctgatattatcagcgcctcgtggggatgggacaaggaacagtcattcccgattctcgaagccacgatccgcgcgctggtccgggaaggaaagatcgtcgtgtttgcgtctggaaacggtttgcaggcgtggcccggcagcatgcccgaagtgatttctgtcggcggcgttttctccgcccaggacggaacgcttgaagcgagcaattttgcaagcggatacctcagcagcctttatccgggccgccgtgttcccgatattgcgggcctttgtggtcagagaccggcaggaatctacatcacgatgccgtcggcacccggcagcatcctcgacaacaatctgtctggcccgtcttttcctgaccgcgacgagacggaagccgatgatggctggctttgctcgagcggcacgagcagtgcagctccacaggtggcgggactgatcgcgctgttgctcgaacaagcacggcgggaccgaattgtcctgacttccgagcgaatccgcgacgtgctgcaacagagcgccaagccggtcgagcgcggcagtagcgcgcagggcatccccgcagtcggccacccgaacatcgcggttggctatggactggtcgacgcgggtaatgcacttgagcggatcagaccttga

SEQ ID NO: 1780 - DNA, 819 bp, BradyrhizobiumColbertium
atgaatcgtgcgacatacgagttcgttcgctcgcaatgcttgttcagcatcgaaggacaaaagcgctatgcagccgcggtgaacgcaggcaagaagccaccgatccagtttccctccgacgcaatcgaggtgaaggcggcatggcttgatttcgagaagccggaagcgggcaagccaccgatcccggttgagaaacgcggcacttactataccgcggagtttaacgggaaaaagtttggtctcgtcgcgttgcacatcctgaccaaggacctgacgaactggttctgggcgactttccgccacaaggatgcacccaccgaagattttggcggccatgaccccgacaattacggcccgccgcaagaggtcgccggcaccgtttgggacaactatcgcctcggaggcacacaaatcgatttctccaggccgacgggcgagccgaccatcgtctcggaccactatgtggaattcggtttccagcgttcatcctgcatcccctgtcacgccaccgccagtatctcgcgagagattgcaggcccaccggccggacggccctttacgtcgatgcccaacggtcaagccaaagctgtctgctcgatcacgccaggtaccggcgatgatctcgattcatgcaaacaattgcttggcaaggacgctttcaagccggatggcacgcccctcgtcgagcgcggcgtgcctgatccgaattggttccagaaagatggcaagccgttctatctccagaccgacttcgtctggtcaattcccttccgcggcaaaagcgaggccgcgccgccgccgagccgatgcaatttttga

SEQ ID NO: 1781 - DNA, 417 bp, BradyrhizobiumColbertium
gtgattgccatgacgataggtttcacacggcttcaggaatatctcgacgctatcgcgcgaaaagccaatctcgaccctgcgaacagccgtcacggggtattctggcgcaccacctatcaggccttcgtaacaggcaatgttcccaataagcattgcaacggtgacgtcgtccccatcatcaaccccgcaaacaaagtcaattccgccttcaatcaaattctgaggggctcgtggtgtgctatgccgcagatgcccaagactggcccatttctaaccgacgacggctattttgttatcctggccgacgggagccgcgtcgatggcacgacaattctcgcagatattcaaggctggctagcggccggtgcgccggagaacggcgacgatcaggcaccgccgccagccccccaagtatag

SEQ ID NO: 1782 - DNA, 1440 bp, BradyrhizobiumColbertium
atgaatcggttcattgaaggggcggaccgagcgcagtcgacgctgttgccagaatgcctcgacgactgggtcgatgagagcaatcctgttcgcgcggtcgatgctttcgtcggagcgctcgatctggccgagctgggcttcacggacgtcgagcctgcggcaaccggccggcccggttatcaccccgcgccgctgctcaagctctacatctacggctacctcaaccgcatccagtcgagccggcggctggagcgcgaggcgaggcgcaatcttgaggtgatctggctgttgcagcggctttcgcccgacgacaagacgatcgccgactttcgccgcgacaacggccccgccatcaagaaggcgtgcgcgaagttcgtcgagctttgccggcagatgggcttgttgacgaaggcgagcgtcgccatcgacggctcgaagttcaaggcggtcaacacgcgtgacaagaacttcacgaagggcaaggtcgagcgccgtcgccagcaactggaggaaagcgtgtcgcgctatctcgcgcagctcgacaccgcagatctgcaggagccatctgaggctctcgctgcgaagacggcgcatctgaaagagaagctcaccaagctcgcgagcgagatgaagaagctcgaagcctacgaacaggcgatgctggcatcaccggaccaacagatctcgctgaccgatcccgacagccggtccatggccacgagtggccgtggctctggcgtcgtcggctacaatgtgcaagttgccgttgataccgagcatcacctcatcatcgcgcacgaagtgacgaatagcggctcggatcgggcacagctcgccaacatgggcaaacaggccaaggccgtgctcggcgtcgacaagctcgaggccgtggccgatcgcggctactacacaggcgaggagatcaaggcctgcaccgacgccgatatcgctgtgacactgccgaagccgaacacgacgggcatggaggcgaagggcaagttcggcaagcacgacttcgcatacctggccaagcaggacgtgtatcgctgcccggctgggcaggtgctggcgtattggctcacaacagtggatggcgaacgcaccattcgacgttacgccacgaaagcttgtggaagctgcccactaaaggcgcgctgcaccacggccaagaaccgcgtcatctcccgttgggagcatgagcaggtcatggaggatgcccagaggcggctcgacgccgatcctcaggcgatgcgtcgccgtcgcgagacagtggagcatccattcggaacactgaagatgcgcatgggcgcgacgcacttcctgacgaggcgcttgccgaaggtcgccaccgagatggcgctgcacgtgctcgcctacaatctcacgcgcgtgatgaacatcatgggcgtcggggcgctgatcgcggcgatgcaggcatga

SEQ ID NO: 1783 - DNA, 921 bp, BradyrhizobiumColbertium
atgttgcgcaccgcgttcggtccttcgattgcacgttttcttgaagatccggcgatcattgaggtgatgctcaacccggatggtcggttatggatcgaccggctgtcgagcggtttggcggacacaggtgaaatcgtggccgcggcggacggtgagcgcatcgtccgattggttgcccaccacgtgggagccgaggtccatgcagcaagtccacgtgtttctgcggagttacccgagacgggagagcgcttcgagggattgttgccgcccgtggtgacagcgccagcttttgcgatccgcaagcccgctgtcgccgtgttcacgctggacgactacgtcgccaaagggatcatgacgttcggccaggccggcgctttgaaggaagccgtagccgcgcgtcacaacattcttgttgccggtggtacatccagcggcaagacgacgctgaccaatgctttgctggccgaagttgccaagacctcggaccgggttgtcctcatcgaggacacgcgcgagcttcagtgcaaggcaccgaacctcgtggctttgcgcaccaaggacggcgtgatctctctgtcagatctggtccgatcgtcgctgcgcctgaggcccgatcgcatcccgattggagaggttcgcggtgcggaggctctcgacctgctcaaggcgtggggcacgggacatcccggtggcatcggcaccatccatgcgggcaccgcgcttggagcactacgtcggctagagcagctcatccaggaagccgtcgtcacggtcccgcgtgccctgatcgcggaaaccatcaacgtcatcgctgtcctttccggccgcggcgccgatcgccggttggccgagctcgccagcgtgaccgggctcggaccttcgggtgactacgctctcaccaaaataggggacaaaccatga

SEQ ID NO: 1784 - DNA, 228 bp, BradyrhizobiumColbertium
atgccctgggagcaaccgctcaaccagatcctgcaatcggtcgaaggcccagtggccaagatcatcgcggtcatcatcatcatcgtcaccggactgtcgctggcattcggcgacacgtcgggtggcttccgcaggctgatccagatcgtgttcgggctctcgatcgccttcgccgcgtcgagcttctttctgtcgttcttctcgttcggcggcggggtgttgatctga

SEQ ID NO: 1785 - DNA, 264 bp, BradyrhizobiumColbertium
atggattcgcggatcccaggcttcgaagcgcccgtccatcgcgcgctgaccgaaccgatcctgatgggcggtgcgccgcgctccatcgcgattctcaacggtacgctcgcagctgcgctgggcatcggtctgcgcctctggctcgcaggtctcctgctttggttcgtcggtcacatggccgctgtgtgggcggccaagcgcgaccctgacttcgtcgaggtcgttcgccgtcacctccgtatccccggtcatcttaactcgtga

SEQ ID NO: 1786 - DNA, 2442 bp, BradyrhizobiumColbertium
atgatgaacctcgctgaatatcgccgttcgaacacgcgtctcgctgactttctgccgtgggcggcactcgtcgatgaaggcatcgttctcaacaaggacgggtcgttccagcgcacggcgagatttcggggaccagatctcgatagcgccgtgccgtccgaacttgtggccgtcgctggtcgtctcaacaatgcgctgcgccgtctcgagtccggttgggcgatctttgtcgaggcgcagcgccattcggccggcagctatcctccggacacgtttcctgatgagacgtcggcgctcgtcgatgctgaacgaagagcccagttcgaagaagccggcacccactacgagtcgagttatttcctgacgtttctttatctgccgccggccgaagggaccgctaaagccgaacgcctgctctacgaaggcagcaatcggacggtcgatggcgatgcgcgcgagatcctccgcggatttgtcgaccggaccagccgcgtgctgcagctagtcgaaggctttatgccggaatgcgcgtggctcgacgacgaggagacgctcacttacctgcattcgacagtctccaccaagcgccatcgggtcagggtgccagaggtccccatgtatctcgatgcgctgcttgccgatcagccgctaaccggcggtctcgagcctatgctcggctcatcccatctgaggatgttgactgtcgtcggctttccgacagcgacgacgcccggaatcctcgatgaccttaaccggcttccgttcgcttaccgctggtcgacgcgcgccatcatgctcgacaagacggacgccacgaagctcctgacccgaatcaggcggcagtggttcgccaagcggaagtcagtggccgcgatcctgaaggaggtcatgaccaacgaggcttccgctctccttgataccgatgcgcacaacaaggctatggacgctgacgcggcgctccaggagttgggctcagacgagattggggaagccttcgttacaacgacgatcgcagtctgggatggtgacgccgccgctgccgacgaaaagcttcgtctcgtcgaaaaagtcatccagggacgcgacttcacctgcatgattgagacggtcaatgcggtcgaggcctggctcggcagtgttcccggccacgtctacgccaacgtccgccaaccgccgatctcgacgttgaacttggcacacatgatcccgttgtcggcggtgtgggccggcgaggcgagggaccatcatttcagggcgcctccattattcttggccaaaaccgaaggatcgactccgtttcgcttttcgctccatgtcggcgacgtagggcacacgctgatcgtcggccccacgggggcgggcaaatcggtgctgctggcgctgatggcgctgcagttccgccgctaccccgggtctcagatctttgcgttcgacttcggcggatcgatccgggcagccgcgatcgctatgggcggcgattggcatgaccttggtggcgcgctcgcgggcgagacctccgaattcgtctttctccagccgcttgccaatattgatgacgtcgccgagcgcggttgggcggcggactggatcagctcaatcctgacccgcgagcggatcgaagtcacgccggaagccaaggaacacatctggtcggcgttaagttcgctcgcttccgctcccgtcgaggagcgtaccctgaccggcctttcggtgctgcttcagtcgaacgtcctgaagcgagccctgcaaccctattgcattggaggaccctacgatcggctgcttgacgcggaaaacgagcgcttgggggcctcgtcagtccaggtcttcgaaaccgatggcttgatcggcactgcggtcgcgccggcggttctcgcttatctatttcaccggatcgaggcgcgcttcgacggccggccaactctcctcatcatcgacgagggttggctcgcgctggatgatgcagactttgccggacgcttgcgcgaatggctaaagacgctgcgcaagaagaatgcctcggtgatcttcgccacccaatcgctcgcggatatcgacggatcggcgatcgcgcctgccatcatcgagagctgcccgacacgggtcatgttgccgaatgaccgcgccatcgagccgcagatcatggcagtctaccggcgcttcggtctgaacgaccggcagatcgagatcctggcgcgagccaccccgaagcgggattattactgccagtcgcgacgcggcaatcggctgttcgagctcggccttggcgaagtcgcactcgccttcaccgctgcttcctccaaggccgatcaggcgttgattgcgcaagtcctcgtcgaacatggccatgagaacttcgcgccgggctggctgaaagcccgcgacatcgcctgggcgaccgatcttatcccgcagatcaacggaccggaggcgcccaaatga

SEQ ID NO: 1787 - DNA, 735 bp, BradyrhizobiumColbertium
atgaagcgcctccgtcttctggtcgccgccagcatcgtcgtgatcgcgatggtcgccggctctcgaactgtgtcggctcaactggtcgttttcgatcccaacaactatgcgcagaacgtgctcaccgccgcccgcgccctgcaacagatcaacaaccagatcgtctctctgcaaaatcaagcgcagatgctgatcaaccaggcaaggaatctcgcgaccttgccgttctcgtccttgctgcaactcgaacaatcgattctacgcacccagcagcttctcgctcaggcgcagcgcatcgcctacgatatccagcagatcgatcgcgcattctcgaccacttatgcgcccgcttcatccagcgtttcagaccaggcgttaatcgccaatgctcaatcccgttggcagaacgcgatgtcgggattccaggacgcgatgaggatgcaggccaccgtcgtcggcaacctcgatacccaccgcacccagatgtccgcccttgtcacctcgagccaaggcgcaacgggtgccctgcaggcgagccaagccggtaatcagcttttggcgttggcagcccagcaactcgccgatctcaccgccgtcgtcgccgcccatgggcgcgcgcagaacctggaatctgcgcagcgtgcggcagcccaggatcagggcagggagcagctgcgccgcttcctgacacaaggcgtcggttatcaacccacaaccgtgcagatgtttcactga

SEQ ID NO: 1788 - DNA, 363 bp, BradyrhizobiumColbertium
atgacaacgcagaaacccaatcgctttccctacatcgtggccttggcgctcgtcggcctcgcagtcgcggcctgtaccatcccgcttcgtggcggcgaggagcaggcgaagctgttggagcccaacagtccacctcccgaccccctggcggcaaagctcgctgaatgccgctccgtcacctatgagcagaaggacgctctggccgaatgccgcaaggtttgggcggagaagcgccaccaattcctcggtcaaaagactccagcaccgcccggcagcgaaggctccgcactgttcgtggcgccgaaggacgagagtcgcttgccgtcggggtactcaccaattcagcaaccggcgaaggagtga

SEQ ID NO: 1789 - DNA, 1206 bp, BradyrhizobiumColbertium
atggggggcacgggaataatcgatcaatttctagaaacattcacccgctacatcgattccggctttgggctgctcggaggggaggtcggataccttgccagcacgctggccgcgatcgacatcaccttggccggtctcttttgggcttggggcgctgacgaggacatcttggcgcggcttatcagaaaaactatatttgtcggggtcttcgcgtttctcatcagcaactggaatagcctcgcccgcgccatcttcgagagtttcgccgggctgggtctcagggcttccggcacgagtctttcttcggccgatttcctgaggcccgggaagatagcgcaggttggcctcgatgctggacgaccgctcctcgagtccgtttggagcatgatgggctatgtcggcattgtcgagaattttgcgcagatcgcgattttgctatttgcctggatcgtcgtgctgctggcgttctttattctcgccattcagctcttcatcaccctgatcgagttcaagctgacgacgcttgcgggttttgtgctgatcccgttcggtctctttggcaagaccgcctttgctgcagaacgcgtgctcggcaacgtgatttcgtcaggtgtgaaggttttggtgcttgccgtcatcgtcggcatcggctcgaccctgtttacgcaattcacaacaggcttcggcggcaatcaaccaacgatcgatcaagccatggccctcgtgcttggtgccctttctcttctcgggcttggcatcttcgggcccgggattgccaacggcattgtgtccggcggcccacaacttggagccggcgcagcgatcggcacgggccttactgcaggcggcgccgtcgtcgccggcgccggtcttgcggctggcggtgttggactggccggcggcgcactcgcggccggagctcgcgggacagccgcggtcgcaagtggagcggcaagtgcctatcgggctggtggggtaggcggcgtcgcgagcgccggtggctcggcggtcgtgagcccgttgcggcgcatggcggccagagtcgttagtggttcatcaacagcggaggcggcgccggcctgggcgcgccgcatgaagcgtgcgcaaagcgtaaatcaaggtgttgccgccgctacgcatgccgttcgtagtggtgacggtgccggcagcggatcgtcggtcgatctgtccgagggagggcactga

SEQ ID NO: 1790 - DNA, 636 bp, BradyrhizobiumColbertium
gtgacgccctaccagaaggcagcacaggtctgggacgatcgcatcggctcggctcgcattcaggccaggaattggcggctgatggcgtttggatgcctgttgttgtcggctggcctcgctggaggtctcgtctggcagtcgacccagggcaccattaccccgtgggtggtggaagtcgaccatctcggtcaagctcaggcgattgcgccggcgaacgccttctatcagccggccgatccgcaaattgcatttcatcttgcgcgattcatcgaggatgtgcggggccttccaaccgatgcgatcgtactccggcaggactggctccgcgcctacgacttcacgaccgatcgaggcgcggtggccctgaatgactacgcccgcaccaatgacccctttgccaagctcggcaccacgcaagttgcggttgatatctccagcgtgattcgcgcttcgcccaacagctttcgcgtggcctggaccgaacgccggtatgacaatggtcagctggccgcaaccgagcgctggaccgcgatcatctccatcgtcatcgaaaccccgcgagatgccgagcggctccgcaagaatccactcggcatctacatcaattccatcaactggtcgaaggagctcggctag

SEQ ID NO: 1791 - DNA, 984 bp, BradyrhizobiumColbertium
gtgagaaacttcacattccgatcggcgacatcgagcttcactccaaaatctgggtgtttcgcacttcttctgacgatcactctctctggctgcacgacgttcaagccgccacagatcagttatgatgatgaggtgccgccatcgccggacctgtcgatgccggcagacgagcatgcgcgtccattacacatcccgccaacatggacgcccagccacgggggcaacaagggcgaggccgaggcaaaggatccgacggatcgcatcgaagttgccaacgatgtagcacgcgtccaaccccggcgcgccggatatttcaacgcggtccaggtcttcacgtatagccccggagcactttaccagatctacgcttcaccagggcaaatcacggacattgcgcttgagccgggcgagcaactcaccggttcaggaccgctcgcggctggcgacaccgttcgatggatcgtcggcgacaccgagagcggcaacggcgacaccaggcgtgtccacatcatggtgaagccgacacggcctgcgattgagaccaatctcgtcgtgaacaccgatcggcgaacctacctgattgagctgcggtcccgtgagaagctgtatatgccatcgatcgcttggttctatccggaagatcgttccagccggtccaggagcttgccgccgacaccgattatcccggagatggctcaacgccgctatcgttatgccatcgagggcgacaagccgccctggcggccgatcaatgcgttcgatgacggtcgcaaagtctacatcgagttctccctggggattgagcagggcgaaatgccgccgctattcgttgttggccaggacggaaggcccgaactcgtcaactatcgcgccttcaaaaacgtgctgatcgttgaccgtctctttgccgccgccgagctgcgcctcggcggagagaagcaacagaaggtccggatcatcagagccgacgggaggcaatcgtga

SEQ ID NO: 1792 - DNA, 1200 bp, BradyrhizobiumColbertium
gtgaccgataatggcgccgacgccaacaacacaggcccttctgcgccaacgggcgcgccgtctcaaattagtccgcaaacgcttcgtctcggtggagaacgtccgcggatcactcgtctctcgaggaaggtcctggccggcggtacggccctggccctgttactgatatcgggtgctgtcctgtgggcgttgaggagcaacgaacggcgtaatccagttccggacgagctctacagcacggaccatcacaaccttgctgacggattgacagcgctgccgaaggactacaccggaattgtccgaagcccgccgcagcttgtgccgacattgccgagcgatctggggcgcccaattggaacagcagaaagtcaatcggtgccgatcggcatcgatgccgagcaacaacgcgccaaccaggaaaccgaggcggctcggaccagcaaagtattcgcctcgacaacggctccggctgcgccgtcgaatgccgcttcacagacacccgcttccagcgccaactcgtcttccgacgagacctttacgcagaacggccaggatcgcaaactcctgttcgtgaacgccccggtggatcggcgaacgaccgcgccagacaggctttcgcgcccagcgtctccctttgtcatacaggcgggaacgatcatccctgcagcgctgattaccggaatccgatcggatctacccggtcaaatcaccgcacaagtcacagagaacatttttgacactccgacagggcgtgccaaacttgtgccgcaaggagcgcgactgataggcctttacgatagccaggtcgcgtttggccaatctcgggtgctgctggtgtggacccggctcatcatgccgaatggtcgctcgattgtattggagcggcaacagggtgccgacgcgggcggctattcaggccttgaggacgaggtcgacaaccattggaaggagctgctcggagctgccgctctatcgacgttgctcggcgtcggttcggaacttggatctggcacggacaacggcagcaacaccgcgatcctgcaagcccttcggttgggcgctgccaattcagtgaaccaaaccgggcagcaagtcgtccgccggaatctcaatatccagccgacgctgacgatccgacctggctttccagtcaatgtcatcgtcaaccgcgatctcgtactcgaaccgtatagaggctaa

SEQ ID NO: 1793 - DNA, 243 bp, BradyrhizobiumColbertium
atgaccagactcaagcttggtgcgctcagcgacgacaaaccggtcaaggtcactcatgagttgccggcaagcttgcatcgagatctcgtcgcctacgccaagatcctcgcccgcgaaagcggtcagcctatcggtgaccccgtcaggttgatcgcccccatgctgacccgtttcatggcaacagaccggctatttgcaaagctgcggcgtacaagtcaggttaccaaggagcgcgaggggtag

SEQ ID NO: 1794 - DNA, 171 bp, BradyrhizobiumColbertium
atgcgggcgccgccgttcaactacggcgacttcgatctgtggaaatcgctgacggaaatccagaagcgaggctctcagattgccggctgcgagagatgtgcagaagccaacggcaagccggccagcttcacctcggccagtagcctttgtgatggcagcaagggcatctag

SEQ ID NO: 1795 - DNA, 1074 bp, BradyrhizobiumColbertium
atgcgcaccgatctcttcgatttcgatctgcccgccgagcgcatcgcgttgcgcccggcgagcccgcgcgattccgcacggatgctggtcgtggagaacggcgcgttgcacgaccaggcgatcgccgacctgccgcaatggctgaagccgggcgaccagctcgtcgtcaacgacaccaaggtgatcgcggcgcagctcaagggccgccgtatcggccgcgagaccgagcccaagatcgaggcgacgctgatcaagcgcctcgacggctcgcgctggcaggccctggtcaagccggcgaagaagctcacagccggcgatcgcatccgcttcggcaacgagggcaaggtctgcctgctgggccatctcgacgccgaggtcgaagccaagggcagcgaaggcgaggtgacgctgtccttctcgttccacgggccggcgctggatcaagccgtcgccgatctcggcagcccgccgctgccgccctacatcgcctccaagcgcacacccgacgatcaggatctcgccgactaccagaccatgttcgcgtccaacgaaggcgcggtggccgcgccgaccgcggggctgcatttcacgccggcattggaggaggcgttgtgcgcgcgcggcgtcggcatcaatcgcgtcacgctgcatgtcggggcagggacgttcctgccggtcaaggtggacgacaccgaagggcataagatgcacgccgagtggggcacgatctcggccgaaacggcggagcggctcaacgccgcgaaaaagaatggcaaccgcatcatcgccgtcggcaccacgtcattgcggctgctcgagagcgcagcgcgcgaggacggaacgatccagccattcgcggcggagacctcgatcttcatcacccccggctatcgcttccgtgcggtcgacgtcctcatgacgaatttccatctgccgaagtcgacgctgttcatgctggtgtcggcattctcagggctggcgacgatgaagggcgcgtatgcgcacgccatcacgaccgggtatcggttttattcgtatggggatgcgtgcttgttgtttcgggcagcgccgtag

SEQ ID NO: 1796 - DNA, 1038 bp, BradyrhizobiumColbertium
atggaggacaaagtgagtaacgatcccgtcgtcgcgattgtcggcgtcactggtgcagtgggcgccgaattcatcgccaccatggacaagcgcggcttccgcgtcggcaagctcaaggcgctcgccagcgcacgctccgccggcaaggcggtatcgttccgcgggcaggagatcgtcatcgaggaattgaccgagcgctcgttcgagggcgtcgacgtcgccctgttctcggccggcggcagcatctccaggaagttcgcgcccgtagcggtcaaggctggcgccgtcgtcgtcgataactcctccgcattccgcatggatccgaacgtgccgctggtgatccccgagatcaacgcgcgccgcatccgcgaccacaagggcatcatcgccaacccgaactgcgccgcgatcaccgcactggtgccgctgtggccgatccaccagaagaaccgcatcaagcgcgtgatcatctcgacctaccaggccgcgagcggcgccggggccgccgcgatggacgagctggtcgaatccacccgggccaatctcaacgggcaggtctatacgcccacggtgatgctgcacccctacgccttcaacctcttcagccacaacacggccgtcgatcccgagaccggctacaacgacgaagagaccaaggtcatcaaggaaactcgcaagatcttcgaggacgacaagatcgcgatcggcgtcacctgcgtgcgcgtgcccgtactgcgcgcccattgcgaagccatcaccttcgaatgcgagaagccgatcagcgaggaccaggtccgcaccatgatggcccgggcgcccggcgtgaaggtggtcgacgaccgcgccaagaactacttcccgatgccgatcgacgcctcgggccaagacgacgtcctggtcggccgcatccgcaaggatctcagcgatccctcagggcactcgatttcgatgttcgtggcggcggaccagctgctcaagggcgcggcgctgaacgcggtgcagatcgcggagctgctgccgcagcgggtgatggcataa

SEQ ID NO: 1797 - DNA, 600 bp, BradyrhizobiumColbertium
atgacgacagcacacccctggacgctttccgccaccgccctcgcagcgctgctcgtcgcagcgccggcgcaggcgatcgtctccgccggaggcaccccaatcgccctgcacggcgagacggttggcaacgcggatgccgaccgtctggccatcagccgcgagatcgagcgcttccgcagtgtaccgatctcgatcagccaggccatggcgattgccgaaggccggcacgccggcgccacgacagcggatgtgagtttcgacggtgccgccggcgtgccggtgtatcgggtgaagaccgtgcacaacgaccgcatctggcgccacaccatcagtgcgtcgaccggcgagctggtcgacggggaagccgccctccccctcacggagctcgaccgcgaggaccgtagcaacctcgcagcgctgggcgcgatcaggcaccgcctcgccgatgccgtccgtgtcgccgagcgcgcggcctccggcaaggcgatcagcggtgggctggtgcgcgagcgcggccggctcagttttgcgatcgtcgtgatcagcggcgacgacctcaaggaggtcattctggagccgcctggcgcacgggccagatag

SEQ ID NO: 1798 - DNA, 747 bp, BradyrhizobiumColbertium
atgggattgactgcgaccaggacgaaaccggcagcaccacggcgcgagatgccgaaatcccgcggcggccggccgacgaagtcagctgcgatcgagcgagaccagcggctgatcgaggtcgccacccgcctgttcctggatcgcggcttcgatgcaacttcgcttgacgccgttgcggaagccgctcgggtgagcaagcccacggtctattcgcgctatggcgacaagcgcgggctgttcgcggcagtattgagacgcgagatcgcgcgctggctcgcaccgctctcggccgcagcagagacgcagctcagcagcgcctcggacatctcggtcgagcagcggctggtcgagatcggccgcgagatgctgaccttcacctgtggtcccgatgccgtcgccttcagccgcatgatgacggcgcaagccatcaacttccccgatgtcgccaagctcggcaaggaggaaggctggctcaaggcggtcgcgaccacggcgcgtttcttcgatcatctggtgactcaaggtgcgctcgacgtcgaagataccaccatcgccgcggaggtatttctcgacgtcgtcgtcggtcacactcaccgcatggcgacgttcggaacggcgctggagctgaagacagccgaaaagcgcatgcgcgcggcgatcaagctgttcctggccggcgcgctgggacctgccgaccgggtccaggactcgacgcgggtcccaacgaggcgccgttcctcgcgctga

SEQ ID NO: 1799 - DNA, 1176 bp, BradyrhizobiumColbertium
atgtcccacccttcatcttcgaacgacgaaccggtctcctcgcgtgaccggatcagacatagaggcgtcggcctgctggtgctgacttgcagcctggcgctcggcgcctgcacctctctgcctcgcacgacctacacggccgctgaagccagcacgtcgcgcgtgctcgatatcgatggtctccggcgctacgcggacgatcccgtcacgaagttcagcttcgagaaagacacccgcaccgcgcccaagtcctatctggcactctccggtggcggtgccgatggcgcctacggcgtcggcgtgctccacggctggaccgcggccggaacccgccccaccttctcggtcgtctcgggagtcagcaccggaggcttgatcgctccgtttgcatttcttggtccgcaatacgacgacacgctgaaggaggtctacaccagcgggatcgcggaaagcctgttggacgatcccagcatcatgcgcgtgctgttcgggtccggcctgttcggcaacacgcggctgcgcgagttggtcgcagcctacgtcggtccggagatcatggcgcaggtcgcgcgcgagcacgccaagggccgcaagctcctggtggtgacgaccgacctggacacccagcgcaccgcgatctgggatatgggcaagatcgcgacggtcggaagcccggaggcgctgaagctgttccgagacgtgatggcggcctcggccagcattcccctggtgtttccgcccatcatgatcgatgccgaaggacaaggccgcaagtttcaggagatgcatgtcgacggcggcgtgacggcgccggtgctgacgttgccggaagccctgctgttccagagcggccgcctgcccggcaatgcgaggatggacatttacatccttgtcaacaagaagatcgaacgcaacttcgaactcgtcgccaacggcaccatcgacgttgcctcgcgcagcctctcggcgatcacgcaatcgcaaacgcgttcgatcatcttctcgacctacgatttcgccaagcgcaaccgattgggctttcatctctcctacatcgcgcgcgactaccccgccccgcgctcggagggatttgataccgcctatatgcgggcgctgtatcaatacggatacgagagggctgcatccggccaagcctggacctcgacgcttccttga

SEQ ID NO: 1800 - DNA, 1146 bp, BradyrhizobiumColbertium
atgaatcccgacaatgaccttcccaatcactttgagttgctcgccaccgatggcgccgcgcgcaccgggcgcctgaccacgcctcatggcatggtacggacgcctgccttcatgccggtcggcaccgccggcgccatgaaaggcatgcactggcgcgaggtccgcgatgccggcgccgatatcgtgctcggcaacacgtaccacttgatgctgcgtccgagcgccgagcggatcgccgcgctcggcggcctgcagcgattcaccggctggaacgggccgatgctgacggattcaggtggcttccaggtgatgtcgctcgcggatctgcgcaaggtcagcgagcacgccgtcactttccgctcgcacatcgacggcgccaaggtggagctctcgccggagcgctcgatcgaggtgcagcgtttgctcggctccgatatcgccatgcagatggacgaatgcgtgcggctgccggccgagccggccgacatcgagcgggcgatgcaattgtcgctgcgctgggccgagcgcagcaagcgcgccttcgagagcgctcccgacggctacatgctgtttggcatcgtgcagggcggcgatgtgcctcagctccgtcatgcaagtgccgagggcctcgttgcgatcggcttccacggctatgcaatcggcggccttgcggtcggcgagccgcaggcggttatgctggcaatgatcgacgagaccgcgccgctgctgccagcagagcgcccgcgctatctgatgggtgtcggcacgcccgacgatatcctcgaagccgtgaagcgcggcatcgacatgttcgattgcgtgatgccgacgcgcaatggccggcacggcgtcgccttcacgcgcttcggccaggtgaatttgcgcaacgcgcgccacgccgacgatccacgtccgctggacgaggcgagctcgtggcctgcggcacgcaactacgcgcgggcctatctgcatcatctcgtcaaggcaggtgagacgctgggggcgatgctgctgtccgagatcaacatcgcttactaccagttcctgatgcagggcatcagggacgcgattgcgcagcgaaagttcgatgaattctatcagcgtacgcgcgaggactgggcgaggggcgacatcgccccgcgctag

SEQ ID NO: 1801 - DNA, 219 bp, BradyrhizobiumColbertium
atgtcagcaattgctgaagtgatgtcgaccgtcgcactgaaccgcgatccgcgttgcagcgagctgccgacctgtcccgtctgcgccgacaccatggtcgccgccgaagcatcagcctacgtctctgaccacgtgatcagctatctctggacctgcgacaattgtggctatggcttcgtgaccaagcacgctctgaagcaaagcttcatctgcaactga

SEQ ID NO: 1802 - DNA, 978 bp, BradyrhizobiumColbertium
atggacacatcgtccaccacgggtgcaacgcaccaacccggccgcggccggatctatgactcggtcgtcgaggccttcggcaatacgcccaccgtgcgtttgcgccggctgcccggcatgcgcggcgtcaacgcgaccattttggcaaaactcgaatatttcaatcctgccgcaagcgtgaaggaccgcatcggcgcggccatgatcatcgcgatggagaaggcgggcatcgtcaagcccgacactgtgctgatcgagccgacctcgggcaataccggcattgcgctcgcattcgtggcggcctcccgcggctacaggctcaagctggtgatgccggagtcgatgtcgatcgagcgacgcaagatgctggcttttcttggcgccgaactggtgctgacgccggcggcgcaaggcatgaagggtgcgatcgccgccgccgaggagctggtgaagacgacgccgaacgccgtgatgccgcagcagttcaagaacctcgccaatcccgatgtgcaccggcgtaccacggcggaggagatctggaacgacaccggcggcaacatcgacttcttcgtggccggcgttggcaccggcggtaccatcaccggcgtcggtcaggtgctgaagccgcgcaagccgggcttgcgtgtggtcgcggtcgagccggaggagagcccggtcctgtcgggtggacagcataccccccacaagatccagggcatcggcgccggcttcgtccctgacatccttgatcgcgcggtgatcgacgagatcgtgaagatcaactccacgacggcgatcgaaacctcgcgcgcgctggcgcgtcaggagggcattcccggcggcatatcttcgggcgcggcgatcgcggcggccctggagatcggcaagcgaccggaggctacgggaaagaccatcctggcgatcgtgccgtccttctccgagcgctatctgtcgacggctctgtttgaaggagtttag

SEQ ID NO: 1803 - DNA, 240 bp, BradyrhizobiumColbertium
atggcagatcaaccgaggcgaccgcgtacgcttggcgatgccaggagcgaagcggaggccgcgttcaagaaggtgaccgcaaaggtggccgccgcgccacccaggcaaatcgccgttcccgggatcaaggagcaggtcacgctgcgcatcgatcaggacgtgctggagttcttccaagagggcgggccgggctggcaggaccgcatcaacgaggcgctgcgaaaggcggcggggaagtag

SEQ ID NO: 1804 - DNA, 1428 bp, BradyrhizobiumColbertium
atgcgctatctcaccctcctcgcttcgctgatgtgcatggcactgtcgatcagtgctgccaaggccgaccgccgtgtcgccttcgtggtcggcaacggctcctacaagaacgtcgcgcaactgccgaacccgccgatcgatgccaaagcgatggcggccacgctgcgcaatgtcggcttcgaggtgatcgaaggctccaatctcagccgcgaccaaatgaccgaaaagctgctcgacttcggtcgcaaggcgcagggctccgacatcgcgctgttctactatgccggccacggcatcgccgtcagcggtaccaactacttgctgcccgtcgatgccgacatcaaatcggagatggacgtcaagctgggagctgccatcaacatcgacctgacgctcgagcaaaccatgggcgatgccaaggtcaagctggtcttcctcgacgcctgccgcgacaatcccttcgccgccaagatcaagtcgaatgccgccacccgcagcgtcaacgtgcagagcggtctcgccgagatgaagtccggtgaaggcacgctgatcgcgttcgccaccggtcccggccagaccgcgctcgacggccaggagggcaacaacagcccgttcacccgcgcgctgatcgacaacatcaccaagcccggcgtcgagatccagcaggcgatgacctcggtgcgcgcccaagtcaatgaagagacccgcaagagccagttgccctggggccacaccaatctgaccggctccgtttatctcaatcaggccccgacgacccaggtcgccaacgcagcgccgaccgcttccggcatcgtgccgggggccagcagcagctcggatggcgtggagctcgaatactggcgctcggtgaaggagtccaacaagccggaggagctcaacgcctatctctcggcctatccgaatggccagttcaaggcgctggcgctggcacgcctcgcagcaatcaagagcggcacctcgaccgcgacccgcactctcaacgcgggcgtcgatcccgcaaccttcacggacgaggccacccagctcaccgaggaccagatcggactcaacaagacccagcgacgcgacgtgcagcgccggctcaccagcctcggcttcgataccaagcagaccggtgtgttcagcgaagagacccgcgcggtactcaggcgctggcaggccgcgcgtggctatccatcgtccggctacctcaacaagcaccagcacaaggccctgctttcggagatcatggctgcgcccgcgacggcgagcgacaccagtcagaagcctgcccggcgcgccagcgcgccgcctccgagcagcgcgccggcaccggctcctcaccgcagcaatcccggcgatgcagccggcgcggccttcgttggcggtgtcgtcggcggcatgatgggcggcatgttccgccgctga

SEQ ID NO: 1805 - DNA, 153 bp, BradyrhizobiumColbertium
ttgcaggcagcaacagactggcaacgaacctacacgaagtgcccgacttcgcgccaccaaaacggccgcccgttgggttcaacccgctgctgtgtggccaatgtgcacgatggagtgcctctccaacgtgatccaaatcacacggtcacttag

SEQ ID NO: 1806 - DNA, 933 bp, BradyrhizobiumColbertium
atgtcgccgataccggccgtccttttcggctttccatcctccggcatccggcccctcatgagcacgacaccgtccaaagcgatggctgcactgtggatggccggctggctctcgctgatgctggtcatggcggttgccgggcgcgagaccacgcgcgagctgaatgtttttcagatcatggaggtgaggtcgctgatcggcttcgtgctactcgcccccatcatctaccgcgcgggcggcttgaagacggtcaagacatcgcgcctgccgcaacacatcgggcgcaatctggtgcactattttgcccagctcggctggttctttgcgctgacgctgatcccgatcggtcaggtggtcgcgatcgagttcacaatgccgatctggacggccatccttgccgcaagcttcctatccgagcgcatgacgccctggaagatcgccgccatcgtgctcggactggttggggtgatcgtcatcgtccggcccgccactggcgaggtcaatccgggtcagctcatcgcgcttggagcagccatgggttttggcatctccatggccctcgtcaaatcgctgacccgcactgaaagtgcgctctcgatcctcttctggatgctggtggtgcagtccgccgcaggcttcgttccgacgctgttcgtctggacctggccatcgacctacgtctgggcctggctcggcgtgattgccgtctgcggtacattttcacactattgtctcgccagcgccatgcgctatgccgacgcaacgatcgtcgtccccatggacttcctgcgggttccattgaccgcggctgccggctggctgctgtattccgagcggctcgatgcctggaccgtgctgggggcggcgctgatcctcggtggcaatctcctgaatttgaagcccacttcgccggtccccgctcgcgcgcagtga

SEQ ID NO: 1807 - DNA, 399 bp, BradyrhizobiumColbertium
atgcatatcttgcagccggccgaatggaaaaaaccgcgtggcttttcccatggcattgtggtcgacggacccgggcgctgggtggttctggccggccaaaccggcggcgacgagtccggcaattacgcgcccgacatggccgcgcaggtcgcgactgcgctgaagcggatcatcaacctactcgacgaggccggggccggccctgagcacatcgttcgcctgacctggtacctgacgagccgcagcgagtacgaggcggccggtgctggcattggtgccgcctggaaggaaacgctcggacgtaattttccaccgtcgacgctgctctacatccctgggctcgtggacgagcgggccaaggttgaaatcgaggtcacggcgttcgtgccggacgcataa

SEQ ID NO: 1808 - DNA, 438 bp, BradyrhizobiumColbertium
ttgcttgcggccacagccgtcagctccgagagcaaggcgcaatccggtccattcgcgccgatggcgggaagctggagtggcgccggcacggtcagcctggaggacgggtcgacggaacgcattcgttgccgggccaaatacgcacccatcggtcccaccatggaactgaccctaacgtgcgccagcgacgcctataagttggccttcgccgccaacgttcagtctgctggccgtgccatttcgggcagttggagcgaggccagccgcaacatctctggcactctccagggtcgtggcagcggcggaaacttcgagttggtcgcgtctgccgccggtttcaacgccaacatcgcgctgaagacgagcggcaacaagcagaccgtcaatatacgcgctgacagtcaattccgcggcgccaacatctcgatgtcgcgctga

SEQ ID NO: 1809 - DNA, 351 bp, BradyrhizobiumColbertium
atgcgttttggtcgcatcgcggcgttctgcgccgcctcagttttcgccggcaccctcgccgcccccgctcttgcccagagcccctatgatggcaattggcaggtcaccatcgtgaccaagaccggctcgtgcgagccgaccgccagctccatgctgacagtagctggcggcaaaatcaccgcgcctggcgctaacgtttccggcaccatcggcagtgggggacttgtgaaggtttcgatcaatggtgcatatgccaacggtcaactcaacggcaacgccggatcggggaagtggaatggagcatcagcaggcataccgtgcagcgggcgctgggaagcatcgcgcctatag

SEQ ID NO: 1810 - DNA, 588 bp, BradyrhizobiumColbertium
atgcgaattaccctcgtcggctcccgccatttcggcgtgaccaccctgaacatgctccgggagcacggcgtctcggtcatccgggtcgtggttgccgatgccgaggatcgcctcgccgcgaccgccaaagctgccgggatcgacgtcgtggtgcaggccaatccgaagctggtggtggcctccgagattgccccggacaccgatctgatcgtcaccgcacatagccacgcccggatcggcaaggacgcgctggccgcggccaagctcggcgggatcggctatcacccctcgctgctgccacgccatcgcggcaaggccgccgttgaatggaccatcaaggagggcgatccgatcgccggcggcacgatataccatctcgccgaccgcatggacgccggcgcgatcgccgcccaggactggtgcttcgtcaaaaagggcgagaccgcacgcgaactctgggagcgcgcgctggcgccgctcgggctcaagctgctggccgatgtgatcgactacgccaaggtccacaaggcgctgccagccaaagtccaggacgagcagttcgcgacatccgcaccgagcctctcctag

SEQ ID NO: 1811 - DNA, 219 bp, BradyrhizobiumColbertium
atgccgagcgcaatcgagcagatcgtcgacgcgtatgtgcgtctgaagaaccgccgcggcctcgatgagctgatgatgcacaggcagcgactcgcggtcgatctcaagagcaggtctggttatgacttcagcctgccgatcggtcagatcgacgaggagatcgcgattatcgaggcggggctcaggcgtctgaaagcagaaaattctacggcggtctag

SEQ ID NO: 1812 - DNA, 303 bp, BradyrhizobiumColbertium
atggccgacctcaacgccgtcctgaccaggctcaatgaccgtctgctccgcctcgagggcgagctgttcgtgctgcgctcgctggcgcgcgcgacgttgacggcgggcgacgaccatgcggcgcgcatgcgcaagctggtcgaggccgcaaaagtggcgctcgacgacgaggccaagcgtcctctcgacaagccgacacgcaaatacgttgatgcggcaactgcactggtggacgagctgctggtcgagccgacgccggcgcggccgcttttcacagtcattgacggcggccggcgcgactga

SEQ ID NO: 1813 - DNA, 228 bp, BradyrhizobiumColbertium
atggccaacagcatctggaagatcgaagagttcacctgcgcgggttgcggcatgaactacaccgcgacaagagaggagcacagcgaagctcacaccggcagtttcaaatgcggcatctgtaacagcgttgtgcacgcttggtccggcaagcatcatttctttggctggcaagcagtgaaaacgaggccgcctgtgttcgggaggcgttgggcggacgtggagtggtaa

SEQ ID NO: 1814 - DNA, 117 bp, BradyrhizobiumColbertium
atggtcctggtcctggacgtcagttccagtcatcttgacggcggttgcgttgctggcaataacggccaggctgcgccggaagtcgcgttcatgccgcaaggaaagctgtgcccgtga

SEQ ID NO: 1815 - DNA, 1080 bp, BradyrhizobiumColbertium
gtgaaaagtctccgtcagctcctgacgggagaggacgtcatccagctcgtgatccggctcggcctgcttgccttgctgatcatctggactttcctgattatccgcccgttcgtgccgatcctggcctggagcggcgtgctcgcggtcgcgttctatccggcgttcagctgggttgccaagatcctcggcggccggcccaagaccgcggcagcgatcctgaccctgattacgctcggcatcgtcatcggtccagcgacctggctcggcatcagcgcggtggacggcgtgcgagagctggcgcaccagctcggcaccggcgacctcgcgcttcagtcggcgccggaacagctcaagtcgtggccgctcgtcggcccctggctctacgaactctgggaccaagcctacaacaacgttcgggcggtggtgcgcgaggtggcgccgtatcttcagccgctggctggcccgctgctctcgctcgcaggcgatgccggcgtcggaacgctccagtttctcgtctccgtgttcgtagccggctttctctttccgcatgggccgaggctggtcgcggccggccgcggctttctgtttcgtatcgtgcccgagcagaccgagcatttcctggggctggcgggcgcgaccatccgcgccgtggcgcagggcgtgatcggcgtcgcgatcgtgcaggcgctgctcgccggcatcggcttcaagctcgccgaggtgcctagcgcagggcttctagcgttcatcgtgctgctgctctcgatcgtacagatcggggcctttctcgtcctgctgccggtcatcatctggatatggaccgccaaggacgtcactacggcgctgctccttaccgtgtttctcgtccttgtcggcttcatcgacaccatgttgaagccgcttgtcatgggacgcggcctgaccaccccgaccatcgtgatcttcgtcggcgtgatcggcggcacgttggcccacggcatcgtcggactgttcatcggaccgatcatcctgtcggtggcctgggagatgatgatggcctggatcaggacggaggaccgggcggaggcgggggagcgctga

SEQ ID NO: 1816 - DNA, 405 bp, BradyrhizobiumColbertium
atgacggcagcaatggcgaagtcttccaagctggttgccgccaagcgcggcaaggtattgttggtcagacggcggtcggacggcctttggatgtttccgggcggccgcaagcgtgcgcgcgagtcggacaaggactgcctgcggcgggagatcaaggaggaactgcccaagctgaagctcggcaggatcagcctctggaaggaagtgaaggcgaggaacaaggtctctggtcgcaagatgagcgacgcgatcttcattgccaaggccgccaagggcaggctgttgatcggcgacaagaaggagctcgaccgcgccgcctggcagaagccccgtggcatccgcctgacgccgacatcgcgctacatccgcgaccggctgtttccgaggaagcagcggcgaagctga

SEQ ID NO: 1817 - DNA, 246 bp, BradyrhizobiumColbertium
gtgtttcgcgaccgcgccgggcggttgcaggacggctattccaggcaatgtccgagctgcgaggtggtgctgttcttcgccgaagactcccagcaccctttcatcaagcgcgcgatgcgctccgcgcgccaggtccgcaaggagatgcgcgagctcgaggccgcaaggctcgctgcacccgaacggcaagcgccgcaatcgaggagattcgccgggcggacgcgatcggcggagcgggaggactag

SEQ ID NO: 1818 - DNA, 252 bp, BradyrhizobiumColbertium
atggaggaaaatttgaagtcgttcattttcatcagcatcatcgcgctgctcgcgatggcccctgcccacgcccagacgctggtcgatcccaacaaggttgcccccgaataccgcgaggcagcggagaagcgccgggccgagcaattgcgccagcgtgaatgcgcgctcaaggcagatctcgagaaggtgctgccgagggatcgcaccgcttttctcaaccgttgcctggagacgatggcggccaagcaatag

SEQ ID NO: 1819 - DNA, 402 bp, BradyrhizobiumColbertium
ttgaacccgtctctaatcctaacccgtcgccaacagaatgcgagccgccctctctgtcgaatcggcaactcgccgccatgcatatgggatttgccctgcgaacgcacccctcgttggcaacgttcaaggcggcgccgcgatcccttacaagctggccgttgttcagcctcgaagacggaaccgacgcgggcaatctctgcatctcgcgatgcatgcggcgcggcgatgggcgacgccttgcatatggccatgaaaaaaccccagcgcttggagccacgctggggcgtttcgttcgaaatgaactggtcaagcaatgtcatctcgatagcagcgatctcgctgcgcgcttgtgaactggctcacacacctcctgccggaacagggtacctcatccccatttga

SEQ ID NO: 1820 - DNA, 3204 bp, BradyrhizobiumColbertium
gtgaggctttccaagaaggcgcgggtggccaagaaggcgccgaagaagaccaaaggatcgcagcgcgccacgatctcgtcttcgtcgccgctcggcatgatggctctccatctgcttgcacaatggaagcagtccggacgcagtggcatcgtgtttctcgccgagagcgagaaccgggcggagcggctcggcagcgtcattcacgcgctcgacccgtcgtgcgaggtgctggtgtttccgcgattgaacacgttgccgttcgatcagctggagccgtcccatgagctggcagggcgcagagcctccgtgctgaggcgcctcgcgaaatccaagaagccgctgtttcttgtttcgacggccgaagccgtgatggagcgcctgccgccgccggcgagcctggtgcgcctgagcctcagcttgaaggtgggcggtgcgttctcggaggaggacctcgaggcgcgcctgcaatccctcggatacgatctggacgatgagccggactatccgggtggggcgctgttccacggccagaccttcgagatatttcccgccggcgcgctggggccgttccggatcgagcattcggatcgtgcgatcgagcggatcgtggcattcgacccgaaggagcacaggatcatcttcgagaccaaggagctgctcgtcgatcccatgtcggagcggctcggcctcgccggcaaaggcagcaaacgcgccagcctgttcgactattgcggtggcgccaaatggatcggcgatgcaggcgtcccctcgcatgcagacagatggctggatacgatcgaggaggccgcgccccgcgcggagcgcgagcgcgaatatctcggacggcgcgactggaagcagctctccaagggcatgaaggtgctgccgcggatggtgtcgtttcaggccgtcccggagttctccaagctgacatcgtcgaggaaggcgctgcgtggcttcgtcgaggagagacgccgggccggatcgcgattgatcctggccgccgcgcacgaggacgatctgcgcgtgatggagcggatgggcggcgtcaaggcggagcgctgcgatgattgggaggaggcggcgtgcgggcggggcggggcggctgcgctgctggccgatctcgatgccggcttcgtcgcgcctgggaagaagcctctggtcgtggtgacggcgtccgacgtgctcggcagccgcgcccatcatccgcaacccatggcgcgcgcctggagcgcggccttcgatcatgccgacgtacccgagcagggcaccgtggtcgtccacctccagcgcggccttgccgtgctcgacggcctgcagacggtcaacaccggcggcggcgcgatgcgcgagatgatccgcctgaagttcgccggcgacaacgcagttctggtgccgccggccgatctcgccttgatgtggccctatgcggcggagctcggcaagctttcgctcgacaaggcggacggcagcacatggtgggcacgccgcggcgaggccgagcgcgagatccaggctgccggcaaggtgctggccaagcacatcagccagcgccgccggcggcgcggcgaaaagctggtgccgccgggatcggcctatgagaagttcgtcgcgcgttttccttatttcaccacgagcgatcaggccaaggcgatcgacgatgtgcttgacgatcttgcatccggtcatcccatggaccgggtggtctgcggcgacgtcgggtttggcaagacggaggtcgcgctgcgcgctgcggccgccgcggtgctgtcgggcaagcaggtggccatcgcggtgccgaccacggtgctcgcacgccagcacgtcgcaacgttccagaagcgcttcgcgccgttcgggatcgaggtgggcaacctgtcgcgggcgacatccggcgcggaattgcgcgagacccgggagggacttcgcagcggccggatcaaggtcgtgatcggcacgcaggcgctcaccggcaaggacgtgaggttcgacgatctcggcctcgtcatcatcgacgaggaacagcatttcggcgcggccgagaaggcaaagctcgcaggcctcgccaagaacgtccatgtgctgatgatgagcgccacgccgatcccgcgcacgctggccgcgggccttgccggcttccgcgacctcagcgtgatcgcctcgccaccggtgcacaggcttccggtggcaacccggatcgcgccgctgtcggatgccgccatcgcctccgcgctgctgcgcgagcagcggcgccacggccagagcttcctgatctgtccgcgcatccaggatctcgagccgatgctggcgcgggtgcaggcggtggcgccggatctgcgtatcgtctgtctgcatggcaagctgccggcggacgagatcgacgaccgcatgatgagcttcgtcgagggcggagcagatgtcctgctcgcgaccaacatcgtcgagagcggcctcgatattccccgtgccaacaccatcgtggtgtgctggccggagaagttcgggcttgcccagctgcatcagctgcgcggacgcgtcggccgcagcggcatccgcgccttcgctcatctcttgaccgagacagagtccggacaatccgagaagcggctcgccgtgctcgaagagttcagccggccgggcgctggctttgccatcagcgaacgcgacctcgacctcagaggtgccggcgatctgttctccgagcagcaatcaggccacgtccaggtgttcgggcccgtgctctacagccatctcctcaggatggcctcggagaaggccggcgaggcgcaagccgcgctgtgggtgcccgatctcaacctgccggtcggagacatgctgcccgagagttacgtgcagtccgagccggtgcggctcgaactctatgcgcgcgccgctcggtgcaacgatgaggacgaccttgaagatctcgaggaggaaaccgcccgccgcttcggacctctgccgaaggtcgcccgcgacttcttcgccgcggccaagctcaggatcgcgtgcaagcgcaggggcatcatccgcctcgacgtcggtcctgaggcggcggccgcgacgttcctgccggggcgcctgcgcaagtcgcgcggcaagtcgcttcagcgcgacggcgaccgcgtgatccatcacagcccgatgggcgacgcgccgttcgagcgggtggaggagctgttcgaattgctcgacgaagggtag

SEQ ID NO: 1821 - DNA, 1065 bp, BradyrhizobiumColbertium
atgcaatcgtacatctcaaagcgggcgagcttgtgcctggtgtccctgctgctggcgtctctcgcctcaacggcagctgcgcaggagagcccgccggactacgcgcgataccgcgaaggcctgttcctgcgttacctcaatgccgacgagggcgacttgcgcgaggtgccgcggatcggactgtccttcggtgagcggccgatccgggcggtgctggattccggttcgacgggcatcgtcgttgccgcgagcttcattcccaatttcgaccggctcgcttcgcttggcgaaggcaagctcacctattcgagttccggccgcgtcatgctcggacaatgggtcgtcacgccggtcgccctggtcggcatcgatggtgcggcggtgcagaccgagccgatgccggtgctcgcggtgacgcgtgtcgattgcctgcagcacgcccgcgactgcacgccgtcggatgcgccgcacggcatcgccatggtcggcatcggttatggacgcgagggcgacctgcagagccagagcacgccggagaagaacccgctgttgcgcgtgaccggcggtcacggcgaacggcgccgcggctacgtgctgacggcgcacggcgttcatgtcggcctcaccggcgcgaatacacgagggccgttctcgttcacgaagctgtcgcggcagccggaccggccggactggtcggcgacgcctgcctgcatttcgttgaacggccggaccccgccggcctgcggcagcatgctggtcgacaccggcgtgtccgtcatgttcatgaccgttccggccgagcaggcgggcggcgcgaccgcgtcgctcgacaccggcaccagcgtgtccatccgggtgggaacggcggagaagtccaccgagctctaccgcttcgccgtcgatggcggctcggcgctggcgccggatcgcattcacctgcgggtgtcgcccgaccggaccttcgtcaacaccagcttccatctgctgaacggcttcgacgtcctctacgacgccgacggcggctatgcgggcttccgccggcgcgaggccggcgcatcgcgataa

SEQ ID NO: 1822 - DNA, 510 bp, BradyrhizobiumColbertium
atgaagagaccgaacgtcgtggcgagcggagccctggccctggccgcattgatcacgctttccacctgcccagcccgtgcggcgggccagctggtcaattcctggcggacgccggacggctggctcaccgagatgcgcgtgcatccgaacggcgccagggtctgctcgaccgggaaggcggcgcaggctccccgaccgttcgggctgtccatcgtccggagcggaaccgagaacgtgctgctggtggtggacgaggcacagccgccgaccagcgcgggcgacatgtcgttcgtccaggccgggaagaccgtgggcacgctgcgcacgcaggttgcggggcccgcctttgcctccgccgatcccttcagcagccagacgcccgacctcatcgcaaagctgaccacggccgcgctgaccatcgatgtggccgggcggcaatatcagacggacatggcgggcctgcccgacgcattggcccagctcgccaagtgcgaggccgagccgaaatga

SEQ ID NO: 1823 - DNA, 672 bp, BradyrhizobiumColbertium
atgaccgcgtccttcgaaacgccaagcttcgccgaagagctcgacgccgtcgcgcttgcagccgctgcatcggctcacgaacctgcagtcaccgatagtccagcactgatcgagcggccaagccgcaagacggtcctgctgctggcggcgtgtgccgtcgccatcgccatcaacggcgcggcggcggtctatacgctgccgtccgccttgccttcgttcagtgtcgcgagactggctgaactgcttccgcgcaaggaggcgccggcgccgaaaccggatcccgtcgtcgcgacgttgaaggagattcagtcggcgcagcagcagcacaccgcgtcgctgcaggagaacaaccaggccctgcagcagaacgcagcgctgctgcagcaggactcgctggtgctgctgtcgctgcggcagagcatcaccgaggaacgggtcgacgtgaggaagatatcgtcgcagctgtccacgctgatcgcgaaggtcgactcgctttcgcagaatgtcttgatgtcggacgtcacgtcgtccgtccggcgcgccaatgcccgctacggattgtccgccgcgatgcgcaagcggatggtgcggccctcgaagcctttggggccggtttcggtcggaggcgcgccgctgagcgtgcccgcaatggtggcggcgccggagagctga

SEQ ID NO: 1824 - DNA, 171 bp, BradyrhizobiumColbertium
atgtttgaaatcaagggtttcgacacggcaggcgtcgtcagtctcaagcggccttcgctccccgccgcgctcaagaaggccagggagctggtcgaggacgggtgctgggacgtccaggtcgtcgaacccacaggccgcgtccacacctcgttcgaggagcaggcggcttaa

SEQ ID NO: 1825 - DNA, 216 bp, BradyrhizobiumColbertium
atgaaaaccgaatcttccttgattgttcgcgctcctcccgggcggcagctggatctgctgcgcggggaagcggcgcgcatcgcaaaagcaaacgatgtgaattggtgtaccgatcgcgccgccatcggcacccgtttctgtttcgacaatgacaaggctaagacgtcgttcgcgcgcatctgcgacgacaacggcgttccgtaccaagacggatag

SEQ ID NO: 1826 - DNA, 177 bp, BradyrhizobiumColbertium
atgcatttcgtattgatgaatgccgacactgacagataccgccgtcaagccaaggctagtctcgatgaggcgcagagggcgacacgcgtccaggacctggaggcatggctgaagctggccgaagagtggatggagatggcggaggcagcgcaacgacagagctcctatgagaactag

SEQ ID NO: 1827 - DNA, 73 bp, BradyrhizobiumColbertium
gagcgcgtagctcagccggtagagcacgtgacttttaatcacggggtcctgggttcgagccccagcgcgctca

SEQ ID NO: 1828 - DNA, 216 bp, BradyrhizobiumColbertium
ttgaaggaccctcatggtgaggagcccgccgcaggcgggcgtccggacgatgctccgcatcgccgggcgaccatgcaggcgcaggtcgtccgccgacctccaacagttcgtggacggcgtcccgccaatcaggttgagaatcacggcttaagccaaggattccacgaacgaaaccccgcctctgcggcgatcttcggcaaccacccgcactattga

SEQ ID NO: 1829 - DNA, 2667 bp, BradyrhizobiumColbertium
atgcgcgttgtcgccgccgttctgttgctcgtgtctgcgctccatgcaggcgtctggggagtcttgcgcgagaaggaacccgcgcccgacttcaggggcctgttgcccagcgtgtcctacgcgccgttcgaaggctcggcgcaccccgacatcgacaacatcccgaccgtcgagaaaatccgcgccgacctgaagacgctgtcgaccatgacgcgcgcgatccgcctctattcgtccacgggcggcgtggaactggtgccgccgatcgcagccgagttcggactcaaggtcaccgtcggcgcctggatcgacaaggacacggaccgcaaccagcgcgagatcaaggccgccatcgagctcgcccgcaagaacagcaacgtcgtcggcgtcgtcgtcggcaacgaggtgatctaccgcggcgagcagaaggtcgaagacctcatcgacatgatcaagaaggtgaagagcgcggtccgcgtgcccgtcaccaccggcgagatctggaacatctggcgcgacaatcccgaccttgcttccaacgtcgatttcatcgccgcgcacgtgctgccctactgggagaacttccgctcggaccaggcggtcgaccaggccgtcgaccgctacaacctcctgcgcaacctgttccccggcaagcgcatcgtgatcgccgagttcggctggccgagccagggctacaatctgcgcaacgccgatcccggcccgttccagcaggccctcgtcctgcgcaacttcgtcacccgcgccgaagccatcggcatggaatacaacatcgtcgaagccatagatcagccctggaagttcttcgaaggcggcgtcggcccctactggggcgtcctcaacgccagccgcgagccgaaattcgcctggaccggcccggtggagaatcccgattactggaagctgatgggcatcgcgctcctggtcggcatcctgctgtcgctgccgatcctgcggatcgaaaaggcgaccgcgaagcaggccttcctgctctcggccaccgccaacggcgtcggcgcctgggccgcgaccgtgttcgccttctggaacagccactatttcatcttcggctcggccttcgcgctgacgctcggcatgatcctgctcgttccgctcgtgctcatcgcgatggcgcgcatcgacgagatcgcagcggtggccttcggccggccgccgcaacggctgctcagcaagggcaagccggtggagaacgtgccggagaattactgcccgaaggtctcgatccacatccccgcttatttcgagccggtcgagatgctcaagcagacgctggatgcgctgtcgcggctgaactatccgaactacgaatgcgtggtcatcatcaacaacacgccggatcccgccttctggcagccgatccaggaccattgccgcgcgctcggtgaacgcttcaagttcatcaacgccgagaaggtgcagggcttcaaggccggtgcgctgcgcatcgcgatggaccgcaccgcggccgacgccgagatcatcggcatcctcgatgccgattatgtcgtcgagccggactggctcaaggacctcgtgcccgctttcgccgatccgcgcgtcggcctcgtgcaggcgccgcaggagcatcgcgacggcgatctgtcgatcatgcactacatcatgaacggcgaatatgccggcttcttcgacatcggcatggtccagcgcaacgaggccaacgccatcatcgtgcacggcacgatgtgcctgatccgccgcgccgcgatggacatggccgggggctggtcgagcgacacgatctgcgaggacagcgatctcggccttgcgatccaggagctcggctgggtcacccactacaccaacacccgctacggcgccggcctgctgcccgacacctacgaggccttcaagaagcagcggcaccgctgggcctatggcggcctccagatcgtcaagaagcactggcgccgcttcctgcctggcgcgagccggctcacgcccgaccagaagcgcgaatacagcctcggctggctcaactggctgggcgccgaaagcctcggcgtggtggtggcgctgctcaacctcgtctgggtgccgatcgtcgccttcgccgacatcgccatccccgacatgatcctgacgctgccgatcatcggcgccttcgtcgtctcgctggtacacttcctgtcgatgtaccgcgcccgcgtcgccatcaagcccggccagatgctgggcgccatgatcgcggcgatgagcgtgcaatggacggtgtcgcgcgcggtggcgcaaggcctcatcaccgagcacatcgccttcgcccgcacctccaagggcggcctcagccggatgtcgatcgagttccaggcgttctgggaagcggtgatcggcaccctgctcctggtaggcgccggcgtgctgatcgccaccaacagctacaagcagatcaccgagatctacgtcttcgccggcgtcctcgtgctgcagagcctgccgttcctggccgccgtcgccatcgccgtcctcgagctcagccgcatcaactcgttccagttctggcgcgacagcgccatccgcactgccgagctgatcggcctgcgcccggtcgccctgccgccggtgggcgcgccgcaagccgtgccgacggaggtccgccgcgaggcgaattga

SEQ ID NO: 1830 - DNA, 579 bp, BradyrhizobiumColbertium
gtgttcgagtcacgaaatgcggtcctgcggcagttcgccgccgccttggccgtctcctcccttctcgtcatcgccggtctcggcagcgcttccgcccagagcggcacaccgacccccgacccgggcaaggcggcccagcccgccgacgccgccaaggacgccgcccagaatcagcgccgcaccgacgagttcgcggaagcagcccatgtcatcaacggcccggccggcaatcccgaatgcgtctggctcggccgccgcgtggtgcgcctgatgtggcgcgatgacctggataccgcattccgccacctcgatctctacgaccgtttcggctgtcccggtggccacatccaggccgccttccgttgtctgacccgcttcggcggccagatcgatcccaaggtcgccgagaccttggacagccgcgtgcacgcgtgctggatcaatccggccgctcagccgcagcaggcagcggccgcggcgtcccagccggcggcgcccgcagcaggcagctccccggcaccgcagccggccgccagcccctcgcctgcggcaagcccgtccccggcgcccgcgaaatag

SEQ ID NO: 1831 - DNA, 1599 bp, BradyrhizobiumColbertium
ttggcgcttctgctcgtttcattgggtgcgattgccgccgtgtggtggtggctggcgacgccaatcacgctcgcacgcgccccgatcgatcccgccgagaaggtccaatgcgtctcctatgcgccgttccgcggcgagcagacgccgctggaagcctggacccatatcgaggccgagcagatcgagcaggacctgcgccagctcaaggaaatcaccgactgcgttcgcacctattcgatggagaacgggctcgaccaggtgccggcgatcgcggccaaggtcggcgggctgaaagtgctccagggcatctggctctccagcaatcgcaccaagaactatgagcaggccggccttgcgatccgcctcaccaagcagtttcccgacatcatcacgtccgtcatcgtcggcaacgaggtgttgctgcgtggcgagatgacgacggcggatctcgtctcgatcatccgcctggtgaagacgcaggtcagcgtgcccgtcacctatgccgacgtctgggagtactggctgaagaaccgcgaagtctatgacgccgtcgacttcgtcacgattcacatcctgccctactgggaggatttccccatcaaggcgaaattcgcctccgcccatgtccaggcgatccgcgagcggatggcggtggcgtttcccggcaaggagatactgatcggcgaaacaggctggccgagcgagggccggatgcgtgacggcgcgctgccgtcgcgcaccaaccaggcgcgcgtcgtctcggaaattctcagcctcgccaagtcgcagaagttccgagtcaacctgatcgagtcctacgaccagccctggaagcgcaagctggaaggcactgtcggcggctattggggcctgtatgacgcggtgcaccggacgctgaaatatccgccgggacagccgatcagcaatttcccgttctggaaatggtacatgggcgcaggcatgggcctttccgtgctggtgttcgccgtcgcgctcatcacgctgcgccggcggccgtggacgccgcgcttcgcggcctggctcggcgtcggcatctcggcgaccacagccggcatcctgctcgggatcggcatcgacaagatgtattacgagagctacggcatcggcggctggctgctctggggcgcgctgctgctggccggcatcctgtcgccgatcttctgcgcgcaggcgatggtgatcggccgcagccttccgaccttcctcgatctgctcggcccgcgcgagggccggaagtggtcgaagctcaccgccgtgctcggcctgacgctggcggtgacggccgtgatcgcggccgcgaccgcgctcggcttcgtgttcgacccgcgctacaaggatttcccctacgccgcgctgacgatggccgtggtgccgttcgctctgctgatgttgaaccggccgcagatcggccagcgtccgatcgcggaagcggtgttcgccggcgtgctcgcgctgtcggcggcatacgtgctggtcaacgaaggccgcgacaattggcagtcgctgtggacctgcgcgatctatctgttgttcgcgctcacgctgtggcgggcgcgggccgagcaaagccgagaatga

SEQ ID NO: 1832 - DNA, 507 bp, BradyrhizobiumColbertium
gtgcagaaccagccggacgctcgcctgttcctgcatgatgcaggggcaggccgaatcgacggaaacgtcacctgccgtgtcacctgccctgttgcctgcccgcgccatgccgaccatattgccgccatgacaaaaaagcccttccgcctcacgccctaccaggtgcagttcctgatcgtcgtcggcttcgcctccgtcggctatgcgctctatctgcggtacctcgcgatcgagctgtcgcaggtcgcgcttgcctgcgacgccggccttcagacgctgatctgcaaggggcgttcggttgcgaccgttctgttcaagaattcggtgttcggcatcgtcgcgctggtggtggcgacgctgaacctgatgcgtccgtcgatcgtgctgctcaccgtcggcatcatcgccgccggcctcggcatcgtgctctacaacgtcgtgctgtcgggcctcgcgatcggcctgctcattctcggctttgctcggcccgcgcccgccacagcgtga

SEQ ID NO: 1833 - DNA, 147 bp, BradyrhizobiumColbertium
atggacaagccaacgcaggagcagctcagcgagctcaagaggctgagcaaggaagcgcgggtggaggattggtcggaaatcgtccagtcaaaggacgaagccgagacgcggatccgggatctgaaagagaaggcgcgcatggaatag

SEQ ID NO: 1834 - DNA, 444 bp, BradyrhizobiumColbertium
ttgatgaacgaactggatgatgtgctgaggctgctcgtcgcagcggcgacggggctcctcatcggcatcgatcgcgatatgaacgacaagccggtgggaatgcgcacgctggcgctggtggctctcggctccgcgctggtgtcgatctccgtgatcgagttccagaacatgcgcgaccacccggatgcgatctccagggtcattcagggcgtcgtgaccggcgtgctgagcggcgtcggctttatcggtgcgggcgtcatcctgcacgatcgcaagtcgaagaccgttcatggtctcaccacggccgcgacggtctgggttgcggccggcctcggcattgcctgcgcattgggagcctggttgctcgtcggagcagccatcgcggtgacgttgctcgtgctgttcgttctgggctgggtcgagcgccggctgggattcaaatag

SEQ ID NO: 1835 - DNA, 1359 bp, BradyrhizobiumColbertium
atggcaaaggattccgacccactggcggacgccttcggcgccaaggagaccggcggcctgttctccggacttctggccgaggaaagcgcgttcgaccggcgcttgatgtggcggctgggctcgtggggcgtcgccgcagtgggggccgtcgtcgtcgccgtcatggccaaccaggcccagctcggctggcggcgcgaccaggtggcgtccgcagatctcgcgcgccaggccgatcggctgcagatgctgagcaaggaaagccagaacgaggcccgccgcctcgccgccgctatcgagacgctgaacaccgatcgcgaccggctgtattcgcgcgtcaccgtgctggagcaagggctcgattccgtcaccggtgccattgccaagcaggccgctgcgccggcgcagggcacgaagccgcaggacgcaacacccgtggccgcagctcccagcgtcgcaccggtcgcctcgacgccaacgccgccgagcgagaagccgcggaccgaggcggccaaggatgcgcagaaggaaaccttgcagaaggaaaccgcgaaggagcccgcgagcgcaccgccgcagaccgctgccgcagcctcgctcatgcaacaatcgccggcgaacaattcggcgctgccgaccattccgctggtgccgtccaagtcgatcatggcaccgccggatcccgccgcaccgaagctcattcagcatgacgccgccgagaagaaggccgagccgcccgcggcggccgaggtcgtggcggcaacaacaaagccgtccgatgcagccgagagcgaatcccctgccatcgcggttcagcagacccgctttgccatcgatctcggcggagccaactcggtcgacggcctgcgcgcgctgtggcgcggccttaccaagtccaatccggaaatcgcagcgctgcggccgatcatcatgatcaaggaaggcaccacgggcctgggaatgcagcttcgcctcggcgccggtcccctcgtcaacgccgccgtcgcagcgaaattctgcgcaagcctcgccgagaacgaccgtcactgcgagaccacgatattcgacggccagcgcctgtcgatgcgtggcggccaggacaagggacaggacaaggcgcaagagaagacgcaggaacgggttcaagacaagagcgcggagaagaaccccgacgcggtcccgcaagccgaaaccgcacccgcgagcgccaagcccgagaagcagcagcgccgccgcagctatccatcgaagcgctcgaagcgcgaggagcccgcgcccgccccggccgcgcagcctgcgcccgcgccgccgaaaccggaggcatcggccggatcgacgctgtcgtcgttcttcaggcggtga

SEQ ID NO: 1836 - DNA, 1356 bp, BradyrhizobiumColbertium
atgaccgcccgttccagcctcacgatcgtgctcgccgccggcgaaggcacgcgcatgcgatcgagcctgccgaaagtgctgcatccggtcgcgcatcagagcctgctcgcccatgtgctggccgccgctcccaggggaaccggcacctcgctcgccgtcgtgatcggaccggatcatcaggcggtcgcggacgaggccaaacgcatccgccccgacgcgatgaccttcgtgcaggccgagcggctgggcaccgcgcatgcggtgctggcggcgcgcgaagcgatcgcgcggggcgtcgacgatctcctcgtcgccttcggcgacacgccgctgatctcggccgagacctttgcgcggctgcgcgcgccgctcgccagaggcgccgccatcgccgcgctcggctttcgcgccgccgatccgaccggctatggccgcttcatcgtcgagggcgaccgcctggtcgcgatccgcgaacaggccgacgccagcgaagcggagcgcaggatcgatctgtgcaatgccggcgtcatggcgatcgacgggcgccgggcgcttgcgatcctggacaagatcgggaatgcgaattccaagggcgaatattatctgaccgacgcggtcgagatcgtccgcaggcaaggatgggagtccgtggtgatcgagaccggagaggacgaggtgcgcgggatcaacaccaaggcgcagctcgcggaagcggaaagcgtgctgcaggcgcgcttgcgcaaggcggcgatggaggccggcgtgacgctgatcgcccccgagacggtgtatctgtccgccgacactgtgttcggcaaggacgtcaccatcgagccgttcgtggtgatcggccccggcgtgtcgatcgcggacggcgcggtgatccactccttctcgcacatcgtgcagacgacgctcggaaagaaggtctcgatcggcccctatgcgcggcttcggcccggcacctcgctgggcgacggcgcgcgcatcggcaatttcgtggagaccaaggcggcgacgctggaggccggcgtcaaggtcaaccatctctcctacatcggcgatgccaccgtcggcgccaactcgaacatcggcgccggcaccatcacctgcaactatgacggcttcaagaagcacaagacggtcatcgggcagggcgcctttgtcggcaccaattcctcgctggtcgcgccggtgacgatcggcaacggcgcctatatcggctcgggctcggtgatcacgaaggatgtccctgacgacgccatggccctggagcgcaaccagcagaccatccgggaaggcggcgctgcgcgctatcgcgagatgaagacgggcggcaagaagccggagaagtga

SEQ ID NO: 1837 - DNA, 219 bp, BradyrhizobiumColbertium
atgaaaggctcgtccgaccgcaagggtctgtcttcgatgtcggtgcgcgcaagcgagaccacgggcacgcaccttgcgcattggccgccgccccagcgcggcaaggaaagcaagcccgtcttcatgaagcatccggagggcgagccggtgaagcgcgccaagccgcgcggctggcgcctgacccgtgcgatcttctccgaattcgccgacgaagaatag

SEQ ID NO: 1838 - DNA, 1827 bp, BradyrhizobiumColbertium
atgtgcgggattgtcggcattctcgggcgcgagccggttgcagagcaattggtggattcgctcaaacgtcttgaatatcgcggctacgattccgcgggcgtcgccacgctcgagggcaggcacctggagcgccgccgcgccgaaggcaagctgaagaacctggagaagcggctggaagccgagcccttgaagggcacgaccgggatcggtcacacgcgctgggccacccacggcaagccgaccgtcaacaacgcccatccgcacgcgacagagcgcgtcgccgtggtccacaatggcatcatcgagaatttccgcgagctgcgcgaggagctcgagaggaagggaacggtgttccacaccgagaccgataccgaaatcgtgctgcacctcgtcgacgatctgctcgcgcgcggcaacaagccggtggaagccgtcaagctgacgctggcgcgcctgcgcggcgccttcgcgctcggcttcatattcgccggcgacgacgacctcatgatcggcgcccgcaacggaccgccgctcgcgatcggttatggcgacggcgagatgtatctcggctccgacgccatcgcgctcggcccgttcaccgacacgatcagctatctcgaagatggcgactgggtggtgctgacgcgcaagagcgcgacgatctacgacaaggacggctacgccgtccagcgcgacaagatcaggcacgcggcctcgacgtcgctggtcgacaaggccaattaccgccacttcatggccaaggagatccacgagcagccggaagtggtcggtcacacgctggcacgctacgtcgacatggcgaccgagcgcgttgcgctgcccgtgaacctgccgttcgatttcaacgacattcgccgcatcaacatcaccgcctgcggcaccgctagctacgccggcttcgtcgcaaaatactggttcgagcgcttcgcgcgcctgccggtcgaagtcgatgtcgcctccgagttccgctaccgcgaggcacccttgcgcaaaggcgatctcgccatcttcatctcgcaatccggcgagaccgccgacacgctggcggcgctgcgctacgccaaggcggaaggcgtgcacacggtcgccgtcgtcaatgtgccgacctcgacgatcgcgcgcgagagcgagacggtgctgcagacgctcgcgggacccgagatcggcgtcgcctcgaccaaagccttcacctgtcagctcatggtgctggccagccttgcgatcgcggccggcaaggccagaggtgaattgtccgaggaggacgagaccaagctggtccatggcctcgttgaagtcccgcgcctgatggcggatgcgctcaccagcgagccccagatcgaaaagctcgcgcaccggatcgccaagtcccgcgacgtgctctatctcggccgcggcaccagcttcccgctggcgctcgaaggtgcgctgaagctgaaggagatctcctacatccacgccgaaggctatgccgccggcgagctcaagcacgggccgatcgcgctgatcgacgagaccatgccggtcgtcgtcatcgcgccccacgaccgcgtgttcgagaagacggtgtccaacatgcaggaggtcgccgcgcgcggcggcaacatcatcctgatgacggacgccaagggcgcggcagaggcgacggtcgagtcccttgtcaccatcgtcatgccggacatggcggcggcgttcacgccgatggtctacgccgttcccgtgcagctgctcgcctatcacacggctgtcgtcatgggcaccgacgtcgaccagccgcgcaatctcgcgaaatctgtgaccgtggaatag

SEQ ID NO: 1839 - DNA, 771 bp, BradyrhizobiumColbertium
atgaccccccgcgacgacgcgcctgcgcctcttgatcccgtcccggaaccgcataccggcctgatgggccgcttccgcaactatttcctcaccggcctcgtcgtcacggggccgatcgcgatcacgctctatctcgtctggtggttcgtcacctgggtcgacggcgtggtgcggccgttcgtgccgctggcctaccggccggaaacctatctgccctacgtcattcccggctggggactgattgtcgcattctttacgctgacgctggtcggtttcctcgcggccaatttgatcggccgcacgctggtcgacgtcggcgagacgttcctagggcggatcccggccgtccgcgcgatctatcgcggcctcaagcaggtgttcgagacgttgttctcgggcaagggctcgagcttccgcaaggtcggcctggtcgagtttccgtcgcccggcatgtggtcgatcgtgctgatctcgcaatcgccgaacgaggacatcgcgcgcagcctgccagggcaggaagagcacgtttcggtgttcctgccgtgctcgccgaacccgaccacgggcttctttttctacgtccccaagagcaagatcatcgaggtcgacctcaccgcggaggaggccgcgacgctcatcatgtcggcaggcgtggtgcagccgggctcgacgcccgattcgaagaaggcggcggcgctcgccggcgtggcaaacgccgcgcgcattgcaaacgcctcgacgctcaagccggagcctgcgaaagtggagtag

SEQ ID NO: 1840 - DNA, 870 bp, BradyrhizobiumColbertium
atgtcgaagatgacgtcaaagaccattgccatcctcgcccccggtgcgatgggcagcgcggtggcgcgccggctcagcgagaacggcgcacgcgtgctgacatcgttgcaggggcgcagtgaggcgaccctgaagcgggcggtggacgccggcatggtcggcgccaaggacgacgcgattgcggaggccgacatcatcctctcgatcgtgccgcccagtgaagcggtcgcgctggcagaacggctggccgcgctgatctccacgcgtgcccacaagcccatcgtcgtcgactgcaacgcggtcaatgtcgagactgtgcggcggatcggcgagatcatcgcctctgcgcaggcaccgttcgtcgatggcggcatcatcggttttccgccgcagccaggtggcaagagcccggccttctacatgtccggtgagcacgccagggacgtcatggtgctgaaggatctcggcctcgacgtgcggatcattgagggcccggtcggcgcggcgtcggccttgaaaatgtcgtatgcgggcatcgtcaagggcctcgccgggatcggctcggccatggtgatcgcggcaacgaaagcgggtgcggccgatgcgctccgcgacgaactggcactgagccagcccgcgattctggcgcggctcgaagtggcgttgcccgacatgattccgaaagcgtatcgctgggtcgcggagatgcgggagatttccggtttcctcgggcccgatcacccggccagccagatctacgagggcttcgcgcgctggttcgagcatctggccgaagatgcgaagggcgagggggcggacgcggagctgatgagggcttttgctgcgcgcgtcgcgcaaacgggggcctga

SEQ ID NO: 1841 - DNA, 2109 bp, BradyrhizobiumColbertium
atgcgccccagcctgctcaacccgctgtttgctcccgtgaccagcctgcccggggtcggtcccaagcaggacaagctcctgcaatatctgctcagccggagcgagacgccgcggctggtggatctgctgctgcatctgccgagccaggtcatcgatcgccgggcccggccgaaggtgcgcgacgccgccgtcggaaccatggtgacgctggaggtcaccgtcgatcgccaccgcccgcccccgccgcgcaacgcgcgcgcgccctatctggtctatgccagcgacgataccggcgacgtcgtgctgaccttcttccgcgccaagccgggctatgtcgagaagcttctgccggtcggcgagaagcgcttcgtctcgggcacgctgcagatgtatgacggcatcccgcagatcgtgcatcccgaccgcgtgctcgacgaggaggtgattgcaaagctctccggcatcgaccccgtctatcccctgaccgaaggacttgcgctcggctctctgcgccgcgcgatcggccaggcgctgcaaaagctgccggcgctgcccgaatggatcagcccggaggtgatgcgccgctgcaatttcccgcctgttgcggaagcgctcacccgcgtgcaccagccggccgagctcaccgacatcctgccggaccagccgttctggtcgcgcctcgccttcgacgagctgctggccggccagctcgcgctcgccctgattcgcgcgcagttgcgccgtcccgccggcgtgcgcaacgccggcgacggacacctgcgcaacaagatcatcgacgccctgccctacgcgctcacgccctcgcaacgcagcgccgccgcggccattgcggaggacctgaagcagcccgtgcgcatgctccgcctgctccagggcgacgtcggctccggcaagaccgtggtcgcgctgctggccgccgccgcggtcgccgaagccgggaagcaggccgcgctgatggcgcccaccgaaatcctggcgcgacagcacgtcaagaccatcgccccgctcgccgagcgcgccggcatgcgggttgcgatcctcaccggccgggaaaagggcaaggagcggcgcgagatcatcacgcagctcgccgacggcgagatcgacctgctcgtcggcacccacgccctgatccaggacgatgtgatcttcagggatctcgccctcgccatcgtcgacgagcagcatcgcttcggcgtgcgcgaacgcctcgcgctgacatcgaagggcgaagccgtcgacgtgctggtgctcagcgccaccccgatcccgcgcacgctggtgctgacctatttcggcgacatggacatctcggagttgcgcgagaagccggccggccgccagcccgtcgacacccgcgccgtcgccatgagccggcttggcgaggtcatggacggtgttggccgcgctttgcaatcgggaaaactggtctactggatttgcccgctggtggaagagtccgaggcggaaggcaccgagcatctcaccaacgcgaccaaacgtttcgagagcctgcaaaagcgcttcggcgaacgcgtcggtctcgtgcacggccagatgaagggcacggagaaggaccgcgtgatgggccagttcgccgcccacgagatcgggctcctggtcgcgaccaccgtggtcgaggtcggcgtcgacgtgccggccgcgaccatcatggtgatcgagaatgcggagcgctttgggcttgcgcagctgcatcagctgcgcggccgcattggccgcggctcggaggcgtcgacttgcatcctgctctacagcgagccgctcggcgagatgtcgaaagcccggctcaaggtgatccgcgaaaccaccgacggtttccgcatcgccgaggaagacttgaagctgcgcggcgaaggcgacgtcttgggcgtgcgccagagcggcctgcccggctaccgcatcgcgcgcccggaggtgcacggccagctgatcgcccaggctcgagacgaagcgctacgcatcctgaaggacgacccgaagctcaagggcgagcgcggcgaggcgctgcggtgcctgctgtatttgtacgagcgagacgaggcgatcccgctgatcggcgcgggctag

SEQ ID NO: 1842 - DNA, 633 bp, BradyrhizobiumColbertium
atgatccggctcctgttgaccagcgggcgcggtccgggggaatgccggatcgctgttgcgaagacggcggctctcctcattgccgaggcgaccgcgctcggtctcgacaccgactatctggagggaccaaatccggacgcgcatggtccggcatcggccatcgtcgtcgtccacggcgatcccgcggccgccttcgccagtccgtggatcggtgtgatccaatggacggcgcagagtccgttgaggccccatcacaagagaaagaactggttcatcggcatcttcgagctgccaccgctgcctgacgtaccgaaggccatcgacgcccaggacgtacgcttcgaagcgttccgggccggcggccccggtggccagcaccagaacaagaccgagagtgcggtgcgggccattcacgttccgagcggcctttccgtcgtcgcgcgcgaggaacgttcgcaacatcggaacaaggcgctggcgctggaccggctggctgggctgctcaggctgcaagcggagttgacggcgatcgcggcccgaaacgaagctcatgcagcccacgatcagctcgaacgtggccggccggtcaagcggttcaaaagcccgaattttcaagccgtctggcagcgttga

SEQ ID NO: 1843 - DNA, 1194 bp, BradyrhizobiumColbertium
atgggcaattctgccaacgtggacggccgcgcgccgatccacatcttcgcctcgtccaattcatggatcgaaggcaacgcaacactacaactggaacacgtcgctgggctacctggagtccgggccgtcgctgccatgcccgatctgcatccgggcaaatatggccccgtcggttgcgccattctgtcggaccggatttatccgcagctggtcggctccgacatcggctgcggcatgggcctcttcgagctggacatcgcggcacgcaagctgcggctcgatcatctggccgaacgcatgcatgcgctcgaccggccctgggatggcggtgtggaaaccgaattggccgacgcgggcattggcgcgagcatattcgatgccgcgctcggcagcatcggtggcggcaaccatttctgcgaagtccaagcgatcgacgagatcctcgcgcctgaggcggccgcgcgggccggcctcgaccggaaccttgcctatgtcctggtccattccggctcccggggccttggcttctcgatcctggagcaggctctgcgtgatggaccagatgcgctccccatcggaagcgaccggggacaagcctatctggcggcgcacgatcacgccgtgcaatgggcaagactcaatcgtcgcatcattgctgagcggacaggagtggcagcacgcgcgagcctgcgccccatcagcgacctcgcgcacaacatgatcgagcaacaggctgacgcaactggcgaggccctggcgctacatcgcaagggagtcgcccccgcagatcgcggcctggtgccggtgccgggatcgcgcggaacgctgtcctatctggtcgagccactggcggagatgccgggcgatgcacttgcttcgctcgcacacggtgccggccgcaagtacgatcgcgcctccatgcacgggcgcgttcgggtcaagaagtccgatgtcgcacggctggagcgcaatcccttcggcggcatcgtcgtctgcggcgatcgcggcctgctcgccgaggaggcgcccgacgcctacaagagcatcgagcgcgtcatcgccgacctcgtggagttcggcctcgcgcgcgtcgtggcgaccttccggccgctgctgaccttcaagagggcgcagtcgagcgtcgcggtgcgggacgccaggcgcggcaagcgctggaaggaggatcgccgatga

SEQ ID NO: 1844 - DNA, 126 bp, BradyrhizobiumColbertium
gtggcttgcgacttctccatttcgccgctatgtgtctcccccgatccggcgcccatttggcgcgatcatcagggagaaggctcgatgacgatcatgtctcgccgccccgtcgagggcatcgcctaa

SEQ ID NO: 1845 - DNA, 291 bp, BradyrhizobiumColbertium
atgacgggaacgacacgatcgagcgaggggctggacgaccgccgcaagcggcttctgttccgctgctggcatcgcggcacgcgcgagatggacttgatcctcggccgcttcgcggatgccgagatcggcaacctgtccgacgccgagctcgacgagctcgagcgcctgctcgaggtcaacgatcccgatctgtatgccgccatcagcggcgacaaggtattgccggcggacgtcaccggcgcgctgtttgcccgcatcaaggcgttcccgattgcggaacgcgacgtatga

SEQ ID NO: 1846 - DNA, 1020 bp, BradyrhizobiumColbertium
atgaagcaggggatgaaatcaccggccgagcagctgacgcccggccgtgccctgacgcttgccaatgtcgcggagggcgcggaagggctcgtcgtctccgatctcgcccgagcgatcgctgcgcggccgaagaagccggccgtcagcctcgctgtggtctgccgcgacggcgggcgcatgcagcagctcgagcgcgcactacggttcttcgcgccggatctgccggtgctgacctttccggcctgggactgccagccctatgaccgcgtctcgccgcatggcggcatcctggcccagcgcctgacgacgctggcgcggctggcctcgctgacgggcagcgacaagccgctgatcgtgctcacgaccgtgaatgccgtcgtgcagcgcgtgcccgcgcgcgagctcgtcgccgcgcaggcgctgtctgtcgcgcccggcaatgtggtgccgatggataccatcgtcgcctggctcgagcacaacggctacaaccgctcatcgacggtgcgcgagcccggcgaatacgccgtgcgcggcggcattttggatctgtttccggccggcctcgagcagccggtgcgcttcgacttcttcggcgacagcctggaatcgatccgctcgttcgacgccgagacccagcgcacgctgctcgacatgcgttcgctcgacctcgtgccggtgtccgagttccagctcgtcaccgagaccatccgccgcttccgcatgggctatgtcccgagttcggcgcgcccgagcgcgacgatgcgctctacgaggccgtcagcgaaggccgccgtcatcctggcatggagcactggctgccgctgttccaggacaggatggacaccctgttcgattatctgcaaggcgcggctgtcgcgatcgagccgcaggccgaggacgccgtgcgcgaacgcttcaagcagatcctcgactattacgaggcccggcgcgaggcaatggagcatcccgggggcggcgccatctacaagccgctgccgcctgatcggctttatctga

SEQ ID NO: 1847 - DNA, 2436 bp, BradyrhizobiumColbertium
gtgccgaccgacggcaccagcgtggtcgacgccggggcgcgcaagggccgtgacttcgcgccggagcgcaacgacaccaaggtcaacgtgttcgaatccgtcgtcgcgcatgtgatggccctgcaggcccagcgcaagaaagtcgtgatcgcgctgtggaccgaaggctcgcgcgaccgcatgacctcgatgctgcgcgaccacaagctggcacatatcaccagcgtcaacagctggcggacggtgcaggcgacgccgcgcaacgaaaccatgctcgccgtgctcggcctcgaaagcggcttcgagaccgacgagattgcgctgatcagcgaacaggacatactcggcgaccgcctggtgcggccgcgcaaggccagccgcaagctcgacaatttcatctcggaggtgacgagcctcaccgccggcgacatcgtcgtgcacgtcgatcacggcatcggccgcttcatcgggctgcagaccctcgacgtcgccggcgcgccgcatgattgtctcgagctgcattatgccgccgagacgaagctgtttctccccgtcgagaacatcgagctgctgtcgcgctacggctccgaccagaccagtgtcgagctggataagctcggtggctcgggctggcagacccgcaaggccaagctgaagaaccgcatccgcgagatcgcgggcgagctgatcaagatcgccgccgagcgcatgctgcatgaagcgccgaagctgccggtgcagcagggcctctacgacgagttctgcgcgcgcttcccctatgacgagaccgaggaccagctgggcgcgatcgagtccacgctgaaggacctcgaaaagggccggccgatggaccgcctgatttgcggcgacgtcggcttcggcaagacggaagtcgcgctgcgcgccgccttcgcggtcgcgctcgacggcaagcaggtcgcggtcgtggtgccgaccacgctgctggcgcgccagcactacaggacgttcagcgagcgattcaagggctttcctgtcaacgtcgcgcaggcctcgcgcctgatcccgaccaagcagctcaacgaggtcaagaagggtcttgccgacggctctgtcgacatcgtcgtcggcacccatgcgctgctcggcaaggccatcaaattccgcgatctcggccttctcatcgtcgacgaggagcagcatttcggcgtcagccacaaggagcggctgaaggcgctgcgtgccgaggtgcacgtgctgacgctgtcggcgacgccgatcccgcgcacgctgcagctggcgctcaccggcgtccgcgagctctcgatcatcgcctcccccccggtcgatcgcctcgcggtgcgcaccttcgtcgccccgcacgatcccctgatgatccgcgaggcgctcttgcgcgaacgctatcgtggcggccaggcgttctatgtggtgccgcgcatcgacgacctcgccgaggtcaaggacttcctcgacaagaacgtgccggagatgaaggtcgcggtcgcgcacggccagatgccgcccgccgtgatcgaggacatcatgacggcattctacgacggcaggttcgacatcctcttgtcgaccaccatcgtggagtccggcctcgacattcccaacgccaacacgctgatcgtgcaccgtgccgacatgttcggcctggcccagctctatcagctccgcggccgcgtcggccgctccaagctgcgggcctatgcgctgttcacgctgccggctcagcagaagatcaccgcgcaggccgagcgccggctcaccgtgctgcaatcgctggagacgctgggcgccggcttccagctcgcttcccacgacctcgacatccgcggcgccggcaatctcctcggcgaggagcagtccggccacatcaaggaggtcggcttcgagctctatcaatcgatgctggaagaggcaatcgtcaacctcaaggccggcgtctccgagcccgctgccgaccgctggtcgccgcagatcaccatcggcatgcccgtgcttatcccggacgactacgtcagcgatctctcggtgcggctgtcgctgtaccggcgacttgccgatctcgacaccgaggaggagatcgagaattttggggccgagatgcgcgaccgcttcggcgtgctgccggacgaggtgcgctacctcttcaaggtcgccgcgatcaaggcgttctgtcgccgggccaatgtcgagaagatcgacgccggcccgaagggcgccgtcatcgtcttccgcgacaattccttcgcctatcccgatcgcctcgtgaccttcatccgcagctatggccaggcagccaaggtgcggcccgacatgaaggtggtgttcctgcaggactgggagacgcccgaggagcgtcttgccggcaccacggagatcatgcggcaattggcgcagctcgccgagagcaagaaggcggcgtga

SEQ ID NO: 1848 - DNA, 162 bp, BradyrhizobiumColbertium
gtgagcatgcaacttcggagccagcgcggttccggagtctgcttgcagtgtccagacagcgacataacgtcacttgcggatcagacggcgcgaggccatatcccgctcatcgagtttcggccgaacgacttggcctcgccgctgacaagcgcgcctgactga

SEQ ID NO: 1849 - DNA, 312 bp, BradyrhizobiumColbertium
gtgttcgcggtccggatcgatgttaacaggcacccttgccacctcagtcgtttctcagtcgtttcgatggcgggtcaatccgcaaccggtatgaaaaacccgcagccggtaaaccggccgcgggtcaagagaaccgaagctctgccagtacatccgtggtcaaagcttcatcatgacgattgcggcacctattcggcgcgcagattctcggccgcagacttgccagttcggcggtctgcaacgatttcaaaagaaaccttctgcccctcgttgagggtattcaagcctgcgcgttcaaccgcgctgatatga

SEQ ID NO: 1850 - DNA, 1176 bp, BradyrhizobiumColbertium
gtggcaagggtgcctgttaacatcgatccggaccgcgaacacgacgacatcatgtatccgcaggttctgccgttcctgttgatccacgccggatgcgtcgcggcgatctggacgggcgtctcgtggcaagcggtcgggctttgcgtcgcgctgtactggctgcgcatgtttgcgatcacggccggatatcaccggtacttctcgcaccgggcctacgcgaccagccgggtctttcagttcatccttgccttccttgctcagagcagcgcgcagaaaagcgtgctgtggtgggctgccaagcaccgccatcatcaccttcactcggacacagcgcaggacgtgcattcgccccggcacaaggggttcctctacagccatgtcggctggatcttctatcgtcagcatgatgggaccgacctcgtcaaagtggccgatcttgcctcgtatcccgaactgatgtggctgcacaggctggagttgctgccggcagctgcgctggcgggtctgtgctttttcgttgccggctggtccggactcgtggtcggcttcctctggagcaccgtgctgctgtatcacgccacgttctgcatcaactcgctggcccatgttcacggacgcaagcggtatgtgactggtgacgactcccgaaacaactggctgctggccctgttgaccatgggtgaggggtggcacaacaaccatcacgcctatcaggccagtgctcgacagggcttctactggtacgagatcgatctgacctattatgtcctggtggtcttgtcctggttcgggatcgtccgggacttgaagatgcctcccgctcaggtcctgcgcaatcagcaacggttgggatcgcgcgtggtcaggcaggcggcggaacagctcgccgcccgtttcgattccgagcgcatcgcgctggcgatccggacctcgatccatgaaaccgaattgtcggtccgtgatgctctcactctgttgcagcagcgtgccggcgaacgtttgtccagcatgccaacgcgcgatcagctgctggctgaagcgcagcgcatgttcgtgaagaccatatcgctggacgacattgtcgaccgtgcctacgagctcctgaacgattcggtcggtctgctcctggcggctcccgctgtgtcgattaaggcgaaagcggagggtggcgtttag

SEQ ID NO: 1851 - DNA, 237 bp, BradyrhizobiumColbertium
atgcgcaagtttcccgatcccaccgaccaagaactgagtgaggggccgcaagccgtggccttccaaatcgcgaatgggaacacgcgacagaactgtatcctgcaaacgaacttgccgaccaaggtgcaagcgcagcgatatcttctcgcgaactggccggccgtcgagaagatggcccgcgacgctctcgcgctggggaagttcgagaacggcgagatcaggctcgtgatgccgtag

SEQ ID NO: 1852 - DNA, 1224 bp, BradyrhizobiumColbertium
atgtcccaggcgggcccgatcctgtttgtgtccgatgccggacgccccggtttcgtggcggcgctcgacgaggcccggctctttccggtcgtcgacaccgactgggctggcgcgacacgcgcggtcgaagaggtgcagccggccgctgtcctcgccgcgatgcatgccggacaccagccccatatcgcaacgctcgcaaggaagatcgcggatcaatcgccctacctgcccttcgtggccctcgatgcggcgggcatgcagcctcacaacgccctgcccttctcctcgcgcggtggcaatcccgatcggctgatcgcacggcttcgcgctgcgctgcgggtgcgcacccttcatgccacggtgctgcgccggctacccgaagtgaaggtcgcgctgccgcagggcgatcccgcacgcgatgcgaccgtactcctgatcggtcgcggcgcggcctatcccgcgctctccgtggcgttcggtgaacgcgtcggcgtggtcggcgcgctctcgatcgaggccgccgccaaacacctcaatacccgcgaccttgacggcgtcgtgctcgccgaaggctttaccgcgcgcgtcaccgacgcatttctcaccgtcctcgccgaggacacccgcttccgcagcctgcccgtgatcgtcaccgcgcaccagctgacgcagacctacgaccttcccaatctcgagctgatcccgggcgagccggcaagaatcgccgccaatgcgctgccgctgattcgtcaacacgcgatggaagcgcagctaagccgcacgctgcgctcgatcgatgcgggcggctggctcgatccgcgcagcggcctcctgacggtggaagccttcgcccgcgatttcgccaaggcggtcgagcagacgctcgcccgcggcggcggtttgtcggtcgcgcgcttcgccttcgacgccaacaattcccgcgcccagctcgatgccgcgcgcatcctcagccgtctgatgcggcagatggattttggcactgcacagaaggatggctcggtcatcgtcgtgttcgccgagaccgatttccgcaccgcccacatgatcgcccgccgcctgtcggcggtgatgcggcacacttcgaacggcaagcacgagatgcgcagcgatcccatcgtcagcgtggactcgctgtcgccgtcggacacagcgcggtccctgctggcacggctgtccgcagaggcgtcgcgggcggcgtcgtag

SEQ ID NO: 1853 - DNA, 1503 bp, BradyrhizobiumColbertium
gtgaaccagccagcaatatcgccgacgctcgacacgttgtttcagcgcacgctgatgcgacagccgcacgcgctcgctctgctcgatcccctcaacaaggcgcgcgtgaccgggcaccagccgcggcggatgacctatgccgaggccgatacggccatcgaggcgctgtcggcgcatttcgtcgaatccggcctgcccgccaactccgtcatcgcgatccagctgcctgccacggtcgagttcgtgctcaccgtgctcgccgcccatcgcgccggcctcgtcgtcgccgtgctgccgctgctctggcggcatgcggaactgacagccgccctcaaccgcaccgcggcgcgcgccatcgtcaccatgagcacggtcgatggtgtcagctacgccgatcttgcgatgcatgcggccgcagaagccttctcgatccggcacgtctacggcttcggaagcgacctgcccgaaggcatggcgtcgctcgacgacgtgctggcgcgcccgcccggcaccacgcgggccgtgatccaggacggccgcaaggcggctatgatctccttcgacgtcaccgccgagggctttcgcccggtgccgcgcccgcatttcagcctgatcgccggtggactcgcgatgtcgctcgaagccgacatcaagcagggcgcgaccgtgatggcggcgttcgcgccgatgtcgttcgctggcctcgcctcctcccttgccgtgtggctgctctcgggtggcgcgctggcgctgcaccatcccttcgagaacgaggtgctggagcagcagatcaacgcgcacgaatgcgaggtgctgatcgcgccggcccagctcgcactgcgcctcggcgtttccgacctcgcggcgcggatgccctcattgcgcaacgtcatcggcctgtggcgcgcgcccgagcaggtcgccgcaagcgatgcctggatcgcgccgcatgcaccgctgaccgacgtctatctgttcggcgaggccgggctgttcggcgcccgccgcggcgaggacggcatgccggtgccggtcatgcccgggccgcacggcgccccgcgcgaacaatccgggtcctccattgccggcgagatcctgctgaccccgaagggcacgctcggcctgcgcggcgcgatggtgcccatcgcggcctatgctccgccgcagccagtcggcgagacgctgacggcgcagccgccccgcgactatgtcgacacgggctatgcggcacggctcgaccgtccgagcggcgcgatctgcatcactgcgcccccttccggcatcatggccgtcggcggctaccgcttcctttccaacgatctccaggaatgggcccgacggctcggccagggcgccctgctcacggcgctgcccgaccgcctctcgggtcaccggctggccggacgcgcccaggacaatgcccgcgcccgcgaggcgctcagcgagcttgggcttaaccctctgatggtcgaggcttttcgcgatcgctccgggccggcctag

SEQ ID NO: 1854 - DNA, 1863 bp, BradyrhizobiumColbertium
gtgccgatgttcatgttccagcgcctcgtcgagggcccccgacccggcctttgccgtctcgcccaggccctggttctggccctcgccctcgggctgtcggccggcggcgcccgggcggagcagtcccacgctatcgccatgcacggcaagccggccatggctgccgatttcacccacatgccctatgccaatcccgacgcccccaagggcggtcgcctgacctggggcctactcggtaccttcgacagcctcaatcccttcatcgtgaagggattggcggtgcagcccgtccgcaactacgtggtcgagagcttgctggcccgcgggcaggatgagcctttcacgctctacggcctgctcgccaggtcggtcgagaccgacgacgaccggacgttcgtcacgttccgcctcgatccgcgcgcccgcttctccgacggcaagccggtcctcgccgaggacgtgctgttctcctggcaactgctgcgcgaccacggccgcccgaaccaccggcagtactacgccaaagttgccaaggccgaggccctcggccccctcaccgtccgcttcgacctcgcaggtgccaatgaccgcgagctaccgctgatccttggcctgatgccgatcctgccgaagcacgcgatagacgtcgcgaccttcgaggagacgacgctggcggccccggtcggctccggcccctatcgggtcactgcggtgaagccgggcgccagcgtgacgctcacgcgcaatcccgactattggggccgcgatctcgccatcaatcgcgggctctacaatttcgacgagatcaggctcgattattttcgcgaggccaacggccagttcgaagcattcaagcgcggcctctacgatttccgcatcgagcacgagccgctacgttggcacgatggctacgactttcctgcggcgagaaccggcgaggtgatccgcgacaccatcaagcccggcgtgccgcaaccgtccgaattcctggtcttcaatacccgccgcccgatcttcgccgacatccgcgtacggcaggcgctgacgctgctgttcgatttcgagctggtcaaccgcaactatttcttcgggctctattcgcgcgtcgcgggctatttcgccggctcgaacctgtcggcctatgggcgtcctgcggacgcgcgcgagcgtgagctgctgaagcccttcgccgcacagatcccgcccgacatcctggatggcagctaccgcctgccggccaccgacggttcgggccgggaccgtacgactctgcgggccgcgctgaagctgctgtcagaggccggctacgatctcgagggcaccgtgctgcgcaaccgtgcaaccaaggctcccttcaccttcgagatcatggtcacgacccgtgaccaggagcgcatcgcactcgcgttccagcgcgacctcaggcgtgccggcatcgagccgaccgtgcgctcggtcgatcccgtgcagttcgaccagcgccggctcgcctatgagttcgatatgatccagaaccgctgggaccagtcgctctcgccgggcaacgagcaatatttctactggggtagcgccgccgcagacaacccagggacccgcaactacatgggcgccagagatcccgccgtcgatgccatgatcgccgccctgctcgaggcccgtgaacatacggacttcgtctcggcggtgcgcgcgctcgaccgcgccctgatcgcgggcttctacacaatccccctgtttaacgtatcggagcaatggatcgcgcgctggaatcggatagaacggccgaaggccacttcgctgtccggctacttgccggagacctggtggtcgaaagggcagccgcaagctcatcaagcaaagtga

SEQ ID NO: 1855 - DNA, 801 bp, BradyrhizobiumColbertium
ttggccgcgtccgtccggccgcgcgggcgacttctcgtcctgttgacggcgacggcgttggtcgtcccgtttgccgctgaggcccagactcccgcaccggctcccggcgcgcccaaggcgactccggctccgaaggctgctcccaaggccgctcccaaggctccggcgcccgcagcgtctccgcaggctcagccggctcccggccagggcggccagcagcagggcgccgcccagccggcggatcagcagattcagctgatctacgccccctggaccaagttctgcctgaagggtcaggacgccaacgccaagcaggtctgctttaccggcaaggacggccgcatcgagtcgggccagccggtcatcgcggccgtgatcatcgagccggaaggcgagcccaagaagatccttcgtgtcacgctgccgctcggcatgcagctcgtgcacggcacccgcatcatcgtggacagcaatgcgccgctgcagcagccctacgtgatctgcttccagaacggctgcatgtcggactacgaggcgacgcccgagctcatcaacagcatgaagaagggccagaatctcgttgtccaggcaatcaatgccaatggcgccccgctgaccctgccgctgccgctcgcgggcgaattccagaaggcctatgacggtccgccgaccgatccgaaggtgttcgaggaaacccagaagaagctccaggaagagcttcagaagaaggccgaggagcagcgcaagaagctcgagcagcagggtggggcgcccggcgcagctccgaccggtcagaagtaa

SEQ ID NO: 1856 - DNA, 333 bp, BradyrhizobiumColbertium
atgattaaagcgcggaccgccaaattccagatcggacaggtcgttcgccaccggatcttctcgttccggggggtgatcttcgacatcgatccggaattcaacaacaccgaggaatggtggctatcgatccccgaagaggtgcggccccacaaggaccagccgttctatcacctgctcgcggagaacgctgagtccgaatacgtcgcctatgtttcggagcagaacctcttgccggacgattccggcgagccggtcaggcattcccaggtcgccgagattttcgtcaaggacaaggccggcggctatcgcccgcgcaatccgtcgctgaactga

SEQ ID NO: 1857 - DNA, 954 bp, BradyrhizobiumColbertium
atggccgacatcctcaatctagctctaccttattttggattgatcttcgtcgggtttgcctgcggcaaggtcaaggccctgccggaatcggggctggcctggatgaacttcttcctgctctacgtgtcgctcccggcgctgctgttcgcgatcatgtcgaagacgccgttcgccgatctgaacaacccgccgttcctggtcgcgactacgctgtcgacggtggcagccttcacgctggcgctggtggtcggcaaggtgtttggccggctgaccttgcgcgaggcaaccctcgcaggtctctgcggcggctacggcaatatcggctacatgggtcccgggctcgcgctcgccgtgctcgggaccaaggcttcggcgccgacagcgctgatattctgctgcgacagcatcttcctgttcacgatcgtgccgctgctgatcgaactctccgaccgcgaccatccctcgctcgtccatgccttcggagtcgtgctgaagcagatcgtgctcaatccgctgatcatgtcggcctgcttcggcgccgcggtggcggcgctgcatatcgagatgcccgtagcgctcgatcgcacgattaccttcctgcagaacgcagctgccccaactgcgctgttcgtgctcggcgtgacggtggcgttgcgcccctttgaccgggtgccgtgggaagtgccgggcgtgatcgccgtcaagctgctgttccatccgcttgctgcattcggcttgatgctcgcgttcgggcccttcgcgcagccgtgggcggccaccgccgtactgatggcctcgctgccaccggcgctgaatgttttcgtgattgcccgacagaacgatgcctggatcgaatccgcttcggtcgcagtgctgcttggaaccttcgcgtcggtggtcacgctgatcagcgtgatgtggataatccagagcgggcggctgacgtttccctga

SEQ ID NO: 1858 - DNA, 1194 bp, BradyrhizobiumColbertium
ttgtcgttcatgacagacgcatcgacactccatgacgcagccgtgatcggcggcggaccggcggggctcgcagcggccatcgcactggcgcaggcgggcgcgcggacggcgctggtggcgcggcgtgcgccctatgcggacaatcgcaccaccgcgctgttgggcgcctccatcgatctcctggaaggcctcgacgtctggccacgctgcaaggacaaggctgcagcgctggaggtgatgcgtctcgtcgacgacaccggccggctgtttcgcgcgccggaggtccggttctcctgtcacgagatcggcctcgatgcgttcggctacaatatcgacaaccgctcgctgatgctggcgctggaagagcgcgccgtcgagttgccgaacctcgtccgcttcgacgacgaggctgaaagcgtcgtcatcgaatccgacgatgtctcggtgcgcacggcttgcggacaatttctttcggcccggctcgtggtcggcgccgacggccggcactcgctgtgccgcgaagcagccggcatcgaggtgacgcggcgcgatctgaaccagaccgcgctgaccttcaacgtcagccatgcccggccgcatcgcaacgtgtcgaccgagttccatacgccgcacgggccttgcgtgttcgtgccgctgccgggcgaccgctgcagtatcgtgtgggtctcgacctctgcggacgccgagcgtctgcgcgccctgagcgatgaggaactgtcagccgcgatcgagaagcagtcgcattcgattctcggccgcatgacggtcgaacccgggcgcaacctgttcccgctggcgatcgaacgcccaaaatccttcggccgcgatcgcattgcgctggtcggcgaagccgcccatgttgtcccgccgatcggggcacagggcctcaatctcggccttcgcgatgctgccgacattgccaggctcgcgagcgacgcgatcgccgcgggccaggatcccggcgcggacgaagtgctcagacgctatgaccgggcgcgacggccggacattttgagccgcacctttgcgatcgacatcgcgaaccgctccctgctcaacgacttcctgccgctccagccggtccgcgccgtcggcatgcacctgctcggcgctgtcggcccgctccgccgttttgccatgcgcgagggcctgacaccgacgtggcggcgctag

SEQ ID NO: 1859 - DNA, 768 bp, BradyrhizobiumColbertium
atggcggatgtgcaaaccggtcccattctgatagcagaagccatggacacccagcaggattcactcaagccaagaccggcgatccgcgccgcagccttctcggtgcacatcttcaccgcgttcggcgcggcgctcgcgctgcttgccatgctggaggccgtgcgcgagcactgggcggcgatgtttcagtggcttggcctcgccctggtcatcgacgcgatcgacggaccgatcgctcgccggctcgacgtcaagaacgtgcagccgaactggtcgggcgacgtgctcgatctcgtggtcgacttcctcacctatgtcttcgtgccggcctatgcgatcgtggccagcggcatgctgctgccggtggccgctcccttgctcggcatcgccatcatcgtcaccagcgcattgtatttcgccgatctgcgcatgaaggccgacgacaatcatttccgcggcttccctgcgctgtggaatgcggccgcgttctacctgttcctgctgcactggccgcctttgtggtcgacgctgctggtggccgcgctcgtcgtgctgaccttcgtgccgttccacgtgctgcatccggtccgcgtcgtgcgtctgcgctggctgacgatgtcgctgatggcgatctgggccgtgctcggcctctacgtgctggcgatggattttcgcgtcggtagcggcgtgaccatcgtgctctgcgccatcgcgctctggatcagcttcagcgacaccttgatacgcctggggagatcgttcgcatga

SEQ ID NO: 1860 - DNA, 726 bp, BradyrhizobiumColbertium
atgatggagcttcttgccagccccgaagcgtgggccgcgctgctcaccttgacggcgctcgagatcgtgctcggcatcgacaacgtcatcttcatatcggtgctcgtctcgcgccttcccgaggcgcaggctcaccgcgcccgccagatcgggcttgcgctggcgctggtcttccgcctcatcctgctcagtcttctggtctggctgatcggcctgaccgagccggtgctctcgatgaagggctacgccttttcctggcgcgacctcatcctgatcgggggcggcctcttcctgatcgccaaggccacgcatgagattcacggcgaggtcgaatccgatcacggccggagcgagaagaaatccacaggcagcgccttcttctgggtgatcttccagatcatcgtcgtcgacctcgtattttctctggattcgatcatcaccgcgatcggcatggcggaggacatccgaatcatgatcacggcggtcgtgatcgcctgcgcggtcatgtacgtttcggcggggccggtgtcgcgcttcgtcgcggagcatccgaccacgaagatgctggcattggcattcctggtgctgatcggcgtcgcgctggtcgccgacggattccagttccacattccgcggggctacatctacttcgcgatcgcgttctcggcggcggtcgagctcttcaacgtgctggccagacgcaaccgcacgaaagccgggaactag

SEQ ID NO: 1861 - DNA, 114 bp, BradyrhizobiumColbertium
gtgcacacggacggctttggtcatcagtcgacctcctcttttcgcgggcaagcgaaagccatcgcgcccgccttgtcaactcgaggccgatcgaggcgggccaaacacgactag

SEQ ID NO: 1862 - DNA, 975 bp, BradyrhizobiumColbertium
atgaccaaagccgtccgtgtgcacaaggtcggaggccccgaagccctggtctatgagagcgtcgacgtgccggcgcccgggccgggcgagatgcgcatccgacagcatgcggtcgggctcaacttcatcgacgtctattaccgcaccggcctttacaaggcaccggggcttcccttcatcgcgggtaacgaggcctcgggcgatgttgtcgcggtggggcccggcgtcacgaattttcatcccggtgatcgcgtcgcctattaccacaatctcggcgcctataccggcgagcgcaacattccctgggagaagctggtcaagctgccggaccacatcacctacgagcaaggcgccgtgttgatgctgaaggggctgacggtctggtatctcctgcacaagaccttcaaggtcgagccgcatcatcgcgtgctgatccatgccgccgccggcggcatcggcctcttggcctgccaatgggcgagggcgctcggtgcgcacgtcatcggcacggtcggctcgcgcgagaaggccgagcttgcggaggccaacggctgcgatcacgtcatcctctacaacgaggaggatttcgtcgcccgcgtgaagcagatcagccgcaacgagggctgcgacgtggtctatgacggcgtcggcaaggcgacattcccgggctcgctgtcctgcctgaagccgcgcggcatgttcgtctccttcggcaatgcctccgggcccgtgccgccgttctcgatcgccgagctgaacaatcacggctcgctgttcgcgacgcggccgaagctcaacgactatgtcggcacgcgcaaggaactgctggaaggcgccgacacgctgttcgcggccgtcatcaacggcaagctgcacgtgccgatcaaccatgcctacgcgctgaaggatgcggcgaaggcgcatatcgatctcgagagccgcaagaccacgggcgcgtcgatcttgaagccgtag

SEQ ID NO: 1863 - DNA, 1197 bp, BradyrhizobiumColbertium
atgaccaccgccacccatccgtatgatgcgttgatggacatcaccgcacggcccaaggccgtattcgtccgcggcgccggctcctacctctgggacgacagccgcaagcgctatctcgatttcgtgcagggctgggccgtgaactgtctcggccactccccgcccgcggtcgctgaggcacttggcgcgcaggccaggcggctgctgacaccgagcccggccttctacaacgaaccgggcctgaagctggcgcaggcgctcgtcgagaacagtgcgttcgaccaggtgttctttgccaattccggcggggaagccaatgaaggcgcgatcaagctcgcgcggaaatatggcagcgtgcacaaaggcggcgccttcgagatcatcagcttcgaaggcggcttccatggaaggacgctggcaacgatgtcggcttcgggcaagaaggcgttcgagccgctgttcgagccgaaggtcgccggcttcaagaaggcgaagctcaacgacatcgcttcggtcgaagcgctgatcaacgacaacaccgtcgccgtcatgcttgagccgatccagggtgaatccggcgtatggccggcgagcgatcagttcctgcaggagctgcgcgcgctgacgcaggcgcacggcatgctgctcattttcgatgagatccagaccggcatgggccggaccggaaaactcttccattacgagcacacgggcatcgcgccggacatcatgacgctcggcaagggaatcggcggcggcgtgccgctcgccgccctgctcgcgaccgaacgcgcctcctgcttcgagcacggcgaccagggcggcaccttcaacggcaatccgatcatgtgcgcggcgggcctggcggtgcttcaggaggtcagcaagccagacttcctgaaggctgtcgccgagaccggcctcttgctcgaaagcgagttgcagaaagtctcggcccggcacggcctcggcggcgtgcgggggcgcggcctcctgctcgcgctcgacctcaagctgccaatcgcgcccggcatcgtcgcgcaggcgttcgaggccggcgtgctcctgaacgcgccgcaagtcgacacgctgcgcttcatgccggcgctgaacgtcacgaaggcgcagatcgccgagatggtcgattgtctcgacgggatcttgaccaaggccggcgcggcacggcgcgtggcgtag

SEQ ID NO: 1864 - DNA, 642 bp, BradyrhizobiumColbertium
atgagccgccttccggacatgctgcgcacgcagcgcttcgacgactatcgcttctaccaccagagcacggtcaaccagacgctgcacctgatcagcgccgtcatcttcctcgccagctacgcccttctgttcaaggacccggcgctcgccggcatcgtcggctggctcgcgatgctgacgcggcagaccggccacttcttctttgagccgaacggctatgacgccgtcaacgacgtcagcaacgactacaaggaagcgatcaaggtcggctacaaccagacccgcaagatcgtgctgctgctggtgtggggcagcgcgccgatcgcgctctacctgtatccgacgctgttcggcctgttcgatgcgccggccactcgcctcgacttcatccggcatgtcggcacgctctggcttgcgatcggcatcggcggcggacttgcgcgcatgctccagctcttcgtcacgcgcgacgtcacgaccggcctcgtctgggtgttcaaggtgctgaccgacccgttccacaacatcgcactgtactggaattcaccgctcaagctgatgcgcggcgagctcatcgacaccgcgattgcagacgccgattggggcgaagaggatgccgaggaagccgcgcgtccgacatga

SEQ ID NO: 1865 - DNA, 1332 bp, BradyrhizobiumColbertium
ttgagcgaaacttttaaaggtgcgccgcgcatctctttccattcgctcggctgtcccaaggcattggtggattccgagcgcatcatcacgcgcctgcgcgcggagggttacgagctcgcccgcaagcatgacggggccgacatcgtcatcgtcaacacctgcggcttcctcgacagcgccaagcaggaatcgctttcggccatcggcgaggccatggccgagaatggcaaggtgatcgtgaccggctgcatgggcgcggaaccggaagcgatcgagcaggcctatcccggcgtgctctccatcaccggtccgcagcaatatgagagcgtgcttgacgccgtgcatcgcgcgctgccgccaacgcacaatccgcatctcgatctggtgccgccacagggcatcaagctgacgccgcggcactacgcgtacttgaagatttccgagggctgcaacaaccgctgcaccttctgcatcatcccgaagctgcgcggcgacttggtctctcgccccgccaacgatgtgctgcgcgaggccgagcgactggtcggcgccggcgtcaaggagctgctcgtcatctcgcaggacacctcggcgtatggcatcgatctgaaatacgccgagagcccgtggaaggagcgccaagtccgcgccaaattcctcgacctcgcgcgcgagctcggcgagttcggagcctgggtccggctgcaatacgtctacccctacccgcatgtcgacgaggtcatcgcactgatgaacgagggcaaggtgctgccctatctcgacatcccgttccagcatgcgagccccaacgtcctcaaggcaatgaagcgcccggcggcgcaggacaagacgctggcgcgcatcaagcgctggcgcgaggaatgtccggatctcgcgctgcgctcgaccttcatcgtcggcttccccggcgagaccgatgccgatttcgaatatctgctcgactggctggatgaagccgagatcgatcgtctcggctgcttcaagtacgagccggtcgccggcgcgaccgcgaacgcgatcgagaatcccgtgccggaagagatcaagcaggcacgctacgacgcgctgatggcgcgccagcagaaaatctccgcccgacgtctcaagcgcaaggtcggcacccggcagcagatcatcatcgacgaggtcggcccgaccgtggccaagggccgctccaaggccgatgcgccggagatcgacggcgcagtctatctcacgagccgccgtccgctgcgtgtcggtgagatcgtcaccgccaagatcgagcgcgccgatgcatacgacctgcacggcagcgttgccggattctga

SEQ ID NO: 1866 - DNA, 138 bp, BradyrhizobiumColbertium
atggaaagagatgcgcggcgcacctttaaaagtttcgctcaaagcgagtatcctgaattttgcagagatttcgatccaagtaactgttgtgatagcgaaattcaatccctttcgaatgtgccgtctgtgataaagtaa

SEQ ID NO: 1867 - DNA, 144 bp, BradyrhizobiumColbertium
atgtccgaggtgaccttagcgcgagagttggaccgtgaaagtacctatgcgtcgtcgatcgacgagttcgagagcaaggtcaagcagtacaaaaagcgactgatgtctaatttggggacgagctacaattttgagccccactaa

SEQ ID NO: 1868 - DNA, 591 bp, BradyrhizobiumColbertium
atgagcgccgaacagtcgcccaaaatcgtgatcgtcgacgaaagcccgatccgggctgcgatcctggaggaggggttgcgggaggccggattcacgcaggtcgtccacatcagcgaaatgcagagcctgcttgcccgtatttatgcggtcgatcccgacatcatcctgatcgatctggagaaccccagccgcgacgtgctcgaggcgatgttccaggtcagccgtgccgtgaagcggccgatcgccatgttcgtcgatcagagcgattcagcctcgatccaggcctcggtcgaggcgggggtgtccgcctatatcgtcgacgggctgaagaaggagcgtatcaagccgatcctcgacctctgcgtgtcccgcttcaacgctttcgccaagctccaggaggagctggagcgaaccaagtcgcagctcgaggaccgcaaggtcattgaacgtgccaagggcatcctgatgaaggtgaagggcctgaccgaagaagaggcctatgtgctgctgcgctccacagcgatgcgcgagaagaagaaaatcggcgagatcgcgcagtcgatcatcaccgcgtcggagatgctgaaatga

SEQ ID NO: 1869 - DNA, 1164 bp, BradyrhizobiumColbertium
atgaccgccaccctccgcatcgggttcattccgctggtcgatgccgccgccctgatcgtcgcggtcgacaaggggtttgccgccgccgaagggctcgacgtcgagctggtgcgcgaagtctcctggtcgaacgtccgcgacaagctcaatatcggcctgtttgacgccgcacatctcctggcacccgtggcgatcgcgtcttcgctcgggctcggccacgtcaaggtgccgatcgcggcgccattcaacctcggtatcaacggcaatgccatcactttgtcgccggcgctccatgccgcgctgatggagcagatcgacggcgatcgtttcgacccgatggtgaccgcgaaggcgctggcgaaggtggtcgccatcaggcgcaaggcaggggccgagcctctgaccttcggcatgaccttcccgttctcgacccacaattatcagttgcggttctggatggcagcggccggcgtcgatcccgacgaggatgtgcgcctcgtggtgctgccgccgccctacatggtcgacagcctcaagaacggccatgtcgatgcgttctgcgtcggcgcgccctggaattcgatcgcggtcgatctcggcatcggccacatcctgcatttcgtctccgacatcctggtccgtgctgcggagaaagtgctggccgttcgccaagcctgggcggacaagaatccggacgtggtcgcagcgctggtgcgcgcggcggtgaaagcggccgagttcatcgagcatcccgagaaccggaccgaggcggcgcaaatcctggctcagccggagcggatcggggtcgacgccgaggtcatccagcgcaccctcaccggacgcctcaagatctcgcccgacggcactttccgtgagagcggccgctatctcctcgttgggcgcgaaggggcagggcgccccgagccggtccaggccgcctggctctatgctcagatggtgcgctggggacagacggcgctgacccccgatggtgtcaagacggccatggcggtgttcaggccggacctctacgatgcagcccttggcagcagggcgcccaccgaggctcccgcggccttcggcgccttcgccggccccgtcttcgatcccgccaacatccgggggcaccttgaagccttcgcggttgggcgctggaaggcctga

SEQ ID NO: 1870 - DNA, 1782 bp, BradyrhizobiumColbertium
atgaaaatcgaaacgctctcagtcgactttaccgacgagcagaagcgctatctcgaaggcttcacgacgggcctgcagatcagccgcgtcggtcgcgctctgggcggcggcgccgtcaaggcgagcgccgagccgaccgggcccgatgccgtgcacatcaaggcgcaggacagggtgattgcgtcgggcaagaagcttgccgaccaggagaagttcaagcgcgaggagcatcctttcgacgcctatccgcggttgcgccagcaggcgctcgacaacgcggcgccgagcccggccgacaatttccgctggcgctattacggcatcttctatgtcgcgccgacgcaggattcctacatgagccgcctgcgcattccgaacggcatcatgaagcactggcagctgtccggccttgccgacctcgccgacgagctatgcggcccctactgccacgtcacgacgcgcgccaatcttcagcttcgcgagatcccgccgaagcacgcgatcaaattcctcgaaggcattcaggaactcggcctgtgctcgcgcggctccggcgccgacaacatccgcaacgtcacgggaacggcgaccgccggcatcgatccacaggagctgctcgacacgcggccctatgcgcgcgagtggcactaccacatcctcaacgaccgttcgctctacggcctgccgcgcaagttcaacgttgccttcgacggcgccggcaggattgcggtgctcgaggagaccaacgacatcgcgttcacggcttatgaggtgaaggacggcttcggcgtcgagcccggcgtctggttccgcctcggcctcggcggcattaccgggcacaaggatttcgccaaatattccggcatcatcgtcaggccggagcaggcaaccgccgttgcagacgccatcgtgcgcgtgttcatcgaccacggcgaccgcaccaaccgcaacaaggcgcggctgaaatatgtgctcgatgcgatggggcatgacggcttcgtcaagctcgtcgaggagcggctgaagacgccgttcacgcgcgtgccggaggaggcgttcgcaccacgccccgcggcggaccgcatggcgcatgtcggcgtgcacaggcagaagcaggagggcctcaactggatcggggtgtcgctgccgctcggcaagctcacctccgatcagatgcgaagcctcgccaagctcgcgcaggatctcggtgacggcgagatccggctgacggtctggcagaacctgctcatctcgggagtgcgcgacgagaacgtcgagcttgcggttgcggcgatcaagcagatcgggctcgcggtcgaggcctcgcacatccgcgccggcctgatcgcctgcaccggtaatgccggttgccgcttcgccgcggcgaacaccaagcgtcattccgccgagatcggcgactggtgcgaaacgcgcgtggcgatggataagccggtcaacatccacgtcaccggttgtcaccattcctgcgcgcagcattacatcagcgacatcggcctgatcggcgcgcgcgtgccggtcagtgaggaagacaccgtcgagggctatcacctctttaccggtggcgggttcgggcccgacgccgacatcgggcaggaggtctaccgcgacctcaaggccgaggatgcgccaaagacggtcgaacgactgctgaaagcctacatggcgcatcgttcgtcgcccgatgaaaccttcctccatttcgcgcgacgccatgacggtgaaacgctgcgcaagctggccgatgcacaggtgtccgcatga

SEQ ID NO: 1871 - DNA, 1611 bp, BradyrhizobiumColbertium
atgaaccagatcacccctccgccgaagctcgacctcattcccccaagcgcaccgttctccgacgcgcagcgctcctggctgaacggctttttcgccggcctgctgtcgcctgaggtcgccgcgccgctgtcaacggagcagggcgccgccgtcatgcaaggcgcggccggcgacggcgatgacggtgaagcgccgtggcacgaccagaccatgccgatcgccgagcggatgaagctcgccgagggccgtcccgtgcgccgcaagatgatggcggcgatggcgcagcaggattgcggccaatgcggctacaattgccacgactattcggaagcgattgcgagccgcagcgaagcgcggctcaacctctgtgtcccaggcggcaaggaaaccgcgcggatgctgaagtcgctgttcgaggagctcgacaagacgcctgcggcgaagccggccgacaagccggatgcggcggcaccagccgtgaccgtgaccatcgccgaacccggccgctcacgcgacaatcctgtcgcggcgaccttcctgtcgcgccgcctgctcaacaagggcaaatcggagaaggagacatatcacgtcgagttcgatctctccgagagcaagctcgactacgtggtcggcgacagtttcggcgtgttcgcgcgcaacgatgtcggcctcgtcgaccagatcatcgcgctgctcggcgcctcccacaccaccaaagtcaacggcaagacgctgcgcgaggtgctgatcgacgacgtctctctgtcgccggcgcctgacacgctgttcgaactgatttccttcatcaccggcggcgccgcgcgcgagaaggcacgtgcgctggcgcagggcgaggatcccgatggcgatgcggccacgctcgacgtcatggccgcgctgcagaagttttccggcacgcggccgcatgccgaggctttcgtcgaggcgctggagccgctccagccgcggctctactcgatctcgtcctcgcacaatgcgtcgccgggaaagctgtcactgacggtggactccgtgcgctacatcgtcggcaagcgcaagcgcctcggcgtcgcctcgaccttcctcggcgaacgcatcaaggagggcgataagctgaaggtctatgtgcagaaggcgcatggcttcggcctcccgcaggatcccaagacgccgatcatcatgatcggccccggcacaggcatcgcgccgttccgggccttcctgctcgaccgcaaggcgaccggtgcgcccggcaagaactggctgttcttcggccaccagcgcagcgattgcgatttcttctaccaggaggagctcaacgcgatgaagacctcgggtctactgacgcgcctgtcgctggcctggtcgcgcgacggcgagaagaaattctacgtgcaggaccgcatgcgcgaggtcgggcgcgagctttggacgtggctcgccgaaggcgcgcatctctacatctgcggcgacgccaagcgcatggccaaggacgtggagcgtgcgctggtcgacatcgtcgcccagttcggcgcgcgttcgacggatgaggccgtcagcttcgtcgccgagctcaagaagtccggtcgcttccaggccgacgtgtactag

SEQ ID NO: 1872 - DNA, 153 bp, BradyrhizobiumColbertium
atgcgcgaattatcggcggaagccagactgcatttctacgcgcgttcgctctcgcggcgaacccgggggacgctgcatcatgtcgcgatgtacagcgccttcgccgtcatcgcggcgatcgtgttcgggacgctttcggtgcatccgttttaa

SEQ ID NO: 1873 - DNA, 771 bp, BradyrhizobiumColbertium
atgaagacagtcgaccttaattgcgatctcggcgagggttttggagcgtgggagatgggcaacgacgccgccatgatcgagctcgcaagctcggtcaacgtcgcctgcggcttccatgccggcgatcccgacatcatgcggcggacggtcgagctcgcgaaggcgcgcggcgtgtcggtcggcgcgcatcccggatatcgcgacctgcatggcttcggccgccatccgatcgcagggctcaaggcctccgaaatcgagaacctcgtcgcctaccagatcggcgcgctgcaggcgatcgcgacagcggccggccacaaggtgacccatgtaaaggcgcatggcgcgctctccaacgtcgcctgcgaggacgacatgaccgcgaaggcgatcgccgccggcatcaaggcggtcgatcccggcctgatcttcgtggtgcttgccaattccaagctggtgaaggcgggcgaagatgccaacctgccgatggtgcacgaggtgttcgccgaccgcgcctatgaggacgacggcaatctggtctcgcgcaagaagcccggtgcggtcctgcacgacgccaaggcgatcgctgaccgcgtggtgcggatggtgcaggacggcgcggtcgtgtcggtcacgggcaaggtcatcaagatgcgcacggacacggtctgcatccacggcgatacgcccggcgccgtggacatcgcccgcggcgtgcgccaggcgttgaaggctgcgggaatcgaggtcgcgccgttcaggcgcggggcgtga

SEQ ID NO: 1874 - DNA, 1038 bp, BradyrhizobiumColbertium
atgagccgcctcgtcgttgccagcatcggcccggcaagctcggtccaggacggcgggcggctcggcgcgcaacgctacggcctgacggtgagcggagcgatggaccgcctgtcgcttgcggcggcgaacaccctcgtcggcaacgagcctttcgcggccgccatcgagatcggcccggtcggcgcctccttcaccgcccgcgacggcgccgtgcgcgtcgcgatttcaggcgcaccgcgcaacgcggacatcgccggcagcccggtcgcgatggacgcatcggtaacgctgaaggacggcgagacgctgacgctcggttttgcccgcggcggcgcgttcacttatctcgcgatcgagggcggcatcaagggcgagccggtgttcggcagcctcgccgtcaatgcccgcgcaggcctcggcagcccctacccgcgcccgcttcaggctggcgacgagttcagcgtcgacgctgcgagcggcgcgccggagcttcgcatcgagctgccgaagccggtgagtggcccgatccgcgtgctgctgggaccgcaggacgacgagttcgacgactccaacaaggctctgttccttgagagcgaatggaagatctcggcgacttccgatcgcatgggctaccggctcgagggccccgccatcaagcatctgcatggccacaacatcgtctccgacggcaccgtgaacggcagcatccaggtgcccggcaacggagcccccatcgcgctgatgatggaccgcggtacctccggcggctatccgaagatcgcaacggtgataacggccgatatcggtcgcctcgcccagacctcggcgggaaccgcgttccgcttcaaggctgtcagcatggccgaagcgcaggacgaggcacgcaagtttgcacagttgatccgcagcctgcccgatcgcctgcgctcctccgacactgtcgcactcaacatcgaggcgctcagcgatgctaacgtggcgggctatgcggtcagcgcggtcgatgccgggacctggcaggtcacggcggagccgtaa

SEQ ID NO: 1875 - DNA, 732 bp, BradyrhizobiumColbertium
atggccgcgacgcttctcccgccccgccttctgcccagtggcgacagcgccgtcacggtcgagttcagccgcaccatcgatgatgtcgccaaccagcgcgtgctggcactcgacaaggcgctggcagcaagtccgatcgagggcatcaccgagaccgtaccgacctatcgctccttgctggtgcattacgatccctgcgcaatcgcttttgatgcgctcggcgagaagctgctcgcgctcgcgggccaaccgctgccgccggtcaccaaggcgcgccgctggcgcattccggtcgcctatggcggcgagcacggcatcgacctcgaggatgtcgccaaggcgctcaacaccacgcccgatgacatcatcgcccggcatgcgggcggcgattacaaggtggccatgatcggcttcacgccgggctggtcctatctcagcggcctcgacaaatccctgcacatgtcgcggcggcaatcgccacgcctgctgacgccggccggcaccatctcgatcggcggcgtgcaggccggaatccaatgtctggccgcgccgagcggctggcatttgctcggccgcacgcctgtcaggacctatcagctccatcgcaacccgaccttcctcaccgaacccggcgatcgcgtgacgttcttcgcaatcgaccacaagacattcgaggaattggaccgcgctgcggaagccggcgagatcgtcgccgagcaggtcgtcgcatga

SEQ ID NO: 1876 - DNA, 699 bp, BradyrhizobiumColbertium
atgtcgctgtcccccgaagctcgcaagactctcgccggcatcaccaccgccaccatcaccacggtcctgctgaagaagggcctgcgcaatgtgtggatgcgcggcgcacggccgctgcgcccgggtctgccccgcttggtgggaccagccttcacgctgcgcttcgtgccggcgcgcgaggatctggcgacaccggaatcctggtcttcgccgatctcgacccgcaccgcgatcgaggcgatgccggaaggatgcatcgccgtggtcgacgccatgggcatcaccgacgccggcatcttcggcgacatcctgtgcgcgcgcatggtcaagcgcggcgtcactgcgctcgtcaccgacggcgtcgtgcgcgacgtcgagggcgtgctcggcaccaacctgccggtgtggtgcgacggctatgccgcgccgccgtcggttgcaggtcttacctttgtcggctggggcgagccgatcggctgcggcggcgttgccgtgttcccgaatgacatcgtcgttgccgaccaggacggctgcgtgttgatcccgcaggcgatgcttgatcacgtccttgccgagggcgtcgagcaggagcggatggaggcctggatcgtcaacgaggtgaacaacggcgcggcgctgccgggcctgtaccccatgaatgccgaaaccaaggcgcgctacgccgcgagcaagaaataa

SEQ ID NO: 1877 - DNA, 405 bp, BradyrhizobiumColbertium
atggagatcaccgtcgcaggcacgcggccgacccgccgcgcgcccaaggaaaacttcaccggcaccgtgtggcaggaccccgtcatcatggcgccgtcgccggcacggctgaactgctcgcgcgtcgctttcgagccgggcgcgcgcaccaactggcatcatcatcccctcggccagacgctctacgtcatttccggcgtcggacgcgtgcagtccaagggcggcccgatccgcgagatccgtcccggcgataccgtctggattcctccgggcgaactgcactggcacggggcgtcgccgaccaacggcatgtgccacattgccatgcaggaagcgctcgacggagtctattcgacctggctggagccggtcacggacgcggaatacggcgccgcggtgggctga

SEQ ID NO: 1878 - DNA, 357 bp, BradyrhizobiumColbertium
atgaacggctttcgcaaaggtctcttcgcttccctcgtcgccatcgccttgccattcgcgcaggctgacgccgcgacaagcaccttcgacggcacatggaatgtccgcatctcgtcatcgagcgagacctgcggcaacggcgcaaccgtcgcaatcggcatcaacaaaggccagatcgcctcgagcagcgccgcggtgaacgcgtccggtcacgtggccgatgccggccgcatcaatgtcaccttgagcaccggcatcaagcgcgcggtcggcttcggccggctcagcggcagctcgggctccggcacttggcgcggtgcgatgtgcaggggaacgtggacggcggagcggatgtag

SEQ ID NO: 1879 - DNA, 168 bp, BradyrhizobiumColbertium
atgaagccgggcaaggaccaaaaatggaccgggcgcatcctcgatccgaactcgggctcgacctacgattcaacgatcgccatgaagggcaccgaccgcctgcgtgtgcagggctgcgccttcggcggcatgttctgcggcggccagacctggacgcgcgtgaattga

SEQ ID NO: 1880 - DNA, 714 bp, BradyrhizobiumColbertium
atggaaagggccgtgatcgatctctattacgcaccgacgccgaacggctggaaaatctccatcatgttggaggagctcgggcttccctacagcgtgaagcctgtcaacatccgcgctggcgagcagttcagccccgagttcctcgcgatctccccgaacaatcgcatcccggcgatcgtcgatcacgatcccgccgacggcggtgctccgttttcggcctttgagaccggtgcgatcctgatctatctcgctgaaaagaccggacggttcttgccggcggacctgcgcgggcgttctgccaccatccagtgggtgatgtggcagatggcggggctgggaccgatgctcggccagcacgggcattttgccctctacgccgcagagaaaatcccttacgcgatcacgcggtatcgcgacgagtcggcccgtctgtatggggttcttgaccggcagctcggcaagaccggtagctatgtcgccggcgactattccatcgccgacatcgcctgctttccgtgggccatgactcacaaggcgcaaggcttcacgctcgatgactatccaaacgtgaagcgttggtatgccgcggtccgcgcgagaccgcaggtgcaggcggggctcgcgatcggcaagttcgtgaaagagccgttcgacgaagaatcacgcaagatcatgttcgggcaacgggctaaggaagtgctgggaaagaagtag

SEQ ID NO: 1881 - DNA, 609 bp, BradyrhizobiumColbertium
atgatcgaattcttcttcgactgttccagtccctggacttatctcgcctttcacaacatccagccgctcgccaaggagctcggcgcggagatcgtctggcggccgatcctggtgggcggcatcttcaacacggtcaatccgagcgtctatgcgcagcgcgagaagccggtgccgctcaaggcgcgctacatgacgaaggatcttcaggattgggcgcgctcggccggcctgtcgatcaagatgccgccgacggtattcccggtgaacagcgtgaaggcgatgcgcggctgcatttggctgggcaaagacacggtgccgtttgcgacggcggtgttcgaagcctattggggcgaggacaaggacatttcgcaggacgcggtgctcgccgggatctgcaagaaggtcggcatcgacgaggtaagattcttcgccggcattgctgagcaaggcatcaaggaccagctcaaggccaatacggaagaagtcgtggcgcgcggcggcttcggttcgccgacgatcttcgtgaacaagaccgacatgtacttcggcaacgatcggctgccgttgatccgcgaggcgctcatgcgcagcaaggcgagcgcggcctga

SEQ ID NO: 1882 - DNA, 978 bp, BradyrhizobiumColbertium
atggtgcgtgctgtcgtttgccgtgagcttggtgcgcccgagacgctgcggctggaggagtttccgtcgcgtgccttgaagccgggcgaggtgcgtgtcgcgatccgggcggccggattgaatttccctgacgtgctgatggcggccggcgaatatcagctcaagccggagttgccgttcaccccgggcatggaagctgcaggcgatgtcaccgaggtcgggcaggaggcaacgggcgttgcggtcggcgacaaggtgatcgtcaagatgcgccatggtgcattcgccgacgaggctgtggcctcgccggcgcagcttacgccgatgccgtccaccttcgattacgcggaagctgcgacctatctcgcgggccacggcaccgcctatcatgcgctgatcgatcgtggccggctcgagccgggcgaggtgctgctggtgcacggcgccggcggcggcgtcgggcttgccgcggtcgaggtcggcaagatgctgggcgcgaccgtgatcgcaacggcctccagcgacgagaagctggcgatcgcgaagtcgcgcggtgcggatcatctcgtccgctacgatcgcgagccgtttcgcgatgcggtcaagcgcatcaccgagggtcgcggggcggacgtggtgttcgatccggtcggcggccaggtctttgaggattcgatgcgctgcatcgcctggggcgcgcggctgctggtgatcggtttcaccggcggcatcggttcggccaggaccaatctgttgctgatcaagggtgccagtgtgctcggcgtgcgcgccggcgaagccgtgcggaagaacccggagctcggcgagatacgcctgaaggcgctcttgcaatgggcggaggagggcaagctgcgtcccaacgtctcacaccgcctgccgctggcggactatgcaaaggccatgcggctgctgctcgaccgcaaggcgatcgggcgtgtggcgctggtgatggattag

SEQ ID NO: 1883 - DNA, 957 bp, BradyrhizobiumColbertium
atggattgccgggtcaagcccggcaatgacagaattgactcaaggaatgacaaggaaggaaacaccatggcgtatgagacgatcaaatacgaggtcgccgagcagatcctcaccatcacgctgaaccggcccgacaagctcaacgccttcaacgcacagatgcaggccgagctgatcgacgcgttcgatgccgcggacaaggacgacgatatccgggccattatcgtcaccggtgccggccgcggtttttgcgcgggcgccgacctctcctccggcgccgacacgttcgatcgcgatgcgcgacgtgggccggtgaagcgcctccccgacggcaaggtcgattacagcgatccgcaggtccgcgacggcggcggccaggtgacgctgcgcatcttcaaatgcctgaagccggtgatcgccgcggtgaacggaccagcggtcggcatcggcgtcaccatgcagcttgcgatggacatccgcattgcctccgaagccgcacggttcgggtttgtgttctcccagcgcggcatcgtgcccgaggcggcctcgagctggttcctgcctcggatcgtcggcatctcgcaggcgctcgaatggtgctattcgggccgcgtcttcccggcgcaggaagctcttgccggtcgtctcgtcagcaaggtcgtggcccccgatgatttgctgccgacggcgcgcgcgctcgccaaggagttcgccgcgaagaccgcgccggtttcggtggcgctgatccggcagatgatgtggcgcatgatgggcgccgacgatccgatggaggcccacaaggtcgacagccgcggcatctacgcgcgcggccgttcggacgacgtgaaggaaggtgtggtgtccttcctggagaagcgtcccgcacagttcaagaacaaggtgtcgacggacatgccggactatttcccgtggtggacggagcgggagtacaagtga

SEQ ID NO: 1884 - DNA, 1434 bp, BradyrhizobiumColbertium
atgcctaagaagagcgccgaagaggcggtcacctcgctgcacgatctctccgccgtcgatctgatcgcgggctatcgcgccaagcaattctcgccgagcgaggtgctggaggacgtgctcgcgcacgtcgctgcgtgggaacctcacctcaaggcgctctatgcattcgatcccgacggcgcgcgcgaggccgcaaaggcctcgaccgcgcgctggagcggcggcgagccgtcgggtgcgctcgatggcgtcccggtcacggtgaaggacaacatcgcgaccaagggcgtgccggtgccgctgggcgcggccagcgtcaagctcgtgccggcggagaaggacgccccgcctgccgcgcgcctgcgcgaggccggcgccatcatcttcgccaagaccaccatgccggattacggcatgctgtcctccggtctctccagcttccacgcgctggcgcgtaacccctgggacctctccaagaatcccggcggctccagcgcgggcgcaggcgccgccgcggccgccggctatggcccgctccatctcggcacggacatcggcggctcggtgcgcctgcccgctggctggtgcggtctcgtcggcctcaagccgagcttcggacgcgtgccgatcgatcccagctatgtcggtcgcgttgccggcccgatgacgcgcacggttgatgattgcgccctgatgatgagcgtgatcgcaaagcccgaccggcgcgacggcatgagcctgccggccgagccgctcaactggaagggcctcgagaagtcgccgcggaaactgcgcatcggcctgatgctcgatgccggatgcgggttgccgccggagaaagcggtgggcgaggtcgcggtgaaggcggctgaggcgttcgagtcggcaggcagcgtcgtcaccgaaatcgacggcattctcacgcgggacatgctcgacgggctcgacaatttctggcgcgcgcggatgtgggacgacctgtccaagctgaccccggcagagcaggccaaggtgctgccctatatcttcaaatggggcgagtccggagccaagctctcgggcatcgacgtcatccgcggcttcaaccagaccatggcgatccgcgctgctgcggcgaagctcttttgcgagctcgactatgtgatctcgccgaccgcaccgaacgtgaactatccggcggaatgggcctcgcccaccaacgatccgatgaagccgttcgagcacatcgcctataccgtgccgtggaatatgtcggaaaaccctgcaatctccgtcaacggtggcttcgacgccaacggctttccgatcggcgtgcagatcgtcggccgccgcttcgacgatatcggcgtcctcggcatggccaaggcgttcgagggcctgcgggggccgcagcgggcttggccgaagccgcctgcacacaagacgccgtactag

SEQ ID NO: 1885 - DNA, 1173 bp, BradyrhizobiumColbertium
atgcccacgatcgaccgcatcgacggttacgccgacgaactcaccgctatcaggcgcgacctccacgcccatcccgagatcggcttcgaggaagtgcgcacctccggcatcgtcgccgacaagctcaagagctggggcatcgaagtgcatcgaggtctcggcggcaccggcgtgatcggcgtcatcaggggcaagggttcgggcagcaagcgcatcgggctgcgcgccgacatggacgcgctgccgatggaagaaaacaccaacctgaaatggagctcgaaaatcccgggccgcttccacggctgcgggcatgacggccacaccaccatgctgctcggcaccgcacgctacctcgcagagaccagaaacttcgacggcaccgtgcacctgatcttccagcctgccgaggaaggcctcggcggcgcccgcgcgatgatcaaggacgggttgttcgagaagttcccctgcgacgaactctatggcctgcacaacgcgcccgacctcaaccatggcgagatcgcgatcctgcccggcccggcgatggccggcgcggacttcttcgatctgcgcatcaccggctatggcgcgcatggcgcgatgcccgagcgctccaaggatgccgtgatcatcgcaacgacgctggcgcaggcgatccagaccatcgtcagccgcaacgtcgacccgctgcaggccgccgtcatctcgatcacccagatccatgccggctcggcctacaacgtcattccgggcgatgcgcatctgtgcggcaccatccggaccttctcgaacgaagtccgcgccatgatcagcgagcgcatccgcacgatctgcgcaggcatcgcgagcgcctatcagtgcgcgatcgacgtggacatccgcgacacgttcggggtgctggtcaaccaggtcgagcagtccaaggtggttgaggaggtcgcccgcaccatcgtcgatcccgccaacgtgatcacccgcacccagccgaagatgggcagcgaggactttgccgacatgctgcagaccatccccggcgcctatttctgggtcggccatgacggctcggtgcccgtgcacaatcccggcttcgtgctcgacgacaagatcctgccgatcggcgccagcatgttcgcccgcatcgtcgagacgcgcatgccggtgggcggcaatgcctaa

SEQ ID NO: 1886 - DNA, 1506 bp, BradyrhizobiumColbertium
atgacacgtatcgccgtcggcggcttcctgcacgagaccaacaccttcgctccaaccaaggccacattcgcggacttccagcatggcggcggctggccggcgatgacccaaggtgccgacgtcttgaaggtgatgcggcgcatcaatgtcggtctcgccggcttcgtcgacagcgccgaggcgaacggctgggaactcgttccgaccatcgcctgcggagcaagcccgtcggctcatgtcaccgaggacgctttcgagcgcatcgtcaaagcgatggtcgacgggatagcagccgcaggacctgtcgacgcggtctatctcgacctgcacggcgccatggtcaccgagcatctcgacgacggcgaaggcgagatcctggcgcgcgtgcgccgcgtcatcggcaaggacgttccgctggtcaccagtctcgacctgcatgccaacgttacccccgagatgatggagcatgccgacgctttgatcgcctaccgcacctatccgcacgtcgacatggcagagaccggccgtgcctgtgcacggcacctggccctgctgctgaagacgaagcagcgcttcgcgaaagcattccggcaattgccgttcctgatcccgatcagctggcagtgcaccaatgaccagccgaccaaaggcatctacgagaaactcgccgcgctggaaggggacgcggttccgacactgtctttcgcgcccggcttcccggccgcggatttccgcgattgcgggccgagcgtgttcgcctatggcaagacgcaggcggacgccgaccgcgcagccgatgcgatcgtgaagctgatcgagagccacgaggacgatttcgacggcaagatctggtcgcccgacgacggcgtgcgtcacgccatggaactctcgaggaacgccagcaagccaatcatcatcgccgatacccaggacaatcccggcgcaggcggagattcggacacgacgggcatgctgcgagcgctggtgcgcaacaacgcgagcgctgcgacgggcgtcatctacgatccggagtcggcgaaagctgcgcacgaagccggcgccggcgccgcggtaacactctcgctcggcggcaagtccggcattcccggcgacgaaccctataccgagaccttcgtcgtcgagaagctctccgacggccggttcatcgcgcccggtccctattatggcggccgcgagatggagatgggcccctcggcgtgcctgcgcatcggcgatgtccgcgtcgtcgtctcctcgcacaaggcgcagctcgccgaccaggcgatgtaccgctatgtcgggatcgagccgaccgcgcagaagatcctggtcaacaagagctcggtgcatttccgcgccgatttcgaaccgatcgcggagaagctgatgatctgcgccgcgcccggcgcgatgccggcggacaccgcttccctgccctggacgcgcctgcgcccgggcatccgcatcaagccgaacggccctgttttcacgcctccctcacgctaa

SEQ ID NO: 1887 - DNA, 1047 bp, BradyrhizobiumColbertium
ttgcagcgcgatcacggcaccgccgtgctgttcatcactcacgacatgggcgtggttgccgaaatagccgaccgcgtcgcggtgatgcggcagggccgcctggtcgagaccggtccgctcgagaccattctgcgcaatccgaccatggaatacacccgcaacctgctcgcgtcggtgccgagcctggtgccgcgtgcgccgcgcgaggagagccgcgaccccgtggtgctggaggccaacgagctcaccaaggtctacaaggagcgcgccttcttcggcaaaggccgcgaggtcgtcgccgccgacaaggtcacgctgacgctgcgcaagggccgcaccctcggcatcgtcggcgaaagcggctcgggcaaatcgacggtggcacgctgcatcgtgcgcctgatcgatccgacctccggcggcgtgcgcctggccggccgcgagatcgccgacatctcgcgccgtctgctccagccgcaccggcagaagatccagatcgtgttccaggatccctatcgctcgctcaacccgcgggtcaccgtcggcgagagcatcgcggaaggtccgatcaactacggcgcggcgcacgctgacgcaatgaagcgggcgcgcgagctgctcgagctggtcggcctgcccgccgatgccgtgtcgcgctatccacaccaattctccggcggccagcgccagcgcatcgcgatcgcccgcgcgctcgccctcgatccggacgtgctggtcgcggacgaagcggtctccgcgctcgacgtttccgtgcaggcgcaggtgctggaactgctcgacgagatccagaagcggctcggcatcgccatcctgttcatcacccatgatctgcgcgtcgccgcgcagatctgcgacgaagtggtggtgatgcagcacggccgcgtcgtcgaacagggccccgccggggaagtgctgacgcatccgaaggaggcctacaccaaggcgctgctggacgccgcgccgggccgcaactgggactttgccaatttccggccggtggccgagagcgtggtggcgagcgcgtaa

SEQ ID NO: 1888 - DNA, 888 bp, BradyrhizobiumColbertium
atgtccgtcgatacccttccccagtcctccattccgatcacgtcgccgctgcggccgcgattcggattcctcacctcgacgccgatcatcgccgcggcgacggtcctgctcaccttgatcgtggtggtctcgatcctcgcgccgctgatcgcgccgcatgatccgatccagctcgcaccgtcgcagcggctcaagccgtcctccgcacaattcctgctcggcaccgacgcctacggccgcgacctgttgtcgcgcgtgatctatggcggccgcatctcgcttctgatcggcatcggcgcggcgatcctgtcgatcgccatcgggctcgcgatcgggctcgtctccggctttttcaagctggtcgattcgatcctgatgcgcgtcatggacggcctgatggcgatgccgagcatcctgctcgcgatcgccgtcgtgtcgctgtccggcgccagcctctggaccgtgctgatcgcaatcacgattccggagatcccgcgcgtggcgcgtctggtgcgctcggtcgtgctctcggcacgcgaggagccttacgtcgaagccgcgatctcggtcggctccagcctgccgaaaatcatgctgcggcacctgatgccgaataccatcgcgccgctgatcgtccagggcacctatgtctgcgcgagcgccatcctcaccgaagccatcctctccttcctcggcgccggcatctcgccggagacgccgacctggggcaacatcatggccgagggccgccagtacttccagatcaagccgtcgctgatcttctggcccggtcttttgctctcgatcgccatcctcagcatcaacctgatcggcgacgccgcccgcgatgcacttgatccgcgcatgaagcagcgggaggcaaagtga

SEQ ID NO: 1889 - DNA, 942 bp, BradyrhizobiumColbertium
atgctaggttatcttgttcgccgcgttctggccgcggtacccgtgatgggcgtggtcgccctgttcgtgttcctgctgctgcggctgacgccgggcgatcccgcggcgattctcgccggcgacaacgcaacgccggaacggctcgagcgcatccgcacctcgctcggcctcaacgagcctctgatcgtgcagttcgtcacctgggtgaacaagctgctgcacggcgacctcgggacttcgctgatctccaacctgccggtgatgaagatgatcggccagcgcgtcgagccgtcgatctcgattgcgctttcgaccatcatcctcgccgtgatcgtcgccgtccccttgggggtgatcgcggcctggaagcacggcacctggatcgatcgcttcgtgatgggtctgtccgtgctcggtttctcggtgccggtgttcgtggtcggctatgtgctgatccaggtcttcgccatcgaactgcgctgggtgccggtgcaaggcttccgcagcatctttagcggcttcgggccgttcttcgagcgcatcatcctgccgacctgcgccctctccttcatctacatcgcgctgatcgcccgcatgacgcgcgcggcgatgctcgacgtgctcggcgaggactatgtgcgcacggcgcgcgcaaaaggcatcaacgaggttgcggtgatgatgcgccatgcgctgcgcaacgcggcggtgcccgtgatcaccgtgatcggcaccggcttcgcgctgctcatctccggcgtggtcgtcaccgagagcgtgttcaacatacccggcatcggccgcctcaccgtggatgcggtgttggcgcgcgattatccggtgatccaggcgatgatcctcctgacatcgttcatctacgtcgtcgtcaatcttctcatcgacgtcgcctataccctgctcgatccccggatccggtactga

SEQ ID NO: 1890 - DNA, 1302 bp, BradyrhizobiumColbertium
atgactcatctcgccatcatcggcgccggcattaccggcgtcacgaccgcctatgccctgctcgaacgcggctacaaggtgacggtgctcgacaggcaccgctacgctgcgatggagacgtcctttgcgaatggcggacagctctccgccagcaatgccgaggtgtggaacagcaccgcgacgatcctgaagggcctgcgctggatgtttcggcgcgacgcgccgctgctgatgaacccgcggccgaactggcacaaatattcgtggatgagcgagttcgtcgccaatatcggcaactaccggtccaacacgatcgagaccacgcggctcgcgatcgaagcgcgccggcacctgttcgacatcgcgtcgcgcgagggcatcgacttcgatctcgaacgccgcggcatcctccacatctatcgcgacaaggccggcttcgaatccggtctgcgcgtcaacgcgctgctgcaggaaggcggcctcgaccgccgcccggtgactccggacgagatccgcgcgatcgagccgacgctgcgcaacgactattatggcggcttctacacgccgtcggatgccaccggcgatatccacaagttcacccgcgggctggcggaagcctgcaagcggcgcggcgcgaccttcgttcacgaagccaacatcgattcgatcgcacgtgccggcagcggcttcgtcatcggctgggccgatctcgccgcgagcgatgccggcgcgtcggcccgcggcatgctgaaggcggacggcgtcgtggtctgcgcgggcgttgcgagccggcacttcgccgccctgctcgacgagcgcgtcaacgtctatccggtgaagggctactcgatcaccgtgcagctcgacaccgccgaaagccgcaacgccgccccgacggtcagcctgctcgacgaggccgccaagatcgtcaccagccggctcggcgccgaccgctttcgcgtcgccggcaccgccgagttcaacgacttcaaccgcgacatccgcgccgaccgcgtgcagccgctgatcgactgggtgcgcatcaacttccccgcggtcgagacctcgcgcgtcgtgccgtgggccgggctgcgcccgatgatgccgaacatgatgccggtcgtgcgcgcagggcggataccgggggtcttcttcaacaccggccacggccatctcggctggactttatcggcggcgacggcgcagatgattgcccagaccatcgacggttggcgcggactcaacgcgccgccgacggtaccttcacttggggttgagcgtgaactacggcaggcatcctga

SEQ ID NO: 1891 - DNA, 1131 bp, BradyrhizobiumColbertium
atgaatcctgccaatctcccctttgattccgaggcaatgctcgagggcctgcgcggctgggtcgaatgcgagagcccgacctgggacgcaggtgcggtggaccgcatgcttgatatcgcagcgcgggatatggcgatcatgggtgcgacgatcgaacgcatcgccggccggcagggttttggcggcgtcatccgcgcgcgctttccccatccgaagcagggcgagccgggcatcctgatcgccgggcacatggataccgtccacccggtcggcaccatcgagaagctgaaatggcggcgcgagggtaacaagtgctacggccccggcatctacgacatgaagggcggcaactacctctcgctggaagcgatccggcaactggcgcgcgcctccttcaccacgccgctgccgatcaccgtgctgttcacgccggatgaggaggtcggcacgccttcgacccgcgacatcatcgaggctgaggccgcgcgcaacaaatacgtgctggtgccggagcccggccgtgccgacaacggcgtcaccaccggacgctacgccatcgcacgcttcaatctcgaggcgacgggacggccgagtcacgccggtgccacgctgtcggcaggacgctcggcgatccgcgagatggcccggcagatcctcgcgatcgacgcaatgacgacggaggactgcaccttctcggtcggtgtcgtccacggcggacaatgggtcaattgtgttgccacgaccgcgacgggcgaggcgctctccatggccaagcgccaggccgatctcgaccgcggcgtcgagaggatgcttgcgctttcgggcaccaacaacgacgtcgccttcaaggtcacgcgcggcgtcacgcgtccggtctgggagccggatgccggcaccatggcgctctatgagaaggcgcgcggcatcgcgaagtctcttggcatggagttgccacatgcaagctcgggcggtggctccgacggcaacttcaccggtgccatgggaatcccgacgctcgatggtctcggcgtgcgcggcggcaatggccacacgctcgaagagttcatcgaggtcgagagcctggtggagcgcggccggttgatggccgggctgctggcgacgttagaataa

SEQ ID NO: 1892 - DNA, 1611 bp, BradyrhizobiumColbertium
atgtttcacttcatgcgccgggggcctcgcgcattcgcctccaaacttgcgctgtcggtcgtcgcgctttcgaccgcgctggtctcgcccgtgcttgccgccgggaagaccattacggccgtgatgcattccgatctccgcatcatcgacccgatcttcaccacggcctacatcacgcgcgaccatggctatatggtctacgacacgctgctggccaccgattcaagcttcaaggtccagccgcagatggcggactggaaggtctccgacgacaagctcacctacaccttcaccctgcgcgacggcctgaagtggcacgacggcgcgccggtcacggccgaagactgcgtcgcctcgctgaagcgctggggcaagaatgacggcatgggccagaagctcatggacttcacggcgagcatcgaggcaagcgatgccaagaccatcgtgctcaagctgaaggagccctacgggctggtgctcgaatccatcgccaagccttcgtcgctggtgccgttcatgatgcccaagcgactcgccgaaacgccgcccggcaagcagatttccgagcagatcggctcgggtccgttcaagttcgtgcagggtgaattccagcccggcgtgaaggcggtctatgtcaagaacaccgactacgtgccgcgcaacgcgccggccagctggaccgccggcggcaaggttgtgaaggtggaccgcgtggagtggattaccatgccggactcgcagaccgccgtgaacgcactgcagtcgggcgatatcgatttcatggagaacgtgccctgggacatgcttccggtcctcgagggcaacaaagacctgaagatcgaggtgctgaacaagttcggcttccagacgcttggccgcatgaacttcctgctgcctcccttcgacaatcccaaggtgcgccgcgctgcacttctggcgatgaaccagaaagacgtgttggatgcgcttgtcggaaatccgaaattctacaagatctgcggcgccttctttgtctgcgacacgccgctcgcctcggagatcggctcggatactttggtgaagggcggcggcatggcggaggccaagaagctgcttgcggaatccggctatgacggcacgccgatcgccatcatggcaccgggcgacgtcaccactctgaaggcgcagccgatcgtcgcggcgcagctgctccgcgaggccggcttcaaggtcgatctccaggcaacggattggcagaccgtggttgcccgccgcgccggccagaagccggtgaaggagggcggctggaatatgttcttcaccaactgggttgccgcggacgtgatgaatccgatcgccaacgtctcgattggcggtcgcgggaagaacggcggctggttcggctgggcggaagacgccaagatcgaagagctcaaggatgctttcgttcgcgcctcgtcagcagatgcgcagaagaagatcgcagccgacattcagaagcaagccatggagcaggtcatctacattccgctcggccagtatcaggccccgagcgcctggcagaagtcactgaagggtgtgctcgacggcccggcgaccccggtattctggaatatcgagaagtcggaatag

SEQ ID NO: 1893 - DNA, 180 bp, BradyrhizobiumColbertium
atgttgtaccgcagcaatcgagaggatgccgagatggaacaagagagcagacccgatcaccccgcgtgggagatcgaacggccggcgtcacagcaacgtccttcgcccggcgagcggccggaccccagcttgccattcatgagcgaagggctcgagcagctgcgcgacagccactgctaa

SEQ ID NO: 1894 - DNA, 1203 bp, BradyrhizobiumColbertium
atggggtttccagaattcgtcatcgtgatcgcgtccatcatggcgctgaatccgcttgcgatggacatgatgctgccggccctgcctaatatcggggcagctttcaagattcccgtcgcgaaccatctccagctggtgctgtcgactttcctgatcggcttcggtgccggccagttcgtcatgggccccctgtcggaccgcttcggccgccggccggtgctgctcggcggcatggccgtctatgcagtggcaagcgtgctggcggtcgcagcgccctcttccgagacgctgctgctggcgcgcgcgctgcaggggctcggtacctcggcgacccgcgtgattgcgacatccatcgtgcgcgactgctatgtcggccgccgcatggcgagcgtgatgtcgctcgcgatgatggtgttcatcgcggtgcccgtgatcgctccctcgttcgggcaggcggtgctgctggtgacggcgtggcgcggcatcttcgtggtgctgatgctctacggcctgctcgcgctcgcatggtgcgtgctgcggctgcctgaaacactccccgaatccgaacgcaggtcgctggcgcccgccgacgtgctctcggccttccggcagaccgtgaccaatcgccagaccatcggctatgcgacggctgccggcagcgtcatcggcgcgctgttcgcctatgtcttctgcgcccagcaggtcttcaccggcatctaccatctcggccaatacttcccgctcgcgttcgcggcgatcgccgccggcaccgccatcgccggtttcctcaacgcaaggctggtcgggcgactcggcatgcgcgcgatctcgcacggggcgctgacgctctatacgctagtggccggcgtgatgctgctgacggaaatcctcggcgtgctgccgctctcactgttcatgctgctctccgccctgatgatgttctcattcggcatgatggtcgccaacttcaccgcgctcgccatggagccgcagggacacatcgccggcaccgcctcttcgctttacggctcgatcacgacgctgatcggaatcgcggtcggcatggcgatcggccagagcttcgacggcacgctgctgccgttctcggtcggcttcttcctgtcgaccctcgccgcactcgggatcgtgctggtggttgagaagggccgcctgttcaggccgcatcatcgtccagtcaactga

SEQ ID NO: 1895 - DNA, 585 bp, BradyrhizobiumColbertium
atgtcgggaagaggcgatataacgcgccagcagatcgtcgttgcggcgacgcgcctgttctatggcgaaggcatcaaggcggtcagcatggatgcggtcgccgagaaggccggcgtcaccaagaagacgctctattatcacttcgccagcaaggacgagctcgttgcggaaaccatcgcggcccgggaccagccgacgctcgaactctacatgcgatggttcgccgagaccgacgggagcgtagccgacaagatccgcggtctcttcgccaagctcggccgctccgtggatacgccgcgctggcggggctgcggcttcctgcgcacgatcgccgagctcgccaacacgccggcccatccggccgtcaaggccggcgcggcacacaagaagcgctttgaagcatggcttcaatcggagttgcgagatcacggcgtggccgatgcaagcgcgctcgcgcgccagctcgtcatcctgctcgatggcgccacgaccgtgatgctgatccatcgcgacctggactatgtcgaggctgcaggacaattggcgcgcggcctggtcgagcaggcggcaacccgacccgattga

SEQ ID NO: 1896 - DNA, 780 bp, BradyrhizobiumColbertium
ttgtccgacttgatcttgatcgagatgcggggcgccgtcgcgctgctgacgttcaatcgcccgagcaagctcaacgcactgagctacgcgctcatcgatcgcctgatggccgtcctcgaccgcatcgaggacgatgcgaatgtccgggcggtggttctgaccggggccggggatcgcgccttctcggcgggcgccgacatttccgagttctccgagagcgtgaggttcgggccggacattgcagtcaaggatttcgtgcgacgcgggcaggcgatgacggcgcgcatggaatcatttccgaagccgatcatcgccgccgtcaacggcatcgccttcggcggcggctgcgagatcacggaagccgtgcatctggcaatcgccagcgaacgggcgagcttcgccaagcccgagatcgcgttcgggatcacgccgaccttcggcggcacgcagcgcttgccgcggctcgccggccgcaagcgggcattggaatgcctcttgaccggggaatccttttcaccacagcgcgccgtggagctgggattggtcaaccgtgtcgttccgcacggacagcttctcgacgcggccttcgggctggcggatcggatcgcgcggcattcccacctggcggtcgcccgcgtcatcacggccgccacgcggggcctgaacgtctcgatcgcggagggcctcgccatcgaaagcgagcagttcgcgcggatggcggcgacacaggacacccgaaaggcgctcgatgcctggctggccgctcgcgcgtcgcggtag

SEQ ID NO: 1897 - DNA, 1320 bp, BradyrhizobiumColbertium
gtgtccgacatgtccggtgctgcacgatggctggagcccgcggccgccacgactggcaggcgcaacgtctggcttgcctgcctgatcgcgctgacggcgctgctggtgctcggcaatctcgccaacgatgcaacgctcgatgtgaaatttggctgggacgttcgcgtcaattgcgcggcggtcgatgcatatgccgaagggcgcgatccctatttcgtcaagaacctgaagggcaccaagctctcttatccctacctgccggtgacgctggacgttttccgtcccctctgcgcgggtggtgttctggtcgatcattgcagaagcatttttctcgtgcttggcgtgctctgcgggttgctcttgcccggccttgcccgtgcgcgcccgagcccgcgcgacattgcgctccgggtgctctgcgcgatcggcgcgttcgtcggtttcgaatgggtgcaggcatcggggaattttgcgattctgagcggtgtgctgactgcgttcgcgctgaggctcttgcttcgtccgcttggatcggaagcgcagggagaacaaggcttctcgtcgcgcctcgccggcgctgcgctgctcggcctcgtgacctcgttcaagctggtgttcttcccggtgctggcggcgctctatttcctgccgctgccgcgcgtccgcaagctggccttgatcgcggcggcgatcctcagctttgccgtgccgatcctgatatccaaactgctgtatcccgatctgttcgcaagctggcggctcgcgatggcggcgcagattcccgaccagcattttgtcgacttgctggagacaaatccatcgttgctgctgctggcgcagagcctcatggattacgccgggctcggtaacgtcaagccggcactgttcgcggcctatgcgctcgcagcactcgcgctcgtgctcgtgccgttcggccttgccgtcctgcgcgtggtgggccgcggccccgcgggggagggaggatcgcttctgatccgacttgatctctggctgagggatcatcctcgtacggccatgcgcgtcaccgtgctcgccatgttcgcgctctacctcagctcgccgcgtctcaaggaatatgccttcttcgagctcgcgctctatgccgccatcctcatcgtcgatcttcccgccatggcgcttgccgccgttctcggcgtcggcatcgcgttcccgacgctgatctcgcttcttgggggaccattcgagggcagtttcatcctcctcgtcgtcgccctgatctgcttctggatcgtgttgctcgatttccgcgcggagcccgagcgcctcgagcgcggctag

SEQ ID NO: 1898 - DNA, 86 bp, BradyrhizobiumColbertium
gcgggcatggcggaattggtagacgcaagggacttaaaatccctcggtgcgcaagcgctgtgccggttcgaccccggctgcccgca

SEQ ID NO: 1899 - DNA, 420 bp, BradyrhizobiumColbertium
atggttgcttcgttgtcctcttcgctgcgcggcttcggcgcgctcctcgcgctgctggcggcgggtgccgcgctgtccggctgcgccggcatgagcgagacgatcgcgcctgcctttgccgatcccgccaaatacgaattgtacgactgcaagcagctggagaccgagcgcaagcagctcgacaagcgcaccgaggatttgcagaagctgatgcagaaggccgagaccggggcgggtggcgcggtcgtgtccgagctcgcctatcgcaacgactatatcgccgtgcgagggcaggcccaattggccgatgacgcctggcgccgcaacaggtgccggcagacgcccgagccggtgccggctgccgagccgccgtcgcccgtcgccaagcccgcctcgaaatccggaagaacgctgcgctga

SEQ ID NO: 1900 - DNA, 1203 bp, BradyrhizobiumColbertium
gtggcgctctcccgaacgattgtcatcgccggtgccggcatcggtgggctgacggccgcgcttgcgctcgcggcccgcggcttccgcatcgtcgtgctggaaaaggccgagcgcctcgaggaagtcggcgccggcctgcagctctcgcccaacgccagccgcgtgctggtcgagctcggcctcgccgaacgcctcgaagggcgcgccgtcactccggaagcggtctcgatcatgagcgcgcgcgccggaggcgagctgctgcgcatgccgctcggggaggccgcctccgcacgcgcgggcgccccctattgggtggtgcaccgtgccgacctgcaatccgcattggccggcgcccttgccgatcatcccgatatcgacctgaagctgggagcgaccttcgaggacgttgcagcccacgccaagggcctgacggtggtccatcgcagcggcacgatccgccgcagcgatctcgccggcgcgctgatcggcgccgacggcatctggtcgacggtgcgccagcacctgttccccgaggtgcagccgcgcttctccgggctgatcgcctggcgcggcacgctcgacgccacgcagctgccgaaggattatactgcgcggcgggtgcagctctggatggggccgaaggcccatctggtcgcctatccgatcgcgggcggacgccagatcaacgtggtcgcggtgctgcccggcacctggaaccggccgggttggagcagccccggcgatcccctcgaggtgatggacgcctttgccgccccgcgctggccgccgccggcacggatgatgctcgccgcggtcgacagctggcggaaatgggcgctgttcggcgtgcccgacggctgcccctggagcaaaggtccggtggcgctgctcggcgatgccgtccacgcgatgctgccgttcgcggcgcaaggcgccggcatggcgatcgaggatgccgccgtgctcgcgcggcatctgagcgtcgaggcggcggagaacactgacggcatcgcagccgcactgacgcaatatggccgtgcgcgcctggcgcgggtacggcgcgtgcagggaaccgcgcggcagcagggccgcatctatcacctcggcgggccgctggcgatcgcacgcgaccttgcgatccgcgcgctcggcccggagcgcatgctggcgcggcaagactggatctacagctggcggacttga

SEQ ID NO: 1901 - DNA, 246 bp, BradyrhizobiumColbertium
atgtccgaccatgtcgtcccgcacttccataacgatgccggcgttcccgtcatcgagatcggctcgcatgagttcatgtgcgtgggcgccaaccctccgttcgaccatccgcacgtcttcctcgacctcggcaacgacgacgagatcatctgcccctattgctcgacgctgtaccgcttcgcggccgacctgaagccgggcgaagcccgcccgccggaatgtgtcttgaaggacaaggtggcctga

SEQ ID NO: 1902 - DNA, 1137 bp, BradyrhizobiumColbertium
atgaagtggctgcgaatcaccaccgcgttggcgggtatcgcgacgtgcggcttcctgctcgtgcaggtcgcgccgcacgcccgcgaggccggcgcgcttctcgcggcccaggacgatccggccgtgctctccgagctcaagctcgatgcactgctgcggcagaacgagggtctggtccaggacagcatcgaggccgcactcgcggccggagacgctgacctcgccgacagttttgtcgcgctggcgcgtgaccggaatatcgcgctaccggacgacgtcctcagccgcgtcagcgatgcggtcaaaacagagaactccacctcgcatttcgccaagcgcttcgtcaccggtctcgtcaccggcaatgctgacgacgtcgcgagcctctcggggacggtgactggcgatctcttcgtgttcggcgacatcagggacgtggtgcgcgaaggcaagcatcttgccatgggcgaggacaccgaccgcctcgtgctcgcccttgcggctgccggccttgcggtgacggcggcgacctacgtctccgtcggcggtgccgcgccggtgcgcgcggggctatcgctggtgaaggacgcgcgcaaggtggggcggctcggcgaggggcttgccgcatgggccggccgctccgcacgcgaggtagtcgacgcgccgatgctccggaacgccgtcgcgtccggctcggtgctgcgccctggccagaccgtgagcgcgatcaaggctgctttccgggccgagaaggccggtgcgctggtccggctcggcaaggacgtgacgcgcgtcgccggaaagaccggcacgcgcggggcgatggatacgctgcgcatcgccgaaggccccaaggatgtcgcgcgcgcggcgcggcttgcggaagcgcatggcggcaagacccgcgccatcatcaagctgcttggccgcggcgcgctgctgcttgcgaccggcgcgttcaatctgaccctctggctgttcggcgcggccctgacgctgtttggcctgttgtcgtcgatcaaggccacgacggaaggcctgacccaggcctggtgcgatcgcaggcgcgcgcgccggctccgccgtgcgcagatcgcagcagaggcaagtctggccaacgcggccgcgacggcctga

SEQ ID NO: 1903 - DNA, 756 bp, BradyrhizobiumColbertium
atgccgagcttccacaacggcgccgttgaaattgcctatctcgacgaaggcgagggcgatccgatcatcctggtccacggcttcgcctccagcaagaacgtgaactgggtctatccgacctgggtgtcggagctgcgcaagaacggccgccgggttatcgcgctcgacaatcgcggccacggcgagagcgcgaagctctacgagcccgcgcagtactcgatcccgaccatggccggcgacgtgctcgcgctgatggatcatctcgccatcccgcaggccgacatcatgggctattcgatgggtggacggatagcggcgtggctctccctcaacgagccgcagcggttgcgcgcggcgatcctcggcggcatcggcatcggcggcctgatcgagggcaccggccccgacgagaacgtcgcgagggcgctggaagcgccttcccttgatgacgtcaccgatcccgtggggcgtaccttccgtgcgttcgccgaccagacccgttccgaccaccgcgcgcttgcggcgtgcctgcgcggcacgcgcgatcttatgagcagggaggaagccgcgcgcatcgaggtgccggtgctgattgcggtcggcaccaccgacgacgtagccggctctgcgagtgcgctcggcgccatcatccccggctcggaagtgctcgacatccccaaccgtgatcacatgcgtgcggtcggcgacaaggtctacaagaccggcgtgctcgatttcctctcacgccgcgattga

SEQ ID NO: 1904 - DNA, 729 bp, BradyrhizobiumColbertium
atgcccggtagcccaacggctgcgctcgttcaaaaactcaccaaaaccaatcggcttgaccaggacgatattctggcgattcaacagcttccgatccagagcaagcgggttcccgcccagcacggcttcgtacgtgacggtgaccgcccatcggaatcctgtctcatcgtcgatgggttcgccttccgctccaagctgacgccggacggtcagcggcaaattctctcgctccacattccaggagaaatcccggacctgcaaagcctgcacttgcacgtcatggaccatgacctgacgacgctcacggaatgcaccctcggattcatcaagcacgaagccttacgggagctgaatctgaggaggcccaacgtagcttctgcgctctggcgcgaaaccttgatcgacgccgcaatcttcagggaatggatcgtcaatgtcgggcgcaggccggcgcgggtccgaactgcccacctgctggcggagctctatgagcggctcgaactgatcggacgaaccacgaatgggtcctttgaattgcccatcactcagatcgagctggcggactgccttggattgtcggtcgtgcatgtcaaccggactctgcaagagcttcgtcacgacggtctcatcgcaacggaacgcagaaccttccacttgctcgataagagcggggtggaggaagcagggcaattcgagaagatctacctgcaccaacgtcctgcgctttga

SEQ ID NO: 1905 - DNA, 243 bp, BradyrhizobiumColbertium
atgccacgctactacttcgactcccgtgacaatgaaaaattcgtctcagatgagatcggcgtcgaggtcgcctccctgcaggaggtaaagacgctggcctccactgctatggccgagctcgctagggacgtgctgcccggttcggtggctcgaaggttggcgattgaagttcgtgacgagttcggcctgctcctcagcgtctgcctccgtttcgagatcgaaccggcacgacaaataacatag

SEQ ID NO: 1906 - DNA, 129 bp, BradyrhizobiumColbertium
ttgacgttcgtctgcggcgtcatctccggcccgcacgatcgctacggcgcgcggatggtgcgggttgccaccttcgtggtgccgatggcgctggcgcgccgtttcggcggcgacgttgaagcgcgatga

SEQ ID NO: 1907 - DNA, 234 bp, BradyrhizobiumColbertium
ttgcctgcatcactccaagagagcctcgaccggatcgagcaacagattcgggcctacgaggcatacgatctggccgagaaggcccggttcgcccgcgaatcctggctatggacagcagaagagcgaatcgaatggcaggaaactcaatctgacaacggcagggtacttcgtgatctgcgtgagcaggccgatgccctgcgtcaaaagctgacgccctttcaaaaaccggcataa

SEQ ID NO: 1908 - DNA, 147 bp, BradyrhizobiumColbertium
atgcaaccaatgctgcttatccttgttgcctctggaagcgtagaattggagagcgcagcgagccgcgtaggtaggttcatcagcaagccgtacgatcccaagcagatcgcagcgctgatcgcggagatgctcggctcggcgccgtaa

SEQ ID NO: 1909 - DNA, 363 bp, BradyrhizobiumColbertium
atgatcgtcgagcaggacgtcctcgtgcgtcacccgctggcggagtaccttcgcgagtgcggctaccgcgtggtggaagcagctcagcacgatgatgctcgtgaatgcctcgaaggtggcaaacacaacatcgatgttgccttgatcgacgtaggtggtcccaccggttccgggtttgctctttccgcgtggatacggagcaactatccagccgtgaagacgatgctaggcgcgacggtcgggaaggtccttgcactcgcgggtgacctttgcgaaggggggccccaggcggcgaagaagcttgattatcgccccgtgctcgaccacatccgccaactgctcgcgactcgaaagcggcattag

SEQ ID NO: 1910 - DNA, 138 bp, BradyrhizobiumColbertium
atggtcagccagtggaaatttattcaatcatcagccactgaacccttggccatcgaattgcttcgtatcgacatcgacgaactccttcgtagaaagcacgaactgcacaacgatccgaaagcttcggccgatgaatag

SEQ ID NO: 1911 - DNA, 1359 bp, BradyrhizobiumColbertium
ttgagcatcaccaccgatcaattacgcgcgcgcgccgccgatacgttatggctccgcctgacagcggcggctctgcccctcctgatgatcgcgccggcgttctggaacggctatccgctgttgcaatgggataccggcggctatctcgcacgctggtacgagggctatctcgtccccagccgctccacggtgttcggcctctatctgcattacggcgagagtttgggattctggatcaacctcgccgtccagtcgctggcgaccctgtggctgctgcagctcactttgcgtgtcctgggattgatgcagacctttcgcttcgtcgcgatcagcctcggcctgatcctgtcgaccgcgctgccctggctggcgagcatgctgctcaccgacatcttcgcaggactttcggtgctgtcgctgttcctgctggtggctggcgcaagccgcacctcgacgctggagaagatcgcgctgttcgtcttcaccgcgtttgcagccgcgacccacagcgccacgctcggcgtgctgctgggcctctgcgtcgcgggttggatggcgcggccgctgctcggcaaccggcttccgctcgccgggctgacgcaagcgagcctcaccatcgttgcgggcagcctgatgctggtgtcggcgaattacgcgctgtccggcaagttggcctggacgcccggcggctatggcgtcgccttcggccgcatgatgcaggacggcatcgtcgcgcgctttctcaacgaccgttgcccgcgcgaacgcttcaaactctgtccctatcgcaacgagctgccggccagcgccgacgaattcctgtggggcaagagcatgttcaacacgctcggacgtttcgaaggcatgaacgacgagatgagctacatcgtcgtgcattccctcaaggactatcctgcctggcaggccgccgcggcgctgcgcgcgacgggacagcaattgctgcacgtggcgaccggcgaaggcaccaatggctggatcccgcacacctacggcatcatcgagcgctacatccccgagcaggttgcgccgatgcgggccgcgcggcagcagcactgggcaatcgatttcgactacgtcaactggctgcatgtccccgtcgcgctggcctcgatgctggccctggttacgctgcttgcgcatgcgctggcgaaccgccggcttgacgacctcacgctgctggcggggaccgtggcgctggccctgctcggcaacgccttcatctgcggcgtcatctccggtccgcacgatcgctacggcgcgcggatggtgtgggttgccaccttcgcggtgctgatggcgcttgcgcgccgtttcggcggcgacgttgaagcgcgatga

SEQ ID NO: 1912 - DNA, 825 bp, BradyrhizobiumColbertium
atggcagtgcatcaggtcaatccgggagggaagctcgcatcgctcgatccgatctgggaccggatccggggcgaggcggaggacatcgtccaccgcgagcccgagcttgcgaccttcatctattcgacggtgctgcaccacagccgcctcgaagactccgtggtccatcgcgtcgccgaccggctcgaccattccgcgctgtcgggtgatctggtgcgccagacctttgacgaggccctgcgcgacgatcccgatctcggcaacgccttccgcgccgatctcgtcgccgtctacgatcgcgatcccgccacctcgcgcttcatcgatcccttgctctacttcaagggcttccatgcgatccagacccatcgcctcgcgcactggctctacctgaagggccgcaaggacttcgcattctaccttcagagccggtcctcggcggtgttccagaccgacatcaatcccgccgcgcgcatcggccgcggcatcttcctcgaccacgccaccggcttcgtctgcggcgagacggcgatcatcgaggacgacgtctcgatcctgcacggcgtcacgctcggcggcaccggcaaggagaacgaggatcgtcatccgaagatccggcacggcgtgctgatcggcgccggcgcgaagattctcggcaacatcgagatcggccattgcgcgcgcattgctgccggctcggtggtcgtcaagcccgtgccgcacaacgtcacggttgcgggcgttcccgccaagatcgtcggcgaagccggctgcgccgagccctcgcgcaccatggaccagatgatcaacgcgatggggctttga

SEQ ID NO: 1913 - DNA, 219 bp, BradyrhizobiumColbertium
gtggacgtcaaggaagtcaggaagctcgacgcgtatctgaagcgcgtattcggcaatcccaagatccgcgtcgtgccgcggcctaagaaggacgattccgccgaggtctatatcggcgaggagttcatcggcgtgctgttcgtcgacgacgaggacgacgatcgctcgttccagttccagatggcgatcctcgaagacgatctcgtcgatcaggaatag

SEQ ID NO: 1914 - DNA, 639 bp, BradyrhizobiumColbertium
gtgctcggaggcgcggctgcggtcggtgcggtcgcgctcgtcgcctatctgctgtggccgacctggggcacgcgcgcggcgaacgcaccggacaagctgccggtgagcgtcggcggcacgctgttcaacctgcccagggctgcgatccgcatgaagatccagcggcactcgggcccgcaggagcggatcgatctcgacttcctctatccctcgctggagccgcccggcgcgcccaagcacgtcaccgccgacacggtggaagccgtggtgcaatcgatcgatcgcatcttcctgtcgatcgcggcccatcacgatgcgctcgcgcccgagcagcgaacggccacgatctatccgcgctatctcgatcgggccgcgacgatgcctgtggaaggcctgacgatgcggatgttccgcgccgacacgccctacggaagcgaggacctctattccgccgccagtcccgcgctgaccgcgcgctgcacgcgcgatgcggccaccccgggcatgtgcctctccgagcgccgcgtcggcggcgccgacctcaccttccgctttccacggagctggctgtcgcaatggcgcgacgtggcggatgcgatggagaagctgacggcgcaactgcgcggaccgaagggctga

SEQ ID NO: 1915 - DNA, 330 bp, BradyrhizobiumColbertium
atgacacctgaggctctcaataccttttttgcgatcggcatcggtttcgcgctcgcgggcgcgctcgtgaacggataccaggcgctcgcacagcggcccgccggcttcggcctgttgcaggagggcgtggcgccgaagaccttcgcggcggttccgttcctcgtgttcgccgcgcccttcatcatcatgcgcaacacgctgcgaggcatccaggtggaaagccgccggatcgagttcgtgatgatggcgaccgtcatcgcgagcttctggagcatgatgagcggcaccttcttcctgatgacgctgcgcgccgccggcattccggtctga

SEQ ID NO: 1916 - DNA, 531 bp, BradyrhizobiumColbertium
atggcgatctacgagctcgacgggcaagcgcccgaccttcccgccgacggcaattacttcatagccgagactgccaccgtgatcggccgcgtgcgcctgaagccgggtgcgagcgtctggttcggcgcggtgctgcgcggcgacaacgagtggatcgagatcggcgagggcgccaatgtgcaggacggttcgacctgccacaccgatctcggctttccgcttgtcatcggcaagaactgcaccgtcggccacaacgtcatcctgcacggctgcaccatcgaggagggcgcgctgatcggcatgggctcgatcgtgatgaatggcgccagaatcggccgcaacagcatcgtcggcgccgggtccgtcattaccgagggcaaggaatttccggagcgctcgctgatcatcggctcgccggcgcgcgtgatccgcacgctcgacgatgcgcaagtccagaggatgggaagcgccgcgaggttctacgtggccaacggcccgcgcttcaagaaaggattgaagcggatcggctga

SEQ ID NO: 1917 - DNA, 168 bp, BradyrhizobiumColbertium
atgaccgtggattcagatccctttacggaaggcgaacgcgccgcgcgcgaaaacattcccgctgaggccaacccttaccgcgacgggagcgatgagcatgcgctgtgggctgcgggccacgagaaggtcgcaggcgcgatcgaagcgcgggaatcggaaggcagctga

SEQ ID NO: 1918 - DNA, 327 bp, BradyrhizobiumColbertium
atgcccgcatcgttcggccccatcaaagggatgatcgtgatcctcgcactcgcggcgatgccggctgcagcgctcgcgcaggcggccggcggctcgacaggctcgagcggagcctcgatgggatcaacgggaggctccgcgggatcgaccggaggtgttcgcaattcgcccgttccgccgcccgggaccaacagcctgggtacggctcaatcatccggctcgggagtcacgaccggcaccggcggaggtggtggggtcgatgcaaccgtcaacgccgagaatcggcagctcgataagagactgaagagcatctgtcgcggctgctga

SEQ ID NO: 1919 - DNA, 369 bp, BradyrhizobiumColbertium
atgttacgcaagatgatgatgacggcgctggctgtcgccgcggtcgggctctcggcgccgcaggcggccgaggcgcggggcggtttcgggcgcggcggaggcttccatggtggcggcttccatggcggaggcggctgggggcaccgtcattggcatggcggcggcttttggccaggggtcgcaatcggggcaggtatcgccggtgccggcttctacggcggttactacgggtacggttatccctattacggcgtcccctactattatggtaccggctacaacgatggctatggcggctgctatgtcgcgcgaaagcgcgtcatgacgccgtcgggatggcgataccgtcgggtcgacgtctgcgagtga

SEQ ID NO: 1920 - DNA, 495 bp, BradyrhizobiumColbertium
atgatcgatctcgcccaggacacgccatccaatcgcctgtttcggttcggcggtcagcccatcgcgctgaccgcggcagctctcttgctcttgattgtaggcgtgacctcgatcgcgatctggcgcgcctataccggtgcagcgccggagaccgaccgggtcgtcgcagcgcggcagctgcaggcccgcaccgcccaagcatccgagcagttggtcgagaagaccaagggattggaggcgacccagcaggaatcgatcgaccagctgcaggtgatgcaggaccaactcctgaccatgaagcggctgatggcggcgcaacaggccgataccaagcggttgtccgagcaggttgcagccctgaacgaatccatcgacggcctgcggcagtcctttgccagtgcccgggcaagcgaggtcgaaacgccgccggtcacccgcaagaaaccggtgcggcaacgcgcccacgacagcgcccgcaagcggtcgcgaagctga

SEQ ID NO: 1921 - DNA, 732 bp, BradyrhizobiumColbertium
atgcgactgcacgtcgtcaatcccaacaccaccgcgtcgatgacggcgaagatcgccgcagccgcgcgcagcgtcgccctgtccggcacatcgatcgatgcgcgccagccggcgatgggcccggtctcgatcgagggattctacgacgaggctttcgccgtccccggcatgctcggctgcatccgcgaggccgaccgcgacggcgcggacgcccacattatcgcctgcttcgacgacactggcctcgatgccgcgcgcgccgccgccaaagcgccggtaatcggcatcggcgaagccggcttccacatggcgagcctgatcgctgcgcgctttgccgtggtgacgacgctcggcgtctccatcgctccgatcgagcacaatctgaagaagtacggcctcgccgagcgctgtgcccgcgtccgcgccgccgaggtgccggtgctcgcactcgaggagcgcaacaccgaagccgtcggcaagatctccgctgagatcaccgccgcgatccgcaatgatcgcgcggaagccatcgtgctcggctgcgccggcatggccgatctcgccgctgagctcgccgccacacatgccctgcccgtggtcgacggcgttgccgcagctgtgacgctggcggaatcactggtacggctgcggctgacaacctcccggctcggcccctatgcaccgccgcgcgcgaaaagctatttcgggcctttttcgcagtttcagccttga

SEQ ID NO: 1922 - DNA, 624 bp, BradyrhizobiumColbertium
atgtttgacttcaggggacaggggaagaagctggcgctggtcgccatgctcttcgggatcagcgcgacagcgcaggctggcgaaagccgtctgctctacgcgagcctcggcgataccacgcgtgcgccgatcggctgggtcgagttctgcgcggacaaagccgcccagtgccagggcgcaccgctgcagccgcgcgacatcgtgatgtcgcaggctgcgtggcgcgacctcgtcaaggtcaatcgctgggtcaacgagaccgtcaagcctttgaccgaccaggagcactggggcgtgatcgagaagtggtcgctgccgtcagacggctatggcgactgtgaagactatgtgctgttgaagcgcaagatgctgatggatgccggttggccacgccaggccctgctgatcaccgtcgtgcgcgacaagaagggcgaaggccacgcggtgctcacggtgaaaaccgacaagggcgagttcgttctcgacaatcagaacgagaacgtcgttgcctggacggagaccggctaccgcttcgtcaagcgccagtcgcagagcgatcccaacgtgtgggtctcgctgggcgataccaggccggcggtctccaccgccagcgcgagagattag

SEQ ID NO: 1923 - DNA, 606 bp, BradyrhizobiumColbertium
ttggcgaacaaaaaatttcttccggccgccgaggagcgcaggcgcttccagcgggtgaaggtgcacctgctcggccgttacatgctgccggaccgccgggaattcccctgccaggtgatcaacatgtcgccgggcggcctcgctttgctcgctcccggcatcggcaatgtcggcgaccgcgtggtcgcctatctcgaccacatcggccgcgtcgagggcaagatcacccgcatcatcgacaacggcttcgccatgacgatcggagccacgccgaggaagcgcgacaagctggcggcccagctgacctggctcgccaaccgcgacatcctcaatctgccggaggatcgccgccatgaccgtatcgtgccgcgcaaccccattgcagtgctgacgctcgaggacggcaccaagatgacctgccgcatcatcgacctttctctgtccggtgctgccattgccgccgagaaccggccgccgctgaaatcgacggtgctgctcggccgggtccagggccgcgtggtccgcaacctcgaagacggcttcgcgctggagttcttgcacgagcagccgatcgagacactcgaagagagcgttaccgcgcggtaa

SEQ ID NO: 1924 - DNA, 114 bp, BradyrhizobiumColbertium
ttgctcggcatgcgggccttcagcgagaacacgatcggatatggcatggcggccggcattcactggtggcttggcctgtcggtcgcgctgcggcgggtgacgcgcgcggcttga

SEQ ID NO: 1925 - DNA, 1152 bp, BradyrhizobiumColbertium
atggaatccatccgcgtctgcactcacgcaggtccgggctccgagcccgtcatccgtaccgtgccgtggccgaaggtcggccgcaaggccgcgctgatcaaggtcggcgcctgcggggtttgcggcactgatttgcatatcctgaaaggtcattggccgaagccgctgccgtggccgttcacgctcggacacgagctcggtggggtcatcgtcgaatgcggcgatgaattttccgaggacttcatgagcaagccgctcaaggtcggctcgaaggtgatgatcccgcccttgatgccgtgtgggcgctgctattactgcatccattatccccagaccgcgaacaaatgcctgacgccggtctattacggccgctatctcggcttcgacaaggcgccgcacctgtggggcggctgggccgaatatgtctatgtcgatctcgagatgctgccgggcaccaagatctacaagctgcccgatgacatgtcgctgcggttgggagcgctatcggagccgctgacctcctgcattcgcgccttcaaccgtgcgacccgcgccggcggcttcagctggggcgacaccgtggtgatccagggctcgggaccgatcggcattctcgccgtggcggccgcaaaagagatgggggcagggcgcgtcatctgcgtcggtgcgcccgaggcgccgcgattgaagctcgcgcgcgagttcggcgcagaggcgacagtgaacatcgaggagctcaaatcgccgcaagaacgcatcgcgcgcgtgcggaagatcgtgggcggtttcggcgccgatctggtgatggactgctcgggccatcccaccgccggacccgaaggcatcgagatgctgcgcgacggcggcacctatgtcgagatgggccagttcaccgacgccggctcgatcgacacctcctggcaccgcatctgcaccaaggacctcaacgtgctcgggtcctggggcttcaccggcaacgatctgccgttaggcgtcgacatgctctaccgcacgcgggacaagtatccctggctgaagatgcatacgatctatcccttcacggaagatggcgtcgcgcaggcggtgaaagacgcgatggcgatgaagacggtgaagtcgaccatcgtgccgtggccagagctggtggagtaa

SEQ ID NO: 1926 - DNA, 516 bp, BradyrhizobiumColbertium
atgagcgaggcgatatccggagcgtttttcgaatcgggcgttcccgcatgtcgccccgctcaagcgggttacgtgccgaaatctggaatgagggccacgatgacagatgcccccgacgtgaacgcgcgctcccccttccacgccatccgcgcgatcgattacaccgtcatcttcgtgcgcgacatggcagcgatgcgccgcttctacgagggcgtgctcgccttctccttgctacgcgagctgtccccgaactggatcgaatacggcatcggcagcaacacgctggttttggcgaggccaagccggaccgcgtccgacgcgccgatcccggcgggaagcgccgcgctgcagctggccttcagggtctcggcggacgaggtcgaccagtgcgccgatgaactccagcggcaaggcgtggtgcttctggctctgccgacggaccagtccttcggccaccgtacgctgttcttccgcgatcccgacggtaatctgctggaggtgtacgcggaaatctga

SEQ ID NO: 1927 - DNA, 1935 bp, BradyrhizobiumColbertium
gtgtcctttccggccctgaccccgccgctcgcccgcgctttggccgagcggaactacgattctcccactcccgttcagctcgccgtgcttgcggacgaagccgctggccgtgatctgctggtttcggcccagaccggctccggcaagactctcgcttacggcctcaccatggcgaaggatttgctcggcgataccgagcggttcgagcaggccggtgcgccgctcgcattgatcgtggcgccgacccgcgagctcgcgcttcaggttcagcgcgagctggcctggctctacggacatgcaggcgggcgcgtggtctcctgtgtcggcggcatggatccgcggcgcgagcaacgcgagctggcggcgggcgcgcacatcgtcgtcgggacgcccggccggctctgtgatcatttgcggcgcggtcgtctcgatatctccgaactcgctgccgtcgttctcgacgaagccgacgagatgctcaatctcggttttcgcgaggatatggagttcatcctcgagaccaccccggagacgcgccggaccctgctgttctcggcgacctttccgcgcggcatcgtcgcgctggcccggcaatatcagcgcgacgccttccggatcgaggtcgcgggcgacgaaggcggccacgccgacatcgagtatcgcgcgatccgcatcgcgcctgccgatgtcgagcacgccgtggtcaacgtgctacgcttctacgaggcgccgagcgcgctggtgttttgcagcacgcgcgatgccgtccggcatttgcaggcggcgttgctggagcgcggcttctctgtcgtcgctctctccggcgaattgacgcagaacgagcgcaccatggccttgcagtcgttgcgtgacggacgcgcccgcgtctgcgtcgcaaccgacgttgccgcccgcggcatcgatctgccgagtctcgacctcgtcattcatgccgatctgcccaacgacgccgaggtgatgcagcatcgctcgggccgaaccgggcgtgcgggacgaaagggcacaagtgtcctgctggtgccgcccgcgcgtcggcggcgcgcggagctgctgctcaatctttcgggtatcgatgcggtctggggcacggcgccgcaggccgaggagatccgcaagctcgatcacgaccgcatgaaggatgtgctgttcaccgaagagacgacgcctgacgacgtggccttggcgcaggcattgctcgccgagaggtcagccgaggagatcgccgccgcgctcgcgcggctttatcgcgcccggctgccgtcccccgaggacatcatcgatcccggtgagcggagcggccggccgcgcgacgggcgcgggcgcgacagacttgaaggtggcgacgatcgtcccgcgaagccgcgatcgaagtccggacaagcgtcgtcgaagcacggcatggacgagggcagcgtctggttccgggccgcgatcgggcggcgtaagaacgcggaggcgcgctggctgcttcccatgatctgccgacgtggcggcatcaagaagggcgatatcggcgccatcaaggtcatggacaccaccaccgagttccagatctccgagcgggttgcggagtccttcgcagcaaaggtcaagcgtccggacaaggaagacagcatccgcatcgagccgatggcggacgcgccgcagcagcaggcacggtcggaagagcgatcacacgcgccgcggcgcgcgagagacgatggcgagcgccgcgaggatcgtccgcgcgaggcacgtgagttcaaacctcacagcaaaccgctcggcgggcgcggaccgagattcgaggatgcgccgtcttccggaatgaaaaagaagcatcgcgataagatgggccgcgcggagccgtcggttaggccatggccggtgaggggggcgccgggaaagaagaccaagaagaagcatcgcggctga

SEQ ID NO: 1928 - DNA, 294 bp, BradyrhizobiumColbertium
atgaaactcacattgtcgaaagttgctttcgttgcgtgcgttgcggcgactgcgttcaccgcgaccagcgccaacgcggcgcagtaccggacctatggctgcgacatcgcctttttcgaaggttgcggcttcctgatcgagacgccgaacgtgggcagaaaacccaccaccgtaacccatcgcgacacctcgcccgtctacatgaagcagaccgatccccgctacagttcgtcgctaagcgatgccggcggcggtggtggcggaggtggaggtggtggcggcggtggccgctga

SEQ ID NO: 1929 - DNA, 525 bp, BradyrhizobiumColbertium
atggaacggcgatacgacatgagcaagccgcattggcgtccggcgcacgcatccgacctgcccgccatcagcaccatcgcggcgcgcatccatcccgatcttccggaaagcctcgaggtgctcgcggagaagatgcggctctgtcccgacggatgccgcgtgctcgtcgccggcgatgagatcgccggctacgggctcgggcatccctggaagcagcaccagatcccgccgctcgatggtttcctcgaacgactgcccgaagacgcagactgcctctacgtgcacgatgtcgccgtgctgccacatcggcgcggaggcgtcgcgcgcacctatattgcgggcatcgcggagctagcgcgcgcatccggcatcggaacgctcgcgctggtctcggtctacggcacgcggccgctgtggcaacgactcggctttcgtccactgatggcggatacagcgttgcgcgcgaaactggcctcctacggagagggcgcgacctacatgctgcgcgacctcgctgcgacttaa

SEQ ID NO: 1930 - DNA, 417 bp, BradyrhizobiumColbertium
atgcaagccaatcgcatgaaaggagatatcatgacgtcctcgatccgcctcgcgctcgcgctcgccatttcgctcgcgatcgctcccgccgccttcgcagcgccgccgaccaagaccggcaagaccgacaagggcaccgtgctcaccgacaccaagggcatgacgctctacaccttcgacaaggatgcggatggcaagtcggcctgcaacggtccatgtgccacgaattggccggtgttgaaggccgaggcgagcgacgtcggtggcgacggctacaccatcatcaccagggacgacggctcgaagcagtgggcctacaagggcaagccgctctacacgttcgccaaggaccagaagcccggcgacgtcaccggcgacggcttcctgaacggcgcctggcatctggcgatgccgtaa

SEQ ID NO: 1931 - DNA, 1164 bp, BradyrhizobiumColbertium
atgacgcaacgaggatcgggtgacatcatcatggcatggcgcattctggcttggacctgcgtcggctgcgtggcattgctggcggcgatcggcggaacctggctgttcctgctgcccggaccgccggctcaaggcaacgcgccagcgatatccaaagaggagaccgaggcaacacttgcggcattgaagccgccaaagcgcaaacgtcccctgatcgccatcgttggtatcaacgacatgagcgagacgaccgactatctgatgccctatggcatcctcgcgcgcgcagatgtcgccgacgtcctcacgttgggaacggagcctggccccgtcgcactctatcccgcattgaaggtgcagccgcacgccacgatcgccgaattcgatgctgcgcatcccgacggcgcggactacgtcgtcgtccccgcgatgagccgcgaggacgatgccgtcgccctgcagtggatcaagagccaggccagcaagggcgcgatcgtcatcggcgtttgcgtcggcgccaaggtcgtcgccaataccgggctgctcgacggccgcaaggccaccacgcactggtactccgtgccagatctgcaaaagcattccgacatccgctatgtcgcggaccgcaggctggtggtcgaccgcggcgtcgcgacgacgaccggcatcaccgcatccatgccgatggccctgaccctggtcgaggccatcgcgggtcgcgccaaggcggaggcggttgcccgcgacatcggacttgcggaatgggatgcgcgccaccgcagcgaggcgttccggttcacgcgcccgtttgcgctgaccgcgatcgccaacacgctcgcattctggaagcgggaccaattcggcatcccactcacgcctgaagtcgatgaggtgtcgcttgcactggttgccgatgcctggtcgcgcacatatcgctcgcacgccctcaccttcgccgccacggcagaggcgcagaccagccgtggcggtctccgcatcctgccggacaaggtcgcggcgggctggccggccaagcagacgctgcaggccgccgtcgacctgcctccggcgcgggcgctggagcagacattgcacgccatcgatgcgcgctacggggagcgcacggccgacttcgtcgcgatgcagctcgaatatccgagatag

SEQ ID NO: 1932 - DNA, 555 bp, BradyrhizobiumColbertium
atgaaacatccgtcgagccgcgcgttcttcgcgtattgggacaagaagcgcggtacggcgcgggcccccgaccgggccgacatcgacccggccgcagtccggggcctgctcggcgacatcttcgtgctgtcctgtgagccgaaccttggcttcccgttccgcgtcgccggcacgcgcgtctgcgcgctcgcaggaacagacctcaaggaccagagcttcgcggcactgttcaccgatgcgagccgcggcgagatcgaggagatcaccaccatcgtcgccgacgagacgctgggggcgatcgcaggcgtcaccgcagcgcgcgaggacggcagcaaggcgcatctcgaactgctgctgctccctttcaacgcccggccacacacccccgtgagcgtgaccggcgtgctcgcgccgttcggcaacgaatgcggcccgttgttggccttcacgctcacatcctggcgttacctgcaccagcccgagaagctcctgccgcgcgccatccgcaaattgcaggtcgcacgcggactgatggtgtatgaggggctgagatag

SEQ ID NO: 1933 - DNA, 114 bp, BradyrhizobiumColbertium
gtgaccaaactgtttgacgcccaaattacaggcctcgccgagaacctggagaaagcggcgaggcttgcgaccgcggtcaccatagcaggcgagcggccggcacaaagcgcatag

SEQ ID NO: 1934 - DNA, 882 bp, BradyrhizobiumColbertium
gtgcacttgcgcaggggcggtctaggcgactatctccagacggtcgctccgatcgcgcctgaaagcgaagctgccttggattctccgcaagattcgtcaccggacctgccggccgtcatcgaggaggctcctcgcgagccgatcctgacgctgcccccggcactgaccgcctatatcgtcctgctggcggtgatccatctgcgggtgctgctgccgccggagttcgagaactggaccatcgacgtgttcggcttcatcccgaagcgctacgattcctcgctgctgaatttgcagattccgggcggggcgggtgcgaagatctggaccttcgtcacctactcgctgctgcacgccaatctcacccatctcggcttcaacgtgctgtggctgctgccgttcggcagcgccctggcgcggcgctttggcacggtccggttcttcgtcttcctggccgtgacggcggctgccggcgcgctcgcccatctcatcacccatgagcacgcggtggcgccgatgatcggcgcctcggcctcagtgtcgggcgcgatggcggcggcaatccgcttcgccttcgtccgcggcagcttcctgtcgttcagtcgttcggacgccgacaccgccgcaagggttccggcgctgccgctgtcgcgtgcggtgcgcgatgggcgggtggtcggcttcctcgccgtgtggttcggcgtcaacatcatcttcggtgttggcgcgatcggggtcgattccgaaacgacgagcgtcgcctggcaggcgcatatcggcggcttcttcgccggcctgttgctgttcgccctgttcgatcccgtgccgcgggctcgaggcaatgctgcgggtgcgtcatcacaggacgtttcagaccgtatttga

SEQ ID NO: 1935 - DNA, 429 bp, BradyrhizobiumColbertium
atgacggtacgttccattctcaacaccaagggccatcacatcgtgagcgtcgagcccgacgccaggctggccgccgcgatcaagctgctcggcgagaagaagatcggtgcggtgttggtgatgaaccagagccggctcgagggcatcctgtcggagcgtgacatcgtccgcgtgctcggcgagcgcggggccagcgtgctggaggcgccggtctcggaggtcatgacccgcaaggtcgtgacctgcaaggagaccgacaccgtcgccgagctcatggggatgatgacgtcaggcaaattccggcatctgcccgtggtcgacaacggcaaggttgtgggcctgatttcgatcggcgacgtcgtcaagcgccgcgtccaggaatacgagtccgagcaggaagccctgcgcgactacatcaaaacggcctga

SEQ ID NO: 1936 - DNA, 1029 bp, BradyrhizobiumColbertium
gtgctggacagattgaaggggcgaggcgcgaacggctccaatggcgagaaggtagggctcggcagcatccgccggccggtgatcggccttgcgctcggcggcggcgcggcgcgcggtttcgctcatatcggcattatcaagaccctgctcgccaacggcatcgtgcctgacgtcgtggtcggtacctcgatcggcgccgtggtcggcggcctctatgcggctggcaagctcgagaccctagaagaatggggccgcagcctgcaaggcatgcgcaccatcctcggctatctcgacatccgcctcaatggctcgggcttgatcggcggcgagaagctcgcaacccggctcgaggaggcctgcggccagaccctgatcgaggaccttcccatcaagttcgccgctgttgcgaccgaggtccgtacgggccacgagatctggctgacgcgcggccgcgtggtcgacgggatgcgcgcctcctatgccctgcccggcatcttcgcgcctgtattgattggtgaccgctggctggtcgatggcgcgctggtcaatccggtcccggtttcggccgcccgggcactcggtgccgaaatcgtcatcgcagcaaatctttccagtgacatctttacccattccacgacgatctattcgcacggcgcaatgccggacaccgccgcgcccgtagccggggagtcgccggccaagcggcgctttccgcggctgttctcgccggagaggacggtgaagcgcgagttcttcggcggcgctggacggcccggcatctcctcggtgatggtcgatgccttcaacatcatgcaggaccgcattacccgcgcccgtctcgccggcgatccgccagacatgctgatcacgccgcgggttggccagatcggctggttcgacttccaccgcgcggacgaactcattgccttcggcacccgcgccgccgagcgcgcgctggattcgatccaggaggccattcatgtgctggcgccggcgcccgagggcaccgcgccgaaagcgcaggaatga

SEQ ID NO: 1937 - DNA, 1074 bp, BradyrhizobiumColbertium
atgacacgcgggggtgacggcatcattggatggcggcgcagcagcaggctgctgtcggcgctgatcgttgcggcgtgccttgttaccgcaggccaaaatgttgcgcaggcgcagcttttctcggatcgtccgccgccggtgccgccggcatccgtgcccgaccccggcggcgccgtcagcctggcgccgccctccgggccgggcgccggcccgccaagcctcccgccgacgctgatgcagccggcgacgcccagcatgccgccgccagcggtcacgaccgtgccgccggccgccccgctgaacgcggcggtgcccggacagggcgtgctgtcgctgacggcgaaatacggcaaggactcccctgccattaccagcggcctggtatggcgggtgtttgccgaccgtcccgacgagaacggcaccttcaagctgatccgcgaggaccgcagcgccacgcccaacatcgtgctgccgcctggcaattacgtcgttcacgtcgccttcggcctcgtcagcgcggtgcgcaccgtcagcctgaaggccgagaccgaccgcgaatcattcgtgctgcccgccggcgggctgcggatcgagggccgggtcggcaccagccgcattccgcagaaccagatctcgttctcgatctacaagggcagccagttcgaatccggcgatcgcgcctcactggtgccgaacgtcgcggccggcgatgtcgtgctaatacccgagggcacctattacatcgtctcgaattacggcgatgccaattcggtagtgcgctcggatattcgcgtccaggccggcaagctcacggacgtcaccattacccaccgcgccgccgtcatcacgctcaagctggtcagcgacaagggcggcgaggcgctcgccaacaccgcctggtcggtgctgacccccggcggcgacgtgatcaaggaatccatcggtgcgttcccgcgcgtcgtgctctccgaaggcgaatatcgcgccatcgccaagaacgagggcaaggtctacgagcgcggtttcaacgtcgtcaacggcgtcgacggtgaagtcgaggtcgtcgctcggtag

SEQ ID NO: 1938 - DNA, 222 bp, BradyrhizobiumColbertium
atggagcaggggaccaggccggtcggcatgttcgaagtgatccttacaaggcgcaagcggtttggctggcgatggcaggtgtgcgaccagtccggcaagatatttgccgatggcttcgaacgcacgcggccgtccgccaaatatcagagcgagcgtgcgttgttcttcctgttgtcgcaagcctacttgcgcaaccgctctgcggcgtccagcgaggattag

SEQ ID NO: 1939 - DNA, 123 bp, BradyrhizobiumColbertium
atgatcgcggatcaacgcatgggcatcaccaacgctttccagcgtaaccgcctgggatcgagccgcggcaccagcttgctggtctctacgaggcgcgtcgcctgcatcatgatctccccgtga

SEQ ID NO: 1940 - DNA, 2463 bp, BradyrhizobiumColbertium
atgactgccgcgaagaagatgccgggaaaaccggccgccgaaatgtttgacgacatcccggtgcttcagcgcaaatggcacgcggcgctgaagcccggcgaaaggctgccgcgctacgaggacgtgatgctcggcagtctcggacggctcgccgaccacatcgcgctgctcaggagcgacggcgcgctcgagctgtcgcggagcgggcgctatgtgcaaaaatggctcggcgaggagcgctgggacattccagtcgtcgagctttcgcccgattgcgccacggcgttgtcggaagcggcggcgaacgcgcttgcgacgttacggccgcaccaggcgagtgcgcattgcgtgcgcgacggaatcgtcaggacctacgacgtgctggcgctgccgacctcctcccgctggggcgccacgctggtcggtgcctatgtcaacgagcgcggcgcgcaatacaatcttctcgacgcgatcttttcctcgaccgaggacgcggtggtctccctggtgacgctgcgtgatgccggcggcagtccgctcgatctccaggtcgtccatcacaacaagagtgcaaacgcgctcctgaaggtcgagagcgggcccttgctgtggcggcggatcggcgagggcggcacgctgctgggctcgcccgaaatcatcaacttcctgctcaaggccgtttcgggcgaccgcggcgagcagctcgagatcgagagcgagggacgctacctccggctcagcgctaccgccttcgccgacgtggtctcgctgacgatctccgatgtcacggccctgaagcggcgcgatgcctcgttccgcctgctgttcgacaacaatccgatgccgatgtgggtgttcgatgccgagaccaaggcgttcctcagcgtgaacgacgccgcggtccagcattacggctacagccgcgccaccttcctgcgcatgaagctgcacgagatctggcccgaggacgagtgggacagccacgccgcggcgctggagcgcgtcggcgatgcctatcattccacgcgcaactggcggcacttgcgcgccgacggcagcgagatcgaggtgctcactttcggccgccgcgtcgccttcgacgaccgcgatggctacttggtggcggtggtcgacatcaccgaaaggcgcaaggcggaggcgcgcattgcccacatggcgcaccatgacgggctcaccgacctgccgaaccgcgagcatttccaggagcgcctgaaacaggcgctcgatcaggcggagggaaaaagggtcggcgtgctctacatcgatctcgacctgttcaagaacatcaacgattccttcggccatccagtgggtgaccgcctgttgaagcaggtcgccgagcgcctgaccaccgccgtgcgcggcgccaatctcgcggcgcggctcggtggtgacgaattcgccgtgatcctggccgccgacgtctcgccaaacgaggccagcgcctgcgcgtccttgctgatcgacatggtgaagacgccttacgatatcgacggacaggagatggtgatcggcgccagcatcggcatcgcgctgtcgccgggcgatggcaccacgccggaagagttgatgcgcaatgccgacatggcgctataccgggcgaaatccgacggcggtggcgtgcaccacttcttcgagcgcgagatggatcttcaggcgcagaggcgccgcgatatggagctcgatctgcgccgtgcattcgccaatggcgagttcgagctgcactaccagccgctggtgtcgatcgcctccgaccgcatctccggattcgaggcgctgctgcgttggcgtcatccggacaagggtatgatctcgccggctgagttcatccccgttgccgaggacatcggcctcatcatccagctcggggagtgggtgctgcgcgaagcctgcgccgaggccgtcaagtggccttccgacgtcaaggtcgctgtcaatctgtcgccggcgcaattccgcagccgcaacctggttcaggtcgtgatttccgccttggcgcagtccggcctgtcgccgaagcggctcgaactcgaaatcaccgagtcgatcttcctggccgagaccgatgccaatctcgcgatcctgcaccagctgcgcgagctcggcgtcggcatctccatggatgatttcggcaccggctactcaagcctgagctatctccggagctttcccttcgacaagatcaagatcgaccgctccttcatcaaggatctggcggagcggcccgactgcggcgcgatcgtgcgcgcgatctccgggctcggccgcagtctcaacatcaccacgacggccgagggcgtggagaccgaggatcagctcgactggctgcgcgccgaaggctgcaacgaggtgcaggggttcctgttcagcgcggcccggcctgcgaccgacatcgcgaagctactggctgatttcggtcagcgcacctcacgggcggcgtag

SEQ ID NO: 1941 - DNA, 1269 bp, BradyrhizobiumColbertium
atgcgacggcgtgaatttcttgtcggggccgcgatgctcgccggcgcggtcgcgccaagccgcgctgtcgatagtcccgccccctcgcccgaagggctcgaccgtatcaccgcgtatttcgacaacgaggtgggaagcggccgactccccggcgcggtgatcctgatccagcagcacggcgagccggtctatctgaagagcttcggcgtgcgcgacaccaggaccggcctcgccatgacgccggacacgatcttcgccatccactccatgaccaagccgatcacgtgccttggcgcgatgatgttgatcgacgagggcaagcttgcgctcaccgaccccgtctcgaaatacatcccgctctttgccgacaccaaggtgggtctcgagctcaccgagccggacggcaagctgaagcttggcctcgtccccctggtccgtcccgtcaccatcgaggatctgcttcggcatacttcgggcatcacctacgattatatcggagccgaattgatcgagcaggcctacaagacggccgacatattcgaaaatcccctcgacaaccgggtattcgccgatcgcatcgccaagctgccgctggcgcggcagccgggaacgctgtggcgctacggccattcgaccgacgtgctcggctgcgtcattgagatcatctcgggccagaagctttatcagtttctgaaacaacgcatcttcgacccgctgggcatgaacagcaccaagttcgtgctcgcaaccgaggatgagctggcgcggatggcgcgtccgctgccgaacgactacatcctgctcgccggcgagcgcgagcgcctcgaccatcccgactggcaatccggaggcggcggcctgctctcgaccatcaccgactatcagcgcttctcacagatgctgctcaacggcggcgccttcgcgggcaggcgctatctcagcccggccgcgttcaaggcgatgacgaccgatcacatcgggccgggctccggcgtcggacgcgactatttctacttccccggggacggtttcggctatggctatggccttgccgtgcggaccgatcccggcaacgccaaaccgccgccgcccggctcgctcggcgagctgaaatgggactcaggcagcggcacctatttcggcgtcgatcccaagctcgacatggtctacctgatgatgcagcagacccagaacgagcgcggccgcatcactcccgcgttcaaggcgctggtctacgattgctacccgcccccactacgccgcccgtga

SEQ ID NO: 1942 - DNA, 564 bp, BradyrhizobiumColbertium
gtgcccgacgccatcgaactcctgaagacccgccgctccgtcaagccgcgcgaaatgaccgggcccggtccctcgccggccgagctcgagacgatcctcaccatcggcgcgcgcgtacccgaccacggcaagctcgcgccctggcgcttcatcgtcttcgagggcgacgcccgccagcgcgccggcgaggtgatcgcaagggtctttgcgcgaaagaacccgggggcgccggaggccgacatcgagaccgagcgcaagcggctcatggacgcgccgctcgtcatcggcatcgtgagcttcaccaagccgcatccgaaggtgccggcgttcgagcaggaattgtcggcgggtgccagcgccatgaacatcgtcacggccgccagcgcgctcggctacggcgcatgctggctgaccggctggttcgccttcgatcgcgacgtgcttgatgggctcggcctcaagcctgacgagaagctcgccggcctcgtccatatcggcacgccgacgaaaccgagcgaggaccgaccgcgaccgttcctttccgaaattgtgacgcggttttag

SEQ ID NO: 1943 - DNA, 2043 bp, BradyrhizobiumColbertium
atgaccgaccagcccaaatccgagtccggcttccagtacagtctctccaatctgaaacccgtgactcccgctcccaaggtcaccctcaccttccccgacggcgcccaacgccagttcgacaagggcatcacgggcctcgatatcgccaagggcatctcgccgtcgctggccaagcgcacggttgcgatggcgctcgacggcgcgctcgccgatctcaacgatccgatcgagaccgacgccaagatcgaactcgtcaatcgcgatgatccgcgcgcgctcgaattgatccgccacgactgcgcgcacgtgctggcggaagccgtgcagacgctgtggccgggcactcaggtcaccatcggtcccgtgatcgagaacggtttctactacgacttcttccggaacgagccgttcacgccagaagacttcgcagccatcgagaagaagatgcgcgagatcatcgcgcgcgacaagcccttcacgaaagaggtctgggatcgcgaaaaaaccaagcaggtgttccgcgacaagggcgaggcattcaaggtcgaactggtcgatgccattcccggcagcgagccgatcaagatctactaccagggcgactggttcgacctgtgccgcggcccgcacatgacctcgaccggcaaggtcggaaatgccttcaagctgatgaaggtcgccggcgcctattggcgcggcgattccaacaatccgatgctgacccgcatctacggcacggctttcgccaagcaggaggatctcgacgcttacctcaagcagatcgaggaagccgaaaagcgcgaccatcgcaagctcggacgcgagctcgacctcttccacttccaggaggaaggtccgggcgtcgtgttctggcatccgaagggctggaccgtcttccagcagttgatcgcctatatgcgtcgccgcctgaccggcgactacaacgaggtcaacgcgccgcagatcctcgacaaggtgctgtgggagacctcgggccattggggctggtaccgcgagaacatgttcgcggcgcaatcggccggcgacgaagccgaggacaaacgctggtttgcgctcaagccgatgaactgcccgggtcacgtccagatcttcaagcacggcctgaagagctatcgcgacctgccgctgcgcctcgccgagttcggcgtggtgcatcgctacgagccttccggcgccatgcacggcctgatgcgcgtgcgcggcttcacccaggacgatgcgcatatcttttgcacggaggatcagctcgccgaagagtgcctgaagatcaacgacctgatcctctcgacctacgcggatttcggcttcaccggcgatctcacggtgaagctctcgacccggccggagaagcgcgtcgggaccgatgcgatgtgggatcacgccgagcgcgtgatggctaccgtgctgcgcgagatccagtcgcagaacaatcacatcaagaccgaaatcaatcccggcgaaggcgccttctacgggcccaagttcgaatatgtgctgcgcgatgccatcggtcgcgactggcagtgcggcaccacgcaggtcgacttcaacctgccggagcggttcggcgccttctacatcgaccatgacggcggcaagaagccgccggtgatggtgcaccgggcgatctgcggctcgatggaacgctatatcggcatcctgatcgagcactatgccggcaacttcccgctctggctctcgccggtgcaggcggtggtcacgaccatcacctcggaaggcgacgagtacgccaaggtggtgatggagcaggcacggcgcgccgggctccgggtcgaggtcgacctgcgcaatgaaaagatcaactacaaggtccgcgaacactcgctggccaagatcccggcgctgctcgtggtcggaaagaaggaagccgagacgcactcggtctcggtccgccgcctcggcagcgacggccagaaggtgatgacgacggcggaggcgatcgccgccctcgtggacgaggcgaccccgccggatgtccggcgggcacgcggcggcgtctga

SEQ ID NO: 1944 - DNA, 1173 bp, BradyrhizobiumColbertium
atggaaagagcccccgcagccggacgtttcgccccgaccgccctgatgctcggcaatctcgtcaccggctgctccgtgctggcgccggcaggcatgctgccggaattggcgacgggactggaggtcagcatccatgcggctggactcctgatcacgttcggagcggtgacgctgtgcatcggatcgccgctgacggcctggctcaccagccgcatcgaacggcggacgctgctcgcaacaacgcttgcggtgcttgccttcggcaatctcgcttcggccttcgccccccactacgccagcctccttatcatccgcctcgcaatgctcgcggtcggcgcgctctacacgccgcaggccgccggcacggcagcgctgatcgtgccggccgagcggcgtggcagcaccattgcgtacattttcctcggctggtcgctggctgccgcccttggtttgccgctgatcaccttcatcgccagccgctatggctggcgagcggcctatggtggcatcggcgcgctcggctgcatcagcttgctgctgttgctgctgcgtcttccggcgggcctgaagggtgcaccggtcgatctgaagacgtgggccgcagtcgggcggagcaggacgatcttgcttctgctcgcgatcacgatgctgcagatgtcggggcagttcgtcgtgttcacctacatgggcccgttgctcaacaagctcactggagccggtgccgatgcgatcggcatggtgtttgcgctttacggtgtctgcggattccttggcgtcgtcctcgccacccgcatcgtcgacacctcggggccttatcgcacctcgttgctgttcacctggctgctgcttgccgggatcgcgggctgggcggtgagcgcaggctcgctcgtcttgatggcggtcgcggtcgcgacctggggactaggcttcgcttccaccaattcgatgcagcaggtgcgactggtcgcagcggcgccgccgctggcatcggcgaccgtcgcgctcaatacctcggtcctctatatcggccaggcggtcggctccgccgtcggtggcctgctgtttgcccgcgagctcctgcacacgctcggcttcgtcgccgtcggtttcgtcgtgctggcgctgatcctggtggtcctgacccggcccggtccggtggctgccacgtcctga

SEQ ID NO: 1945 - DNA, 363 bp, BradyrhizobiumColbertium
atgattctggcggttgccgcggtgctctattcagcctccgcatttgcgcaagccgacaagccaccgatggtcggagacaagccgctggtgcaggtcaagcccaaagaggccgcggccaagcctgccgcggcatcgaagggcaagccgcagtcgatcgccgtccggctccaggcctgtctcgagatcgacgacggcaccaaggatcgcctcaactgctacgacgccgtgatcccgccggcgccgaaaccgaagcccgcgaaggccaagggctacgccgattgccggttcttcaaggaagaggacgagcggctcgcctgcttcaacggctttgccgagagcattccgaagctgcccaagaactga

SEQ ID NO: 1946 - DNA, 1338 bp, BradyrhizobiumColbertium
atgttcggggccgtttcgacactgagagctgactttcgtgccgaccggacacgatccggtcggcccggtcgcgcgctccaagtcggcctgatctcagccttgctgccattgtcgctggcgctggggcactgcggcaaggcgcccgatccgacagcgctggccgcgcattcgcaggcaaatgtccaggtcgtcgcgaaaaccaattcgcagacctccaattcacgaatggcaagcggcgacacgttcgaggaccgctttccggccccgcgattcaaagagcgctttccctcggcgagcgagagtttcctgcagcggcagatgtcggatttctcgcccaagcgcgctgtccagcaacaaccgccggagcaagcgtcctacaaagtggcttctctcgaaccgcaggtcccctacaggcgtccgccgcgcgaggacctgacgacgctcgtcagcatgaagtcgtcggcatttccctatttcggcaacaatcccgcctcggacgcgcccttcctcaacatttccaagggcgaccgccgcggccaccgcagctattccgggcgcgtctactggcaggacgagacttacaacgacaaccgcgtgctggtgcacgtgcccgagcatttcgacgtgcgtaagccgggtgtgatcgtggtgttcttccatggcaacggcgccacgctggagcgggacgtgcgcaaccgccagctggtgcccaagcagatcaccgattccggcgccaacgccgtgcttctcgctccgcagatggcggtggacgccgccgattccagcgccggcaagttctggcagccgggcggcttcaaacgcttcatggcggaatcggccgagcatctcgcccgcatcaccggcgaccccaacggtgcgcgtgccttcgccaacatgccgatcgtgatcgtcggctacagcggcggcttcctgccgacggcctggagcctgcaggtcggcggcatcagcgaccgcgtgcgcggcgtcgtgctgctcgacgccgtctacggcgagctggacaaattcgcctcctggatcgagagccaccgctccggtttcttcgtcagctcctatactcgccacacggcacggcgcgaccgcgagctcatgagcatgctgcggcagaagggcatcagcgtgtccgaggacatggacgagccgttacaacccggcagtgtggtattcgtcgagaccggcgaaggcatcacccatcgcgattacgtgacgcgggcctggacgcaggatccgctcaaggacgtgctggtgaagatgtcggccacgccctcgctcgcgcttgcgcgcgtagcctcaaccaatccatccgcagcgggccgttag

SEQ ID NO: 1947 - DNA, 1368 bp, BradyrhizobiumColbertium
atgacggcatcagatgcgggaaccgcagcctggacgggccggctgaccgggagcggggccggagtctccgttccggttgcaaccgcaatcgttgtggccgacatgatcggggttggcgtcttcaccagccttggcttccaggtcaaggacatcccgtcgggcttctcgatcctgctgctgtggacggtcggcggcatcgtcgcgctgtgcggggtgtttgcgtacagcgagctgggcgcgatgtttccgcgctcgagcggcgagtacaatttccttggccgtgcctatcatccggccttcggctttctcgccggctgggtgtcggcgacggtcggcttcgcggctccggtcgccctcgccgcgatggcgtttggcgaatacgccaaatcggtcgtgcccgatctgtcgccgatcccgcttgccataggcgtggtgtggctggtctcgctcgtgcaactgaccggcgtcaagcgctccgcgacgttccagctgatctcgaccatcctcaaggtcgtgctgattgtcgccttcctcgtggccggcttcatcatcggcgtgccgcagccgatcgccttcacgccgcagccgggcgacctcgcccacatcgtcagtgcgcccttcgcgatcggccttgtcttcgtgatgtactcgttctcaggctggaatgccgcgacctacatcatcggcgagatgaacacgccgcagcagagcctgccgcgtgcgctgcttgcgggcacggtcatcgtgctcgtgctgtatgtcgcgctgaacgcggtgtttctctattccacgccggtcggcgcgcttgccgggcagctcgacgtcgcgagcgtcgccggcagcgccattttcggcagcctcggcggccggatcgtcggcgcgatgatctgcttcggtctgatctcctcgatcagcgcgatgatgtggatcggcccgcgcgtgatgatgacgatgggcgaggacataccggctctgcgcgcattctcgcgcaaatcagtgagcggtgcaccggcctacgccatcctgtttcagcttgcggtcgcgaccttgctgctgttcacgcgcagcttcgaggccgtgctcgactttatccagttcgcgctgttgttctgctcgttcttcacggttgccggcgtcatcaagctccgcatcaccaatcccgatttgccgcggccctaccgggcctggggatacccgtttacgccgttcgttttcctgctcgtgaccgcgttcatgatgtactaccttttgaccgagcggccggtgcagtcgctctcggggatgctcgtgatgctctcgggcctgttgatctatgccgttttccgcaggcggccggtcgccgctgccgcttcaccacatcgcgaatag

SEQ ID NO: 1948 - DNA, 1215 bp, BradyrhizobiumColbertium
atggtcgaactcttgagaattgcggcggtcgctttcgccttcttcgccgcggcagcttcgtccgcgcacgccgccgaggtcactttcgacgacaccgcgcgcttccttgcgggcatgcagccgtcggccgactcgccgctggtgccgctcacgaaggatccaggctggcagcgtcacgcaaaattcttcgatggcgcattcgcgcagctcgagcagcgccagctctcgaagatacgcaattgggccgatgtcaatctcgccgcgccccggccgaccatgttctacatgttcagcggcccggatttcctctacgccgacgcgttctactccaaagcgagcacctatgtgctcggcgccctggagccgattggcgccgtgcccgacctcacgcgcctgtcgcgcggttcgatcggagccgcgctctacaacgtcgagcgctccctcggctccatcctgagcttctccttcttcatcaccaagcagatgaaggtcgacctgagtgccaaccaggtcaacggcaccttgccgatcctctatgtcttccttgcgcgctccggcaagaccatccgcaatgtcgagatggtcgcgctcgacgacaagggcgggctgcatgtcggcgacgacaatccgggacgtagtgcgacgcgcggcgtccggatcacctttgcgggcagcgatggggaaacgcgcacgctgtactatttttcgaccgacctctccaattctggcgcacgcgccgcagggttcctgaagttctgcgagacgctcgggcccggcaacagcctgctcaaaagcgcgtcctatctgctgcactccggcaacttcaccgtcgttcgcgactggctgctcgccaacagcgccacgatcatccaggacgattccggcattccgctcgcgaattacaatgcgcggcagtggcggttcttcccattcggccgctatctcggccccatcgacgaattccccggccgctaccaggagcgctacgcccagttgttcacgcgcgctcagccgatcgacttcggagtcggctatcgctggcggatgcacgagtcgaacttgctgctggcggtgaaggtgccgggcagcgagaccgcgccggctgcggagaccacttccaccgccgagccagcgccgaagccgccccgcccgaagcggctgcggccaccggaatccatcccgccgtcacagggacgcttctattggttccgatag

SEQ ID NO: 1949 - DNA, 129 bp, BradyrhizobiumColbertium
atggacctgctcgccattgtcgcactgctcgctctcgtcgtcgcctcaagctggtatttggcggacagtcttgcgacgccgcccagcacgacgacgtttatcgtgccgagccagagtgtgcactggtag

SEQ ID NO: 1950 - DNA, 225 bp, BradyrhizobiumColbertium
gtgggctacaactgccggcacctgccgacctgctccgtttacggcgatgaagcgatcgagcggttcggcttgtgggccggaggatggatgacgctcgctcgcctgctgcgctgcaatcccttcggcacatcaggtatcgacaacgtccccctcaccgcgccgaagggcgctcggtggtatctgccctggcgctacggccgctggcgcggggtcaatgcatcttga

SEQ ID NO: 1951 - DNA, 885 bp, BradyrhizobiumColbertium
ttgaaacttctgacgtcgctcaattttcgcggctggttgctggtaggagccgccgtttgtggtgtcgcgctgtcgggcgccgtcgcgacattcgggtcgtcggcgcgagcgggtagtgcgctcgaggagcgcaagctgccgatgaagttcaactgggtcgcctgcgaaccgaactgccgcggctggatcagcgcagtcggcatcatcactgccgatacccccagggaattcgaagagttttcgcgcgggcgccagctcggcggcgccaccgtggtgctcgattccagcggcggttccgtaaatgatgcgatcacgcttgggcgccgcttccgcaacctcggactgtcgaccacggtcggcgtgagccttcgcggcgggccgtcgactcggccggctgtcgcgccagaggcctattgcgaatcgatgtgcgtgttcctgttgttggccggcaagaagcgatacgtgccggcggccgcacatgtccgggtccaccagatctggatgggcgaccgcgccgatgatgccaaggccgcgagctacagcgcgcaggatctgatgatcgtggagcgcgacatcggtcgccttgccaaatacacattcgacatgggcggcaccggcgatctgctgtcgcttgcgctcagtgtcccgccctgggaagacctgcacgaactcgatgctggtgagctcaagctcgccaatctggtcacgaccgatctcgtggctgacgtgctcccgcatatggacatttccgcgccggcaatggcggggcttgcgccaaagacgcaagccagattcgccacggaacaggagccgtccaaatcgaccaagacggcggaggccgtcgtgccgacgggcggcgtggcggcgccggcaccggagaagtaa

SEQ ID NO: 1952 - DNA, 456 bp, BradyrhizobiumColbertium
atgctgaacgacatttataacaagcggatcattgagctggccgggaatattccgcgcctcgggcggctttcggaccccgatgcttccgccacagcccactccaagctgtgcggctcgaccgtgaaggtcgatctcaagatgaacggcgacacggtcaccgacttcgcccatgacgtgaaggcgtgcgccctgggccaggcgtcttcatccatcatggcaagtcacgtggtcggctcgactgcgagcgaactccgcgagttacgggaaactgttcgcaagatgctgaaggagaacggcgcgcctcctgaaggcaaatgggaggagatcaagttcctcgaacccgttcgcgactacaaagcgcgccatgcctcgacgctgctaaccttcgatgccgtggtcgatgcgatcggccagatcgaggccaaggccaagcagccggccgcggcgcagggctga

SEQ ID NO: 1953 - DNA, 690 bp, BradyrhizobiumColbertium
atggacgctgcaatcaaatccatccgccccaacaagccctccgaccggcagcccgagagccgcccggcggagctggaccccgccgagttcctcgcggccgccgtccgcgccgatcagccgcgcccggcgcgtgccgaggcggaagccgcggtcaagacgctgctcgcctatatcggcgagaataccgagcgcgagggcctgctcgacacgccgcgccgcgtggtggaggctttcgacgagctctatcagggctaccaccagtgcccggccgaggtactcgaccgcaccttcggcgagacagcgggctatgacgatttcgtgctggtgcgcgacatcgagttcacctcgcagtgcgagcatcacatgatgccgttctacggcaaggcgcacatcgcctatacgccggtggagcgcgtcgtcggcctgtccaagcttgcccgtctcaccgacatcttcgcccgccgcctccagacccaggagcacctgacggcgcagatcgcggcggccatcgacgaggtcctcaaaccccgcggcgttgccgtgctgatcgaggccgagcatacctgcatgtcggtgcgcggcgttgccaagcatggcgcctccaccttcaccagccgcttcaccggcatgttccgcgacaatccggcggagcaggcccgtttcctgtccctggtgcgaggcacgcgctga

SEQ ID NO: 1954 - DNA, 423 bp, BradyrhizobiumColbertium
gtgtccgctcactcccatgagatcgaggaaggtcttgccttcctgcccaagttcgatgccgcaggcctggtgacctgcgtcgcgaccgacgccgttactggcgatgtgctcatggtcgcgcacatgaacgaggaggcgctgcgcaagaccgttgccaccggcgaggcctggtacttcagccgctcgcgcaatgccttgtggcgaaaaggtgagacctccggtcagacccaacgcgtgatcgagatgcgcaccgattgcgaccaggacgcggtctggatccgcgtcgagcagatcggcgccgcctgccacaccggtcggaggtcgtgcttctaccgcaaggtcgaggccgagggcggcggagcgaagctggtcttcgccgacgccgagcggctgttcgatccgagcgagatctacaagaaatga

SEQ ID NO: 1955 - DNA, 1020 bp, BradyrhizobiumColbertium
atgtcggtcgacaattccagtgcgacgcacacggccggtctcgacccctcgcgcgcgcgggtcgccggtgcgatcaagcaggcctcgaacatctccggcgtcagcttccagtacatgctgaccaccgccaagatggaatcggacttcaatccgacggctgctgcccccacctcgtccgcccaggggctctaccagttcatcgaccagacatggctaggcaccgtcaaagaggcgggcgcccagctcggctacggcagctacgccgacgccatcaccaggacgccgtcgggtacctacaccgtcgatgatcccgtgaagaagcggtcgatcatgaagctgcgcgatgatccggaggcggcatcgagcatggccgcggcgctgacgcagtcgaacagcttcaagctcaccggccttctcggccgcaggcccagcgacagcgagctctacatggcccatttcatgggcgtcggcggagccgcaaaactcatcgccaatgccgaggacaatccgcaagccgtcggcgcgaggctgtttcccaatgcggctgccgcaacccgctcgatcttctacgcgaaagatggccgcgcccgcagcgtctccgaggtctattcggtgctcgacgcgcgctacgccagtgcggccaactcgaaagtgacccgcagcgcgatggcgatgtatggcggcgcgccgtcgaccactgaggtggcgagcgcaagcggcgtgctgccgagcgcacccgtgatcgacaatgccgcatatcttcagacgtttccgaacacgcgcgcggtgacgcccgtcagcgcgacgacgtcgaaaacgcttgccgagaatgctccaagcactccggtgtttcgttcgatctatcagcccggcgatgcgacgcagccggtctccgcgacggtgcagaaattatggggcaacaacgcctcgctcacgtcaattgcctcggcaacgccggacgttcggccgccgcagccgctcgacctcttcagcgatcgcagcggcacgttctcgagttaa

SEQ ID NO: 1956 - DNA, 1176 bp, BradyrhizobiumColbertium
atgattgttcggcagttcatcaattggatcagaacggcgccggccggcgagcgggccgaggcaacgcgggcactggcccgggcctggctgatctcggacctttctgcagacgaccgtatcgccgccgaaggcgcgcttctgatgctcctggacgatccctcgccgctggtgcgacaggcgatggccgaggcctttgcccgcagccttgaagcgccggccgcaatcgtgcgggcgctgtcggcagaccagccgagtgtcgcgctgcccgtcctcgaacattctccgctgctgatcgacgccgatctcgtcgacatcgttgcgaccggcaacgaagaggtgcaatgcgcggtcgcccgccgcattgcgctgccggtatcggtctgcgccgccatcgccgaagtcggctgcgcggctgccgcgctggagctgatcgaaaacccacatgccgaactggcgccgttctcctgggaccgcatcgtcgagcgccacggccatctcgccgcgatccgcgaggcgatgctggtgctggaggatctgccggcggcaacgcgcgcagcgctggtggcaaagctctcggagatgctggcgcaattcgtggtggcgcggaactggctgagcgccgatcgcgcggaccgcatcacgatcgaggcacgcgaccgctccaccatgaacatcgcggcacgctcccgcggagaggatatgcagggcctggtgcgtcacctgcgcgtcaccggccagctgaccgcaggactgatcctgcgtgcactgctgtcgagcaatctcgatctgttcgatgcggcacttgccgagcttgccgatctgccgctggcacgcgtctcggcgctgctgcacgaccgcggcggcaacagcctgcaggcgctgctgcgccgcgccgggctgcccgagacgacgtttgcggcgttccaggttgcgctcgatgcctgtcacgagcagggttttgtcgacagcgatgacggtgcggtgcggctccgccggcgcatggtcgagcgcgtgctcacccattgcgagatggagcgcggcgtcaccgagccgctgatggtcctgctccgccgcttcgccacggagtctgcgcgtgaagaggcaaggctgttctgcgacgagctggtcgcggaagaggcgatggacccggcctatgacgatctgatcgcggcctag

SEQ ID NO: 1957 - DNA, 579 bp, BradyrhizobiumColbertium
atggcgaagaacagcgcgaaggacatcgaggtcaaggccttcgccacgcatcacgtcatcacccagcccaatccgctgcgaaaggtcctgcgccgcgtcgaagaaaaggacatggacgatccggtcgcccgcgccgagcaggcgctggcaggcctgtccggcgagttcagggattggatggcgatcgaggtccagcgactgtccgccgcctggactgcggtgcagaaggatggcttcacgaagaagctgcgcgacgagctgtttcacgccgcacacgacatcaagggcgacgcggcgacattcggctttccttcggccgcgggaattgccgaaagcctctgccgcgtcatcgagcacgcacctgatctgcagaaggtgccgcccgagctgttcacgcaccacatcaatgccattctcgccatcgtgcacgagaacaccaggctcgacaccatcagcgtctcagccgagctcagccgtcgcctgcgcaaggtcgccgacgactatctcgcccacgtcaatcgcgaccggcccgagcatctcgaggtgatcctgtccccgagcatcgcgccggtggagtaa

SEQ ID NO: 1958 - DNA, 546 bp, BradyrhizobiumColbertium
atgttccgtatcgacttcaacaagctgcgcttcctcgtctgcgacgacaatccgcacatgcgccgcatcctacggacgctgctgcattcgttcggcgcgcgcgaagtctacgaggccgaggacggggccacggcgctcgaaatgtacagccactacgtgcccgacatcgtcatcaccgactgggccatgccgatcttcgacgggctcgagctcgcgcagatgatccgccaaccggaatccaagggcaatccttacgcgccgatcatcatgctgaccggccattccgagaagcgtcgcgtcacggtcgcacgcgatgccggcgtgaccgaattcctggccaagccgatctcggccaagggcctctatcagcgcatcctcaacgtggtcgccaatccccgacccttcatcaagaccaagacctatttcgggccggaccgccgccgcaacaccaactccgcctatatgggccccgagcgccgtgtcggcgagaagcacgaggtgctgcagcagccctcactgctcgacaaggcccgttcctcaatctag

SEQ ID NO: 1959 - DNA, 780 bp, BradyrhizobiumColbertium
atgaccaagccctcgcgatatgaccggatcgccttcgtcgccagcccgagcaacgaggcacaggccgcctttggccagctcaccagggactatggcaattgcgaccctgcggatgccgacgtcgtggtcgcgctcggcggcgacgggctcatgctccagacgctgcaccagaacatgcgcacgggcaagccgatctacggcatgcatcgtggcacggtcggtttcctcatgaacgagtactcgacgcacgatttgcgtgcgcggctcgcggcggctcacgaatccgagatcaatccgcttctgatgcgcgcgaccgatgtcaacgatcgcgtccacctgcatcacgccatcaacgaggtcgccctgttccgacagacctaccaggccgcgcgcctgaggatcctgatcgacgagcgcgagcgcatgtccgagctgatcgcggacggcatcatggtggcgacaccggccggctcgaccgcctataacctctccgcgcagggaccgatcctgccgatcaacgccgcgcttcttgcgctgacaccgatcagcgccttccgcccgcgccgctggcgcggcgcgctgctgcccaatacggcctatgtcgtgatcgaggtgctggagggcgacaagcggcccgtcgccgccgtcgccgaccacgacgaggtacgcgacgtccgccgcgtcgaggttctctcggacaagaccatctcgatgcgcatgctcttcgaccccggccacagcctggaagagcgcatcctgcgcgagcagttcggctattga

SEQ ID NO: 1960 - DNA, 1569 bp, BradyrhizobiumColbertium
atggtcaagcaactgccgatgctccgccgcgcgagcctggtgctggcggtctcggctttcgcgctcgcgggctttgcgcgcgcggatgatccgccgcagccgcgccccgaggcggcctcgccgggcggacagaagggcggtcgcggcggtggcgcaccaaacgcttcaccggcttcgccctccgcggccgagcagcaccggctgccgccggattcgatcacgaggcagacactcgatctgcccggccggactctcaatttcacggccaccgccggctcgatccgcgtgttcgacggcaagggcgagccgctggccgatatcgccgtgacctcctatgagctcgacggtgccgaccgcgcaaaccggcccgtgacgttcctgttcaacggcgggcccggcgcgtcctcggcgtggctccagttcggtgcggccggtccatggcggctgccgctcgacggcgaggccctgtcgccctcggcctcgcccgaggtgaagccgaacgcagagacctggctcgacttcaccgatctcgtgttcatcgaccccgtcagcaccggctacagccgtttcgtcgccagcggcgaggaggcgcgaaaatccttctactcagtcgacggcgacgtcaattccatcgcgctcgtgatccgacgctggctcgagaagcacgagcggctgacgtcgccgaaatttgttgccggtgaaagctatggcggcattcgcggcccgaaggtcgtgcgccagttgcagcttcagcagggtgtcggcgtcaggggattgatcctggtgtcgccattgtttgacttccgcgagttcaccggcaccagcatcctgcaatatgtcgcgacgctgccgagctatgtcgcggtcgcccgtgaggccaagggaccggtcaagcgcgccgacctcgccgatgtcgaggcctacgcgcgcggcgagttcctgaccgacctcgtcaagggcgaggcggacaaggaggcgaccaatcgtctcgcggacaaggtcgcccagctcaccggcatcgatcaggccgtcagccgcaggctagccggccgcttcgacgtcagcgaattccgccgcgagctcgaccgcaagaacggcaaggtgacggggcgttacgatgcctcggtgcgtggcttcgatccctatccggattccagcaactcgcgcttcggcgacccgtccggcgatgcgcttcaggcgccgctgacgagcgcagcggttgacgtgctctcgcgcaagctcaactggcggcccggcggctcctatgaagtcctgaacggcacggtgggaggtcaatgggatttcggccgcggcatcgacccgccgcagtcgatctcggagctgcgccagatcctcgcaaccgatgggaagctgaacgtgctggtcgcgcacggcttgttcgatctcgccacgccctatttcgggacgaagcgagtgctcgatcaattgccggccttcgtcacacagcgcgtgaaattcgtcgtctatcccggcggccacatgttctattcgcgcgagggggcgcgacaggcattccggagcgaggtcgagacgctcattcgggagtag

SEQ ID NO: 1961 - DNA, 1389 bp, BradyrhizobiumColbertium
atggacccgtggctgcgacccgcgatcgactacatcggctcctggatcgaattccagctggcgacactccaacagccaggcgtcctcgtcgcgttcgcctatcgcggcgagatcgtagccgagcacgcgttcggtctcgccaacctcgataccggcgagaagctcactccgcgccatcgcttccgcatcgcctcgcattcaaagagcttcacctccgccggcatcatgaagctgcgcgagcagcgcaagatccggctcgacgacacggtcgggcaatatgtcggcggcctgcatccgcgcgtggccgagacgacgatcgcgcaggtgctctcgcacagcgcggggttgacgcgcgacggcgctgattccgggcagttcatcgacagccgcccctatctcaacgccagcgagctgcttgcggaattgaagcagccggccgcgatcgaggccggcacgcgcttcaaatattccaatcacggctttggccttctcggcctcgtgatcgaggccgtgacgaaggagccctaccccacctggatcaagcgcgagatcattgcacccgcgggcttgcgcgaaaccgaaccggacactccgctccccagggccgccctgttcgcgcgcggccacacacggaggctgccatatggcgagcgatgcgtcatcgccggggacaatcccgcccaggcgatggcatcggctgcaggcttcgccgccaccgcggctgacacggcccgcttcttcgcgcagcttgcgcccaatgcgaagaagagcgtgctgtcggttgcgagccgccgcgagatgacgcgccaccattggcgcatcccgcagagcttcgaggcctactacggcctcggcgtcaatgccggcaagaccgacggctgggactggttcggccatagcggcggtttccagggttacatctcgcggacctgctccattcctgcctgcgagctcgccatcagcatcctcagcaactccatcgacggagcggcaccgatctggatggacggcgcgatgcagatcctgcgagtcttccagacccgcggcgcgcccgatcgccgcctgcgcgactggaccggccggtggtggacgatctggggcgcgaccgatcttgtccccgcaggcaaccgcgtgctcctcgccaatccgcagttcaacaacccgttcatggatgccgccgagatcgaagtcaccggtcgcgatagcggcaagctggcctgggccgcaggctattccagccacggcgagccggtgcgccgcgttcgcaacaagcgcggcaaggtcagcgagatctggatcgcaggcgccaacgtgaagcctgaagccgtggtcgcgcgcgagatcgcgcgccgctatccgccgcgcaagcgccggcctactcccgaatga

SEQ ID NO: 1962 - DNA, 543 bp, BradyrhizobiumColbertium
atgcgcaaactctcaatgttttttgtgccggcactcctcgccttggcgctggcggctgcgccggtactgtccagcgcgtatgcggcgggcagcgacgagccttcgtcgccgccgaaatcggactcctcgaccaagaagggcaagaagaagagctcttccgtcagcgaccccaaattcctcgcgacctatcgtaccgcctatgccgcgatctacgacaagcacgattactcgggcgccatcgaccaattgaagtcgctcaagcgcgacgacgtcgccgacgtcgccaacctgatcggctattcctatcgcaagctcggcgactatcaatcgtcgaaggtctattacgagctggcgctgaaggacgatccgaaccacgtccgcacatggcagtattacggactctggcagctggagcagggcaatcgcgagcaggcgcagtatcacctcgacaagatcgcctcgctcgccggcaccgacagctccgagtatcgctcgctggccgctgcgctcgacaagccgaccggcgccacgctcgtctactga

SEQ ID NO: 1963 - DNA, 360 bp, BradyrhizobiumColbertium
atgttgaagaccatttccgcagccttgctcgcagcctccgtgctcgcagccccggccttcgcggccgaggccggcaagaccaccacgaccgcgccggcgatcaaggcagaccagagccagcccaaggcggcgactgccgtcaagccggaagccggcttcaaggccgacacgaaggccgccgacgttaaggccgatgccaagatggacggcaagccgaatgcggtgaacgctcacaccaacgctgcgcccgacgagcacaagaccgtgggccagcatcgccatcaggacaagcaggtctctgacaagcagtcacagaagccggacgtgaccaagccggcagcgaccgacaagcgcaactga

SEQ ID NO: 1964 - DNA, 423 bp, BradyrhizobiumColbertium
gtgaggagattggcgagatgtgcggtgatcctggcgttgccgctggcggttgcggcatgtttcggcagcgatggtgaccgcccaacgctgatgggcggcacccaggcgggcggaccgcagccgtttcccgacaatttccggagcgacacgctggccttgatgcggacctatctcaacaatccggtcggcgtgcgcgatgccagcatggccgaacctgtgcagcgcgaggtcggtggccggcagttctatgtgagctgcctgcacttcaccccgcgggagaccgatggcagctacaaggccatgcgggaacgcgccgtggtcttcgtcaacggccgggcggaccgcgtggtcgaccgcaccagcgatctctgcgccggtgcggtttacgccccctttccggaactggaaaagatgacgcggtag

SEQ ID NO: 1965 - DNA, 714 bp, BradyrhizobiumColbertium
atgatcatgaagtcgattttattgggtgcagccgctctgcttgcgctggtcgcgccggccgcagccgcagacatgcagccgcgcccctacgccaaggctccggcctacacgcccccgcaggtgatctataactggaccgggttctacatcggcggccatgtcggcggcgcgtttgccggcgacaacagcttccagtcgagcgacgcccgcttcatgggcggcgtgcagggcggcttcgactaccagttcgcacccaactgggtgatgggtatcgaggcccagtattcctggctgccgaccaacaacaacggcgtcactttcccgctcggcacgcaggtcacctccaacaccgaccagatcggatcggtgaccggccgtatcggctacacctgggggccgacgctgctctatgccaagggcggttatgcctggcggaacaacaatctcggcgtcaacatcgccggtgtgcctcaggccttcaccacgagcggcaacagcaaggacggttataccgtcggcgccggccttgaatacatgttcgccccgagctggtcggccaaggctgagtaccagtactacaattttggcagcaccaccttcacctccggcccggccgacgtcgtcggcgtacggggtcgggaggacgagcataccgtcaaggtcggtgtgaactaccgcttcggctggggtggcccggcggcgtcgcgctactga

SEQ ID NO: 1966 - DNA, 243 bp, BradyrhizobiumColbertium
atgcgtattttggtgtcggcggcgatgctctcgagcttcttttgcctgccgtgctctgcacagacaatcctcaaatccgagcctctgatgttggcaccctatgaggtggccttcgtcaaggacgtgtcgtgtccgtcgggcaaggtcctgaaggttacgggcgccatccgtgggctgcatcgccgcaaggcctgcgtggccatgccgggcgagcaggcctcgcttgcggcggccacgccctga

SEQ ID NO: 1967 - DNA, 255 bp, BradyrhizobiumColbertium
atgccctacgccctattctgcaacggcgcccagatcagcaaggcctatccgagcgaatccgacgtctggaagctcgcgcaacggagtggtctcgtcgtggacgtggcggcggatgacgagcgggccggcccgcgccggatgctcgacaacgattacgagatcgcgccctgccaggcagcacagggcgaggaccccgccaagaacaaggctgaggcagaccagcagtccaggatggagctcgaactgaagtcttga

SEQ ID NO: 1968 - DNA, 120 bp, BradyrhizobiumColbertium
atgttttccgccatgacgagcgacctgaaaacgtcctgcggacacatgcttctgcctctcacgctggcgctgctcggcgcctgcgcggccaatctctggctggtgtggtcctggctgtaa

SEQ ID NO: 1969 - DNA, 375 bp, BradyrhizobiumColbertium
atgaaatggatcagggagcgcgacgcactgatcgcgcagacactctccttcgtccaatccgtgaccggcaggaaggatgtcgtccttcagccggaggcgccagcggctggcacacccatctcgatggacctcatcgccatgaaggcggtcaccgccgatatcgacgcgccacaagaacccccttcaccccggtccacgcctcctgccctgccctgggcgagcggcgatttacgcatcgagatgcaggcctgcatcgccaatttccgcaagcaccaggagcgcttcgagcgcgagcgggaagaatattgcgcggcgaccctgaccaaattgcgtgccgccctccgtgacgcctccggccgaccggtcaagaaataa

SEQ ID NO: 1970 - DNA, 165 bp, BradyrhizobiumColbertium
atggttgcaggagaagaacggtcggacgaggcggcgggcctgaggctcatccgtgcgttcctgtcgctgccgcgcgagaagcgggcggaggtgatcgcgtttgtcgaagaattggcgcgtgcctatggccggcccgaggagggcacgaaggcttcgccgaggtga

SEQ ID NO: 1971 - DNA, 192 bp, BradyrhizobiumColbertium
atgtttctgctgacggcggtggcgctgtgctgtagcgccgtggccggcacggtcgcgatgttcgaaccaacgccagcacctcttcctgcaaagcaggtcgcccagcgcatggcgatcgaagcctccgcccagacgccggtccgggtcgtcggcgcgccattcgaacccaatgtcaatcccagcgagcggtag

SEQ ID NO: 1972 - DNA, 711 bp, BradyrhizobiumColbertium
atgatctcccatcgacctcccgtgctcgcgcacgaacgtttcgtcgccgaccgcgagaatttcgcgggcctcgatctcgccgcccggttcgagcgcatcgagcgtaccaacctttggggcgcagccacttcggtgtctggcctcggttcggaggaccccgcaaccagcgcgatccgggaagcgtttcctccgctgctgcaacggctcggcgcgcgctcgctgctggatgcgccctgcggcgatgcgggatggatcggccggctcgaactcgatgtcgattacaccggtgttgacatcgtgcagtcgctgatcgaggccaatcgccggcgcgttgaaggtgccggttcatccgcccggtttattgtcggcgacatcacgcgcgatgcgctgccgcgcgcggacgtggttctctgccgcgattgtctggtgcatctcagtttcgccaacatcgctcgcgcagtcaggaattttcgtgcgagcggcgcgcgctttctgctcgcaaccacctttcccgaatgggagcaaaatcaggattgcgaggacggcgactggcgggcgctgaacatggagaaggcgccgttcgaatggcaggcgccgcacgcctcgatcaacgagcggtgcgaggagggcgatggcggatggcgcgacaagagcctcgggctctggcggctggatcagttgccggaggcgagacccgagagccgcacatag

SEQ ID NO: 1973 - DNA, 72 bp, BradyrhizobiumColbertium
gccggcttagctcagcggtagagcagcggttttgtaaaccgaaggtcgggggttcaatcccctcagccggca

SEQ ID NO: 1974 - DNA, 474 bp, BradyrhizobiumColbertium
atgaagatcaagcttctcggggctacggcggttgcagcgaccatgctggcgggttctgccatggcgcaagcggtcgtcaccaatcctggccgctgctcggcgcaattcccgaatgcaaactgccagaacctcggccccggtaacccatacaccgatggcgggtatcgcgatcgccgcgcgtcctatgggcagaccagcggcggttggaataatgattggaacaggaggcgcaccggcttcttgccgaccgacgtcgcggccggcgtagccggcgccgcaatcggcaccgccggcgcaattgccacggctccgttccgcgcgtgggacaattcctacgcctacgacaattcgtgggaccgcggctggcacaatcgcggatgggacaaccgtacctatgcacagcgcaacggcttcgtctgcacgcccggcacctacttcaggggcgaggacggccgccgtcacatctgccagtaa

SEQ ID NO: 1975 - DNA, 486 bp, BradyrhizobiumColbertium
atgcgtgctgtaacgctcgccgcctttctgatcggtctgcctgcggcggcgctcgccggcgagggcttcgagatcgtcgttcccggccgccccggcgtgccgatcatcatcaacaacatcgacgcgtcctacagcgtggtcgaaggcacctggggcctcggcaaaaatcagcaagtgcagccgacgatctatggcgggcgctatatcgccgagcggcaacccgaccacgtcggccattactatccgacactcggcctgcggccgggctacggccggctcgaggtcgagccgcccgccaaccgtaaattgcccaagcccgccgaaagctaccatcagagttggggcgcgtcgtctgcgccgctgcctgcgcagatggacccgcccgtcgattctccgccggtgatctacgcgcccgagatcaacgagcgaccacggccgcctcggccgcggccgcgtacagaactgcccggcaggccgccgggttga

SEQ ID NO: 1976 - DNA, 507 bp, BradyrhizobiumColbertium
atgcgtcagatgatttcgggactggttgcggcagttgccgtgacgttcgcggccaccgcgcccgccgcggcctgcggcttcaccacctgcgcgcccgttgcgccggtctattccggctgcaacaccggctgcggcggttacgggtatggttatggttatggcgcctatgagcgcctcgccgagccggccacgcagtattactacgtcaaccagggcccgacctacaccggtccgggcgccttcgcgccttatccgacctaccgcgaggacgccgtcgtcgcgcccgccaattatggctacggctatggctatcgttccgctgcggtcgcgccgccggccgcttatccctatcgccgtccgtactaccgtccatatcgctacggctacggcccgcgttacggctatctgccgcgcacgcactacggccatgctcatcgtcatggctacgcccatcgccacgcgccgcactaccatggcggtcaccgcgtgctgcgccgctattactga

SEQ ID NO: 1977 - DNA, 927 bp, BradyrhizobiumColbertium
atgcggtggggcaaagtcaaccgaggcaagcagctaaaatcgccctctccgacgccgaaattgccatattccggaacccatgacagaagcgagcccatgaaggatcgaaaattcggccccaaaggggctcgcgggggaactaagcccttcaaccggccggggaaatcggctggccggccggcttggcgcgaccgcgaatcgcatctcgacggccccgtcattctctatggctggcacaccgtcacgatggcgctcgccaaccctcgccgccggatccgaaagctgacgctgaccgaaaacgccgcgcggcgccttgcggaagagaacatcgagacccgcgtggcgccggagatcgtgcggccccaggagatcgatcggctgctgtctcccgacgccgtgcatcagggccttctggcggaggccgatccgctgccctcgccggacatcgaaaccctcgagcaggaaggcatggtgctggtgctcgaccagatcaccgatccgcataatgtcggggccatcctccgctcggccgcagctttcgacgtgaaggcgatcgtcaccaccgcgcggcacagccccgaagcgaccggcgtgctggccaaggccgcctccggcgcgctcgagctggtcccgattgtcacggtgcagaacctcgcccgcgcgctcgccgcattgaacgagcgcggcttccagaccgtgggtctcgacagcgaaggcagcgaggacatcagcgacgtcgcgctgcgcgagccgcttgcactggtgttgggagccgaaggcaagggcctcaggcagttgacgcgcgagacctgcagcgttgtggcaaggcttgatatgcccggcgagatcaagagtctcaacgtctccaacgccgccgtgctcgcgctctatgtcggcgcaagccggctcggcctgatgaagcgctag

SEQ ID NO: 1978 - DNA, 1134 bp, BradyrhizobiumColbertium
atggcacctccttccaagacgtccccgcaggcgcgccgccgcaagactcccggcaaaaccaaacggcaggttcgatcggcaggcgcgcagacgccggtcctcgagctgacgccggtcgagcgctctctggccgcgcagtcttcctcggccgctctgcaaaccgagatggcggcactcgacagcgtcctgaaggggccgcccgcactttcgccggatagtgagccggtgcaggccattttgacaggcgcggcgcccgacgatgccgagcgcttgcaggcgctgctggtcggcaaggaagccaagcgcgccaggcgcaccaccagcgacgaactggcggacgattggcggctgggcggctacccctacaagtcgcggatgtatcgccgcgactacgaggagcagaaattcgtcctgcagaccgagctcttgaaattgcagaactggatgaaggagagccggcagcgcctcgtcctgttgttcgagggccgcgacgcggcgggcaagggtggcgcgatcaaacggttcatggagcacctcaatccgcgcggcgcgcgtgtcgtggcgctggagaagccgagcgatgtcgagcgcggccaatggtacttccagcgttacgtgcagcatctgccgaccgccggcgagatcgtgctgttcgaccgcagctggtacaaccgcgccggcgtcgaacacgtgatgagcttctgctcgccggccgagtacggcgaattcctgcgccaggtccccgagttcgaacgcaatctcgtgcgcagcggcctgcacctcatcaagttctggttttcggtcagtcgcgaggagcagcgccggcgcttcaaggagcgcgaaggccatccgctgaagcagtggaagctgtcaccgatcgacctcgcctcgctcgacaagtgggacgactacacccgcgccaaggaatcgatgttcttccacaccgataccgcggactgcccctggatcgtgatcaagtccgacgacaagaagcgcgcccgtctcaacgccatgcgttacgtgctgcatgcgatgccctacgcgggcaaggacggcaagcgcatcggcatgatcgacgatctcctcgtcgggcgtgcgaacgtgatccacgaacgggaagagcacgcgggatag

SEQ ID NO: 1979 - DNA, 1035 bp, BradyrhizobiumColbertium
atgactgcaccgcttcaattcggattggactcctttggcgacgtcaccaaggacgccaccggcacgctgcttccgcacgctcaggtgatccgcaacgtcgtcgaagaggcagtgctggccgacgagctcggcctcgacttcatcggcctcggcgagcaccaccgcgccgatttcgcgatctcctcgcccgagaccgtgctcgcggcgatcgcatcgcgcaccaggcgcattcatctcggttcggccgtgacggtgctgagctcggacgatccgatccgcgtattccagcgctttgccacgctggacgcggtctccaacggccgtgccgaggtgatcctcggccgcggctcgttcaccgaatcctttccgctattcggcttcgacctgcgcaaatatgaggagctgttcgaggagaagctggatctgttcgccgcgctcctgtcgcagcagccggtgacctgggaaggcaagctgcgccccccgctgcgggatcagctggtctatccgccggtcgagaccggcacgctcaagacctggatcggcgtcggcggcagtccgcaatcggtggtgcgcgccgcgcactacgatctgcctttgatgctcgcgatcatcggcggcgatcccgcgcgctttgcgccctacgtcgagctctatcaccgcgcgttcaaggagttcggccgtccggcccagccgatcggcgtgcattcgcccggctatgtcgccgaaacggatgcgcaggcgcgcgaggagctatggcccgattacaaggcgatgcgcgaccgcatcggcaaggaacgcggctggccgccgatgggccgagacgagttcgtcagcgagatcgagcacggctcgctctatgccggctcaccggagacggttgcgcggaagatcgcgaagaccgccaaggtgctcgggatttcgcggtttcaactgaagtactctgcggggccgctgccgcacgagaagctgatgcggagcatcgagctctatggccgcaaggtggtgccgatggtcagggagatgcttgccggttga

SEQ ID NO: 1980 - DNA, 981 bp, BradyrhizobiumColbertium
atgaaagccgtcgtcgtcgagcaatatgcccccatcgatcaaatcgagctgaaggaagtccctcgccccgttgtcgagcctggccagctacggatccgggtggaagctgccggaatcggattcgtcgacggcttgaagatcgaaggacgctatcagaccaaggaccccctccccttcattcccgggacggagttcgcgggagtggtcgcggacgcgcccggcgcgccgggcggctatcaaccaggcatgcgcgtgatgggtatgacgcgatctggcgcgctggccgaagagatcgtcgtcaagcccgaagcactccatccgctgccggagggcgtcgcggccgaagtcgccgcatcgtttcgcgccaactacctgacggcactttatgcactaagcgcgcgcgcatcgctctgcgccggcgagcagcttctcgtgcttggcgcggcgggcggcaccgggatcgcggccatccagatcggcaagctgctcggcgcgcgcgtcatcgcggccgcgtcgacaccggagaagcgcgagtttgcgcaagcgcacggcgccgacgccgtcatcgactacacgcaggccggctggcgcgacacgctcaaagaactgaccgccggacgcggggccgacgtgatcttcgatcccgtcggaggcgagatctcggtgcaggctttccggtccatcgcctggcgcggacgccatctggtggtcggctttgccgcaggcaccatccccgcgctgcccttcaatctgccgctgctgaagggcggcgctctgctcggcgtcgatctcgcgcagatccccctgcgcgagcccgacgtgcagaagcgtctgatgtcgcagttgacgggttggctcaccgacggccagctgaaacccgtcgtcggccgcatctttgcgctggacgacttccgcgatgcattcaagtcgatgcggacgcgcgctgcgctcggcaagatggtcgtgcggatcgcgcgatag

SEQ ID NO: 1981 - DNA, 2058 bp, BradyrhizobiumColbertium
gtggcgacatatctggacacgctcaatgcggagcagcgccgcgccgtcgagcatggcgtgaccgagggctcgaccgtgggcgcccccctgcttgtcatcgccggcgcgggctccggcaagaccaacacgctggcccaccgcgtggcgcatctgatcgtcgccggcagcgatccccgacgcattctgctgatgacgttctcccgccgcgcggcagccgagatggctggccgggtcgagcgcatcgcccgcaaggtgctgggcgagaacaacgccgcgatcatgcgcgacgcgctcacctgggccggcaccttccacggcatcggcgcgcggctcctgcgcgaatatgccgagcggatcggcgtcgatcccgccttcaccatccacgaccgcgaggactctgccgacctgatgaacctggtgcggcacgagcgcggcttgtcgaagaccgagtcccgcttcccggcgaagggcacttgcctctcgatctattcccgctgcgtcaacgccgagatggagatcgagaaggtgctggggcagcactatccctggtgcgcgggctgggccgccgagctgaaaggcttgttcgccgcctatgtcgaggccaagcaggcccagcacgtgctcgattacgacgatctcctgctctactggtcgcagatgatgagcgatgcgctcatcgccggggagatcggcggccgcttcgaccacgtgcttgtcgacgaataccaggacaccaaccgcctgcaatcctcgatcctgctggcgctcaagcccgacggccgcggcctcaccgtcgtcggcgacgatgcccagtcgatctattcgttccgtgccgccacggttcgcaacatcctggacttcccgcagagcttttcgccgcgcgccgagatgatcacgctggaccgcaattaccgctcgacgcaagcggtgctgtcggcagccaacggcgtcattggcctcgcccgcgagcgtttcacgaagaacctctggaccgatcgcacctccgggcagaagccgcagctcgtcaccgtgcacgacgaggccgaccaggcgcgctacatcgtcgaagcggtgctggccaaccgcgagcaaggcgcgctgctcaagcaccaggcggtgctgttccgcacgtcctcgcattcgggaccgctcgaaattgaactcacgcgccgcaacgtccccttcgtcaagttcggcgggctgaaattcctcgatgccgcgcatgtcaaggacgtgctggcgctgctgcgctttgccgaaaatccgcgcgaccgcgtcgccggctttcgcgtcctgcatctgctgccgggcatcggcccggcaaccgcccagcgcgtgctcgagcagatggccgagagcaccgacccgcttgccgcgctcggccgcctgccggtgccggcgcgcaccggtgcggactggatcgacttcgtccgcatcatcgaaaatctgcgctattcggaatggcctgtcgatctcgaacgcgtgcggctctggtacgagccgcacctcgatcgcatctacgaggatgccgagacgcgccgcgccgacctgatgcagctcgagcagatcgcgagcggctatgcctcgcgcgagaaatttctgaccgagctcacgctcggtccgcccgatgcgaccagcgacaaatccggtccccccttgcgcgacgaggactatctgatcctctcgaccatccattcggccaagggccaggagtggaagtcggtgttcgtgctcaacgtcgtcgacggctgcatgccctccgatctcggcgccggcaccagcgccgagctggaggaggagcgccgcctgctctatgtcgcgatgacgcgcgccaaggacgatctccacctggtggtaccgcagcgcttcttcgtccatggccaggctgccaaaggcgaccgccacgtctacgcctcgcgcacccgcttcatccccgagcaactggtctacctgttcgagcgcacggcatggccgagggccgcggccggcgcggcgcgtaccgcggcccagggaccgaaggtcgacatcggggcgaagatgcgcgggatgtggcggtag

SEQ ID NO: 1982 - DNA, 591 bp, BradyrhizobiumColbertium
atgaccgagctcaagcccgaccagttcgagatgcggcggctggaatcgctcagcaacaccattttcggcgtcgccatgacgttgctggcctacgatctgcccaaggcggcggtgtttaccagcgcgcctgactggagcgatctcgcccatgtctattccggcaagctcgccggcttcgcgctcagcttcattatcgccggcgtgttctggatcagccatcaccggaggctggctcgccagcccgtcggcagccgcggcgcggtgatcctcaatctgttcttcctgctctcgatcgtgctgctgccggtgaccaacggcctgtataccaatttcggcatgagcggcgcggtcgccgtgctctatggcctgcacttgaccgcgatcgccggcctcaatgcgtggctgtggtggacgatcctgggcagctggcggcacgagatgcttgcctcgctgtttccgctgctggtgttcatcccgggcacgatcgttgcggcgttcgcgccgcacgtcgcgcccttcttgtggaacatcgcctttgcagggctcctgatccagcgcttctacggtgcgcggatcagaccggacgcgtag

SEQ ID NO: 1983 - DNA, 387 bp, BradyrhizobiumColbertium
gtgatgatgctgtacgccatcctggcctatcacgtggaagacgaggtcatgtcgtggacgccggagcaggacgcggcagtcgtcgccaaagtcatcgaggttcaggcacccctgagggaaagcggacagttcggcccggcggcccgtctggatgaaacccggaaggcccgcaccttgcgtggccccgggccgggaatagtgctggacggcccgtttgccgagaccaaggagcagcttctgggattccacctgatgcagtgcgataccgaggatgaggcaatcgcagcggcgcggaagctgcgcgcggtcaatccgacggcggtctacgaaatccgcccgatcaagctttacgtgccggccgatgggttcggcgcgacggaggggtga

SEQ ID NO: 1984 - DNA, 186 bp, BradyrhizobiumColbertium
atgtcgggtcacaccatcaagatcatctgcgacgcgcggcgggcaggacagtcggctccggccgatttgcacgatcaggccggccatcaccgctactatggcagctcggccgagaacggcggcgagcggatcgcggagagccggggcggcaagcgcccgcgcgcgcgcaacatctgcggcttctga

SEQ ID NO: 1985 - DNA, 204 bp, BradyrhizobiumColbertium
atgaacgtcctgcaaatatcggtcgcggcgataccgttcctggtcgcgctgatgagccggaccggcaaggccatcgcgccctgccttctggcaagcatcttcacggtgctgctcggggaggagccacaccgcgcagtcgtagcctggtgcatcggcatgctgatcgccgccgtcgccctgcgcgaacggcttcgcgccggctga

SEQ ID NO: 1986 - DNA, 71 bp, BradyrhizobiumColbertium
gcgggtgtagctcaatggtagagcagcagccttccaagctgaatacgagggttcgattcccttcacccgct

SEQ ID NO: 1987 - DNA, 309 bp, BradyrhizobiumColbertium
atgaccgacaagccgatcgactggacgccggatctcacactgccgacctccaagtccaccgtccagcacttcaccgcgaccgccggcggcgaccggctgacgattgacactactccttggggagaggccgacctcagggtcaacggccagtcgattgctcacatcgatgtggcgccgagcgctggtgacgcgtttcgcacgctcgagacgtttgctgaagatttcgaagccggcaaccgcgagcgtctgaaccagacgatcgatgacgacgacgttcgtgaaaaactgggtctgagacacgctccctga

SEQ ID NO: 1988 - DNA, 138 bp, BradyrhizobiumColbertium
ttgctcgcgatcctcccgcgcgcggtccaccgcgccgcctcgagcctgtcggctgaccctcacaccgggaagatgatcgatcctgtcgttctcggcagcctcagcgcgctgaagttcgcgcccgtcgatatcgcatga

SEQ ID NO: 1989 - DNA, 1488 bp, BradyrhizobiumColbertium
gtggcctgcctgtggggcttcacccacggcggtccggccgggacgatcgtcggacgatactggccgaactcctcatctaatagtaaaaatatacccgacttgggctactggacatcgctcgtgcatgaagcgatccacgatcaggaaggatattcgagcttgcaagttgccgccttcccgtcggaccgagctgaagaaatcctcgcgtcagcttcgaggctatttgcccgccatagctatgcgaatgtgacgatggagcaggttgcagcgtcggttcgatcggtgccgggggcgctctatcactactttcgcgacaaggaggacctgatctatcactgctacctgcgcgggctcgcgatctacaggcacgagatcgagacggcggccgaagcgggtatcgacgggctcgaggtcgtcaggcgcatcatacgcgcccggctgcggcgtgaaggtcagcgtatgatcctgttttccgacatcgatgcactggccccatcttacagcaatgacgtgcacgccaggcgctggcagaatgccacgctgctggccgatattgtgaagcgaggcgttggagacggctcgatagcttgcgatgagccgctcgttgtcgccgtggctctcatctccatcctggactgggttccgttctggctctccgagcgcgattactacacgcgcgaacaggcgattgatgcgattgatgacatcgtcacgcatggagtctatcggcgcgatatcgctttaccggacatgcccgaaccgccgagtctcgcgccgtttctccaggctcgctcgagattgaataagcgcgccgcgaagctggacagaatgctctcgattgcttcggacagcttcaatcgaaggggggcattgggcacgtctcttgagagcatcgcggcggaagccgggatgacccgcgcgggcatctattatcacttcagcgaaaaagagagtctcttgctggcttgcctgcaaagagggctcgtcggcgagatcggcattcgggaacatttgcaggatctggggcttggagcgtttgatcacatcgttcagagagttcgtctgttgctgatgctgcacgacaccccatgcggccccaaggcgacctaccacaacatcaactatctcaacgacgttgaccgaaaacactatgtggagcaggtgctcgcaacgatcggccaggaccagaagaaccatcaacgttggatcgacgaggggcacttccaggaaggtcgacacgcatttcgcggaacgtgtcttgactggtatgagccactggtacccgatctggttcagagatgtgcggggctggtcaccaattcagatcgccgatcatttttcgcggctgttcctcgcggggctcaagccgcgtcgtcgttcggcctgaacagccaatccggcccagctcggcccgttgaaggatccacgtccttcaactggatcgttcgacaaaagctgggacgagcaggcggacaaaagttgacttga

SEQ ID NO: 1990 - DNA, 1233 bp, BradyrhizobiumColbertium
atgcaaaaactcataattgctgcggcggcagcgctgacggtgctcggaggagcggcattcgcgcaggagaccatcaagatcggctacatcgatccgctgtccggcggcggcgccagcgtcggtgaaggtggcttgaagacgttccagtatctggccgacgagatcaacgccaagggcggcatactgggacgcaagatcgaaatcctgccccttgataacaagaccaacccgcaggaaagcctggtgcaggcgcagaaggctattgatgccggcgcccgctatatcacgcaaggcaacggctcgtcggtggccgctgctctgtctgatttcatcaccaagaacaacacgcgcaatcccggcaaggaggtcctttacttcaactatgccgctgtcgatccgagcctgaccaatgaaaaatgcagcttctggcatttccgctgggatgccagctcggacatcaagatggaagcgctcaccagctatatgaaggatgtcccggcgatcaagaaagtgtacctgatcaaccaggactattcctttggccagtccgtgcgcgccgatgcgcgcaagatgctgggcgccaagcggccggacatccagatcgtcggcgacgaactgcatccgctgctgaagatcaccgacttctcgccttacatcgcgaagatcaaggcgtcaggcgccgatagtgtcgtgaccggcaactggggccaggacattgcactgctgctcaaggcagctgccgatgccggcctgaaggtcaattggtatacctattatgccggcggcgctggcggtccgacggcgatcaagcagaccggcctggaccatcaggtattccagatcacggaaggctttgccaattcgggccaccagccggcaatggagttcgagaaagcattccgcgccaaggtcaatatgtcgctgtggtatccccgcgcggtcaacgagatgcgcatgttcaaggctgcggcggagaaggccaactcgcttgaccctgtgaaggtcgcggctgccctcgaggatctcaaattcgaggtgctggacggtggcgagggcctcatgcgcaaggatgatcaccagttcttccagccgatctacatctcgtccttcggcaagctcgcggcaaacgagccgttcgacgaggaaggcaccggttggggatggcacctggtttccaagatcgatacgtccaagacgatggttcccaccacctgcaagatgacccggccgtaa

SEQ ID NO: 1991 - DNA, 957 bp, BradyrhizobiumColbertium
gtgaatgctgtgcttgaactgatcgttatatcgacactgaacggtctgttgttcggtatgctgttgttcttgctgtcgagcggcctgaccgtcatcttcagtatgatgggcgtgctcaactttgcccacgccagcttctatatgctcggcgccttcttcggctttcagctcaccaaatggatcggcttctggtcggcgctgctgttggcaccgctgctggtcggcgcgatcggcatggccgtcgaacgctacggcctgcgcaacacgcacaagcacggccacgtcgcggagctgcttttgaccttcggtctcgcattcgcgatcgaggaaatcgtggcgatgatgtggggcaggagccccgtcgactaccgcgtgccggcgctgctcgactttccggccttcacgatcttctcgaccaactatcccgcctacaagatcttcatgctggccgtgtcgatcgtgatcttcgtcgcgctgttgatcgtgctcaagcgtacgcgggtcggcttgatcgtgcaggcggcgctgacgcatccccacatggtcggacatctcggtcacaatgtcggacgcgtgttcatgctagtgttcggcgtcggcagcgcgcttgcgggaattgcgggcgtgatcgccggtccggccctggtgacgcagtccgatatggcggcggcactgggcccgatcctgttcgtggtcatcgtgttcggcggcctcggctccttgccgggcgcattcatcgcctcgctcgtcatcggcctggtgcagacctttgcggtggcgttgaacggttcgctggcgagtgctttcggtccgctggacccgtcggcgggcccctccgtgcttaccgacatctggaacgtcacgatcgcccaggtggcgccgatcgtgccgtatcttctgctggtgatcattctaatcgtacgccccatgggcctgatggggacgcgcgagtcatga

SEQ ID NO: 1992 - DNA, 1299 bp, BradyrhizobiumColbertium
atgaacgccacgacgacttccgcatcgaacatctcaggcaagtccgccggcgacagcctgcgcttttatggcgtctggctggtcggcatcgctacgctgatcctcctgccgatgatcttctcctccggcggctcgctcacgtccttcagcctgatcggcatcgcgatcgtgttcgcgctgtcctacaacatcttgctcggccagaccggcctcctgtcgttcggccatgcggtgcattacggcctcggcggcttcgcggcctgccatgtgatgaatgccgtggtctcgcacggctggccggtcccgcttcccttcataccgttgttcggcgggctcggcggtcttgctttcgcaatgatcatcggctgggtgatgaccaagcgcgccggcaccgtgttctcgatgatctcgctgggcattgccgaactggtggcgtcctcctcgctgatcctgcgttccgtgttcggaggtgagtccgggatctcgaccgaccgcacggctttgccgaaaatgttcggctggactttcggtcctcagattcaggtctattacctgatcgcgttctggctggtgatctccgcgatcgcgatgtacgcgctgacccggacgccgctggggcggatcagcaacgccgttcgcgacaatcccgagcgcgtccagttcatcggctatgatccgcacgtggtccgttacattgccttctgttttgccgggttcttcgccggcgtggctggaggcttggctgcgatcaacttcgagattgccaacgcggcctatctcggcgcgatccagtccggcctcgtgctgttctcgacctttatcggaggcgtcgcatttttcttcggccccatccttggcgcgatcctcgtgacatatctgcagcttgggctgaccagcgtcacgggcgtgtggcagctctatttcggcattatcttcatcggcatcgtgatgctgtctccgggcggcatcgccggcctgatcatgatgcaccggccgctggctcgtgccggaactttgcagacggtgattccgtcctatgtcgtcgcggcggtgccgaccctggcgctggcctgcggcgtgatcctgacgatcgaatcgatcgcgcgcacccatagcggccaaagcagccccatcaacctgttcggtgttgccttcactccggcgtcgccgatgacgtgggcgagtgcggcgatccttatcgtcgtcggcttcttcgtggcgcgcctcagctggcgacgagtcgccgatgcttgggatcgcgcggcgacgatcgcgcgcgaccgggggtatctggcatga

SEQ ID NO: 1993 - DNA, 750 bp, BradyrhizobiumColbertium
atgacggcagccatcgaacttaacgctgtcgaaaagcgctttggcaacgtcggtattatccgggacctcaatctcagcgtcgcgcaaggcgagcgtcatgccatcatcggtccgaacggtgccggcaaatcgacgacgttcaacttgatcagcggccatatcaggccgagttcgggcgaggtaagactgaacggcgatgtgatctccggtctcaggcccttcgagatcaaccggcgcggcctgtcgcggtcgttccaggtcaccaacgtgttctcccgcatgtcggtctgggagaatgtccgttgtgccgtgctgtgggcgacggggcaccgttacgcgttctggaagaacgtcgacagcctgcctgaggtgcgcgaacgtacctctcagatactcgacgatatccatctgacgcaccggcgcgatgttccggcgggcttgttgacctacgctgagcagcgcgagcttgagatcggcatcaccatcgccggcggtgccaatgtcgtgttgctggacgagccgaccgccggcatgagccatgccgaaaccgaccgtgcggtggcgctgatccggcggttgacggaaggcaagacgctcgtgatcgtcgagcacgacatgagcgtcgtgttcggccttgccgatcgaatttccgtgctggtctacggccacatcattgcctcgggcacgccggaagagatccggcgcgatccgaaggtcaaggaagcctatctcggcgaggaggcgcactga

SEQ ID NO: 1994 - DNA, 696 bp, BradyrhizobiumColbertium
atgctcgaggtcagggatctgcacgcctactacggcaagagccacattctccagggcgtcgacctcgatgtcgcctcgggcgaagtcgtgagcctgctcggccgcaatggtgtcgggcgttcgaccacggtcaaggcgatcatgggcgaggtcgcgccgcaaggcacgatccgcttcaagggcaaggacatcgccgggctgccgagctacaggattgcgcgtctcggtctcggctatgtgccggagcatcgcgacatcttcccgggtctgaccgttcgccagaatttgctcctcggtatcaaggacacgcgacgtcccggcaaatggcagcttcaggacatgctcgacatgtttcccaatcttgccgcgcgggccgacacgcctgcgggggtgctgtcaggcggcgagaagcagatgctcacgacctgccggaccctgatgggcgaccccgatctcatcatgatcgacgagccgaccgaaggtcttgccccgctcatcgtacagcaggtcggggatctcattgcccgcattgcgcacgccggcgtcgcgattctcctcgtcgagcagaagctgtcgattgcgatgaagatctccaaccgggtctacgttatgggacacggtcgcgtcgtcttcgaagggacgcccgagcaactgaagtcgaacggcgacgttcgcgcgcaatggctggaagtgtga

SEQ ID NO: 1995 - DNA, 207 bp, BradyrhizobiumColbertium
atgagcgtggagaccaaaagcccattcgacaaggaaccggcggaaggatcacgtgacatcatcgaccgcgaactgcggcgcgctgacgatgccgagaaaaacaaggtcgatcatctccccggcgtgaaggtcagcgggcagccgcaaggtggtgccgtcgaccgtgcgcgcgaggaacgcgagcaagagaacacgaaggagaaatag

SEQ ID NO: 1996 - DNA, 864 bp, BradyrhizobiumColbertium
gtggatcagcctggcgacggagcctccttcagtcctgcatccaagctcgacggcgtctcgcggcgtcaaaccaagcaggtcgaatcccagagccggccgagcgccgcgctcatccatgaaacgatccgcgcagagggagagcaggaactggagcggcgctggtgggcgatcgtcctctccggtcttgccgcagggctgtcgatggccctgtcgctgatcgttcagggcgcgtttcacgggctgatttcggatgatgcgacgcggcgcctggtcgctccgctcggctacacggtgggcttcctcgtcgtggtgctgggacggcaacaactgttcactgagaacacgctgacgccgatcctgccgctcttgcacaaccgggacctccgcactctggcaagcgtgctcaagctgtggtttctggtccttgcttcgaacgtcgcaggaacctgggcgatcgggtcggtgctcgcccacaccagcatcttcgagccgcgcattgtggacgccttcgtcgacatcagccggcatacggtcgaggggacgttctcgaccaccttcgtccgggccatcttcgccggctggctgatcgccttgatggcctggcttcttccggcggcgaaggaatcacgcgcgcacatcatcgtcataatgacctatgtcgtcgcgctcggcggattctcgcacatcgtcgcaggctccgtcgagtgtgccttcctggtgcagagcggccgggcatccctggcccaatacgcctcggacttcttcatgccgacactgctcggaaacattctcggcggaacgaccctggttgcgttgctgaactacggacaggtcgcagcggagatcgacgatcacagggaataa

SEQ ID NO: 1997 - DNA, 561 bp, BradyrhizobiumColbertium
atgctggtgccgatcccgattgcgtgcttcatcggggcgctgccgaccgacatcgcctatgtcgcgagcgccgagatcatgtgggcggacttttccgcctggctcctggtagtcggtgtcatcttcggcgtgctcgccgccatcgcggggctgactgacttcatcggcaaccgcctggtccgggcgcggacgtcccgtcggcgtcgccatcgacaagaccggtgcgccgctggttgccgacgacagcggcaacacgttgtggcgggtgaacgctgcgcatccgcagctgacgcaacgttaagcccggtcccgcgttgggagttcggaacagttaaagcccaagccaggaggaggacaatgggtctcgctcaatacgccatcgtgccggtacaggacgaatggggcgtgctgcatgacggcgacgtcaggagccggtacgccaccaaggaagccgcgttcgagtcggcagtcgccgcggcatcactggcccttcgtgagggacacgaggtccatgtcagcgtgcccggccgcgaagccggcgacaacgcgctgggtgtgtag

SEQ ID NO: 1998 - DNA, 171 bp, BradyrhizobiumColbertium
atgaccaagccccgcgagcccaacggcatcgagccatcccgctccgaggacgacatgcagcgcgaccagctcggtccgcgcggcgtgcctggcgcgcccgatcctgccaagatgacgccccaacgcgacaagaagaccccgaagcacgtcgatcccggccataccgcttga

SEQ ID NO: 1999 - DNA, 1230 bp, BradyrhizobiumColbertium
atgtcggccctgccgctttcaggcatcaagatccttgacctcacccgcgtgcttgccgggcccctgtcggcccagatgctgggcgatctcggcgcggaggtgatcaagatcgagcggccgggcaccggcgacgacgcgcgcgccttcggaccgccttacctgaatgaccccgatggcaaggccaacaacaacaattcattctatctctgcgccaaccgcaacaagaagtcggtcacggtcaatatcgccaagccggaagggcaggcgatcgtccgcgcgctcgccaaggacgccgacgtcttcatggagaattacaaggtcggcgatctcaagcgctacggcctcgactacgagaccatcaaggcgatcaatcccggcatcatctactgctcggtcaccggcttcggccagaccggcccgtacgcgccgcgcgccggatacgacgccatcctgcaggcgatgggcgggttgatgagcgtcaccggccatatcgacggcgagccgggtgagggcccgatgaaggtcggcccgtcgatcgtcgactacatgaccgggatgaatgcctcgatcgggatcctatcggcgctctatcatcgcgacgccaagggcggccagggacagcacatcgacgtctgcctgttcgacaccgtcatcgcatccctgtcgcactggctgcagatttatctggtcaacgggaagacgccgccgcgccgcggcacttggggcaatggcgggatgccggccggtgtgttccgctgcgccgatggcgagctgatgctggtggtcggcaacgacgggcagttccagcgcacctgcgccgtgctcggcgagccggagctcgcgaacgatccccgcttcgtcaagaacaacgaccgcgtcgtgcacggcaaagagatcatggccatcttcgccggcctgttcctgaagaagccggtggcttactggctggagaagctggaggaggccggcgtgccgtcaggtccgattaacaatttcgagcaggtgttctccgatccgcacgttcagtcgcgcggcatgcgcgtgaaggtcaaacatcctttcgagccggatctgtcgctggtccgcaatgcgctgaccctgtcggagacgccgatcaaggagtaccgcgcgccgccgctgcttggggagcacacgcaggaggtgctcggcggcaagctcggctttgacgcggagaagatcgcggccttgaagcagctggggatcatctag

SEQ ID NO: 2000 - DNA, 216 bp, BradyrhizobiumColbertium
atgtcctacacgatcgggttccaggccaaggaccagaagtccattctggcgaccgaggcggccaccgccaatcaggccgtcgccatcattgccgcgctgcggcagagcgcggacgaaataaagttcatccgctcgccgcaggaaggcgagatgggtatcgagatgctgctgctgctcgccaaggaagaggccgaggagatgccgcagcgggtctag

SEQ ID NO: 2001 - DNA, 672 bp, BradyrhizobiumColbertium
atggccagcgatcacaccaggtccgccattctcgccgccgccgaacggctctatgccgatcgcggcttcggcgacgtgacgctgcgcgacatcgtcgcggccgccaatgtcaacctggccgcggtgaactatcatttcggctcgaaggacgagttgatcgcggaattatttgtcacgcgctcgatcgccacgaaccgcgagcgcctgcgcgaattaaaggcggcggaagagcaaggcggcggccgcgcgccgatcgaggcgatcttgcgcgccctcgtcggtccgaccttgcgcggctgcctcggcccggagacccagcgctccaccgccgcgcgcttcatgatccgtgcctcgatcgaatccgtgccgccgatccgccgcatcaagaaccgcgagatcgaccatttgcgcaaatttgccggcgcgatgcgacggtccctgcccgatcggagcgaggtcgatatctattggggcctcaactttgcgctcgcgatggcgcatcacaccatccgcgagagcgagcgactgacgaaattgtcggaaggcaaatgcgatctcgatgacgtcgaggacgtggtcgcacgcgtggtcagcgtggcgacgatggcgctgacggcgggaaaggtcgaggcgaaagcccccgcgcgcgcactcgcacgggacgcgcgctga

SEQ ID NO: 2002 - DNA, 1236 bp, BradyrhizobiumColbertium
atggacttcgatatgtcccccaagcagaaggaatggctcgaccgcgtgcggtccttcatggccaagcacgtgcgcccggcggtgccgatctacgaccagcaggacaagagtggcgaccgctggaaggtcatcccgatcctggaagacctcaagaagaaggcgaaggcggaaggcctctggaacatgttcatgccgccgtccgagcacgaggacgacgaattccgcggcgcgggactgaccaatctcgaatatgcgctgctgtcggaagagatgggccgcatcacctgggcctcggaagtgttcaactgttccgcgcccgacaccggcaacatggaagtgttcatccgctacggctccaaggagcagaagcgcaaatggctgcgtccgttgatggacggcgagatccgctcggccttcctgatgacggaacctgcggttgcgtcgtccgatgccaccaacatcgaaacccgcatcgagcgcgacggtgatcactacgtcatcaacggccgcaaatggtggtcgtccggcgtcggcgatccccgctgcaagatcgcgatcctgatgggcaagacggatttcaaggcggccaagcaccagcagcagtcgcagatcctggttccgctcgacacccccggcatcaaggtcgagaagatgttgccggtgttcggcttcgacgatgcgccgcacggacatgcgcaggtgctgctcgagaacgtgcgggtgccgaaggagaatatcctgctcggggagggtcgcggcttcgagatcgcgcagggccgcctcggtccgggtcgcatccatcactgcatgcgcaccatcggcaaggccgaggaggcgctggagaagatggtgaagcgtctcacctcgcgcaccgccttcggcaagaagatcgtcgagcacagcgtgtgggagcagcgcatcggcgaagcccgcaccaaaatcgagatgacccgcctcctgtgcctcaaggccgccgacatgatggacaaggtcggcaacaagaccgcgcaggccgagatcgccatgatcaaggtcgcggcgcccaacatggcgctgaagatcatcgatgaggcgatccaggcctttggcggcgccggcgtctcggacgaagcgggccttgccaaggactacgcccacatccgcacgctccgtctcgccgacggtccggacgaggtgcataaccgcgccattgccagacttgaggttcggaagtatgcaaactctcccggtcattag

SEQ ID NO: 2003 - DNA, 1059 bp, BradyrhizobiumColbertium
gtggcggacggcgtcaggaaagacgaagagttctcgggtaccaagccggtcgaggagcggcatcgtttcgacgagctgcgcctcgaagcctggatgcgcgagcatgtcgaaggttttgaaggcccgctggtcgtgctccagttcaagggcggccaatccaacccgacctatcgcctcaacacgccgaaccgctcctacgtgatgcgcagaaagccgttcggcaaactgctgccgtcggcgcatgcggtcgatcgcgagtatcgcgtgatcgctgcgctcggaaagcagggctttccggtcgcgcgcgcctatgcactctgccaggacgacagcgtcatcggtgcagccttctacatcatgtcgatggaggagggccgtgtgttctgggatccgacgctgccgagccaggcgccggacgaccggcgcaagattttcaccagcaagatcgagacgctggcaaagctccacatgttcgatcccgacgcgatcggtctcggcgatttcggtaagcccggcaactattttgcacgccagatcgaccgctggaccaagcaatatcgcgcatccgagacgcagcacattcccgagttcgagaaggtggccgaatggctgccgaagacggtgccggagcaggcgcgcgtctccatcgtccatggcgattatcgccttgacaacatgatcttccacgcgacggaaccgcgcgtgcaggccgtgctggactgggagctgtcgaccctcggcgatcccatggccgacttcacttatctgttgatgcagtggatcatgccgggcctcgagggcgccgacctcaaggcgctcaacatcccgagcctggaagaggccgcgcagatctactgcaacgtcaccaagatgacggtgccagatctcaactggtacttcgcctataacctgttccgccttgccggcattacccaaggcatcgccggccgcgtccgcgacggcaccgccgccaacgccaaggcgctggagtccgccaaacgcaccgtgccgctgtcaaaggcctcgtgggaatacgcgcagaaggcgggcgcggtgtag

SEQ ID NO: 2004 - DNA, 1173 bp, BradyrhizobiumColbertium
atgccaagctcaagacccgatcgcatccgaaagctcctcgccgacctcgtcggcttcgacaccatcagcgaccgcacgaacctgcccctgattgcccatatcgaacgctatctcgccgggttcggcatcaagggtgagcgcatcgtagacgagaccgggcagaaggccgctctctgggtcacaatcgggccggaggaccggccgggcttcgtgctgtcgggccataccgacgtggtgcctgtcgtgggccaggactggagccatgatccgttcaagctggcggagcgggacggcaagctctatggccgcggcaccaccgacatgaagggatttgtggcggtgtgcctcgccatggtgccggagatggtggacgccaggctgaagacgccgattcatctggcgatctcctatgacgaggagatcggctgcgtcggcgtgcggccgatgctgcgcgaggtcgccaggaagaaggtcaggccgctcggctgcttcgtcggcgagccgacccagatgcaggtcatcatcggtcataagggcaagcacggcgtgcgggccacgtttcgcgggctcgcccgccattcctcgatcgcgccggagggtgtcaatgcgatcgaatatgccgccgagctgatcgtcgaaatccgccgccgcgccatggcgctcgcagccgcgcacgcgacggacagtctctacgacgttccgcactcgacgctgctcaccagcatcgtgcacggcggtgccgcgctcaacatcgtgcctgatacctgcacggtggaattcgagtgccgcggcatcggcatcaccgagtcgcgcgaggtcaccgatgcaatcgtcgcctgggccaaggccgaactcgagcctgcgatgaaggcaaggaatgcggagtgcggcatcgcattcgaggagatcctcgactaccccgcgctcgacacggaagccgatgctccaatcgtcaccctggccaagagcctggcgggacgcaacgaccacgccaaggtcgccttcggcaccgaggcgagcctgttcgccgacatcgccgatatcccctccgtggtgatcggccccggctcgatcgcgcaggcgcatacgccggacgagttcgtggagatggcggagctggagaaatgcggagccttcgtggagaggctgatcgcgcattgcgtgaagagctga

SEQ ID NO: 2005 - DNA, 786 bp, BradyrhizobiumColbertium
atgggccgcctgcaaggcaaatccgtcatcatcactggcgcgggcagcggcatcggtcgcgcggctgcgctgctgttcaccaaggaaggtgccaaactgattgcggtcgatcgctcggaggcggtgaaggagacggtcgacgaggtgaagaaggccggcggcaccgccgaagccatgatcgcggacgccggctccgagaccgacgtcatcgccgtcatcgacaaggccgtgaagacgcacgggcggctcgacgtgatctgggcgaatgccggaatctccggcgggctcgttccgctcgccgagcagacggtggagcactggcaggagatcttgcgggtcaacctgatcgggccattcctcgcggtgaagtacgccatgccacacatggtcaagcagcaatccggcgcgatcgtgctgacggcgtccgtcgcaggccttaaggccggcgcgagcggacatccctatgccgcgagcaaggccggcgtgatcagcctggtgcagaccacggcctattcgctcaccggcaccggagttcgcatcaacgcggtctgccccgggctgatcgaaacaggcatgaccaagccgatcttcgaccgcgccaaggagcgcggcacccaggacaagatcgggcagctcaacccgctcaagcgccccggccagccgcatgagctcgcggcgatgggactgttccttgcgagcgacgaggcgtcttatgtgaacggccaggcgtttccggtcgacggcggccttaccgcgtcgatgccgtacacgggcaagccggtttga

SEQ ID NO: 2006 - DNA, 699 bp, BradyrhizobiumColbertium
atggccggtgcagacaagccgaatgtggtcgtcacgcgatggtggtgggtccggcacgcccccgtgcgcaatgacggcggcaacatctacgggcagagcgatatcgcctgcgacaccagcgacacctacgtattcaatgccgttgccaaggtgctgccacgcaccgcgatctggtactcgagcaacttgatgcgcacgcaccagaccgcggaagcgatctgggcggctggtttcccgcggcctgcgtcgatgaaatgggaggccgacctcgccgagcaaaatctcggccgctggcagggcatgaaccgcgcccagttcatcgccagccgccccgtcggatcgagttggttcgccgatatcaatgagcccgcgcccggcggcgaaagcttcatggatctctacaaccgcacgcgccgcaccatcgagcggatcaacaacgaggcggcagggcaggacattatcgcggtcgcgcatggcggcaccatcaaggcggcgctgggtctcgcgctcgacggtcagccggagcgcgggctgtcattcgacatcgacaattgctcggtgacgcggttggactattttgcgagccccgagcgcacggtctggcggctgccgatggtgaaccagcagccgtggatcgcggatgttgcgcacgcggcgatgcaccagccggcggggccggaagtcaagaagctcgcctga

SEQ ID NO: 2007 - DNA, 768 bp, BradyrhizobiumColbertium
atgaccttgttcgacatgaaggggaaagtcgccgtcatcacgggatcgacgcgtggcatcgggctcgcgatcgccgagcgcatggccgagcacggtgccaaggtggtgatctcctcgcgaaagggcgacgtctgcgaccaggtggcaaagggcatcaacgacaaatacggcaagggcaccgcggtcgcgatcgccgccaacatctcctcgaaggaaaatctgcaaaacctcgtggacgagagcaaccgcgcgttcggcaagatcgacgtgctggtgtgcaacgcagcatcgaacccgtattacggtccgctcgccggcatctccgacgatcagttcaggaaaatcctcgacaacaacattgtcgccaacaactggctgatttcgatggtggtgccgcagatgatcgagcgcaaggacggctcgattatcatcgtctcctcgatcggcggcctgaagggctcgaccatcctcggcgcctatgcgatctcgaaggccgccgacatgcagctcgcccgcaatctcgcctgcgaatacggcccgcacaacatccgcgtgaactgcatcgcgcccggcctgatcaagaccgattttgcaaaagcgctgtgggacaatccggagaatttgaaagcctcgacctcgcgctcgccgctgctgcgcatcggcatccccgacgagatcgcgggcgctgcggtgctcctggggtcaaaggccggcgacttcatgaccggccagaccatggtgatcgacggcggcgcgacgatcagttga

SEQ ID NO: 2008 - DNA, 1119 bp, BradyrhizobiumColbertium
atgtcggacgctttcaagcgcgaaatcgaaaagggaaccatccctggggctactgtgctggtggcccggcgtggccagatcggctggttcgaggcgctcggcaagcaaagcccgtcgggcgctgcgccaatggcgcgcgattcgatcttccggatcttctcgatgaccaagccgatcgtctccgtcggcatcatggccctggtcgaggacggccatctgcttctcagtgacgcggtcgccaagttcatacccgagttcgccgaccagaaggtcggcgtagtcagtggcggcaagctggaactggtgccggcaacgcggccgatgacggtgcaggacctgctccgccacacctccggcctcacctacgagcaccagggcgatggccccgtgcacaagctctatcaggaatcccgcgtccgcagccgcaagatcaccaacgccgagcacgccgcactggtcgcgagctttccgctggtctgccagccaggcgcggagttcaactacagccgctccaccgacattctgggccgcatcatcgaggtcgtcagcggcaagtcgcttggcgctttcctcaccgagcgcgtcctcgcgccgctccagatggccgagaccggcttctcgacatcggaggccaatgcgggccggctcgccgagccgttcgcgtccgatccctggaccggcgacaaggtcgcgctgttcaacatgctcgagcagccggtgatggagtccggcggcggcggcctggtctcgaccaccatggactatgcccgattctgcctgatgctgcgcaatggcggtacgctcgacggcaacagggtcatcggccgcaaaacgctggaactgatggcgtcagatcatctcgggccaggcgttgcgatcaacggcaccctgctctcgcccggccacggcttcggcctcggcttcgccgtgcgcaaggaggcgggcatcgcgcccttccccggcagcatcggccagtatttctggagcggcattgccggcacgttcttctggatcgatccgaaggaggatctgttcgcggtgttcatgagccagggccccggacagcgcgactacacgcggaccctggtgcgggatctggtttacgccgcggtggagtga

SEQ ID NO: 2009 - DNA, 73 bp, BradyrhizobiumColbertium
aggagtgtagctcaattggtagagcaccggtctccaaaaccgggggtcgcaggttcgagccctgccactcctg

SEQ ID NO: 2010 - DNA, 1002 bp, BradyrhizobiumColbertium
atggtcggtcagatgtgccacctcgccaatttcgcggccaatcccgcgggccgcgtcatcgcgattgccgatctccggccggaactcgcggccgccgccgcgcagaaattcggcgtctcacggatctatggcacgcaccgggagctgcttgcggacagcgaggtctccgcggtggtcgtggtgacgaagcggcgcgcgaccgggccgatcgtcctggacgtcttgaacagcggccgccacgtgctgtcggaaaagccgatggcctacacgacggctcaagccgagacgctggtcgaagcggcgcggcgacaggacctcatctacagcatcggctacatggaagcgtcacgatgccggcgtggcacgcgcgtggccgagttggcacgtattcgcgcagaccggtcgctggggcgcatcgtcgccgcgcatggctggtgcttcggcggcgacacgggccgagcgcaggacaacttcgtgatgaccgccgaagcacggccggacgggctcgaactctgggaggatggccccgactggatgccgcgcgcgatgcgccagggttacgaccacttcttgaatgtctccagccatatcatcaatgtggtgcgctacctgctcggaccatcgccgactcttctcgatagctcgatcgaggattcgggggcggggcgcatcacgctcgatttcgacggcctcgcctgcacgctcgatctcaccagcgggtcggccgggccctggcgcgaggggctgacggtcgagtttgaacgtggcgcaatgaccctggaactgcctccaccctttgccgagcaagaggctttggtcgttgtcgatcacgatggtcaacgcatgcagacggcgggtgcaccgagctgggcattccggcgtcaggccgatgccttcgtttccgatgtcgccaggcgacgcacgccgttggcctcgggcgccgattcagtcaccgaaatcgcacttgcggaagccgtgtggaagcggcgggtgagcgggtag

SEQ ID NO: 2011 - DNA, 117 bp, BradyrhizobiumColbertium
gtggcacatctgaccgaccatacccgttccgatgatgccaatgcctggtgtcactggctcgatccctcagcgtttgcggatgacgaggaaatgcgccggctgccccccgggcgttga

SEQ ID NO: 2012 - DNA, 666 bp, BradyrhizobiumColbertium
gtgctcgagttcggtcctgattccggcgagaacgcgctggtgtttgccggctggggcggaaatatgacgctcgccgagccgaaccagcatgcgcacccgaagatccaggcctttttcgcgcgttttggcctgacgaagcgactgcgcgagctcgtgctggccgatgtcgagggattccgcagcgatcgccgtttcgacatcatcgatgccgaagggttcatctacacggtgcagccgacggagaatcggctgggcatcttccgcggcctgctcaatccggacggttatgccgtggtgtcctattacgagcgctatggcggcttctccgagctcgcgctcaaggcgatccatgcggccggcaaggccctgacagggcgccccgcgctcgagacggcgaggacgctgttcgagccgaaatggaacagcattccgcacacccgcagcttcgaatcctggctgatggacgtgctcgaaaatcctttcgttcggcacagatactttctcgacgcggcagccttgtgcacggcggcgcatgagcagggattcgatatccattcggcctggcccgcctaccgcgacagcctggacatctactggcacaaaaaggtcctgtccggcccgacaagctgcaccgcctcacacgccatctcgatcgcagccgcctga

SEQ ID NO: 2013 - DNA, 627 bp, BradyrhizobiumColbertium
ttggctgaagcgcagcatggccattccggtcagctcagtaccgttgtcggacaggcacatcgccggccggccgcgccaggcaatgatgacatcgagctcgcgtgtgacccgcaggcccggcagcgaagtatcggcgacgagcgccaggcattcgcgagtgaagtcgtcgaccacagccagaatccggaaccgtcgggcgccggcgagacattcggtcagcgcgcaagggagtacagcgctcgtcttcgtccgatcctcgccaaggcccgcgccagcggtgccgagatcgccatctatggcgccggctgccgcgcctgcaccttcaccaatgcccacgagctgacggatctcgtcgacctctcggtcgacgaccagaaggagcgccagggcctctccctgcccggcaccgggatccccatccgctcgccggacgttctcgccggcaagactgggccgctcgtctgtcttctcgccgtgaatcaggagaacgaagccaaggttaacagccggctgcgcgagaacgtgaggcgcccgctccacgtcgtttcgatcttcgcgccgtcggacatctggagcgagctcgatcgtctcgaagcggccgcagggtcgccgcatggcctatgctag

SEQ ID NO: 2014 - DNA, 369 bp, BradyrhizobiumColbertium
atggccatgctgcgcttcagccaagagaggcagatcgagtggcactacatcgcgcccggcaaacagacccagaatgccttcatcgagagctttaacacccgcctgcgcgatgaactcctcaatgagacgctgttcacttcgctcgcacaggcgcgagccgtgctggccgcctggaaagacgactacaacaacgcccggccgcacagcgccctgggcaacctcacgccgaccgaatacgccaaacgcaacgctcttgggccgcaacgggacgggacgctgcgctatgccgagggctccgcgccccgccccgttgcttcaccgagccccttgggctcatattcaaccgggactctttccattgctggatga

SEQ ID NO: 2015 - DNA, 117 bp, BradyrhizobiumColbertium
gtgaccgaccaatgccgcctttgccattcgatcaacctgcgtccggtcatcgacctcggtctaatgccgattgcgcatcggcttcggcatggccaagacgagcagcaggagcagtag

SEQ ID NO: 2016 - DNA, 192 bp, BradyrhizobiumColbertium
atggcagtcagcccgttcaagttcttgcaggaagtgcgctcggaaactgccaaggtcacctggccgacccgccgggagaccacgatcaccaccatcatggtgttcgtcatggtcgccgtcgcctcgatcttcttcttcgccgccgaccagatcatccgctatctcatcaccttcctcctgggcattcactga

SEQ ID NO: 2017 - DNA, 555 bp, BradyrhizobiumColbertium
atggcaacagcaaccgctcaagtgtccgacaagcgctggtacattgtccacgcctattcgaacttcgagaagaaggtcgccgaatcgatccgcgagcaggccaagcagcgcgggctcgaggatctgttcgaactggtgctggttccgaccgagaaggtcacggaagtgcgccgcggccgcaagatcgacgccgagcgcaagttcttcccgggctatgtgctggtgaagatgaagctgaccgacgaggcgttccatctgatcaagaacaccccgaaggtgacgggtttcctcggcgcggaaaacaagccgatgccgatctcggaagccgaggccatgcgtatcctgcaccaggtgcaggaaggcgtggaacggccgaaggcgtcggtatcattcgagattggcgagaacgtgcgcgtggccgatggcccgttcgcctcgttctcgggcgtcgtcgaggaaatcgacgaggcgcgctcgcgcgtgaaggtcgcggtctcgatcttcggtcgcgcgacgccggtcgagctggaattcggtcaggtcgagaaggtctga

SEQ ID NO: 2018 - DNA, 429 bp, BradyrhizobiumColbertium
atggcaaagaaagtgaccggatacctgaagcttcaggtcccggccggtgcggcgaatccttcgcccccgatcggtcccgcgctcggtcagcgcggtctcaacatcatggagttctgcaaggcgttcaacgcccagacccagaaggaagagaagaacaccccgatcccggtgatcatcaccatctatgcggaccgttccttcaccttcgagatgaagacgccgccgatgtcctacttcctcaagcaggccgccaagatccagtccggctcgaaggcgccgggccgtgacaaggccggcaaggtgaccaaggcgcaggtgcgcgagatcgccgagaagaagatgaaggacttgaattgcgacaccatcgaatcggccatgaagatggtcgagggctcggcccgttcgatgggtctggaagttgcggggtaa

SEQ ID NO: 2019 - DNA, 693 bp, BradyrhizobiumColbertium
atggcaatcggaaagcgtttgaacaaagcccgcgaaggcattgatcgcgaaaagctttacccgctcgcggacgccatcaagatggtcaaggaacgtgcgaaagcgaagttcgacgagaccatcgaggtcgcgatcaatctcggcgtcgacccccgtcacgccgaccagatggttcgtggcgtcgtaaccctgccgaacggcaccggccgcacactgcgcgtcggcgtgttcgcccgcggcgccaaggccgatgaggccaaggcggcgggtgccgacgttgtcggagccgaggatctggtcgagaaggtgcagaacggcaacatcgacttcgaccgctgcatcgctacccccgacatgatgcctttggtcggccgcctcggtaaggtgctcggcccgcgcggcctgatgccaaacccgaagatcggcactgtgaccatggacgtcaccggtgcggtgaagggggccaagggcggctcggtcgagttccgcgtcgagaaggccggcatcctccaggccggcgtcggcaaggcctcgttctccgaggagaagctcgtcgagaacatcaaggctctggctgatgctgtctcgaaggcgaagccggccggctcgaagggcacctacatccagcgcgtggcggtgtcctcgacgatgggcccgggcgtgaaggtcgagccgggcaccattctcggctaa

SEQ ID NO: 2020 - DNA, 954 bp, BradyrhizobiumColbertium
atgactgacaaggtcctgatctactcgcgctttcccaagtcgatgatggtgcgtttcgctgagcgtttcgagttgctcgataccggtggcaagcccgcgcacgaggtattttcggctgatgagctgagcggcatccgcgcgatgctgacggcgggcggcaccccgctcggcccggaggcgatggacgagtctccaaagctgggtgccatcgtctgctatggcaccggctatgacggcgtcgacttgaaggcggcagccagccgcaacatcgcggtcgggcacagtccgggcgccaatgcggcctcggtcgccgatatcgcgatgaccctgatgctggcgacgacgcggcggatcctggtggccgaccagtatgtccgcagcggcgattgggctgagtcaaaacagtcgccgatgatgcggccccaggtcggcatgcccgggcgccggatcggcgtctacggcatgggcgagatcggccgcaagatcgcggcgcgctgcgccgccttcgagagcgaggtcggctatttcagccgcaccagatacgatctgccctatcgatatttcccctctctggaggcgctcgtcgactggtgcagcgtgctgatgattgccgtgcgagcagggggcgagacccagcacgtggtcaatggcgatatcctgaggcggcttggcgcggatggctatgtcgtcaacatctcccgcggctcggtcatcgacgagaaagccttggtcgcggccctctccgacaaaaccatcgctggcgcgggcctagacgtctatgagaaggaaccgcacgcgcctgacgcgctgaccgcgcttccaaatgtcgtgttcgccccgcatatcggcggccacaccgtcgaatcgcacgtcgccatgcagaattgcgtgctggcgaatctcaccgcgttcttcgaggggaagccgctaccttatgcggtcaaatcagcctga

SEQ ID NO: 2021 - DNA, 519 bp, BradyrhizobiumColbertium
gtggaacgagcggcaaaaaaagaagcggtcgaacagctccatgaggtcttcaagaccacgggcgtcgcgatcgttgctcaatattccggcctcaccgtcgcccagatgcagactctgcgcaagcagatgcggcaggctggcgcatcggtgaaggtctcgaagaaccgtctcgccaaaattgctcttgaaggcactgacgtcgttgccatcggccccatgctgaagggaccgaccgtgatcgcgacttccagcgatccggtagcggcgccgaaggtcgccatcgacttcgccaaggcgaacgaaaagttcgtcatcgtcggcggatcgatggggaagaccgtcctgaatgtcgacggcgtgaaggcgcttgcctcgctaccgtcgcttgacgaactgcgcggcaagatcgtcggcctcatcgtggccccggcgaccaagctggcccagctcgccaacgcgcccgcgggcaagctcgcacgcgtcatccaggctcatgcctcaaagggcgaagcggcctga

SEQ ID NO: 2022 - DNA, 378 bp, BradyrhizobiumColbertium
atggctgacttgcagaagatcgttgacgacctctcgagcctcaccgtgctcgaagctgccgagctcgcgaagctcctcgaagagaagtggggcgtttcggctgccgcggctgtcgccgtggccggcccggccgcaggtggcgccgccgccgctccggccgaagagaagaccgagttcacggtcgttctcgccagcgccggcgacaagaagatcgaggtcatcaaggaagtccgcgccatcactggtctcggcctgaaggaagcaaaggacctcgtcgagggtgctccgaagccgctgaaggaaggcgtgaacaaggaagaagccgacaagatcaaggcccagctcgagaaggctggcgccaaggtcgagctcaagtaa

SEQ ID NO: 2023 - DNA, 4125 bp, BradyrhizobiumColbertium
atggcgcagcagacattcaccggtcgcaaacgagttcgcaagttcttcggacacatcaaggaagtcgccgagatgccgaacctcatcgaggttcagaaggcgtcctatgatcagttcctgatggtcgacgagcccccgggcggccgtctcgacgaaggtctgcaggcggtgttccgctcggtgtttccgatttccgacttctcgggcacctcgatgctggaattcgtccgctacgagttcgagcagccgaaatacgacgtcgacgagtgccgtcagcgcggcatgaccttcgctgcacccctcaaggtgacgctgcgtctgatcgtgttcgatatcgacgaggaaacgggcgccaagtcggtgaaggacatcaaggagcaggacgtctacatgggcgacatcccgctcatgacgatgaacggcaccttcatcgtcaacggtaccgagcgcgtcatcgtctcgcagatgcaccggtcgcccggcgtgttcttcgaccacgacaagggcaagacccattcctcgggcaagctgctattcgccgcccgcgtcatcccgtatcgcggctcctggctcgatatcgagttcgacgccaaggacatcgtctatgcgcgtatcgaccgtcgccgcaagattccggtgacgtcgctgatgttcgctctcggcctcgacggcgaggcgatcctgtccacgttctacaagaagattctctacaagcggacgaaggagggctggcgtgttccgttcgacgccaaccgtttccgcggctactcgaccgtcaacgacctgatcgacgccgacaccggcaaggtcgtgctcgaggccggcaagaagctcactgtccgcgccgcgcgccagctccaggagaaggggctgaaggcgctgcgcatggctgacgaggaactggtcggcaactacgtcgccgaggatctcgtcaacccgaagaccggcgagatccacgccgaggccggtgaggaaatcaccgacaagctgatgaaggcgctcaacgagcagggatacaaggagctgccgctgctcgacatcgaccatgtcaatgtcggaccctacatccgcaatacgctgtcggccgacaagaacatgacgcgtgaggacgcgctgttcgacatctaccgcgtgatgcgtccgggcgagccgccgacgctggagtcggcgcaggcgatgttccagtcgctgttcttcgacgcagaacgctacgacctctccgcggtcggtcgcgtcaagatgaacatgcgcctcgacctcgatgcgcccgacacccagcgcacgcttcgcaaggaggacatcctctccgtcatcaagacgctggtggatctgcgcgacggcaagggcgagatcgacgacatcgaccatctcggcaaccgccgtgtgcgttcggtcggcgagctcatggagaaccagtaccgcatcggcctgctgcgcatggagcgcgcgatcaaggagcgcatgtcctcggtcgacatcgacacggtcatgccgcaggacctgatcaacgcgaagcccgcagctgccgccgtgcgcgagttcttcggctcctcgcagctctcgcagttcatggaccagaccaacccgctgtcggaaatcacccacaagcgccgcctgtcggcgcttggaccgggcggtctgacccgcgagcgcgccggcttcgaggtgcgcgacgtgcatccgacgcattacggccgcatctgcccgatcgagacgccggaaggtccgaacatcggcctgatcaactcgctcgcgaccttcgcgcgcgtgaacaagtacggcttcgtcgagacgccgtaccgcaaggtcaaggacggccgtgtcaccgacgaggtcgtgtacctgtcggcgatggaagagggacgctattccgtggctcaggccaacgtgccggtcgacgccaagggtcgcttcaccgaagacctggtggtctgccgctcgagcggcacccgcgacgtcgtgccgatgacgcccgacaaggtcgactacatggacgtgtcgccgaagcagctggtttcggtcgccgcggcgctgattccgttcctcgagaacgacgacgccaaccgcgcgctgatgggctcgaacatgcagcgccaggcggtgccgctggttcgcgccgaggcgccgttcgtcggcaccggcatggagggtgtggttgcccgtgactcgggtgccgcgatcgcggcgcgccgctccggcgtgatcgaccagatcgacgcgacccgcgtcgtcatccgcgcgacggaagatctcgatcccaccaagtcgggcgtcgatatctaccgtctgatgaagtaccagcgctccaaccagtcgacctgcatcaaccagcgtccgctggtgaaggtcggtgacgtcgtcaagaagggcgacatcatcgccgacggtccgtcgaccgatctcggcgaactcgcgctcggccgaaacgtgctggtcgcgttcatgccgtggaacggctacaacttcgaagactcgatcctgctctccgagcggatcgtgaaggaagacgtcttcacctcgatccacatcgaggagttcgaggtgatggcgcgcgacaccaagctcggacctgaggaaatcacccgcgacatcccgaacgtctcggaagaagcgctgaagaacctcgacgaggccggcatcgtctacatcggcgctgaggtgcgcgccggcgacatcctggtcggcaagatcacgccgaagggcgaaagcccgatgacgccggaagaaaagctcctgcgcgccatcttcggcgagaaggcctccgacgttcgcgacacctcgctgcgcgtccctccgggcgtgcagggcacgatcgttgaagtgcgcgtgttcaaccgccatggtgtcgacaaggacgagcgtgcgctggcgatcgagcgggaagagatcgagcgcctcgccaaggaccgcgacgacgagcaggccatcctggaccgcaacgtctacaaccgtcttgccgagctcctcgaggggcggcagggcatcgcaggcccgaaaggcttcaagaaggacaccaagatcacccgtgcggtgctcgaggagtacccgaagtcgcaatggtggctgttcgcttcgcccaacgacaagctgatggccgagatcgaggccatgcggaagcagtacgacgagtcgaagaaggggctggaacagcgcttcctcgacaaggtcgagaagcttcagcgcggcgacgagcttccgcccggcgtgatgaagatggtcaaggtcttcgtcgcggtgaagcgcaagatccagcccggcgacaagatggccggccgccacggcaacaagggcgtggtgtcgaagatcgtgccgatcgaggacatgcctttcctcgaagacggcacgcatgccgacatcgtactcaatccgctcggcgtgccttcgcgcatgaacgtcggacagatcctcgagacccatctcggctgggcctgcgccggcctcggcaagcgtatcggccagacggtcgatgcctatctgtcgaagcaggacatcaagccgctgaaggaaaccttgaagaaggtctacggcgaggacgagacgatcaagtcgctcaacgacaacgagctgctcgaactcggccataacctcagccgcggcgtgccgatcgcgacgccggtgttcgacggcgccaaggaagccgacatcgaggagatgctgaagcttgccggtctcgacgcgtcggggcagtcgaccgtctatgacggccgcaccggcgatccgttcgatcgcaaggtgacggtgggctacatctacatgctcaagctgcaccatctggtcgacgacaagatccacgcgcgttcgatcggtccgtactcgctcgtcacccagcagccgctgggcggcaaggcgcagttcggcggccagcgcttcggcgaaatggaggtgtgggcgctcgaggcttacggcgcggcgtacacgctccaggagatgctgacggtgaagtcggacgacgtcgccggccgtaccaaggtgtacgaggcgatcgtgcgcggcgacgacacgttcgaggccggtattccggaatcgttcaacgtgctggtcaaggaaatgcgctcgctcggcctcaacgtcgacttgcataactccaagatgggaccggcgccgacgtcggaagcggccgagtaa

SEQ ID NO: 2024 - DNA, 4197 bp, BradyrhizobiumColbertium
atgaaccaagaaattatgaatctcttcaatccgacgacgccggctcaggtcttcgaccagatccggatctcgatcgcgtctccggaaaagattctgtcctggtcctacggcgagatcaagaagccggagaccatcaactaccgcaccttcaagcccgagcgcgacggcctgttctgcgcgcgcatcttcgggccgatcaaggactacgagtgcttgtgcggcaagtacaagcgcatgaagtacaagggcatcatctgcgagaagtgctcggtcgaggtcacgctgtcgcgcgttcggcgcgagcgcatgggccacatcgaactcgcagcccccgtcgcccacatctggttcctgaagtcgctgccctcgcgcatcggtcttctgctggatatgacgctcaaggatctcgagcggatcctctacttcgaatattacgtcgtgctggagccgggtctcaccgcgctgaaggaccgtcagctgctgtcggaagacgaatatctgaaggcacaggacgagtacggccaggattccttcaccgccatgatcggcgcggaggcgatccgtgagctgctcaagggcatggacctcgagaagctcgaggcctccttgcgcgtcgagatgcaggagaccgactccgacatcaagcacaagaagctcgccaagcgcctgaagatcgtggaagcgttccgccactccggcaacaagccggaatggatgatcatgaccgtggtcccggtgattccgccggacctgcgtccgctggtgccgctggacggcggcctcttcgcgacctcggacctcaacgatctctaccgccgtgtcatcaaccgcaacaaccggttgaagcggctgatggagctgcgcgcgcccgacatcatcatccgcaacgagaagcgcatgcttcaggaggccgtcgacgcgctgttcgacaacggccgccgtggtcgcgtcatcaccggcgccaacaagcgtccgctgaagtcgctcgccgacatgctcaagggcaagcagggccgcttccgtcagaacctgctcggcaagcgcgtcgactattcgggccgctcggtgatcgtggtcggtcccgaactgcgcctgcatcagtgcggcctgccgaagaagatggcgctcgaactgttcaagccgttcatctactcgcggcttgacgccaagggtctgtccaccaccgtgaagcaggccaagaagctggtcgagaaggagcggcccgaggtctgggacatcctggacgaggtcatccgcgagcatccggtgctgctcaaccgcgcgccgacgctgcatcgcctgggcatccaggcgttcgagcccgtgctcatcgagggcaaggcgatccagctccacccgctggtctgctccgccttcaacgccgacttcgacggcgaccagatggccgtccacgttccgctgtcgcttgaagcgcagctggaagcgcgcgtcctgatgatgtcgaccaacaacatcctgcatccggcgaacggtcagccgatcatcgtgccgtcgcaggacatcgtgctcggcctgtactacgtctcgatcatgcgcgaaggcctgcccggcgagggcaaggtgttcggcgacatggccgaactcgagcacgcgctgcacgcgaaggtcatccacctccacaccaagatcaagtaccggtgggaaggcatggacgagaccggcaaggtctccaagcgctggatcgaaaccaccgccggccgcgtcatgctcggcaatctgctgccgaagaacccgcggatttcgtacgagatcatcaacaagctgatgaccaagcgcgagatctccggcgtcatcgaccaagtctaccgccactgcggtcagaaggagaccgtgatcttctgcgaccgcatcatggcgctcggcttctacaacgcgttcaaggccggcatctcgttcggcaaggacgacatggtcgtgccgcacggcaagtggaagatcgtcgacaccacccgtacgctggcgaaggatttcgagcagcagtacaacgacggtctgatcacgcacggcgagaagtacaacaaggtcgtcgacgcctggtcgaaggccacggaagaaatcgccaaggcgatgatgaaggagatctccgccaccaagaagacggcgagcggagccgacgccgacatcaactcgatctacatgatggctcactccggtgcccgcggttcgccggcccagatgcgccagctcgccggcatgcgcggcctgatggccaagccgtcgggtgagatcatcgagacgccgatcatctcgaacttcaaggaaggcctctcggtgctcgagtacttcaactcgacccacggcgcccgcaagggcctcgcggacaccgcgttgaagaccgcgaactccggctacctgacccgtcgtctcgtcgacgtggcgcaggactgcatcatcacgcagagcgactgcggaaccaagctcggcatcaagatgcgcgccatcgtcgacgccggcaccgtggtcgcttcgctcggctcgcgcatcctcggacgcacggcctgcgaagacgtgcgtgacagctcgggcaaggtgatcgtcaagcgcgatacgctgatggaagagagccacgtggatgccatccatcaggccggcatccaggaggtgaagatccgctcggcgctgacctgcgagctcgtcaacggcatctgcggcaagtgctacggccgtgacctcgcccgcggcacgccggtcaaccatggcgaagcggtcggcgtcatcgcggcgcaatcgatcggcgagccgggcacgcagctgaccatgcgcaccttccacatcggtggtgcggcgcagctcaacgagcagtccttcgtcgaagccaacttcgacggcaagatcgtgatcaggaacaaggccatcgcccgcaacagcgaaggtcacctgatcgcgatggtgcgcaacatggttgtcgcgatcgtcgatgccgacggcaccgagcgtgcaacgcaccgtattcagtacggttcgcgcctgcacgttgacgagggcgacatggtcaagcgcggccagcgtatcgtcgagtgggatccctacacccgtccactgctcaccgaagtcgaaggaaccatcggcttcgaggatcttgtcgaggggcagtcgatctcggaaacgctcgacgaagccaccggtatcgccaagcgcgtggttatcgactggcgctcgacgcgcggcggctcggacctgcgtccggccatcgtggtcaagggcaaggacggcaaggtgctcaagctcgctcggggcggcgatgcccgctacatgctgtcggtcgacgccattctgtctgtcgacattggagccaaggttgcgccgggcgacatcctcgcccgtgtctcgaccgaaagcgccaagacgcgtgacatcaccggcggtctgccgcgcgtggcggaactgttcgaggcccggcgcccgaaggatgcggcaatcatcgccgaaatcgcgggcaccatccggttcggacgcgactacaagaacaagcgtcgcatctcgatcgagccgatggacaagaccgacgagccgcgcgagtacctgatcccgaagggcaagcacatccacctccaggacggcgacgtcgtcgaaaagggcgacttcatcgtggagggcaacccggcgccgcacgacatcctggcggtgaagggcatcgaggaactcgcggcctatctggtcaacgagatccaggaggtctaccggctgcaaggcgtgctcatcaacgacaagcacatcgaggtgattgtccgtcagatgctccagaaggtggaagtcaccgaccagggcgatacggacatgatctcgggcgagcaggtcgacaagatcgagttcgacgcgctgaacgcgaaggccaaggaagagggcaagaagcccgccacgggaacgccggttctgctcggcatcaccaaggcgagcctgcagacccggtccttcttctcggcggcatcgttccaggagaccacacgcgtcctcaccgaagcggcggtcaacggcaagatcgatccgctcgagggcctcaaggagaacgtcatcgtcggccggctgatcccggcgggcaccggcgcctccatggccaagatccgcgaagtcgccatgaagcgcgacaagctgatcctggacgagcgcgagaagcaggcggccgtcgtgtcgcccgcaccggaagccgagcttcctgcgctgccgcctgcggaatga

SEQ ID NO: 2025 - DNA, 2055 bp, BradyrhizobiumColbertium
atgcttgatctcgcaatcgtaggcggcggccccggcgggctgatgagcgcctggtatctgaagcgtaagctcggcgatctctgtcgcgtcaccatctacgaggcctccgatcggctcggcggcaagatcgtcacgcgcaaattcgattcagcccccgcgatgtacgaggccggcgttgccgagatctacgactactcgatgacgggacccgatccgctgcgcgaattgatccagcatttcggcctccagaccatcccgatggacgccgagcaggtacattttggcggcgaactcatcaatgatgtgcccggcatgcgccgcagatatggcgccaagaccgcggacgcgatcgaggcgttccggaagcgctgcaccgaggcaatgtcgcccgtcgagtattacgagggcgttggtgcgcacgacaacgagaatccctgggcttacaagaccgccgagcaggtgctcgacgaggaggtcgaggacgagacggcaaagcgtttcttcaaggtgatggcgcggtccgacatcgcgaccgagagccacaacaccaacggtctcaatgccctcaagaactatctgatggacgtcgatggctatatcggcctctattccatccagaacggcaacgagcagctgatcgaatgcctgcagtccgaggtcaacgcggacatccagctcaatcaccgcgtgctcaccgtcggcaaggcgccgaccggccgctatcagctcaagatgatgaacggcaagggaccggagatccgcgatttcgatctcgtgctggtctgcctgccgcattcctggctcgccaccctcggctgggagggcgagcagctgcgcaggtcgatggtcaagcacgttgcctacttcgaccgtcccgctcattatttgcgcgtgtcgatcctgttcgacgagccgttctggggcgagaagattcccggagcctggttcatgtcggaggccttcggcggctgctgcgtctacaatgagggtgcgcgtcacgacgtcggcaagcatggcgttctgaactggctcatccccggctccgacgcgctggctttcgccaatctgtcggacggggagctgatcgatgccgccctgaagtcgctgccggcgtctctcggcgatgcgcgtttgcatttcatggaaggcaagatccaccgctggctgtcgtcggtgaacgcaattccaggcggcttgccggtgcgcgacgtcatgaccaatcaccggcccgagccgaaggatcatcccggaatcgtcgtggtcggcgactatctgttcgactcgacgctgaacggtctgctcgactcctcggacgcagcgaccgacattatcctgaccgagatgatgcgcctgcgccgcgaacgcacgcaggaggataagccgctttcgaacaagatcgatcgcgattatttcgagaactatcgcggcctcggaccctatcaccaggcctggcgccacttcaccgaccccgattacctcaccagactgatcagcatcgtctggggcaaggcgacgggcgccaagatgctggtcgcgggttccgccagcggagaattggtcggtgcgctgcgcgatcgcggcatcgatgcatggggaatcgagaacaatcgcggcatccacgccaagacgccaaaagcgctgaagaagtacaacaagctcggctcgatcaccgacatgccgttcaaggaccgcgcgttcgatttcgtgtttgagaccagcctctgtcacgttgcccccagacaggtgggccgcgcgatccgcgagctcaaccgcgtggtcaagaccggcctcgtgttcggctcgatcacctcggacatggcgccggcattgatcgaccgatacgatctcctgcgcggcgtcaagaagctggttacctggtgggaatggtccgaactgttcttcggcaacggcttcgatctgtcgatgcaccgcaaggattgcaccgatgcgctctgggaagcgacgctcgccgcgaacaaggggcctgggcaatggtacgccgacgccgatagcttgcgttattccttcttcgacaaggtcgaggacgaggattag

SEQ ID NO: 2026 - DNA, 126 bp, BradyrhizobiumColbertium
atgctgacggccggcatgaccgcagagaatgcaggaatagcggcaaccgctattgcaccgattctatgcgatcaggatgaattcggcaaaacaattggcgaattcgcaccgcatcccgcgggctaa

SEQ ID NO: 2027 - DNA, 2001 bp, BradyrhizobiumColbertium
atggcgtccaagcccctccctcccgacaaacagaagctcgccgcgaaagaggcggtcgagctcgacgacaagctggcctctgctgccaaagtcgatctcgacgacgaggacgaagaagacggagaggacgaactggaactcgacgacgatgaggacgaggacctcgtcgtctttactgcgcgcgaggccgccggggcgctcgcgaccatcgtcggattcgtcaggccctatctgaccaactacaagcggatgctgtcctacgtggcgttcggtgtcctcgtggagacgctgttcaacgtcattatgcccctcagcctcaagtatctgatcgacgacgcgctgggcgaggaggacttccgggcgctctacaagatcctcggcgtgctcgcgatcgccggcatattcacctcgatcgtcgcggtctggtacgagcgctgggacgcgcggcttgccgcctgcatcatctccgatgtccgcaagcgcctgttcgagcatgtccaggacctgccggccgcctatttcggccgcacgaagcgcggcgagatcctgtcgcgtttctcggtcgacctctcggccttcgaaggttcggtcaagacgttcgccaacagcgcggcgctgccgttcctggaactgatcgccggcatcatcctgatgttgttcctgaactggcagctcgccgtcgtcgcgctactggtgttcccgatcacactgatcggcccgcggattctgactcctaaagcggtgcaggccaactacgagcagaagctcaacgagagcgcgctgctcggcatggtgcaggagaatgtcgcggcgcaggctgtgatcaaggcgttcagcctccaacgcaagatgttcggcttcttcaccttgcgcaacgacgagacccgcaacaggatcgctgcggctacgttcctctcgacgatggtggagcggacggtcaccatctcagttcttctcctgcatctcgtggtgctcgcgatcggcgcctatcttgcaaccaccggccagatcaccatcgggaccttcgtcaccttcgagagcgcgttctgggaggtgtcctacaacatcgctcacgtcatgcatttcgtcccggtgtcgatctcctcggccgccgccatccgccacatccaggaattgctcgatgagccgacccgcgccgccgatcgtccgggtgcgcccgatctgccgcgcatcaccaacgacatcactttcgatcacgtcaccttccggtacgagggcagtcagacgccggtgctggataatctcagcctcaagctcaatgccggcaagcgtatcgccatcgtcggtccgagcggctccggcaagagcacgctgctcaatctgatcctgcggctctacgttcccgacgagggccgcgtcaccatcgacggcgtcgatgtccgcagggtgacgctggattcgctgcggcggagcatggcagtggtgttccaggagaacatgctcttcaacatgtcgatccgcgagaacatccgtctcggcaaggagggcgcaacggacgaagaggtggaggaggcggccaagaaggccgagatccaccgctacatcatgagcctgccgcagcgctacgatacgcccgtcggggaacgcggagacacgctgtcgggcggccagcgccaacgcatcgcgatcgcccgcgcaatcatccggaacccttccgtgctgctgctggacgaagccacctcggcgctcgatcagaccacggaggccgcaatcaaccgtacgctgctcaaggtcgccaagggtcgcaccatgatctggtcgacccaccgtctgacctcggtggtcgagatggatgagatcatcgtgatttcagggggcagggcgatcgagcggggctcccacgccgagctgctcgccaggaacggcatctatcgcaagctgtggaacgaccagatccaccagcctcatggcgcgtcggctcacgccgaggacagcggcgatgacgatgatgacgatctcgacgatgaggacgaggagtga

SEQ ID NO: 2028 - DNA, 312 bp, BradyrhizobiumColbertium
ttgccgcggcccgttgccgggaccgcaaattgttttcgagccacccgcccgacgaggtcgcctcaagcggaacaatccgcgcaaagcgaaattgcgccaaccgctccatcaccgagcggaaagcgcttcgacgccacagaggaccgcagtcttgaagccgttcagcgtaacgccgcggcccgaatactgaggtcatgcatccgaattcgatctcaagagagcgtgctcaagagaactaaaatcgcactggcattgcctagctatgatcgacagcgtttgagcggcattcgtcgaggttggtgcccgccttga

SEQ ID NO: 2029 - DNA, 372 bp, BradyrhizobiumColbertium
atgccgacgatcaaccagctgatcgctcaaccgcgggaagtgcagaagtcgcgcaagaaggtgccggcgctgcagcagtcgcctcagaagcgtggtgtttgcacccgcgtctacaccacgaccccgaagaagccgaactcggcgcttcgcaaggtcgccaaggtgcgcctgacgaacggcttcgaggtgatcggctacatccccggcgaaggtcataacctccaggagcactcggtggtcatgatccgcggcggccgcgtcaaggacttgcccggcgtgcgctaccacatcctccgcggcgttctggatacccagggcgtcaagaaccgtaagcagcgtcgttcgaagtacggcgccaagcgtccgaagtaa

SEQ ID NO: 2030 - DNA, 471 bp, BradyrhizobiumColbertium
atgtctcgtcgccactctgcggaaaagcgcgaagtcctcccggatcccaagttcgggaacatcatcgtcaccaagttcatgaactcggtgatgtacgccggcaagaagtcggttgcggaaggcatcgtctatggtgcgttcggcatcatcgaggccaagaccaagcagaacccgctcggcgtgttcgagcaggcgctcgagaacgtcatgccgaccatcgaggtgcgctcccgccgcgtcggcggcgcgacctaccaggttccggtcgaagttcgctcgacccgccggcaggccttgggcattcgctggctgatctctgccgcgcgcgagcgcaacgagaagacgatgacggagcgcctctcggcggagctcctggacgcatcgaacaaccgcgggaacgccgtcaagaagcgtgaagacgtgcaccggatggcggaagccaaccgcgccttctcgcactatcgctggtaa

SEQ ID NO: 2031 - DNA, 2073 bp, BradyrhizobiumColbertium
atgccccgccaacatgccatcgaggactaccgcaatttcggtatcatggcgcatatcgacgccggcaagaccacgacgaccgagcgcatcctctattacaccggcaagagccacaagatcggcgaagtgcacgagggtgccgcgacgatggactggatggagcaggagcaggagcgtggcatcacgatcacctcggctgcgaccaccgccttctggaacggcaagcgcctgaacatcatcgacacccccggccacgtcgacttcaccatcgaagtcgagcgcagcttgcgcgtgctcgacggcgccgtctgcgtgctcgactccaaccaaggtgtcgagccccagaccgagaccgtctggcgccagggtgacaagtacaaggttccgcgcatcgtcttcgccaacaagatggacaagatcggtgccgatttcttcaagtgcctgtctgacatcgtcgaccgtctgggtgccaagcccgttgcgatccagcttccgatcggcgccgagaacaacttcaagggtctcgtcgacctcgtgaagatgaagggcgtcgtctggaacgatgaagcgctcggcgcgaagttcgactatgtcgacattccggaagacctcgtcgaccaggccaaggaataccgcgagaagatggtggaagccgccgtcgagctcgatgacgacgccatggccgcctatctcgacggcaaggagccggacgaagcgaccctgaagcgcctgatccgcaaggcggtgctgaccggcgcgttctatcccgtgctgtgcggctcggccttcaagaacaagggcgtgcagccgttgcttgatgctgtcgtcgactatctgccgtcgcctctcgacgtgcccgcgatcaagggtaccgacgacaagggcaacgaggtggtgcgcaaggcggacgacaaggagcccctggcgctgctcgcgttcaagatcatggacgaccccttcgtcggcaccatcaccttctgccgcatctattccggtatcctgcagagcggcaccggcgtcgttaactcgacccgcgagaagaaggagcggatcgggcgcatgctcttgatgcatgcgaacaaccgcgaggacatcaaggaagcctatgccggcgacatcgtcgcgctggccggcctgaaggaagcgcgcaccggcgacacgctgtgcgatcccgacaagccggtgatcctggagaagatggagttccccgagccggtcatcgagatcgcgatcgagccgaagtccaaggccgaccaggagaagctgggcgtggcgctggccaagctcgccgcggaggatccgtccttccgcgtgtcgaccgaccacgagtccggccagaccattctcaagggcatgggcgaactccatctcgacatcaaggtcgacattctcaagcgcacctacaaggttgacgccaacatcggcgcgccgcaggtggcgttccgtgagcgcgtcaccaagcgggtcgagcatagctacacccacaagaagcagaccggcggtaccggccagttcgcggccgtgtcgttcatcgtcgagccgaacgagcccggcaagggctacgagttcgagtcgaagatcgtcggcggcgcggtgccgaaggagtacatcccgggcgtcgagaagggcctggagagcgtactgtcgtccggcgtggtcgcgggcttcccggtggtcgacgtcaaggtgacgctggtcgacggcaagtatcacgacgtcgactcgtcggcgctcgccttcgaaatcgcgtcgcgcgcctgcttccgcgaagcgctgcagatgggcaagtccgtcctgctcgagccgatcatgaaggtcgaagtggtgaccccggaagactacaccggttcggtcatcggcgacctgaactcccggcgcggtcagatccagggccaggacatgcgcggcaacgccaacgtcatcaacgcgatggtgccgctcatgaacatgttcggttacgtgaacaacctgcgctcgatgagccagggtcgcgcgaccttcaccatgcagttcgaccactacgcagaagcgccggccaacgtgtcggcagaagtccagaagaagtttgcctga

SEQ ID NO: 2032 - DNA, 1191 bp, BradyrhizobiumColbertium
atggccaaagcaaagtttgaacgtaccaagccgcactgcaacatcggcaccatcggtcacgtcgaccatggcaagacgtcgctgaccgcggcgatcaccaaaatcctcgccgagaccggcggtgcgacgttcaccgcgtacgatcagatcgacaaggcgccggaagagaaggcgcgcggcatcaccatctcgaccgcgcacgtcgagtatgagacgcagaaccgtcactatgcccacgtcgattgccccggccacgccgactacgtgaagaacatgatcaccggcgccgcgcagatggacggtgcaatcctggtcgtgtcggccgctgacggcccgatgccgcagacccgtgagcacatcctgctcgcccgccaggtcggcgtgcccgcgctcgtcgtgttcctcaacaagtgcgacatggtcgacgatccggagctgcttgagctcgtcgagctcgaagttcgcgaactgctctcgaagtacgagttccccggcgacaagatcccgatcatcaagggttcggcgctcgccgctctcgaagactccgacaagaagctgggccacgacgccattctcgagctgatgcgcaatgtcgacgagtacatcccgcagccggagcgtccgatcgaccagccgttcctgatgccggtcgaagacgttttctcgatctcgggccgcggtaccgtcgtgaccggccgtgtcgagcgcggcgtcgtcaaggtcggcgaggaaatcgagatcgtaggtctccgcgccacccagaagaccaccgtcaccggcgtcgaaatgttccgcaagctgctcgatcagggccaggccggcgacaacatcggtgcgctgcttcgcggcaccaagcgcgaggacgtcgagcgcggccaggttctggccaagcccggttcggtcaagccgcacaccaagttcaaggctgaggcctacatcctcaccaaggaagagggcggtcgccacaccccgttcttcaccaactaccgtccgcagttctacttccgcaccaccgacgtgactggtgtcgtgcacctgccggaaggcaccgagatggtgatgccgggcgacaacatcgcgatggaagtgcacctgatcgtgccgatcgcgatggaagagaagctgcgcttcgcgatccgcgagggcggccgcaccgtcggcgccggcgtcgtcgcctcgatcatcgagtaa

SEQ ID NO: 2033 - DNA, 309 bp, BradyrhizobiumColbertium
atgaacggccaaaacattcgtatccgtctcaaggcgttcgaccatcgtatcctcgatacgtcgacccgcgagatcgtgaacacggcgaagcgcaccggcgcgcaggtccgcggacccattccgctgcccacccgcatcgagaagttcaccgtcaaccgttcgccccacgtcgacaagaagagccgcgaacagttcgagatgcgcactcacaagcgcctgctcgacatcgtcgatccgaccccgcagaccgtcgacgccttgatgaagctcgacctcgctgccggcgtcgacgtcgagatcaagctctga

SEQ ID NO: 2034 - DNA, 714 bp, BradyrhizobiumColbertium
atgcgctccggagtgatcgcacaaaaggtcgggatgacgcgggtcttcacggaggccggcgaacatatccccgtgaccgtgctgaagctcggcaattgccaggtcgtaggccaccgcaccgaggagaagaacggttacgtcgcgctccagctcggatctggcagccgcaagaccgtttacatgccgaaggctgagcgcggccagttcgcggtcgccaaggtcgaaccgaagcgccgggtcgaggaattccgggtcagcgccgatgcgatgatcccggtcggcgccgagatccaggccgatcacttcgtcgtcggtcagttcgtcgacgtcaccggcacctcggtcggcaaaggcttcgccggcggcatgaagcgctggaacttcggcggtctgcgcgccacgcacggtgtgtcgatctcgcaccgctccatcggttcgaccggtggccgtcaggaccccggcaagacctggaagaacaagaagatgcccggccacatgggcgtcgaccgcatcaccacgctcaaccttcgcgtcgtccagaccgatgtcgagcgcggcctgatcctcgtcgagggagccgttcccggctccaagggcggctggatccgcgtgcgcgacgccgtcaagaagccgctgccgaaggaagctccgaagcccggcaagttcaaggttgctggcgacgcggaagccgctccggctgcgcaggaggcgtga

SEQ ID NO: 2035 - DNA, 621 bp, BradyrhizobiumColbertium
atggaattgaaggttaccaccctcgaaggtaaggaagcgggctcggtccagctttccgacgccattttcggcctcgagccgcgcgaggacatcatcgcgcgctgcgtgcagtggcagctgaacaagcggcaggccggcacgcacaaggccaagggccgcgccgagatctggcgcacgggcaagaagatgtacaagcagaagggcaccggcggtgctcgtcacggctcggcccgcgtgccgcagttccgtggcggcggccgtgccttcggtccggttgtgcgttcgcacgccacagacctgccgaagaaggtccgcgcccttgcgctcaagcacgcgctctcggccaaggccaaggacggcgatctggtcgtgatcgagaaggccgctctcgataccgccaagaccaaggcgctgctcggccacttctcgggcctcgggctcaccaacgcgctgatcatcgacggtgccgagctcaacaacggttttgccgctgccgcccggaacatcccgaacatggacgtgctgccgatccagggcatcaacgtctatgacatcctgcgccgtcagaagcttgttctgaccaaggccgccatcgatgcgctggaggcgcgcttcaaatga

SEQ ID NO: 2036 - DNA, 303 bp, BradyrhizobiumColbertium
atgacgaagaacatcgagcctcgccactacgacgtgatcctgtcgccggtcgttaccgaaaaggcgacgatcgcctctgagcacaacaaggtgctgttcaaggtggccgcgaaggcgaccaagccgcagattaaggaagcgatcgagaagctgttcgacgtcaaggtcaagagcgtcaacacgctggtccgcaaaggcaagacgaaggtcttccgcggtaatctcggttcgcagtcgaacagcaagcgcgcgatcgtgaccctcgaagagggccaccggatcgacgtgaccaccggtctgtaa

SEQ ID NO: 2037 - DNA, 834 bp, BradyrhizobiumColbertium
atggcactgaagacattcaatcccacgacgccgggccagcgccagctggtcatggtcgatcgttcggccctgtacaagggcaagccggtcaaggcactcactgagggcaagaagtcctcgggcggccgcaacaacaccggtcgcatcaccgtgcgtttccgcggtggcggtcacaagcagacgctgcgtaccgtcgatttcaagcgcgagaagatcgacgtccccgcgaccgtcgagcggctggagtacgatccgaaccgaaccggcttcatcgctctgatcaagtatcaggacggcgagcaggcctatatcctggcgccgcagcgcctggccgtgggtgacaccatcatcgccggcaactatgtcgacgtgaagccgggcaacgtcatgccgctcggcaacatgccggtcggcacgatcattcacaatatcgaggtcaagatcgggaagggcggccagctcgcccgttctgccggcacctatgcccagctcgttggccgcgaccaggactacgtcatcatccgcctgaactcgggcgagcagcgcctggtgcacggccgctgccgcggcacgatcggcgcggtgtcgaacccggatcatatgaacacctcgatcggcaaggccggtcgcaagcgttggatgggccgtcgcccgcacaaccgcggtgttgcgatgaacccgatcgaccatccgcacggcggtggtgaaggtcgtacctcgggcggccgtcatccggtcaccccatggggcaagccgaccaagggcaagaagacccgcaccaacaagtcgaccaacaaattcattctcctaagccgccacaagcggaagaagtaa

SEQ ID NO: 2038 - DNA, 279 bp, BradyrhizobiumColbertium
atggttcgttcagtctggaaaggcccgttcgtcgagggttctctgctcaagaaggcagatgccgcgcgcgcgtccggccgtcacgacgtcatcaagatctggagccgtcgttcgacgatcctgccgcagttcgtcggcctgaccttcggcgtctacaacggtcagaagcacgtgccggtggccgtgaacgaggaaatggtcggtcacaagttcggcgagttctcgccgacccggaccttccatggccactccggcgacaagaaagccaagaaggcttga

SEQ ID NO: 2039 - DNA, 387 bp, BradyrhizobiumColbertium
atgagcaaacctaagcgcgaacggagcctcgccgagaacgaggccaaggcggtcgcccggatgctgcgggtgagcccgcagaagctcaatctggttgcccagctcattcgcggccggaaggcgtctgccgcgctcgccgacctgcagttttcgcgcaagcggatcgcggtcgacgtgaagaagtgcctggaatcggcgatcgccaacgccgagaacaaccacgacctcgacgtcgacgatctggtcgtggcgcaggccttcgtcggcaacggcctcgtgatgaagcgcttcgccgcccgcggtcgcggccgctcgggccgtgtctacaaaccgttttcgcagctgacgatcattgttcgtcaggtcgaagctgaagccgccgcttaa

SEQ ID NO: 2040 - DNA, 726 bp, BradyrhizobiumColbertium
atgggtcagaagatcaatccgatcggtctgcgtctcggcatcaaccggacctgggattcccgctggttcgccggcaagcaggaatacggcaagctgctgcacgaggacgtcaagatccgcgagatcctgcacaaggagctcaagcaggcggccgtcgcccgcatcgtgatcgagcgtccgcacaagaagtgccgcgtcaccatccactcggcccgtccgggcgtggtgatcggcaagaagggcgccgacatcgacaagctgcgcaagaaggtcgcggacatcacctcgtccgacgtcgtcatcaacatcgtcgagatccgcaagccggagctcgatgcgacgctggtggccgagtcgatcgcccaacagctcgagcgccgcgtggcgttccgccgtgccatgaagcgcgccgtgcagtcggcgatgcgtctcggcgcggaaggcatccgcatcaactgctcgggacgtctcggcggtgcggaaatcgcgcgcatggagtggtaccgcgaaggccgcgtgccgctgcacacgctgcgcgcggacatcgattacggcgtggcgaccgccttcacgaccttcggcacctgcggcgtcaaggtctggatcttcaagggcgagatcctcgagcacgatccgatggcccaggacaagagaatggccgaaggcgagaccggcggcagtggcgatcgtggtggccgtcagcgccgcgatacggccgctgcctag

SEQ ID NO: 2041 - DNA, 414 bp, BradyrhizobiumColbertium
atgatgcaacctaagaaaacgaagttccggaaggcgcataagggccgcatccacggcgttgcgtcttcaggcgcgacgttggcgttcgggcagttcggcctgaaggcgaccgagcctgagcgcgtcaccgcgcgccagatcgaagccgcccgtcgcgcgctgacccgtcacatgaagcgtgccggccgcgtctggatccgcgtgttccccgacgttccggtgtcgaagaagccggccgaagtccgcatgggctccggcaagggttctccggaattgtgggtcgcgcgcgtcaagccgggccgggtgctgttcgagatcgacggcgtcaacacccagacggcgcgtgaggcgctgaccctggcggcggccaagctgccgatcaagacgcgcttcgtcgagcgcattgcggagtaa

SEQ ID NO: 2042 - DNA, 207 bp, BradyrhizobiumColbertium
atggcccagatgaagatcgaagacatccgcgcgatgagccccgaccagcaggatgacgccatcctgaacctgaagaaggagcgcttcaacctgcgcttccagcgcgccaccgggcagctcgagaacacctcgcgcctgcgcgaggctcgccgtgacatcgctcggatcaagaccgtcgccgcgcagacgcgcgccaagaagaagtaa

SEQ ID NO: 2043 - DNA, 249 bp, BradyrhizobiumColbertium
atgccgaaacgtactttgcagggcgtggtcgtcagcgacaagcaggccaagaccatcgtggtgcgggtcgatcgccgcttcacgcacccgatctacaagaagacgatccgccgctccaagaactaccacgcgcacgacgagagcaaccagttcaagccgggcgacatggtgtggatcgaggaaacgaagccgatttcgaagttgaagcgctgggtcgtgatccggggcgaacacaagaaaagcgcctga

SEQ ID NO: 2044 - DNA, 369 bp, BradyrhizobiumColbertium
atgattcagatgcagaccaacctcgacgtggccgacaattctggcgcacgccgtgtcatgtgtatcaaggtgctcgggggctccaagcgccgctacgccacgatcggcgacatcatcgtcgtctcgatcaaggaagctatcccgcgtggcaaggtgaagaagggcgacgtgatgaaggccgtcgtggtgcgcgtccgcaaggacatccgccgcgccgatggctcggtcatccggttcgaccgcaacgctgccgtcctgatcaacaatcagtccgagccggtcggtacccgtatcttcgggcccgtgccgcgcgagctgcgcgccaagaaccacatgaagatcatctcgctcgcgccggaggtgctgtga

SEQ ID NO: 2045 - DNA, 315 bp, BradyrhizobiumColbertium
atggctgcgaagatccgcaagggcgacaaggtcgtcgtgctgaccggtcgcgacaaggggcgcaccggcgaagtgttcgaggttcgccccgacgccggcacggcgctggtgcgcggcatcaacatggtcaagcgtcaccagaagcagacgcaggcccaggagggcggcatcatctcgaaagaggcgccgatccaactgtccaacatcgcgtatgtcggcaaggacggaaagccgacccgcatcggattcaagattctggcggacggaaagaaggtccgcatcgccaagagctcgggagctgagatcgatggctga

SEQ ID NO: 2046 - DNA, 558 bp, BradyrhizobiumColbertium
atggctgaggccgcttacacgccgcgcctgcgcgcggaatacgatgcgaatatccgcaccgctctgaccgagaagttcggttatgagaacgtcatgcaggttccgcgtctggacaaggtcgtcctgaacatgggcgttggcgattccgtcaacgaccgcaagaaggccgagaccgccgcagccgaattgacccagatcgccggccagaaggcgatcgtgacctattcgcgtatcgcgatcgcgaccttcaagctccgtgagaaccagccgatcggctgcaaggtcacgctgcgcaaggctcgcatgtacgagttcatcgatcgcctggtgaacgtcgcgctgccgcgcgttcgcgacttccgcggcctgaacccgaagagcttcgacgggcgcggcaactactcgctcggcatcaaggagcacatcattttccccgagatcgacttcgacaaggtcacggaagcccgtggtatggacatcaccgtctgcaccacggccaagaccgacgaagaggcgagggccttgttgaccgctttcaatttcccgttccggcagtga

SEQ ID NO: 2047 - DNA, 306 bp, BradyrhizobiumColbertium
atggcaaagaagagttcagtcgagaagaacaaccggcgcaagcggatggtgaagaacgccgccgccaagcgcgagcggttgaaggcgatcatcgccgacaagacgctgccgatggaggagcggttcgccgcgaccctaaagctggcggaaatgccgcgcaattcgtcggcgacccgcatccgtctgcgctgcgagctgtcggggcgcccgcgctcgaactaccgcaagaacaagctgtcccgtatcgcgctgcgcgaccttggctccaagggcatggtcccgggcctcgtgaagtccagctggtaa

SEQ ID NO: 2048 - DNA, 399 bp, BradyrhizobiumColbertium
atgtctacgcacgatccaatcagcgatctgatcacccgtatccgcaacgcgcagatgcgttcgaagaccaaggtctccacccccggctcgaagatgcgcgagaacgtgctcgaggtcctgaaggccgagggctacatccgcggctacgccacgctcgagcattcctccggccgcagcgagatcgagatcgagttgaagtatttcgacggcgagcccgtcatccgcgagattgagcgtgtttccaagcctgggcgcagagtctacgcctcggtgaagaacctgccgcgggtgaacaacggactcggcatttcggtgttgtcgacaccgaaggggatcatggccgaccacagcgcgcgcgacgcgaatgtgggcggcgaagtcctcttcacggtgttctga

SEQ ID NO: 2049 - DNA, 510 bp, BradyrhizobiumColbertium
gtggcggtgccgtcgggcgttaccccgaccgtcgacggccagaacgtcaaaatgaaggggccgaagggccagcttcagttcatcgtccacgacgacgtcgaggtgaagctcgagaacggccaggtcaaggtcaagccgcggaccgagaccaaccgcgcgcgggcgctgtacggcaccgctcgcgcccaggtcgcgaatctggtcgaaggcgtcaccaagggcttcgagaagaagctcgagatcaccggcgtcggctaccgcgccgcgatgcagggcaagaacctgcagctcgcgctcggctacagccatgacgtgatctatccaatccccgaggggatcacgatcaccgtgccgaagccgaccgagatcacggtcgccggcagcgacgtccagcgcgtcggccaggtcgccgccgagatacgcgcctaccgtccgccggagccctacaagggcaagggcgtgaagtatgtgggcgaattcatcttccgcaaggaaggcaagaagaagtaa

SEQ ID NO: 2050 - DNA, 363 bp, BradyrhizobiumColbertium
atgtcgaaagccaaggttacgaatgcccggcgcaagcggagtgtgcggctgaagctgcgccgttccgccggcggccgtccgcgcctgtcggtgttccgctcgtcaaagcacatctacgcccaggtcatcgacgacctgaagggcgagacgctggcctctgcctcctcgctcgagaagtcgatgcgcgatggcggcaagaccggcgccgacatcgatgcggcgaaggcggtcggcaagttgctggccgagcgcgccgccgagaagggcgtcaaggaagtcgtgttcgatcgcggcagctatctctatcacgggcgcgtcaaggctctggccgacgcggcgcgtgagagtgggctgagcttctaa

SEQ ID NO: 2051 - DNA, 597 bp, BradyrhizobiumColbertium
atggcagctgaacgcgaacaacgtggtggacgcgatcaacgcggcggcggacgtgaacgcagggagcgcgaggagcgcgacagcgagttcgtcgacaagctcgtccacatcaatcgcgtggccaaggtcgtcaagggcggcaagcgcttcggtttcgcagcgctggtcgtgatcggcgatcagaagggccgcgccggcttcggtcacggcaaggcgcgcgaagtgcccgaggcgatccgcaaggcgaccgagtcggccaagcgtaacctgacgcgcgtgtcgctgcgcgagggccgcacgctccatcacgacatcgccggccgtcacggtgcgggccgtgtctacctgcgtgcagctccggccggtaccggcatcatcgccggtggcccgatgcgtgccgtgttcgagacgctcggcgtccaggacgtggtagcgaagtcaatcggctcgtcgaatccgtacaacatggtgcgcgcgacctttgacgcgctcaagcaccaggattcgccgcgttcggtcgcagcccgccgcaacatcaaggtgtccaccctccagtcgcgtcgtatcggcggcgatgccgaggcggctgccgactaa

SEQ ID NO: 2052 - DNA, 195 bp, BradyrhizobiumColbertium
atggccaaggccgcaaagacgatcaagctcgagcagaccggcagcgcgatccgccgccatcactcgcagcgttcgacgctgattgggctcaagctcaacaagatcggccgcaccagcgaactgcctgacaccccggcagtccgcggcatgatcgagaaggttcaccatctcgtccgtatcgtcgacgagaagtaa

SEQ ID NO: 2053 - DNA, 486 bp, BradyrhizobiumColbertium
atgaagctcagcgatatcgccgacaacgccggctcgcgcaagaagcgcatgcgcgtcggccgcggcatcggttccggcaagggcaagcagtccggccgcggcggcaagggccagaccgcgcgttcgggcgtgcgcatcaaggggttcgaaggcggccagatgccgatgcatcgccgcctgcccaagcgcggcttcaacaacattttccgcgtcgagttcgccgagatcaatctcgaccggctccaggaagcggtcgatgccaagaagatcgacgccggcagcgtcgtgaacgtcgaggccctggtaaaggggggtgtgctgcgccgcgccaagggcggcctgcggctgctcggccgcggcgagctcaagtccaagctcaacatcgaggtgcacggcgccaccaagacggcgatcgcggcggtcgagaaggccggcggctcggtgaagatcctcgcccccgccaaggaagaaggcgaggcggcgtaa

SEQ ID NO: 2054 - DNA, 237 bp, BradyrhizobiumColbertium
ttgttccgctgcagagaccatcttggactttctcccgccgcctgttgcgccgtcatgcccgcggccgggctgctaaggcgcgatgagatcaggatgcctcgtcatcgcgctttaggttgtcgcattaagcatgatcttcccggaaaaccgcttcacacttttccgtatcatgctttggcggacgccggacattatctaaggctcgccttcgataagtctacgttcccgcatgcgtaa

SEQ ID NO: 2055 - DNA, 1332 bp, BradyrhizobiumColbertium
atggtctctgcagcggaacaactggcagccaatctcaatttcggcgcgtttgccaaggccgacgaactgaagaagcgcatctggttcaccctgggtgcgctgctcgtttatcggctcgggacttacatcccgctgccgggcatcgatcccaacatctgggagcaggtgttccgctcgcaggcgggcggcatcctcggcatgttcaacatgttcgccggcggcggcatccaccgcatggcgatcttcgcgctgaacatcatgccgtacatctctgcctcgattatcatccagcttctcaccaccgtctcgccgcagctcgaggccctgaagaaggaaggcgaggccggccgcaagactctgaaccagtacacccgctatctgacggtgatcctggccgcattccagtcctatggtattgctgtgggtctcgagggcgccggcaatgtcgtcagcgagcccggcctgttcttccgcctgtccaccgcgatcacgctgaccggcggcaccatgttcctgatgtggctgggcgagcagatcacctcgcgcggcatcggcaatggcatttcgctgatcattctcgcgggcatcgttgccgagctccccgccgcgctcgccagcatgctcgaactcggccgtcagggtgcgatgtcgaccggcctgatcctggtcgtcatcatcatggcggtcgtcgtgatcgccttcatcgtgttcatggagcgcgcccagcgccgcctcttgatccagtatccgaagaggcagggcggcaacaagatgttcgagggtcagtcctcgcatctgccgctcaagctcaacacctccggcgtgattccgccgatcttcgcatcctcgctgctgctgttgccgaccacggttgcgaacttcaacgcgggcagcgggccggaatggtttcagtggatcaccacgcagctcggccatggccgtccgctgttcctgatcatgtatctggcgctgatcgtgttcttcgcgttcttctacaccgcgatcgtgttcaacccgaccgagaccgcggacaatctgaagaagcacggcggtttcattccgggcattcgccccggcgagcgcaccgccgaatacatcgactacgtgctctcgcgcatcaccgtgctcggcgccatctatctcgcgatcgtctgcttgatccccgagatcctgatctcctacgcctcggtgccgttctatttcggcggcacctcgctgctgatcgtggtcagtgtcaccatggatacggtggcgcaggtccagggctatctgctggcgcatcagtacgagggcctgatccgcaagtcgaagctgcggggccgccgtagatga

SEQ ID NO: 2056 - DNA, 1212 bp, BradyrhizobiumColbertium
atgaacagggagctcgcccgccgaatcgctttgacgatcggcgcgctgcttcttttcaggctcggcacgcagattccgattgccggggtaagcacgtccagcctcttgccgacctcggccctcatcgcccgcctctcgctctttgcactcggccttgttccctatctgaccgctgcgatctttgttcggctgctgtcggtggtgtggcccggcgtgagttcgcttgagcgctccggtgagagcggtcgccgcaagattgcgcgggctacgctcgggctcaccttggttctcgctgcctttcaagcctatggcattgcctcagcgttgacgtccattccgggcctagtcaggagtcccgatggctggttcgtggcggcggcgacggcctcgatggtcggaggcgtcttcgtgctggtgtggttgagcgaacagatcacccgccacggcatcggcaacggcctggctctgatcctgagtgccggctttctcgtctccattccgcaggacgtctcgggcatcgtcggtctcgtgcagagcggggcaatctcgggctatctcgtgctcggccatgccgtgttctggatcgtgaccgtggccgtgatcgtgctattcgaagaggcccggcggaacattcccgtcacatttggcgcgcgcagggtcggtacgcgatacctgcccgcgcgtaatgccgtgctgcctatcaagctcaacagcgccgggtttctgattccggttaccgtggcgccgtggatattctttctgccgctcacctttgctggcctggtcctgggcggcgatcacccggcggtcgcggcggtctacggacatcttcaaatggggcagcctgtgcacctcatgctcgtgtcgatcgccgtgttcgttctggccttcgtctacaccgcctacgtcgtggatcccgagtacaccgccaaatgtcttgccgcccgcgatggcgccattcccggtgttgctcgcggcgaggctaccgccgattatctcgatcgcgtcgtgtcattgacgacggtcgtcggagccgtctacctgacggcgttgcaggtgattccggaggtcttcgacctttacgggatcggactgccttatagtatggtcatcaatggcggtgcggtgctggttgtggtttgcaccgctcttgatatcaaagcacaggtgcgcgacgtatcgctcaccaatccggggggcgtacgccgatga

SEQ ID NO: 2057 - DNA, 867 bp, BradyrhizobiumColbertium
atgagaattatacttctgggaccgccggggtcgggcaaggggactcaggctcagcttctggtgcagcgctatggcatcgttcagctctcgaccggcgagatgctgcgtgccgctgttgctgctggaacgccggtcggactgaaggccaaggagatcatggccagcggcggcctagtgccggacgatgtcgtcgtgggaatcatctccgaccggatcgaccagccggacgccaagaagggtttcatcctcgatggcttcccgcgcaccgtgccgcaggccgaggcgctggacgagttgctcaagcgcaagcatctcaagctcgacgccgtgatcgagctccgcgtcaacgagagcgcgctcttgaaccgcgtcgagacccgggtagcccagatgcgcgaacggggggaggaggtccgtgtcgacgataccccggaggtcctgaccaagcggctggccagctaccgcagccagacggaaccgctgattcactactattccgagcgtcgaaagctttccaccatcgacggcatgatggccatcgacgaggtcacccaggccatccatcgccaactcctggccctcggtgcggttgagcccaagacccgcgcccgaagcgcagcgaaggcggcgcctgccaaaaaggccaagaccaccaagaggacggccaagaaaccgacgaaaaccaccaaaaaaggcgccaaatcggtcaagactggcaagaaggcggccaagagggtcgtgaagggccccaagacggcgaccaggaaaacagccaagaaggcggtcgtgaagaccgccgggaaggccgtcaagaagggagccagaaaggccgcaaaaaaggtcacgaaaaagcgagccaaacgctag

SEQ ID NO: 2058 - DNA, 369 bp, BradyrhizobiumColbertium
gtggcccgtattgccggcgtgaacattcccaccaacaagcgcgtgctgatcgcgctccagtacatccatggcatcggtcagaagatcgccggtgagatcctggagaaagtgaagattcccgtggatcgtcgcgtcaatcagctcagcgacgccgaagtgcttcagatccgcgaagtcatcgaccgcgactatctcgtcgagggcgatctgcgtcgtgaggtcggcatcaacatcaagcgtctgatggacctcggttgctatcgcggcctgcgtcatcgtcgcggtctgccggtgcgcggccagcgtacccacaccaatgcgcgtacgcgcaagggcccggccaaggccatcgccggcaagaagaagtaa

SEQ ID NO: 2059 - DNA, 390 bp, BradyrhizobiumColbertium
atgggcaaggaagccacccgcgttcgtcgtcgtgagcgcaagaacatcgcgtccggcgtcgcgcacgtgaactcgtcgttcaacaacacgaccatcaccatcaccgacgcgcagggcaacacgatcgcctggtcctcggccggcacgatgggcttcaagggctcgcgcaagtcgaccccgtatgccgcgcaggtcgccgccgaggacgtgtcgaagaaagcgcaggagcacgggatgcgcacgctcgaagtcgaggtcgccggtcccggttcaggccgcgaatccgcgctccgcgcgctccaggccgcaggcttcaccgttacttcgatccgcgacgtgaccacgatcccgcacaacggttgccgcccccgcaagcgtcggcgcgtttga

SEQ ID NO: 2060 - DNA, 1032 bp, BradyrhizobiumColbertium
atgggtgaaacagtgacgatccagaaaaattggcaagaactgattcggccgaacaagctccaggtcacgcctggcagcgacccctcgcgtttcgcgaccatcgtcgccgagccgctcgagcgcggcttcggccaaaccctcggcaatgcgctgcgccgcatcctgctgtcgtccctccagggcgcggcggtgcagtcggtgcatatcgacggcgtgctgcacgagttctcctcgatcgcgggcgtccgtgaggacgtcaccgacatcgtgctcaacatcaaggacatctcgatcaagatgcagggcgaaggccccaagcgcatggtcgtgaagaagcagggtccgggcgtcgtgaccgccggtgacatccagaccgtcggcgacgtggtcgtgctgaaccccgatctgcagatctgcaccctcgacgagggcgccgagatccgcatggagttcacggtctcgaccggcaaaggctacgtgcccgccgagcgcaaccgtcccgaggacgcgccgatcggcctgatcccggttgacagcctgtattcgccggtccgcaaggtctcctacaaggtcgagaacacccgcgagggccagatcctcgactacgacaagctgacaatgaccatcgagaccaacggcgcgatcacgccggatgactccgtggcctacgctgcgcgcatcctgcaggatcagctcaacgtgttcgtcaacttcgaagagccgcgcaaggaagtcgcccaggagatcatccccgatctcgcgttcaacccggccttcctcaagaaggtggacgagctcgagctgtcggtgcgttcggccaactgcctgaagaacgacaacatcgtctacatcggcgacctcgtgcagaagagcgaagcggaaatgctccgcaccccgaacttcggccgcaagtcgctgaacgagatcaaggaagtgctggcccagatgggtctgcacctcggcatggaagtgccgggctggccgccggagaacatcgacgagctcgccaagcgcttcgaggatcactactga

SEQ ID NO: 2061 - DNA, 417 bp, BradyrhizobiumColbertium
atgcgtcacggcaaggttcatcggaagctcaaccgcacggccgagcatcggcgcgcgatgttcgccaacatggcggccgcgctgatcaagcacgagcagattgtcaccacgctgccgaaggccaaggagctccgtccgatcgtggagaagctggtcaccctcggcaagaagggcggcctgtccatgcgccgccaggcgatctccgagatgcgcgacaaggatcaggtcaagaagctgttcgacgtgctcgcgccccgctacaaggaccgccagggcggctacacccgcatcatcaaggccggcttccgctacggcgacaacgccgcgatggccgtgatcgagttcgtcgaccgcgacgtcgatgccaagggccaggattccggcccggtgcaggagacggaagccgaggcggcgtaa

SEQ ID NO: 2062 - DNA, 789 bp, BradyrhizobiumColbertium
atgaagatcgacctgtccggcaagaccgctctcgtcaccggctcgaccgccggaatcggcttcgccattgccaagggcctcgccggctcgggcgcgagcatcgtgatcaacggccgtggccaggacaaggtcgatgcggcggtgcgcaagctggaagggacgggtgccaaggcccgcggcatcgccgccgacgtctcgaccgcggcaggctgcaaggcgctcgttagggcagtgcccgagatcgacatcctcatcaacaatgccggcatcttcgagccgaaggacttcttcgatatccccgatgaggattggacgcgcttcttcgaggtcaacgtcatgagcggcgtgcggctgtcgcgcgcgtacatgaagggcatgctcgatcgcaactggggccgcgtcgtcttcatctcctctgagtccgggctcaacattcccgtcgagatgatccactacggcatgaccaagacggcccagctctctgtcgcgcgcggactggcgcagctcacccgcggcaccggcgtcaccgtcaattccgtgctgcctggcccgaccatgtcggagggcgtcgagacgttcgtgaaggatctcgccaggcagaacggccaatcggtcgatgaagccgccgccaatttcgtcaagcagcatcgccctagctcgctgctgcaacgcttcgccagcgtcgaggaaatcgccaacatggtggtctacgtcgcatccaaggaggcgtccgcgaccaacggtgcagcgctgcgcgccgagggtggcatcgtcaacacgatcgcctga

SEQ ID NO: 2063 - DNA, 213 bp, BradyrhizobiumColbertium
gtgggggagggtggtccgccggccaagaccatcatcatcgtcgagtttccctcgatggcccgggcgcgcgaatggtacgcatcggcagaatatgccgatgcactgaagcttcggcagacggcgctcgagcggcaactgctattcgtggaaggtgtagtgccagcttacctgatctgcctactgggtgcttcaatttggcgcccggcaggctag

SEQ ID NO: 2064 - DNA, 1314 bp, BradyrhizobiumColbertium
atgttctggcccctatcgacccgccatagacgtctgttcagcctgacatccgcgcggtggcggcggcaggcgatctttctgctcggtgggatcggagtcggcgccattgcggtggcgctagcgcaagttgccgacctcgcccagcacgcctttgcgttgctgctcgcgaaatcgcgctatgccgtgctggcggtgacgccgctcggcttcatgctgtcggcctatctgaccatccgtctattcccgaacgcgcagggcagcggaattccgcaggcaattgcggcgcggcacctgaccgatcagggcgcgcgagagagcctggtctcgatccgggttgcgatcggaaaggtgatcctcactctgttcggtctgttgtgtggcggctccgttgggcgggaggggccgacggtgcaggtcggtgcttccatcatgttcgcgctcggccgcgtctcgccgcgccgccagcccggattgatcctggctggtgccgcggccggcttggccgcggcgttcaacacgccgctggctggcatcgtcttcggcatcgaggagatgagccgcgcttttgaaacccgcacgtccagcctcatcattgcggccgtcatcgcggccggcctcacctcgctcgcgctcgccggcaattacgcctattttggcagcagcgcgacgacgctggcgcgtggagcggactggctcgccgttccactttgcggggtggccggcggcctcgcgggcggcctgttcagccgcatcgtcatcgcgatggcgcgcggcttcaataatccgctcggacgcgcgatcaagagccatccgctgtggtttgcattcgcctgcggtctcgtcgtcgcgatctgcggcctggtatccggcgataccatctatggcaccggttacgagcaggtgaaggcggcgctggagcacagctcgccgctgccgcaggatttctgcgccctcaagtttcttgccaccacctttgctgcgatcagcggcataccgggcggcattttctcgccgtcgctcgccgtcggtgccggcattggcagcaacatcgcctcgttcttccacgatgcgccgctcggcgcgatcatgctgctcggcatggtctcgtatttcgcgggcgtggtgcaggcgccgattaccgccttcgtgattgtgacggagatgaccgacaatcacggcatggtcgtgccgttgatggcggcggcgctgatcgcgcacgcgacttcgcggatgatctgcgaggagggcatctatcacgcgctcgccaagggattcatcgaacgggcgacgcgtccgcaggaaaagatgcagtag

SEQ ID NO: 2065 - DNA, 1014 bp, BradyrhizobiumColbertium
atgaaagccgtcggctacaagaaatcgcttcctatcgaggaagcagagtccctgatcgatttcgagaccgcaaagcccgaacccaaggggcgcgacatccgcgtcgccgtgaaggcgatctcggccaatccggtcgactacaaggtccgcaagcgcgctgccccgtccgaaggcgagaccaagattttgggctatgacgccgccggcgtggtcgacgctatcggtcctgacgtcacgctgttcaagccgggcgacgaggtgttctatgccggctcgatcctgcgccagggcaccaatgccgaattccacctggtcgacgagcgcatcgtcggcaacaagccaaagagcctgtcgttcgcgcaggccgccgcgcttcccctcacctccatcacggcctgggaattgctattcgaccgtctcggcgcggtaccgggcaagagcgtcgatccgcgcaccctgttgatcacgggaggcgccggcggcgtcggctcgatcctgatccagctcgcccgccgcctcaccggtctgacggtgcttgccacggcgacgcggccggattcgcaaaagtggtgtctcgatcttggtgcacatgcagtggtcgaccacggcaagccgatgaaggagcagatcgaggccttgaagctgccgccggtcgcgctggtggcaagcctcaccttcaccgaccagcactacaaggcgatcgcggagttcatggcgccgcagggcaagttcggcctcattgacgatcccccggagttcaccatgagcactttcaagggcaaggcgatctcggtgcactgggaatcaatgttcacgcgttcatcgttccagacgccggacatgatcgcccagcatcatctgctcaatgacgtctccgacctcatcgacaagggcgtgctgcgcaccacgctcgaccagacctttggcacgatcaacgccgccaacctcaagcgcgcgcatgcgctgctggagagtggcaagtcgcgcggcaagatcgtgctggaggggtggtag

SEQ ID NO: 2066 - DNA, 378 bp, BradyrhizobiumColbertium
atgaaacggcgcgattttgcccgtcgtccgggttgttcggtcgaggcgacgctggaccttatcgacggcaagtggaaaggcgtgatcctctaccacctccagagcggcacgcagcggttcggcgaattgcgccgccggatgcccggcatcacccagcgcatgctcacgaagcagctgcgcgcgctggaggaggacaagctcgtcatccgcaaagtctatgccgaggtgccgccgcgcgtggagtattgcctctccgaactcggcgagagcctcaagccggtcatcgacatcctgaaggcctggggcgagagccaccaggagcggctgtcctgcgcgtcgccgccggtggtcgtgaagaagccgcggcgcgcggcgtag

SEQ ID NO: 2067 - DNA, 1614 bp, BradyrhizobiumColbertium
gtgagcagaacaagaattgcggccacggcaattggtctcgccggcgcgctggcggcctcgcaggcccaggcccaatcggcaagcagcagcgagcaggagatcgcgctcctgaagcagcagttgaagttgctcgagcagaagctcgacaggcttcagagccaaaccgcggcgaatacggcggccacggcaagagccaaagccgaagccaaggccgaggcgaaagccgaggcgcggtcggaggcgaaggcggccgtggccaacgcgaacgcggcgatcccggtcaaagggccggcacctgcatccggtgtcgtcgtgacgatgccgaacaaccggccgaccatctgcaccgccgatggagcaaactgcgtcggcatcaccagccgcctgcactgggatgtcggcggctacgactatcgccccaatacggcggcgactgtgccgcagaagctcgatagcggccaaaacgtccgccgcgcacgcatcggtgtcaccggcaagttcttccacgactggaacttcgcgctgatctacgatttcggcggctcgtcggacggatttggcggcgccgcaccgggatcgcttccgggcggtggcctctccggcgtagagaacgcctatctcagctataccggcctgaagccgttcggcggcaagatggcgatcgaggccggcatcatggatctgccatacactctcgacgaggccacgagctcgaacgacatcatgttcatggagcgcgcctcgccaggcgtgatcgcgaccaacatcggcgccggcgacttccgctccgcagccggtgcgcgctggttcaacgaccagctctggatcggcggctatgtcacgggccccacgacgggcgcgatccattccgcttcgagcgtctcgccgccgggcacgagcgagcaatatggcgccgtggcacgagtcgctggcaatcccatcagcgccaaggactactcggtgcatatcggcgccaatgcgcaatggctgatccagccgccgcgcaatctgatcgccaacacgcagactgtcacgctgagcgatcgtccggaattgcgcctcgacccgacaccgctgatctccaccggcgccatcgccaacgtctcgggtgcgcaggtctacagcgtcgaagccgcggcgacctacggtccgttcatcgtccagggcgagtacttctggtacaacgtcgatcgcacggccaacaccagcgtgccgctggccggcgcaccaagcctgaaattccagggcggctatgcgcaggctggctacgtgctgacgggcgaaggccggacctacaatgcggcgaacgccgcctatcacggtgtcaaaccggcacatccgttctcgctcgatggcggcggctggggtgcgtgggagatcgcaggacgcttctcgacgatcgacctcaacgatcagcttgcaacggctaccggcgttgccggcggacgtcagaccgtctacacgctggcgctcaactggtacgtcaacggcaacgtccgcttcatgctggactatctgcacggcacggtatcgcgacaggcttcgcccgtatcgaccgccgatgtcggctcgaagttcgacgcggtcgcgatgcgcacccagttcgcgttctga

SEQ ID NO: 2068 - DNA, 255 bp, BradyrhizobiumColbertium
ttggaaaagacgccggaatataggcgcgttcgtcccgcaatagaagggcgccggagggcaatattcggcccgtgcccgctgtacccggcatgcaagcgcagcgtgcgattcggcaatttgcctgagcgatcgattggcatgatgcgtgtcatccagcattgtggagtgacgcaggattcggttgcggcgaattggcatcagtgggaaccgcacaaccggacgcagcgtcgcggggcagtcatcgatcccacctag

SEQ ID NO: 2069 - DNA, 1407 bp, BradyrhizobiumColbertium
atgtttcgatcgacctggagcgccgtcgttacggcatcgtgcatagtcttttcggcccatttcaatccggctgccgcgcaggaccgtcgggtcccggcgtcgccggtcgagctgcggctgtcctatgcgccgatcgtgcagcgggtgcagccggcggtcgtcaacgtctacgccgccaaggtggtgcagaaccgcaatccgctgctcgacgatccgatctttcgccgcttcttcggcgtgccgggccagcagcccgagcagatgcaacgctcgctcggctccggcgtcatcgtcgatgcctccggcctcgttgtcaccaacgtgcacgtcattgagggcgcggatcaggtgaaggtgtcgctgtcggacaggcgcgagttcgaggccgagatcctgctgaaggattcccgaaccgatcttgccgtgctccgcctgaaggacaccaaggagaaattcccgaccctcgatttcaccaattccgacgaactcttggtcggcgacgtcgtgctcgcgatcggcaatcccttcggcgtcggccagaccgtgacccacggcatcatctcggcgctcgcacgcacgcaggtcggcatcaccgactaccaattcttcatccagaccgatgcgccgatcaatcccggcaattccggcggcgcgctggtcgacatgagcggcaggctcgcgggcatcaacaccgcgatctattcgcgctccggcggctcgcaagggatcggctttgcgattcccgccaacatggtgcgcgtcgtcgtcgcctccgccaagagcggcggcaaggcggtgaagcggccgtggcttggggcaaaattgcaggcggtgacgcccgagattgcggaaagcctcggcctgcgctcgccgaccggtgcgctggtcgcaagcgtggtaccgactgggcccgcagcgagggccggtctgaaatcctccgacctcatcatcgggatcgatggccagaccgtggatgatcccaacgctttcgactaccgcttcgcaacccgtccgctcggcggcaccgcgcagatcgacgtgcagcgcggcagcaagccggtcaggctcacggtggcgttggagaccgcacccgatacggggcgcaacgaactcgtcatcaccgcgcgttcgccattccagggcgcgaaggtctcgaccatcacgcccgcggtggccgacgaactgcgtcttgacgccgataccgagggcgtcgtgatcaccgatatcggtggcgatactgcggccgcgagcgtcggcttccagaagggcgacgtcatccttgcagtcaacaatcagaagatcagcaagaccgcggacctcgaaaaggcggcaggcgagcgaccgcgcatctggcgtatcacgcttgtgcgcggcggccagcagatcaacgtcacgctgggcggatga

SEQ ID NO: 2070 - DNA, 1236 bp, BradyrhizobiumColbertium
gtgttgtcggaggtcgtcggtcaggatcatatcctcgggcccgatggtgccctgacgcgcatgctggagacgcgctcgctcggttcgctgatcttctggggccccccgggcaccggcaagaccacggtggcgcggctgctggcggacgcgacggatctgcatttcgagcagatttcggccgtgttctccggcgtcgccgatttgaagaaggccttcgatgctgcgcgcgcccgccgcgagatgggcaagggcacgctgctcttcgtcgacgaggtgcatcgtttcaatcgcgcccagcaggattcctttctgcccgtgatggaagatggcaccgtcgtcatggtcggcgccaccaccgagaacccatccttcgagctcaacgcggcgctcctgtcccgcgcccgtgtgctggtgtttcgctctctcgatgccgccgcgatcgaaaagctgttcgcgcatgccgaggctgtggagggcaagaagctgccgctcgaccccgaggcacgcgcggtgctggtgcggatggccgacggtgacgggcgcgcctcgctgacgctcgccgaagaggtctggcggtcggcgcgggcggccgagatcttcaatgccgcgcaactgcaggagatcttgcagcgccgcgcgccgatctacgacaagtcggccgatggccactacaacctgatctccgcgctgcataaatcggtacgcggctcagatcccgatgcggcgctgtattatctcgcgcgcatgttggacgccggcgaggacccgctgttcctggcccgccgcgtcgtgcgcatggcagtcgaggacatcggtctcgccgatccgcaggcgctcgtcgttgcgaacgcggccaaggacgctttcgacttcctcggccatcccgaaggcgaactcgcgatcgcccaggctgtggtctatctcgccaccgctccgaaatcgaacgccgtctacactgccttcggcacggcaatgcaggtcgccaagcaggcgggctcgctcctgccgcccaagcacatcctcaattctccgaccaagctgatgaagtcggaaggctacggcgcagcgtacgaatacgaccacgacacgccggatgccttctccggccaggactacttcccggaatccctgggccgccagaccttctacgacccgcccgaacgcggcttcgagcgggagatccggaagcggctcgattactgggccaagctgcgcaaggagcggggcggcaagtag

SEQ ID NO: 2071 - DNA, 285 bp, BradyrhizobiumColbertium
atgatcgtcagctaccgtgacaagcgcacggagcgatttgccgctggccagcacgtcaaggacttctcggggtttgccggtcaggcagagccccgcctcgatcgattgggcgcggcaacaagcctagcggacctggcggcattgccgggtaatcgtctggaagcctttaggggcgatcgtgcaggacaattctcgatccggatcaacgatcaatggcggatctgttttagttggccggaagggtcgtctggcccaaccgatgtagagatcgtcggccatcagtga

SEQ ID NO: 2072 - DNA, 318 bp, BradyrhizobiumColbertium
atgccccgcacgcccatccatcccggcgaacaactcgccgaagagctgcgcgaactcggcatcacggccgcagagctgtcgcgtcagatcgacgtgccggtcaatcgcatcactggcatcatcaacggacagcgcggcatcaccgccgatacggcgctgcggcttggtcactggtttggcaccagcccgcaattctggatgaacctgcaacagcaatatgagctgcggctggcggagaaggaggtgggcgcgcaggttgcgtcgctgccccgccgcgccaatgcgcagtcgacacgaaagcttggaaagaccgcatga

SEQ ID NO: 2073 - DNA, 1215 bp, BradyrhizobiumColbertium
atgagccgccgcatcaagagaatgaatccaaaaccgcgttcgcgtgacgagcgcgacaactcgcgcccgcatcaggcgcatagcgcgaagagggccgggccacgtcctagtggcaagcccggcagcaagccaccgcgctttgcgggtgagcgcgccgagcggcgtgcgcccaaggtggaactggaaaggtccgcgccggcaaagcctgtcgaagcattgctgccgaccaaggtgcagaccgtcaccgtgacgtccgacgagaacaacatgcgcgtcgaccgtttcctcgaagcgcgctttcccggcctgtcgttctcccatattcagcgcgtcgttcgcaaaggcgagctgcgcgtggacggcaagcgcgtcgacagcaaggaccggctggaggaggggcagagcgtccgcattccgccgctgaagctcgacgccccgaagggcggcggcgagctctcggaggctgcccagaagacgctcaaggcgctgaaggagatgacgatctgggaggacgacgacgtcctcgtgctgaacaagccggccggccttgccgtacagggtgggtcgggcatgacgcggcacatcgaccagatgcttgaggtgatgcgcgatgccaagggccagaagccgcgcctcgtgcaccgcatcgacagggagacgtcgggttgtctcctgatcgccaagactcgcttcgccgcctcgcacctgaccggcgcattccgctcgcggtcggcgcgcaaagtctattgggctctggtaccgggcctgccgaagcccaagcagggccgcatctcgacgttcctggcgaaggaggagggcgaggacgacaccatcatgcggatcgcccagcatggcgatgagggcgcgagccacgcggtgacctattatgccgtggtcgagaccgctggcaacaagctgacctgggtgtcgctgaagccggtgaccggccgaacccaccagctccgcgcccacatggcccatatcggccatcccatcgtcggcgatcccaagtatttcaacatcgagaactggcagttgccgggcggactgcagaatcggctgcatctcttggcacgccgcatcgtcattccgcatccgcgcggcggcgtcatcgacgccaccgcaccgttgccgccgcacatgcagcagtcgtggaacctgctcgggctggatgcaaccagatttgatcccatcgagaacgcgcctgaggaatag

SEQ ID NO: 2074 - DNA, 300 bp, BradyrhizobiumColbertium
atgactcggctctcgatctgttttgtgctgatggcggcgctctgcacggagcaggctgcgcacgcgcaatatgtgtcaccgggcgcctcgcgcctcgctccactatcgccccaaccaccgccgccgccgaagatcgaggcaccgaaggttccgcaattcgacgcgccaccgcgatacaattaccagccgcttccgcgcaattcgttcggcgatcgcttcacaaagtgtctcgacgccgccgcggccgcgggattgggcccggccgatcgcggtacgtatgcacgcagttgcgccaactag

SEQ ID NO: 2075 - DNA, 795 bp, BradyrhizobiumColbertium
atgcgcgaattgttcgaagaggcagcaggccagcccacgccggatccccgggcatcggcgcgcgcgtccgcgcgtccgccgcagcgcaagcgcttctacaaggaggcgggcgttgctgaggccgagggcggtttcgccgtcacgctcgacggcaaggcgatccgcacgccaagcggccgtcaagtgctgattccggcgcggacgcttgccgatgccgtggccgctgaatgggcggctcagggcgaaagcatcgacccggtgagcatgcccctgacgcgcatcgccaacagcgtcgtggaaggcgtcgtcgaccgcgtcgaactcgtcagcgacgacctcgcgaaatatttcgaatccgaccttctgttctatcgcgctggccatcccgaaaggctggtcgcccgcgaggccgcgcattgggatcccgtgctgttctgggcggcggaggcgctgggcgcacatttcatcctgtccgagggggtcatgcatgtgaagcagccggacgaggcgttgaaggcggcccgtgccgccctgccgcaggatgcctggtcggtcgccgcgctccacatggtgacgaccctgaccggctcggcgctgctggcgctggcgctggctcatgacgtgcgcgatgccgggcaggtctgggatgccgcccatgtcgatgaggactggaacatcgagcaatggggggtggacgaggaagcggccgcgcgccgcgccacgcgcctcagggatttcgaggccgccgtgacggtcttggcggcggcaaaggcgctcgcggccaaaggtccttaa

SEQ ID NO: 2076 - DNA, 1569 bp, BradyrhizobiumColbertium
atgccgacgccggtcacgtccattcttcccgtcagtgccgccagctccctggctgatgcgacgacgcccgacctcgtgcttcaggcgggcagcgtcgtcaatgccagggtggtcggcgtgatggccgacaatctggtgcggatcgcgatcgccaacctctcgatggacgtcatgtcggaggtcccgctgacgccggggcagaatctccagctcgcggtctcgcagaacaacggcaccattcggctcgcggttctgggtggggcaggcgaagcggctgccgatcagatcacgctgacgccccgcgcggcatcgttgctggaaagcccgccacttgccccgtcggcgggcgcttcgcgcaacacgctgacgccgttggagcatgctgctgttgcggtggcttcggccgatgccgcgaccagacagggcagccaggccaccctgtttgccaatctggcctccgtcgtcaccggcagcgatctgcccgcgggcttgaagcaggcggtgctggacgtgctggcacagcagacgccgctcaacaccgggctcgacggtggcgatatcgaatccgccttccagaagtcagggctgttcctcgaggcctcgcttgccgcgggggcgccgtcctccggcacgatgcccgatttgaaggcggcgctgctggtgctgcgccatgcgctggcgacaatcgggactgcggtaccatcgacgcaagccgaagcgacgactccggcagcagggggagcggcgcaggccgcatcgccgtcgaccgaaaccgcccaacagccgcaagtgccgcgcggcgccaattccgcagctgccctgcccgccgagatcgctggcagcgcttcgcagccggcggcactgcgaaccatgtccgccggccttgcggcgagcttgctgcaagaggtcgcgcaagagctgccgcgtctggccggcaacgtgccggggtccagcaagggcgtgccggatggccgcctcttcgaggccgccacgcagccgacgcccccgccattccgcggagcgctgccggcgccgcagtccatcgccgcgccatcgctcgcgccggacacgccgcttgccgcgaccgtggatcgcctgctcgacgacactgatgctgcgatcgcgcggcagacgctgttgcagattgcttcgctgcccgatcgcagcggtgcgaccgggcaccggatcgatccggccgtgccgcagtggaatttcgagattccgttcgcgaccccgcaaggaactgccatggcgcagttcgagatctcgcgcgatggtggcaatgaggccgccgatcccgtcgcgcaggcttggcgtgcacgcttctcgctgaatgtggagccggcgggccccgtccacgcgctgatcacgctcaacggcgacaagaccttcgtgcggatgtgggccgagcggccggcgacggcgcagcagctccgtgccggcatcggtgagctcagccaggcgctgacgcgcgccgagctcaagccgggcgacatcctggtccgcgacggcacgccgccgcaaccggcgccggcccccgccggacattttctggatcgcgcgacatga

SEQ ID NO: 2077 - DNA, 345 bp, BradyrhizobiumColbertium
atgagcgattcaaccaagctcgcgatcgcgctgcactacgagaagggcaccaacgccccagtcgtcgtggccaagggcaaaggcacgatcggcgagaagatcgtcgagatcgccagggcgcacgacatcccgatcgaggaaaacgaggtgttggccggcgcgctctccaaggtggagctcggtgaagaaattccgccggacctctacaaggccgtggccgaggtgctggtgttcgtgctgcggctgtcgggccggggaaggcaaggatcaaccgtcatcgtttcaccacgtagcggctgcatggtcgcgccggttctccatgctcacggatatcgcttttgctga

SEQ ID NO: 2078 - DNA, 819 bp, BradyrhizobiumColbertium
ttgctgacccgtcgttctaccctcggtcttctcgctgcagtctcggccctgccatcgcgtgcgcttgcccatgtcgcgccgccgcgcaatgaaatacgggagggcatcgcaaagcgcttcaccgacctcggcacgtcaggcacctttgtcggctacaaggtcgaggactatctcgttgtcgcaagtgacaaggagcgatcgggtgagggcaagctgccggcctcgaccttcaagattccgaacgcgctgattgcgctcgagaccggcgtggtcactgatcccgacaaggacgtgtttccctgggacggcgtcaagcgtccgatcgaggcctggaacaaggatcacacgctgcgcagtgcgatcgcagtcagcgcggtgccggtctatcaggagattgcgcgccgcatcggccaggaacgcatgcagaaatatgtcgacgagttcgattacggcaatcgcgacatcggcggcggcatcgaccagttctggctcaccggggctttgcgcatcgatccggtcgagcagatcgacttcgtcgacaggctgcgccgccgcgcactgccggtgagcaagcgcagccaggatctcgtctgcgatatcctgccggtgaccaaggtcggcgacagcgtcattcgcgccaagtccggtttgctgggcgccgagcgcggcgagccgtcgctcggctggatggtcggctggaccgagaagggcgagtcgcacacggttttcgcgctcaacatggattgcaaggagccgcgtctcgtcggtgagcgcatgccactgacacaggcctgccttgccgatatcggcgcgatctag

SEQ ID NO: 2079 - DNA, 735 bp, BradyrhizobiumColbertium
atgtcgctcgacacgctgatccccgataatccgaacaagccctatgacatgaaggagctgatcctgaaggtcgtggacgagggcgacttcttcgagatcgcggagagctttgccaagaacatcgtcaccggcttcggccgcatcgcggggcgcaccgtcggcttcgtcgccaaccagccgatggtgctcgccggcgtgctcgactccgacgcttcccgcaaggcggcgcgcttcgtgcgcttctgcgacgccttcaacatccctatcgtcaccttcgtcgacgtgccgggcttcctgccgggcaccgcgcaggaatatggcggcctgatcaagcacggcgcgaaactgctgtttgcctattcgcagtgcaccgtgccgctcgtcaccatcatcacccgcaaggcctatggcggcgccttcgacgtcatggcgtcgaaggaaatcggcgccgacatgaactacgcctggccgaccgcccagatcgcggtgatgggcgccaagggcgcggtcgagatcatcttccgctcagacatcggcgaccccgacaagatcgccgcgcgaacgaaggaatatgaagaccgcttcctgtcgcccttcatcgccgccgagcgcggctatatcgacgacgtcatcatgccgcactcgacccgcaaacggatcgcaagggcgctggcgatgctgaaggacaagaagacggaaatgccggcgaagaagcacgacaatctgcctttgtga

SEQ ID NO: 2080 - DNA, 348 bp, BradyrhizobiumColbertium
atgaccgaagacgatccggctgacgagatttccgatatcgaagcgcggatcgaggcgctcgccgaaatcgccgagcgctgccggaagtacattctcgcgtccaagatcgcgatcggcggcggggcgacgctgttgttggtgacgatcctcggcctttttggcttcggtcagaccgccgccttggcatcgatcgcgctggtgctgggcgggatcgtctcgctcggttcgaacgtcagcacgctgcggcagacggacgaggccatcagtgaggcggaggcgcggcgttcggcgttgattggcagcattgatctccgcgtcgttgccgatgcgccgctgaagctggtgtga

SEQ ID NO: 2081 - DNA, 153 bp, BradyrhizobiumColbertium
atgccccgcatcgaatatctcaagcaacagattgcgcgcgccgagcggctggccaaggccatcctcgaccggcaggccgccgagcggcttcaagccttcgcagccgagtgccgcaccgaattgtcggagctgacgttcaagcgggccgcgtga

SEQ ID NO: 2082 - DNA, 654 bp, BradyrhizobiumColbertium
atggccgacctcaccctgaccaccttcaattgggttcccgacgcgccgcgaggcttcgtgcgcgacctccgcgtgcgctgggcactggaggaagccggcctgccctatcgcgttgcgagcgtgcctttcgaggatcgcgggcctgcccacctcgcgcaccagccgttcggccaggtgccgtggctgaccgacggagacatttcgatcttcgagaccggcgcgatcctgctgcatctcggcggactgagcgagaagctgatgccgacggatccgcgcggccgcactgaagcgatgaaatgggtgttcgctgcgctcaattcggtggagatggcgagcctgccctgggcaatgtcgcagttcatgggccatccgaccgatacgccggcgtggaaattcgtcgacgacttcctcaagcttcggctgaagcacctcgagccggtgctcggcagccgcgaatggctggcgggctccttctccgtcgctgacatcctgatggcggacgtgctgcgccctgccgacggcttcgacgggctgatggaccatccggcctgccgcgcctacctcgcgcgcgccaccgcccgtcccgccttcgccaaggctcatgccgatcagatggcacattttgctatggcggatgccaggcgcggggcgtga

SEQ ID NO: 2083 - DNA, 315 bp, BradyrhizobiumColbertium
atgcccgctgccttcttcgtcgttcgcgccatcgtcaccgatcccgccaagcgcgccgccttcgaccggtggtacgagagggaacacctgcccgacgcggtgaaggcgttcggtgtggccaaggcttggcgattctggagtctggatgacccgtcgattcaccaggccatgtatgaattcgaggacgaggcgaagcttacggctatgctcgagggcgatgtcttgaagcagctcgtcgccgacttcaatcgcgactggcccgacgtcaagcgcacgcgagaaatgctggtgctggcgcaggcgtttgcgaggtaa

SEQ ID NO: 2084 - DNA, 309 bp, BradyrhizobiumColbertium
atggagcgccggagttttttgaaacttgcattgggattgacggcgggcgccgccgccttcgccgcatccgcggcgcaggccgcgccgctgtcaccgcatccgctcgctgatcccgcccgcatgccgcaaggcaatcccgacgctcaccccgcagtcaccacgggggaggaagccgccgagctgacgcccgagcaggtccactggcacgggcatcgccgccacgcgcatggccatcaccgccactggggctggcaccgccgtcattggcgccggcatcgccgacgctggcaccgccgccatcattggtaa

SEQ ID NO: 2085 - DNA, 255 bp, BradyrhizobiumColbertium
atgaaatacctgtttgccgccgtcatgctcgcaagcgcggccgtggtcggtttcagcgaagctgccagcgcagctgaaggctgcggccgagggttctatcgcggtccttacggtaattgccgcccgatgcgtggcgctgtggtcgtgcgcccggcacccgtggtgatcgccccggcaccggtcgtcgtggtgccgcgcgcccgcgtgtgcccctacggcttccgctggtacgccggtcgctgccgcccgttctga

SEQ ID NO: 2086 - DNA, 1023 bp, BradyrhizobiumColbertium
atgacggagattttgatgaaccgcatcttctcgactgcacttgctgccgtcctcttcagcatcccgcttgcatcccacgccgccgatacgaagcctcgcgagccctatggcatcgcgctcgaaggcttcgcctatccctaccccgtgcatttcatcccggtcgtcaacgacggcgagcctctcagcatggcctatatggatgtcgccgcggctcagccgaacggccgcaccgtggtgctgctgcatgggcgcaatttcccatcgagctactgggcgcctgtgatcgagatgctgagcgaggcgggttatcgcgtcgtggttccggaccagatcggcttcggcaaatcctccaagccggcgggcgagctgcacttcgacaatctggcgcgcaacaccatggcactgctcgatcatctcaagatcgacaaagccgagatcgtcgcccattcgcttggcggcatgctgggcgtgcgcatcgcgcgggcctacccgaaccgcgttgcccatctggtgctgaccgcgccgatcggactcgaggactaccgcctctacgtgccgccgacgccgacagagaagatgatggagaccgaggacaagctcacggcggagggctaccggaagcaactccagaccaactacgcgatcaagctgccggcggacgcaatcacgccgttcatcgatgcccgcttcaacatcaagggcagcccggattatccgcgctggctgcgcgccttcgtcagctccggccagatgatctaccgcgagccggtcgcgcacgagatcccgctcatcgcgctgccgaccctgttcatcatgggcgccgacgatcacaatgctcccggccggccgctcgcgccggaggcgctgcgggccaagatggggcagaacgctgaactggcgaagatgctggccgcgacgatgcggaatgcgcgggcggaggtaatcccggacaccggccatctcgtcttccttgaggcgccggagaggtatagggagctggtgctgggctttctcggccgctag

SEQ ID NO: 2087 - DNA, 789 bp, BradyrhizobiumColbertium
ttggcaattctgtcacgggttgctcgcaatgacgacttgagtgaggactacgcgcttgcctcgctacaatgcttcgcctatcatcgaactatgaaagcaggcccagacatcgccatggtcgcctcgttggtcggcgaccccgcccgcgccaatatgctgaccgcgctgatgaacggccgcgcgctcactgcgagcgagttggcgcaggaggccggcatcacaccgcagaccgcgagctcgcatctttcgaagctggaggcaggcggcctcgtcgcgccggagaagcagggccggcatcgctactaccgcctcaccgacgacgacgtcgccggcgtgctcgaggggcttgcgggacttgccgcgcgcaccggccacatgcgggtgcgtaccggaccgaaggacccggcgctgcggcgcgcgcggatttgctacgatcacctcgccggcgatctcggcgtgcagatgctggactcgctgcgacagcggcagctggtcaggcagaagaaactggacatcgagctcaccaccgagggggcgcgtttccttgccaaacatctgcagatctcccccgacatgctcagccacccgcgccgcccggtttgcaaggcctgcctggactggagcgagcggcgtcaccatctcgccggcatgctgggcgcgaccctgatgcaacgctttgccgagctgaaatgggccacgcgcgatgccacgccgggcagccgcgtggtgaatttcacccgtatcggcgagaagcaattcgccgcgctgttcgggaatgggcgggactga

SEQ ID NO: 2088 - DNA, 309 bp, BradyrhizobiumColbertium
atgtccgttaccgtgttcatccgttaccagctagatcccttcaagcgggcgcaattcgaggaatattcgaagcgctggcttaccatcatcccgcgatgcggcggcgacttgatcggctatttcatgccgcatgagggcaccaacaacatcgcgtccgccctgatctcgttcgaaagcctggcggcctacgaggcctatcgcaaacggctgcgggttgatctcgacggcatggcaaacttcaattttgccgagtctgagaaattcatcctcgccgaagagcgcacattcctgcgcaaggtggtattgtag

SEQ ID NO: 2089 - DNA, 351 bp, BradyrhizobiumColbertium
atgatcgccgtgatcttcgaggtctggcccaagccggaacatcgccaggactatttcgaccttgcggcggatctgaagcccctgctgcaaaccatcgacggctttatctcggtcgaacgcttcgagagcctgagcgagaagggcaagattctatcggtgtcgttctggcgggatgaggcagcggtcgaggcttggcgcaacacgatggagcatcgccgcacgcaggcgaaaggccgtgccaagatcttctcggactatcatctgcgcattgcgagcgtcgttcgtgactacagcatgaccgatcgtgagcaggcgccgaaggacagccgcgcggtgcacgatgcgcactag

SEQ ID NO: 2090 - DNA, 810 bp, BradyrhizobiumColbertium
atgcatgtgacaactgctgacaagcgcgcggcgttcaggaagatgcacgagagcggctgcttcatcctgcccaatccggtcgatgtcggcagcgccaaagcgctgcagcatctcggcttcaaggcgatcgcgtcatcgagcgcgggctttgcctggaccatcggcaaggccgacaatcacgtcaccgtcgaggacgtctgtcagcatctggcagcattgagttcggcggtcgacattcccgtgaatgcggatttcgagggcggctttgcggttgagccggacagggtcgccgacaatgtcgagcgctgcgtgcgcaccggtgtcgcgggcctgtctatcgaagattcaaccggagacaagaacaatccgctctatgaccacagtctcgcaaccgaacgcatcaaggcctcgcgcaaggcgatcggcgacagtggcacgctgttggtcggccgatgcgaggcttatctctggggtgtcaccgaccttacgctcgtcatcgatcggctggccgcatacgccgatgccggcgccgactgtctctacgcgccgggtctgaagagccgcgaagacatcgctgcggtggtgaaggcggtacatcccaagccgttcaatctcctgatcggcgcgtccgggctctccctgcaggaagcccaggatctcggcgtgcgccgcatcagtgtaggaggctcgctcgcccgcgtcgcctggggcggcttcatgcgcgccgcaaaggagatggccgagaagggaacgttcaccgagcttggcagcggctatcctggcggcgaactcaacaagatgttcagctag

SEQ ID NO: 2091 - DNA, 399 bp, BradyrhizobiumColbertium
atggctgacgaccgttttcccaacgatccgtaccgcccgaacctcgccgatgatgagtattctcgcacggcgcgccgggataccgaccttcaggccgatccccaacttggcgaaggccctgcttccagcggcaagatcgcggtgtttgcagtggcgatcgccctggtgctgggcgccgtgttctacggcctgaacaataccagcacgaccaatcaggccagcaacacgccggcctcgcaaaccgctcaacaggcgccttccaatccggctgcacctcccggcatgcgagacgtgacgccgcggaacaacaccgagccgggcgtaacgacgggtgctgcaccgagcaggccggctgccccggcgccggagtcgcagacgccgcctgacggcgcgaagtga

SEQ ID NO: 2092 - DNA, 192 bp, BradyrhizobiumColbertium
atgtcggcgtttctcggtcactatccgctggtctgggtggccaatccaatctacctcgcactgccgggtggagcggcgctgctgaccatcctgatcgcgcggctggtgcatcggctgcacctcgccttcatcgtgctcgatgccatcgggctcgtcgtgttcaccatgatcggctgcaacgtcggctggtag

SEQ ID NO: 2093 - DNA, 288 bp, BradyrhizobiumColbertium
atggatgcctcgctgccgatcgtgatcgtctcgggcatggtgaccggctgcgccggtggcgtgttgcgcgacgtgctctgcaacgatgtgccgctgctgtttcggtccgagctctatgcaagcgtctcggtcgtgacagggttgttctatgcgacggcgttcggcctcaatctcaacgccgaactctggacgattttgaccttcgtcctcggcctcagcttccgcctgctcgcggtgcgctacaaatgggaaatgccgaaattcgtctttacgggagacgagcgttag

SEQ ID NO: 2094 - DNA, 3492 bp, BradyrhizobiumColbertium
atgggcataaaccagggtccgatcagtctcgatcaaaaatacacccagcagacgggacacgtcttcaccaccggcatccaggccctggtgcgcttaccgatggcgcagatccggcgcgaccgcgccaatggcctcaataccgccggcttcatctccggctatcgcggctcgccgctcggaggctatgaccaacagctcttcgccgcgcgcaagcacctcgaacagtacaacatcaagttccagcccggcgtgaacgaggatctggcggccaccgccgtctggggatcgcagcagctcaacctctcgcccggcgccaagtacgacggcgtcgtcggcatctggtacggcaagggccccggcgtcgaccgctgcggcgacgtgttccgccacggcaatgccgccggctcggccaggaacggaggcgtactgtgcctcgccggtgacgaccacggcgcaaagtcctcgactgtcccgcatcagtccgaccacgccttcatgtctgcactgatgccgtatctctatccctcgagcatccacgagatgatcgagatgggtctgctcggcatcgcgatgtcgcgctattccggctgctgggtcggcatgaaggtgatcacggagacggtggagaccaccgccgagatcgatctcagcgacgagatgaagcccttcatcatcccgaccgacttcgagctgccgcccggcggcctcaacctgcgctggcccgacgaccgtttcgagcaggaccgccgcctgcaggactacaagggctttgccgccatcgccttcgcgcgcgccaacaaggtcaaccggatcaccatggattcgccgaacgcacgcttcggcatcatggcgtcgggcaagagctacgaagacgtccgccaggcgttgcgcgagctcgggattaccgaggaggtcgccgccaagatcggactgcgcctctacaagatcgggatgccctggccgctggagccggaaggcgtgcatcaattcgccgtcggtctcgaggagattctcatcatcgaggagcgccgcgagatcgtcgagaaccaggtcaagcaggtgctgttcaactggcgcgacgacgtccgcccgcgcatcgtcggcaagatggacgagcacgacaagcgcttcctcaccttcgccgcggagctcagcgtcgcttcacttgcgacctcgctcaccgagcgtctgctccggcttgatctcaaccccgagattgcggagatgcttcgcgccaaggccgattggttcaacggccgtcaggcgtcgcagatgatcccgactgcgcccgtctcccgcacgccgtatttttgctccggctgtccccacaacacgtcgaccaaggtccccgaaggaagccgcgcgcttgccggcatcggctgtcacttcatggcgctgtggatggaccgctcgacggagaccttcacccatatgggcggcgagggcgtgccgtgggtcggcatcgcgcccttcaccaacgaaaaccacatcttcgccaatctcggcgacggcacctatttccactcgggaattctggcgatccgtcaggcggtcgcctccaaggccaatatcacctacaagatcctctacaatgacgccgtcgccatgaccggtggccagcgccatgacggcgatctctcgccgcaacagatcacccatcagctccacgccgaaggcatccgcgagatctatctggtctccgaggcgcccgatgcctatccggccgataccattgcgcccggcgtgaagaaatatcatcgcgacgagctccagaacgtcatgaagatgtgccgcgagttcaaggggacctcggcgatattgttcgtgcaaacctgcgcggccgagaagcgccgccgccgcaagcgcggcctgatggaggatccggcgcgccgcgtcatgatcaatcccgcggtctgcgaaggctgcggcgattgctcggtgcagtcgaactgcatttcggtcgagccgctggaaaccgagtttggccgcaagcgtgccatcaaccaatcgtcctgcaacaaggattattcgtgcctgaagggcttctgcccgtctttcgtcaccgtggacggaggcaagccgcgccaccgcgcacccgcggaactcgccgacatcggtgagctgccggagccggcctcgcggcccacactggacaagccctacaatatcgcagtcggcggtgtcggcggcaccggagttctcaccatcggcgcgctgctcggcatggccgcgcatatcgagggcaaggcttcgatgatcctcgacatgtcgggcctggcgcagaagggcggcgccgtgctcagccatgttcgcctgtcggatcatcccgcggaggtaacctgctcgcgcatcgtcaccggtacggcggacctcgtgcttgccgcggacgaggtggtcgcggtcgccaaggacacgatctcgctctgcgacaccagccgcacccgcggcatcatcaacagccatgtcattccgaccgccgacttcgtcctcaaccgcgatttcaacttccagactcggaagctgcacgcgctgctggagaccgcgctccacaaggactccgtcttcttcgacttcaccaagccggccgagcagctcctcggcgatgccatcgccaccaacatgatgatgatggggtacgcctatcagaagggtctcttcccgctctcggcggagtccatcgagcaagcgatcgaggtcaacggtgtctcgatcaagatgaacaaggaagctttccgcctcggccgcctcgcggtcgccgatccgaagcgactttccgacatgctcaaggggacggacgaggtggtcgcgcccaagaccctggacgcgatgacgctggatgaggtcatcgagcatcgcgccaagcatctcacggcatatcagaacagccgtctcgccaggcgctatcgcaagctggtcgaccaagtccgagatgccgcggtgaagggcggctatggcgacgcgctgccgcgcgccgtcgcggtgaactatgccaagctgctcgcctacaaggacgagtacgaagtcgcgcgtctctacaccgacggcgccttcgaacagcagctccgcgagcagttcgagggcgacttcacattcaacttcaacctggcgccgccgatcctggcgcgtggcgtcgatgccctcggccgcccgaagaagcgcaccttcggcccgtggatgctgaacgttttccgcgtgctggcaaagttcaagttcctgcgcggcaccctcttcgacgtcttcggtcgcagcgccgaccgcaagctcgagcgcgacctcatcgccggctacgagaaggatgtcgccaccgtgctcggcctcctatcgccggtgacgatcgacaccgcggtcgaactgctctcgctgcctgatcgcatccgcggctacggcccggtgaaggagaaggcggtggcggatgcaaaggctcgctacgcccagctcgcggcggacttggcaaccccgccgcctgcgcccagacagatcgcggcggagtag

SEQ ID NO: 2095 - DNA, 171 bp, BradyrhizobiumColbertium
ttgcgtggtttttctgaaccgcggtgggctgattggcaagcgtggaaatattccgccccgcgagagggcagcgagtgggcgcaagtggagaggttctcgccggcctccgcgtcgtcattgcgaacggagccgccgatcatccattctgcaaaacaaccccatgcacagtag

SEQ ID NO: 2096 - DNA, 1158 bp, BradyrhizobiumColbertium
ttgaccatcaagggcaaggcctacatcgccgggatctacgaacacccgacccggcatgcgccggacaaatccaccgcccagctccacgccgaggtcgccaagggcgcgatcgaggatgccgggatcagcaaggacgacatcgacggctatttctgcgcgggcgatgcccccggcggcgcctggccgatggtcgattatctcggcctcaacaccaagaagctccgccatgtcgattccaccgagaccggcggctgttcctacatcatccatctcggccatgccgccgaggcgatcgcggcgggcaaatgctcgatcgcgctgatcacgctggccggcaagccgcgcaccggcgcgatgccgccgcgggcgcagggcgccgaagccgatttcgagacctcctacggcgcgaccacccacaatgcctatggcatgtgtgccatgcgccatatgcacgactatggcaccaccagcgagcagctcgcctggatcaaggtcgcggcctcgcatcacgcgcagtacaatccgcatgcgatgctcaaggacgtcgtcaccgttgaggacgtcctgaattcgccgatgatctccgatcccttgcatcgcatggattgctgcgtcgtctccgacggaggcggcgcaatgatcgtgacgacgcccgagatcgccaagagcctgaagaagccgctggtgcggctcatcggtcacggcgaggcgatgaagggcccgcgcggcggcaaggacctcgatcttacatactccgccggcgtctggtccggcccgcgtgcgttcgaggaagccggcatcacgccgaaggacatcaagtacgcctccatctacgacagcttcaccatcacagtcctgatgcagctggaagacctcggcttctgcaagaagggcgagggcggcaagttcgtcgccgacggcaacctcatctcgggcgtcggcaaactgccgttcaacaccgacggcggtggtctttgcagcaaccatcccgtcaaccgcggcggcatgaccaagatcctcgaggccgtgcgccagctgcgcggtgaggcgcatccgaaggtgcaggtcaagaattgcgatctcgccatcgcccacggcactggcgggcttctcggtgtccgccacgccgcgtcgacggccattctggagcgcgtgtga

SEQ ID NO: 2097 - DNA, 390 bp, BradyrhizobiumColbertium
atgagcgaagcaaagaagtatccggccccggtgacgaatccggagaccgcagcgttctgggacgccgccaagcagggcaagttcatgatcaaacgctgcaccgcgtgcggcgaagcccattacttcccgcgttcgatctgtccgttctgctactcggacaagacggtgtgggaggaagcgtcgggcgagggcacgatctacacctacagcctgatgcggaagtcgccgaccggtccttacgcgatcggctacgtcacgctgaaggaggggccgtcggtgcagaccaatttcgtcgactgcgatctcgaaaagctgaagatcgggcagaaggtgaaggtagtgttcaagccgaccgacggcgcgccgctgccgttcttcacgccggcctga

SEQ ID NO: 2098 - DNA, 861 bp, BradyrhizobiumColbertium
atgtccgccagatatgaagaactcaagggcctgaagaacatcggccagaaatatgcctacaccgaccgcgaagtcatgctctacgcctacggcatcgggctcggcgccgatccgatggatgagaaggaactcgccttcgtcaacgagggcgcctacacgccgcgaccgctgaaggtggtgccgacatttgcgtccgtggccgcctggggctcgggtccgggcgagatgaacctcaaccgcgtcatggttgtcgacggcgagcgcgacatcacctttcaccagccgctgccggtggaagcgaatatcaccgccgattcctccgtgctcgaagtctacgacaagggcaaggacaagggcgtcgtcatcgttcaccagaccgtactgaagaacgagaagggcgagaagctggcaacgctggtcgcctcgcgcttcgcgcgcggcgatggtggcttcggcgggccgaacctgacgcagccagatccgcacaagattccctcgcgcagcccagacaagaccatcgatatcacgacgcgccccgatcaggcgctggtctatcgcctttgcggcgaccgcaacccgctgcactcggatcccgagtttgccaagaaagccggcttcccgcgccccatcctgcacggaatgtgcacctacggcattacctgccgcggcgtgctccagacctatgccgactacgatgccagcgctttccgccagcacgtcgcgcggttttcttcccccgtctatcccggcgagaccgtaaccatggacctctggaaagacggcaacgtgatctcgttcgaagccaaggtagagtcgcgcggcgtcacagtgatcaagaacggcaagacggtcctgggttag

SEQ ID NO: 2099 - DNA, 879 bp, BradyrhizobiumColbertium
atgggactactcgacggaaaggttgcgctgatcaccggcgcgggtggcgggctcggcgaagcctacgcaaagctgttcgcgcgggaaggggcctccgtcgtcgtcaacgacctcggcgggccccgagacggctccggcgccgacaagtccatggcgcagcaggtcgtggacgcaattacggcggaaggcggcaaggcggtcgccaacggggccgacatctccaccatggagggcggtcagtcggtgttcgacgatgccattaagcacttcggccgcgccgacatcctcgtcaacaacgccggcatcctgcgcgaccagacctttgccaaggcctccgaggccgattgggacaaggtcatcaaggtgcatctgaagggcaccttctgttgcacccttccggtgtttcgctggatgcgggagaacgggggcggcgtcatcgtcaacacctcttcgacctcgggcctgatcggcaatttcggccagaccaattacggcgcggccaagggcgggatctggggcctgtccaacgtgttggcgatcgaaggccggaagtacaacatccggatctggacgctggcgccgggggccctgacccgcatgaccgcagacctgccccgctataaggagaaccccggtgcggcgctggggccggacggcatcgcgccggccgtgctatacatggtcagcgatttgtcgggtgaccagaccggcaaggtgctgggcgtctccgggccgcgcggcgtgcgcgagatgcggatgatggaaatggaaggctggaagccgccgcattcgggctggaaggcccaggacatcgtcgatcacgccaaggagattttcttctccgaggagcagatcaagatgggggcgaggcggttttag

SEQ ID NO: 2100 - DNA, 954 bp, BradyrhizobiumColbertium
atgaaactcaccgccgaggccaagggcactttcgcaatcgcgccgacgccgttccacgacgatggccggatcgacgagcgctcgatcgaccgcctgaccgacttctacgaggaagtcggctgcgacggcgtaacggtgctcggcattctcggcgaggcccccaagctcgatgctgccgaggcagagcaggtggcggtgcgcttcgtcaagcgcgccaagaagatgcaggtgatcgtcggcgtctctgcaccgggctttgccaccatgcgctcgctggcgagggcttcaatggatgcgggcgcggcgggcgtcatgatcgcgccgccgccctcgcttcgcaccgacgatcagattgtcggctacttcaagcaggccgcggaggcgatcggccccgacgtgccctgggtgctccaggattatccgctgaccctgtcggtggtgttcacgcctgccgtgatccgcaagatcgtcatggacaacccgaactgcgtgatgctcaagcacgaggactggccagggcttgagaagatctcggcgcttcgcaacttccagaaggacggatcgttgcggccgctctcgatcctctgcggcaacggcgggctgttcctggatttcgagatggagcggggcgccgacggcgccatgaccggttacgccttccccgagcttctgatcgacgtcgtgcggctgtcgaaggagggcaagcgcgacgccgcgcatgatctgttcgacgcgcatcttccgctgatccgctatgagcagcaacccggcgcgggccttgccgtgcgcaaatacgtgctgcagaagcgcggcgtcattgcctccagcgcccagcgcaagcccggcgcgacaatcacggcggcggcgaaggccgaggtcgagtacctgctgtcgcgcgtcgcccgtgccgacaagcgcgccaatctcggcccgcaatccagcgccgcaggttag

SEQ ID NO: 2101 - DNA, 798 bp, BradyrhizobiumColbertium
atggccgagacatcagcatcacgcccggcctccacgatcctcctgcttcgggacggcgcggcacacgaaatcgaggtcttcatgatggtccgccatcatcagatcgaattcaactcgggtgcgctggtgtttccaggtggcagcgtcgatgctggcgacaaggagatcgtcgcccgcgccggcctttactcgggcggcgaaggcttgagcgaagcggaccgcggttttcggatcgccgcgatccgcgagacgttcgaggagagcggcatcctcctggcgcggtcgaaggataccggcgcgccaatcgatgccaggcgtgccggcgagattgccgacgcgcaccgtgttgcgctgaacgaacacaagatcggcttcctcgacattctcgccgacaacggtctccagctcgcgctggacacgctcgtgccatacgcgcactggatcacgccggagggcttgccgaagcgcttcgacacctggttcttccttgccgccgcaccgccggaccagctcggcgcgcatgacgggctcgagtccaccgattccatctgggtctcgccgcgcgaagcggtggaggggggcgagagcggccgcttcaagctgccgttcccaacgacgcgcaatctgatccggctggccaagcagccaaacgtgagcgcggcgatggagcacgcccgcggcctgtccatcgtcacggtgatgccggtcatgaccaagactgaaaccggccgtcagctccgcatcccggccgaggccggctatgacggcgaggtgttcgaggtaggggcagccggctag

SEQ ID NO: 2102 - DNA, 738 bp, BradyrhizobiumColbertium
atgtccgccgaattgacgccgtccccagagaaaaggcgaacattttcgctctccatcggccagctcaccttcggcagcttcctgttggtgctggcggtgatcatcgttacctcgaccgcgagcgtgatcgcgatccggcacatcgacaccaccttcgccgagctgcagaggctccagagcgtcggcgacctcgccgaggatatcgaccgccgcatgaacgagttgcgcctcgccgcgcgtgactttgtcacagacccaggcgccggcattcagttccagcaggtgggcgaggcggcctcgaccctgagcgagatcctgaagaagacccgtatcgagctcgcgcccgagcagcaggacatgctcgacggggtcaccgagcggctcgccacctatcgtaccggcttggagcggatctcgacgctgatcgaccgccgcgcccagctgctcgccggcctgccgccgctgcgcgagcaattcgatgcagctgtcgccggcactgcggaccgggagctggcgtcgcacctctccgaagcgcagagccggatcgcgctcgggctgctcgcgcgcaacccctccgcggccgagcaagcggcgcagagcatgcgaacgatgggcatcgccgatcccaggctcaagtccgcggtgaacgactacgccgaggcgatcatggcggtggcggtccggggcggcagatcgccgacattgatcgcgaggtcttgggaactgagggccgattga

SEQ ID NO: 2103 - DNA, 1953 bp, BradyrhizobiumColbertium
ttgatcggccgcgtcaccgaattgctgcgcgaagtcagctcccggcgcggacacgtgctgtcgcgcgactttgcccgaaccctgaccgaggcgcgatggcagagcatcgtgctcggtacggtcggcgtgttgatcggtatcggcgcttcgttgttcgtggtgcgcaggacggttcgtccgctcgcccagatcgcacgatccattcgcgcgcttgcggccggccggaaagacacctcgattccatccgccgacctcgacaacgaaatcggcgacatcgcgcgggcggccgaagtgttccgccgcgcgctggaggaggccgacaccgcgcgcgaggcggcggtgcgcgctcttaccgagcagcgcctcgccgaggagagctaccgcaagctgttcgagggctcggtcgacggcatctatgtgacgacgcccgccggtgacctcctcaacgccaatccggcgctggcgcggatgatgggttatgacagcccacagcagctcatcgacagcatcaacgacatcgcccacacgatctacgtccatccagaggcgcgcgccgaataccagcggctgatggcgcgcgacggcatggtgcgcgagttcgagtaccaggtgcgccagcgcagcggcaatatcctgtggctctccgacagcgccacggccgtgcgggacgagcagggcagtatcgtccgctatgagggcacgctgcgcgacatcaccgaccagaagcgcgcggaagacgccattgccgaaggccggcgcctgctccagcaggtcatcgacaccgtgcctgcggtgatcaacgtcaaggaccgcaacctgcgctacgtgctgatgaaccgctacatggcgggcattttcggcatcgagccccgcgatgcgcttggccgcaccaccgcagacttgatgtcgcgctacggcgcggcgaagaccgacgagaacgacaagcgcgtgctccagctccgcaaagggctcggtttctatgaggaggagtacaaggacgcggcaggcaacatgcggcaatggctggtcaacaagctgccgctgctcgatgccgagggcgagatcgagcggatcgtcaccgttgcgctcgacatcggcgagcgcaagcgcggcgagcaggagatgcgcaaggccaaggaggctgccgagaccgcgttgcgcaatcttcgcgagacgcaggcctcgctgatcgaggccgagaagctcgccgcgctcgggcgcctcgttgccggcgtcgctcacgaggtcaacaatccggtcggaatcagcctcacggtcgcgtccgcgctggagcgcaagaccgcagtgttcgccgccgaagtcgagcggggggagctgcgccgctcgacgctcaacgatttcctcggtacaagccgcgatgcatcctcgcaactcgtctccaacctcaaccgtgccgccgaactgatccagtctttcaaacaggtcgccgccgaccgcaactattcggaccagcgcacattcgatctcggcgacctcaccgagcaggtggtgatgagcctgcggccgggcctgcgcaagcacaatctgacgctcaacgtcgagtgccagccggacctgaccatgaacagctatcccggcccgtacggccaggtgctgaccaacctgtttctcaattcggtggcgcacgccttcccggatggcaggccggggaccatcgagatccaggtgcgcgaatccggcaaggacaatgtcgagatcatcttttccgacaatggctgcggcatgtcgctcgacgtccgccgccgcgccttcgatccgttcttcacgacgcggcgcgaccagggcggcaccggtctcggcctgcacatcgtctacagtatcgtcaccaaccggctggggggccggctcgatctcgattccgagccggggggcggcacgcgcatccagatgatcttgccccgggtggcgccgctggagcaggcggccgaatag

SEQ ID NO: 2104 - DNA, 354 bp, BradyrhizobiumColbertium
atgaagaacggcctttattcaattcacgtgaccctgctcgatggtcgagtcggcaagggcagcggcgtgattctgttccgcgacggcaagattcttggcggcgacgcctacctctattacaccggcagctacacggtgaaggacaacagcaccttcaaaggcgaagtgctggtgcaacggcacacgacgcctcggggcgatgacaacccactgttcggcggccccgcccccgtcggcatcggcgtcaccggcagcttcaccgagacgcgcggggagatgaccgggactgcgctggtcggcaaggccagccagatctttggcgccacgctgcacaagctcgcggacgtcgattag

SEQ ID NO: 2105 - DNA, 387 bp, BradyrhizobiumColbertium
atgccattcgccgtcacttgggatcatgtccacctgcgcagccccgatccggaggccacggcggcttggctgcgggacatccttggtggcgagatcgctcgcgcgccgggacggatcgacgtgaacctcggcggcgccaggatcttcatcgcacctctagagggcgacagcgacgtcaacccgccgcccccgcacccgcatcagggtctcgaccatttcggccttgtggtgcaggacatcgacgccgtggccgccgagatcaaggccaagggtgtcacctttacgcgtgagccgacgaccatccggcccggcgtacgcatttgcttcatccaaggccctgaaggcatctccatcgagctgctcgagcgcgacaagaagtatagctga

SEQ ID NO: 2106 - DNA, 573 bp, BradyrhizobiumColbertium
atgaacgccaggctcgaccggatcggatttgggcgcctcgccgggaccggcgaacggctggcacgggccgtgacgatcgccagtgtctcgtttggccgcagtcttctctggctgctggcggcgatcatcctgggttgtggtgtctggattttgctacctttttccagaggcaatagtgctgagccggcgacgccggagctggcctctgttgaggcgcttccgtcggacgatgcgtcggtagacgtgcggccggcatcccaagctcaggcgccggcgagggcagaactcggtcgtctcaggatctcatcgcagacctggcgccgcggcggcctcggttcgaaggccctggtgacgttcacgctccgaaacgacaacgactatgccgtaaaggatgtcgagatcgtctgcgccttcacgcggcatgacggcagtcatcttacgaaccgcacccgcgtggtggccgatccggtcagcatgaagagccgcaagacctttgtacgtgtcctcgtcggcttcgttaacgtgaatgccgatcatgcaaattgctcgctggttgcagcgcgccgtgtctaa

SEQ ID NO: 2107 - DNA, 534 bp, BradyrhizobiumColbertium
atgcccatctttaggtatttcattttcgtcggtggagccttgctcgcactgctgttcgcggcggatttcgttctcccgccggcgccggtcacgcaagccatcgcaaccgccggcatcgatcagcccctgatccgaatccggtccaatcggcacctgcctgaacgcgtggtgctcgacaccagccagccgacgatagccgcgcccgcggtgcagaccgccgctgttgcggcaccggagcccccggcgcaggagagcctaacgccggctttggccgagatgtcggccaagacccgggtgcgcgagaccttcgcccagttcacgccggcgccgaggaccgagactgccgcgaccaggaagaccgagacgaggaccgagccgagatcgcaagctcgtcagcttcaggctgctcaggctcaaacttctccggcccagcccaagcgcaaagttgccaggacacctccgccgcagcccggtcgtcccatgatgctggtggcccagcagccgcatttcggccttttcaacaacacttggtga

SEQ ID NO: 2108 - DNA, 74 bp, BradyrhizobiumColbertium
gcgctcgtagctcagctggatagagcatcggatttcgattccgagggtcggaggttcgaatccttccgagcgcg

SEQ ID NO: 2109 - DNA, 1050 bp, BradyrhizobiumColbertium
atggcgatgcttcgacattcatttgattgtacatttcagcggctggcagaaaccatgttgttcgacaaccttgctccctcctccgcgcttcaactgatcggcttttctgacgtcgattcatttcggccgatcgagacgatggaggatgcgagaagcattccgctcgacatccccaacttcgcgccggtccgcgctgtcgtcgccctgccggcgtgccgcatcatcgtgatgaaatcgttcgcgcgcattctcgataccgcctatcgcatgccgggcgggatggtgatcctgtccatgaccgatgacgttcaggccagtttcaagggagtggatatcgacgcccgcttcttcgctgcgctgcgcggcaacgacgagtgccatttcgtcgaaccccaatccaatcatcatgccatgatcatcttctctcccgagctgagagaccggggctggttcgacaatgccgacgacttgcgggcccatgtcgcgaaccggcccgcactgctccacacgcggcaactcctgctcgacatcctacgcacggcgtcagtgcagccgggcctgttcgaaagcacagaggctgcggcccatcttcaggaaggcttgctgctcgcgctcgacgacctgtttcgaatcgaatcgttgtcggaccggatcgcctcggtccagagccagcgagcgatcaagctcgtgcagcggatcgacgacttcttggcggccgatccgacagcacccatctatacggccgacctcgccggcgagtttggcgtctcggttcggacgctcggcggcgccgtcagcaaggtgcgcggcatgagcttgcaccagtatattcgcctgaagaggctgtgggcgactcgcgcccgcctgcttaggggcggcggcgtcaccgtcgccacctgcgcgcgagcccagggcttccatcatctcggtgagtttgccgcggcctaccgcgcgatcttccaggaggcgccctccgacacgctagcccgcggacgtaggagccctcccgccggcccacacagcatgcgtacagtttctctagacctttag

SEQ ID NO: 2110 - DNA, 282 bp, BradyrhizobiumColbertium
atgactctcaagactggcctcgtcgccgcgtccctgttggttggcgccctcgcggcatcgcaggcggcgtccgccatgccgatagcgccggctcccgcgacaccgcagatgtccggcgtcgagcaggtgcggatggtctgcaacgcgtgggggcagtgctggtggcgcccgaactactatggatattacgggcctcggccatattaccgccctcgctattacgggccgccgcgctattacgggccgcgctactatggctattacggctatcgccgctggtga

SEQ ID NO: 2111 - DNA, 435 bp, BradyrhizobiumColbertium
atgctgccgggtaaggttagctggatgcgaatcattccaaatctgtcgatctcgccggagaaggtcttcttcgtcatcgcgaaatcgcgccgctccgatagcgaagcggccggaggcggcgtcatcctggactcaggtgacgacgacatgagctacggacgcggcggacgtggcgaaaccaccgaccgtacggagttggcgggcttcatccgcgatctcaacgttgacgagcagatcgatctggtggcgctgacctggctcggccggggcgacggtgatctctctaattggcgcgaactgcacgcccaggccgcacaggcgcacaatcagcgcactgcttcctacctgatcggcacgccgatgcttgccgattatctggaagaggcaatggcgcagttcggcaagtctttcgaggaattcgaagaacacctctga

SEQ ID NO: 2112 - DNA, 462 bp, BradyrhizobiumColbertium
atgaacaagatgagaatcgagaagggtgactggctggtcgtgtgcgacgggcgcaaggcgctgattctggagaacgtcggcgacgagatgtttcccaatctacataccagagaagtgcacgagcagcccaacccctcgaccgccgcgcaaggtagcgatgcgcccggccgcttgcatgcggcggtcggtggatcgcgcagttcggtcgagcagaccgattggcacgatgaggcggagcgcgccttcctgcgcggacttgctggccggctcgatgctgccgtcagctccggcgagaccaaggcgctgaccatggtggcctccccgcgcgcgctgggcatgatccgcgccgactattctgacacggtgcgtaaggcgctccagggtgaagtcggcaaggacctcgtcaagctgccggtctacgagatcgagaagcaattgttgctgtcgggcgccgcgaaatag

SEQ ID NO: 2113 - DNA, 264 bp, BradyrhizobiumColbertium
atgagcaagttgacgtttgtagccgcgatcgtggccctgacggctgcagttctggctcccggccttgcggaagcgcgcggacaccatcggtatcaccgctcttacgccaacccgctgccctatccgatcagctatctgcacaattacggaccgggcctcacccccggcacctttgcctattacgacggcccgtcgaccaaccattgctatcgcagcgcggccgcgtatatcggccaggatggacggcggcacccctgccactga

SEQ ID NO: 2114 - DNA, 555 bp, BradyrhizobiumColbertium
atgaccaaagagtatttcggtaagaatcctgtcgccggcgccgaggatcatttctctgggtccctggaagtcggtggtattcctgaaggccgtcgccgtcacctcgccatgcgcatcacgcttctgagcctgctgttgctctgcctcgccgccgtaactccggcgcgcgccgaactgcgcatcacccgcgaccatggcggctatgtcgaggagtacaaggccaagtacaagcgggtgcgcgagaagggcgagcgcgtcatcatcgatggcatctgcaattcggcctgcacgctcgtgctcggcatcgtgcccatgaacaagatctgcgtgacgccgcgcgcgagcctcggtttccatcaggcctattacgacaaggcgttcaccttcggcatcaaggtcaccagcgccgaaggaacctccgatctcatgtcctactaccccgacacggtgaaggactggattcgccgcaatggcgggctcaccaccgacatgaagaagatcaagaacggtgtcgagctctggaggattgtcaatccctgtccggaagaatggtga

SEQ ID NO: 2115 - DNA, 873 bp, BradyrhizobiumColbertium
atgaaccataaccaagaaatcctggccgcccgcgccgcgccgatcctgttcgtcctgctctggagcaccgggttcatcggcaccaaatacgtcgtcaacaatgccgatcctttgacctatctcgccatccgcatggcgatcgtggtcggcctgatggcgatcatcgccgggattgcgcggccgaaatggcccgaccggatcgggctcgcccacagcgcggtcgccggcatcctcgtccatggtttctatctcggcggcaccgcgatcgcgatcgcgcattcgattccggccgggctctctgcgctgattcccggcctacagccgatcctgacatcgaccatcgccaatcgctggctcggcgagagagtgacgccggtgcaatgggccggtctcgtgctcggtctcggcggcgtcgtgttgatcctgcacaaccgtcccatgaccggcgaagccggacttggctggctggcctccgtggtctcgctgatcagcatcacgctcggcacgctctaccagcgccgctactgcaatcacatcgactggcgcgccggcaatctcgtgcaatatgtcgccgtcaccgtcttcttcgcgatcggagcatttctgttcgaagaccgcgtggtgcactggacacaggaattcgtgctcgcgctcgcctggctcgccgtggcgctctcgataggctcgatcgggctgttgtactggctgatccgccacgctgcggcgacctcggtcgcgagcctgttctatctggtgccggccgtgacggcgctgatggcctatctgctgttcggagaaaagctggacgcaattgccattgccggaatggcgacgtgcgcggcggcggtcttcgtggtcaatcgacgctcttag

SEQ ID NO: 2116 - DNA, 174 bp, BradyrhizobiumColbertium
gtgctagggtggagcattcaattccacttcttttgtcagcgcggctgtatcaatgaaggcgaggcgtgcactgctccatcatggttcgagccgttcgcgcatcgcaacggcaccaagttcgatcatccggggtcgatgaaggctccattcacgatgaccgcgggcgcaacgtga

SEQ ID NO: 2117 - DNA, 204 bp, BradyrhizobiumColbertium
gtgatcaagaaggtcaatggccagcgagtgatcaagcagttcggctcatcggaaaagcggaagcgcttcaacgccgaggaccgctcgttcatcgcagcgatccgcaatcccaaggcaagcaccatccgggccgacgggcagccaggcggtgaggatagggcggcgccgtctccgggcgcgcccgcacccggagacctgctctga

SEQ ID NO: 2118 - DNA, 282 bp, BradyrhizobiumColbertium
atggacgacgaaaagccgatcaccgaacaggcgatggacacgatcaccagcgccgtggaagcgaccaaggacgcggcggtcacggccgtgaagcaggtcagacgcgccgccaagaaggtcgccaggaaagtagcgccaaagaagacgtccaagaagaaggccggtaaatcctcaaagaaggcagccaagaagactgcaaagaaggctggcaagacatccacaaagaaggccgccaagaaaaccacgaaaacaaaaaagaaggccaagaaggcgaagcgctga

SEQ ID NO: 2119 - DNA, 1440 bp, BradyrhizobiumColbertium
atgccaaacccgcagccggtcatcgtctggtttcgcgaggaccttcgtctatctgaccaccccgctctccacgccgccgggaagaccggcgggccggtgatctgcctctatgtgctcgatgaatccgtggggcgggcgccgggcggcgcggcgcgctggtggctggcgcagtcgctgcgggcgctcgggaccgagatcgccgcacgcggcggatcgctggtcctgcgcaggggaccggcgaccaaggtgatccctgaagtggcgcgcgagagtggcgcacgcgctgtctactggaatgggatcgcgcaggtgccgcatcaagcggttgagcgacagctcgaaacggcgttggcaaagctcggagcggactcgcaaagttttcccggcgacctcctcgccccgccctcggcaatccgcaacaaggatggccggggcctgcgcgtgttcacaccattctggcggcgggtgctgtcgctcggcaccccgccaaggcccttgcccgcgcccaaggagctgcgaccagcgccggagatcgccagcgatcgactggagagctggacgctcgagccgagcaagccggattgggcggccggcctgcgcgaagcatggactcccggcgaagcctctgcacgcgagcgcctgcgcgacttcctgaagcacacagtgcgcggctatgtcggcgatcgcgaccacccggatcggcacggcacttcacggctgtcgccgcatttgcggttcggcgagatcagcccgcgccaggtctggcacgccgcgcgcttcgccgcggcggaagatccggcactcggacccggcgtcgaaaaattcctcagcgagcttggctggcgcgaattctgccgccacctcctccacgacaacccgggcctcgccaccgaaaacctgcagacgaacttcgatggcttcccgtggtcgcgcgacgacaaggcgcttgccgcctggcagcgcgggcgcaccggctatccaatcgtcgatgccggcctgcgtgagctctggcacacgggggtgatgcataaccgtgtccggatggtggtcgcctccttcctggtcaagcacctgctggtcgactggcgcgaaggcgaagcctggttctgggacacactggtcgacgcggacgccgggagcaatcccgcgaactggcagtgggtcgccggctgcggggccgacgcggcaccctatttccgcgtgttcaatccgctgcttcagggcgagaagttcgatccggatggcgcctacgtccggcgctgggtgccggaactgaaggggatgcccgccaagctgatccatcggccctggcaggcaacgcccattgagcttgccgccgcgggcatcacaatgggcaagacctatcccgagccgattgtcgatcatgccggaggacgcgagcgtgcgctcgccgccttcgcaaagatccgcggaggttga

SEQ ID NO: 2120 - DNA, 660 bp, BradyrhizobiumColbertium
atgacacttccgatcggcgccaccgcaccagacttcgaagccgagaccaccgaagggaagatcaagttccacgactggatcggcaacagctgggcgttgctgttctcgcatccgaaggacttcacgccggtttgtacgaccgagctcggtgctctcgccaagctgaagccggaattcgacaagcgcggtgtcaagctgatgggcctctcggtcgatccggtcgacaaccatgccaaatggtcggaggacatcaaggagacccaaggcgcggcgccgaattatccgatgatcggcgacaccgattacaacgtctcgaagctctacggtatgctgccggccgccatttcgggcgatcccctggtccgcacggccgccgacaatcaaaccgttcgcaacgttttcatcatcggtccggacaagaagatcaagctggtgctggtctatccgatgaccacgggccggaacttccaggaaatcctgcgcgtcatcgactcgctgcagctcaccgccaagcatcgtgtggccaccccggccgattggtcacagggcgacgacgtcatcatcgcgggctcggtctccaacgaagaggccaagacgatctacccgcaggggtggaaggagccgaagccctacctccgcatcgtgccgcagccgaaataa

SEQ ID NO: 2121 - DNA, 573 bp, BradyrhizobiumColbertium
atgtctgccgctgcgcccaaacccaccgagtcatcgtccctcgaaccgtcctgccgcgataccgcggctcacgcgctgagcgtggtgcgcgacggcataatcacgggagaaggcccgaccaccaagggaagggtgcatttctcccgttcgctcgatgctgatgacaccgcatggtgcatccgcatcctgacggcctccgccgtgaacgatcagccggtgagccgcgccgaggccgaagtgctgttcgagatcaacgaggccgcgactgagcgcaccgatgggggccggttcgacgatctgctcgccaaggcggtcgcccattatgccgcgagcgcttcgggcctgaaggtgccgccgcggaacatggcgctgtcggccgacaccgacatcgagagctgggcgccgtcctatgcctccaaggtgaacagcgagatgctggagtggatcgccggccagatgcgcggcaagcgccagaacaaccgccggctgatggccatggtggcgaccttcctcggcgccaccgcgttgcctctcgccggccaattgccgaacgtgttcgacattggcatgtga

SEQ ID NO: 2122 - DNA, 282 bp, BradyrhizobiumColbertium
atgcagaacaaatcgaaactcctgtgcctgatcacggcatcccttatcgcgggcaccgcggccgcttcggcgcaaggctacgattggaacgggccgcgcatgggttgggaccgcgccgcgccctcctacgaacccgttcaaccgcgtgcatattatccggatgtcgcgggaccctacggcgcactgaacggcaccaaccatccaacaccgagttcgacacagggcgacgtcggtcccggcggcaacaacaacggcacgctgaccggccgctatcgctggtaa

SEQ ID NO: 2123 - DNA, 450 bp, BradyrhizobiumColbertium
atgattgccagatcacatggggcgttgttcgcctcgctcagcgcagccgcgctgctccttgctgcaaatgacagctctgccggacctgcagtcgccgcggcgcccggtgtcgtcaccgccaccgcgccgccgattggagcacatccgccggtcgcgcctggtgcccggttccaccgccgcagcgctccatgggtctattggccgggcggcggcggcttcttcaacgaccgtgccggctacatccagcccttcgccgatgtgagccagtcgctctctgccgacgtgcgttacacctacacgtatgatgtgccctgggactggacgcatcgctttccgccgaacgtcgtcccgtcgaaccggccctatgtgccgagctgcccgacagagcaggtgacggtgcccggccgcggcggcagcgagcacaccgtgaacatcacgcgctgctactga

SEQ ID NO: 2124 - DNA, 843 bp, BradyrhizobiumColbertium
atgagcgatctgcaaatccgcaatttgcgccctgacgaaatcgccatcgccgtcgaatgggccgcgacagagggctggaatccgggccttgccgacgcggactgctttgcgatccccgacgcgcaaggcttcttcgtcggcgagatcgatggcgagccggtcgcgaccgtctcctgcatcaattacgacgaccgtttcgccttcctcggcttctacatcgtgcgcgagcgtttccgcggcagcggctacggtctgcgcatctggaacgcggcgatcgcgcatgcgggcgcccgcgtgatcgggctcgacggcgtggtcgcccagcaggacaactacaggaaatcaggctttcggcttgcccatggcaatgtccgctatggcggcatcgtggccgcaccgtcgaaatcgcccgtagacatggtcgccttgaccgggattccgtttgcaagtgttgaggccgatgacgccaccgtattccctgccgcgcgcagcgccttcctgcgcgcctggatccacacatcagagcatgtcggccgcgcgctgctgcgcgatggcaggctgaccgcatggggcgtgatccggccgtgccgcaccgggcacaagatcggaccgcttgtcgccgacgatcgcgccgctgcggaagcggtggcgcaggccttgctggcaagcacgggcggcggtgaaatcttcctcgacgctcccgccgtcaatggcgaagcgatcgcgctcgcggaatcccttggcctcaagccagtgttcgagacggcgcggatgtatacggggccgaccccgccgctgcgcatcgaccgcctcttcggcgtgaccagcttcgaactaggctag

SEQ ID NO: 2125 - DNA, 705 bp, BradyrhizobiumColbertium
atggcagcagagaaggtcgcgctcgttaccgccggcggcagcggcatgggagcggaggctgcgcggcggttggccgcggacggctttcgcgtcgcgatcctgtcgtcgtcgggcaagggcgaggctctggcggccgaactcggcgggtgcggcgtcaccggctcgaacacgtcgaacgacgacctgaagcgccttgtcgacgctgcgatggcgaagtggggccggatcgacgtgctcgtcaacagcgccgggcacgggccgcgtgcgcccatcaccgagatcaccgacgatcagtggcacgccggtctcgagacctatctcctgaacgtgatccgcccgacgcgactggtgacgccgctgatgcaggcgcagaagggcggtgccatcatcaacatctcgacggcctgggccttcgagccgagcgcgatgttcccgacctcggcagtgttccgcgcagggctagccgccttcaccaagatcttcacagacacttacgctgccgacaatgtccgcatgaacaacgtcctgcccgggtggatcgacagtttgccgcagcaggatgcgcggcgcgacagcgtgccgatgaagcgctacggcaaggtcgaggagatcgcggcgacgatatcgtttctggcgtccgatggcgcggcctacatcaccggtcagaacatccgcgtcgatggcgggctcacgcgctcggtttga

SEQ ID NO: 2126 - DNA, 390 bp, BradyrhizobiumColbertium
atggctaaccaatcgtcccgcctcgaccagatcttcgcagcgctcgccgatcccacgcggcgggcgatcgtgatgcggctctgcgacggcgaggcgtccgtcggggagctcgccgatcccttcgacatggcgctgccgagcttcatgaagcacatccatgtgctggagacgagcgggctgcttcagtccgagaaatccggccgtgtgcgcacttgccgcctcagcccggacgcgcttctcggcgcggaggattggttccagcggcagcgcgcgatctgggaggcgcggctcgaccggttcgaagcctatgtgatgaagctcaaggaagagaaggagagggcgggtgccaagcggccgtcccgaacaaccaaacggaaaggttccgagtga

SEQ ID NO: 2127 - DNA, 492 bp, BradyrhizobiumColbertium
atgtcaagttctgccaatcccacactgtcgcaatggtcgctcgaccgtgagatcgtgatgtcgcgcgtgatcgacgcgccacgcgatctggtgttcgaagcgtggtccgacccgaagcacttgccgcaatggttcgggccgaagggattcaagatcgagacgttcgagatcgacgtccgcgtcggcggcgtttggcgcttcaacatgatcggtcccgacggcacggtctatccgaaccgcatgcgattccgccgcatcgagcggccatcgctcatggagatggatcatggcgccgaccaggaccaggatcccgggatgttccgcttcaccgtcactttctccgagcagagcaacggcaagaccgtgctgatgttgcgccagctgacttccagcaccgagcagcgcgacggcatgatcggattcggcgccgtcgagtacggctaccagaccatggacaagctcgcggcgtacgtggccggcatgacgaggtga

SEQ ID NO: 2128 - DNA, 888 bp, BradyrhizobiumColbertium
atgtactacttcgacaagcggctgcaatacccggtcagggtcgagaaacccgatccgatcttcgcccgccagctgcaacaggcgattggcggcgtggaaggcgaaatccgcgtctgcctgcaatacttcttccaggcctggggcgcgcgtggtcccgccaaatatcgcgacgtgttgctcaacaccgcaactgaggagatcagccacatcgagatgctgtcgaccgcagtcgcattgaacctagagaacgctccggcgacgatgcaggagagcagcattcagggcaatccgatcgtcggcgccgtgatgtccggcggcgagcggccgcggcacgtgatcgagggcatgctgcatcggcatatcctttcgacgggcatggcggcatttccggccaactccgacggcgttccattcgattgttcgcacgtctatgccagcggcaacctcgccgccgacatgtattgcaacgttgccgccgaagctaccggtcggacattggcggtgcgcctttacaactccacgagcgatccgggcatgcaggacatgctcagctatctgatcgcgcgcgacagcatgcatcagcagcaatggctcgccgtgatcgaggagttgggcggagatgcctcgctgccgattccgaacagcttcgatcgcagcaaggaggcgaccgagttcagctacatgttcatggggaccgaacgcaacggagcgccgctgcagccaggccgctattgtgaaggcccgtcgctcgacggccgcggcgaattcagtttccgccctggattcgaaccgctcggcgacgagcccgtgctcggtccggcacggccggacagtgccgcgcaggtggagcagatgcaggagccacccgtcacgaacgcgctcacctga

SEQ ID NO: 2129 - DNA, 288 bp, BradyrhizobiumColbertium
gtggtggtgctggcggtggtggcgctggcggagccggcggcggtgcgggtgccggcgccggtgcgggaggcggagcgggaggcgcaggtgcgggagctggcgcaggctcgggcagcggcggcgcgggcgcgggctccggtggcggcggtggcatcacgcatgtggagcgtggcggacaaggcgcctcgagccccccgggcatgcgcaacgagaccaccccacgatcggatggcacgacccggcgttgaggcggcggcgatcaccgtccgcggtccatcttttttctag

SEQ ID NO: 2130 - DNA, 849 bp, BradyrhizobiumColbertium
atgacacaaattcccctctccaccgcagcagaagcggaacatccgcaatccgatctcgatcgcaacgacagcacgcggcagatcgtcgccgatgtcgcctaccggcagcttgccatggtcaacgtgatctttgtcggcgtcgaaggcgccggtgatggcaactgggtgctggtcgacaccggcattcccggctcggcccgtgccatccgctccgccgctggcgctcggtttggcgggcacggccgtccggcctgcatcgtcatgacccatgctcatttcgatcatgtcggggcgctcgaaacgctggctaacgaatgggacgtgccggtttatgcacatcacgccgagcatccctatctcgacggcacccagtcttatccgccggccgatcccagcgtcgggggcgggctgatcgcccggctctctccgctgtttccgacccggccggtcaacgtcgcatcgcacctctacgatcttccctcggatcacagcgtccccttcatgcaggactggcgatgcatcccgacgcccggccatacgcccggtcatgtctcgctctggcgcgagcgcgaccgcgtcctgatcgccggagacgcgttcatcacgacgcgccaggaatccgtctacgcggcgatgagccaaacgccggagatgcacgggccgccgatgtacttcacaccggattgggcgagcgcgaaaacctcagtgcgcgaacttgccgcactcgctcccgagatcgtcgtgaccggccatggtgcggcgatgcagggcgcggaaatgcgcacggcgctcaatgccctcgccgaacgattcgatgaggtcgcggtgcctcctgatcggcaagcatag

SEQ ID NO: 2131 - DNA, 567 bp, BradyrhizobiumColbertium
atgatcgacgatcccaccgcttccggaaatctcctgcccccgcgtcctggacacggccagccagacaacagttcggacgcatatttcatgcagatccgcgatgacctcgcggacaagggattcttcaccgcgaccgcggaggagctgatcacttgggcccgaacgggatcgctgatgtggatgacgttcggactcgcctgctgcgctgtcgagatgatgcagatgtcgatgccgcgctatgacgccgaacgatttgggttcgcgccacgggcatcgcctcggcaatccgacgtaatcatcgtggcgggcaccttgaccaacaagatggctcccgcctttcgcaaggtctacgatcagatgcccgagccgcgctacgtgatctcgatgggatcatgcgccaacggcggcggctactaccactattcctattccgtcgtgcgcggctgtgaccgcgtggtgccggtcgacatctatgttcccggctgcccaccgaccgctgaggcgctgctctacggggtgatgctgctccagcagaagatccggcgaatgggcacgatcgaaagatag

SEQ ID NO: 2132 - DNA, 498 bp, BradyrhizobiumColbertium
atggcgaatgcagcccgcgatacgttcgtggtgggactacgaaatgcgcatgcgatggaagtgcaggcgcgcgaattgatggagcgccagtcggagcggctggatgactatccggaggtcaaggcgaagctcacggcgcatcttcaggagaccaacgagcaactgcggcggctggaacaatgcctggaagcctgcggcgagagcacgtccagcctgaaggacacggcgcagtcgatgatggcgaacatgcaggccatggcgcacgccgctgccggtgacgagattctcaagaacaccttcgcgaacaacgcgttcgagaatttcgagatcgccgcctacaagtcgctcatcgcactctgcggcgctgccggcatgtccgaggcgaaggcgccgctcgagacgtcgctgaaggaggagcaacgcatggcttcctggatcgactccaatgtcgagaaggtgacgatggagtacctgacgcaccagcgccaggcggcgtag

SEQ ID NO: 2133 - DNA, 264 bp, BradyrhizobiumColbertium
atgacgcacatcatcttcagtgactatcgcaacccggccgcggagcaggcttacgagatcgcctgggactttctcgcgcgtacgggcgccatccgcgacgagttcgaggcctgcgtgttcctggcgcagcgcatcaccatgatggtcgaggaggggcagacgaaccggatccgcatggccaaccgcgcgatctcccaatatcagcggcatgtcgacgaaagcgacgacctcgtccgcagcggcggccgccgtgcggaaggttga

SEQ ID NO: 2134 - DNA, 1221 bp, BradyrhizobiumColbertium
atgaagaacaatctcatcaaaggcttcgcggcgtccacgctctttctcacgctctcgatcgcggccgcgcaagcgcaaaagaaatatgatcccggcgcctccgacaccgcgatcaaggtggggcagaccgtgccgctcagcggcccggcctcggcctacgcggtgatcggcaaaacccaggccgcctacatgaggatgatcaacgaccagggcggcatcaacggccgcaaggtcgagctgatccagtatgacgacgcctattcgccgcccaagaccgtagagcagacccgcaggctggtcgaaagcgacgaggtgctgctgacgttccagatcatcggcacagcgccgaacgtcgcggtgcagaaatatctgaacgccaagaagatcccgcaactctttgccgccaccggcgcggcgcgcttcaccgatcccaagaactttccctggaccatgggcttcaacccgtcctacctcgtcgagggccgcatctacgcgcaatacctgctgaagaaccacccgaatgcgaagatcggcgtgctctaccagaacgacgacctcggcaaggattatctcgccggcctcaaggccggcctcggcgacaaggcgagcatggtcgtggccgagacgtcctacgagatcaccgagccgacgatcgattcccagattctgagattgagggacgcaggcgccgacgtgctgttcagcgcgacgacgccgaaacaggcggcgcaagcgatcaagaaggtggccgaaatcggctggaagccgctccacatcattgacatcaatgcctcctccgtcagcgccgtgctcaagcccgcaggactcgacaatgccaagggcgtcatcagcgtcggttacgtcaaggatgctgccgatcccgaatggaaggacgatgccggcatgaagcgctatttcgccttcatggccaagtactatccggacggcgacaaggactcgaacctgaatgtctacggctacatcaccgcacagctcctggtgcgggtgctgaagcaatgcggtgacgatctcacccgcgagaacgtgatgcgacaagccgccagcctcaagaacgtcgagctcgatctgacgcttccgggtatctcggtcacgaccacgccgacggactatcgcgtcaacaagcagttccagatggtgcagttcgatggccagcgctggcagaagctcggcgggatcgtgacggacgacgccagggagtga

SEQ ID NO: 2135 - DNA, 987 bp, BradyrhizobiumColbertium
gtggcatcgttcaaggtcacacgccgaactctgctgggcacgattgccggcggcctcgcagcgggatctggcatgacggcacatgccgaggacgcctggccgtcgcgcctggtccggctgatctcaccctacggacctggcggatccaacgacatctcgctgcgtctgctcgcggaagaattcggccgcagcctgcgtcagcagttcatcgtcgagaacaagccgggcgccggcacccgtatcgccaatgacatggtcgcgcatgcgccgggcgacggctacaccttcctgtacgtcgcggccccctacgctacagccgaggcgttgttcggcaagctcacctatgaccgcaaggaactgcagccggtggcaatggtggtgatcgcgccactgttcctcatcatcagtaccaatgcgccgttcaagaccctcccggagttgatcgcctacggcaaatcaaagccggacggactgaccttcgcctctcccggcgccggctcgcagcctcatctcgccggagagctcctgttccgcgatgcgggcgtcaagggtctgaacatcccgttccgcggcgatgcggcttcctacaccgaactgctcgccggacgcgtggatgccacgctgacggcgctgccgaccgccctgccttacatccagagcggcaagttcaccgtgctgggcgtcgcctcgcctgagcgcagcgcactctacccgcaggcgcccaccctgcgcgagcaaggctttcccaacgtggctgccgccggctggtacggcttcatggcgccggcgacaacgccacggtcgatcgtcgacaagttccaggccgaagtgctgcgcgcgctcgccgaacccgcgatcaagaacaagctgacggcccagggcctcgaggtgcgcgccggcaccgcggccgagttcgcccagttcatcgacaacgagacgcagaagtggaccaagttgatccgcgatgccggcctcaagggcgaataa

SEQ ID NO: 2136 - DNA, 1197 bp, BradyrhizobiumColbertium
atggctggaccgctcgaaggactgaaggttctcgatatcgctaccatcatcgccgcgccgttcgctgccacgctgctggccgactacggtgccgaggtcctcaagatcgagatgcccggacagggcgacggcgtgcgatcgttcccgccgttcaaggacggcaagccgttgtggtggaaggccgccaatcgcaacaagaagttcgccaccctcgatctgcgcacgccggacggacttgcgttgttcaagcagcttctcccacgtttcgacgtgctgatcgagaattttcgcccgggaacgctcgatcgctggggccttcccaaggaggtgctgtggtcgatccagccgcgcctcgtgattctgcgcgcgaccgccttcgggcagaacggcccctatcgcgagcgtccgggcttcgcccgcatcttcgaagccatgggcgggctcacctacatcaccggtgagagcgacggcgaaccgacccatcccggatacccgatcggggattcgatcggcggcctgttcggcgccgtcggcgtgctcgcggcgctttggaaacgggcgtgcgacccgcatgcgccgggcgaggagatcgatctcgccttgaccgaggccgtgttccgcctgctcgacgtcctcgccatagagcacgaccagctcggcgccgttcgcagccgcatcggcaatgccaacggctattcggcgccggccgctgtttttcgcaccagcgacgatcactgggtgacgctcgcaggctcgaccaacaccctcttcgcagcgaattgccgcgcaatcggccggcccgacctcattgccgatccacgctttgccagcaatgacgagcgcgtcaagcacgccgccgaactcaacgacatctttgccggctggtgcgccgcgcatccactcgacgaggtcctcgcgagcttcaatgccgcacaggggacgctggcgccgatctattcgatcgatcagatcgccgaggacccgcaagtggaggcgcgcgaagtgatcacccgcgttgccgaccgggacttcggcacggtcgccatgaccaatgtcgtgccgcgcttcaccgtcgatcccgcgcgcttgcgccatgccgcgggcgacgtcggccaggacaacaacgagatttaccgggattggctcggcctgtcagacgccaggatcgagcagctcacccaacgaaaggtgatctga

SEQ ID NO: 2137 - DNA, 888 bp, BradyrhizobiumColbertium
atggtccagaccggttcatccaagcccagacatccgccctcctctgccgcagccgtgttggcggtcagctccgaggacgccgcattcgcgacgacgctcgcaaaagggctcgtcgtgctcgaagcgttcaaggcggggagcacgctgctcggcaatatggagctgtcgactttgacgggcatcccgcggccgacggtggcgaggctgacccatacgctggccgagctcggctatctccgctacgacgccgaacgggcgaagtaccgcgtcggcgcgcgagcgctgcggatggcacatcctctgctcgccggaatgcaattccgccaggtggcgcgccccatgatgcaggagctggcgcacagcgttcgcggcacggtctcgatcggcctgctcgacgccacctcgatgatctatgtcgagactgcgcgctccggcgatgtcggcccgcacgtgcccgacatcggcatgcccattcccgtcgtgttgaccgccatgggccgcgccgcggcctcgaccttgccgcctgcggacgcagaccggctggagcggaacatcgccgccgaagattccgggctgtggtcagcgatgcgggacaaataccgcgccgggattgcgcagtgcaaaagccgcggcttttgcacctgctggggcgagtacatggcttcgatccatgccgttgccgcaccgttgtttcatgccagcgaatcgaaacagtcgttctcgatcaattgcggcatccccgctttccggctccagccaggtcagctcgagggtgagatcggtccgcgcattgccgcgctcgccgacagcatccgcgccatcatcgggcaggccgaactcacgacgccgccgcgcaaaaccaagaaaaccacaagcgtcgggacatga

SEQ ID NO: 2138 - DNA, 783 bp, BradyrhizobiumColbertium
gtgagcagcgccaacgtcctcgtctggttcatgctgtaccgcgagttctacccggcggcgtcgggcagcctgagcggcggatccgacatagggctgatgctgctgctgtgcgccggctatgtgttcggctgtgcgttccgatcggtcctgccgcgagcggacgttcagcgcatctgcctgttcgacacctggctatcgagcgtcttcgtcggccgttcggtcgcgacggtcgccgaggtttgcttcgccgcccaatgggccatcattctgcaccagctcggcaccatgaccggcgccgagacgacggtgaacatcgcttgggtgatcgtgccggtgatcatcatcgcggagtgtttctcctggtacgcggtggtgaccaccaactatctctacaatgcgatcgagaattcgctgtgggccgtgacgttcttcctggccgggatcgcgttgtgccgcctgatgccggagttccagggcgtggtgcgctgggcgctgatcgtcggcgtcgtcggcatcgcctgctttctggccttcctgatcaccgtcgatgtgccgatgtatctcagccgctggcgggcagggcatgccgagggcaacgaattcctcggcctcctcgaaggcttgcatgacgtcgcgacgcgctgggtggtgacgcatgacatcgcgcattggaggggcgagctgacctggatgttcctgtatttcagcgccgccgtctggtcgagcctcgcgctctgcgcgctctacgccatggaaggccatcttgcgcgctatctggcttga

SEQ ID NO: 2139 - DNA, 1212 bp, BradyrhizobiumColbertium
atgggtacgacccgcgccacctccgcagccaccctgctcattacactcgcgctcgcggggtccgctgcgcgggccgacatcaagggcgacgccatccggatcggtgttctcaccgacatgaacggcgtgttcgcgaccgccatgggtccgggctcggtcgaggcggcgcggatggcggcggaggagttcggcggcaagatcaacggtaggccgatcgagattttgcaggccgatcaccagaacaagccagacctggccgcatcgctcgcccgcaaatggttcagcgatggtgtccaggcaattgccgacggcggcagctccggctcggcgctggcggtgcaggagcttgtgcgcagcaacggcaagatattcctcatctccggcgccggtgcaaaccagctcacggatgaagcgtgcgccccaaccagcgtgcaatggacccaggacgcctattccacggcgaccgccgtggtctccggcatcatgcagaccagcaaggagccgtggttcttcatcaccggcgactacgccttcggccattcgatcgaggcgaccgcgcgagaccgcatcgccgcgctcggcggcaaagtcgccggcagcgtcaaggcgcagctcggtacgcccgattacagctcatttctgctccaggctcagtcgtcgggcgccaagatcctggccatcaacgtcgccggcgacaatgcgactgcgatcaagcaggccgaggagttcgggctcaccgatcagggcatgaagatcgtgccgatgtcgttccagaacgtcgacatcgaagccgtcggcttgaaggccacacgcggtgatctcatcgtcacctcgttcttcgaggacgtctcgccggcggcccggaaattcgccgatgcgttctatgcccgccgaaaggcgatgccctcgcagatccaggccggcgtctattccgccgtgcgtcactatttgcaagccgtgaaggacacagattccgacgagggcacggccgtgatggccaaaatgaaggcgacgccggtatcggacgcctacaccaccaacggccgcatccgcgaggaccagcgcatggtgcacgatctctatctggtgcaggtcaagacgccccaggagtcaaaaggcccttgggatttcgtcaagctggtcgcaacgatcccgcccgaccaggcattccgtccgcttgaccgcagcaagtgcagcctggtcggcaagtag

SEQ ID NO: 2140 - DNA, 150 bp, BradyrhizobiumColbertium
gtgcccggtgacgtcatcgtcacgggcacgccgggcggtgtcggcgccaaacgcacgccgccgctgtggatgcgtcccggcgacaccgtcgatgtcgagatttccggcatcggcaccttgcgtaacacggtgatcgccgaaccggcctga

SEQ ID NO: 2141 - DNA, 714 bp, BradyrhizobiumColbertium
atgaagctgatctcgttcattgtgcgcggacgcccctccttcggcgccgtcaaggacaacggcgtcgtcgatctcggcgcccggatggcgggctgcaccacgctgcgccagctgctcgaagccggtcgcctcgccgaggcggcaaagctgaccgcctccgctgcgcccgatcatccgctcgacaagatcagcttcgcccccgtgatccccgaccccggcaagatcatctgcgtcggcctcaattatcgcgaccacgtcgccgagacgggccgcaccgtcaccgagaagccggcgctgtttgcacgcttcgcctgcagccaggtgggccatctccagccgatcgtgaagccgaaggtgagcgacgacttcgactacgagggcgagctcgcgctcgtcatcggcaagggaggccggcacatcccggccgaccgggcgctcgatcatattgccggctactcctgctacaacgaaggcagcatccgcgactggcagcgccacaccagtcaattcctcgccggcaagacctttgccgaaagcggcagcttcggtccctggctggtgacgacggacgagattcccgatccgtcaaagctcaccttgcagacgcggctgaacggcaaggtcgtgcaggacaccacgacggatctcctgatcaccgccattcccgagctgatcgcctacatctccaccatctgcccgctccgtgcccggtga

SEQ ID NO: 2142 - DNA, 1506 bp, BradyrhizobiumColbertium
atgcaagataaatccgccctcgaagaatttgatgtcgtgatcgtcggccgcggcccggtgggtgccacgctcgccaatctgctcggcctctgcggcgtgcggacgttggtgctggagcgcgaggcgcggacctatcatctgccgcgcgcggtgcatttcgacgacgaatgcatgcgcgtgtttcagacgatcggcctcgccgacgcgattctgccgcacgtcattctcagcccggggatgctctttctcgatgccgacggccgcatgctgctggattggtcccgtccacggacgctaacgccgatgggctggcatctcagctaccgcttccaccagccggatctggaggacgtattgacccgagggctcgcccgctggccacacgtcagcctgcgcaaccggtgcgacgtgttcgcgctcgatcaggacgaggatggcgtgcgcgtccgctacgaggacctcacgaacgggaggctctgcggggttcgggccggctatgtggtcggctgtgacggcgcccgctcgctggtgcgccgctttatcggctccggcatggacgacctcgggttccacgagcgctggctggtcattgacgtcctgctcaagcgcgaccgcgatgacctcggcgactacagcctccagcattgcgatcccaggcggccggcgacttatgtgcgcggcaccggcgcgcggcggcgctgggaaatcacggtgctgccggacgaggattcgaacgacgtggcgcagccggcgaaagtgtgggagctgctgtcacgctggatcacgcctgaggatgccgagctcgaacgcgcggcggtctacacctttcattccgtgatcgcacaacaatggcgcaacggtcgattgctgctcgcaggcgattctgcgcaccagacgccgcctttcctcggccaaggcatgtgcgccggcatccgcgatgccgcgaacctcgcctggaagctcgacgcggtcatacggggcgccgcagattccggtgtgctcgacacctatcagagcgaacgcctgccccatgtgcgcgaattcatcgagctcgccattcggctgggcggcgtgatcaacaccaaggcgaccgaagcgggacttgccgccggcgaggctcgcgagaacgcgcccgtgaagctcgaggtgaagaagcctctgctcggccccgggctcgtatcaagggatctgccgctcgccggacatctggcgccgcaattcaccttgagcgacggcagcccaagcgacgacaggaccggctacagccacgtgctgctcgtcgagacggcggcggcgccgtcatcgcgacaggccctttcacagggaatcaggatcctgaccagcgacgatgccagcagccttgggccctggctgcgcgagcacggcatcgtcgccgcgctcgttcgccccgaccgctacgtgcgcgggacggcctgcaacgaagccgagctcgaccggctcattgccgccatcgcgcctccaacccacgtgccctccgcggcctga

SEQ ID NO: 2143 - DNA, 1149 bp, BradyrhizobiumColbertium
atgctgaaatgcgcgggagtggcgtgccttgcaatccaaatgttcatggtgtcggcttctgccgcggacatcaacgtgggaatcctgctgtccacgacaggtccggccgcagcgattggaaatgcggagcgcaatgggaccagctttggcccacccgaaatcgcaggccacaaggtcaactacctgtttctggacgaagcctcggacagcaccgcggccgttgcggcgatgcggaagctgttccagggcagcagtatcgatatcctcgtcggtccgaccacgacgcccggatctttcgcggtcatcgatcccgcggtcgaataccggcttcccgtgatcacgcttgcccccgtcaacgctctggtggctccggtcgacgcgcgaaggcgctggatattcaagacgaccaccaacgacgatcacgaagcggcgccgttgttcgcgcacatgaagaagagcggggtcaagaaactcgccctgatcggtttcggcgattcctacggtgacgcctggagcaaggtcagtgcagagatgtgcgcggcggcgggaatcgcgctcgtcgccgacgagaaatatgcacggaccgataacagcgtcgtcgggcagatcctcaagatcgttgccgccgacccggacgccgtcctcattgcagcctccggcgcgcccgcggcgctgccgctgcttcagcttcgcgagaagggatttgcagggaaggtgtacggcacgctcggcgccacctttggagatttccgcaagctgacaggcgctcaaggtgacggcatcttcgtgccgctgagcccggcagtcggcgcggcctcgttgccggatgagcatcccgccaagaaggccgcgctggatttcattcagcgctatgaagccaggtttggtccgggaagccgcaatatctttgcagggtccgcctatgatgctctgctgctgatcgagcgggctgcacccgccgcgctcaagaagggcgcgcccggcaccgccgattttcgcgagggccttcgcagcgcgatcgaagagctccgaggcgtggccggctctcgcggagtctacaattacggccccaatgaccacaccggcctcgaccagagtgcgctgacgctcggccggcttgagaagggcgaatgggtggccgtgcgctaa

SEQ ID NO: 2144 - DNA, 1185 bp, BradyrhizobiumColbertium
atgccggcaattcccggacaaccggtctacgacgtcgatctctacagcgatgaggtcttgctcgacccatacccgcactacagagcccttcgcgagctgggcgccgtcgtctggttgccgcgtaatgagcttcatgcggtggcgcgattcgacgacgtgcgtgccgcgttgcgaaacccgaccgtgttctcgtcggcacagggcgttgccgccaacgaccacgtcaacgacatctcgcgaggcacgacgctggcgagcgatgcgccgctgcacgatcggctgcgcgggatcatcgcggcgccattgatgccgcgggcgctggaggagatcgcgccccagatcaggacagaggcccgccggcttgtcgacgatctggtcgcccgcggccagttcgatgcagtgtcggatctggctcagcacctgccgctgacgatcgtctccaagctcgtcggtctggaggatcatggccgcagcagcatgctgcgctgggctgctgcgaccttcaacgtgctcggcaccatgaatgcacgggcctgcacggcactgaaggacgttcaggagatgcgcgcctatctcggcggggaagaaatcaggagccgtctgcggcccggcagctggggcgaccgcatcttcgctgctgcggaccgaggcgaggtcgagccggagcgctgtccggtgctgatgagggattatctcggcccgagcctcgatacgaccatcttcgcaacggcgaacctcgtgttgctgttcggccgtcatcccgcgcaatgggatctggtccgcaacgatccggccctgatcccgaatgcgatcaacgaggcgctgcggctggaatcgccggttcggggattcacacgccatcttgcggccgatgcgacggttgcagacctgaccattccgcgcgagagccggctgctgctgctgtacgcgtcggccaatcgcgacgagcgaaaatggcacgatccggaacgtttcgacgtgaggcgccgcgccaacgatcatctcggattcggcaacggcacgcacatgtgcgcgggccttcacctggcccggctggagatgacggcactgctcgaggtcctggtggagcgagtggcctctttcgagatcggggaacccgtgctggcgctcaacaacgtgttgcgtggcctggcttccttgccggttcgggtgaagcacgcatag

SEQ ID NO: 2145 - DNA, 792 bp, BradyrhizobiumColbertium
gtgtccaaggagcggacgcagaacggcaggccgcggcagtccgagggcgtccgcgccttcaagcgggggctcgacgtgctgcatgaggttaaccgctccggcggcatccgcgccggcgacgtcgcccgcgcgctcgatctcccccggcccaccgtctatcgcctcctcgaaacgctggaggaactcggttacatcgcccgcagcgccagcgacgaccgatttcgggtcacccggcgcgcactgagtctcggcgacggctatgatcccggcgtggtaatctgccaggcggcggcgccttatctcgccgatctgagcaagaaattagtctggccggtcgatctctccacctatgagaacgcggcgatggtggtgcaggagaccactcactctcgcagcccgctctcgatcgaccgcggcatgatcggcaagcgtctgccgatgctgcgcacgtctgcgggtcgcgcctatctcgccgcctgccccgcgcgtgaacgcgatctgatcgtcaatcatctccgccgcatcgatgaggccgatgatcgcccgttcctcgacgaagcccgcctcgaccggatgatggccgagacgcaggcgcgcggctacgccatccgcggcgaaggcgaatacaaccccaagacggcctcgatcgctgtctcgatcgtgcgcgacggcgtcgtgttcggctgcatctccatcatctggatccgctcggcgctggggatcgaggaagccgtcgcaacctttgtcgatccgatgcgcagcgccgcggcagctatcgacgtcggagtctga

SEQ ID NO: 2146 - DNA, 984 bp, BradyrhizobiumColbertium
atggaaatcacagcactcggctatatcggaatcagttcatcccagctcgatcagtggagccggatggcgaccgggctgctcgggatgcagcaggtcgatcgcggcggcaagatgcgcgccttccgcatggacgaccgcaagcagcggctgatcgtcgacggtggcagcgatgccggccttgcggtgatgggatgggaagttccctccacggccgagctcgaccggttggcgggacgcctggaaagccatggcacgaaggtggtccgaggctcgcgcgcgctcgcggacgagcggcatgtcgccgagctgatcgcgttcactgaccccgccggcaaccggctggaggctttttgcaacccggagcttgcgagcgagccgttcaggcccggccgcccgatctcgggcttccgcaccggcgcgctcggcatggggcatgtcgtgctcaatgtggaggatgtcgagcagctcctgccgttttatcgtgacgtgctcggctttcacgtctccgatttcgggctgaagccttacgggctctatttcttccacgtcaacggccgccaccactcctttgcgatggttggctcggggcggaaggcgatgcatcacttcatggtcgagctcggcagtctcgacgacgtcgggcagggttacgacctcgcgcagctggacgaggggcgtgtcgcctacacgctgggccggcacaccaacgaccacatgacctcgttctacgtgaatacgccgtccggcttcttcatcgagtacggctggggcgcgcgggtcatcgatcccgagacctggcagccgcacgagacctttgatggtccctcgctgtggggccacgagcggctccatatgcccgaagagcagcgcaaacgattgcgcgacatgcggctggatgcagcggcgcgaggcgtgcgcgtccctgacccgcgcgtgccgccgctgaactgcgcctggctggattcggtcgtcgcgcgcgaatga

SEQ ID NO: 2147 - DNA, 195 bp, BradyrhizobiumColbertium
gtgaagaagctgcggacggcccaagagaagtggttctacctgatcagattcgtgcgtgtcactgatatggcccgctgggagcgggcggttcttcaacaggatcattgtcgagtggcgatgcgctacgacgccgagaactattccaatttgcgtcgattcggctgtggctgcgcgtcgatgagtccgcgtcgttga

SEQ ID NO: 2148 - DNA, 279 bp, BradyrhizobiumColbertium
atgctcggcgtcggacttgctctgttgctgcccgagctcggcaaggtggccagcccgaccgagcgcagtgccatctacgccctgattctgctggctggcggctatggattgctgcaatcagcacggctcgcgatggaatttggacagagggtagacttgaacgagcatttcgcgcccgcaatcggcggcttcgccatgatgacggtgctcgcattgctcctgaaaatgttgtggcgcgcggcatggcctgcgctcgtcccgccgagagccgcgaaataa

SEQ ID NO: 2149 - DNA, 150 bp, BradyrhizobiumColbertium
gtgggctacaatgtaggacacgaggttatccgcaacgcccgcgagggcatcgactatctcgcctcgattatcattgcgattcgcatccgaggccgtcgccgccgggttgagccgcggaagatgcttccttccctgcatcgcccgcattga

SEQ ID NO: 2150 - DNA, 648 bp, BradyrhizobiumColbertium
atgagcgcagccgatgccaccatcctgctggtcgacgaccattccgtcgtccgcgagggctatcgctccgtgctccagaagcagcccggcctgcgcgtcgtcgctgaggcagccgacggcgcggaagcctatcggctgtacaagtccgaagcgccggacctcgtcatcatggacctcagcatgcccggcatcggcggcatcgaggccgtcaggcggatcaggcagtgggacaaggccgcacgaatcctcgtcttcaccatgcacgagaatgccggctttgccgtgcaggcgatccgcgccggtgcgagggggtacgttaccaagaccagcccgcccgagaccctggtgcgcgcggtaaaggacgtgctcgccggcaagatcgccatcagtcccgatatcgaccacgagcttgcgctcagccgcatcggcggcgagtgctcggccgcggacgtgctgacgccgcgcgaattcgaggtgctgcggctgctgctcgccgagaacacgacggaggagatcgcccagatgctgcatgtcagcccgaagacggtggcaaacctgcattccctcatcaaggacaagctcggcgttgggtccgacatcgaactggtccggctggcgcttcgccagggattgttaacggaggtctga

SEQ ID NO: 2151 - DNA, 1380 bp, BradyrhizobiumColbertium
atgtggaatcgcccgaggttcgatctcaaggtccgtctgacgttgctcgtggccgggatatcggccgtctgcttcgctgcgatctccgcctatttcctcgtatcggccgaccgggccgcgcatgcgcgcatcgacggcatcgccgccatcgtggcgaaatcgctggagttgcaacagggcaaggttcagtgggtggccaacccgcgctccgactttccgaacctcgatcctgtttcggcctatgtgatgacacccggcctgtgtctggcattccgcggcacgagaggcgacatcctccagcgcttctgcagtggcgcgcctgcccccgcgagcccgccgccgcaagccttcgtcgccttctatcggagcctgttcgatcccggccgggaggcagtacgaccggtcattgtgcgcggaacgaacctcggcgagaccgtggtttcggtcgatccggccgtacagacggcggaagcctggcacgaggcggggcgactgatgatcgcgcttgcaatcgcgctgccgctgctctgcgcactggtctatgccgcactcgcccgcgccctgcgccccacccggctgatcggcaaaggcctcgagcgcattgccaccggagacctcacgacgcggctgccgccattcgatctcgccgagctctccgccatccgtgacgtcttcaaccaactcgccgaaagcctcgatatcgcgcttgccgaacgcaacgagctgacacggaagctgatcgcgcttcaggacgaggagcgccgccatctcgcgcgcgagctgcatgacgaattcggccagtcgctcgccgcgatccgcgcgcttgccgcatccgcccgccagaccgcggcgcaggactgccccggattgctcggagagtgcgacagcattgcccggaccgcgactggcatgatggagacgctgcgtggcgcgctgttccggttgcggccaccggacgtcgacgagctcggcctcgtcgcaagcctcgaaggtctggtgtcgggttggaacggccgcagtcgcggccagacccggttcgaaatccggttcgacggtgccttcgagagcgtgcctggcaccatcagcgccactctctaccgcatcgtgcaagaggcgctcaccaacgctgccaagcatgccggcgcaacaagggtcagcctgcaactgacaatggccaacaatgagatcgccctcgcggtcgaggacgacggccgcccgaatgagactgccgtcaaatccggcatgggcctgctgggcatgcgcgagcgtgtcgccgcgcttcgcggccggctgagcttcgagaccggccctcatggatccacgttgcgtgtgttcatcccgctcgcggccgatcggcaggccctggagcacgccgcatga

SEQ ID NO: 2152 - DNA, 144 bp, BradyrhizobiumColbertium
gtgcccgatccagatttgcggccgtcccatcctgcgaggtccgttcatgcattgctctcgcctgattctctccgcctttctcctcttcgtcctttcttgttcgccggccgatgccgagagcgctattggcgtagccatggatga

SEQ ID NO: 2153 - DNA, 894 bp, BradyrhizobiumColbertium
atgcattgctctcgcctgattctctccgcctttctcctcttcgtcctttcttgttcgccggccgatgccgagagcgctattggcgtagccatggatgatttcagctataccgatacttcgggcgagccgaccaaccagaccgccgctcacgagcggcggctggccgcgttcatggccgcgcttcgaagggacatcgctgcggactcgcgctatcggctggtgccgtccacccgggacggcgcggcgttcaaggtcatcggcggcattcagaagacgagcacgctggtgcaatgggccaaggtcgccgtgatcgacgtcggcgccaagaagctcgtgatggacaagctttacagcttccgcggcgacaacgatgaatcctgggagcgcgccgagatcttcctgtcccgcgagatactggccgcgctcgcaacgccagtgccggtcgcgctggcggtgttcgatttcgagctggaggatacgaccggcgcgtcggcggaggcatcggcgacttcagacgcgtcatacatggccgaggtctccggcagcgtacgcgaagcgctgggtcaatccggccgctaccgcatcgtcgatgtcagcggcgtgcgcggcgaggcggggaaggggcgtgccttgcgcgactgcggcggatgtgaggcggcgattgcgaaagagctcggcgcggatcagtcgctgatcggcgtggtgcggcgggtcagccgcaccgaatacacgctcggcttccaggtgcgcgatgccaggactggggcggtgctggcgcgcggcgacagcggcctgcgcttgggcgcggactattcgtggaagcgcggtgcggtgcggctggtcagggaccgattgatcgaggggcagcaggtcaacgacgctcctagaaagtaa

SEQ ID NO: 2154 - DNA, 1032 bp, BradyrhizobiumColbertium
atgcgcgccgtcgtcatccatgcaccgaaggatctccggattgacaattatccggatgcgatgcccggcccgggagaagtccgcgtcaaaatcgccaatgggggcatttgcggctcggacctgcactactatcatcacggtggcttcggcgtggtccgcatccagcagccgatggcgctggggcacgagatcgccggcgtggtggccgatgtcggtgacggcgccaccaatgtgaagcccggcacgcgcgtcgcggtcaatccgagcagaccatgcggccagtgcctgcattgccaggaaggcatgcgcaaccagtgcctcgacatgcgcttcctcggcagcgcgatgcgcttcccccacgtgcagggcggctttcgcgaattcatcacggtcgacgcgacgcaggccgtgccgatcgcggacaagctctcgcttgcggaagccgcggtggccgagccgctggcggtatgcctgcatgccggcaagcaggcgggccccctgctcgggaagcgcgtgctgatcaccggctgcggcccgattggcgcgctgatgattgtggtctcgcgcttcggcggcgcgtccgagatcgtggcgactgatgtcgccgaagcgccgctcgcggttgcgaagaagctcggcgccaccgacgccatcaacgtcgcggccaatggcgcagccctcgatccgtggcgcgccggcaagggcgtgttcgacacgctgttcgaagcttcaggtaatcaggcggcgctccgcaccgcgctcgacctgctcaggccgggcgcgacgctggtgcagctcggcctcggcggcgagatgacgctgccgatcgattcaatcgtcgcgaaggaattgcagctccgtggcaccttccgcttcgatcgggagttcgagctggcggtgcggctgatgggagaaggcctgatcgacgtcaaacctttgatcacggctgccatgacgttcgagaatgcggtcgcggcctttgagctcgccagcgaccgcgcgcagtcgatgaaagtgcagcttactttctag

SEQ ID NO: 2155 - DNA, 768 bp, BradyrhizobiumColbertium
atgagcacgtccctcttcgatctttccggccgcaccgcgctcgtgaccggttcctctcgtggcctcggccgtgccattgccgaaggcatggccaaagcaggcgccaggatcattgtaaacggcgtcgttcccaagcgcgtcgagcaggccgtcgccgagtttcgcagcgcagggcacaaggccgaaggcgcgcccttcaacgtcaccgacgagccggctatcctcgccgctttcgagcgtttcgaccgcgaaggtcttgcagtcgacatcgtcgtcaacaatgccggcatccagcaccgcaagccactggtagaattcaccaccgacgagtggcgcaaggtgatcgagaccaatctcaccagcgccttcgtgatcggccgcgaggcggccaagcgcatgattccacgcaagcacggcaagatcatcaatatcggctcgctcggcagcgagctggcgcggcccaccatcgcgccctacaccgcggccaagggcggcatcaggaacctgacccgctcgatggcggtggaatgggcccagcacggcatccaggccaacgcgatcgggcccggctacatgctgaccgacatgaacgaggcgctggtcaacaacgccgacttcaacaactggctgatgggccgcatcccgtcgaaacgatggggcaagccggacgagctggtgggcgccgcgatcttcctggcatcggacgcgtccacctatgtcaacggccagatcatctatgtcgatggcggcatgatcgccgcgatgtaa

SEQ ID NO: 2156 - DNA, 1200 bp, BradyrhizobiumColbertium
gtgaagatcacgtcgatcgagacactgcgcacgcaagagttctccaacgtcatctgggtccgcatccacaccgataccggcatgatcggactcggcgagaccttttacggcgcaggcgcagtcgaggcgcagatccacgacacctttgcaggccggctgctcggccgcaatcccctgcacatcgaggcgattcatcgcgacatgctgaacctgccgatggcgcagtcgtcgaccggcgtcgagtaccgtgccgcctccgccatcgatatcgcgctgtgggatctgttcgggaaggtctgcggccagccggtgcaccagatgctcggcggcctctgccgggacaagcagcgcatctacaacacctgcgccggcacgcaatatgtccgctcgaccaatatcagcccggttgccaactggaatctcggcgcctccaagggtccttacgaggatctcgatgcattcatgacgcgcgccgatgcgctggccgagagcttgctggagagtggcatctccgcaatgaagatctggccgttcgatccggccgcacaggagaacaaggggctctacatcagcgcagcgcagatgaagcaggcgatcgagccgttcgagaagatccgcaaggccgtcggcgacaagatggagatcatggtcgagcttcactcgctatggaatctgccgactgccaagcagatcgcgcgcgctctcgaaccctacaagccgacctggtacgaagacccgatccgcatgaactcgccccaggcgctcgccgagtatgcgcgctcgaccgacgtctgggtttgtgccagcgagacgctgggctcgcgcttcccctacaaggacatgctcgaccgcgacgccatgcacgtggtgatggcggatctttgctggaccggcggcctcaccgagggccgcaagatcgcggccatggccgagacctatcaccgacccttcgcaccgcacgattgcatcggcccgatcggcttcatcgccgccatccacatgtcgttcagccagcccaacaccttgatccaggaatcggtgcgcgccttctacaagggctggtacaatgagctcgtcaccacgatgcctgccatcaaggatggctacgtctatccgatggaaggacccggcctgggcgtcgacctcctgcctgctgtcttcgagcgcagcgatctcaccgtgcgccgctccaacgtctga

SEQ ID NO: 2157 - DNA, 768 bp, BradyrhizobiumColbertium
atggcacggcgcaagcgcgcactccaggtggtgaggaacgagggtgacaccggaggccggccgtcccgtagcaaccgtctcaacttcttcgagttggcctatcagaggatcgaagagctcctggttcattgcgagctcaagcccggccagttcatgaccatgctggaactgcagcaaatcaccggtttcggccgcacgccggtgcaccacgccgtcaatcgtctctcggccgacacgctcatcatcatccggccccgtcatggcctgcacatcgccccgatcgatctggcgcgcgagcgcatgctgctcggcctgcgccgcgacatggagcgcttcgtggtccgccttgcggccgatcgtgcgaacctgtcgcatcgcaatcaggcgctgcacatcgaacgtctgctgcgcgagcgtcgcgccagcctgaccctcgatgaattcaacagcctcgaccgccgcatcgacgcgctggtgctggaggctgccggcgagcccttcttggtgcatacgatgcggccactgcacacgctgtatcgccgcatcggctacatccatcaccgcttcatgccggggcaggcggatctgtcgggcacgatcgatcatcatctcgccattctcgcagctgtcgccagtcgccgcgtcgaggaagcggtcaaggcgagcgatgccctgatcgactacatgggcgaaatgttcacgggcatggaggcgggcatcgatccgcgcttgctcgattgcagcatcgagccgctgctcggcgcgtag

SEQ ID NO: 2158 - DNA, 1365 bp, BradyrhizobiumColbertium
atgtcaacgatggcggtgccacaaccgaccccgagcgaagccgcggtccgctacctcatcacgaactacagccccaagggcaacaaggtcggctggctgatgatggcctcgatcctggtcgaggcctgggatctctactcgatcgctttcgtgctgatcttcatcaaggaacagtacaatcccgatccgctgatgctcggccttgccgcagcgggcacgcaaggcggggcactcatcggcgcgctgctcggcggctggttgtccgacaagatcggccgccgcgtcatgttcctggtcacgatggtgatgttcatcgtgctcgctctggcacaggccttcgtgcctgatgtcgcctggctggtcgtgatccgcttcctgctcggaattccgctcggttcggacatctcgaccggctacacctacatcatggaatccatggccaagggcgagcgcgaggtcatgggcaatcgctggcagttcatgttcgcggttggcgaggttctgacaatcggcgtcatcgtgatcttcctcctggtcgacatgaaccacgagatgctgtggcgcgtgacgctgggtctcggcgcggtgccggcactgatcattctgatcatgcgccatgacgtgccggagacggcggtgtggctggtgcagaagggacgctaccgcgaggccaagcaggtcgcgcgcgagatgttcaacgacaatctggatatgctcccggatcgggatgtcgtggttccgaagaccagcacccgtgcgttcctggccgatctcaagaaggatccgatccgctggcgtgccacgctgtacggctggatcgcctgcttcgcgcaggcgagcgagttctcgacgttcgcgttctacctgccggtgctgttcgccatggtgggcgtctcgacgatcctcggcaacaatctggtcacgatggcactgttctcttttgctgcgttgtcgggatgggtcgggccgctgctgacgccgaagatcggccatcgcggcattgccattgcgggcttctcgatcgtgctggtctcgctgctggtcgccgcttttgcgctttacaccggcaacacgatgttgctgccgtttgcagccgccggcatgctctgggggcactattgggatgcatcgaactgcatgacgattccgaccatggtcgcccggccacaatatcgcggcaccgccagcggcttcgcctacatgttcgtgaagctgccgtcgttcctggcgatcttcctgttcccgacgctgttcgcggcgatcggacaggccaacgccaccctgttcgttgcaatcttcccggtgatcggattgctcgccgcgatcttcatcctgccggaagtctacggctacgagaacgactga

SEQ ID NO: 2159 - DNA, 237 bp, BradyrhizobiumColbertium
atgcagattcaatcgaaggcattggcgcggagctccctcttgcgccgcgcgcttcggaacctcaccggaccgcccgagatccacatccagacggcccatcctctgctggtcgtgtccgcaatggtcttgctcaccctgctcgcgatcgtggagatcgatctccacagcgctcagctgcaggcgatcggactgctcggccatgggaccggtatagacccgatcttcctgagcccgtaa

SEQ ID NO: 2160 - DNA, 1260 bp, BradyrhizobiumColbertium
ttgccgaccgtgccctctgatgccatctggacctggagcatcatcgccatcgcgaccgcaggcgtcatcgtccggccatttcgcctgcccgaggcgctctgggccgtgatcggcgccggctcgctactgctgtttggtttgctgccctggctggacgcgctgacaggcatcgagaaaggcgttgacgtttatctcttcctgatcggcatgatgctgatcgccgagctggcgcggctcgaaggcctgttcgattacctagccgcgattgcggtggaatatgcgcgtggctcgccgcagcggctgttcctgctgatctatctcgtcggcacggtcgtgaccgtgttgctctcgaacgatgccacggcgatcgtgctgacaccggccgtctatgccgcgacgcgcgcggccggcgcaaaacccctaccctatctctttgtctgcgcgttcattgccaatgccgcgagcttcgtgctgccgatctccaatccggccaatctcgtcgtattcggcgcgcgcatgccgcagcttacggaatggctgcgcctgttcgcccttccctcggcggcgtcgatcctgctgacctatgtcgtgctgcgcctgacccagcaccgcgccctcaaggaagagacgatcgcgcgcagcgtgccgcacccggaactcgggcgcggcggcaagctgacggcgatcggcatcgttgcgatcggcgtcgtgcttgtcactgcgtctgcgcgggacaagcagctgggcctgccgaccttcatctgcggcgtggtcacggcggccatcgtgctgctgatcagtcggcaatcgcctttgcccgtactgcgcggcgtgtcctggagcgtgctgccgttggtcggtgggctctttgtcatggtggaagcgctggtgaagacgggcgtgatcgcacagctcagcgccctgctgcaccaggccgtcgcgcaatcggtgccccaggccgcctggagcgtcggcatcgccacggcgctcgccgacaacatcgccaacaaccttcccgtcggcctcgtcgccggttcggtcgccgccagcgatcatctgcctgcatcggtcgtcagcgccatcctgattggtgtcgatctcggccccaacctgtcggtgaccggatcgcttgccaccatcctctggctggtcgcgctccggcgggagaagatcgaggtcggcgcctggccgttcctcaagctcggcctgctggtgacgccgcctgccctgatcgcggcgttggcagcggccatcaggtag

SEQ ID NO: 2161 - DNA, 2478 bp, BradyrhizobiumColbertium
gtgcgcttccgcatcacaacggccgatgccttgaaagactccttgcccgagaccgtcgccgccgaaaggctgcgccaacacctcgaagacgtcgcgcgcgagcgcgataatgcctatcgcgcacttcaggagcgcgaagccgagttggcgcgcatccagcgcattggcaaggtcggcggcgtcgaggtcgatttccgcgaaggcttcaagaaccgtcgctcgcccgagtatttgatcatccacggcctgccgcccgaagccgccgacgagtcgcacgaagactgggtcaaccgtatccatcccgacgaccgcgacgccaccgtcaagcatttcttcgatgctctcgctggggcgagcgaagactacagcgccgaataccggatcgtccgccccagcgacggcgagacccgctggatccgggtggtcgccaagatcgagcgcgacaaggacgaccgagccatccgcctcgttggcgcccatatcgacatcaccgaccaggcgctggcgcgcgagacgctgcgcgagagcgaggagcgttttcggctgatcgccgacagcgcgccggtgccgatctgggtcaccaagctcgaccgcaagcggtccttcgccaaccgggcctatgtcgatttcgtcggcctgccctacgaacaggccatcgatttcgactggcgcaaggtgctgcatcccgacgacctgccgcgcgttctccagcaatccgtcgaaggcgaagcatccctcaagcctttcgtgctggaagcgcgctacaggaatgcaagcggcgagtggcggtggctgcgatcggaatcgcagccccgctgggacccgaccggcaagcatatcggcttcatcggcgtcgcccacgacatcaccgtggccaagcaggccgagatcgagctgcggcagctcaacgaaacgctggaacagcgcatcgccgaacgcaccgccgagctcgaatcgaacgaggcgcggctgcgcgcgatcctggagaccagcaatcagtaccagggcctcgtcaacctcaagggtgaactgctctacgccaacaagaccgcgctggatggcatcaaggcaagctcttcggatgtgatcggaaagccattgtgggagacgccctggttcagcgcgacagaaggcatgagcgcactggtgcgcgaggccttccacaccgtgctgagaggcgaagcggtccggctggagatgcgcctgcgccttcccgtcggcgagcgcgatttcgagttcggcatgcgcccggtgctcgaccgccacggcaacatcaccggcgcggtgcccgaggcggtcgacatcaccgagcggcgtcgcggcgaggaagcgctgcggcagtcgcagaagatggaggcgatcggccagctcactggcggcgtcgcgcacgacttcaataatcttctcaccatcatccggtcggcgaccgacttcctgcgccgtcgcgagctggccgaggagcgccgccgccgctatgtcgacgccatctccgagacggtcgagcgcgcctcaaagctgaccgcacagcttctcgcgttcgcgcgccggcagccgctgaagccgcagatattcaacgtcgggagccaggttgaaggcgtggcgcagctggttcggccgctggtcggcggccgcatcgagatcgcggtggaggtccaggacgccgactgcttcaccatggccgacatcgcccagttcgagacagcgctgatcaaccttgcaatcaacgcccgcgacgccatggatggcgaagggcacctcaccatcgccgtgcgcaaggtctctggaatcccgagcctgcgcgcgcaaccggcgcgcggcggcgattatgtcgcgatctcgatcaccgataccggcagcggcatcgcgccggaacatctcgaatcgatcttcgagcctttcttcacgacgaaggaggtcggcaaaggtactgggctcggtctcagccaggccttcggcttcgcaaaacagtccgaaggcgacatcgctgtgatgagcgtgccaggcgaaggcgccaccttcaccatctatctgccgcaagcacaaagccccgcgacggacaaggaggtcgcatcgctgacccacgaggcggcgaccaccgggcgcggctatcgcgtgcttgttgtcgaggacaacgatgaggtcggccgcttctccaccgaactcctggaggatctcggctatgtcgtccgccgggtcgccaatgccaatgcggcgctggcgatcctcggcgagaacgaattcgccgtcgacctcgtgttctccgacgtcatcatgcccggcatgaacggcgtcgagcttgccggcgttatccgcgagcgctatccggggctgccggtggtgctcaccagcggctacagcaacgtgctcgccgaaagcgcccatcgcggcttcgagctgatccagaagccctattccgtggagtcgctctcgcgcatattgcgcaaggcgatcacggagaagctgtcagtggcgcggtga

SEQ ID NO: 2162 - DNA, 222 bp, BradyrhizobiumColbertium
gtgccagaccgatattcacacagacggagcgtgatagccattgccgagaggacgtgtgtggcgggaaaaagcggatttgcaggatcggctaaagtacggcttaccaacgccggtccgtcaattttgttccaggaactggaacgaacagccggcggatgcgtcttcgcgaggcgcaataccagcttccatgaagctcccctttccgaagaggctaaatcttga

SEQ ID NO: 2163 - DNA, 1083 bp, BradyrhizobiumColbertium
ttgaagctctttgtctgccaggcctgcggcaacgtcctctatttcgagaactatgcctgcgaacgctgtggccatcgggtcgccttcctgccggagaaggagacgatgtcggcgatcgagcctgacggagaggcctggaggatattggccagcaacggcgaaagccggatgctgtgccggaatgccgagtacgatgcctgcaattggttgatcgacgcggccgataccaccggctgttgccgcgcctgccgccacaatgggatggtgccgaacctctccgatccggcgcaactcgccggctggcgcgagttggaggtggcgaaacaccgcctgttctattccctgatccgctggcggctgccgctacggacccggcaagacgaccccgagcatggtctgaccttcaatttcctcgccgacgatccgcacagcggcgagaaggtcatgacgggccacgacaacggcctgatcacgatcgcgctgaccgagaccaacgatatcgagcgcgagcggcggcggctggagatgggcgagccctaccgcacgctgctcggtcacttgcgtcacgaggtcggacattatttctgggacgtgctggtgcgcgacggcggcaagcttgccgaatgccgcgcggtattcggtgatgattccaccgactacggtcaggccttgcagcgtcactatgccgaaggcgcgccggcggactggcagcaaaactacgtctcggcctacgccaccatgcacccctgggaagacttcgccgagacctgggcgcactacctccacatcgtcgacaccctggagatggctggcgagtttggcatggaggtgcggcccaaggtggaccgcgacggggagttgacggcccggatccggttcaatccttacgaggccagagacgtccaggcgctcatcgacgcatggctgcccttcacctttgccatgaacagtgtcaaccgcgccatgggcctgcgcgacctctatcctttcatcctgtcgccagccgtggtcgcaaagctgggcttcattcacacgttggttcgggacgtggctaagtccaagtccaacgccgggatggcgtag

SEQ ID NO: 2164 - DNA, 867 bp, BradyrhizobiumColbertium
atggcctttcgttcccgccgcgagaaacttcgctcagtcctgtcggactcaaactgcgtccaccccggctcggtgtatgatgcgatctcgatccgcattgccgaggacctcggctttcccctcggcatgttcgggggatcggtcgcttcgctcgcggtgctgggcgaccccgacgtcacgctgatcaccctcaccgagcttgccgagcagatgcggcggatgtcgcgtgccgcaacgctccccgtgttggtggatgccgatcatggctacggcaatgcgctgaacgtgcgccgcacggtgcaggaactcgagatggccggcgcggccggcctcaccatcgaggacacgctgttgccggctgcttttggcgagacgaagacccagctgatctctctagaggagggggtcggcaagatgaaggcggcgctgggcggccgcagcgatccctctctggtgatcatgggccgcaccggtgcggccgcgatcacgtcgatcgacgatgcgatccgacgcgccaaggcttatgaagcggccggcgtcgatgcgctgttcttcaccggcatcaaggcgcgcactgagctcgaggcgatcgcatccgccacgagcctgccgatcgtgctcggcggcgtgccggaggagttgagcgcgctcgattaccttgcgagccagcgcgttcgcatcgctctgcagggccatgcgccgattgtagctgcgacgcaggctgtctacgacacgcagaaggccttgcgagagggcgcggcgccgaaaagcctcaagggcttggcatcatcggagctgatagcccgtatcatgcgggagagcgagctcagggcgctcagcgccgatgtccttggatcgaagaagtga

SEQ ID NO: 2165 - DNA, 279 bp, BradyrhizobiumColbertium
gtggtgatctgcgggcgcgtgcagggcgtcggctatcgggcttgggtcgagcagcaggcgaggacgagcggcctcgaaggctgggtccgcaaccgccgcgacggcagtgtggaagcgctgttcgctggtgcgccgagacacgtcgccgacatggtcgcgctgtgccgccacggcccgccgtcgtcacgcgtcgacagtgtcaccagcgagaccgccagcgcggatgacctgaatctgcgccgggccggagagatgttttcggtgctgccgacggtgtga

SEQ ID NO: 2166 - DNA, 1491 bp, BradyrhizobiumColbertium
ttgttcgaaagcgagcgcagtttccggctgttggttgagggggtcgccgactacgctctctacatgctcgatcccaagggcaccatcaccagctggaacattggcggcgagcgcatcaagggctattcgcccggggagatcctcggccagcatttttcccggttttacaccgaaaccgaccgcgccaacggcaagccggcgcgagcgctcggtattgcgcgggaaaagggccgatacgaggaggaaggctggcgcgtccgcaaggacggcacgttcttctgggccagcgtcgtgatcgacccgatctacgaggacggtgagctgatcggcttcgccaagatcacgcgcgacatcaccgaacgtcgcaatgcccaactcaagctcgaggcgatgcagaagcagctcgccgagtcgcagaaattcgatgcactcggacagctcaccggcggggttgcgcacgacttcaacaatctcctgatgatcatcagtggcagccttcacatcctgaagaagagcgccactagcgaccccaagctcgagcgcgccatgtccgcgatcgagaccgcgaccaagcgcggcgccgcgctgacgaaccagctcctcaccttcgcgcggcggcagagcgtgaatccgcaggcgatcgatttcgccgaacgcgtcggcgccatccgcgaggtgctcgacgcaggggtcggcagttccgtgcgtctcgccttcgacattcattccgacacgtggccgatcaaggccgacgtttccgaactcgagactgccctgctcaacctcgtcatcaatgcccgggatgcgatgccggacggtggcgcggtgacgatccaggcgcgtaatgtcgtgctgaacgagccgcccctcgccggcgacttcgtcgcaatcgatgtcaccgataccggcctcggaattccctccgacgttctcgacaagatcttcgagccgttcttcaccacaaaaccgatcggcaagggcacgggtctcggcctctcccaggtgcatggctttgcgcatcaggccggcggcacggtgaaggttgcaagcgaactcggcaagggtacgactttcaccatactgcttccgcgcggcatggatgcgccggtacgggacgccgcggaagcgatgtcctttcgcggcagcggcacggtgctgctggtcgaggacaatcccgacgtcgcgctcgtcagcaccggtcttctggagcaactcggctacgaagtgcgccgggtcgccgatgccgaggcggcattgcgcgagatcgagaacgacgccgtggacttcgtgttctcggacatcgtcatgcccggcaagatggatggactcagcttggcccatcacctccggcagatccgtcccggtctgccgatcctgcttgccaccggttacagcgatgtcgccgccggcgtgcgcggcgatttcccgatcctgcgcaagccctatgagatccacgagctgagcgaagcaatcgccaagctgccacggtga

SEQ ID NO: 2167 - DNA, 864 bp, BradyrhizobiumColbertium
atgaccatgaccctcgacatcgctacggtccaggcattcctgctggtcgccgacctccagagctttacgcgagccgccgaagcgctcggcacgacgcaggcggccgtcagcctgaagctgcagcggctggaagcgttgctgggcagacgccttgtcgagcgctcgccgcgcgcagtccggctcaccgccgacggcgctgccttcctcgatcgcgcccgcgcgctgttggaggcgcatgatcgcgcgctgtcgggcgaagcttcagtcgcgccctcgctcacgatcggcatctccgatcacgcggcgggtcccgaactggtgccgcttctcgagcggctgcacgcgatgtcgccgaacctcactctcgctgtcaccatcggcttctcgcgcgagatgcaggatgcctatgacgcgggcgaactggacgcggtgatcgttcgccaggaaggcagccgccggggcggcgagaagctggttgaagacgagttcggttggttcgcgtcccggcgcttcacgctggcaaagggagcgccgctgccgcttgcgacactcgccccaccctgcggcgtccgcgccgtggccgtgcgcgcgctcgacaaggccgctatcggctggcgcgagcgtttcgtgggcggcggtgtcacggcggtggttgccgccgcgctcgccggcctcgcaatcgcgccgctggcgcggcggatcgcactgcccgggctggtcgacatcggaccggcgcacaggctgccgaaactcggcagctcgaaggtgatgctgcattcgaaggtcagcgatcccgccaagctcgcggcgctgcgggcgatcgtcgcgacgttccggagcgcagcggcgctagcagtccgctga

SEQ ID NO: 2168 - DNA, 489 bp, BradyrhizobiumColbertium
atgaatccggcaggtctagcttctcgccaacgccgcaagtcgcgcgacatctcgaggagaaccgccatgcccctgatcaccgtgtcctacaccacgtcccgccagtcgccatcgctcaaggccgacatcgcgaacgccgtgtccgagctgaccgctgagatcctgcacaaggatcccagggtcaccgccatcgtcgtgaagtcggtgaatgccagcgattggttcgccggcggcaggtcgctcgcggagcagaagctcgcaagctactggatcgacatccacgtcaccgagggcaccaacaccaaggacgagaaggcggcctatctcgctgccatgttcaagcgtatggccgagatcctcggcccgctgcatcccgagacgtacctgcatgtcgacgacgtcaagggcgacgcctacggcttcggcggccagacccaggagcggcgctatatcgccggcaagcttggcatgtccttcgaggcggcgtga

SEQ ID NO: 2169 - DNA, 429 bp, BradyrhizobiumColbertium
gtggcctatgtcatgctggacctcaaacgtcgccggccggacgttcgcgcctatgtcgcgagcctcgaagagctgattctgcgcacgttggccgccttcaacgtccgcggcgagcggcgcgaggaccgcgtcggagtttgggtgaagcggcccgacaagggacctgggcacgaggacaagatcgccgcgatcggcgtccgactgaagcgctgggtctccttccacggcatcgccatcaatgtcgagccggagctgtcgcatttcgccggcatcgtgccttgcggcgtcactgacgcccgctacggcgtcacctcgctggtcgacctcggccagctcgcgaccatggccgatgttgacatcgcactccggcaggcattcgagcagctgttcggaccgaccacagctccggcgcctgaagctgtggtctga

SEQ ID NO: 2170 - DNA, 219 bp, BradyrhizobiumColbertium
gtggatctcatggtcgtcctggggacgaccaccatgccgatccatcaggtattgcgtctttcccgcggcgccatcatcgaactggacgcaactgaggcggacgaggtcaaggtgttggcgaacaatctgccggtggcctccggggtcgtcctggtcgaccgcaaccggatcgccgtcgaggtcaagcagatgctgccgcgctcgccggggacccggtaa

SEQ ID NO: 2171 - DNA, 82 bp, BradyrhizobiumColbertium
gcgctcgtggcggaactggtagacgcgctgccttgaggtggcagtgagtaaaatcgtgggggttcgagtccctccgagcgca

SEQ ID NO: 2172 - DNA, 177 bp, BradyrhizobiumColbertium
atggaaaacgtcgttcgattcgtatcgaaatccgagctcgaacgcgagcgcctgatccgcgaagctcgcgccatctacgacagcatattcccaccggtcaccagcgccggcgtgcaagacgatgatcagaccgagccgaggacgtcgatccaccctctggctgacagggagccgtga

SEQ ID NO: 2173 - DNA, 1212 bp, BradyrhizobiumColbertium
ttgatctccatgcaaaaactccccgtcaccgttttgtccggcttcctcggggctggaaagaccactttgctgaaccacgtcctgaacaaccggcacggcctgaaggtggcggtgatcgtgaacgacatgagcgaggtgaacatcgatgcggacctggttcgcgatggcggtgccaagctgtcccggaccgacgaaaagctcgtcgagatgactaacggctgcatctgctgcacactgcgcgacgatctcctgaaggaggtacgccccctcgcggcaaacgggcgcttcgattatctgctgatcgagtcgaccggtatctccgagccgttaccggtcgcggcaaccttcgatttccgcaacgaagacggcgacagcctctccgacgtggcacggctcgacgccatggtcacggtggtcgacgcggtgaacctgctcaaggactattcgtcgagcgactttctcgaacaacgcgggcaggcgctcgagaacgacaagcgcacgctggtcgatctgctggtcgagcagatcgagtttgccgacgtcatcgtgctcaacaaagtcgatgattccaccccggcgcagcgcgaggcggcgcgcaagatcattcgcgcgctcaatccggaggccgatctcatcgaagccaattacggccgcgtccctttcgaccgcatcctcgacaccggccggttcgacttcgaaaaggcgcagcagcatccgctctggttcaaagagctgtatggcttcgccgatcatatgccggagagcgaggaatacggcgtgaagcatttcgtctatcgtgcccgccgccccttcgatcccgccagattcgaccaattcatcaaacagcccgggccgggggtgatccgcgccaagggacatttctggctggcaacccgaccgcaatggctcggcgaaatcagccaggcaggctcgatcatccgcactgaggcgctcggtttctggtgggcgagcgtgccaacggaacgatggccggacgatccagcctggcggacgcggctgcgcgccaactggagcgagatctatggcgatcgtcgtcaggagatcgtgttcatcggcaccaacatggacgaggactcgatccgctcccgcctggacgcatgcctcgtgcctggaagacctgccatgaacatcgcggattgggcaaagctcccggacccattcccgatttggcgccgtgcggacgctgcctag

SEQ ID NO: 2174 - DNA, 141 bp, BradyrhizobiumColbertium
gtgcgccttcacgccgggctgcgcttccccaccctgacattctcagcgcgcgcggtgctcgaaggcttcgccgcccaaacgtgccggaccgcacaatccggaccctcgctcgccggatcgggaaagacttggcgtggctga

SEQ ID NO: 2175 - DNA, 588 bp, BradyrhizobiumColbertium
gtggccccaatcagggaggccgttcacctctgcatcgacatgcagcgcattttcgcccccggcggtctgtgggcgacgccctggatggaacgggttctgcccacgatcgcttcgatcgttgcgcgccatcaggaccgaacgatcttcacgcgcttcatcactccgcaggatccagaggatcgccggggccagtggcagagctattttcggcgctggccgcaggccacccgcaggcatctgccgccatccgctcttgagcttgtgccggccttggaccggttcgttccgccggccgccgtcatcgacaagccggcttattcggcgttcagcaatcccggtcttgcaagcctgctcgttgaaaagaaggtcggcaccgtcgtgatatcaggcgcagagacggacgtctgcgtgctctcgacggtcctgagcgccgtcgatctcggcttcaggatcgtcatcgtcgaggacgcgctgtgcagttcgtccgacgtcgggcacgatgcgctcatgacgatgtatcgtacccgctttcatggccaggttgacctggtgacagcggaggagctggccgagttctggcgggagtag

SEQ ID NO: 2176 - DNA, 783 bp, BradyrhizobiumColbertium
atgcaggcaggatttgctttctcgaaactcgccgatcggctgacgagcctcgtcgaattgacgaccgacgatctcgacctgcttgcggacatgccgagcagcattgcgcatttcggcacgcatcagatcatcctgcggcacggcgacgaggcgacccattgctgcctgttgctccaaggatatctgtcctggcagaaccacgagagcgccgatgggcagatcaccgcgatctgcgtgcccggcgacatcgccaacctgcacaccctccatcgcccgcgcatcgagggcaatctgatcgcgctcggacccgccatcgtcgccctcgtgccgcaccgcttcttccgcgaagtcgcagcgcgttcgccggcgatgtcgcaggccatgctgttgatgctcctcgccgaacacgcgatccagcgcaactggacggtgaacctcggcagccgggacgcactgacccgcgtggcgcatctgctatgcgagatcaccgtgcggctgcaaatcgtcggccttgccagagacctcagattgtcttcgcccttcacccagtccgacctcgccgcggcctgcagcatctcccccgttcacgccaatcgcactatccaggagctgcgccgcgccaatctgctgcaatggcaaggcaggaccttgacgatcacggactggccgggcttggttcggctcgccggcttcgacccggcctatctgagcattcgatccggcacggacgatgcgcggctgccgcacgcgaactcgatgactgctgacgtcgcggtcgcttga

SEQ ID NO: 2177 - DNA, 1155 bp, BradyrhizobiumColbertium
gtgaacgcggagccgcgaccagcaattggcagtggaccgcgacccgctaccggggagcggcggcgttcgagctggatcgccgccgccgagctcggcctgatcagcagcactttctccaccatcgtcagccagctctccgccgcccgcatcggccgcgacgccgcggtcgactggatgacggtcgccgccattcccgcgcgcgactgggcgatcagctccgagccatcctggagcacgatcctgaccgggatcgcctttcaccaatgggcggatttttcctgggctctggttttcttcggcgtgctcgggcgctggaccgcagacttgcggccgatgacgatcctgttgctcgcgctgccctgggccgtattctcttccggcatggaatggttcgtgctggtgccgctgtttccgttctggcagccgctgttcacgctgcagcagccctactggatcggcctgcttgtccatggctcctcggccgtgatgtatcctctgttcgcccgcctgcgctggagacacggcaatgcgccgcggcgcgacgtgcggttcaccaacgcctggatcaccggcgcgctggctgcggttgtagtgctcggaaccatcgcattctttggcagtcatggtcacgagctgccatggatgggccgcgacagggatcaggaccagacctacatccgtcacatgaccgcgcatcatgcccagggcatcgagctggcgcgggttggcgcggagcgcgcgcaggacccgcacctgcgaaagctcgcgatgatgatggtcgcgagccaaagcggcgagaaccggatcttcgagaactggtggctgagctggttcgacacggagatgccagactgcagcacggaggagcgtgcggcgatgcccggctttctggtgccggccgagatgcgacagatcaggactgcgccgccggaccagttcgacgcgctgtttgtcgagataatgagcaggcatcaccggggtgcagtcaggatggccgaccagatgtggcgaagcagcggcgatccgcgtctgcgcgtcatggcccacgccattcgccatgagcagcaaggcgagattgggctgatgcaaggcgtaagcggcgttgccgccgttaccaccgcggttcgcaacatgttcggcgacaacgtcaattga

SEQ ID NO: 2178 - DNA, 180 bp, BradyrhizobiumColbertium
atgggcaagaccaagggtcttcagcaacgcatcgcaggcaagacgaagcaggctgtcggcgagatcatcggcgaccaggatctccacgatgagggcaaggcgcaagccgagcgcgggcgcgacgaacaggacaagccgagcgagctcaatccgctgaagaagctcaagcagctgacgtga

SEQ ID NO: 2179 - DNA, 1605 bp, BradyrhizobiumColbertium
atgagcgtcgcgtcccgtgacgaaacggcgtggtgggaatccgccgtcatctacgagatcgcgctgatctccttccaggactcgaacggcgacggcaagggcgacctcgcaggattgatgtcgcgcatcgactacctgaagtggctcggcgtcgacgcggtctggctgacgccgatctacaagagtccgttccgcgacctcggctacgacatctccgactattgctcggtcgaccccgccttcggcggcctcgaggagttcgaccgcctggtcgaggcgctgcacgccgcgggcatccggctcgttctcgacctcgtccccaatcacaccgcgaacgatcacgcatggttcgtcgagagctcgagctcgcgcaacagcgccaaggccgattggtacatctgggccgatcctgccgagaacggcggcccgcccaacaactggctgagccggttcggcggcagcggctgggaatggtgcgagccgcggcgacaatattactatcattcctttctggtcgagcagcccgacctgaactggcgcaatccggacgtgagggccgccatcgccgatgccatgcgcttctggctcgatcgcggcgtcgacggctttcgcgtcgatgccagcgccgtcctgatcaaggacgagctgctgcgcgacaatccgccgaatccgcaagcagagggcaagccgccgccgcagcggcagacacccgtgttcaccgacgacagaccggaaacgatggactgcatcgagttcatccgggaggtgatcgacgcctatcctgggcgcatgctgtgcggcgaagtccagggcaagaccgaccgcatcgggcacttctacggaaacgaccggccgcggttgcacctgcccctgaatttcgccctgctcgattcacaatgggacgccccgtcgctgcaggcgacgatcgatgcctatctgagtgccattcccgatcatgcctggccggtctgggtcatcggcggccacgacaagcagcggatcgcgagcaagatcggcgagccgcagatgcgtgtcgtggcgatgctgctgatgacgctgcggggaacgccgttcttcttcatgggcgacgagatcggccgcaagcgcgtccccattccgtccgaccgcgtccgcgatcccttcgagaagctcgtgcccggatatggtttgtgccgcgatcccgaacgcgcgccgatgcgatgggatgacagccgcgacggcggcttcaccacgggccatccctggctgccgctggagccacccgatggcgcggccaacgttgccgtacagcagcgcgacgagcggtcgatcctggcgctgtttcgcgggctgatggccttgcggcacgagcatgccggcctgcgatgcggcgcttacgaaccgctgcgctcgcagaacgatgtcctcgcctacaaacgcatcgacggccgcaacgaaattctggtcgcgctcaacatcgcagccgagccgcgaaaactccattggcaaggtcgcggtcgcctggtgatgtcgacgcatctggaccggccgtccgggccgtcggctgacgcttcgatcctgcttcgaggcaacgaaggcgtgatcatcgcgctcgagcctcggtga

SEQ ID NO: 2180 - DNA, 570 bp, BradyrhizobiumColbertium
atgtttcatttctccaacatcgtacgcaccaagggcgaccccaagatcgtcgagggcgggccgagcctgaagcagtccgccgaccagctcgcgcgggcgctcggctggttcagcatcggcctcggcgccttcgaattgtttgcgccgagacgcgtcacggaagcggtcggcatggaaggccatgagacgctggtccgcgctttcggcgtgcgcgagatcctggccggcgtgatgtcgctctcggtcgacaagaacgccggcctgtgggcccgcgtcggcggcgacggcctcgatgccgccgcgttgctatcggggctgacggctgacaatcccaagaagggcaacatcgcgctggcgctgctgatggtcggcggtatcgccgtgctcgactatcgggccgcacaggacaccaagccgcgacgcccggctcgcgatgcacggcgcaagctttacccgaaccgcagcggcttccccaagggcatcgagaacgccagaactgcggcaaggcagatcgcagcgcatgccggtcgtagcgaggtgaagcaaggcgatgagcgtcgcgtcccgtga

SEQ ID NO: 2181 - DNA, 1176 bp, BradyrhizobiumColbertium
atgaaggcgctggtctggcacggcaaggaggacatccggtgcgacaccgtcaccgacccggagatccaggacccgcgcgacgccatcatcaaggtcacgagctgcgccatctgcggctccgaccttcatctcttccataacttcattcccggcatgctgcccggcgacatcatgggccacgagaccatgggcgaagtggtcgaggtcggctcgggcgtcaacggcaagctgaagaagggcgaccgcgtcgtcgtgcccttcacgatcatttgcggcgaatgcgaccagtgcaagcgcggtaatttttcagtttgcgagaccaccaaccgcaagcgtcatttggcggacaaggtgttcggccacaccaccgcgggcctgttcggctacacgcatctgaccggcggctatccgggcggccaggccgaatatctgcgcgtgcccttcgccgatgccacccacatcaaggtgcccgcgggaatccccgacgagcaattgctgttcctcagcgatatcttcccgaccggctggcaggccgccgtgcaatgcgacatcgagccgaccgacacggtcgcgatctggggctgcggcccggtcggccagatggcgatccgcagcgccctcctgctcggcgccaaccaggtgatcgcgatcgactgcctgcctgagcggctcagcatggcggaagccggcggcgccaccacgatcaacttcgagaccgaaagcgtggtggagcggctccaggaattgaccgacggcaaggggccggaaaagtgcatcgactgcgtcggcatggaatcgcacgtgatgccgtccctgcccgacacgctactcgaccgcgccaagcagatggtcatggcagagagcgatcggccgcacgtgctgcgcgagatgatctatgtctgcaggccgggcggcatcatctcggtggcaggcgtgtacagcggtctgtccgacatgcttccgatgggggcgttcatgaacaagggcctgacgatgcggaccggccagacccacgtcaaccgctggaccgacgacctgctccgccgcatcgaagaaggcgaaatcgatccgtccttcgtcatcacccataccgtcccactcagccagggaccggagatgtaccaggtgttccgcgacaagcgtgattcctgcgtcaaggtcgtgctgaagccctga

SEQ ID NO: 2182 - DNA, 783 bp, BradyrhizobiumColbertium
atgcccgccaatcaactcgccatcgtcacaggcgcctcaaccggtatcggcttggaactcgcaagatgctgtgcccaggcaggttttaacctcgtcgtcgccgcggacgaaccgcagatcgagcgggtggccgtcgatctgcgccgcctcggtggaagcgtggagcctgtcgaggccgatctcgctacgaccgagggtgtcgacaagctgtgcgcagccgtcggcgaccggccgatcgatgcgttgctggccaatgccggggtcggcctgggcaaggcctttctcgaccaggactttgccagggtgaagcacctcatcgacaccaacatcaccggcacgctgtatctgatccaccgcgtcggcaacgggatgctccgccgcaatgccggccgcatcctgatcaccggctcgattgccggctttatgcccgggagtttccaggccgcctacaacggcagcaaggcattcctcgattcattctcgttcgccctgcgcgaggagctgcgggacagcggcgtcaccgtcacctgcctgatgccgggtccgacagagaccgagttcttccgccgcgccgagatgatggacactaaggtcggcaccgaaaagaaggacggcgcctacgatgtcgccaaggtcggcttcgatgcgatgatgcgcgggcaggccgacgtcgtcgccgggatgaagaacaagatccagaccacggtcgccaacgtcacaccaaacgagatgctggccaagcagcaccgcaagatggcggagccgggcacggcaaagtcatag

SEQ ID NO: 2183 - DNA, 396 bp, BradyrhizobiumColbertium
atgacggcatggtcgcaccggggcgcaccgctcgcggggcgtcgcattttcgtggtcgaggacgagtatttcctcgtcgatgacatcggcaagacattccgggcaatgggcgcggagatcgcggggcccttcggtgatttcgaggacgcgctcagggtcctgcgcgacggcagcgtcctggatgccgccgtgctcgacgtcaacatccgcagcgagatggtctttccgatcgcccgcgaattgagagcgcgaaacgtcccgttcgtcttcaccacggggtacgacaaagtcgcgctcggtccggagtttcaggacgtgccgctgatggaaaagccgatcgatcttcccgcgatggcgcagaagctgactgggctcatcgcggagcccagggtgtga

SEQ ID NO: 2184 - DNA, 1008 bp, BradyrhizobiumColbertium
atgagcaaccgtgacatcatagtcatcgggggctcggcgggagccactgcgccactgaagcagattttgggccgtctgcccgccgacttgccggccgccgttttcgtcgtgctgcacatcccggcgcaaggcatcggcattctctccaccgttgccagcagagccgggccgcttcccgtgcgccaggcacagaacggcatgaagatcgcgccgggccggatctatcttgccgcgccggaccatcatctgctgctgtccggggatcacattttcctcggccgcggaccgcgcgaaaacatggtgcggcccgcgatcgacgccctgtttcgctccgctgccctctaccacggaccgcgcgtgatcggcgtgctcctgagcggactgttgtcggatggcgcggccggcctcaacgccatcaaacgctgcggggggatggccgtggagaaggaccccgcggacgcaatctcagaggagatgccgcggtgcgcaatggaagcgacgacggtcgacctctgcgttcccggcgccacaatgggtgacgtgctgtccgaactcgtcagggagccggccggcgccgccctggccatcccgcccgagatcaggctcgaggtcgagatcgcggccggggagcgcatcggcagcgacaatctggtcgcggttgcggaccctgtcgggctgacctgcccggcgtgcggtggcgtgctttcgaaagtcaaggacgcgcgccccatgcgcttccgctgccaggtcggtcacggcttcacggccgatgcgctcgccaaggagcaggagggacgcgtcgacgaagccctgcgcgtggcgctgcggatcatcgaggagcgggcagaactggtgcagcggatggcagccgatggtcggcgcagcggtcgcgctgccgtggccgagatgtacgaggccagggcggtcgaatatcgcgaatacgccgacatgatccggcgcgtcgtgctgaagtcgctcgaccgtcccaacggcgaacgggaagcttga

SEQ ID NO: 2185 - DNA, 267 bp, BradyrhizobiumColbertium
atggccgtctcccttgccgaacgcaccgcacagctcgaagccgagcgaggtctgctggtgaaggccgatcaggacatcgaggagggctggcggcgcatccacgatcaggaagatcgggttcgtgagctcatggctggcggccacgatacgtgccaggcggagcggctggtcagcctgctcaagcaaaccgtggtggagtgggagcggcaccgtgttctgatcgcggagcgggtcgaatatctccgccaggaggtcgcggcgggatag

SEQ ID NO: 2186 - DNA, 144 bp, BradyrhizobiumColbertium
ttgccgcgtccaaactcgccggcgctagcggaggaacccgcaatgccaatctgggaggagcttgccgatctgatcaggcgcgccgatcgcgccaacgcagacgccagccgcctgctggcggagaacgagcgctggcgccagtag

SEQ ID NO: 2187 - DNA, 3171 bp, BradyrhizobiumColbertium
atgcatgacgtcggcgaccagccggtccagggagagcgccagatcaagactccgctgatcataggggtgggcgcctcgcccggcgccctggacagcatcgagcgcttcttcagcaggctgaccatcggatccgatcaggcgatcgtgctggcgcttcagaaccatgaagccttcaacgagcggcaattgcgcgagatcgtgcaggcgtccaatggcggcaagctcaccgatatcagtgacggccacccgatcgaaggcggctcggtctatctctgcccgccgtcgatgatcaccacgatccagagcaaccggttcgcgctgcgcaaggcagagcaggcgcccggcgagcgcgcaacgatcgacagcttcctggtctccttggcggaggagcgcgccgagcaatcgatcggcgtcgtcctggccggcaccggcggcgatggtacgctgggcaccgcggccctgaaagaccacggcggtcttgccatcgccgagaaagtcgcagggcttgatgagcctgagcacctgcgcgacggcaacacgcccgccgcgatcgccgactatgtgctgccgccggaggatatcccggagcatatccaggtctatgctcgtcatctcaggcgactggacgagaagcagggcttcgacgaggttctggcaaccgccgcgacctcgctgttccgcatcgccgatatcctgcgcagcaggaccggcaatgatttccacggctacaagcagaacacctttctgcgccgcgtgcagcggcgcatgcaagtggtgcggatcgacgacatcgctgcttacgccgatttcctgcgcaacgacaacgacgaggctcagcacctcttcaatgacctcctgatcggtgtcaccgaattcttccgggacaagcgcgagttcgaggtgctggaagaccagatcatcccgaagatattcgagggcaagggagcgggccagcaggtgcgcgtctgggtactcggctgcgccacgggcgaggaggcctattcgatcgctattctcctgcgcgagcatatggcgcgcatggattccgtgccgcaggtccaggtcttcgccaccgacatcgatggacgcgcgcttgcgaccgcccgcgtcgggcgttatcgcaccaatatcgaggcggatatgaccggcgaacgcctgacgcgctggttcgtgcgcgagggcgacacttatagcgtagtgaaggagctgcgcgagatgtgcatcttctcgcagcacaacgtcatcaaggatgcgccgttctccaggctcgacctcgtttcgtgccgcaacctgctcatctatctcaatgccgagttccagaaccgggtcatcccgctgtttcatttcgcgctgctgccggagcgctatctattcctcggcaattccgagaacgtgacccggcaccccaagctgttcgcgccggtcgaccgtcgcgcccggatcttcaagaagctggagaccggaacccggctgccgcctgaatttccgattacgaccgcggccggccgggtgccggtcgaggtgccggcaatacgctcgttcggctccgacgtcggcctggagcggcgcgcgcagcgcatcgcggagcgctatgcgctcgcctatgtcattacggacgacaatttccaggtccagcatttctcggggcgtaccggccgctacatcgagccgatggcaggcgctgctacgctggacctacttcagctcgtgcaccgcgatctgcgtctggagttgcgtaccgcgctctgcagcgccgccgaaacgaacgagcccgcccatgccgagcaggtgcaactcggagtgaacggtcaacgccttctggtcgacatcaccgtcgagccgatccaggacggcggcggggaccagcgcaatttcgtcgttctgttcaaggaaggtccggtgcgaagcgtcgaagccgatcagagcggcaccaacgcgttggtgcgcaccgagcaggtggagcgcctcgaaaacgacctgcgcgccacgcgcgagcgccttcaggcgaccatcgaggagctcgagagcaccaacgaggagctgaaatcctccaacgaggaatatcagtcgctcaacgaggagcttcagtccgcgaacgaggagctggagacctcgcgtgaggaattgcagtcggtcaacgaggaactgacgaccgtcaacggcgaactggcccaccgcgtccaggaattgacgcgtgctaccagcgacctgaagaatttcctcgaaagcacgcagatcgcgaccgtattcctcgacaatgatctgcgggtcatgaacttcacgcctgcgattacgcagatcctccaccttgtcgagaccgacactggccggcccgtcggtcacatcaaggcccgcgtgccgatcgaggagctctatgatgacattcgtcgggtgctgcgcacgctcgccagcgtcgagcgcgagctgagcgcgccggacagcggcacgcgctacatcgtgcgcatcctgccctatcgcagcatcgacaatttcatcgccggcgtcgtcctcaccttcatcgacgttaccgcaatcacccgtgccgaagagcgacagcgcctgctgctggccgagctccagcaccgcgttcgcaacacgctcggcgtggtgcgctcgattgcgcgacgctcggcggaaacgagttcgaccgtggaggagtatgcctctcatctcgatggccggctgaacgcctttgcacgcacgcaggcgctcgtgactcgagatcccgaaggcggcgtcgatctcgaatatctcgtgatcgaggagctgcttgcctacaatgcccgggaaggcgagcagatgcgggtttcgggaccgaaggtgcgcttccagcccaaggcggcagagactttcgcgcttgcggtccacgagctcgccaccaatgctctgaaatacggcgccctgagccagcccagcgggcggatcgaggtaacttggcgtgtggacgagagcatcgagccggcggagctgctgttcgaatggcgagagcgcggcgggccacccgtgagcccgaggccacggaaaggattcggtaccgagcttctggagcgtacgctggcgttcgagttgaaggggcagaccacgatggtgttcaatccgttagggctgcaatgcaccatcgccattcccctgagcaagcgcgccttccatacaccggtggttgccctctga

SEQ ID NO: 2188 - DNA, 759 bp, BradyrhizobiumColbertium
atgccgttgtcgacagccgatcgcagcgttttggagccggtcgttcgccggctgggcgcgctcaggacgttgtcgaccgaggctcgggcatcgctcgaacttgccgttctcgacggtctccagcgggccggctcgggcgaagacctggtaacggagagtgatcccgtcgatagcgtccgggtcctgctgtcgggctggcttggccgctacaagatgctggaggacggccgccgccagatcgtcaacttcatcttcccgggcgagagctgcgatgcgcacgcctacctgctgggcgagatggaccattcgatcatgaccctgacgccggtagtctatgccgagataaagcgcgctcgcttcgagagcctgctggcgaaaaacccgacgctgtctgaggctttctggtgcgagacgcttctcaacaatgcaatccagcgcgaatgggccatcaatctcggccgtcgtgtcgcgctcgagcgcgtggccaatctgttctgtgagatattcgagcggctccgccccgtgggcatgatcgaccgcaattcctgcatcatgcccgtgacgcaaatggatctcgcggatgccacgggactgtccgtggttcacctcaatcggacacttcaggagttgcgtggggctgggttgatcgtgctgcgcgagcggacactgaccatcccggaccttgatgcgctcaagaacgcggcgttgtactcgccgagttatctgcgactgtatcgaggggctgaaatgacccgatga

SEQ ID NO: 2189 - DNA, 201 bp, BradyrhizobiumColbertium
atggcgaagcaaatccattttccgttgcagtcggacgagaagcacgtggagcaggttcgcgacgccattcgcgaggcacgaaaagctctggagcttcccctgccggatacgtttctcggccggagaactcacgagcccttaccaaacggacaaggtgatgatcaccaggagagcagcgtcgcaaaacgtggtgacgtgtaa

SEQ ID NO: 2190 - DNA, 183 bp, BradyrhizobiumColbertium
atgcctgatgccctgtttgcacgctccgcacgcgctatcgaagagagccgctccctccgggagcagcacaggcgagatgcggaccactaccgcgagaccgtgaacgatttgcgtttggcgatcatggacagcgcgatgcttcgctccgagctcaaggcgcaccgggacaacgagaaaccgtga

SEQ ID NO: 2191 - DNA, 198 bp, BradyrhizobiumColbertium
atgacgcgacatcgattcaagcaagtcgagaatttagagacgcgcttggccgcggaagctgagcggctacgcgaggaagccaaggcgcttccgcccggcgcggcgcgggacgccacgttgcgcaaggcgcgtcaggcggaaacggggtctcagatgagcgaatggctacggtcaccgggcctgcagccgcctcactga

SEQ ID NO: 2192 - DNA, 174 bp, BradyrhizobiumColbertium
gtgagcaagcttaagcagcttgcgaaaggcaacacgccaaccggcgtgatgagcatcaagcttcaacgcccggtcgcggccattcggagcaaggcgcaacgcgaaggaatttctctgagacccgtcaaccgctcgccgtacaaccggcgaaccaaagccgcgaaacggcgctga

SEQ ID NO: 2193 - DNA, 156 bp, BradyrhizobiumColbertium
atgttcaagaacgacttgaaggaggatcatcatggcaaaagcagcatggaaacggccgggctcaccgatcggccgcaagggaccgcgcaaggcaaatcccgcgtacaagcgtcgggcgcggcagccttggactcctgcggacgtgagcaagcttaa

SEQ ID NO: 2194 - DNA, 210 bp, BradyrhizobiumColbertium
atgaccgccaaacgtaaccgcaggaaacagacccaatcacttcaggagcggctggccgcattcgccgagaacgcccgcgaacgagcgcgcagcctgccacccggcagggaacgcgagatgctgctgcgacgcgccaagcagaacgaagtgacctcgaacctgacagagtggctgagcggacccgtgtccccaagacgtggacgatcatga

SEQ ID NO: 2195 - DNA, 201 bp, BradyrhizobiumColbertium
atggggagcatcaagcattaccgcgcgttccagatcgatccggacgggcacgtgttcggatgcatcaatctggtctgcgacgacgacgagcaggccaagcgcgaagcggccgcgctcgtgctggtccaccgcatcgagctgtggcggcttgatcagcggatcgcgaaattcgatgcgccgcaggagattgctcgccagtag

SEQ ID NO: 2196 - DNA, 903 bp, BradyrhizobiumColbertium
atgaccggcgcaccgccacttgaatgcctgatcgttggcggcggcccggccgggctgatggctgcgatctatctggcgcgtttccgccgcagcgtctgcgtcgtggacgcgggcgcgagccgggcggcgctgatcccgcgcagtcacaacgtcccgggcttcgtccacggcctgtccggcaccgaattgatcgaacggatgtcggcccagctcgatgatctcgccgtcgtacgggtcgaagcggaggtcacggcattgcagcggcaccgatgcggtttcgaagcgacgtggaacggtcgcgtgcatcaggcggccaccgtggttctcgcctgcggcatcgtcgatactcatccgccattcgcggagtggcgcgcggcggtcgcggacggactcctgcgctactgccctatctgcgacgctttcgaggccgcaggccgccgcatcggcgtcgtcgggccgcttgatcgtgcggccggcaaagcgcttttcctgcgtggctacgcgcgcgacgtgacgctgcttgcgaccggcgcggacgacccgaaggccgcaacgtcggagctgtccgaggcgggtgtcggaatcgtgttcgcgcccgacctgcgcctgacgcgacgagagggcggcgttggagcggacttcgcggacggacgtaccgcgcagttcgacatcgtctatcctgcgatgggcgcggaggtccgctctcagctcgcgacggcgctgggcgccgaccacgcctcggacggtcatctgaaggtcgacgatcatcagcgcacgtcgatcgaggggctctacggcattggcgacgtcgtcaccgatctgcaccagatctcagtcgccttcgggcacgctgcaaatgccgcctgcacgatccacaacagtctgccgcggcgcctggcctga

SEQ ID NO: 2197 - DNA, 189 bp, BradyrhizobiumColbertium
atgctggaagagaagctcaaggaagccattgtcgacgagttgaagcgccaggctgctgaccggccgcaatcgctgcaggtccagggcgcggcagacgcgaagggctcggaggagctgaccgtcaacggcaagatcgacctgggagcgctcgccatggtgatcgctggatcggtcgccggcggcccctag

SEQ ID NO: 2198 - DNA, 939 bp, BradyrhizobiumColbertium
atgatcggctttctgatctttcccgaattccagttgctggatgcggccggccccatctcggtgttcgagatcgcaagacgccacacgcggaatgcaccgcgcgtgatcaatgtcgcggcgaaggccggtgccgtgcgcagctcgtcgggcaccgagatgctggcgcgcagcctgcgatcggcaagctcggtcacgacgctcttcgtcgccggtggtgagggcgtcgaagctgcggcgcgctgcaaggccaccatcgccttcattcaacggctggcgcgccgcggcgtgcgaatggccagcgtttgctccggcgcatatctgctggccgaagccggggtcctcgacggacgctgcgcaacgacgcattggtcctgcacccgcgacttcatcgggcgctatccgaaggtcaggctcgagccggaccagatcttcacgcgcgacggcggcgtatggacgtcggccggcatcacggccggaatcgatctggcactcgccatgatcgcggaggaccatggcgaggagatttcgcaggcaaccgcacgccagctcgtgctctatcatcgccgcagcggcgggcaatcgcagttctcgagtctgctcgagctgaagacgccgaacggccgcttcggcagcttgttgtcgtggatgcgcgagaatttggatgcaccgctcacggtcgagacgctggccgagcgcgcggggctgagctcccggcatttcgtccgctccttcatcgccgaaaccggatccacgccgacaaaggcggtcgagcgcttgcgcgtcgaggtggcgcgcgagcgggtgcagtcctccggagagacgatcgagcgtgtcgcgcgatccacgggttttcgcgaccccgagcggatgcgccgggccttcatccgagcattcggtcagccgccgcagtcgttgcggcgctccgcacgaatgttgtga

SEQ ID NO: 2199 - DNA, 684 bp, BradyrhizobiumColbertium
atgtcggacccgttgcagatcggtcttctggtttttcctcgcgttacccagctcgatctcaccggtcctgcccaagtcttctccagcctgcctgacgcgacggtgcatctgatctggaagcgcatcgagcccgtgccgagcgattccgtgatcgcgctgacgccgaccgtcaccttcgccgattgcgcgcagctcgacgtgatctgcgtccccggcggttacggcaccgacgaactcatgctggacgaggaggtgctcgcgtttctgcgccggcaggcgggcagggcgcagtatgtcacgtcggtctgcaccggctcgctcgtgctcggcgcggccggcctgctcgagggatatcgtgcggccacgcactggacggcgacagacgccttgcccttcttcggggccgaggtgtcgcgggagagggtgtgcatcgaccgcaaccgcatcacgggcggcggcatcaccgccggcatcgactttgcactcacgctggtctccatgttgaggggccgcgcggctgcggaattgatccagctgcgcatggaatacaatcctgcgccgcctttccaggccggctcgccggaaacggcgccggccgcgatcgtcgcagcgatgaaggaacgggttgcgccggcgcaggcgcggcggctggagctcgtcaggaaggctatccgccaggaatga

SEQ ID NO: 2200 - DNA, 1266 bp, BradyrhizobiumColbertium
atggtggatcgggcaggggcgtcacggtcatggcataaccggctttgccggtcggctttcggtttcatcctggcgctgggtccggtcgcattcgccgaacgaggccaggccgccgatttttccggtggcgcgatccggatcggcatcatcaacgaccaggcgggacccttgtcggatcttgccggaccgggctccgtcgtcgccgcgaagatggcggtcgaagactttcagaaggccgcgcccgggctcaaggtcgacatcatcgttgccgatcatcagaacaagccggatatcggtgcccagatcgtccgcaaatggttcgacgtggacggcatcgacatggtggccgacgtcggaaactccgccgttgcgctcgccatccagtcgatcgcgcgcgacaagaacaagatcgtgatctactcggcggtcggcaccaccgacatcggcggcaagcaatgcgcgcgcaccggtctgatgtggttgcacgacaactacaatctggtcgccggctcggttcgcaagctggtctcgcagggatacgacagctggttcttcatcgcgtcggactatgcgttcggacgcaacatggtggatgtctcccagcgcgtgctcgcagcgaccggcgccaagtcgctcggcgcggtttttcatcccttgggaaatgcggattacagctcgttcctgctccaggcccaggcgtccaaggccaaggtggtcgcgttcgccaatgccggcgaacagctcgtgacctcgatgaagcaatggaacgaattcggaatgcatacggggcctcagaaggccgtcgccgagctcatgttcctgaccgatgttcacgccatgggtgccgagaccgccaagggcctcacgacggtcaccgcctggtattgggccctcaacgaggcgacgcgggcgttcgcccagagattctacaagctgcacaacgccatgccgaccgcgccacaagccgccgtctattcggccgtcctgcaatatctgcgggccgcggctgccgcgggcacggatgaaaccaatgctgtcctggagaagatgcggtcgatgcccgtcgacgatttctatgcgccgggcgcgcggctgcgcgctgacaacaagctggtgcacgatttccatctggtcgaggtcagaaagcctgcggacgtaaaagccccctgggactactacgacgtcgtcgagactatccgtgccgaggacgcctatcttcccctggaccagagcgaatgcccgctgctgaagacctcgcaaaagtag

SEQ ID NO: 2201 - DNA, 258 bp, BradyrhizobiumColbertium
atgccgaagaagggaatcacgggccacgacgactgggttctgaccgaggcgctcgcgaccgccctggtcgcgctggagcagctcgagccaaagcaccagccgaacgcgcatatggaggatatccgaaagttgctcgcaaacggcaaggagccggcggcggtgagcctgcacctcgcccaggccaaatgccgtctgtttcccgagctcgacccgctgcagatctaccgggaatacggcatcggcgaggagtatggctga

SEQ ID NO: 2202 - DNA, 375 bp, BradyrhizobiumColbertium
atggtcttcctcagcttcgtctaccgcttcctcaccaatttcgccttcatggcggtggtctatttcagcctgaacttcatggagaagtacccgaaccgggcgatcctggcgatcctggtgctggtctatgccgccatgcgctcggcctcgactctgcgcgcgttctacttcttccagaagatcgagaagctggaagccgagaccaggcgcctgcaggcgcccatcaatgacggttcatgcggaaccatgacgcgcaagcaggtcgtcgccgacgttgcgcggctgcggcgcgacggcgagctcaagtcgtatatggacctgttcttcctggccctgatcgtgctgctctgcgtcgccgccatcctgcggcagtga

SEQ ID NO: 2203 - DNA, 1155 bp, BradyrhizobiumColbertium
atgcagtatcgcgagacgctgccgttgaaggaccatgaagtcgttctgaccttcgatgacggtccgatcccgaaatattccaaccaggtgctcaagatcctcgccgacgaatgcatcaaggcgaccttcttcatcgtcggcaaccaggccaaggccaatccggaaggcgtccgcaagctggtcgcggcaggccacaccgtcggcacccacagcatggatcatccgctgaccttcgaccggatgccgatcgaaaaggccgaggcggagatcaacggcgggatcgagtggacgtcggctgcgatgaccgatccgtcccagctcgcgccgttcttccgcattcccggcctgatgcgcgccgagggcgtcgagaaccatctgatctcgcgcggcatccaggtctggagcgccgatttcccggccgacgattggcggcatgtgtcatccgaccgcgtctaccagctcgcgatccagcggctggaggcgaagggcaagggcatcctgctgctgcacgacatccaggcccgcaccgtggcggcgctgccgaagatcatccgcgacctcaaggcgcgcggctatcgcatcgtgcatgtggtgcccgccacgcccgaccgcccggcgacaccgaccacgcaagtcgaatggctgctgcgtccgccgaccgaaacgacgccgatcgcgcgctggccgcgcgtgccacatttcgtgttcacggagacccggatgctgccggctcccgttctggccgacctcaatgcccgggccgagcatcagccgctactgccgcgccggacgatggcacaggccaatgtcgcggcgaccctgccggtgccgggccgcgcgctcttcgcgattccggaaggttcggtcgaggtgctgctgtcgacgactctttcgcggcgtgccgcgacacggctggcgacggccgcccaggcctttcatgcggccaaggacaaggcagcgcaaggcaagccagcgaagaagccgcagctacggcgtacggctcatgcggcgccggtggcaacggatcatgccgcacagcccctcgatattgcacccaagagcgccgacacgaagagcggaggccccaagggcgcggcctccaagggtactgcgccccgtccgacccgcgtcgccagcctgaagaagcgcgcttaa

SEQ ID NO: 2204 - DNA, 117 bp, BradyrhizobiumColbertium
atgttgcaggtgtgcggcctaccgaccgtcgatcagaccaaggcggttggttaccgctggcgtgactggcttgatatgcttgatatgggattggtctctttctccgcgccgatctga

SEQ ID NO: 2205 - DNA, 993 bp, BradyrhizobiumColbertium
atgatcacgctttttatagataccaacgtcctgctttcattttatcacctgacgagcgaggacatcgaggagctgaagaagctcgtcgcactcgttaaaaacaaagagatcgatctcattgttccgaagcaagtggaggacgagttttggcggaatcgcggtggcaaaatctccgatgccatgaagaagctgagggaagcaagatttaacgcgtcgttcccggctttctcaaaggactacgatgaatacaatgaacttcgcgcgttgctgaagaaggccgacaagctgcatgctgagctcgtcagcaagatcatggctgatgcgaaagatacttctcttaaggcggatgagatcgtcactgggctattcaagacggcgaacaagccgaggttcgataacgatgactatttgaacgcgatgaggcgcgtgcggctgggcaatccacccggaaagaacgagagccttggggacgctgtgaattgggaaaccttgttggctacagtagataaggggaacgctctctactttgtgtcagaggataaagattatcgatctcagttatccgaaggcgttttcaatgagttccttcgggacgaatgggaaagtcggaagaagtcgtctctgatctactattcgaagatctctgacttcttcaaagactgcttccccgacattaagatcgcgagtcaggttgaagcagatctcgccattaacagtctgagtaatagcggcagtttcgcgtcaacgcacgtgcatatcgggaagctcgatacattcgatcaattcacaattgctcaggtcgagcggctcattaaaattccggggcagaacaatcaagtcggttggatcatcgacgatacggacgttcataggttttatgcgaagctgttggacaaatacggtggaggcctaaaggacgacgatcacgatctcctcgaagaacttgtcgagaaaggcaaaccagagccggatgaagacgatccgctttcttag

SEQ ID NO: 2206 - DNA, 345 bp, BradyrhizobiumColbertium
atgacgacgtctgataccgatgttcccgagccgacccccgaacaggccgcgctattcgcgcgggtgaggcggatgatgctgatcgcggggctgaccacggcgctggcgttctgcgccgtgctgatcgcggtgggctaccgccttttcaagtcggagggaagggcggtggaggccggcggcgacgtcaccgccaccctgccgaagggcgccaggatcgtttcgaccggtgtcgccggcgaccggctcgtggtcacgctggacctcggtggcgtcaccgagatccgcacgttcgacgcccacacgctgaagccggccggaaagctgaaatttgccaatgagccgtaa

SEQ ID NO: 2207 - DNA, 981 bp, BradyrhizobiumColbertium
ttggaggtcgtggtcgtcggcgatgagggctcggcccggctcgaccgcgtgctggcggcgcgcctcaccgagctgtcgcgatcgaggctgaaagccctgatcctggcgggcgccgtccacctgaaggcctccgcggtccgcgaccccgcttatcacgtcagtccgggcgatacgatcataatcgacgtgccgcaggcggcacccgccgagcccaggggcgaggatatcgccctcgacatcgtattcgaggacgatgacatcgtcgtcctcaacaagcccaaggggctggtggtgcatcccgcggccggccacgagaccggcacgctggtgaatgctttgatcgcccattgcggcgcctcgctgtctggcatcggcggggtgcgccggcccggcatcgtgcaccggctcgacaaggacacgacggggctgatggtggtggccaagaacgacctcgcccatgcctcgctgtcggcgcagtttgccgaccacggccgtaccggcgagatgcggcgcggctacatggcctttgcctggggggtgccgaaccggcatcgcggcacggtggacgcgccgatcgaccgccatccgcatgcgcgcgagaagatggcggtgcgccagggcggccgcgaggcggtcacgcattgggagatcctggagagctttgccgggcgggacggcaagccggtggcgagcctcctcgcctgcgagctcgagaccgggcgcacccaccagatccgagtccatctcgcccatatcgggcacccgctgatgggggatgccgtctacggcccgcatttcaagaccaaggccaaccagcttggccccgaatcgcaggcggctttggccgcgctgggacggcaggccttgcacgcctatctcctggtattggagcaccccaggaccggagaacttctgcactgggaggcgccgctgccggaggatttgcttctccttcagcgtgccctccaagcggcgcaatga

SEQ ID NO: 2208 - DNA, 900 bp, BradyrhizobiumColbertium
atggcccgtaccgctgctttgccggtcctcaatggagaatccggcctttctcgctacctcgccgagatccgcaagtttccgatgctggaaccccagcaggaatacatgctcgccaagcgttggcgcgagcatgacgatcgtgacgcggcgcaccaactcgtcaccagccacctccgtctcgtggccaagatcgccatgggctatcgcggctacggcttgccgatctccgaggtcgtctcggaaggcaatgtcggcctgatgcaggcggtgaagcgcttcgagcccgacaagggcttccgtctcgcgacatacgccatgtggtggatcaaggcgtcgattcaagagtacatcctgcgttcctggtcgctcgtgaagatgggtaccaccgcgaaccagaagaagctgttcttcaacctgcgcaaggcgaagagcaagatcaacgcgctggatgagggcgatctccgccccgaccaggtgaagatgatcgcaaagcgcctcggcgtcaccgatcaggacgtgatcgacatgaaccgccgcctcggtggtgacgcgtcgctaaacgctccgatccgcgacgacggcgaggccggcgaatggcaggactggctggtcgacaacacgcccaaccaggaagccatgatggcggagcacgaggagtatgatcaccgccgtgatgcgctgaatggcgccatgggcgtgctcaacccgcgcgaacgccgcatcttcgaggcgcgccgcctcgccgacgagccgatgacgctggaggaccttgccgccgagttcggcgtgtcgcgcgagcgcgtccgccagatcgaggtccgcgccttcgagaaggtgcagtccgcggtcaagggcacgatcgcaaggcaggaacaggccgcgctggaagccgcgcactga

SEQ ID NO: 2209 - DNA, 621 bp, BradyrhizobiumColbertium
atgatgtctcgcctggctgcggccgttttcgctgcgcttctcgtcgcccccgccgccgcggtggaggccgagctcgcaaagctcgcgcgcgcctcgggcacgcctgacatccccggccttaacatcgtctggctggcgccatggggcgacgtccgtaacgcacacccctggcgcaatatcatcgtgcaccagaccgagggacctgccggctcggcgcgcgggggcgcgcaagcgcaggcgaagaatccgacgcggcgcggcgtcacggtctgggtcgagaccgacggcacggtctattgggcggtggccgaaaaccacgtgccgacccacggcgacggcgccaaccgcaacgataacaaatacatcgacaacaagccgacctatcgccaggtggtgcgcgacaattcgatcggtgtcgagttcgccggcaactatcccgacgtggcgacgggcccgaccgaagcacaggtcgcggcgtggaagatcctcgtgaagatcctgcgcgcgcgctacgacatcccgctcgagcgcgtctatgcgcacaactgggtcgactacaaggacgcgcgctattgcgaaggctgctggctcgcaacgctggcgcggatgtggggggaatag

SEQ ID NO: 2210 - DNA, 1212 bp, BradyrhizobiumColbertium
atgctgagcgtgccgacactctggaccgtcattgtcatcaacttcctggcgctgggcctaatctgggcctatgtggcgcgcgcctatcccaaattcgaggcggcgcggtactggacggcggcggcggtgctggcggcatcgggtgcgggaatctcgatgctgcgcgaggtgatggacccgcgctttccgctgatcgtcggcggcggtctgatgatcttctcgtcctggctcgcctgcatgggtgtggcgcggttctatcagcgcccggtgtcgtggccggccgcgatcgccaattcgcttctctgcagcgccagtctcgccttcttcctgattgccgtcgacaacatgccgatgcgggtgttgacctactcgctggggcaatcgaccccggtcgtgctgactctgccgctgcttctcagcaggcagaatggccgggaaaatccgggcgctcgtctcgctgcgatcgtcgggatgctgcttctgtccattcacctcgtccgctccggcgcggcgctgctcggctatggcggcgccgtcaccgcgatcaacttcaacggtttgcagtcggtgatgatcctgctgctggtgttcctggcgatggcctggaatttcgcctgtctcctgatggcgatcgagcggctgcgcaacgaggttgccgacctcgcgctgctcgacgatctcaccggcgtcgccaaccggcggcatctgctgcagcgcctgaccgaggaatgcgcccgctccgagcgcagcggcgtcccgttctcgctcctggtaatcgatctcgacggcttcaaggccatcaatgacacccacggccacgctgcgggcgacgcgtgtctcaagcacttcaccctgatggcgcagacgcgcctgcggcccggcgatatgctcgcccgcaccggcggcgacgagttctgcgtcgtgctgccgtcgtcctccttgcgcgaaggcgcgctgatcgcccggcgcgtgctcgaggcgtgccgtcaggatgctgccggctgcaccggcagcgacattccgatcgcgatctcgatcggtgtcgcgcagtgggattgcagcatcggggaatccccggaccgcctgatggccaacgccgaccatgctctctatgccgccaagaagaacggtaagaacgacttcgctgtctatgatcccgccccgccgccgctttcgcccgaggcggtcgaggcactgcgcaaattcgcatga

SEQ ID NO: 2211 - DNA, 612 bp, BradyrhizobiumColbertium
atgaccttgtccttcctgctcacttcgctcatcgtcgtcgcttcacccggcaccggcgtgctctatacgctggccgccgcactgactcgcggctcacgggcgagcgtcgccgccgccttcggctgcacgctcggcatcgtgccgcacatggcggcggcgatactcggccttgccgcggtgctccacaccagcgcgctcgccttcgccgtgctgaaatggtgcggcgtcgcatatctgctctacatgtcctggcaggcgctgcgcgagacgggagctctggcggttggcggtgagattcgcgagcgatcgagtggccgcgtcatcgtcaccggagtcctgatcaacatactcaatccgaagctgtcgatcttcttcctcgccttcctgccgcagttcatcgccgcggacgaggcccatgtgctggcgcgcatgctggaattgagcggcgccttcatggtcatgacctttgcggtgttcgtcctctacggactctgcgccgcctcggtgcgcgagcacgttatctcccgtccccgcgtcatggcgtggctacggcgcagcttcgccgcaggatttgccgcgctcggcgccaagctcgcccttgcggagcactag

SEQ ID NO: 2212 - DNA, 375 bp, BradyrhizobiumColbertium
atgggacaagcagagccatttcgcgcgacagcgctgatcgttgaagacgacgtcatgcagcgggagatgctttgcgtcctccttgaagagagcggctaccaggtgatccagtgcgaaagcgccgaggccgccgagcgcgtcctcgacaagagcgccggggcactctgtctgatgctgaccgacgtccagcttgccggccgcatgaacggcgtcgagctcgcgcatgtcgccaagcaccgcaatccgaagctcgacgtcgtcgtcacctccggccgcccgctgaagcagcccttgcccgatggcgccaagttctgggccaagccctgggcgccgctcgacgtcttgcgagaagccgagatcgctcagctgtcctga

SEQ ID NO: 2213 - DNA, 831 bp, BradyrhizobiumColbertium
atgacgacgattcgcggcgccgccgcaatcacgggagccgcgagcgggatcggccgggcactcgccatcgagctggcgcagcgcggctgcgatctggcgctcgctgaccgcgacgaggcgggattaaaggcgctggcggcggagatcggaacgacgcgcaaggtcagcgtgcatcgggtagacgtcagcgagcccgccgacatcgcacaattcgcgagcgaggcgaccacggcgcatcccgccctcggcatcgtcgtcaacaatgctggcgtggcgctgatgggctcgttcgaggagatcgaccaggctcagatggactggctgttcgacatcaatttctggggcgtggtgcacggcacgcgcgccttcctgcctcacctgaagacacaggcggaggggcacatcgtcaatctctcctcgatcttcggcatgatcgcgccaccgggacaatcggcctatgcggcggcgaagttcgcggtgcgcggcttttccgagagcgtgcggcacgagctagcgatggcgggaagcccgatcaagctgtcggtggtccaccccggcggcgtcgccacagcaattgcgcgcaatgcacgcaccggcatcggtgtcaccgacaatgcccgccgggcgcagtcgatcgagcggttcgagaatgcggcgaagacctcgccgaaggatgccgcgctgcgcatcatcaggggcatcgaaagaaacgagccgcgcatcctgatcggcaacgacgctcgcttcatggacctgctgcagcgcttccgcccgggaacgtactgggccccgctgcagcggcggctggagaagatggctaaggggacgtag

SEQ ID NO: 2214 - DNA, 804 bp, BradyrhizobiumColbertium
atgtcgagactgcttctcgcggccgccttcgttgttctggccggcgggccggcgcaggccgcccgctgcggcggcgacttcaacagcttcattgccagcatggcgcaggaagcgcaggcagccggcgtctcggcaggcgtgacgagcgcggcgctcagtggcgtgacggttgatcctgcggtgctcgccttcgaccggcgccagcgctacaccttcaacaagactttcgagcagtatgtctcgacccgcgtcggtgccggccgtatcaatgggggccgtgcgatgctgcagcgtcacgccgcgctgctctcccgcatcgagcagaagttcggcgtaccccgttacatcctcgtcgccatctggggcctggagagcgacttcggcaagggcgacaccggcaagctgcccgtgatccgcacgctggcgacgctcgcgcatgattgccgccgcaccgacctgttccagggcgaactgctcgccgcgctcaagatcgtgcagcgtggcgacctgcagctgcgcgacctcatcggggcctatgccggtgagatcggccagactcagttcctgccgtcgtcctacatcaagtatggcgtcgattttgacggcgacggccatgtcgacctccgccacagcatccccgacgtgctcgcctcgaccgcgaacctgctccacaccagcggcttcaagatgggtcagccctacggcgagggcacgccgaatttcgaggcgatgcgcgagtggaacagggctgtggtctatcgcaagacgatcggctatttcgccgaccggctgatggggcagtga

SEQ ID NO: 2215 - DNA, 528 bp, BradyrhizobiumColbertium
atgaccggaattaccttcactgccgagcagattcgcaatgccccagccccggtgcggcaatggatcgagcaagaggtgatcgccgcgctcggccttgcgtcgcgcccgccggcggccaccccgccgcagacggcgcatctggtcgcctgcagcgtggaagacatggccggcgtgctcgagcacatccgcggcgtgcttccggcggtgaacgtactgttcgagctcggccggcccggcatcaacatcggccgtcccgcagtgatgacgttccgcctgttggacatcctgcatcacacgcgcctcgcggacgtcggccaggtcatcacctgcctcgagatgatcaaccaggcgctgaccgaggtgaagaaggatgcatcggtgcggttctgcggcttcgacaacgaaggccactgcctgatcgcaccgcaaacgcaggagagcatcgcaacgctctggcagaccatgatggagcgccagcaggcggcccaggcgagcgaggcaggcaaccgggtggcaccagcggcgtga

SEQ ID NO: 2216 - DNA, 345 bp, BradyrhizobiumColbertium
atgtccaaccatcaacctccccaagcgccgcggcccgccctcctccgcattccgctgtttcgcctgctcgccatcaacctcgcgatcggcgcctgcgccgccgcgctgctggtcggcgggctgctctggctcaaccccggacatctgcgcgagctgatcttcgccgacagtgcaccgggcgttgcgctcatcctgctgctcgcctccttcctcatcacgttcggctcggccgcgatgggcagtgcgatcatggctcagggacgcaacgagaacggcgacaaaggcggcggacatggatcgcggctcgccgttcaggaagtggcgcagcgtccgcacacgcattga

SEQ ID NO: 2217 - DNA, 237 bp, BradyrhizobiumColbertium
atggccaagaaacccggaaccaatcccaaaggcgaattcgccttcttcaacgtcgtctatgaggacgattcccagcgctccaaccgccgcgtccccgccgagttgctcggcggcctcgacggcgacgaacccgcccgcggcttcatcatggagcaggaccgcgagatcgccgaaaagagcggccgtccgccgctggagatcaagcggctcgagcgggtggggacgaagaagaagtag

SEQ ID NO: 2218 - DNA, 2139 bp, BradyrhizobiumColbertium
atggccaccaaggcaaagacgctgcaggcgaaggacaaggaaaaagacgacaaggcagcggatgcgccggagaaggactcccaggacgcgccctcgcccttgctcgacctgtccgacgccgccgtgaagaagatgatcaagcaggccaagaagcgcggcttcgtgaccttcgatcagctcaacgaagtcttgccgtccgaccagacctcgcccgaacagatcgaggacatcatgtcgatgctctcggacatgggcatcaacgtcaccgaagccgacgacagcgaaggcgaggaggagaaggacgagggcgacgacgacaccgacaacgagctcgtcgaggtcacccagaaggccgtcaccgaggtcaagaagagcgagccgggcgagcgcaccgacgacccggtgcgcatgtatctgcgcgagatgggcacggtcgagctgctgtcccgcgaaggcgaaatcgcgatcgccaagcgcatcgaggccggccgcgaggcgatgatcgctgggctctgcgagagcccgctgaccttccaggccatcatcatctggcgcgacgagctcaacgaaggcaagatcttcctccgcgacatcatcgatctcgaagcgacctatgccggtcccgacgccaagggcggcatgaacaccgcgatgatcgcgggtccgaacggcgaagcctctgccgatggcgacgcggccccgaccgccggggcgcctgcgcatgtcgcccccccggctgcgccgccgtcgccgaccccgttccgcgcggcgcccgccggcggcgcggatgcagtcgaggagaaggatcccggcgaggctgcggccgaatccgacatggacgacgacgagttcgagaaccagatgtcgctggccgcgatcgaggccgagctcaagccgaaggtggtcgagatcttcgacaggatcgccgacagctacaagaagctgcgcaagcttcaggagcaggacatccagaaccagctcgacagctcctcgcatgggccctcgctgtcgccgccgcaggagcgcaagtaccgcaagctcaaggatgagatcatcgtcgaggtgaagtcgctgcgcctcaaccaggcccgtatcgacagtctcgtcgagcagctctacgacatcaacaagcgcctcgtctcgcacgagggccgcctgatgcgccttgccgacagccacggcgtcgcgcgcgaagacttcctgcgcaactacaccggctcggagctcgatccgcgctggctcaaccgcgtctcgaagctgtcggccaagggctggaagaatttcgtccatcacgagaaggaccgcatcaaggagctccgccacgaggtgcatcagctcgcggcgctgaccggcctcgagatcgtcgagttccgcaagatcgtgcactccgtgcagaagggcgagcgcgaggcacgccaggccaagaaggagatggtggaagccaacctccgcctggtgatctcgatcgccaagaagtacaccaatcgcggcctgcagttcctcgacctgatccaggaaggcaacatcggcctgatgaaggcggtcgacaagttcgagtaccgccgcggctacaagttctcgacctacgccacgtggtggatccggcaggcgatcacccgcagcatcgcggaccaggcccgcaccatccgcatccccgtgcacatgatcgagacgatcaacaagatcgtgcgcacgagccgccagatgctcaacgagatcggccgcgagccgacccccgaagagctcgccgagaagctcggcatgcctctggagaaggtccgcaaggttctcaagatcgccaaggaaccgctctcgctggagacccccgtcggtgacgaggaggattcacatctcggcgatttcatcgaggacaagaacgcgatcctgccgatcgacgccgcgatccagtccaacctgcgcgagaccaccacgcgcgtgctcgcctcgctcacgccgcgcgaggaacgcgtcctgcgcatgcgcttcggcatcggcatgaacaccgaccacacgctggaagaagtcggccagcagttcagcgtgacgcgcgagcgcatccgccagatcgaagccaaggcgctgcggaagctgaagcatccgtcgcggtcgcggaagctgcggagcttcttggataattga

SEQ ID NO: 2219 - DNA, 2004 bp, BradyrhizobiumColbertium
atgcgcttcacgccccagttcctcgacgagcttcgtgcccggctttcggtgtccgaagtcgtgggcaagcgcgtcaagttgaagaaggcaggcagagagtggagggggctgtcgccgttccagcaggagaagacgccgtccttctacgtcaacgaccagaagggcttttatcacgacttctcctccggcaagcacggcgacatcataaccttcgtgatggagaccgacggcgtgccgttcgcggaggccgtggagcggctcgcaggcatggcgggcctgccgctgccggcggtgacaccggatgcggcgcggtacgagcagcggcgcaagtcgctgcatgacgtcttggatctcgcggccaagttctttgcggagacgctggcctcgcgcgtgggcgccaaagcgcgcggctatctcgccgaccgcgccatctcgccggcgacgcaattgcagttccgcctcggctacgccccgtctgatcgctttgcactgaaggagcatctcggcaagctcggcatctccgtcgacgacatggtcgagacgggattgctcgtcgctggcaacgacatcccggtgccgtacgaccgctttcgcgatcgtgtgatgtttccgatcacggatctgcgcggccgcgtcatcgccttcggcgggcgcgcgctggagaaggacgttccggccaagtatctgaactcgccggagacgccgctcttccacaagggcgacaatctctacaaccaccagactgcgcgcaaagccacgcatgatggcagccccttgatcgtggtcgaaggctatgtcgacgtcatcgcgatggtcaccgcgggctttgcaggcagcgtggcgccgctcggcaccgcgctcaccgaaagccagctggcgctgctgtggaagatggctgatgagccgatcctctgcttcgacggcgaccgcgccggacagaaggcggcgtaccgcgctgccgatctcgcgctgcctttcctcgcacctggcaagagcctgcgctttgcgctgctgccggaggggcaggaccccgacgacctcgttcgctcgggtgggcgcggcgcgatcgaagaggtgatcgccgcggcgcgtccgctcgccgacatgatctggtcgcgcgagctcgaaggcggcaatttcgcaacccccgagcggcgggccgcgctggaggcgcggatcagggagctcaccaacggcattcgcgacgaggtggtgcggcgctactaccgcgacgagttcgtcgagcggctccagcgcacctttgcccccgaaggggggcgcagcggcttcggcgggcggggcaattttcgccagggtggcggccggtccttccagccgaggggaggggcgaatcgattcggcggtcagggattcggcggagggcgtcgcggcgtctccggttccatccctctgccctctggcccctaccaggcggcaagtccccagctagcggcaagcccgatcatgcgcggccagcgcagcgccatctcccgccgggaagccctgatcctgcaatgcctgatcaaccacccctggctgctgcacgagcatctcgaggaggtcgccgccctggagctggcccacccggaggcccacaagctcagggccggcatcatcgccgccttcgccaacgaccatcaccactcgtccgaccccggcgagcaggctgaaaagatgcgcagcgatatcgagaagggcggattttcgcaggttcttcaaagggttgagaatgggatcaccaccgcggcggtatggggggcccgcgagggcgcagcgcgggacgacgttctcgccacctggcatcagctggttgccttgcatcggcaatggcattcactacttagagagctgaaagacgccgagctggccttgggcgaggaccccagcgaggccaatttggcatggctgcgtgacgtgaaggctcggatcagcgaagtcgacggcaccgaggccctgatcgagggttttggcgagctgtcgggccggctccagaagagcatgtga

SEQ ID NO: 2220 - DNA, 504 bp, BradyrhizobiumColbertium
gtgacgggcgagcccctgcccttcatgccggcgctgtcggtgaccgacagcgaggccgtttcattgccgctggtgccctcgcgcaacgcctggaggctggtcggcgtccccagcagcttgcgctacaccgagcgcgcggagaagcagcagctcgtggcggtgcaggccgggctcggccgaccggaggcgaccagcgcggcgctgatcccgatccgcaaatcggccgcctggtgggaactgacgcaggaagagcgtcgcaggatcttcgaggacaagtcgcaccatatcgcgagcagcatgcgcttcctgcctgcgatcgcgcggcagctctatcactgccgcgacctcggcggccctttcgactttctgacctggttcgaattcgccccggcgcacgcctcgctattcgaggagctggtggcaatgctgcggcggacggaagagtggacttacgtcgagcgcgaggtcgacgtgcgcgcggtgaaggaagtgctgtcggcctaa

SEQ ID NO: 2221 - DNA, 399 bp, BradyrhizobiumColbertium
atgacttccgatcgcctttttgtctatggcacgctgatgcgcggcttcgaccatccgatggcgcggctgctggcgggacacgcggactttctgggagaagcgacctgccgcggccggctcgttctggtcaagcattatccgggattgctgctctctgatgcgccgtcggacgtcgttcacggcgagctcttccgcctgcgcgtgccggacgagctgctacgcgagctcgacatgtatgaagcctgcggcgagggctttccggagccgaccgaatatctgcggcagctggtcgacgtgacgcgtgccgacggcgctaccgagagggcctggacctacgtctacaactggcccgtcaccgctctgccgatcatcgagtccgggcggttcttggagcattag

SEQ ID NO: 2222 - DNA, 792 bp, BradyrhizobiumColbertium
atggctttggaggcggccgaggcagccgatcaactgctcggcgagggcgacattccgcccgtgcatgaggtgaatgcggaggggacatcgcccttcctgctcacatcggatcattacggacgggtgctgccgcgcgcgctcggcgatctcggcgtcgcggaaagcgagctcgtcaggcacatcgcctgggacatcggcatcgccggcgtcgccgagcggctcgccagaatgttggatgcgcatttaatcgcgcagcgctattcgcgcctcgtgatcgactgcaaccgtccgcccggcgttgcaagctcgattcccgtgatctccgaggcgaccgcgatcccgcgcaacgaagggatctcggagcaggagcgcgaggcaaggcggcgcgagattttcgagccttaccatcgccgcatcggtgcggcgatcagccgccgcatccacgacaagcggccgaccgtgctgatatcgctgcacagcttcacgccggtttatgccggcatcgcgcggccctggcatatcggcacgctctatcaccgcgaccccgtgctgccacgactgctgttgaaacatctgcgcgccgagggtgacatcgtcgtcggcgacaacgagccttatgcggtgagcgatctcaccgactacaccatccccgtgcacggcgaagcccgcggtctggtcaacaccggcatcgagatccgccaggatctaatcacggaccagtccgcccagcagcaatggtccgagcggctggcgcgtatccttgcggagatcgaggcggagctaccgctgtaa

SEQ ID NO: 2223 - DNA, 621 bp, BradyrhizobiumColbertium
atgatgtccatgcaagcctatttcgccttcgtcgccgcctgcattgcgctggcgctgctgccggggccgatcgtcaccctcgtcatcgccaacggcctgcgccacggcacgcgggctgcgctcatcaatgttgccggcgcgcaagccgggcttgccatcgtcatcggcatcgtcgcgatcggcctgacctcgttgatggcgaccatgggctactggttcgactgggtgcgctttgccggcgcggcctatctgatctggctcggcatcaagctgatctgggcaccggtcgaaggcgtcgatgtcgacgcgccgcctccgcccccgcgtggcggcttcttcctgcaaggtttcctggtcctgctgtcgaacccgaaggttctggtgttcttcggcgccttcatcccgcaattcatggacatgaaccagccgcactttccgcaagtcgcgctactgggtgcgaccttcatggtcaccgctgtagtgacggatgcgctctacgccctcgccgccggccgcgcgcgaaagttcttctcggcgcgccgcacgcgaatgctgtcgcgcatctccggcggcttcatgatcggcggcggcatctggttggcgctgacgcgggcgaagtga

SEQ ID NO: 2224 - DNA, 315 bp, BradyrhizobiumColbertium
atggatgaggtctttaaagcgctcgccgacgcgtcgcgacggtcgctgctcgacaggcttcacgccaggaacggccaaacgctgaacgagctctgcgaagggctcgacatgacgcgtcaggccgtgaccaagcaccttgtgattctcgaggaggccaatctggtcaccaccatcaggcatggccgcgagaagctgcattacctcaacccggtgcccatccatcagatcggcgaacgctggatcaggaaattcgagcgcggcaagctctccgcactcagcgagctgaaacggcagctggagaaacgcgatgagtag

SEQ ID NO: 2225 - DNA, 513 bp, BradyrhizobiumColbertium
atgaatctcgaccagttcaagcctctcaccgtctacacgatctacatcgcctcgacgccggagaaggtatgggaggcgctgacctcggccgagttcagccgcgaatatttttccggcttcgcggtggagatggagccgaagctcggcggcaccttcatcgtgcgcgaacccgacggttcggagcacatctccggcgaggtgttcgaatacgatccgcccaggaagctgacggtgacgtggaacgtgaactggcccggcctcgtcgaaaaactcggcatcaccgtcgtcacctatgagatcgagcccgccggcgaagccgtccgcctcactctgagccagcgccacgaccgcccgctcagcgaagacatcctttccggcggccgcaccggctggccggcgatcctgtcggggctgaagagcctgctggagaccggcaaggcgccgaagatcgagatgtccccgccggtgaggttgctggaagcgctaaaggcgatggggatcaagatgccgtag

SEQ ID NO: 2226 - DNA, 777 bp, BradyrhizobiumColbertium
atgtccatctcgggcaaggtcgatccggtggtccgtcccctggcggcgaccgacatcgcggaggcgctggtcgaagggctgcgcgatttccaggcgttgccgatttatggtgtttgtttcggcggcctctatgccgccggcggcatcgccatcctgctctgcctcaccgcctttggaatggtctatctggtctatcctctggctgcgggctttgcgttgatcggaccgtttgtggcgatcggcctctacgaagtcagccgccgccgcgagcgcggcgagccggtctcattcgctgcgatctggtcggccatccgttcgcgcagcgagatcggctggatggccttcgtcacactgttcgtattcgtggtctggatgtaccaggtgcggctcctgatcgcgctgctgctcggcctcaatgcctcgttctcgagccttcaggaattcatgacggtggtgctgacgaccaacgagggcctgctgtttctcggcatcggtaatgccgtgggcgccgtgctgtcgctgatccttttctcgctgaccgtggtgtcgttcccgctgctgctcgaccgcgacgtcgatttcgtcacggccatggtgaccagcgtgcgcgccgttgtcacgagcccggtgccgatgatctcgtgggccgccgtgatcgtgatgctgctgatcgtctcggcgttgccttacttcctcgggctgatcgtgacgttgccggtgctcgggcatgcgacctggcatctgtatcggcggctggtggcgccgctgcccgcctga

SEQ ID NO: 2227 - DNA, 2232 bp, BradyrhizobiumColbertium
atgagcctgcgtacccggttactgatcctcgtcatcgccgccatgctcgtgccggcgatcctggtcgggctccgttttgtgcagaaccgggccagtgagatcgacgcggcgctggccaatctggtcgcatccgccgacgatatcgcgagcgatctggacgagaagatccagggcacggcccaacttcactacgggctcgcccgtgcccgcgacctcgacacgcgcgacaaggcggcgtgctcggcgtttctgtccgacgtccgcgaagaatatccgcagttcacgggcatcctgaccatcgatcccgacggcaagctgttctgtgactcgctgcggaccgaccgcacgctcgacctgaacgaccgcggctatttcaagcaggtgaagaatcttcaagggggtgtcgcagtggagccggtgttcggtcggctcaccggattgtcggtgctgcagatcgcctatcccgtccgatcggaggcgggcgcgctgaagttcgtgctgctcgcgtcattcaacctgaacaagttcgcagaatttcacgacaagcggctgctcgccgaacaggacatccttctgatcgacgccaagggtacggtgctggtcgcccccaagggcggcagctggagcgagcccgtcggcggatccatcgcgggctctgacctattccgctttgcggcagcggccgatcgcgagccgtttcacgaggcgagcgaccgcgaaggccgtacgcagatctggtccgttgcccgctcaccttcgatccgcaaggccggtctctacatcctggtcggacgatccaaggacgggctggtcgcggcggcaaaccgccgactctacgaggacgtggcgattctcgcagtagcctcgctgctgctcctggccggcttgtggattctcaccaccctaagcatcggccgccaggtcgggcggctcgcggccatggcgaggagcctcgggcgcggcgatctcagcgcgcgcatcccggagccccacccgggcggggagctcggcggattgatgacgctgcttaatagcacggccgaatcgctcgagcagcagcgcaccgccatcgcggatctcagccacaagctcagccagtcccagaagatggaggccatgggccagctcacgggcggcgtggcgcacgatttcaacaatctcctgaccgtcattctcggcaacgcggagcaccttgccgacaggctggcgggaaacaaggaattgcaagggatcgccggtgacatcgcaaccgccgccgagcgcggagccgacctgaccaagagcctgctcgccttcgcgcgaaagcagcctctgaggccgcgagatatcgacatcgccgaggaagttctcggcatggagcagcttctgcgtcggaccctgggcgagcatatcgagtgccgcttcgcgttcgaccaagatctgtggccggtcagcgtcgatcccggccagctgacgacggccctgctcaacctcgtgctcaacgcgcgcgacgcaatgccggaaggcggcaagctgaccgtcgagcttcgcaacagctcgctcggcgaatccgatctcgacgtcaacggtgaaccgcggcccggcgactacgtcatggtagctgtcaccgataccggcagcggcatgaactccgaagtggcgagccgcgcgttcgagccgttcttcacaaccaaggaagtcggcaaagggaccggtctcggcctgagcatggtctacggatttgcacaacaatccggcggacttgtgcaaatgcagtccgaaccgggacaaggcagcgtcgtcaggctcttcttcccgcgtgtcgccgcagcacagaacgagaatccgacgccgaccgagccgttcaacacgtcagacggacgcgaaacgattcttctcgtcgaggacgacgagatggtgcgtgcctatgttgaaagcgagctcaagacgctgggctatcgcgtcatcgcgacgtcgaacgggtccgcagcgctggctgtgctgcgccagccagacgagatccatctgctgttcaccgacgtcgtgatgcccggcggcatgttcggaccggagctggcgaggcaggcaaccggcctgcggcctggtctcaaggttctcttcacctccggctacagccaagatcccgttaggacacccgacggaatcggcgacgccctcatcttgaacaagccgttccggcgcaaggatcttgctgcaatgctgcgggccgctctttcggagccgtctcggtag

SEQ ID NO: 2228 - DNA, 444 bp, BradyrhizobiumColbertium
atgcgcctgatcgatatcgttctgcttctcaacacgctctggttcgtgggggccttcatccagttcagcatcgcgcaaaccaacacgctgaagatcctgctgccgcgcgaagaacgcagcaatccgatcgcgcccacccttgcggcaagcgtcgcgttcctcggcggaatgaatctgccgatcggactcctctcgctctacctactggtcgcccgaccgtccttcttccagccggtcgaagctcaactcgcgctgttcctgttcttcgccgcctgccatttcagccagttcgcgtacaacgtccccgtgctgatgcgcggcggccgcgtcggcgtggcgtactggccggtgctgaaaggcccgatgctccggatcttcgttgtcgacgctgctctgttcgcggccaatctcgccgtggcgctccagctcgcaatcgggtcctga

SEQ ID NO: 2229 - DNA, 369 bp, BradyrhizobiumColbertium
atgagcggacaggcaatgaatcgcgcggccgcggaacgcttcgttgcggcatggtgcgcgagttggtgcagggtcgatatcgatgcggtcgtcgcgcatttcgccgagaatgcgcagatgcgcagccctcttgctctcaccctgacggggtgtccgtccgtcatcggcgccgagagcatccgcgcctactggcggaaagcctatggccacgttgagagtgccgacctgaagatactgagctggagctgggatgaggcgatcgcgcggctgacggtgtggtggcaactgggcgatacgcgcgccagcgaattcatggacttcgacgatgcgggccgcgtggtgcgtagcgaagccttctacggaaaataa

SEQ ID NO: 2230 - DNA, 468 bp, BradyrhizobiumColbertium
atggccaagacctctcacgccacggggcttcaccgcgcctcacttgcaaagctgaacgaactcgatgcggcgctggagctgatgtattacggctggcgcgggatgacgctggaggccgacgcatatcttgcgaagcagggcctgtcgcgtccgcatcaccgcatcctctacgtggtggcgcgccggccggacatcgcgatcggcgcgctgatcgagatcctcggcatttccaagcaggcggtcaaccggccgctcaatctgctcctggagcgcaagctcctgacctcgaagcgttcacctgagcagcaccgctcgaaactgctgcgcctgacggaggcgggacggcgcgtcgagcagcgcgcgtcggatcacgagcgcaacgtgatgcgcgaggcgttcgatcgcgtcggagcgtccggtgcggccggctggatgggcgtgatggaggcgatcgccgacaacaactga

SEQ ID NO: 2231 - DNA, 1611 bp, BradyrhizobiumColbertium
atgctgatcgaagccaaaacctacgacgagctctatcgcaacttccgctgggacgtccccgcgcgcttcaacatcgcggaagcgtgctgtgatcgtcatgccgacggcacggggcggctcgcgctgatctatgccgacgagaacggcgccaccacgcgcacctctttcgacgagatggcggagatgtcgcgtcgcttcgccaacgtgctgaaggcagatgggctgcaccgtggcgaccgcgtcgccgtcttcttgtcgcagtcgctggaattgccgatcgcgcatatggcggcgttccgctccggcatgatctcgatcccgctgtttgcgctgtttggcgaggacgcgctggaattccgcctgtcgaattcgcaggccaaggccatcgtcaccgatgaaggcggctggcagaagctcgcaaggatccgcgaccgcctgcctgacctgaagaatgtctatgtggtcggcggccgcgcgccgcccggcacgaaatctttctgggacgcgttgaacaccgcctcgcccgacttcccgcgggtcgatacctcgtgcgacgatcccgcgctgatcatctacacctcgggcaccacgggcaatccgaagggtgcgctgcatgcgcatcgggtcgtgctcggtcatctcccgaacgttgagatgtgccacaacttcttacccaagcccggcgatctcatgtggacgccggcggactgggcctggatcggcggcctcgtcaacggcctgctggcgttctggtaccacggcatcccgctggtcggccaccgcgcgcgaaagttcgagccgcaagcggcgatgcagatgatggccgatctcggcgtacgcaatgtcttcctgccgccgaccgcgctgaagctgatgcggcaggccggcgtgaagcataccggcgtcaagctgcgcagcatcttcactggcggcgagtccctcggcggcgagttgctcggctgggtgcgcgagaccttcggcatcgatgcgcacgaggtgttcggccagaccgagtgcaatctagtgatcggcagcaactcgaacctgtttccgatccgccccggctcgatgggcaaggccacgccgggcttcgacgtccgcatcgtcaacgagaagggcgaggaattgccacgggggcagcgcggcatcatcggcgtccgccagccatgtcccgtcaccatgcttgaatattggcgcaatccagaggcgacggcgaagaaatatgccggcgacttcctcctcaccggcgatctcggtgtgcaggacgaggacggatacttctggtacgtcagccgcgaggatgacgtcatcaccaccgccggctatcgcgtcggcccgtccgagatcgagcacacgctgatgaagcatccgtcggtggcgatggcggccgtggtcggcattcccgatccgatccgcacggagtcgatcaaggcctggatcgttctgcgcccgggctttgccggcagcgatgcgctctcgcgcgagatccaggagttcgtcaaggtgcagcttgcagcccacgaatacccccgcttcgtcgagttcacggagacgctgccgatgacggcgaccggcaaggtgctgcggcgcgaattgcgggcgaggggctag

SEQ ID NO: 2232 - DNA, 1137 bp, BradyrhizobiumColbertium
atgaccgccatcaagccgtttcgtatcgccatcagcgacgacgtcctggcggacctgaaatcacgcctcgcccgtacgcgttggccggaggcggagctggtcgacgactggagccagggtgcgccgctgcgatggatccaggagatgtgtagctactgggccaaggactacgactggcgcgcgcgcgaagcgaagatgaaccgcttcgagcagttcaccaccgagatcgacgggctcgacatccacttcatccatgtgcgctcgaaggagccgtccgcgctgccgctgatcatcacccatggctggccgggctcgatcgtcgagttccagaaggtgatcgcgccgctggtcgatcccgccgcgcatggcggcagtcccgccaatgcgttccacgtgatctgtccctcgctgcccggcttcggcttctcggccaagccgaagaccaccggctggggcgtcgatcgcatcgccgcgacctgggcgaagctgatggcccggctcggctacgcgcgttacggcgcgcaaggcggcgactggggctcggcggtgacgagttcgctcggcgcgcaggatgccgagcattgcgccggcatccacatcacgctggccttcagcgtggcaccgaaggtcgagggcgagccgacggcggaggagaagcgtgcgctcgccggcctcaagcactatgccgatctcgattccggctactccaagcagcagtcgacgcgtccgcagacgcttggctacggcttgacggattcaccgagcggacaggcggcctggatcctggaaaagtactgggcctggaccgattgcaacggacaccccgagaacatcctcacgagggacgagctgctcgacaacgtcatgctctattgggcgaccgcgacggcaacctcctccgcgcggctctattgggagagctttggcaagcgccgcgcgacgccggtggtgaaggtgccgacgggtgtcgccgtgttccccaaggagatcgtcacgccggtgcggcggtggatggagccgaacttccctaacatcacccactggagcgagatggaaaagggcggccatttcgcggcattcgaacagccggagctgttcatccgcgatgtcaggacgttcttcgcgaccgtgcggtga

SEQ ID NO: 2233 - DNA, 456 bp, BradyrhizobiumColbertium
atgctgcgcgacgacatcaacaatgcggtcaaggaggccatgaaggccaaggacgagcgcaagctgtccacgcttcgcatggtcaactcgaccatcaagaacgccgatatcgacgcccggggcagcggcaagcctccgctgtcggacgccgagatcctcgccgtgctgcagaaaatgatcaagcagcgccaggaggcggtcgagctctacgacaagggcggccgtgccgagctggccgcgcaagagcgcgaggagatcgcggtgatctcgacatatctgccgcaacagatgtcggacgacgacgtgaagaaggcaatcacggatgcgatcgccgagacgggcgcgagcggcatgaaggacatgggaaaggtgatcgccgcgctgcgcgcgaaatacgccggccagatggatttcggcaaggcgtccggcttggtgaaggccgcgctgtccagttga

SEQ ID NO: 2234 - DNA, 729 bp, BradyrhizobiumColbertium
atggaccgaacgaccccgattgtgctggttccggggctggcctcctcggcccggatctatgctcccgtgatccccgcactctggcgtttcggaccggtgacggtcgccaaccacatccgcgacgacagcatggccgcgatcgccggccggatcctcgctgacgccccgccgcgctttgccctcgccggccattccatgggcggttatatcgcgttcgagatcatacgtcaggcgggcgagcgcgtgacgaagctcgcgctgatcaacacccaggcgcggcccgacacgccggaggcgcccgcccgtcgccgtggcctgatggagcgtgcgaggcggggcgagctccgcgccatccgtgaggagagctttccggagctggtgcatccatcgcggcgcgatgatgccgatattctcgagctcgtgcatgcgcaggacgacgatgtcggcgtcgagggctatctgcggcagcagaccgcgatcatcgcgcgtgtggactcacgcccgacgctgtcgacgattacctgcccgacgttggtactgacaggcgatgccgacaacacgatcccgaatgcgctctcgaaggagatggcggaaggcatcgccggcgcgagactcgtgatcctcgatcgctgcgggcacctgccgcaagccgagcagccggaagcgaccgtgcgggcgctcatcgaatggctagggagcgaggttgtctcaggggcgcgaacggcctag

SEQ ID NO: 2235 - DNA, 1191 bp, BradyrhizobiumColbertium
atgacacaacatgacaacgataccgcttggccggaccacaaaccgaccgcgctcctcgtgcttgccgatggcacggtgctcgaaggcttcggtctcggcgccgaaggccacgccgtcggcgaggtctgctttaacaccgcgatgaccgggtacgaggagatcctgaccgatccctcctatgccggacagctcatcaccttcaccttcccgcatatcgggaacgtcggcaccaacgacgaggatatcgagacggtgaacatggccgcgacgcccggtgcgcgcggcgtgatcctgcgtacagcgattacagatccgtcgaactaccgcgctaccaagcatctcgacgcttggctgaaggcacgcggcatcatcggcctctccggcatcgacacccgcgcactgaccgcgctgatccgctccaagggcatgcccaacgccgtgattgcgcattccaggaccggcgagttcgatctgcatggcctcaaggaagaggcacgcgaatggccgggcctcgagggcatggacctcgtgccgatggtcacgagcggccagcgcttcacctgggacgagacgccctggctgtgggacaagggttttggccggcaggacaagccggagttcaacgtcgtcgcgatcgactacggcatcaagcgcaacatcctgcgcctgctcgccggcgtcggctgcaaggtgacggtggtgccggcgacgacctcgtccgaggacatcctggcgatgaagccggacggcgtgttcctgtccaacggtccgggcgatcccgccgccactggcaaatatgccgtgccggtgatccaggacgtgatcaagtcgggcacaccgacctttggcatctgcctcggccaccagatgctgggccttgccgtcggcgccaagaccaagaagatgcatcagggccatcacggcgccaatcatcccgtcaaggacgagaccaccggcaaggtcgagatcacctcgatgaaccatggttttgccgtcgacgagacgaccctgccgaagggcgcgacgcagacccacatctcgctgttcgacggctccaattgcggcatccagctcgacggcaagccggtgttctcggtgcagtaccatcccgaggcgtcgcccggcccgcgcgactcgcattatttgttccagcgctttgccgatttgatgcggcaaaagaagagcgcttga

SEQ ID NO: 2236 - DNA, 216 bp, BradyrhizobiumColbertium
atgtacgcatccgacgttgcgcagcgacatttttcggcggccgtcgacgaggcggagacggccggcctcgggcacgaagccgtctgtcgtgccttgctgaatctggtgatctcgaaatatctggagacgagatcggtcgccgacatccaggcggagctgcgcttcatcgccgagaactgcgatcccgacacggacttcatgttcatgcgtccgtga

SEQ ID NO: 2237 - DNA, 522 bp, BradyrhizobiumColbertium
atgtccgtggtccgcgacaaagccgagccgctcgccatcgtcttcgaggacgatggcctcgtgccgaacaacatccttccgttcctggtctaccagcgcgcggtcaagctcgatccagggcgcccggaggagaccatcgaagacctgttcgaagcaaacggctggggcgggacgtggcgcaacggcgtctacgactatctgcattatcacgcgaccgtgcatgaggcgctcggcgtcgcccgcggcagcgcccgcgtccgcttcggcggcgatcacggccaggagcttcacatcacggccggcgacgtcgcaatcctgccggccggcacaggccaccaatgcgtccaagcgagcgacgacttctgcgtgatcggcgcctatccgccgggcgccaagatggagatcacgcaggcgacggcggagaaccacgccagggcgctgaagacaatcccggaagttgccctgccgccggccgaccctgtgacgggcaaggacggggcattgatgcggctgtggcgatag

SEQ ID NO: 2238 - DNA, 717 bp, BradyrhizobiumColbertium
atgagcgcgcgctcggagccgtctggcaccttgcgggtggcggcgtcgctgccgatcggactgcatgtgatcgcgcccgctctgcctgcgttccgaaagcgtcatcccaaagtgacggtcgatctcagactgactgaccggattgtggacatcatcgaggaaggcatcgacgtcgcaatacgcatcggcgatcttgcggattcgcgcctgttgtcgcggagccttgccccgtatcgactctgctgctttgcgtcacccgcttaccttgcggcgcgcggcgcgccacagcaccccgacgatctggcggggcacgacctcgtcaacctccgctatcagaacacgggtcagagcttttggtggcccttccagattggcggcgaggagatcgaattggcgcccaccgccggcatcgtcatcgacgtgagcgatgcggtcgccgtcacgctcgcggccggcggcggcatcggcatcagcgcgaccttcatcgcagcgccttatgtcgagcgcggcgcgcttgtccctgtgcttgccgcctttgcggtcgagcgacacaacatcacggccgtgtggcccgaaagccgccgcgcaaatcctgccgtgcgtgctttcctggacctgttgcaggacgttttccaagagcggctgacggccacggcgagcctgtcggaagaagggcgccacgctgccggcccacaggcgacagcgaacggttcttag

SEQ ID NO: 2239 - DNA, 147 bp, BradyrhizobiumColbertium
ttggttatccacgactgcgaggagcaggccgagcgcctcgatggatcccggcgctcgcttttttgcggcctgctcgggagcggtgttttgttcgcaaagctgtcaggcgacctcccgtctcacctcggcctcgtcaaggcgatgtaa

SEQ ID NO: 2240 - DNA, 1392 bp, BradyrhizobiumColbertium
gtgctcgggatggcccaaacctcgctcgatcgggaagccgaactgcgccgtctccaagtcgagctcgacgagcgtcgccgagatgttgttgcgcgggaacgcgccgcggagcgtgccacatcggacgagaagggctgggcagaggcgtgggcggcggaatgccgtggatgctggctcggcgagggacccgagaccccggcggtcggcgcagtgcgcgaggtgctcgccgcgatcactgagctttccccgaccattgagaagcgtgctgcccttctcgaccgcatccacaagatggaacgggaccagctcgcgttcagcgaggaggttgcggcactcacggggcttctcgggattgaaccgggtcccgacgccgtcctggagctggcccagcgtgtcgtcgaaacggtccggagtgccacggcggcccgcgaccagcgctccagcctgacgcagcggaccggggaggcacaagcgcgccagcgtgagcttgcagaatcgcaagccgttcatgacgaacagaagcagcggatgacggcgtttttcgcggttggctctctggaggaggtgtcccggaagctgtccgatatcgagcgacgaaccgacctcatgaaccaagctcgtgaggcggaaaaggatatcatcgaggctcttcgtgcatcggatatccagcgtgcggaggcggcgctcgatcaagcggacaggccggcactcgaggccgagctcacggaattgacgacccgagcggaagaccaggacaagcgttgtcatgaactgttcgcggcgaagtccgccgccgaggatcgggtcgaggcgatcggtggagacgccagggtcgccatcatcgaggagcgccgacggacgaccctgctcgagattgaggatggcgccacgcgatatctgcaactacgtgccggcatctcagccacgcagcaggcgctcgccagctatcgcgagcgccatcgcagttcgatgatggcgcgtgcgtcggaggcgttccgaaccatcagccgcggcgcctataccggcctcatcgcccagcccggcaaggacggcgatacgctgattgcgatttcagcagagggcggttcgaaggccgccgataagctttcgaaaggcacgcgcttccagctttacctcgcgctacgcgtcgccggctatcacgagtttgcccgcgctcgcagttcggtgccgttcgtcgccgacgatatcatggagacgttcgatgatttccgcgcggaggaggcatttcgcttgttcgcggaaatggcccaggtcggccaggtgatttacctcacgcatcaccagcacctttgcgaaatcgttcaacgcgtgtgcccgacggctcggttacatcgccttgacgaggccgaggtgagacgggaggtcgcctga

SEQ ID NO: 2241 - DNA, 363 bp, BradyrhizobiumColbertium
gtgctggcgtcggtttcggttggattgctgcgcgccgcgtgcccgcaggcctgtgagatggcgggaaaagaattcagaagttggcccgaactcgccgcagccgcgccggtgatgcgggtaatgatcggtctctcggaggcgggatgggtggatggcgcaggcagggttgggcgatacgccgcagccgcaatcctcgccaccgtgctcgaaaagtcggctcgattgccggatcagatatcgagtcccggcggctacttccgggcaatgatcgatcgcgctgtggagggccagttgcacctggaaaagagcttgttcggactggccgatggcgccttcaagcgaggagcggggggcgcgcaatga

SEQ ID NO: 2242 - DNA, 615 bp, BradyrhizobiumColbertium
atgctgatcggatacgcccgcgtctcaaaagccgatggctcgcagtccctcgacctgcagcacgacgacttgcgcgccgccggtgtcgaacaggacaacatctatgaggatcacgcttccggcggccgcgacgatcggcccggactggccgcctgcctgaaatccttgcgcgacggcgatgtgctcgtggtctggaagctcgatcgtctcgggcggtcgcttgcccacctggtcaacactgtgaaggatctgtcggatcgcaatatcggcctgcgagtgctgaccggaaagggcgcccagatcgacaccacgaccgcatccggccggatggtgttcggcatcttcgcaaccctggccgaattcgagcgagatctgatccgcgagcgcaccatggccggcctcgccgccgccagagcgcgcggtcgcaaaggcggacgaaaatttgccctcaccaaggcgcaggtgcgtctcgcccaagccgccatggcgcaacgcgacacttccgtttccgatctgtgcaaggaactagggatcgagcgcgttaccctctatcgctacgtcggtccgaagggtgagctcagggactacggaaagcgtgtcctcggcttagcgtag

SEQ ID NO: 2243 - DNA, 402 bp, BradyrhizobiumColbertium
ttgcaggatcggccagagctggacgccatagccggccatgaggcccattgcgcgctcgacgggggcgaggtggccgagggcggcgaactcatccagcaggtagaggaccggcacggccggcttggcggggtcgcgcgccatgtcggtcaggctttgcgcgacgagcagacgcagccagcgggaataggtggcgaggcgatcgggcggcaggacgaggaacaccgaggcgttgcggcgcttgagattggcaaagcggaaatcggatcggccgaggaccgcgaccatgcgggggctgtcgaggaaatgggtatggcgctgcgcggccgagaggacgccggccgcttcccggtcggatttgccgaggtggggtcgtttgcgggagggggcgaaatcctacgctaa

SEQ ID NO: 2244 - DNA, 390 bp, BradyrhizobiumColbertium
atgaccgacaccgatgcgcccgaatggcccgatcccgccgacaaggcccatgccgttgaacaggccaagcagctccgtgaccaggccgccaagggcggcttgcggtttgaagcctatctgccgccgtcgctggccctgtggctgctcgatctgatcgaacaggacacgttccatgatccgtccgaagccgtgttcgtgatcctgggcgagcataaggagctggcaccccatgccgatctgcgccgggaactactcaagcgccgcatacaggtggcggccgatgattcccgaccgggtatttcgatggaagaaatgaaagccctactgcgcgaaaagcgcgaagcccccctgcccgagccggccagatgggaaaagcggtcccggcgctga

SEQ ID NO: 2245 - DNA, 318 bp, BradyrhizobiumColbertium
atgagcaagacttacaagagtgaagctctggcggccgtccatgagatgatggaaggcttctatgagtccggcgcgatcgacaagcagacgatgcgcgaatttgacgaggggtgtctgacaaccgttgagccgctgacccccgaggaaatccgttctattcgtgagcgtgagcgtatctcgcagcctgtctttgcccgctatctcaacgtgagtaaggggctggtgtcagattgggaacgtggggtgaagaagcccggcggcccggcgctgcggctgctgaccgttattcagaaaaggggccttgaggcgattgcctga

SEQ ID NO: 2246 - DNA, 390 bp, BradyrhizobiumColbertium
gtgagggttttcaaaaacagccggtttcacaagtttgcccgaaaggagaaaatctctgacgcgatgctttgtgaggctgtagagcgggctgagcgcggccagatcgacgccgatctaggggccggccttatcaagcaacgagtagcgcggcccggcgctggaaagtctggcggcttccgaacgctggttttcttccgcgcggagacgagggcggttttcgcgttcgggtttgccaagagcgatatggcgaaccttgatgatgcggaagaagcctacttgaagaaggccgcaaagctggtcttggggtttgcagatgcgcagatggacgcggaagttgctgcgggtcgaatgttcgaggtgaattgcgatgagcaagacttacaagagtga

SEQ ID NO: 2247 - DNA, 252 bp, BradyrhizobiumColbertium
atgaaggccgtgggcgcgcagaccacgccgcctgttgcgcctatcgcggaatccgcccccgcgccgaccccggatcgtgccgagggtaagcgttaccatgccgccacgcgggccggaatgaagcgggtgacagtcgtggtcgagccggaggaacatcgccgggttaagcggctgtcagccgacaccgaccgctccattgaagacctcatgcgcgaggcgcttgctgacttgctggcaaaacatagtgcttga

SEQ ID NO: 2248 - DNA, 381 bp, BradyrhizobiumColbertium
gtgatcgacaccgcgccgcactcggaagcggccgcaatggcggcaacgcgatcgtccgacatggtgttgatcccgtgccgagccggaatcctcgatcttcgcgcgatcggaagcacggccgagctggtgaaactcgcccaaaagccggcctttgtcgttttgaacgccgtgccgccgcgtgccacgcagcttctggccgatgcgcgggaagccgttcaggttcacggcttggaggttgcccccgtcgccttccagcagcgggcggctttcggacatgcgctcacggccggcaaaaccgctccggagtatgagccggccggcaaagccagcgaggaagtgtccgaattgctgacctggcttagaggccaattgctgatttga

SEQ ID NO: 2249 - DNA, 2778 bp, BradyrhizobiumColbertium
gtgccagcccagcgtagcaccgttgttggtgtccacgttggattccaggaccgacggatcgatcgtgaaggtgccgatgttcgcgttggcgccgaaccccggcagaggggagctgacggacgacgaggtgaacaccgcttgcgccgtgtgggtgtcgatcagatccagatcctggatcgccagcgtgccgccgatcgaaagggacaagccggcgtcctcagtgacgcagcccttcgccgcgtcttcatcgctggtgatggtcggggcatcgttggtcccggtgatcgtaattgtgacgtcctgcgtcaccatggcattattgttgtcgatcaccgtgacggtgtagacctgggtgatggtctggccttcggccagcgactgcagcaccggatcgtcattgtcgagcgtgaaggtccagccgaccgacccttgcgaactggcgccgggactctcggtcactgccgtcaatgcgaacgtgccgacatgcgaggttccgtcggtgaagccggggagatgcgcgctcgacgtcgtcgacttcacgacgaagcttgcggtgtgagtgtccgtgagatctggatcgttgaacgtgatggtgccgttcgcctggagcgcgaccgcatcatcctcggtcaccgcgccggtcgtatccgtctcgtcctcgacgatcgtcggcacgtcgttggtgccctcgacattgacgtcggctccattgatggagaccgtgagcggcgtgctgacgacgccgccgtgcccgtcatcgacctgcaccacatagttgaggatcagcctctcgtcctcggcaaggaagtcgaagagatagtcgggaacactgtaggtccaggtggccgtcccgttgttgccgtttccagcgccctgaaccacggtcagcggcaccttgacggccgcgatcgccgcgagctgctccggggtcagcgtcgcggtgatgtcgttgccctccgcatcgagatacttgaacggctgggtcgacgagagctcagcgctcacgatcggccggtccgtcagatcgacgtccgtgaaggtgaccgtgccggtgatgatgtccagagcttcgttgcccgtgcccaccttctcgatcagggtgccgcccgatgtagcaacagtcggcttgtcgttcgttcccgtgatcgtgatggtgatcgggatgaacctggactcggggtcgacggtgaagttggtgtcgacgcggaccatgtaggtcagcgtcagggtttcgccggccgcgaggaagtcgaagaccttgtcgggaatcgtgtaggtccagactgccgagccgttgttctcgttggtggggtcggcaatgacactgatctggatctgcgtcgccgcgatgccctgcttctggagcgcggtgagcgagcccgtgacgtcctgctggccggcgttcttgtagacgtagttcggcgcctccgcgaggctcaccgacaccgtcggccggtcgccgaggttttgatcgacgaatcggatgaggccgctgactgtatcggcctgggtgtcgccggtggtgtcggcgcgttcggtcagcgcgaacgccgtcttcacattgccgccgaggtcgaaactctgtgcaatcggctggccgggaatgcggatggccggcggcgtcgagacttggggagcatcctgtcccggcggactgaggttgacgaatgtcgcgactgcagtcaggccggatcccgacttgaacaccacgtcctgactgaacggcgtgatcgtgtcggtaaaattcgtggtcagcttggtgttggtgttgttgtccgtgaacttcagcgtgaacacgtccgtgatcagcttctgcacctccggggacatcagcgcattggagatcgagacgttgccgccgctgatctggatcatctggccggcctggttgaccgtggcgatcggcagcagcgtgaccttgtcgaacaggatgtaggagccggtcgtgccgttcggctcgaccagcacctggaagctcgcctgcggctgcggatcgccgccgccggcgggaacgacgaagttgatctgggtcagcaccgccgtgccgcggatgcccatggtggcgaccggcgtgtcgaccttcatgtcgccatgcttggcggtctcgccggcgacgaaggtgatggtgcccgcaaccaggctgagcagcgaggagttgctcgacccgttggggtcgtagaccatctcgttcagcaccatccgcgcattcgacgacaggccgaacacggtgccgtcgatgaaggtgatgccgagcgtcgaatcggccccggtcgagaccacgtcgcccttctcgacattgtcgccgttgttcaggatcaccgacacgccgttgcggatcgcggtcgcgctgccggaaagtttggtgacgtgaccgatgacctgcgcggcagaggcgccgggcgcggcctgggcgacctggacatggccggtgagggcgttgacgatgtcgccggtgaggtgggcgccgtccggcgaggcgatcgcggcacgcttgtcgcccctgaaataatcgtgaaccacgaactcacggccgtcgtgggacagcacgagatcgaggccggcgcgcttgaactcgccgttgaagatcagattggggtcgggaacaacgaacgcaccatccggcacatggccatgcgcctttgcgatgaagggcttggccgcaaaggagtcgaaatggacataggcgggcgagttggaaccctggccgtccaagaacgtcgcggcgtcaaatttgccagcgtaattcaaccgggcaccgtgaaaagggttaaaatttaa

SEQ ID NO: 2250 - DNA, 729 bp, BradyrhizobiumColbertium
atggagaccgcagctcgctcgtgcacctttcgcgcaatcctcgtcctgtgcggcctgatcctgctcggatcggccgccgagcttcgcgccggcacgctgctgtcgccgggcgcgggcgtcctcgtgcgcaaatccgccgagccgttcggcgtattcgtcttcgccatctcgtccggcggcttgcagcagaaatggtccgcactaaaagacaggctcgatgacgacatggtgcagctcgcgctgtgcgacggcgaccgagacaattgcgcatcgccggcagccctgaagctgctcgccatcgtcgaccaggcccgcgcccgcgagggccgcgcgcgcctcggtgagaccaaccgcgccatcaatctcgccatccatgccgtcaatgacggcaccgacgacctctggagttcgccgctcgcgaccttcgcgcgcggcgccggcgattgcgaggattatgccatcgccaagctcgccgcgctgcggctggcgggcgtgccccctgaagacctccgcatcgtcgtggttcgcgacatccgcgccggcgaggagcatgccgttgccgctgcacggctcgaggaccactggctgatgctcgacaatcgccgcatggcgatggtcaaggatgacgcgacgcggagctatcagccgctgttcgtgctgcaacaggcggcggtgatgaagtatgtcgagccggtgcaggcttcggtggcggtcgccgagacgcggtga

SEQ ID NO: 2251 - DNA, 1200 bp, BradyrhizobiumColbertium
atgtcgaaatcgttcagcgcattcggccttgcaatgagtgccgtcgtgctcacctgtctgccggccgcagcgcaaaccaaggtgaccaacgagggcatctcggcaaccgagatcgtcgtcggcactcaccaggacctgtcgggtccgatcaaggggtggggcgtgccggtcgcaaacggcatgaaaatggcgaccgaggagatcaacgccgccggcggcatccacggccgcaagattcgactggtcgtcgaggacagcggctatgatccgaagaaggccgtgctggcgtcgcagaagctgatcgagcgcgacaagatcttcgcaatggtgggaccgatgggatcgccgaccgttctcgccgcgcaggacatcctgttcgacgccggcgtcctgcagctgttcccgctgacggccgccgagttcaccttcaagttcgatccggcgaagccgcaggaacgattgaagttcaacaacctgcttccctatgtcgagagcacgcgggccgcggtgaagtacatgatggagtggaagggcttcaagaagccctgcatcatgcaccaggacgacgagtacggtaagaacgtgctcgacggcttcaatcagcagctcaccgccatgaaggcgcagccggcttcgatcacgagctacaagcgcggtgcctccgacttcagcgcgcagatcgccaagatgaaatccgacggctgcgacctcgtggtgctcggcaccgtgcttcgcgagaccatcggggcgatgagcgaagccaagaagctcggctgggacgtcaccttcctcggcgcgacccccaccaacgtgatggaggttcctgcgctgggcaaggaagcggtcgaggggctctatgccgcaagcggcttcgagattccctatgaggacaccgcgaagggcaaggtgaaagactggctcgtcaactacaagaagatgttcaacgcagacgccaacacgcaggcgatcatcgggtacaacgcaatgatgacgtttgcgttctacgcgaacaaggcgggcaaggatctcaccggtcagaagatgcttgaagcactcgagtcgggcgaaaaattcctcgacatcttcaactcaccgccgaccaagttctccaagaccgaccacctcgccaacaccattacccaggtgcagcaggtcaagggcggtcgctgggtgctcgtgaaggacaatctggtgttctga

SEQ ID NO: 2252 - DNA, 1839 bp, BradyrhizobiumColbertium
atggcccgaccggcggtgctgacggtcgctgatacgatcgcaaagagcttcttgcgcgccgccgagacgcggggcgacaagccggcgatccgcgagaagaagttcggcatctggcagccgaccagctggcgcgaatggctggagatctcgaaagagatcgcctatgcgcttcacgccatcggcttcgcgcccggtgacgttgcctccatcatcgccaatgccgttccggaatgggtgcacgccgatatgggcatattgtgcgccggcggcgtctcctccggaatctatccgacggattcttcatcccaggtcgaatacctcgtcaacgattcccgcaccaaggtgatcttcgccgaggacgaggagcagctcgacaagatcctgacctgccgcgcgcgctgcccgagcttgcagaagatcatcgtgttcgacatggaaggactcagcggctttaccgacgacatggtgatgtcgctcgacgagtttcgcgcgctcggccgcaaccacatggtcggccgcgaggcgctgtggcaggagatgatcgacagccgcagcgccggcgatctcgcgatcctcgtctacacgtccggcacgaccggcccgcccaagggggcgatgcacgccaatcgcagcgtcacgcaccagatgcggcacgccaacgacttcatcccggcgcgggaggatgaagaccggctgatcttcctgccgctctgccatgtcgcagagcgcatcggcggctattacatctcggtcgccctcggctcggtgatgaattttgccgagagtccggagaccgtgccggacaatctgcgcgaggtgcagccgaccgtctttctggcggtgccgagaatctgggagaagttctactccgcgatcaccatcgcgctgaaggatgcgacgccgctgcagcaatgggtctatcggcgcgcgatcggcatcggctatcgcatggtcgagtaccggctcgagggcgagacgccgccgctgtcgctgcggatcgccaaccgcatcgcctaccaggttgccttccgcaacatccgccgcatgatcgggctcgaccgctgccgcattgccttcactggtgcggccccgatcgcaccggagctgatccgctggtatctggcgctcggcatcgacatccatgaggtctacggccagaccgagaactgcggggtcgccaccatgatgccggcggaaaggaccaagctcggctcggtcggcactgcggtgccctggggcgaggtcgcgctgtcgcccgaaggcgagatcctgatcaggggcgacttcctgttcatgggctatctgaaccagccggagaagaccgcggagacgatcgattcccgaggctggctgcacaccggcgacgtcggcaccatcgacaatgaaggcttcgtccgcattaccgaccggatgaaagacatcatcatcacctccggcggcaagaacatcacgccgtccgagatcgagaaccagctcaagttttcgccctacatctcggatgcggtcgtgatcggcgacaagcggccctatctcacctgcctcgtgatgatcgaccaggagaacgtcgagaagttcgctcaggatcacgacatccccttcaccaactacgccagcctgtgccgggcgagagagatccaggacctgatcgggcgcgagatcgagcaggtcaatggcaatttcgcccgcgtcgaaaccatcaagaagttctacctgatcgagcgtcagctcacgccggaagacgaggagctgacaccgaccatgaagctgaaacgcggctttgtgaacaagcgctacgccgccgagatcgaagcgatgtatcgcgagcgtgcggtggcgtga

SEQ ID NO: 2253 - DNA, 789 bp, BradyrhizobiumColbertium
atggatgccgccacgaccccggatatcatcctcaagctcagcaacatcgagagctattacgggcctatcatggcgattcgcggcatctcgctggcggtgccgcgcggccgcatcgtcacgctgctgggcgccaacggcgccggcaagaccacggtgctgaagacgatctctggcatcctcgacccgcagaaggggacgatcgagttcctgggcaagccgatccagcgcatggaagccgaccggatcgtgcggcttggcctcagccacgtgccggaaggacgcgaagtgttcccgttcctttccgtgcgcgagaacctgatgatgggcgcctacccgcgcaaggacagggacggcgtcgcggaagatctggagcgcgtctacggctattttccgcgtctgagggagcgcatcaaccagccggccggccagctctccggcggcgagcagcagatgctcgcgatcggccgcgccctgatgaaccggccggcgctgctgctgctcgacgagccctcgctcggcctgtcgccgctgctggtgaaggaaatcttcaccatcatccgtcgcgtcaacgaagagcagggcatgtcgatcctgctggtcgagcagaatgccaaggtggcgctggagaccgcacattacggctacgtcctggagatcgggcggatcgtgatgaacgacacctgcgaccgcttgatgcattcccaggacatccaggaattctaccttggcgccaaggaagcgggcgcgcgcggcgagcggcgctggaagaagaagaagacgtggcggtga

SEQ ID NO: 2254 - DNA, 759 bp, BradyrhizobiumColbertium
atgagctattttcgcgccgagaacctgtcgctgcacttcggcggcctcaaggccgtcgatgcggtctcgttcgcggtcgagaggggcgagatcctctcgatcatcgggcccaacggcgccggcaagagttcgatcttcaacctgatctcgcggatctaccggccgacctcgggccgcatcttcttcgaggaccaggacattacggaagagccgccctacgacatcgccaagctcggcatcgcgcgcacctttcagaacatcgagctgttcgagaatgcgaccgtgctgtccaatctgctggtcggccgccaccggcactcgacgacgcagctctggcaggaactgctgttcctgccgagcgtgcgggccaacgagaaggtacaccgccgccgggtcgagcaggtcatcgaattcctcgatctcgagccgtatcgcgacaagctgatctcgggtctgccttacggcgtgcgcaaggtgatcgagctggcccgcgcattgtgctcggagccgaagctgatcctgctcgacgagccgtcctccggtctcaacgtggaggagaccggcgacatgtcgttctggatccgcgacatgaggagcgagctcggcatcacggtgctgatggtcgaacacgacatgtcgctggtcaaccgcgtctccgaccgcgtcattgcgctgaattacgggcgggtgctggcgatgggctcgccggccgaggtccagcagcaccccgacgtcgtcgccgcctatctgggagcctga

SEQ ID NO: 2255 - DNA, 1152 bp, BradyrhizobiumColbertium
atgcgcttcctgttcaagaccgactatgaagacgatatcaagctgttcccgcattcgggctacgtcgtctcctacggcatcctgctcgcgctgctgctggtcgcgccctatgcgctctccagctacttgatgagccagctcgtcttcgtctgcatctatgcgacggtcggcgtggcgctcttgatcctgaccgggttcaccggccaggcctcgctcgggcacgccgccttcctcgcgatcggggcctacaccgcggcctatttgcaggaatacaacgtgccgttcccggtctacttcctcgccgccgggctcttgactggcatcatcggcgcgatggtcggctttcccgcgctgcgtctcaccggcatctatctcgtcatcgccaccatctcctttgccctgatcgtcgaggagatcctggcgcgctgggagagcgtcacccacggcaacgagggcatgcgcgtcaaggcgctgtcgctgctcggtgttaccgtgccgcgcgacagcccgaccttctattatctttgtcttgccgtgctggtgctgaccatcgtcggcacgctcaatctgctgcgctcgccgacgggccgcgccttcgtcgcgatccgcgacagcgagacggccgcgcgcagcatgggggtcaatgtcgcgctctacaaggtgaagtcgttcgcgatctcggcggcgatcaccggccttgccggcgtcttgttcgcgcacaagctctccttcatctcgccggagatgttcacgctgcagctctcgatcgagttcatcatcgtgatcctgatcggcggcaccttcagcctgcacggtgcggtgctgggcgcgatcttcatcgtgatgatcgatccgttcctgacttatctcaaggacgacatgcccggcatcatcgcgggtatcgccgcggcattcggcgccgggccggccaccgcgggaagcatccagtcgagcgtcgcggccttcgcatcgctcaacggcctgaaaggcgcgatctacggcatcatcatcgtgttgttcgtgctgttcgagccgctcgggctctacggccgctggctcaagatcaagctcttcttccagctgttcccgctctacaagcgcgccaccttcaagcggcagaagatctacgtgaagtcggagcgcaatcgatga

SEQ ID NO: 2256 - DNA, 876 bp, BradyrhizobiumColbertium
atgctggatttcgttcagcagctcgtcagcggtgttgcgctcggctgcgtttacggcctgatcgcactcggcttcgtgctcgtctacaaggccaccgaagtcgtcaatttcgcccaaggcgatctgatgatgctcggcggcttcttcgccttcaccttcatcggcatgatgggcctgaactactggatcggctttgccggtgccgtggcggcgatggcgctgttcggcatggtggcggagcgcgtggtggtgcggccgatcctcggctatccgcagttctcgatcatcatggcgacgatcgggctcggctacttcctgcgatcggtcgccggcatgatctggggcaccgacgatttgaagatcgatacgccgttcagccagggcgtgctgcgcatgggctccctggtgctcgcctatgacaagctctccgtcatcgcggcgacgatgatcctgtgcacgctgctgtggctgttcttcaacaagaccgtgctcggcaccgcgatgcgcgccagctccgagaacatgctggcggcctactacatgggcatcccggtcaagcgtgtggtgtcggtcgtgtgggcgatcagcgcggcggtcgcaacctgcgccggcgtgctgctggcgccgatcaccttcattcactcgaatgtcggcctcgtgctcggcttgaaggcatttcctgccgccgtgctcggcggcttcggctcgatcccgggcgccgtggtcggcggcgtcctgatcggcgtgatcgagagcatggccggcttctacctgcctgaaggctggaaggacgtcgcgccctatgtcgtgctgctgaccgtgctgctcctgaagcccgagggcctgttcggcctccacgtccgcaagaaggtctga

SEQ ID NO: 2257 - DNA, 750 bp, BradyrhizobiumColbertium
atgaagccggaccacgcggcgctggaagtccgagggttaacgaagcgttttgaccgtctggcggtcgacggcctcgatctcaccattcacgcgggcgagttttatgcactggtcggcccgaacggcgccggcaagaccaccactttgcgcatggtggcgggcctgttgcgccccgatgccggcgcggtctcgatcttcgggatcgatgcgctggcggaccccgtcgcagccaagcaggcgatggcttgggtttccgacgagcccatgatctacgacaagctgagcccgctcgaatatctcgagttcgtcgcggggctctggggcatcgcgccgtcggtctcggagccggtcgcgcaggagctgctcaactccctcgggctcgaggcgcaccggcacgagcgctgcgagggcttttccaagggcatgcgccagaaggtcgctctcgcaggggccctggtgcacgatccccgcctcatcattctcgacgaaccgctgacggggctcgatgccgtctccgcacgccacgtcaagggcctgctcggcgaacgcgtccgcgccggctgcaccgtcatcatgaccacgcatattctcgaggtcgccgagcggatggccgaccgcatcggcgtgatcgcgtccgggcgcctggtcgccgaaggcacgctcaccgagctgcgccagcaaaacggccatgccgataccagcctcgaagaccttttcatcgcgctggtgacgcttcaggccgcggcatga

SEQ ID NO: 2258 - DNA, 1527 bp, BradyrhizobiumColbertium
atgagctcggcaaccgcgctgtcctggtttgcccgccacgagctgcggctcgcctggcgcgaatggttcgccatgatgacgggcggacggcgcaaacgcacgcgcgctgcggtgatcggcctgctctgcttcgccgcgctgctgcacctgccggcctgggcggtgatcggccgtttcgccgatctgcagctgccgctcgacaagtccgccctgatcgtgatcacggcgacgatctttctcgcctggaccttgatgctgtcgcaggcgatcgaatccgtgacgcgggtattctacgcgcgcgccgatctcgacctgatcatgtcctcgccggcaacgctggccaatctgttctcggtccgcatcgccgcgatcgcgctgaccgtcacggtgctcgcgctgctgttctcgacgcccttcatcgacgtgctggtgctcggcggcggcgcgcgctggctggccgccttcggcgtcgtcgtcgccatgggcctgtccgccgcggcgatcgcgattgcggtgaccatcctcttgttccggctgatcggcccggcacgaacgcgcctgattgcccagatcctcgccgcgatcatcggcgccggcttcgtgatcgcgctgcaggttgcggcgatcatgtcctacggcacgctgtcccgcttcaccatgctgacctcgggcagcctggcggcctacgcgcccgacatcgacagcatctggtggtggccggcacgggcggccctgggcgacagcgaggcgctgctgctgcttctcgcgctggccctggtgctgctcggcagcgtcatggcgatcttctcgcaccgcttcgccgataccgcgatcgatgcggcagcttacggcacgtcgggccgcacccgtggcaaggagcgcccgttccggggcggatcgcgccagcaggcgctgcggcgcaaggagttcgtgctgctgtggcgcgatccctggctgatctcgcaaacattgatgcagctgctctatctggtgccgccggcgctcctgctctggcggaattttgccgacagctccgcggcgctgacgctgatcacacctgtcatcgtgatggcggccggacagctggccggcgggctcgcctggctgacgatctcgggcgaggacgctcccgatctcgtcgccaccgcgccgctgacgccctccagcgtcatccgcgccaagatcgaggtggtgctgatcgccgtcgccgcgatcttcagtccgctaatcgcggcgctggcctgggcctcgccgtaccaggccgcgatcagtgccggcgcgatcatcgtcagcgcggccgcggcgaccgcgatccagctctggttccgggtgcaggcgcggcgcagccaattccggcgccggcagacgtcctccaggcttgcgaccttcgccgaagctttctcctcgatcggctgggctgcgagcgccgcactgctgctcgccttgccgctcgccggcctcatcagcggcctgatcaccgccggcctggtcgccatcacctggaagctcagcccaaagcgcgactag

SEQ ID NO: 2259 - DNA, 813 bp, BradyrhizobiumColbertium
atgcggcgactgttttcgacggctctggcgctgttcggcgcgctcctctcacctgcgctggcgcagcagccacagcgcagcgaatgcctggcgatggccaatgcggcgccgcgggtcatgtccgtcgcgtatcggccagcggccggctcggccggggtagagatcacctatgccggacactccacttacttcatcgacacgccgggcggcctgcgcatcgcgaccgattacagcggcgcgtaccaggtgggacggctgcccgacgtcgtcaccatgaaccgggcccacagcacccactattccttgtatccggacaagcgcattccccatgtgctgcatggctggagcgatgacggccagccggcgatcgtgtcgcagcgcatcagcgacaccttcatccgcaacgtcacgaccgacatccgccgctatatcggcgacgatctcggcagcgacatgatccgggacggcaattccatcttcatcttcgaggcggccggcctctgcatcggccatctcggccacctccatcacaagctggacgacacccatttcgcccagatcggacggctcgacatcgtgatggtgccgatcgacggcacctacaccatgtcgttggacggcatctccgagatcaccaaacggctgcgcgcctccgtggtgctgccgatgcatcgcttcgccaccccgctcgaggacttcatgcggcggatcggccagcacttcgagatcgagcgccgcctcgagcgctcattccggatgtcgcgggatacgctgccgaacaagccgatcgtgatcatcctcgacggcgtctga

SEQ ID NO: 2260 - DNA, 552 bp, BradyrhizobiumColbertium
atgctgatctcctcgcaacaggagatcgacatgagcgactttgcgcgattgttgcacgcggacgcagccaaccccgagcatgccgaggcactccagctctatggccgcttcgtcggcgactgggacgccgagatcaccgcccatgggaccgacggaacgaggcacaccgcccccggcgaaatccattttggctgggtgctcgaaggccgcgccgtccaggacgtctggatcattccccggcccgcgagcgcgccggcctttccgatcgccggcaactggtacggcacgacgctgcgggtctatgatcccgccatctcggcctggcgaatttgctggttcgatcccgcgcgctgcgtgttccgccagcagatcggccgtccgcgcggcaaggacatcgtgcaggaaggcacgaccgaagccggcgagctgacgcggtggagcttcacggagatcaccgaccagtcctttcactggctcggcgaatccaaaccgcctgcggcagccgactggcggctcgcggtcgacgtgagggcgaagcggcgcaggagctga

SEQ ID NO: 2261 - DNA, 1053 bp, BradyrhizobiumColbertium
atggccgcaagcggtctgcctagcaacaccagcgggctcttcgtcgagccgcgcgaggactggctcgcgttgcatcgcgaggagatcatcgatcccttgcgaccgatcgtcgatccccaccaccatctctggaatcgcggccatcgctacctgatcgaggaaatggcggccgacatcgcatccggccacaacgtcgttgccaccgtctatgtcgattgccggtcgatgtaccgtgcgcacggccccgaagcgttccggcccgtcggcgaggtcgagttcgccaacggcgtcgcagcaatgagcgccagcggagcttacggcaacgctgcgatctgcgccggcatcgtcagccacgccaatcttctgctcggcgattcggtaaagccggtgctcgaagccgagatcgcggcgggcaacggccgcttccgcggtatcaggcattcctcggcctgggacgaagaccctgtggtggcggggatgtacgcgaacaggccgaagggactgctgcgggacaggaccttccgcgaaggcttctcctgtctcgcccccctgaacctcagcttcgatgcctggctattccatccgcagatcggcgagctgaccgagctggcgcgcgctttccccgacaccagggtcgtgctcgaccattgcggcggcccggccggcatcggtcgcttcgcgggccggcgcgaggaggtgttcgcgcaatggcgcgcctcgatccgcgagatcgcgacatgcgggaacgtggtggtgaagctcggcggcctcgcaatgtgcctgctcggctacgacttccatctgcgcgagaggccgccgtcatccgaggacctcgccgcggcgtggcgtccctatatcgagacctgcatcgaggcattcggcgtgaagcgggcgatgttcgagagcaacttcccgccggacaagggccagtgcagctaccaggtgatcttcaatgcgttcaagcgcatcgcatcgtccttgagcgaggcagagaagacggcgctgttctcgcaaaccgcggccgacttctaccggctcgagctgccgtcatga

SEQ ID NO: 2262 - DNA, 450 bp, BradyrhizobiumColbertium
atggcattgattgaagtcggtagttgcaatgttgacctcgaactgcggccgatcgagccgtcctgggtcatcgagggcaatccggtctcccgctcgcgcgtcctgtcgaccagcgccgacggcaccgcccagaccatcatctggcaatgcaccgaagggcgcttcaactggtactacgacatcgacgagacgatcatgatcatggaaggatcgatcgtgctcgaaagcgacggcatgccgcccaagcgctatggtcccggcgacgtcatcttcttccgcgacggggcgcacgccaaatggcatgtcgaaggccacgtcaagaagatcgcgttctgccgcaagaccaatcccgtgatgatcggcttcctgatccgcgtcgtcaacaagctcaagaaaatgttcgcctccagcggtgagcgccgtccggcctcgctgatgggcgccggctag

SEQ ID NO: 2263 - DNA, 1257 bp, BradyrhizobiumColbertium
atgactgatcaacgcaatacctccactcccatcgatcccgtgaagctcgaccgtctggccgaggtggcggtgaaggtgggcctgggcttgcggccgggacaggatctgcttctgacggcgcccgcggtcgcgctgccgctggtgcgacggatcgccgtgcatgcctacaaggccggcgcaggtctcgtgacgccgatcctgtcggacgaggagatgacgctggcgcgctatcgtcacggccacgacgacagtttcgatcgtgccgccggctggctttatgagggcatggccaaggcattctccgagaacaccgcgcggctcgcgatcgtcggcgacaaccccatgctgctgtcgggcgaggatccgtccaaagtggcgcgcgccagcaaggcaaattcgatggcctatcagcccgcgctggagaagatcgtcaatttcgacaccaactggaacatcatcgcctatccaagcccgtcctgggcgaggttggtattccctgatgatcctgaggacgtggcggtcggcaagcttgcggatgcgattttcgcagcgtcccgtgtcgatcacgaggacgcgatgggcaattgggcgagccacaatgcggtgctgcgcgagcgcaccaattggctcaacggccagcgcttccgcgcgctgcaatattcgggtcccggcaccgacctcaccatcggacttgccgacggtcacgaatgggaaggcggtgcctcgctctccaagaacggcatcagctgcaacgccaatatcccgaccgaagaggtcttcaccacgccgcattgccgccgcgtctacggccatgtcgtgagctcgaagccgctgtcctaccagggcacgctgatcgacaacatcgccgtgcgcttcgaggacggcaagatcgtcgacgcaaaggcctcgcgcggcgcggaggtgctgaacaaggtgctcgacaccgacgagggcgcgcggcgcctcggcgaagtggcgctggtgccgcattcctcgccgatctcgcagagcggattgttgttctacaatacgctgttcgacgagaacgcagcctcgcacatcgcgctcggccagtgctattcgaaatgcttcgtcaacggcgcgcagctcacgccgcagcagatcgccgcgcaaggcggcaaccagagcctgatccatatcgattggatgatcggatcggccgagaccgacatcgacggcattttggccgacggcagcaaggtcccggttttccgcaagggcgagtgggcgaagtag

SEQ ID NO: 2264 - DNA, 1362 bp, BradyrhizobiumColbertium
atgccagctttccccgcctccaccaccgtgctcgactccatgctgtttcgcgacgccttcggcacgccagagatgcgcgaggtgttctccgacgtcgcgacggtcgcgcgctatgccgaagtcgaggtggcgctggcgagggcggaagcgagatgcggcgtgatcccacaggaggcggcggcagcgatcgcggcgcggaccgacgtcgccgcgttcgatttcgacctgctcaggcaggagaccgatatcgtcggctatccgatccttcctttggtgcatcagatggtgaagcaatgcggcgaggccggccgctacgtgcattggggtgccaccacgcaggacatcatggacaccgccgtggtgctgcagttgcgcgccgggctcgagatcgtcgaacgcgacatcggcgagctgcgcagaattctcgccgatctgtcgaagtgccatcgcgacacggcgatggcaggccgaacccatctccagcaggcgctgccggtgaccttcggctacaagaccgcgatctggctcgcgatgttcgatcgccacgccgagcggctggcgcagctcaagccgcgcgtcctggtcggtcagttcgccggcgccgccggcacgctggcctcgctcggcgacaagggctttgaggtgcaggaggcgctctgcgccgagctgaagctcggcgttcccgcctcgacctggcacgtcgcgcgcgacggctttgccgaggccgtgaacttcctcgcgctggtcaccggctctctcggcaagatcgcgctcgacatcatgatcatggcctcgaccgagttcgccgaggtctacgagcctttcgtcaaggggcgcggcgcctcctcgaccatgccgcagaagcgcaacccgatttcgtcggaactgatgctcgcggcttccaaagcggtgcgccagcatgccggcctgatgctcgacgccatggtgcaggatttcgagcgtgccacagggccgtggcacgccgaatggatggcgatccctgaaagtttcgtgctgaccgctggcgcgctgcaccaggcgaagtttgcgctcgccggtctgatcgtggacgaagcgaagatgaacgacaatctcgccatcagccgcggcctgatcgtggccgaagcggtcatgatggggctcgcgccgcaaatcggccggcaggaggcgcatgacgtggtctatgacgcctgccgtcaggccaacgagaagggaatgagccttgccgatgcgctgtcagcagattcgcgcatctcaagccgcatcaatcgcgccacaatcgaggcgctgacttcaccgaaaaattacctcggcctcgcgcctgccatggtcgatcgggtgctgaaatcggcaacgcgttga

SEQ ID NO: 2265 - DNA, 321 bp, BradyrhizobiumColbertium
gtgcggcagcttacgcaggttgctcggcagagcaatccgacattcagggttcatcacacgttcggtgccgtccgatggttctcgcaagcctttttctcggtgactccgaggcctgtactgcgcatcgccccttcaggacggaccgcggccatcggccccggagcgcaacattcgagcttcggttgtattcccctcagaaaacggcatggcagccatcacgcaatctcgatgaaccaaggggcctcttcggcagacacacgattttcgacccaaatttccttttgtcattttattcgcgttattcgcgttatttcgcaatga

SEQ ID NO: 2266 - DNA, 138 bp, BradyrhizobiumColbertium
gtgaacgaccaggtcgaaaacctgaggctccacggcaatgggaacctgctcgcggctcagctcgcgccggtcagtgtcgagaaggtggtcccggaacagaaactgcacgtcgaaaactcaggcctcattgcgaaataa

SEQ ID NO: 2267 - DNA, 1446 bp, BradyrhizobiumColbertium
atgcagaaccgcgaccgggtcgtcagcaaggacgaactgatcgacaagatctggcacgggcgcagcgtctccgaatccaccctgaccagccggatcaacgcggcgcgcaaggcgatcggcgatgatggcgcgagccagacgctgatccgcaccatcacgcgcaagggttttcgcttcgtcggggacgtccagacacaatccgccgccgtcgcgccggaaccggtccgtatcgcccagccccaggcagccttcgcgctgccggagcggcccgcgatcgccgtgctgccattcaccaatatgagcggcgaggccgggcaggattatttctcggacggcatcagcgaggacatcatcaccgcgctgtcgaagctgcgatggttcttcgtggtcgcgcgcaactcctccttcgtctacaagggccgcgccgtgcacatccaggaggtcgcgcgggagctcggcgttcgctacgtggtcgaaggcagcgtgcggcggagcggcgagcgggtgcgcatttcggcccagctcaacgacgtctcgaccggcagccatctctgggccgaacgctacgatcgcgagctcgccgacatcttcgccgtgcaggacgagatcaccgaggcgatcgtcgctgccatcgagccgcagctctacgcagccgaaagtttccgagcccagcagaagccgccgggcagcctggatgcatgggacctcgtgatgcgggcgctctcgcattattggcgcagcccccgcgagggcaacgccgccgcgcaacgactgctggaacaggccgtcgcgatcgaccccgcctatggcaaggcgctgggcctgctcgcgaccagccatatgttcggcgcgcatatgggctgggccgacatggcggcgaccatcccggtcgccgaacgcgcggcgctcgcggcggtggaggccgatcgcgaggatgcctgggcccatcacggcctcgcttacacctatctgttccgccgccgctttgacgacgcgctggcagaattcgagttggccttgaggctcaatccgaacttcgcaatggcgcatgccttccacggcgtgacgctgtgctacgccggccgatggcaggacggcgatgcggccgcgcgccgcgcgctgcggctgagcccgcgcgacccgcttgcggcgatctattgcggcgttgcggcctatgcccggttcgtcggccgcgactacgagggagccgcacagatggcgcgggaatcgctgcgccagcgcgcagatttcgtcggcgcgcaccgcgtgctgacggcggccgccggcatgctcggcgatcccgcgctcgccgcttccgccctggaaaacctgcggcgcgcccagcccgaggtctcgcttgagtggatcacgcgcgagttgccgatgctgcgggatgaggaccgcacgcattatctcgagggcctgcggcgcgcgggcatgacgtga

SEQ ID NO: 2268 - DNA, 1581 bp, BradyrhizobiumColbertium
atgtacgacacgatcatcgtgggcgccggctcggccggctgtgtgctggccaaccggttgtcggccgatccgggccggaaggtgctggtgctcgaggccggtcgtgccgccccgcccgcctcggacattccatccgattggccgacgatgttcaataccgcggtcgattggggctttcacacggagccgcaagcaggctgccggggacgtcgaatcttctggccgcgcggcaagatggtcggcggctccggcgcgatgaacgcgatgatctatatccgtggcctgccgtcggactacgacggatgggcgcaggcgggctgcgcaggctgggcctggaaggacgtgctgccgaagttcatcgccttcgagaacaacgcccgcttcggcgacgatcctctccacggcacccgcgggccgctgcacgtcgccgacgtaccgttcgtcgatcccaacgaattgaaatggctggaggcagcgcaggccgcggggctcccgcacaatcccgatttcaacggcgtcacgcaggagggcgccggctttttccagttcgtcatcaggggcggcgagcgtttcggcaccggcaaggcctatctgcgcccggcgctggcgcgtcccaatctcgtcctcaagaccagcgcacacgtcacgcgcatcatcatcgagcgcggccgcgcgatcggcgtcgcatatctcgataatgggcagccgaagagcgcattcgccgccggcgagatcgtgctcgcctccggcgccatcggctcggcgcaacaactcctgctgtcaggggttggcccggctgacgaattgaagctaaccggcgtcgaggtcgtgcatgatttgcccggcgtcggcagggatctccaggatcacatcaacattcccatcaccttctacacgaaggagagaatcggcatcggagcctggaccgaggagagtctcgcgacgagccttgcggaatggcaggcgcaccgcagcggcccgcgcacctcgccctgggtcgccgccggcgcccatgtgcgcagccgccccgatgtcgagcccgatctccagctctatggcgcgatcagcccgcaccgcgactatgtccgctttctttcgtccaagccgggcatcaccctgcatgcgaccttgcagcggccgaagagccgcggccggatcacgctgcgctcggccgaccctatcgaagaccccgcaatcgatcccggctatttcgcatcggacccaagcggaagcgatatcgcaaccatggtcgaaggcgtacgcatcaaccgtcgcatcgccgcgcagtcgccgctcaggaagatgatcgagtgcgaggtcacaccgagtgcagaagcgatcaacgatggcgagattgccgattacatccgcggccattgcacgacgctctatcacgctgcctcgacctgccgcatgggcatcgatgatctggccgtcgtcgatcccaggcgattgcaggtgcgcggcatcgacggcctgcatatcgccgacgcctcggtgatcccgatcatgatctcaggcaacatccagacgccgacgatcctgattgcggaatgcgcagccgcggcgatcctgggctag

SEQ ID NO: 2269 - DNA, 693 bp, BradyrhizobiumColbertium
atgcgcgcctcgacagcctattttgtcggtgccggaaccatcgtcgcggccatcgccattggtcttggcggcggtatcgttgccggcaacatcatgaatccggtcgcgcccaagcagggcccggacacaagcaagatggcgcagcgtacggaggctgccggcccgccggcggcaccggatgctccctctgagcgcgtgaactatctcaccggctcgcaagccttcggcgcgatgattgccacgccggcgcaggccgaagcaaaacccgagcccgcaaagcctgatacgcaatctacccaggcgaatgacggaccgccggcggcgcagccctcgcaagcggccgcagtcgagccgcccaaggcggcgccgccatcggcaccgcaggcggcaaggcctgccgagcagcaggcttcgaccgagccgtcatcgtcgtcgtcgaataatgcctatgccagggcaagggattccgatgtgaagcgcgcggcgagcgagcggcgccgagccgagcgccgggagcgctggaccgagcgccgacattatcacgagtcccgcgagccgcgcggcagccgcggccgcaccgattgggacgacgtggcccgcaacatccgcgaagattcggatgcgcgcgactacgccgaccggccgcgcagcggctttccgcaggttcggttgttcgggcccgacgacgattag

SEQ ID NO: 2270 - DNA, 714 bp, BradyrhizobiumColbertium
ttgtccaaagccatcaccatcgtcgtgctgacctgtttcctggttctcggcgccgccacaaccgccattctcggtcgcgacagtgttccaagcgtcagcgccgagatgatcgcccagacgcccccggccaagccgcctgcgaccaaccgcgccgccaaggccgatcgtctgattccgacgcttgcgctggcttcggccgcgattgagccggtccaggtggccgccgacaagctttcgcaggcgcccgtgctggccgagccgctccgccaggcctttgcggcggctacgccctccgatttcccgatgccgaagcggagcgctcacgaagcgcccgccgtgacggaggttcctgccgtcgaagttccggccaagccgaaggctgtcgccaagccgcagccgcagaagtcctattcactgctgtccgacgtgcagatcgcgggcatcagggatcgcctgagactgtcgtcgtcgcaggaatattactggccttccgtcgagaccgcgctgcgcaacgtcgcccgcaagatccaggcgaacaagttgtcgaatccgaatgcgccgcccagcgcgcagatcgatccgaattgcgacgaggtgcagcagttgaaatcggccgcgatgccgctgctgttccagctccgtgacgaccagaaggaagaagtgcgcaagctcgcccgccttatcgggctcgagaaggtcgcgcagcaaatctga

SEQ ID NO: 2271 - DNA, 249 bp, BradyrhizobiumColbertium
atggacttcgattatctcaacagcaagacgtccgcgacgatggacgaaatccgcatccgcgttgctcacgccctggcccggcacccgctctgccgcaacgtccgtttcgacatcgtcagcgtccctcgcacccgcaggggcggcaactggacggtgacgctgcaatcggtcgagccgcgtgcggtctgggaggcctccgagatcgtcgccgacatccaggacgcctacgagctggcggccgccgcctga

SEQ ID NO: 2272 - DNA, 969 bp, BradyrhizobiumColbertium
atgccatcggatcgactgcaccgcttcggcgatcgtctcgccctgcctctgatcgcggcgccgatgtttctggtgtcgggcgtcgagctcatggccgcatgttgccgcaatggggtgaccggcagttttcccaccgcgaattgccgtaacacggaacaactcgatgaatggctcgccgggatcgcggcgcggttgcggcagcacgaagatcaaaccggccggaaggccgcaccgctctgtccgaacctgatcgtgcaccgctccaatacgcgcctggagcaggatctcgcggtgctgctgcggcaccagccggagatcgtcatcacctcggtcggctcgcccgcgccggtgctgaagccgctgcatgacgcgggcgcactggtgctcgcggatgtcgcttcgatacgccacgccgaacgcgcggccgaagctggtgccgacgggctggtgctgctgagtgccggcgccggcggccagaccggctggcttaatccattcgccttcgtccgcgcggtgcgcgcattctacgacggcatcatcgtgatggcgggcggcatcagcgatggccatgcgctgcacgccgcggaggtgcttggctgcgatctcgcctatatgggcacgaagttcatcgcgacgcgcgagagcatggcggatgaccgttacaagcggatgctggtcgagagtagcgccgacgacatcctgctcaccaccgcgttcacgggcttgcagaccagcatgctgaggccgtcgatcgtcgccgccgggcttgatccggacgatctgccggcgcgcggtgcgatcgacatcgccaaggacatcgacgttgccgcacgcgagaaccggccaaagcgctggcgtgacatctggagcgccgggcactccgtatcgggggtgacggatgtgctcgcggtcgacgatctcatcgggcggacgctcgccgagtatcgtgacgcgcgcggcggcaggtga

SEQ ID NO: 2273 - DNA, 234 bp, BradyrhizobiumColbertium
gtgcagtcgatccgatggcatgcatgcctccctgcgcgggctttgtcgtttcctcccgcagtctctgtgctagcgtcatcagcaacattggcacgccagaagccggtgacaaagcaacgaggaaacatatgtctgatcggctccacgcatcccctccagcttgtgcgcagacgctacgggcgctgtcgcgctatccggatcgtatcgcgttcgcctggcctgggggatcactga

SEQ ID NO: 2274 - DNA, 1563 bp, BradyrhizobiumColbertium
atgtctgatcggctccacgcatcccctccagcttgtgcgcagacgctacgggcgctgtcgcgctatccggatcgtatcgcgttcgcctggcctgggggatcactgagctatcagggcaccatcgacctgatcgggcggatccagggcgtgttcatgcggctcggcttgcagcccggcgcgcgtgtcgccttcctgaccgcgaaccgcgccgacacctggtgcgccggtgtcgcggcgcaattggcccggctctgcatcacctggctgcatccgctgggatcgctggaggaccagctgtttcagctcgaggattccgaggccgagatgctggtggtcgacgccgccgccttccgcgatcgcggcggcgagctcgctgcgagggcggcccggctgaaggcggtcttcaccatgggaccggccggctacggcgccgatctgctggccgcgatcgaagatgccggacatgcgagcccgctgtgcctcgccggccccgacgatctcgccacactgaactataccggcggcaccacaggcaaatccaagggcgcgctgcgctatcaccgcgagaacgccggcgccgccggcgcgatcctggccgacttcgagatccccgaggctgcgcgctatcttactgtcgcgccgatcagccacgtcgccggcacgaaggtgctgccgaccctgatgcgcggcggcaccgtgcacatgctgaaaggtttcgatcccgaagccgtgctggccacgatcgcgcgcgaacgcatcaacttcacgctgttcgttccgaccatgatctatgtgctgctcgatcagccggcgctgggcaggaccgacctctcctcgctcgagctcgtgctctatggcgcttccgcgatgtcgccgagccggcttctcgaaggcatcgagcggatcggaccggtgttctcgcagctctacggccagaccgaatgctacccggtctcggtgctgcgcaaggccgaccacgatcccaagcagccggagttgttcctgtcctgcggcttccccatcgcggcatgcgaagtcaagatcctcgacgataaggacgaggaagtgaaaacgggcgaggccggcgagatctgcgtgcgcgcaccgcacgtcatggcggagtactggaagcgcccggatatcaccgccgagacgctgaagaatggctgggtccataccggcgacatcgcgcgcagggacgagcgcggctacatgttcatcctggaccgcaagaaggacatgatcgtcaccggcggcttcaacatcttcccgcgcgaggtcgaggacgtgctgtcgcaacatgccgacgtcgccatggtcgcagtggtcggtatccccgacgagaaatggggcgaggccgtcaccgccatcgtcgtgccgcgtgaaggcgcaaggcccgatccggatgagctgatcaacctggtgaagacgcggaaaggctcggcgcatgcgccgaagcagatacagttcgtcaagcagctgccgatgaccggcgtcggcaaagtcgacaagaaggtgctgcgcgcgggcttctggagcgggcgggaccggatggtgggataa

SEQ ID NO: 2275 - DNA, 132 bp, BradyrhizobiumColbertium
gtgaacaggcaggatggcgagcatcccttccgcggcggcggaagtctgccgttcaaatcggctcccggcggccatgtcgcccaccatcaccgtttctcgatgacgaggctctgcatcgcgcggccgaaatag

SEQ ID NO: 2276 - DNA, 774 bp, BradyrhizobiumColbertium
atgcccgccatttaccgcgtcgacggcaatagcgtcctcaccagcccggaggccgcgggcccgtgggaccgccgcatgcagcacggctcggcaccgtcggcactggtgacgtgggcggcggagcgcatccctgcaccggcgccaatggatgtcgcgcgcgtgacaatcgatctgatgcgcccggtgccggtggcgccgctgacgattgaaagcgaggtcctgcgcgagggccgcaagatccagctctgcgagatcaagctgctggccgagggcgtgcaggtggtcggggccaccgtgctaaagatcagacgccagacgcaggcgctgccggacgaggtcaaggatctgcccgtcacgctgccgtcaccagaggattcgctggtcgaggacgggcatggcgcgaccagcccgttcgccggcatggtctcgatgcgcgccgcgctcggccgattcggcaaggccggccccggcgcgatctggtttcgcctcgaccatccgctggtcgaaggcgaggctgtatcccaggcgatgcgcgccgtggtcgccgccgacttttccaacggcaccgcttcaacgctcgactttcgcgcctggacctacatcaacgccgatctcaccgtgagcctgtcgcgccagccagtgggcgaatggatcctgctcgacggtgaatcctggattggtccggacggagcgggcctcgcgatgtcgcggcttgcggaccggcagggctatttcggccgcgcgatgcagagcctcgtcatcgagaaacggtga

SEQ ID NO: 2277 - DNA, 969 bp, BradyrhizobiumColbertium
atgtccatgcctgccttgttcaagggacgcctgtcgatcccggtgatcggctcgccgctcttcatcatctcggtgcccgatctggtgatcgcgcagtgcaaggcgggtgtggtcggttcgtttccggcgctgaacgcacggccgccggagctgctcgacgagtggctggcgcggatcaccgaggagctcgcggcctatgaccgcgcccatcccgacaggccgtcggcgccgttcgcggtcaaccagatcgtgcacaagtcgaacaacaggctcgaccacgacatgcagctctgcgccaagtacaaggtgccgatgatcatctcgtcgctgggggcgcgcgaggagctgaaccaggccgtgcacggctggggcggcatcgtcttccacgacgtgatcaatcagaaattcgcgcacaaggcgatcgagaagggcgccgacggcctgatcctggtggcagccggcgcgggcggccatgccggcaccatctcgccgctggccttcgttgccgagacacgaaggtggttcgacggaccgatcgcgctgtcgggcgccatcggcaacggcaaggcgatccgcgccgcacgcatcctgggggccgacttcgcctatatcggctcggccttcatcgcgaccaaggaagccaacgcggtcgaaaagtacaaggagatgatcgcaggctcgagcgccgacgatatcgtctattccaacctgttcaccggcgtgcacggcaactacctcaagccctcgatcgtcgcggccggcatggatcccgacaatctgccgacctccgacccctccaagatgaatttcggcaccgacgcctccggcgagcgcgccaagccgaaggcctggaaggagatctggggctcgggccagggcatcggcagcatcgacaaggtcgtgccggcggccgagctgatcgcgcgtttcaagaaggagtatgacgaagcgatcgatccgccgttgtga

SEQ ID NO: 2278 - DNA, 1401 bp, BradyrhizobiumColbertium
atgagccggacggagcaggacttcctcggacagcgtgagatcgccgacgacatctactacggcgtccagaccatccggggtaaggagaacttccacatcaccggcattccgatgaaccaggagccttacttcgtgaaggcgcttggctacgtcaagaaggccgccgccatggccaatcgcgatctcggcgcgatcgatgccaaggtcgcggacgccatcatcctcggctgtgaccgcgttatcgccggggacatgatggaccagttcgtcacggacttcatccagggcggcgccggcacctccaccaacatgaacgccaatgaggtgatcgccaatctcgcgctggaatcgctcggctttgccaagggcgactaccagcacgtcagccccaacgatcacgtcaattacggccagtcgaccaacgacacctatccgacggcctttcgcctggcgttgatcctgcggctcgagagctacatgacggcgttgcgccagctccaggaggccttcttcgccaagggccgcgaattcgaccgcgtgctgaagatgggccgcacgcatctgcaggatgcggtgccgatgtcgctcggcgcggagttcaggggctggggcaccaccatcggcgaggaggtcgagcgcatctcggaagcgcgtgctctgctgcgcgagatcaatctcggcgccacggcgatcggcacctccgtgaccgcggccgtcggctatccccagctggcggtccggcacctcggtgagctcaccggcgtagacttcgtgcttgccggcgatctggtcgaagcgacctccgacaccggggcctatgtgcagctgtccggcgtcctcaagcgcacggccagcaagctgacgaagatctgcaacgacatccgcctgctcgcttcgggtccccgcgccggcttcaacgagatcaacctgcctcagctgcagcccggctcctcgatcatgcccggcaaggtcaatcccgtcatccccgaggtcgtgaaccagaccagcttcctcgtcatcggtctcgacacgacggtgacgcttgcggcctcggcaggccagctccagctcaacgtgatggagccggtgatatcgttcgcgctgttcttctcgatccgcaccatggagcgcgcggtgaacagcctgcgcgagaactgcgtcgtcggcatcaccgccaacgaggagcacacccgcaacatcgtgctgaactcgctcggcatcgtcacggtgctgaagccgctgctcggctacaagctttgcgccgagatcgcacgcgagggctacagaagcggcaagtcgctgcaccagatcgtcgtggtcgagcgcaagcttttgacccaggagaagtgggacgagatgttctcgttcgagcggctgatcaatccggatttgatcgggtaa

SEQ ID NO: 2279 - DNA, 537 bp, BradyrhizobiumColbertium
atgatggttcgatccggcaatccggccgtgtggttcggaacgttgatgtcagcggcgctgctgctcctgctcggcggcgggacggggcagacgcaatccgccccgcctgcgctcgggatccaggggcaggatattcgggccgcgccagcgccgtcgtcccctgcgccatccgtgtcaccggcgcctggggaaaattccgggttgatcaatgaaatgggcaagctgttcgagaagctgccctcgatcctgccgccgatcaaaagcccgagcgagaccatgaacgatctgtcgcggctggccaagccctcgaccatggtgtcgggccgcatcgcctgcccggcctcctcgaacggagcgcccgactgcaagcaggcggccgaccagctctgccagagcaagggctacaaggaaggcaagagcctgaatgccgattccgccgaaaaatgctcggccaaggtcctgattccgggacggccgcgcaagccggacgattgccgtaccgacacgttcgtgaccagcgcgctgtgcctgaactga

SEQ ID NO: 2280 - DNA, 603 bp, BradyrhizobiumColbertium
atggtgcttcatcgcggcgccatgctgaaacgtatctacgactggtgtatcgacgccgcccacaagccctacgcgctctggatcatgggcatcgtgtcctttgccgaaagctccttctttccggtcccgccggatgtgatgctcattccgatgtccctggcgcgtccgcagcgcgcctggctctatgccgcggtctgcaccgtcacctcggtgctcggcggcatcgtcggctatgccatcggcgcgctgctgttcgactcggtcggccaatggctgatccaggtctacggcctcgccgacaaggtcgacgccttccgcgcctcctatgcggaatggggcgcggtgatcatcctgctcaaggggctgacgccgatcccgtacaagctcgtcaccatcacctcgggcttcgccggctacaacatcatcctgttcatcctgtgctcgatcgtcgcgcgcggcggacgcttcttcgtggtcgcgatcctgctcaaccgctatggcgattggatccgggtcaggatcgaacggcatctcggattgtgggttgcgctgggcgccatcgtgctggtgctcggcttcgtcattgccatcaagctgatctag

SEQ ID NO: 2281 - DNA, 405 bp, BradyrhizobiumColbertium
atgagtgattcgcttgagcggctatatctggctgtgctcgcggccagagaccttgatccggcaacgtcgcgcacggcgcggctgtttcagcgcgggccgtccaaaatggcgaagaagctggccgaagaggccatcgaagtcgtcatcgacgcggtcaatggcgacagcgaggccgtgatccgggaaagcgccgacttgctctacaatctcacggtgctgtgggcctcggccggggtacgtcccgaggacgtctggcgcgagatgacccggcgcgaagacctgctcggcattgccgagaagctgccgaaatcaccgatgaagctgcccaaagtcgcgtcaccacgtgttgctgccaggcggccaattgtcgcgctcgagggccgcggcgcgcgcaagcgccactag

SEQ ID NO: 2282 - DNA, 363 bp, BradyrhizobiumColbertium
atgttcgacagattttcgaagcttgccggccgcaaggccattctcgcaaccgctgccgtgctggcgctgagcaccgtcgcccccaccgcgtcgtttgcgggcggtcgccattggcatggcgggggtggcgctgctcttgctggcgcggccattgccggcgccgtcggcaccggccttgcgatcgccgccactcggaacgcctacgcctacgatgctccctattatggcggcccggtctactacgccgacggtcccgtctactacggcggcgactcctatattggcccgcgcccgttccatcgttgcggcggcccctaccagtctgcgcggggcggccaaggctacatttcgacctgctactga

SEQ ID NO: 2283 - DNA, 1164 bp, BradyrhizobiumColbertium
ttgcgtaacgatgccgcaacgccgctcatccgccgttcatgttggcgcgcgcacggtcgtcgccggccggcgctgcaagcgtcacgaaatcacaacaatgcgggaccggcgcaactgatgtcaggactcaagaccgcccttcacggcctcctcgctctttcgatctcgcttgcagcactgattgcaagcgatctcagcgcggccgaggccaccacgccctccgttgcgatccacttcaccttcgaccgggcgccggacgcgagcatggcgccgttcttcctggcggcgaaggacggcaggttcggcgccgagcgtctcaacgtgtccttcaacagcgcaagcggatcgcaggaagcgctcgcgcgcgttgccaagggcgacagcgagcttgcgctcgtcgacatcaatgagctgatccgctttcgagacaagcaagacgccgcgccggtcaaggcggtgttcgcgctgttcaaccgcacgccttacgcgatcatcgcgcgcaggagccgcggcatccaggtgctgcccgatctcgacggcaagaccgtgggcgttgccgatggggatctgtcaatgcggctatggccggcgctggcgcaacagaacggcatcaaggcatcgcgcgtcaaattccacaagatcagtgcggcggtgcgcgagccgatcctgtccgcgggacaggtcgatgctgtcgccggcttgagttatctctcggcggtgaacctgcgcgatcgcggcgtccccggagccgatctcgtcgtgctgcgctttgcggactatggctgcgaggcctatggctttgccgtggcggtcaatcccgttttcgccgcagcaaagccggccgccgtgaagggcttcgtccgtgccttgatggctggcgtcagcgccaccgtcagggagccggaacgtgcggcggaggaggcggcgagccgcatcgacggcggcgaccgcaacctcgagctggagcgcctgcgcgcggtcctcgtcgacaacatcctgaccgaggaagtcagacgcaacggcctcggcggcgtcgagccggcgcgcctggagagctcgatcgatcagatcgcgcaggacttcaagttccgcaagcggcccgcggcgggcgatatcttcgacgatcaatacctgccgccggcggcggagcggacgatcaactga

SEQ ID NO: 2284 - DNA, 1797 bp, BradyrhizobiumColbertium
atgtccatcctccgtctctacacccgcgttctcgaattgctcggcagcgaggcacggctgggctggctgctcgcggtcgccaatctcctgctcgcagggtcgcaattcgccgagccggtgctgttcggccggatcgtcgacgtgctctcgggcaagaccgtggcgggctccaactcggcctggcccttcctggccgcctgggtcgcgttcggactcttcaccatcgcctgcagcgcgctcgttgcctggcaagccgaccggctctcgcaccgccagcgccaggccgtgctgactgactatttcgagcacatcctgcaactgcccctgaccttccattccggcacccattccggacggctgatgaaggtcatgctcaacggcacggatgcgctgtggcggctctggctcgggttcttccgcgagcactttgccgcaatcctctcggtcgtggtcctgctgccgctgtcgctctacctgaactggcggctcgcgattctgctgttcgtgctctgcatcgtcttcactgcgctcaccactttcgtggtgcgcaagaccttcggcatgcagatggaggtcgaggaacgctacagcgagctctccgcgcgcgcctcggacgcactcggcaacgtcgcgctggtgcagagtttcgtgcgcgtcgagtccgaggtgaaggggctgcgttccgtcgccgacgagctgctggccgcgcagatgccggtgctgtcgtggtgggcgctggtcacggtgatcacgcgcgcctccaccaccatcacggtgctcgcgatcttcacgttcggcatcgcgctgcacgaccggggattgacgtcggtcggcgagatcgtgatgttcgtgagcttcgcgacgatgctgatccagaagctcgagcaggtcgtcagcttcatcaacagcgtgttcatggaagctccgcgcctgcgcgaattcttcaatgtgctcgacgcggtgcccgcggtgcacgaccggccggatgcaatcgacgccggcaggctgtcgggcctcgtcgagttcaacgacgtcacgttctcctacgacggcaagcggccggcgatcgaggacctcactttcaccgcgctgcccggccagaccattgcgctggtcggtccgaccggcgccggcaagtcgaccgccattgcgctgttgcatcgcgccttcgaccctcagtccggcgtcatcaaggtcgacggcatggatgtgcgcggcgtcacgctgacctcgctgcggcgaaacatcggcgtcgtgttccaggaagcgttgctgttcaaccgctcgatcgcggagaatctgcgcgtcggcaagccggacgcgaccgaggccgagatgcgcaaggcggcggagcgcgcccaggcgctcgaattcatcgagcgcagcggcggcttcgagaccaatgccggcgagcgcggccgtatgctttccggtggcgagcgccagcgcctgtccatcgcccgggcgctgctgaaggatccgccgatcctgatcctggatgaagccaccagcgcgctcgacgccgtcaccgaaaccaaggtgaatgccgctctcgacgaagtgatgaagggccgcaccaccttcgtgatcgcccaccgtctttcgaccatccgcaatgcgacccgcattctggtgttcgagaacggacgcgtgatcgaaaatggaactttcgatgaactcgtggccaaaggcggccatttcgccgcgctcgccagggcccagttcatggtgcaggagagcacacgggccggcgtgacggcggccgagactgctgcgacggcttccgaatcaccctag

SEQ ID NO: 2285 - DNA, 1530 bp, BradyrhizobiumColbertium
gtgcacgcccttcgcccgctgcttcgcagatcgctgttcaacctgttcgccgcgggcatcgcatgtaccgcattgctcgcgccgcgcgcggcaagtgccgaagcgctgctgctgatcgaggcagacagcggcaaggtgttgcaagcggacaacgcgaccattccctggtaccccgcttccgtcaccaagatcatgaccgcctacgtgaccttgagggcggtcaaggacggcaggctcacgctggactcgctgctcacggtgtcgccggttgcagcctcgcaatcgccctcgaagatgggcttcccgccgggaacgcaggtcacggtcgacaacgcgctgaagatgatgatggtcaagtctgcgaacgacatggccgtggtcctcgccgaaggcgtcggcggctcggtcgacggcttctccgcgatcatgaacgacaccgcccggaagctcggcatgacgcagacgagctacgtcaatccgaacggcctgcccgccgacggccagatcacgtcggcgcgcgatctcggcattctggcgcgcgcgttcctgcgggatcttccggaatacgaatacttcgtgcacatcccggcaatccgcttcggcaagcgcgtcaccggcaatttcaacaagctgatcggccgctatcccggcgccgacggtttcaagaccgggttcatctgcgcctccggatataatctcgtggcatcagcgacgcgcaacgggcgccggctgatcgcggtggtgctcggcgccagttccggcaccgcgcgcgccgtgaaggctgcgcagctgctggagcgcggcttcactcaggacaatctcacctggctgaggccctcgctcggcaccgtcgacaatctcgtgcccgtcgacgccacgccaccgaacctgcgcgacgagatgtgcggtccgcaccgcaagcggccggccagcgacgacgacggtgcactgattgccgccaatggcggagcgcccggatcggcctcggccaccggcggcgaggcccaggtcacgttcttcacggcaggtctgcagccgccgctgatgagagcctccgagctgatggcctcggccccgacgccaaccgagcccgtgctggtctatacgggcccgacccgcaccggcacggcgctgatcgccgcagtcgcggccgacgccgacaagcaggcagcgtcgaaaccacgcggcaagaagtcgcgcgtcgccaacaagcccaaggatggaggcaaggacggaggcaaggacgccggcaaggacaccaagacggcggcgacgaagccggataccaagctcaagcccgaagccagatctgaagccaagtccgaagcgaagagcggcgccaagggtgacaccaagggtgacaccaaggccgcagccaagccggcagcgcccaagcatgccgcaaccaagcaggatgcggcggcgaagcccgccgagaagcctgcggcgagcgatcaggcggcgaagcctgccaagcccaaggccgcgacgaagcccgccgctgccgccaagccggccaacaacagttaa

SEQ ID NO: 2286 - DNA, 1686 bp, BradyrhizobiumColbertium
atggagcgcatctggctcaaacaatatccgcccggcgtgcctgccgatatcgagccgacccaatatgcatcgctggtcgacctgctggaggagagcttcaccaagttcgccgaccgcaaggcattcatctgcatggacaagtcgatcagctatcgcgacctcgaccagatgtcggttgcgctcgctgcctacctgcagggccgtggactccagcgcggcgcccgcgtcgcgatcatgatgccgaacgtcctgcaatacccggtcgcgaccgctgccgtgctgcgcgccggatatgctgtcgtgaacgtcaacccgctttacaccccgcgcgagctcgagcaccagctcaaggattcgggcgccgaagccattatcgtgctggagaacttcgcgcacacggtcgagcaggtgatcgcgaagacgcaggtcaagcacgtcatcgtcgccagcatgggcgacctgctcggcttcaagggcgtgatcgtcaacctcgtcgtccgccgcatcaagaagatggtaccggcttggtcgctgcctggctccgtgtccttcaatgacgcggtctcggccggccgcggcatgaccttcaacaagccgaagctgtcgccgggcgacgtcgccttcctgcaatataccggcggcaccaccggcctctccaagggcgccaccctgctccaccgcaacatcgtcgccaacgtcttgcagaacgacgcctggctccagccggcgctcgcggcgccgccgcatgtcgatcagctcatggtcgtgtgcgcgctgccgctctatcacatcttcgcgctcacggcctgctacctgctcgcggtacgcgccggcggctgcaatctcctgatccccaacccgcgcgacattcccggattcatcaaggagctggcgaaataccaggtcaacagcttcccggccgtgaacacgctctacaacgggctgatgcagcaccccgatttcaagaagctcgatttcaccaagctcaagatctccaacggcggcggcatggcggtgcagcgccccgtcgctgaccagtggaaggcgatcaccggttgcttcatcgccgaaggctacggcctgtcggagacctcgccgaccctgacctgcaatcccgcgaccgcgaccgagttttcgggatcgatcggcattcccgtgccctcgacctggatctcgatccgcgacgatgatggcaacgaagtcccgctcggtcagcccggcgagatctgcgccaagggtccgcaggtgatgtcgggctactggaacaggcccgacgagaccgccaaggtcatgacggcggacggctatttccgcaccggcgacatcggcatcatggacgagcggggctacaccaagatcgtggaccgcaagaaggacatgatcctggtctccggcttcaacgtctatccgaacgagatcgaggaagtgatcgcgagccatccgggcgtgctcgaatgcgccgtcatcggcatccctgattccaagtcgggtgaggcggtgaaggccttcgtggtgaagaaggacccgaacctcactgccgaggcggtgatcaagttctgtcacgagcagctcaccggctacaaggtgcccaagcacatcgaattccgcaacgacctgccgaaaaccaacgtcggcaagatcctgcgccggcagctccgcgacgagaagaaggcggaggcggcgtaa

SEQ ID NO: 2287 - DNA, 555 bp, BradyrhizobiumColbertium
atgaccgacccggacgacgttggcccggccggcattctcgcgttctggcgcgaggccggccgcgagtgttggtacgcgcgcgatgaggctttcgacgcggaaatcaggcgccgctttctcgcgctctggcacaaggcggtcgccggggaactggcggcctgggaggcgagcgacgatggggcgctggcactcgtcattctgctcgatcagtttccgcgcaacatgttccgcggcacgccccaagcctttgccagcgatgcgctggcgcgcgacgttgcccgtcgcgccatcgaacggggcgccgatcgcaggatcgagccggccctgctcgaattcctctacatgcctttcatgcattccgagcacctggcggaccaggagcactgcgttgcgctgttcgaacgcgccggcgacgccgagagcctgaaatacgcccgggaccacgcggatatcatccgccgcttcggccgctttccccaccgcaacagcattcttggccgcgagacttcgccggacgaacaggctttcctggacggaggcggctttgccggctga

SEQ ID NO: 2288 - DNA, 486 bp, BradyrhizobiumColbertium
atggcgatccagattggcgacaagctgcccgaggcgaaattccgcgtgatgacggcggaaggtccccaggtgaagaccaccgacgatatcttcaagggtaagaaggtggcgttgttcgcggtgcccggcgcctacaccggcacctgccacaagatgcatctgccgagcatcttcctcaacgcctatgcgatgaaggacaagggcatcgacaccatcgccatcgtctccgtcaacgacgccttcgtcatgaacgcctggaagcgcgacaccgaccagcgcgacgaggccgtcttcctcgccgacggcaatgccgacttcaccaaggcgatcggcatggagctcgacgcctccgccaacggcctcggtatccgctccaagcgctattcgatgctggtcgaggacggcgtggtcaagaagctgaacctcgaggcgatgcccggcaaggtcgaggtctccggcggggatacgctgctggggcagctgtaa

SEQ ID NO: 2289 - DNA, 465 bp, BradyrhizobiumColbertium
gtgagcgagcgtcccaatgtcacgatctataccgatggcgcctgctcgggaaatcccggcccgggcggctggggcgcgatcctgaagttcggcgacaaggaaaaggagctgaacggcggcgagcggcataccaccaacaaccagatggaactgatggcggcgatctccgcgctcgaagcgctgaagaagccgtgcacggtcgatctctacaccgacagccagtatgtccgacaaggcatcacgggctggatcttcggctggaagcgcaacggctggcgcaccgccgacaagaagccggtgaagaatgtcgagctgtggcagcgcctggatgccgcgctgaagcagcacgaagtccgctggcactgggtcaagggccatgccggccaccccgagaacgagcgggccgaccagctcgcccgcgacggcatagccatggcgcggttgcagcagcgggtgacggagtag

SEQ ID NO: 2290 - DNA, 984 bp, BradyrhizobiumColbertium
atggcggtctacaccgacgtcgccgccgacgagcttgcggatttcctgaaacagtacgatctcggcgaattgctctcctacaagggcatcgccgagggcgtcgagaattccaacttcctgctgcacaccggcaagggatcattcatcctcacgctctacgagaagcgcgtggcgaagaacgacctgccgttcttcctggcgctgatgacgcatcttgccgagcacggcgtcaattgcccgctgcccgtgaagggacgcgacggcgagtcgctgcgcgagctcgcaggccggcccgccgcgatcatcacctttctcgaaggcgtctggccgcgcaagccgaatgcggcgcattgcgccggcgtcggcgaggggctggcaaggatgcatctggccggcgccagttttgcaatccggcgcgccaatgcgctctcggtttccggctggcggccgctgttcgatgcggcttcgaaccgcgccgacgaggtgcagccgggcctgcgcgactttcttgccgccgagctcgatcatctctcgagcgggatctggcccaccgatctgccggaaggcgtcatccacgcagatctcttcaacgacaatgtcttctttctcggcgacaagctctcggggatcatcgacttcaccttcgcctgcaacgacatgctggcttatgacgtcgccatctgcctcaacgcctggtgcttcgagccggatcattccttcaacgtcaccaaggcgcgcgccttcctcaacgcctatggccgcgtgcgaaagctcacctcggcggaagaggcggcgctgccgctgctggcgcgcggcgccgcgatccgtttcctgctgacgcggctggtcgactggctcaacgtgccgccgggcgcgctggtcaagccaaaggatcctctggaatatgtccgcaaattgcgcttccaccagagcgtggcgagcgcacgcgactatgggctgatgccatcggggctggtggcgtga

SEQ ID NO: 2291 - DNA, 969 bp, BradyrhizobiumColbertium
atgtcagccaaaccagacctcaagatcgtgctttgttctccccgcggcttctgtgccggggtggtccgggcgatcgacaccgtggagcgggcgctcgataaatacggcgcccccgtctatgttcgccacgagattgtgcacaacaagtatgtcgtcgacgggttgaagaagaagggcgccatcttcgtcgaggagctggcagagatcccggaaaacaccagcgctcccgtggtgttctcggcgcacggcgtgcccaaatcggttccagccgacgcccagtcccgcaacctgttctcactggatgcgacctgcccgctggtgacgaaggtgcaccgcgaggccgcgatccatttcaagcggggtcgcgagatcttcctgatcggccactcccatcatcccgaggtggtcggcacgctcggccaattgccgcccggcgccgtcaccctgatcgagaccgccgaggacgccaagaccatcacgccgaaggaccccaacaacctcgccttcgtgacccagaccacgctgtcgatcgacgacaccgcggagatcgtcgcgctgctcaaggagcgcttcccgaacatcaacgggccgcacaaggaagacatctgctatgcgaccaccaaccgccagctcgcggtgaagaaggtggcgcctgtggtggacgcgctgatcgtggtcggcgcgcccaactcgtcgaactcgcagcgcctgcgcgaagtcgccgagcgagagggctgcaagatcgcggtgctggcgcagcgcgcaaccgacctcgactggagcaggttcgagaacatcaagagcctcggcatcaccgcgggcgcgtcggcgccggaagtcatcgtcgaggagatcatggacgccttcgccgagcgcttcacgctgcatgtggagacggtctcggccgcggaagaaaacgagttcttcccgcttccgcgccaggtgcgccccgaagccgccgccgagtga

SEQ ID NO: 2292 - DNA, 696 bp, BradyrhizobiumColbertium
atgagcaacgcacctctgatgcccaaggcgaccgccgtctggctgctcgacaacaccgcgctgaccttcgaccaggtcgccgatttcaccaagatgcatcccctcgaggtgcgcgcgatcgccgacggcgacgcggcccagggcatcaagggcatggatcccctctccaacggccaattgacccgcgaggagatcgagaagggtgagaagaacccggactaccggctccgcctccaggagagcaaggtggtgctgccgccccagcccaagcgcaagggaccgcgctacaccccggtgtcgcgccgccacgagcgcccgagcgccatcctctggctgctgcgcaaccaccccgagctcaaggacgcccagatcatgcgcctggtcggcaccaccaagagcacgatcgctagcgtgcgcgaccgtacccattggaacacgtcggcgttgaccccgatcgatccggtcacgctcggcctctgctcgcagatcgagctcgatttcgaggtgcagcgcgccgccaaggaaaagccgatcgacgcggcctatggcggcgccaccctgctgccggcctccgagaccacccgcaaggacgagtacgagcccgcggagaagtccagcgacgacctcaacgtggacgccgtattcgccaagctgaagacgctcggcggcaagaagcacgaagacgaggaggagtaa

SEQ ID NO: 2293 - DNA, 747 bp, BradyrhizobiumColbertium
atgcatagaacgacgagaaacctggcgcggctcgccacaattggcgcgatgctcgtgggcactcttgcctcggcgcaggctgccgatctgccggtctacaagaaggcgccgccgccggtggaggcgttcaatccgtggatgatccgcctgcgcgcgctgggcgtgttgcccgatggcggcggcagcagcgtcaccgtggcgggcgtgccttcgctctcgtcacccaattccggcctctcgatcagcgatcaggtcgtccccgagctcgacatcagctatttcttcaccaagaacatcgcggccgagctgatcctgggtgtgacccggcattcgatcagcggcaccggctcgctggcgaacctgccgatcggcaagaccacgctgctgccgccaacgctgacgctgcaatatcacttcgacaatttcggcgcgttcaagccctatatcggtgcgggcgtgaactacaccgtgttcttcaacaattccgccgcgaatgtgcctgccgcaatcgccggtccccccgcgatcgtcgccaccaccaccaacctgcacgtcagcaacgcctggggcggcgccgtccagttcggcttcgattacatgatcgaccggcactggggtctcaacgtcgacgtcaagaagctctggctgcgtccgaactacagcgcgaccgtcagcgggttgccggtcaccggcaccgcgcacatcgatccgtggctggtcggcgcgggcgtgacgtataagttctga

SEQ ID NO: 2294 - DNA, 267 bp, BradyrhizobiumColbertium
atgtcagccaagctcgcgcagtatggggcaatctccctgctagccctcgcactcgctgcctgctccgcgcgctaccagacgccggtggcggtgggcggcgacgacgatgacgcggtctgccagggccggggctatgcgcaaggttcgccggaatacgtggcctgccggaaggatcgggacgtccagcgcaatgccgccgtcgcccgcgccgaccgccgccagcgcgatctcggcgaatacatgctgaacaatcccgtgcggccgtga

SEQ ID NO: 2295 - DNA, 1911 bp, BradyrhizobiumColbertium
atgaacgtccagggcgagagtctctatcacaaggtccacgcgcgttcgctggccgatcccgaaggattctggtccgaggcggccaaggagatcgactgggtcgagtcgccgaaaaaaatcttcgacccctcgcaaggaacctacggccgctggttcgccggcggtgtcgtcaacacctgctacaacgcgctcgaccgccatgtcgaacgcggccgcgccgaccagctcgcgctgatccatgattcgccgctgaccaattcggtcacaaagctcacctacgcggagttgctgaacgaggtgcaggcgcttgccgccatcatgcacgattttggcgtcgccaagggcgatcgagtcattctgtatatgccgatggtgcccgaggcggtggttgcgatgctcgcctgcgcgcggatcggcgcggtgcactcggtggtgttcggcggcttcgccgcaaaggagcttgccactcgcatcgacgacgcccagccgaagcttattctctccgcgagctgcggcatcgagccgggccgcatcgtgcagtacaagccgttgctcgacgaggcgatcaggctggccggcagcaagccgaaggcctgcatcgtgctgcaacgtccgcagctcacctgcgatctgactgcaggccgggactatgattgggcgagcctgcgccgaaaggcgctgaacgacggcaagaaggctccctgcgttcccgttgccgccaccgatccgctctacatcctctacacctcgggtacgacgggcattccgaaaggcgtcgtgcgcgacaatggcgggcacctcgttgcagtgaaatggtcgatgttcaacctctatggcgtcaagccgggggaagtctggtggtgcggctccgacatcggctgggtggtcggccacagctacatcgtctacgggccgctgttccacggcgcgaccaccatcatgtatgagggcaagccggtcggcacgcccgatgccggcgcattctggcgcgtcatcagcgagcacaaggccgtcgccttcttcacggcgccgaccgcattccgcgcgatccggaaagaggatccggaaggaaaattcatccggcaatatgatctcaccaagttccgcacgctgttcctcgccggcgagcgcgccgatccgccgacggtggaatgggcggagcagcagctgaaggtgccggtgatcgaccattggtggcagaccgagaccggctggtgcatcgccggcaatccggtcgggctcggcatgctgccggtgaagcacggctcgccgacggtgccgatgccgggataccaggtcgacgtggtcgatgaagcggccaagccggtaggtcccaacaccatgggctcgatcgtcatcaggctgccgatgccgccgggctgcctgccgacgctgtggaatcaggacgagcgcttcaaggaggcctatctcagcgaatttcccggctattacaaaacgtccgatgccggctacaaggacgacgacggctatgtcttcgtcatgggccgcaccgacgacatcatcaacgtcgccgggcatcggctctccaccggcggcatggaggagattctggcctcgcatcccgacgtcgccgaatgcgccgtgctcggcgtcaaggacgcgatcaagggcgaggtgccctgcggcttcctcgtgctcaaggccggcgtgaaacgcgcgcccgccgagatcgagaaggagatcatcgcattggtgcgcgacaagctcggcccggtcgccgccttcaagctcgccatcaccgtcggtcgcctgcccaagacgcgctccggaaagatcttgcgcggcaccatcaagaagatcgccgacggcgagtcctggaccatgccggcgacgatcgaggaccccaaggcgctcgaggagatcggggaggccctgaaggggcgggtgtga

SEQ ID NO: 2296 - DNA, 1389 bp, BradyrhizobiumColbertium
atgtgcggcattcgagcctccgcgcaaacgcatccgcctcgcaaaatctcgcttcgcgccctcttccttggcgcggcaatgagtcttgttctcgctccggccgctgcgagcaccgagtgcgtgctgggcagcaaggctgacccggccgagctgatctcggcatgcagcgtcatcatcgaccaggcctcaaatccgaccactgatcgcagcgcggctctcgtcgtccgcgccgaagccaacgcgcgcacctcgggtggcctcacgcgggcgctgcgcgatcttgatcgcgccatcgcgctcgacggcaagaatgcaaaggcctggcgcctgcgcggcgacatcttgcgggaggccggcggcgatctcaatcgcgctgcggcggatctcaccaaggcgatcgagctcgatcccgaggatgcggaggcttatgagacgcgcggcgtcgtctacaccagtcagcgccgactcgaccgggcgctggcggattacgatcaggcgatcaagctgaggccggatgatgcgcaggcctggtccgaccgcggcgtggcctattatctcggcggcgacaacgagaaggcgatcaggaatttcgatgaggcgctgcggctcgatcccagccgcgcgcgaacctacaccaatcgcggcgcggcctataagaagctcggccagctcgacaaggcagtcgccgacgacggggaggcgatcaggctcgatccgaaggtgccggaatattatgataaccgcggcctgacctatgctgcgatgggggagtacgacaaggcgatcgccgattacgaccaggcgatccggcgggagcagcgcgccaacttcctgaccaatcgcggcgattcctaccagttcaagggcgagctcggggctgcgctgagcgactacgaggctgcgctgaaactcgatccgaacttcgccaaggcgtacaacaaccgcgccgtgctctacaagaagatgggggagcgcaagaaggcgctggccgactacgagacggcgctcaagctggaccccggcaacgagaatgccgcgaacggccgccgcagcatgatcgccgagatcgccaagttcggcgcggcaacgccaggtccgatacatgcgcgctcggcggacgatagcggcccgtcgttcgattgcgccacggccaaacgcgaggtcgagaaggcgatctgtgccgatccgcagctgggcgtgctcgaccgccagatcgccgagacctatgaacgtgtgctgaggacctcgaaaggacgttccgcgggcgacctgcgcaagacccagcgcgccttcatcgccacccgcaacgccagcttcggccgtcccggctatgatctgaagaagatcatgcaggatcgcctgcagcggctgaacgccgtgggaagctga

SEQ ID NO: 2297 - DNA, 759 bp, BradyrhizobiumColbertium
atgcgttttctcaaccacttgttcggcgcatggctgctctacggcctctcgcttgcgtcggtcgatgctgcgaccggcggcgagccggttgcggtggtgcaggtcgatctcgagtcctgcctcgcggccaccgcggccgacgacctggacaaggcagccacggcctgcgccgccgtgatcgacaatgagaagacggcgaaggcggacctgatcaaggccctgatcgcgcgcggcgcgctctatgcgcggcacgaccaagtcgaccgtgccgtcgctgacgacagccgtgctctcctgcttgatccgacccttgtggatgtcttcaacgcgcggggggaactctggctcaagaagggcgacaagcccaaggcggtgcaggatttcggcgctgcgctcaggatcgatccgaaccacgagaaggccaaggcaaatcacaaggcgatggcacgcgagctcgagcggatcggcgcgcagatggcgatcgccggcaagcccagtttcaattgcgcgcgagcacgccgggcggtggaaaaggcgatctgcggcaatcgcgaactcgccgacctcgatagggagatctttgcatcgaacgcccgcgtgatccgcgaggcgcgcaatgccggtgaagcgaaggcgctccagcgcgagcaggatgagttcatcgcgcgccgcaatgccgatttcggccgaccgggatacgacctgaagaaggccatgcaggagcggctgcaacggctcaacggcgtggatgggtattga

SEQ ID NO: 2298 - DNA, 1578 bp, BradyrhizobiumColbertium
gtggcgccgctcaaatcgggttcggggatcatcgtgtcgacattcgaatggatcatcgcgcttctgctcggcgccgttggcttatcggcgctggcgcgacggatcaaggtcccctacccgacctttctcgccatcggcggcgcgctgatcgcatttgtgccgtccagcccgtcctggacgctggagcccggcctggccttggcgctttttgttgcacctgtcctgctcgacgccgcttacgacacctcgctgcgcgatctgcgaaacaattgggttccggtctcgaccctggtcgtcgccgcggtcggcctgaccacggccggcgtcgccttcgtcgcgcaccggctgatgcccgacatgccctgggccgccgcggttgcgctcggcgcgattgtcgccccgccggacgcagccgctgccgtcgcgatcctgagccaggtgaagctgccccatcgcatggtcaaggtactggagggcgagagcctgctcaacgatgccagcgcactcctgatctatcacattgccgtcggcgccgttgccaccgagcatctgacctggggccaggttgcgccgaccatggcgctggtgctggtcggcagcgtcatcgcgggcctcgtcgcaggccggatcattccgctgttcatggagcgggtgacggaggcgcccagcgcgatcatcgtgcagttcgccaccacgttcatggtctggatcgccgccgagcatctcggcctctccggcatcctcacgatcgtggtctatgccatcacggttgcacggaccgcgccggcgcgcatcccggcacggctgcgcgtgccgtcctatgcggtctgggaaacgatggtgttcgtgctcaacgtgctcgccttcatgctgatcggcatgcagatgcggccgatctgggcgcggctggatgcggacgtgcgctgggaatattgcgtggccgccgcctcgatcctcctcaccgtggtgctggtccggctgttctgggtgacattctatcgcacgacgctgcgtgtgctggtcgctcaagggatctatcatccgaaggatccgaagcagattgcctcggccaagggcggcctgatcatctcctggtgcggcatgcgcggcctcgtcacgctcgctgcagcctttgccctgccggagagcttcccccatcgcgacttcatcgtcttcatcgcgtttgcggtggtgctgggatcgctggtgatccagggcctgacgctacggccgctgatcatcgccttccgcctcgaggacgacgatccggtcggcatcgaggtcgcgcgcggacgcgctgtcgcctatcgcgccgcgctcgatgcaattgaaggcgacccgtcggaagaggccgaaatcctgcggctcgaatatcgcgccatcctgatgcaggccgaaaacgatcccaacggcggcatcgccaatggcgagctgcctgcggatcccctgcgccgccgcgccatcgaggccgcacgcagatcgattttcgatctccgcgccaccgaggtgatcggcgacgacgcgtttcaccggctggaggaggagctcgatcgcgcagaattgagcgcagggggatga

SEQ ID NO: 2299 - DNA, 771 bp, BradyrhizobiumColbertium
atgacgaccctgatcgacgaccgtcgtgtccgcgcgcgagatgcgtcgcctgcacgatacttttatctgaacatgtccctggcctgcgcggccactgcgtttcttggcttcgcgccgacctattggatgccgctcgcccgtggtgcgctctccgcgagccccgtgattcattttcacggattcttgttcttcacctggacactctacttcgtgctccagacctggctcgtggcctccggccgcgtggtcaatcatcgcgcgctcgggatcgccggtgtctcgctcgccaccgcgatgacgatcttcggcttccttgcctcggtcagctcgatgaagaacgctgccgcgctcgggcaggccgacgccggcatcaccttctcgatcgtgccgatgagcgggatcgcgttcttcgcactggtgttcgtgctggcgatcatgaacacgcgaaagcccgatattcacaggcggctgatgctgcttgccgcggtttcgatcctggacgcggcgatcgcgcgctggttcctgaccttccttgcgcctccgggaccgcccggcccgccgccggtgccggtcaccatcgcgccggccgtggtcgcctcgcttctgctcgtcgtcgccatggtccgcgactggcgcaccgagggccgcgtgcatcccgtctatatctacggcacgctcgcattgctggcagtgaaggtgctgaactggccgatcagcgagacggcggtgtggcacgcctttgccggcggcatcctggcgctggcgcaatag

SEQ ID NO: 2300 - DNA, 807 bp, BradyrhizobiumColbertium
atggatcggctcaggggcaaggttgcgatggtcgtgggcgccggctcgatcggtccgggctggggcaacggcaaggcgaccgcggtgaccttcgcgcgcgagggcgcgcaggtgttctgcgtcgatcgcaacggcgcggccgccgaggagaccgcgaagatcatcaccgacgaaggcggcaaggcgatcccgttcacggccgacgtctcgcggcacgccgagatcgagacgatggtggcagagtgcctgaaggcctatggccgcatcgacgtgctcgacaacaatgtcggcatcgccgagatgggcagcgtggtcgaggtgagcgaggagagctgggaccgcgtcttcaacgtcaacctcaagagcgcctatctcgccatgaagcacgtcatccccgtcatggtgaagcagggcggcggctcgatcatcaacatctcctcgatcgcctcgatccgccacatgggcatctcctacgtcacctacggcacctcgaaggcggccatgaaccagatgacgcgcaccaccgcgatcgagttcgcgcgtcatcatgtccgcgtcaacgcgatcctgcccggcctgatgaagacgccgatggtggagcattccgccggcctcgccgccagctacgccaagggtgacgtcgaggcgatgtggcgtgcgcgcgacgcgcaggtgccgatgggtcatatgggcgatgccttcgacgtcgccaacgccgcgctgttcctcgcctcggacgagtcgaaatacgtgacggggatcgagctcgtggtcgacggcgggatcacgtgcaaggcgggagcgtaa

SEQ ID NO: 2301 - DNA, 348 bp, BradyrhizobiumColbertium
gtgaaggcgctggcgatgtccgcgttcacgcttgtatggacgcattcgatcgcaaaggtcgattggcaggaagactggcgtgtcacgcccgccggcctcgaactggtgcaggcccgcgtcaagggcaccggccccggcatggagccgccgtccgaggcgcggctggtcgacggctggtttcaatggcggccgcagcgtgctccgacgccggaggtcgtgcttggcaattcgggcgcggcgggggagtggcggctgtgcgttgacggacaatgccggacgctttcggagattgtcggccatcccattggtgctaacgtcaccaagatgagcatctgtaaagaaccgtag

SEQ ID NO: 2302 - DNA, 2112 bp, BradyrhizobiumColbertium
atgatatcgcaggcacaggctaccgaggcccccatcaaggtcgagtttgacaatttcgagcatggcttccccgaaggctttggtccgggcaggtggggccagctcgcctattggatcggcatcgcctttgcggtgttccagctctatgtcgccgccttcaactatctgccgagccaggtggtgcgcggcgtccatgtcggtttcctcgttctgctcaccttcggcctgatcgcaaacttcaccgcgagaagcgatttgggccgcgcggccggctgggtgatcggcggcgccggcttctactgcggcctctatcagtggatcttctatgccgacctgatcgcgcgcgacggcgatccaacgcggcttgatctcgtggtcggcacgctgctcgcggtgctgatcttcgagggcacgcggcggctgatgggcgcggcgctgccgctgatgtgcggggcttgcctggtctactggttcttcggccagtacctgccgtcgccgctcaatcaccggggctacgatttcgaccaggtcatcacccatctgtcgttcggcacggaaggcttctacggtgtgccgatctacgtctcggccacgtacatcttcctgttcatcctgttcggctcgttcctggaacgcgccggcatgatccagctcttcaccgacgtctcgctcggcctgttcggccgcacccgcggcggacctgccaaggttgcggtgttcgcctcgggcatgatgggcacgatctccggttcgggtgtcgccaacgtcgtcaccgtcggccagttcacgattcccttgatgatcaggttcggctatcgccgcgccttcgccgccggcgtcgaggcgacggcctcgatgggcggacagatcatgccgccggtgatgggtgcggtcgccttcatcatggcggaaacgcttggcgttcagtactcggagatcgtgaaggcggctgcgatccccgcaatgctctattttgcctcggccttctggatggtgcatctggaggccggcaagcatggcctcgtcggcatgaagcgctcggagatcccgagcgcctggaaggcgctggtggcgcgctggtatctcgtgctgccgctcgccgcgctcgtctacatgctgttcgagggcttcacgccgctctatgccggcagcatgggccttgcgctgaccgtgacgctgatcctcggcaccgccgtcacgacgggcgcctcctcgaatgtgatccgctacatcttctggatcgggctcgcgctcgtcgtcgccgcgctgtcgcgcgacggcctccagatcgtgccggttgctacggtcgtggtcggcctgatcgtgatcacggcgttcgtccgtggaggttttgcggcgctgcgcgcctgccgcgatgcgctggccgagagtgcaaaatcggccatcacggtcggcatggcctgcgccatcgtcggcgtcatcatcggcatgatgtcgcagaccggcgtcggcaccatcttcggcggctgggtgatcgggctcggcgagaagagcctgttcctggcactggtcatgaccatgctgctgtccattctgctcggcaccggcattccgaccatcccgacctacatcatcaccgccgcgcttgccgcgccggcgctcgcgaaactcggcgtgcccctgatcgcgagccacatgttcgcgttctattacggcatcatggccgacctctcgccgccggtggcgctggccgcgctcgcggccgcaccgatcgccaaggagaatccagacaagatcggctgggaggcgatgcgcatcgcgctcgccggctacgtcatccccttcatcttcgtctattcgcccgccctgatgctgcaggctggcgatcccatggcggccaagctcggcttctatggcgcagtggcgctggcgagcctgaaggcgctggtggcgatcggcttgttcggcatggtcgcgatcgggttcctgttcacacggctgacgctgatcgagcgcctggtcgcgctcggcggggcgttctgcctgctcggcgaattccccttcagcgacactgcaggcttcgtgctcgccgctgcgctcgtgctgtggcaatggcggcagcgtccgtcggcgcccgtcgaggccgtgtga

SEQ ID NO: 2303 - DNA, 948 bp, BradyrhizobiumColbertium
atgaaacggacgattttcggcgtggccgcggctattgctctggcggcgtcggcaccttgcgctcaggcgcaatccttcatcaacgtgctgaccggcggcacctcgggcgtctactatccgctcggggtcgcgatcgggaagatctacggcgagaagattccgaacgtgaagacgcaggtgcaggccaccaaggcgtcggtcgagaacctgatcctgctgcagcagggccgcggcgagctggcgttcacgctgggcgactcgctgaaagccgcctggaacggcgaggaggaggcgggcttcaagaccaagctcgacaagctgcgcacgatcggcgctatctatccgaactatatccagatcgtcgccaccgccgagagcggcatcaagacgctggccgacctcaagggcaagagcctgtcggtcggcgcgccgaagtcgggaacggagctgaactcgcgcgcgatcctcggcgccgccggcatgagctacaaggatctcggcaaggtcgaatatctgccgttcgccgaatccgtcgatctcatgaagaaccggcagctcaacgccacgttgcaatcagccgggctcggcgtcgcctcgctgaaggacctgtcgacctccagcccgatcacggtggtgtcggtgccgaaggagacggtggacaagatcggcccgcccttcgtttccgcggtcattccggccaacacctatagcggccaggacaaggacgtgccgactgcggccgtgatcaattatctcgtcacgaactccgccgtgtccgacgatctcgcctaccagatgaccaagctggtctacgagtcgctgcccgagctcgtcaacgcgcatgcggcgggcaaggagatcaagctcgagacggcggccaatggcagcccggttccgctgcatcccggtgcgatccgctattacaaggaaaaggggctgatcaagtag

SEQ ID NO: 2304 - DNA, 480 bp, BradyrhizobiumColbertium
atgcgccatgtgttcaagctttgctgggctgctttggtgtcgctgaccgcgctggcgccggcggcccgggccgatgactaccagctcagtcacaaccagcgcatctcgtgcagccgcggccttgccccgggcaagctgaacacggcgacctgcaaatcctacacctatctcttcaacaccaggacctcggaatatttccgttgtcaggtctcgctggcgctgacccgcgacaacaaggaggtcatcaacgtccagaccgacggcggctgcatcaaaaagccacgcatcttcgaaaccgacggcaagtacgatttcgacgccacggagaccgagccgccgaacaccaactcgttcttcggtcccggcggctatgcggtctgggccgccgacgtcggcgcgcagaaggtgcgcggctgcatcatcatctcgtccgggctcggctccgacatctccaagtgcctggacatgaccttccagtag

SEQ ID NO: 2305 - DNA, 315 bp, BradyrhizobiumColbertium
atggcattttcaaccagcacatttgcacgcgtttcgggtgcgctcttgccgatgctcggcgcgttcgccgcgccggcattcgcgcagacggcgacaccgtgggagctcaggcccgacatgggctatgcctatgacagggacggcaagacctattcctacaagatgggcaccagcaacgccggcgagttgctgaagggcgccaagaaggtgccgaaaggcacgctgttcttcatcggccagaacggccagctctacatgcgcagcggcccgtatctcgagggcgacggcaagttcaagttcggcccggatcagtaa

SEQ ID NO: 2306 - DNA, 1224 bp, BradyrhizobiumColbertium
atgcatcattcctttcgaaagcccaaggcattggttccccttgcgctggttcagctcgcgcttgtcctgagctcgcccgccgcgcgcgccgaggccgacgtgctgccgccggccgtccgcaatgccaacgcccagctgctgtcacagtttttcgcgcaaggtggcgcctcgccggccgtgctcgaatatcgccgcaagctcgcggagtaccaggccgcgcgcgcagccttcgacgctgaggccggcgcctattggagccagatctacgagaagcggaagacgcgcaacgccaagcggcgcagcgggcagcagatcacgctcgacgattacgttctcgagcatccgccgctctataacgggccgaagaagccggtgaatcccgagccggaggaaacgccggagcggccccggaaaccgattccggtgaccgccgattttctgcgcgcggcgcaggagctttaccggttcacgccgcaacggccgaccagcgaggtcgagttcaagcgcgcctatgcccgctacgccctcgcatccgggctgacgcgcgagcaggcggtgcgggtctacgcgttcgagaccggcggcaccggcactcacgacgtgcaggccggcatcgagcatggcggcaagcgcgcgatctcgaccgcgatgggctacaaccagctcctcaccaccaacagcgtcgagctgctggccgagcagggccatgagctcattcgcgcgctctccgagaaggtcacgcggaccccggggccggcgcgccatgcgctggagcacaagctcgccgtgctcaagaaaatggtggcgcacgcgaagtcagtgcccgacacctggtcggagcacgagaagatgggcaggactccccaaggctgggccatgcatgcgatggtcctcgacatcgacatcgggccgatgctgcagacccacaagctgctgacctctgtgctgttcgcgcgcgccaagggccactcccgcccgctctccgcggccgagctcgagatgatgaacctcaccggcgacggcacgggcctcgacatggtgacgatgccgcaggcgatgcgcgagcaggtgccgacctcgaattttttccagcgcggcggctatgagcgaaacccggtcgcgatccgccacaatacggtggccaagctgctggccgtgacggaccagcggatggatgcgaacagcagcaaagccggggcgagggagctggcggcggcgttttag

SEQ ID NO: 2307 - DNA, 624 bp, BradyrhizobiumColbertium
atgagaccgttcgacgatgccacaagacggaatatcgcggctgcctgcgcggccttcgcgcgcctgccggaggacggcgcgccggcggcattgaagcgtgccgcggtggctgtcgcgctgaccgcgagcgacggcgacgacacggcgctactgctcacgttgcgtgcatcgcatctgcgcgcgcatggcggtcaatgggcgctgccgggcggccgctgcgaccctggcgaaacaccggtcgaagccgcactccgcgagatcgacgaggagcttggccttcgcctcacgaatgcggatgtgctcggcacgctcgacgattatccgacgcgttccggctatctgatcacgccggtcgtggtgtgggctcccgatgccgccgcgatcaagccgaacctggacgaggtcgcgtccgtccatcgtatcgcgctcgccacgatcgagcgcgaggacgctttcgacttcgtcgcaattcccgagagcagccgtcgcgtgatccgcttccatcaccagatgagcctgatccacgccccgaccgcggcgctgatctaccagttccgcgaggtgctcgcgggtcggcagacccgcgtcacagacttggaacaaccggtgtttgcctggaagtga

SEQ ID NO: 2308 - DNA, 438 bp, BradyrhizobiumColbertium
atggacgacgacatgaccaacaaggccgccgcaaggctgaaatcggacggctggagcatcctggagcccacgggcttcctgcacctgatcggccccttgtgggaacgcaaggtcgacgggcatcacgagttcgcactcgcccccgaagacaagcatcacaaccgccgcggcatggtccagggcggcgtgatgatgacctttgccgatcgaacctgcggcatgaccgcccgctacgtctccggcaaggattacctggcaacggtgcagctcgacacccatttcgtcgaggccggccagatcggcgacgtcctcatttcccgcccccgcgtggtgcgctcgacccgcagcctgatcttcatgagcacggaggtgacggtggatggccgctgcatcgtcatggccaatggcgtgttcaagatactgaaggggccggggtag

SEQ ID NO: 2309 - DNA, 1023 bp, BradyrhizobiumColbertium
atgcaataccgccagctcggccgcagcggcctgaaagtgtcgccgatctgcctgggcaccatgatgttcggcgggccgaccgatgaagccgcatcgaagcggatcatcgccaaggcacgcgataccgggatcaacttcatcgatactgcggacgcctattcgaaaggtgcatcggaggaagtcgtggggcgagcgatcggcgacaatcgccattcctgggtgctcgcgacaaaactcgcaaatcccatgaacacggggatgggcagcgatcccaatcgcggcgggctgtcgcggcgctgggtgttgcaggccgcggacgaaagcctgcggcggctcggcacagatcacatcgacatctactatctgcacaaggaagaccacgcgacaccgctggaagaaacggtgcgcgcgatgggcgacctgatccgcgcgggcaaggtgcgctactttggagtctcgaactaccgcgcctggcgcgtcgccgagatctgcaacatctgcgaccggctcggcatcgaccgccccgcggtgagccagccttattacaacgccatgaaccgcatgccggaggtcgagcactttccggcctgctcatactacggtctcggcatcgtgccctacagtcccttggcgcgcggcgtgctcaccggcaaatacaagccagatgcagcgcccgacaaggagacgcgcgcgggccgcaacgacacccgcatgatgcagaccgaatggcgaccggaatcgcttcagctcgcgcaggagatcaagacgcatgcggagcgcaagggcatcaccgccggccagttcgcggtcgcctgggtgttgaactccgctttcgtctcctcggtgatcgccggtccccgcaccgaggagcaatgggacggctacatcggcgcgctcgactatcggtttaccgcagaggacgaggcgctgatcgacaggctggtggcgccgggccatccctcgacgcccggctacaacgatccggcctatccgatcgaaggccgccgcgcgcggacggcgtga

SEQ ID NO: 2310 - DNA, 1314 bp, BradyrhizobiumColbertium
atgacgctcgaagatcgctacggcctaccgctctccacctcttcgcacgaggcagcaagcgcctatcgcgagggcgtcgacctcatgctcgcgggctggaccggcacggcggagacgctggagcgcgcgattgcgacggacccggatttcgcgcttccccatatcgcccgcggccgcgtgcacgccttctaccagcagggcgatctcgcgcgcggaaaggcggccctggcgcgcgagctcgtggccaagcgcggcaccgagcgggagcgctcgcacgtcgagacgctggcgctcgcgatcgagggccggctgccggacgcgatcgctgcgatgcgcaagcatgtcgaggcatggccgcgcgatgcattggtgctgtcgctgccgctcggcgcgttcggcctgttcgccttctccggcatggccgaccacgatcgcgcccggcacgaactgtgcgagagcgtcgcgcggcattacggcgaggactggtggttcctcaccatgtcgggctgggccatgacggaaaacggcgacgtcgcgcgcggccgcgccgtcaccgagcgcggcttcaacctgcgccggcagaacgcccacgcagcgcacgcagtgctgcacgcgatgttcgaggacggatcgatcgaggcggccgaccgcctcgtcgacgaatggattccgggctacggccgcgatggaattctgcacggccacatccgctggcatcaggcgctcggcgcgctggagcatgacgatgcggcgcgcgcgctcgcgatctatgccgatgtgcttcagccggccgccacgaaggcgccaccgctcaacctcgtcaccgatgccgcctcattgctgtggcgtctcacgatctacggccataccgtgccgcaggcggtgtggcgggaggccgcggcggcagcgcaagagctgtttccgaagtcgagcctctcttttgccgacgtccacatggcgctgttcgcggcggcaacgcagaaccaccaggcgctcgccgcgcgtcttgcggtgatcgagcaacggctcgctgaaggtaagctgccggccggcgcggtggtgccggcgatctgccgggcgctcgcggctttcgccgaggaggattacgggacttgcgtacgaatcctcacaccggtcctcaccgaggtggcgcggatcggcggaagccacgcccagcgcgaattgatcgaggacacctatatcgtcgcgctgatgcgcggcggggagttgccccgcgcccgcgctctgctggacgcccgcttgcaccgccggccctccctgcgtgataagcgctggcaggcggcgatggcttga

SEQ ID NO: 2311 - DNA, 819 bp, BradyrhizobiumColbertium
atgaccgaaatcgttgcgcttgaggcgctggctgcacgtgtcgaatccggacagtcgctggccgtccccgtggaccgctccggcgtcgcgatggccgcgaccgccgcgatcatcgctgccggcatcgacaatcttcatctggtctgtgtccccatcagcggcatgcaggccgatctcctgatcggcgccggcgcaatcaagacgctcgaaaccagtgccgtctcgctcggtgaggccggtggcgcgccgcgcttcggtgctgcagtgcgggccggctccctgacgctgcgggacgccacctgtcccgccattcatgccggcctggtagcggcgcagcacggcgtgcccttcatgccgatcgccggcataatcggcagtgacctgctcgaagtgcggcccgactggaaggtgatcgacagtccggtcggcgagccgcgcaaggtcgtcgtggtgccggcgatcaaacccgacgtcgcactgtttcacgcgccggaggccgaccgtgccggcaatgtcaggatcggccgcttccgcgagctcgccaccatggcctatgccgccaggcgcacgctggtcaccgtcgaacgcatcgtcgaccgcaatttgctggagacggaggattccgccgccggcgtcctgccttcgctctacgtcgacgccatcgcggtcgccgagcgcggcagctggccgctcgcgctgtgggacgaatatcccgcggacgaggcggagatcgcacgctatacggcgatggcgcgcagcgaagacggctttcgcgcctatctctccacgttcctgtcacatcgcaagcaggtggcgtaa

SEQ ID NO: 2312 - DNA, 744 bp, BradyrhizobiumColbertium
atgcagtccgagcacgagcgccgcgagctcctcattgccactatcgccgatctgctcgacggcatccgccacgtcgcggtcggcgcatcgtcgccaattcccgccgccggcgcgatgctgctgcgcgcgcggaacgcgcgcgacggcaagccgccggtgcgcatctcgattctcggctcgcagcggcacaatttcttcaccaatggcggcatcgagctgttcgactgcgccgcgcaaggccgcgtcgacgcgttctttctcggcggcggccagatcgacggcgaaggcaacatcaatctcgtcggcactggcgattatccgagaaccgacgtgcgctggccgggctcgttcggctcggcctatctttatcacctgatcccgcgcgtgatcctgttccgcgaggagcattcgccgcgtgtgttcgtgccaaaggtcgatttcgtcagcgcccgggcaaccacgccggaagtaccccgccgcggcggcccctacgcgcttctgaccaacatggcgctattcgatttcgatcgcgaggcgggcggcttcgccttacgctcggtgcatccgccctttacgccggccgacatcaggaagaataccggcttcgactatgccgagccggaggtcgtccgcgagacgccgaggcccgatggcgcaaccctggatttgctgcgcgggcagattctcgacgaactcgccgagacttatccggcctttgcgcggagcatgacgcaggcggcgtga

SEQ ID NO: 2313 - DNA, 579 bp, BradyrhizobiumColbertium
atgcgcctccgctcagtggcgcttgccgccctcctcacgacgctggcaagcccttgttttgccgaggcttccaagcccatcccggtcaacaatccgcaggcccagcagaacgccttcatcgatctcctggctctgatgtccggccactgcaagacgctcaaggtcgcgggccgcaccttcgcgtgcaagaccgtggcctatgcccacggcgacaagggtcgggtcaacttcgcggtcgcggtcgacgacccctccgacgacagccatgtggtgtcgttctccggggagaacggcaagcgcgccgacgacaattcctacgagctgccgatcgaccgcatgctgctcaattccaaggaccgccccagggtcgacggcctgccggtgccggccgagcagacctctacaggcatctgccgccagaccggcaatttcgccgccaagaaggtgaacgacgtcacctgttcggccaccgacaaccagggtcgcaaatacgagctcttgttcgtttccgacggcacgccggtcagcgtgcgccgtatccgccagtcggcaccgtcgatccaggacccgttcaagtag

SEQ ID NO: 2314 - DNA, 1827 bp, BradyrhizobiumColbertium
atgctggtgccgatcattcaaccgcagtcactcgctgacgtgacgacattgccggagctcctgcgctggcgcgttcaagcgacgccggaggcggaggcctatcgccatttcgatgttgccgccgggcgctgggtcagccggtcctggcggcagatcgatgcggagttcgagcgctggcggcgggcactggccgccgaggggttcgcgcccggcgagcgcctcgccatcctgatgccaaacggcattgcacatgttgcgatggatcaggcggcgctggcgcgcggcctcgtgccggtgccgatgcatgccgtggataaccccgacagcatcgcctatatcctcgcagattccggcgcgctgctgctgttcgtcgacacgctggcgcgctggcaggcgatcgcggccaccggccagccgctcgaccatctcaagcgcatcgtctgcgcggacgggacggggctcactgctgtcgatgcccgcatcgtcgcgctcgacagctggctggcgcaggccgccgacgcgggagcgccgctggctgacgtcacggtcgagccaaatgaccttgccgccatcgtctacacctcgggcacgaccggtcggcccaagggcgtgatgctgtcgcacggcaacatcatcgccaatgtgaaggccgtcgcgcgacgcatcgcagccgtgccgaacgatgtcttcctgtccttcctgccgctctcgcacaccttcgagcggaccgggggctactattatccgatcgcgataggagcctgcgtcgcctatgcgcgctcggtgcagcagctcgcggaagacctgaagacggtgcggccgactgtactggtctcggtgccgcgcatctatgagcgcatctacgccctgatcatgcaacgccgcgcggcggccggcggcgcagagcgcacgctgctcgatcttgcgcttgccgtcgggggccggcgcttcgatgcgcgccaggggcgaggctcaatgtcgctgttcgaccggctcgcctggccggccctgaagcgtttcgtcgccaacaaggtcttggcccagttcggcggacgcctgcgcgttgcggtctccggtggcgctccgattgcagagcccgtgatcgggctgtttctcgcgctggggctcgacatccttcagggctacggcatgaccgagacctcgccggtcgtgtccgtcaatacgcccgaggacaacgatccgcgctcggtcggccgcgtcctcgacgggctcgaggtcaggctcggcgatctcgatgagctgctcgttcgcggccccagcgtgatgcttggctactggcgcaagccggaggagacgcgcagggtgaaggaggccgacggctggctgcacaccggcgaccaggcccgcattgagaacgggcgcatcaccatcacgggacgcatcaaggacattctcgtgacatccacgggcgagaagatcgcgccggtggatctggagactgcgattctcgccgatcccttgttcgagcaggcgctggtgatcggcgaacagcggccgttcctcgccgcgctggtcgtgctgaatgcaaaagcctggacgcaggagaaggaaaggctcgctgcaagcggcgagcaaggcgacgcggcggagcgcgccgcgctgctggccagaattgcggcagccgtgaaagcctatccgtcctatgcgacaccgcgtgctgtatggtggacgttggatccgtggaccattgccgcgggcctgctcacgccgacactgaagaacaagcgtcccgcgctggaacgccgcttcgccgcagaaatcgagcagatctacgccaggaagccgaccccgataacgtcgacgtga

SEQ ID NO: 2315 - DNA, 312 bp, BradyrhizobiumColbertium
atgaagtatctcattgtcgcgatgaccgtcggtgccgcggtgcttgccggtggatcggcggcgaacgcggccggcagcagcgcgagcggcaagcagaccgcgcaggaaagccagacgaccgaaataagcgcgcatcgcaggcatcatcgctggcacggccaccgccatcactggcggcaccgtcacggctatcaccggccccattacagaagctacggctattacccgcgccacggctattatggccgcgggcccgggtactacggcggcggtcccggcgtgaccttcagcttcggcggcggacgctggtaa

SEQ ID NO: 2316 - DNA, 1284 bp, BradyrhizobiumColbertium
atgtccgacatggccgagcacattgtcgtcgtgggcgccggcgcagccggcctgatggcggcgcgcgagctggcgcgcgccggccgcaaggtaacaattctcgaagcgcgccagcgctgcggcggccgcattcatccgttgccggcgtcggagttcggctatcccgccgatggcggtgctgaattcgtccatggcgaggcgccggtcacacgcgcactcctgcgcgacgccgggctgtcgctccaggagatcgaaggcgagccgtggagctttcacggcacaacgttcgcgcgcgaggatcgccaccaagcccatgaggcggagcttcgggccgtgctgagggagctcaaggacgacctcacggtggccgacttcctgcgccggcattttgccggcgatgattatgcgccgatgcgccgttcgatcgaacggatggtcgagggttacgacgcggccgaccctgagcgcgcgtcaacgctggcactgcgtgcggaatggatggacggcgggcacgctctgcaggcgcgcatcgatggcggctatggcacgatgatcgatttcctggcggccgagtgccgcaggcacggcgtcaccattcatctcggttgcgccgtatcggctatcacggaggagagcggcgcagccgtcgttcgctgcgccggcggcgacctgcacagctgcgatcgcgtgatcctcaccgtgccgctgccgctgctgcgggagatcgcgctgccggcgagcgcgcgcacaaggcttgcggcgaccgatgacatcggcttcggcaatgtcatcaagatcctgctgcgtttcgcgcggccgtggtggcgcgagcgcaaggaagagctcgcgaacatgaccttcctgttgtccgacgagacgatccctgtgtggtggacgcaatatccggacctgcggcccgtgctcacgggctggatcggggggccgcgtgtcgcggagctggacagcctcgattcgcaggggctgatcgatgccggtctcggttcgctcgctggcattttcggaatggtgcgcggggacatcgcgcgcgagctcatggcggcggctgcgacaaactggagccatgatcgctacgcgcgcggcgcctattcgtgggcgacaccgcggacccgggaggcgcaggcgatccttgcgcgcaccgacgatggccccgtgctgttctccggcgaagcgctctatcgcggccgcgacatgggcacggtcgaggcggcgctggcgagtggcctggagacggcggggacgctgttgcgggaagagcaaaagtaa

SEQ ID NO: 2317 - DNA, 750 bp, BradyrhizobiumColbertium
gtggcgccggatcggcggcctgagcgcggcatggagaaccatatgaagccttatgtcgtttgtctcatgcactccagcctcgacggccgcacgcatcccagccgctggcgtcctaagggtgcaggcccggattggttcgagaagattcatgacgagctcggcggcgatgcctgggtgatcggccgtgtcaccgggtcggagttcgccaagggcaagccctatccagcgagcgaggcgatcttcccccgcgaaaactggttcgcgcagcgcggcgcgaaaacctatggcatcgtcctcgatgcagagggcaagatcggctggggccgctcggatatcggcggcgatccgatcgtcgtcgtgctgaccgagagcgtgccggattcgcatctcgacggcctgcggggcgaaggcgtgtcctacatctttgccggcacgtccgagatcgacctcgcgttgacgctggacattctcgcccgcgagctgggcgtgaagcgtctgttggtcgaggggggcggcatcgccaacggcgcgttcctgcgcgccggcctcatcgacgaattcaatctgatcctcagccccgccatcgacggcgcgaaaggcgccccgttcgtgttcgactcgacggaggcggacagtgaccggcgcgcgccgatcaccgcgatgacgctggagagcacgcgcgagctcggcggcggcgtcctgctgctgcgctatctgatcaaaaacgatccgcaagccgtgagccgataa

SEQ ID NO: 2318 - DNA, 675 bp, BradyrhizobiumColbertium
atgctccccattcccgccgatatcttcaccgagcccgaggacgtctcgcccgacggacttgccaatcttggcccgcttcgccgtctcgccgggacctggcaggccgacaagggcatcgacatcaatccgaaggcggaagggccggagcagcggatcttcatcgagcgcatccgcatggatccaatcgatccgcaggccaacgggccgcagcttctgtacgggctgcgctatcacatccacatcaacacgcccgaggaagacatcaccttccacgaccaggtcggctactggctgtgggagccggcgaccggattgatcatgcagacgctggcgatcccgcgcgggcaggtgctgctggcctcgggcaagggcgggccggaggatagggcaatctcggtcacggccaagcgcggcgagaccgcctacgggatctgctcgaccgatttcctggagcaagccttccgcaccgatgcttaccgctgcgacatcactttcaacgacgacggcagctggacctatctgatccagaccgagttgttcgtccgcggcgcgccgttcaatcatcgcgacaccaacacgctccagctcgtcacaccgccgaagcccaatccactggcggtgatcgtgaacggtcgcgccggggaaaatgcaggtggcgccggatcggcggcctga

SEQ ID NO: 2319 - DNA, 249 bp, BradyrhizobiumColbertium
atgcaggaagtgtcccgttctggtgctgctgatgaactccggctcgacgcgttgatcgccgatctgtggtggcgcgtccggctgatcaacaccgacattctcgaggaagaggctcgtgccggggtgttcgacccccaccagccgacctacccgctactcgcggccaaccttcgcgcccggcgcgataacctggtcgcgaccatcggcgtgctcgagcagcgtgcgagatcgacgtcgcaagcggcgtga

SEQ ID NO: 2320 - DNA, 531 bp, BradyrhizobiumColbertium
ttgatcggacgcgttgcctctcgccaagaccgggaggctttcaagcggctattcgagcatttcgccccccgcatcaaggggctgatgcagaaagccggctgcagccccgacgaagcggaagagatcactcaaaacgcgatgatcgccgtgtggcggaaggccagcctgttcgacccggcaacagccggcgcagcggcctggatattcacgatcgcgcgcaatctgcggatcgatttattccggcgcagagcacgcgcgggccgactggaagacgtctctgagctgcctgatgcaccggaccccaccgaaccggccgatgcggtcatttcccgcgcgcaggatgccgcgcgcatcgagtccgccatcaagcaactctcggcggagcagattgcggtcgtcaggctgtcgttcattgaggagaaggcacaccctgaaatcgcaagccagctcggcatcccgctcggaacggtcaagtcgaggatcagactggcgatgaaccggttgagagatattttggacgaagacgcatga

SEQ ID NO: 2321 - DNA, 642 bp, BradyrhizobiumColbertium
atgacgatcagccaccatccgcctgaagaacttctggccgagttcgccgccggcaatctggaagaggcccatcagctggtcgtcggcgtgcatgtggcgggatgcacgcgctgtgcccgtttcgtgcgagccctggagcagcttgcgggcgcggcgctggaagaggtcgagccggtgccgaccgcgccggatgcgttcgaccgcatcatgtcgcgaattgatgagcttccggaagacacaaaggcgcctccccccgcgtccgttacggacaatgatgttccgcccgctctccgaaactatcggatcggcaagcgccggcgcgtcgcgcccggcctgagcatgcggccgatcgagctttccggttccggcaaggcccgcgcctttctgcttcggtccgcgccgggctcgcgcatgctcgaacacacgcacaccggcaccgagctcactctcgtgctcgagggcagcttcagtcacgagggcggacgctttggtcccggcgacttcgactacggcgacgacgaggtcgagcatcgtcctatcgttggcgatgagggcccctgtgtctgcctggtcgcaatgaccggcgacctgcgcatgaacggcttgctcggccgtctgatcggcccgttcgtgcgactgtga

SEQ ID NO: 2322 - DNA, 585 bp, BradyrhizobiumColbertium
atggcctgttcgagcctcgcacgtcaggtgcagagcgaaaggttatccgaactgctcgcacgcgttgcctcaggtgagacgcgggctttcgcggagcttcacacgctgacacgaggcaggctgcgcgcgatcgtgctggccgcaggagcctcgcctcatgacgtcgacgacatcctccaggaaagctttctgaaagtctggcgtaacgccggccggtatgattccaggcgggcgccggtcacggcctggatgtccacgattgcccggaacaccgcgatcgatcatctgcggactcggcgacagccgaccttcgaactggacgaggcagtttcggtcccggcggcttccgacgcgtcacatgtcgaggacttcgactacgcccgcgccgaaccgatcgcgcggggggcactggctcgcttgccggaagatcgccgcaggctggtgaccctggcctacctcgaaggcgagagccgcgcgagcttgtcacgacgcttcggtgtgccggtcggcaccatcaagacgtggctgcaccgaaccatcgtggccgttcgcaaggattgcctcgcggcatcggctgccgcctga

SEQ ID NO: 2323 - DNA, 303 bp, BradyrhizobiumColbertium
atggccgcggagatcattgaattccccgagcgtaggcctcaggagagactcgtcttctcggtcgcacggctcgaagcgatggtgagagaagtcgagcgcgttgcagccgacgatcccgaagccgggctggatcgattgcttgctgccaccgagcgcatcggtcaacaattggtcgatctcgcaggcctcttgcttgacgaagtgacccggctgcaggcgcagagtgcatttgaatccctggccgagaagatcgcggaaaccagagaaaccttcgaccagctcggaggacgaaagtcgacctga

SEQ ID NO: 2324 - DNA, 402 bp, BradyrhizobiumColbertium
atgaatcttctcttcacctatctttcggtggccgtgaccttcgttgcagtcgatatgatctggctcaggatcatggttgagaggctttaccggccggtgcttggggacatgttgcgggccgagcccaacctgggagccgccgcagttttctatctgctctatcccgtcggtttgatctggttcgcggtgctgccggcacagcaggacggaagcgcgttgcgcgctttcacgtcgggcctgatgctcggctgcttcacctatgccacctatgacctcaccaatcaggcgactttgcggaactggtcgaccgggcttacgctcgcggacgtttgctggggatcgctgctcgccggcgtcagttcctggatcggatacctggtcgcccagaagctggcccactga

SEQ ID NO: 2325 - DNA, 792 bp, BradyrhizobiumColbertium
atggttcttgtgcatgtgcaggcgatcggcggcattgcgctggccctttgtatcctgatgggacttgcctgggtcgttcagcagcgcacgggaaattccggatgggttgatgcgatctggtcctacgcgaccggcctcgttggtgcggtcgccgctctgtggccttttgaggacggcacgccggaacgccgtgtgctcgtcgcgacactcgcgctgctttggtcggtgcgacttggtacgcacatcgcgcgccgcgccgcggcaggcatcgacgatccacgctacgcgaactatgcgcgccagtggggggcggcggcccctcgccggatgttcctgttcctgcaatcgcaggcgctggtttcagtgccgctgccgttcgccatcttcctcgccgcccacgctcccgaacctggattgcggctgcaggattatatcggagccttcatcattctagtggcaatcgcaggcgagggattggcggatcagcaattgcgccggttcaagctctccccatgcaaccacggacttgtctgcgacatggggctctggcggtggtcgcgacaccccaactatttcttcgagtggctgggttggctggcttacccggtcatcgcgctcgcgcccggatacgcctggggttgggccagcctggcggcgccagcgatcatgtactggatcctcgtgcatgggacagggataccgccactggaggagcagatgctgaagtcgcgcggcgatctgtaccgggattatcaggcgcgaaccaacgcattcttcccatggccgccctga

SEQ ID NO: 2326 - DNA, 1314 bp, BradyrhizobiumColbertium
atgcgtttggccgtgatcgggacgggaattgccggcaatgctgccgcgtggctcctgtcgaaacgccatgccgtgacagtgtacgagcgcgagctgcagccgggtggacatagccataccgttcgcgtcctatatgacggagagccgatcgacgtcgatgtcggcttcatcgtgttcaacgaggcgaattatccgcagttgacggcgctgttcgcgcatctcggcgtgaggaccgtcgagacctgcatgagcttcgccatgtcggccgatcacggtcgattcgaatggcggggtggcggcgagacccttctgcaagctgcccgcggcctgtttgcacaaccgcgcaatctcggatcgccgtcatattttcgcatgctggccgaagtgctgcggttcaaccgccagagcgagacggacttgcgcgccggccggctgcacgggctgacgctcggcgactacctgcgcaaggaatcattcgggccgcgcctgttcgccgattatctcggaccgatgggagcggcgatctggtcctcctcgtcggccgacatcctgtcctttccggcggagaacttcgtcgccttcttcgacaaccaccggctcctgcatctggaccggccgcgctggcgtaccgtcgaggggggcagccgtcgctatgtcgacaagctcaccgctttgttcaaggacaacattcggctaggctgtgccgtgacgtcggtcaaccgagcggagcatggcgtgaccatccgcgacagtcatggcggtgtggaaacctacgatgccgtggtgatggcttgccatagcgaccaggctctcgcggcactgtcggatgccgacgcccacgagcgctccattctcggcgcgatcaagtacgctcccaacaccgtctatctgcatcgcgatcgcagtctcatgcccaggcgccgtcaagcatggggttcctggaacttcctgcgatggccgcggcaaacgccgacccaaaacgacgttgcggtgacgtattggatgaatcggctgcagggcatcgacgacagcaagccgttgttcgtcagcctcaaccctcccttcgagccggcagcccatctgacatttgcgaaattcagcttcgcccatcctcaatacgacctggctgcgtttgcggcgcagcgacgactcccggccattcaggggcgtcgccggacctggttctgcggtgcgtggaccggctacggctttcacgaggatggcttgcaggccggcatctccgttgccgaggcacttggcagcacggtgccgtggcggcattctgactcgctgctgatccaggctgccgagtag

SEQ ID NO: 2327 - DNA, 789 bp, BradyrhizobiumColbertium
atgacgccaacgaaaccggccaacgcggagaatgcgacagcgccggcagcgctctactggggaaaggtgatgcacgcgcgctggcggcccgtgcagcacaggttcacctatcgcgtgatgagcctcttgatcgaccttgaccgcttgaacgaggcggatcgccagtcctggctattcggcatcaaccgagcagcccccttcagcttccacgagtgcgaccacggcgacggcaaaggcgggtgcctcagccagcacgcccgacgactggcggccgagcgcggcgtcgacctctcgggcggtcgcgttctccttctctgttatcccagcgttctgggctacgtgttcaacccgctttcggtctatttctgctatgcggcgtcgggcgatcttgcgctgttgatctacgaggtccgcaacaccttcggcgagatgcactcctacgtcctgcccgtgcaggatgcacgaccgggcggcgcaatacgacagaaccaggcgaaggagttctacgtttcacccttcatggagatgggaacacactaccgcttcagcatttctccaccggcgcaaaacgtgacggtcagaatcgtgcagacgggcgagcaaggcgcgatgttcgcggcagcattcagcggacgacggcgcgccctgaacagccgctcgctgctggcggcgctcgtcgccctgcccttcctcacgttcaaggtgatcgcagctatacactgggaagcgatgcggctttggctgaagggtgtcccctacctgccccgcttgaaacaacgcgagacttga

SEQ ID NO: 2328 - DNA, 1218 bp, BradyrhizobiumColbertium
atggacctcgctgccgctcgtcactccgtccaattcgatggtgttccattccttgcccggctggccctgcgccttgcatcgcagctcaggtacggcaccgttcatgtgcgcctccccgaccggagagttgttgctttgcgcggccagcttccgggtccatcggccacgatcgaactcaacaattacaggttcgcgcgcagcctcgtcctgggcggcgacatcggcatggccgaggcgtacataagaggcgattggaccacgcccgatctcacccagcttctctatctgttctgtctcaacgaagatctggtcgacagcgcctttgccgggaatgtgctggtccgcctctgccgacgggcacttcatcggctgcgccgaaacacgagacagggctcgaggcacaacatccacaggcactatgatctcggcaacgagttcttcgcggcgtggctcgataccagcatgacctactcatcggctctgttctcgaccgaaacggccgacctgcccgccgctcaacgacacaagtacgagcaactcgcaaaggcgatcgaattgcagcccggacagagcgtgctcgagatcggatgcgggtggggcggattcgccgaatttgccgcgaagacttacggcgccaccgtgctggcactcaccatcagcaaggagcagcacgaatttgccagccgacgaattcacgaggccgggctcgcggagaaggtcgaggtgcggttgcaggattatcgcgaccaggacggtcgcttcgaccgcatcgcctccatcgagatgatcgaggcggtcggcgagcaattctggccggcctatttcagccagctgtcgcaacggctgaaaccgggcggcctggcgggcatccaggccatcaccgttcgcgacgagctcttcgacagctatcggcagcgcgtggacttcatccagaggtacatctttcccggagggatgctgccttcgaccagcatcctgcgcacgctcggcgagcgcttcgagatgcccgtcattcgcgagcgcctgttcggacaggactatgcaaagacgctcgcgctctggcgcgacaatttcagccaggcctggagcgacctgacctcgctcggcttcgatgagcccttccgccggctgtgggaatattatctgtgctactgcgaggccggcttcagggccggaaagatcgacgtcgggcagctggtgtttgcgcgtcggagctga

SEQ ID NO: 2329 - DNA, 74 bp, BradyrhizobiumColbertium
gcccccttagctcagctggattgagcgttgccctccgaaggtggaggccacacgttcgaatcgtgtcgggtgcg

SEQ ID NO: 2330 - DNA, 1692 bp, BradyrhizobiumColbertium
atgctttccaaatggtccatccgttccaagattatcgcggttatcgtccttctcctcgccatcatgggcggcttaggggtcatcgccgtacgaagcatgcaagggatcaacgcgcatacggtcgagatcgccaccaactaccttccgagcgttcgcgtcctcggcgccctgcgggccgacattaacgcctaccgttcgtcaattcgcgaccacctcttgggcgaaaccgcggaggaaaaagctgcggccgaaaagaaaatggcggcggacattgagacgatcaaaaaggaccgcaagtcctacgaaccggtgattgcctcccccgaagaacgggcgatatacaacgattggacccgagtgtgggaagagtaccgcaaaggtgtcgacgaagttatcgaggcatcccggaagagcgtcggtcggcctgccgacgaagcgcgcgatctcctttatgcgaagtacagcaagctccgcgcccaatccgacgagttgcttcagaaggatattgacttcaacgataccggcgccaataccgagaccaagagcgcagccgacggatatagcaccgccttcacggtgataacaggtgtcattgtcgccgccatgctttgtggcgcgttaatcggattcctggtcgttcgcgacgtgtcgaaggggatcgcttcgatcatcaagccgatgcaggagcttggacagggtgacctcagcgcggaagtgatgcatcgtggcgagaggaccgaggtcggcgcgatggccgatgtgctgcaaatcttcaaggaagcgctgattgcgaagaaaagggctgacgaagatgcggcccgcgacgcggaggccaaaatcgatcgcggtcgccgtgtcgacaacatcacccgtgagttcgaatccatgatcggcgagatcgtcgagaccgtgtcgtcggcctcgaccgagcttgaggcctctgcgagcacgctgacctccactgccgaacgggcacaggaagtgaccacaatggtcgcggcggcgtccgaggaagcctccaccaatgtgcagtcggtggcgtcggccactgaggagttgtcgtcctccgtcaacgagatcagccgccaagtgcaagaatcggctcggatggcgggtgatgccgtcgatcaggcgcggaagaccaacgatcgcgtcggcgaactatcacgggcggcgggccgcatcggtgacgtggtcgagctcatcaacaccatcgcgggccaaaccaaccttcttgccctcaacgccaccattgaggccgcgcgcgctggtgaagcgggccgcggctttgcggtggtcgcgtccgaagtgaaggcgctcgccgaacagacggcgaaagccacgggcgagatcggccagcagatttccagcatccagtcggcaacccaggaatccgtcggtgcaatcaaggagatcggcggcacgatcgaaaagctttccgaaattgcctcgaccatcgcagccgccgtcgaggaacaaggggctgcgacgcaggagatctcccgaaacgtccagcaggccgcacagggcacccagcaggtctcgtccaacatcgttgatgtgcagcgcggtgcaacagagaccggctcggcctctacgcaagttctgtcagcagcgaagtcgcttgccagcgacagcacccggctcaaagtcgaagttcaaaagttcctcgagtcggttcgggctgcgtga

SEQ ID NO: 2331 - DNA, 252 bp, BradyrhizobiumColbertium
atgagaagccggttcggcaccgtgaaatggacgccgacggacaagaagatcaccgccaattgcgtccatactgatctcagcgggatgttggatttcggcgtgccatattttcacaccgcaagcctcaacggtcacgcgacggaatacggcgtgccgcgcgaagcctattatgggttcgtcaaccgcgatttccagaatgcgattcaattcaggacatcgaaaccgctgcgggcaactgctctcggcgtctga

SEQ ID NO: 2332 - DNA, 750 bp, BradyrhizobiumColbertium
atgttgccgacggtcggcgcattccaagctgcgacgcgtcagcagacccaggcttcgacgggcgcacatgccctgatcctcgccgatcctgatcccgtggtcttttctggacgcggaaatccagagaacgcgcagatcggcatcaactggcagcacgcggcctaccgagaagtgctagcgcggatctatgatcgggacggggcgtcgatttttccgcagccgcgtttcgatctcagaagtatggaggggcagctcttacatttcatggcccgaggcatcgcggcaggccacttcgaggaaatatccggttcgcccaatgcttcagccctcatttcggaagccatgttgcggttgatcatcgaggggagcaatctaggcggagactcgattttcgagagaacgcctgccgatgccagttcccggcaggtgcgagccgctatcgatctgatgaacgagagactgcacgagccgctgacgcttagcaagttggccgaagagctcggaataagcggaagatcccttcagcaaggctttcgcagatatcaggatacgacaccgctcacctatctccgacgtctgcggcttgaggctgtccacagagagctctccaatccacagaacgaactgccggtgaacgaggttgctgcgaaatggggcttcgctcacctcggtcggatggccaagctctatcgcgccagctatgctatgtcgccttccgaaacgctaagacgtgcaaaaagccgccgctaa

SEQ ID NO: 2333 - DNA, 117 bp, BradyrhizobiumColbertium
gtgagcccgccgctcgatcagagcagaaaagatgtccgggaccgcaaggatacgaacgacgtcggaaatgcgctcggcggaaaggccgtcgagccgctgccctcgagatattcgtga

SEQ ID NO: 2334 - DNA, 120 bp, BradyrhizobiumColbertium
atgccgatctcgacttggcttagcatcgagcccaagcgtcttcacgatgtggtcgcaggttacaatcggttcgatgtctttgattatcacgtccggcgcgagcgcttgcggccgtcatag

SEQ ID NO: 2335 - DNA, 114 bp, BradyrhizobiumColbertium
gtgctggaggcgacgccaatctccgaaagtttcttcgccgaccctacgggcgtggtcttcggcgaagcgacgacggacgaggggctcgtctatgccgatctcgacttggcttag

SEQ ID NO: 2336 - DNA, 405 bp, BradyrhizobiumColbertium
ttgaagatcagccacgtcagtgacaatccggaggagtggcaggaatatcatttcaccgaacccaaggaagggccgttggtcgctggcgagctgtatttcattcgcacctcaggctctaccggcacgatgatgagcggcgtctggcgttccggcaagggtattgccggctcgtccgtcgatgcgaaaggtacgctggttaccccctacaccggtacgctgggtgatgaaaccattctgctgcttgagggtgaggtggaagtcgtggagaccgacagcggcaaaaagcattcgtttaaggccggtgacgttatcggcctctcttctggagtgcacattacatggacttccaaaggtccgtttacaaagaagttgtgggtgataacacgggacgtgctgcccgactaa

SEQ ID NO: 2337 - DNA, 180 bp, BradyrhizobiumColbertium
ttgcgcagcggaggttacggaggagatgcggccctgtacaggtgcgtttctgcatggcgcattgatagaaggtctgccacaccgcgcccgcgcgttcatcgatttcatcgcggagccagcgcgggtaaccgatccgacgctaaagcgagcgggggatgggaagtggaggtcctacggtga

SEQ ID NO: 2338 - DNA, 1572 bp, BradyrhizobiumColbertium
gtggcgaagacggcgactaagaaggcttctaagaagaagagtgcgtcgaagaaggcggcgaagaccgcgaagaaggcgaactccggccgcaagagtgccgtcgcgaagccggcaaggaagtccgcgccgcgcaggtccgccgcaccgcgtcttcccaagggaccggcctggcaatggtcggcggtggagaccgccgcggccatccgctccggcgccatctctgcggtcgcgacggtcgaggcccatctcgaacggatgcgcgcggtcaatccgaagctgaacgccgtcgtcgtcgatctctcggaagaggcgcttgccgcggcccatgcggccgacaagcagcgtgccaagggcggcgatctcggccttctgcacggcgtgccgatcacgatcaaggaaaacgtcgatttccagagtcggcccaacttcaacggcgtgccggccaacaagggcctgatcgccccctccgacgcgcctgttgtccgcaacctgaagaaggccggtgcgatcgtcatcggcctgaccaacacgccggaattctccttccggggcttcaccgacaatcccctgcacgggttgacgctgaatccctgggacccggacatcacctgcggcggctcctcgggcggagcgggctcggcggtcgccgccggcatcggcaccatcgcccacggcaacgacatcgggggctcgctgcgctggccggcgcattgcaacggcgtcgccaccatcaagcccacgcagggccgcatccccgcattcaacgagagcgcaacggccgagcggccgatgctggcacatctgatgtcggcgcaggggccgctcgcccgccacgtcgccgacgttcgcctcgcgctggaggtcatgagccagcgcgatccgcgcgacccctggtgggtgccggcaccgctggtcggcgaacggccgaaaggaccgatcaaggtcgcgctggccaaaatccccgaggacatggacgttgatccgtctgtctccgccgcgctgcgccaggccgccgaccatctcgagcggtctggctatcgcgtcagcgaggtcgaggtgcccgacatcaacggtgtctggcagacctggtgcgacatcatcaccaacgagaccgtggtgatgcaggaagccggcatgctgaaggtcacgtccgaggattttcacaaggcctggggcggcatgaaggccaaggccaatgtgctcgatctcaagggctggatgcaggcgaccgccgcgcgcaacggccatatccgcgcctggcagttgttcttcgaggagtatccggtcgtgctggcgccgaccacggtgaagccgacgccaggcccgcgtgacgacaccatcagcgccgagcgcgtgcgcgagatcttctggggcgagatccgcttcatctccgccatcaatgtgctggggctcccgggcgcggtcgtgccggtggcgctgcacgacggcaagccgatcggcgtgcagctgattgccgggcgctatcgcgaggatctcgcgctcgatgctgcggccgcgatcgagaagcgcgccggcgtgctcgcccgccagctgtgggagcaaatgtcttag

SEQ ID NO: 2339 - DNA, 366 bp, BradyrhizobiumColbertium
gtgatcggcgacgttgacgaaggcgaaatgcagcgccgcctgaccggtcgcgaccgcgagcgcgccgacgccgccttcgagttgggcgatgcgcttctccagcaccgcgctggtcggattggcgatacggctgtagcgaaagccttcggtctcgagattgaacagggcggcgccgtgatcggcgctgtcgaaggcataggccgcggtctggtagatcggcacggccaccgcatgcgtggtggcttcgggctcgtagccggcgtgaatagcaatcgtctcgttgcgcattatgccacctccgcgtggggcgggccgcacttattagcctgtatgaggcatgtgcgttgtccgccgctcctctgttag

SEQ ID NO: 2340 - DNA, 501 bp, BradyrhizobiumColbertium
atgggctcggtgctgtcgccgttcaatgccttcctgctgctgcagggcatcgagaccgtcgcgttgcgcatggagcgccacgtcgagaatgcgcgcaaggttgccgaattcctgcgcggcgatcctcgtgtcgcctgggtcaattacagcggtttccctgacagtccttactatccgctggtgcagaagtacctgaacggcaacgcctcctccctgttcacctttggcatcaagggcggcatggaagccggcaagtccttctacgatgcactgaagctgatcacccgcctcgtcaatatcggcgacgccaagtcgctggcctgtcatccggcttcgaccacgcaccggcaaatgtcggcggagcagcagcgcgccgctggcgtgctgccggagaccatccgtttgtcgatcggcatcgagcatgtctcggacatcatcgaggacatcgaccaggcgctggaaagggcctgttcgccggcccgtctcgaggctgcggagtag

SEQ ID NO: 2341 - DNA, 999 bp, BradyrhizobiumColbertium
atgacgatcttgatcgacaaggatcaagtcatcgccggcccggcgctggtgccggccgagcacgatctcgcgcgcgaggccggcgacgaactcaccatcgggctcgtcaacaacatgccggatccggcgctgaaggccaccgagcgccagttcatgaagctgctccaagccgcagcaggcccgcgccgtatccgcttctactgcttctcgcttcccagcgtaaagcgctcgccggaagcgaagtggcatatcgagagcgagtactccgacctctccgatctcgagcgcggcaaattcgatgggttgatcgtgaccggtgcagagccgatcgcgcccgagctcgatcaggagccttactggcgcgacctcacgaacctcatcgactgggcgaagatcaatacgcgctcgacgatctggtcgtgccttgccgcccatgcggcggtgctgcacctcgatggcatcgaacggcggcggttgccggccaaatgtcacggcgttttcgattgcgacgtcgtaacggccgactcgctgacacgcgccgcgcccgcgcctttcaaggtctcgcattcccgcctgaacgagatcgccgagagcgacctcgagcaggccggttatcaagtgctgacacgttcggcccaagccggcgtcgacgtcttcatccgccaatatgccagccgcttcgtgttcttccagggccatccggaatacgacgcgctgtcgctccagcgagaatatctgcgcgacatcggccgctatctcgcgcgcgagcgcgacaactatccacgcctgccggtgagctattttgacgcagcgacggaagagaagctggctcgcttcgagaagagggcggcacatcagcgccatccggcgctcagcaacgagctgcccaggctgaacttgcgcgccgatatcggcgctggcagcgccgcggcggtgctattccgcaactggttgcgctatctcggcgcggccgccgatgcgtctgcggcggtacgctag

SEQ ID NO: 2342 - DNA, 657 bp, BradyrhizobiumColbertium
atggtgagctttaccttcgacgatgctcccgatagcgcggcaagcgagggcgccgagcttctggagaagcatggcggccgcgggacgttctatctcgccggcagtctgatcgatcagccgtcggagcattggcacggcctgtcgaatgacgcgatcgtgcggctccaccgcgccggtcacgagattgcctgccatacctactcgcaccggaactccgccactctcgacgagggcgcgatggctcgcgagatcgaacggaaccgctcctatttccgcggcatcgattcctcgatcacactggagaacttcgcctatccctatggggtcgcctcgatctggcgcaagccgcaactcacaaaggccttccgttccgcgcgtggcattcttcccggcgtcaacagcgatgtcatcgacctccagttcctgcgtgcttcgcccttgatcgattgcgagatcgacaaggcaggagttgatcgctatttcgacgaggcggtcgcaagcggcggctggctcatcttctacggccacgacgtcaccgatcggccgagcccctatggctgcacgcccgacctgatgcggcatgcgctggcggcagccggcaagcgcaacatgccgatcgtcacggtcgcagaagcgttgcggcggatcggagcctag

SEQ ID NO: 2343 - DNA, 1866 bp, BradyrhizobiumColbertium
atgtccgctccctccaccgctaccgtccctgtaccggccaacggccacgacgcgctgtcggtgctgcattcggtgttcggcctgccggacttccgcggcgcgcagggcgagatcatccgtcacgtcacccagggcggcaattgcctcgtgttgatgccgaccggcggcggcaagtcgctgtgctatcaactcccttcactgctgcgcgaaggctgcggcatcgtggtgtcgcccttgatcgccttgatgcgcgaccaggtcgccgggctgatcgatgccggcgtcaatgccgccgccctgaactcgtcgctgacgccgcaggaggcgtccgatatcgagcggcgcctgctcgcgggtgatctcgacctgctctatgtcgcgccggaacggctggtcacgccgcgctgcctgtcgctgctggcgcaggcgaaggtggcgctgtttgcgatcgacgaggcgcattgcgtctcgcaatggggccatgatttccgtcccgagtatgtggggctctccatcatcgccgatcggtttcccgacgtgccgcgcatcgcgctgaccgcgaccgccgacgagctgacccgcaaggagatcgtcgaacggcttcatctgaccggcgcgccgcaattcgtctcgagcttcgaccggcccaacatccgctacgagatcgtggacaagcgcagcccggtgtcgcagctcaaggaattgatccgcgagcgccacgccggcgatgccggcgtggtctattgtctgtcacgcaaccgcgtcgaggaggtcgccgccgcgcttcaggaggccggcattgcggcgctgccctatcatgccggcctcgacggcagcgtgcgatcgcgcaaccaggaccgcttcctcaacgaggacggcatcgtcatcgtcgcgaccgtggcgttcggcatgggcatcgacaagcctgacgtgcgcttcgttgcccatctcgacctgcccaagagcatcgaggcctattaccaggagacggggcgagcgggccgcgaaggcaagccgtcgacggcctggatggcctatggcctctcggacatcgtgcagcagcgccgcatgatcgacgagtccaacgcttcggatgagttcaagcgggtctcgatcggcaagctcgatgcgctggtcggccttgccgagacgccgcattgccggcgccggcggctgctcgcctatttcggcgagatcgcgatgggcgagagctgcggcaattgcgacaattgcctgacgccgcccaagatgcgcgacggcaaggtgctggcgcagaagctgctgtcctgcgcctatcgcaccggccagcgtttcggcgcgatgcatctgatcgacgtgctggtcgggcgcctgaccgagaaggtcacgcagttcggtcacgacaagctgtcggtgttcggcatcggccgcgagctcaacgaaaagcagtggcgcacggtgctgcggcagctcgtggcgatgggccatttgcagagcgacagcgaagcgttcggagcgctgaaactgacagagtcctcgcgcggggtgctgcgcggtgaaacggaggtgtggctgcgcgaggaagcgaccggcacccgcacccgttcgagccgcgctagatcccgccgcggcgatctcgcgcctgcggccggcgcgccgcaaggcgatgtcgatcccgagctgcgtgcgcgcctgcggtcgtggcgttcagacgtcgcccgcgaacgcggcgtgccggcctatgtggtgctgcacgataccaccatcgacggtatcgtccgggcctggccgacgacgctggacgaactccgcaccgtgccggggatcggcgacaagaagctcgagcattacggcgacgagctgctgcagatcatcaggacgcggtaa

SEQ ID NO: 2344 - DNA, 1017 bp, BradyrhizobiumColbertium
atgatgctggaaaaattcgcgcgctatccgctgaccttcggcccgacgccgatcgagaagctggagcggctgtcaaaacatctcggcggtaacgtcgaaatctacgccaagcgcgaggactgcaattccggtctcgcctatggcggcaacaagctccgcaagcttgaatatatcatccccgatgccatcgcctcgaatgccgacacgctggtctcgatcggcggcgtgcagtccaaccacacccgcatgatcgccgcggtcgcggccaagatcggcatgaagtgccgcctcgtgcaggaggcctgggtgccgcacgaggacgcggtctatgaccgcgtcggcaacatcatgctctcgcgcatcatgggcgcggacgtgcgcctggtcgacgagggcttcgacatcggcatccgaaagagctgggagcaggcgatcgaggaggtgaaggcagcgggcggcaagccctatgcgattcccgccggcgcctccgtgcacaagtttggcggcctcggctatgtcggcttcgccgaggaggtgcgcaagcaggaagccgagctgggcttcaagttcgactacatcatcgtctgcaccgtcaccggctccacccatgccggcatgctggtcggttttgcggcggatggccgtgcccgcaaggtgatcggcatcgacgcctcctttacgcccgcgcagaccaaggcgcaggtgctcgagatcgcgcagaacaccgctcagctcgtcgagctcggcaaggagatcgtcgccgacgacgtcgtgctgatcgaggactatgcctatcccgcctatggcgtgccgtcggaggagaccaagggtgccatccgcctcaccgcgcgtctcgaaggcatgatcaccgaccccgtctacgagggcaagtcgatgcagggcctgatcgaccttgcgaagaagggccatttcgagaaaggcgcgaagatcctctacgcccatctcggcggtgcgccggcgctgaacgggtatgcctatgcgttcaggaatgggtga

SEQ ID NO: 2345 - DNA, 465 bp, BradyrhizobiumColbertium
atgtcgtcccggctcgatcgaattgatctcaagatgttgagattgcttcagaataacggccggctcagcaacgccgagctggcggagacggtcgcaatcagccccgccacatgccatcgccgtacccagcgactgttcgaggacggcttcattgccgccgtgcgcgccatggtcgcgccgaagaaggtggcgaaaggcacgctcgtgatggtcggcgtcgtgctcgaccgctcgacaccggagagctttgcctccttcgaacaggcgatcaccaaactgagatgcgtgctcgactgccatctcgtcgccggcgatttcgactatttcctcaagatccgcgtcggcgacatggaggatttcaaccgcatccacggcgagcagctcatcgcgctgcccggcgtgcgccagacccgcaccttcttcgtgatgaaggaagtcgtcgacaacgcgccgctggagttttga

SEQ ID NO: 2346 - DNA, 855 bp, BradyrhizobiumColbertium
atggggctggcctgtcttgccatctcggcgagcgccgctttcggcgaggccgacgacgatgaaacggcaaagccggctattccgaacatctacctcgatctgcgcacgaactatgcgaaaatcccgtcgggcaccctcggactcggattcggaaacacctcgctatcagccgcactccaggccctggcggtgcgtcgcggcgcaacgctgccgcacggcttgccggccacgacagcgattgccatcgacctgccgttgaccgtcgacgtcagcgaccgcgtctcgctgtatggcggcgtgtcgggctctaccactgacgacggccgcggctggtcctccttcgacatcacgagctggaacattggcgtgcaggccgacctgtaccagcagaatggcggaacgattccgaccatcacgctgcagtcgaccctgacgcaatcggtcccgaacgaacagggtatgacgaattcgttcaacaacatcctggagttcgactacgcgctcgacgaggacgagacgcggggctggctggccggcacgcaatacaccaccaccgccattgccagcccgttcgccaacatcggaacgaatacgatcctctatgccggcggctactaccaatggccgagcaactggaagttcaccgggcgcctcggcgtgcagtccttcggtggcgcacagctcgcggggcggacgatcgcggagtccttcacccagccgatcctgcggctcgacctcgatcgcatggacgacaacgacaaccggctgttcggtatcaccgcgctgatcgcgtgggcgccgaagccgtcctaccagctgacgctacgaacgccgctctacgccgtgcgcaattag

SEQ ID NO: 2347 - DNA, 336 bp, BradyrhizobiumColbertium
atggactgcatcgatgcgcgcggctaccctgccgtgatcgcaccgactctcgccggctatagctcgggccggaccatggaggacgaagccatgaacacgtcgcgccgcatcctgctcgccggaatggcggggctcatcgccgctccgactgccgtgacggccacaccggcgtcggcggccgatgatgtgacggttgccgaagaacgctttgcgcgcatgatcgccgccgcgcatgcgcccgacatcaattgcgcgcggcaggcggagcgttatgcggacgcgcattggcctgaatacgttgtcgcggccagggcggttctcgatgcacgcgtgtga

SEQ ID NO: 2348 - DNA, 936 bp, BradyrhizobiumColbertium
atgccgctcgatccactcgcaaagcgtttgttgaccatgatggcggcggccgggccgcaggcgcggagcagaccgagcgtggaggcgcggcggcaatcgctggcaaagctgatgcagttcgcgcgcgccgaggcgccggatgtggcgacctccgatggcacgctgactggccacgccactgaactggcctatcgcctctacacgccggcaagcgccgaggagctcgcgccgggcttcgtgttcttccatggcggcgggctcgtcgccggcagcattgccacgcacgaccgtatcgcggccgcgctggcgcatgccaccggttgccgcctcgtatcggtcgagtaccggctcgccccggagcacagatttcccgccgccgtcgatgacgcgatcgccgccaccgaatgggtggcgcgcgaggccgcatctctcggcatcgacgcggatcgtctggtgatcggcggcgattccgccggagctacgctcgcggcgatcgtgtgccaggaggcggcgcagaccgccggcctctccatcgccgcgcaatgcctcatctgcccggtgctggatttcgaggagacctcgccctcacgcgaagcctttgccgaggggcacctgatcgatcgcgccacgatcgaagccgatctttccgactatctgcctgacgacatcgataccgcagatccgcgcgtctccccgttgcgcgcaacgcggctcaccggactgccgaccgcgatcatccacaccgccgagtacgacccgatgcgcgacgaaggcaacgcctatgcccgcaagctgctcgccgcgggcgtcgccgtcgagcatgtctgccacgacggcatggttcacaatttccacgccatgggcgcgatcctgccgcaggcacaactcgtgttgtcgcagatcggagaacaggtgcggagggctgtgaagaggtga

SEQ ID NO: 2349 - DNA, 888 bp, BradyrhizobiumColbertium
atggccgaaatcaagaaacccattgaatattcgccgagttggaccttcttcgagggtaaatggcacgacggcaatgtgccgatcatgggcccgcggacgcatgcggcctggctcggatcgatcgtgttcgacggcgcgcgcgcgttcgagggtgtcgcccccgacctcgaccgccacatcgcccgcgccaaccagtctgcgctcaacttcggcctcaagccggtggtcgataccgacacctggctcacgctcgcgcgcgagggcattgcgcgctttggaccttatgccgagctctatatccgtccgatgtattgggcgcagaacggttcgggcggcggcgtgctgttcgaccccgaaaccaccaattggtgcctgtgcatctacgaggcgccgatgccaaaacccgtgggcaacgccatcacgctgtcgccgttccgaaggcccaccgccgaatgcgcgccggtcgaggcaaaggcggcttgcctctacccgaacaattcgcgtgcgctagcggaagctgcttcccgcggcttccagaacgcgttgatgctcgacatgctcggcaacgtggccgagtttggcaattccaacgtgttcatggccaaggacggcgtggtgtttacgccggtgccgaacggcaccttcctcaacggcatcacgcgccagcgcgtcatcagcctgcttcgcggcgacggcatcaccgtggtcgagaggacgctgcgctatgccgatttcctggccgccgacgagatcttctccaccggcaatttcgccaaggtcgcgcccgtgatccgcatcgacgagcgcgaactgaagccggggccgttctatgcgagagcgcgcaaactgtattgggactttgcgcatgcgatgaagcaggcggcttga

SEQ ID NO: 2350 - DNA, 621 bp, BradyrhizobiumColbertium
atgtccgatcgaagtgcgcattgggagaacgtctacctcaccaagggcgaagccgaggtcagttggttccagaacagcccggcgacctcgctcgacctgatccgcgctgcaactcccgaccatggcgcagccatcatcgatatcggcggcggagcatcacgactggtcgatgcgctgttgcaggacggatatcgcgacgtcagcgtgctggatctttcggcgaatgcgcttgacgcagcaaagaagcggatcggcggagcagcctcgatggtcgactggatcgttgccgacgcgacgacgtggcagccggcgaagacctacgaggtctggcacgatcgcgccgcgtttcatttcttgaccgacccgcgcgacagggccgcctatgtcgagcgccttcggtcggcggtcgctcccggcggcaacgtcatcattgcgacgttcgcgcccgatggtcccgagaaatgcagcggcctgccggtgcagcggcatgacagcgcgagccttgcggcggcgctcggcccggagttcgagctcgtcgagacgcgaagcgagacgcatcacacgccatgggattccacgcaggcgtttcagttcagccggtttcggagacgcggcgcgtga

SEQ ID NO: 2351 - DNA, 585 bp, BradyrhizobiumColbertium
atggcgaaatcagaccaacccaccaccatcaagaaatacgcgaaccgccggctctataacaccgggacgagcacctacgtgacgctggaagaccttgccgccatggtcaaggatggcgaagatttcctggtctatgacgccaagaccggcgacgacatcacccgctccgtgcttgcccagatcatcttcgagcaggagaacaaggccggccagaacctgctgccgaccaccttcctccgccagctcatccgcttctacggcgacagcatgcagatggtggtgccgaaatatctggagcagtcgatcgcgaccctgacccaggagcaggagaagttccgcaagcagatcgccaacaccctgtccggcactccttttgctcccctggaggaacaggtccgccgcaacatggagctgttccagcagaccttctcgatgttcaagccgttcgcagcgccccgttcggccactaccccggagcccgacgcgaatgccgaggcgccgaaggacagcaacatcgacgatctgcgccagcagatgaaggaaatgcaggaacgcctcgagcggatgtcgaaaaaggacgagtag

SEQ ID NO: 2352 - DNA, 1179 bp, BradyrhizobiumColbertium
atgtcagacgatgtcgtcatcgtcagcgccgcccgcaccccggtcggaagcttcaacggagcgttcgcgacccttcccgcccatgacctcggcgcagtcgccatcaaggccgcgctggagcgcgcgggcatcgagcccggccgcgtctccgaggtcatcatggggcagatcctgaccgccgcccagggccagaacccggcacgtcaggcttcgatcgccgccggcattccggtggaaagcccggcctggggcgtgaaccagctttgcggctcgggtctgcgcaccgtcgcactcggctatcaggcgctgctcaacggcgattccgagatcgtggttgccggcggccaggaatcgatgagcatggccccgcacgcccagcacctgcgcggcggcgtcaagatgggcggcctcgaactggtcgacaccatgatcaaggacggtctgtgggatgccttcaacggctaccatatgggcaataccgccgagaacgtcgcgcggcagtggcagatcacccgcgcccagcaggacgaattcgccgtcgcctcgcagcagaaggcggaggccgctcagaaggcgggcaggttcaacgacgagatcgttcctgtcaccatcaagacccgcaagggtgacgtcgtcgtcagcgcggacgaatatccgcgtcatggcgccacgctcgatgccatggccaagctcaagcccgccttcgagaaggacggcacggtcacagcgggctctgcgtccggcatcaatgacggcgctgccgccgtggtgctgatgactgccaagcaggcggccaaggaaggcaagaagccgctcgcgcgcatcgtgtcgtgggcacaggccggcgtcgatccgaagatcatgggctcgggtccgatcccggcttcgcgcgccgcgctgaagaaggccggctggaatgtcggcgatctcgatctcatcgaagccaacgaggccttcgcggcgcaggcctgcgccgtcaacaaggacctcggctgggacacctccaaggtcaatgtcaacggcggcgcgatcgcgatcggccatccggtcggcgcatccggctcacgcgtgctggtgacgctgctgcacgagatgcagaagcgcgattcgaagaagggtctggccacgctctgcatcggcggcggcatgggcatcgccatgtgcctggcgcgcgactga

SEQ ID NO: 2353 - DNA, 726 bp, BradyrhizobiumColbertium
atggcacgtgttgcattggtcacgggtggtacgcggggcatcggtgctgcgatcagcaaggcgctgaaagccgccggctacaaggtcgcggcgagctatgccggcaacgatgcggcggccgagaagttcaaggccgagaccggcatcgcggtctacaaatgggacgtcagcagcttcgatgcctgcgccgagggcgtgaagaaggtcgaggccgatctcgggccgatcgaggtgctggtcaacaatgccggcatcacccgtgacaccgccttccacaagatgacgctcgagcagtggaacgccgtcatcaacaccaatctcggctcgctgttcaacatgacgcgccaggtcatcgagggcatgcgcgcgcgcaagttcggccgcatcatctccatctcttcgatcaacggccagaaggggcagttcgggcaggtcaactattccgcggcgaaggccggcgacatcggtttcaccaaggcgctcgcgctcgagaacgccaagggcggcatcacagtgaacgcgatctgccccggctacatcaacaccgaaatggtgcaggcggtccccaaggacgttctggagaagaacgtgattccgcagataccggccagccgtctcggcgagcccgaagagattgcgcgcgcggtcgtgttcctcgcggccgacgatgccggattcatcaccggctcgaccctgacggtcaacggcggccagtacatggtgtga

SEQ ID NO: 2354 - DNA, 870 bp, BradyrhizobiumColbertium
atgactccccgcaccgccacactgatcggcttgaccgcgatcctcatgtggtcgctgctgtcggtaatgacggtggcgaccgggaagatcccggcatttcaactcgccgcgatgacgtttgcgatcggcggcctcgtcggcctgctcacctggatcgggcggaatggggcgacgaaaagcctgcgccagccgctcgtcgtctgggtcgtcggcgtcggcggcctgttcggctatcacgcgctgtactttctcgcgctgcgcttcgcgccaccggccgaagccggccttctgaactacctgtggccgctcttgatcgtgctgttctcgtcattcctgcccggcgagcgtctggctgcgcatcacatcatcggcgccgtgctcggcctcgtcggcaccgtgctgctgttcgccggcaacacctccggcttcgcgccgggcgcggtaccgggattgatcgcggccttcatcgcagctttcgtctgggcgacctattcggtgctgtcgcgccggttgaaggcggtgccgaccgacgccgtcgcgggcttctgccttgccacggccgcgctggccgcgctgatgcatggcctgctcgagaccacggtgtggccggagaccagggtgcaatggctttcagtcatcgcactcgggatcggccccgtcggcgccgccttctacgcctgggacatcggcatgaagcgcggcgacatccgcgtgctcggcgccgcctcctacgcgacgccgctgctttcgaccggattcctcattgcagccggttttgccaaagccagcgccagcatcgcgcttgccgcaatcctgatcgcgggcggtggcttgatcgcggcgaaggacatggtgttgcggaagaggtga

SEQ ID NO: 2355 - DNA, 423 bp, BradyrhizobiumColbertium
atgccgaccgcagccgagatcatcgcgcgcctcgaactccggccgcatccggaaggcgggcattaccgggagacgtttcgcgaccaggccaccgacgccaacgggcggtcgcgctcgaccctgatctatttcctgctcgcgcgcggcgaacgctcgcactggcaccgcgtcgatgcggtcgagacctggcattattacgccggcaattctttgatcctgcgcatcgcccatgagggttgctcgcaacacgaggtgcggctgggctccgacctcgtcggcggcgagcggccgcagggtatcgtgcctgcgaatgcctggcagatggccgaaaccacgggcgagtggacgctggtcggctgcacggtggcgcccgcattcgagttcgcaggattcgagctcgcaccgaacggctgggagccgtag

SEQ ID NO: 2356 - DNA, 768 bp, BradyrhizobiumColbertium
atggccgccgaaattcgtactttcacctgtttaaacgacaatttcggttacctgatccacgatgtggaaaccaaggcgacggcgtcgatcgacgcaccggaggccggcccgatcctcgaggccctggagcgcgagggctggcagctcaccgacatcctgatcacccatcatcatggtgatcatgtcggcggggtcgctgaactcaagcagaaatacaattgccgcgtcgtcgcgccgcacgacaagacgacgaagatcgccaacgtcgatctgcgcgtcgccaatgccgacgtggtcaagatcggcaatctgctggcgcgcgtcgtggagacgccgggccatacgctcgaccacatctcttacgtgttcgacaccgagaaggcggtcttcgcagccgacacgctgttctcgatcggctgcggccgcgtctttgagggcacctatcccatgatgtgggattcgctcctgaagctgcgcgccctgcccgacgacttcaagctctattgcggccacgaatatacggcgtccaacgtcaggttcgcgctcaccatcgagccggacaatgcggcgctgcaggcgcgcgccgcggaggtgacgaagctccgggccgagaacaagccgaccattcccaccctgctcggcgaggagaagcgcgccaacgtgttcctgcgcgccgacgaaccctcggtcgcggccaagctgcacatgaaaggcgcagaccccgcctcggtgttcggcgagctgcgcgagcgcaagaacaagtcctga

SEQ ID NO: 2357 - DNA, 798 bp, BradyrhizobiumColbertium
atgcaatattccgcgcgcagcgccgggcgcgtgcatgatacattgcccgtcatgaccatcgacgtcgtcgacctccgcgagttctattcccgccgcctcggcatcgtggcgcggcagatgatcaatcgcggcatcagggagcgttggccccgcgccgagggccagcgcgtgctcggcatcggctatcccacgccttatctggggttgttccgcgaggatgccgagcgctgcattgcgttcatgccggccgcccagggtgtcctgaaatggcctaccggacggccggcgctggcctcgctggtcgatgaattctcactgccgcttcctgacgccgcggtcgaccgcatcctcctggtgcacgcgctggagatgtcggacgatccggccgcgctgctgcgcgaggtgtggcgcgtgctatcgccgtccggtcgcgtgatcgcggtgatcccgaaccggcgcggaatgtggacccgcacagacaacacgccgttcggtcacgggcggccctattcgcgatcgcagatcactgagctattccgccagacctggttcacgccgaccgcctggggcgaggcgctgttcatgccgccctatgccggcggctgggtgctgagatcggcgcagatgtgggagcgcgccggagcagcgttgtcgctgccctttgccggcgttcatatcgtggaggcgaccaagcaggtctaccgcgcgatccccgccaagcgcgagcgcgcacggctcattccttcgctcggcaagcccgtgctggtgccctcctcgacgacggcgacacgcagctga

SEQ ID NO: 2358 - DNA, 774 bp, BradyrhizobiumColbertium
atgagaaacggtcaaaacaagcagcggatgcgcaaccgcaacaacaataacaacaacaaccggcgcggccagaatccgatgacccgggtctacgagtccaacggaccggacatcaagattcgcggcaccgcctcgcacattgccgagaaatatctccagcttgcgcgtgacgcgcgctcctccggcgaccccgttgcggccgagaactattaccagcatgccgagcattacttccgcctgatcgcggcggctcaggagcagttccggcagaaccagcagccgcgcggcgatgagccgatcagcaacagcagcgacgacggcgaggacgatggcgagaatttctcggccttcggccaggagccgggcttcgtcccgcagccccagcagcagcccttcatgcgcgaccgcgacgggcagcgcgatcaccaccagcgtgaccctcagcagcgcgacagccagccgccttatcagcgcgacaaccagcagccccgcgagcaccgcgagcgcgatcatcgtccgcagccgcaatatcagccgccgccagctaaccagccgcagcccgtcattgccgatgccggcggcgtcgaccgcttgccctccttcatcaccggcgcgcagccgcaggtgaatgtcggcgcgaatggcggccaaggtgggttcgagggcggtggtggcgagcgctttccccggcggcgtcgccgtccgcatggcccgcgccccgagcgcgaagccgccccggtcgcctccagcgacgaggtcgcccccggcgagtag

SEQ ID NO: 2359 - DNA, 879 bp, BradyrhizobiumColbertium
gtgagcaatcccttcaccggacaatccatcgaaggcgcgcggcgcgcgctcgctgcgcgactgaggtcggcacaattcgacgaggccgagctcgacgcacgcatcctgatcagtgcggtactcggcctcgacctcaccggcctgatcacgcaggccggccgtcctctcaccgcggccgaagcatcgcggctggcgcagcacgcagagcgccgtatcgccggtgagccggtggcgcgcattctcgggacacgcgagttctggggcctgccattccgcctgtccgaggcaaccctggtcccgcgccccgataccgagaccgtggtcgagcttgcgctggaagtctttcgcgagcggccgacgcctcatccgcgtatcgccgatctcggcaccggatcgggcgcgatcctgctcgcgctgctgcacgaaatccccgatgctttcggcgtcggcaccgatctcagccagaacgcgctcagaaccgccagggacaatgccgcggcgctcggcctcgccgaccgcgccgccttcgtcgcctgctcctacgccgcggcgctccgcggcccgttcgacctcatcgtgtccaatcccccctatattccctccgccgagattccgaaattgagcatcgaggtccgcgagcacgatcctcatctggcactcgacggcggcaatgacggctacgacgcctatcgcgcattgatccctcaggccgccgagcgcctctccccggccggcgcggtgatcgtcgaggctggccagggccaggcccagaatattgaaaccttgatgaggggggccgcgttgtcgatcgacaggccacccaagaccgatttggccggcattccccgggccgtttcggcccgaaaaatgcccccataa

SEQ ID NO: 2360 - DNA, 1086 bp, BradyrhizobiumColbertium
atgtcgtcacttcccgaagccaaactggacctcctgctcgcgcatcacgcctcgctcgaggctgaatcgctgggacagctcacctccgagcggtacgtgcagatcacgcgcgagctcgccgagatcaccccgctcgtcgaggcggtgaagacctatcgctccgcggtcaaggagctcgccgataccgaagccctgatcgccgatcccgccaccgatgccgagatgcgcagcatggcggaggccgagcgcggcgagttgacgtcaagaatcgaggagctggtccagaagatccgcgtcgcgctgctgccgaaggacgccatggacgaccgcaacgtggtgctggaaatccgcgccggcaccggcggcgacgaggcttcgttgttcgccggcgatttgttccggatgtacgagcgcttcgccagccttcagggctggaaggtcgaggtgatctccgccagtgaaggcaccgtcggcggcttcaaggaaatcatcgcggaggtgcagggccgtggcgccttctccaagctcaagttcgaatccggcgtgcaccgcgtgcagcgcgtgcccgataccgagacgcagggacgcatccacacgtccgcggcgacggtcgccgtgctgccggaagtcgaggatgtcgacgtcgagatcaagaacgaggacctgcgcatcgagacaatgcgcgcgcaaggcgcgggcggccagcacgtcaacaagaccgaatcggcgatccgcatcacgcacatcccgaccggcatcgtggtgatgatgcaggacagccgctcgcagcacaagaaccgcgcctctgccatgaacattctgcggtcgcgcatctacgacgccgagcggcaacgggtcgacgccgcgcgctcggccgagcggaaggagaaggtcggctccggcgaccgctccgagcgcatccgcacgtacaattttccgcaaggccgcgtcaccgatcaccgcatcaatctgacgctctacaagctgccgcaggtgatcgcgggcgaggcgctcggcgaattgatcgatgcgctgacgacggagcaccaggccgcgcagctcgctgcacaaggcgcggcggcctga

SEQ ID NO: 2361 - DNA, 2238 bp, BradyrhizobiumColbertium
ttgttgagacggctccgcgagaccatggcggagcaggtctcggcccaggagcggctggacaagatcgtggtgctgatcgccgccaacatggtggccgaggtgtgctcggtctacgtgctgcgcatcgacaacacgctggagctctacgccaccgaaggtctcaatcgcgaggccgtgcaccacaccgtgctcagcgcccatgagggcctggtcggcctggtcgccagcgaggcgacgccactcaatctgagcgacgcacagagccatccggccttctcgttccgccccgagacgggcgaagagatctaccactcgttcctcggcgtgccgatcctgcgggccggcaacaccctcggcgtgctggtggtgcagaaccgcgccaagcgcaactatgtcgaggaggaactcgaggcgctgcagaccactgcgatggtgctggccgagctgatcgcctcgggcgaattgtcggcgctggcccagccgggccaggagcccgctgcgcgccattccgcgcagaaggtcggcgcgatcctgtcggagggcatcgcgctcggccatgtcgtgctgcacgagccgcgcgtcgtcatcaaggactacatcgccgaggacctgccgaaggagatcaagcggctcgacaccgcgctcgccaagctgcgcgccgatctcgatcgcatgctggagcgcggcgacgtcgccgaaggcggcgagcatcgcgaggtgctggaagcctaccgcatgttcgccaacgaccagggctggtcgcacaagctgcacgaggccgtcgccacgggccttaccgcggaagccgccgtcgagcgcgtgcagtccgacacccgcgcgcgcatgctgcgctccactgacccttacttgcgcgaccgcctgcacgatctggaagatctcggctatcgcctgatgcggcagctcgtcgggcaagaccacgcgccttcgcgcgagcaattgcccgacaacgccatcgtcatcgcccgcgcgatgggcccggcggcgctgctcgactacgaccgcaagcgcctgcggggcatcgtgctggaggaaggcaccgccaattcgcacgtctccatcgtggcgcgcgcgctcggaatccccgcagtcggcgaagtgccgaacgcgcccggcatcgccgatcccggcgatgccatcatcgtcgacggcacctccggctcgatctatgtgcgcccgtcgcaggaggtcgaggcggcgttcgccgagcgcgtgcgctttcgcgcccgccgccaggcgcagtatctggcgctacgcgaccggccctgcgtcaccaaggacggccagaacgtcgagctgatgatcaacgcaggtctcgccatcgacctgccgcatatcgaggacaccggcagcgccggcatcggcctgttccgcaccgagctgcaattcatggtcggccagagcctgccgcgcaccagcgatcaactcgcgctctatcgcaccgtgctggacgcggcgggcagcaagcccgtcaccttccgcacgctcgatatcggcggcgacaaggcgctgccctatatggaagcggtgatcgaggaaaatcctgcgctcggctggcgcgcgatccggctcgggctggatcgtccgggcctgttgcgcgggcagatccgcgcattgctgcgggccggcggcggccgcgcgctgcgcatcatgttcccgatgatctcggaggtcgccgagttcgacgcggcgaaagcgctggtcgagcgcgagctcacatatctgcgccagcacggccacacgctgccggaacgtatcgacatcggcaccatggtcgaggtgcccgccctgctttaccagctcgacgagctcctgaagaaggtcgatttcatctcggtcggctccaacgatctgttccagttcctgttcgcggtcgatcgcggcaatgccaaggtctccgagcgcttcgacaccatgtcggcgccgatcctgcgcgcgctgcgcgatatcgcacgcaaggcgcacgcggcgaagaagtcgctctcgctctgcggcgagatggcgtcgaaaccgatcggcgcgctggcgctgatcgcgctgggctaccgttcgctgtcgctctcggcaaccgcgctcggccccgtcaaggcaatggtgctcgacctcgacgccaggaaggccgaagccgtgctcggcccgctcctggacgcgccggcgggcagcgtctcgatccggcagaagctgacggaatttgccgaagccgagggcctggcgttgtag

SEQ ID NO: 2362 - DNA, 1257 bp, BradyrhizobiumColbertium
atgagccgcctcgtgatgaaattcggcggcacgtccgtcgccaatatcgaacgtatccgcaacgttgcacgccatgtgaagcgtgaggtcgacgccggccacgaagtggccgtggtcgtctcggcgatggccggcaagaccaacgagctggtcgcctggtgcaccgaggcctcgccgatgcatgacgcgcgcgaatacgacgccgtggtcgcctcgggcgaacaggtgacctcgggcctgcttgccatcgtgctccagggcatgggcatccaggctcgctcctggcagggatggcagatcccgatcaagaccagcgacgcccatgcctcggcgcggatcgaggacatcgacggcagcgagatcatcaagcgcttccaggagcgcaaggaggtcgcggttatcgcaggcttccagggcatcaaccccgagaccaatcgcatcaccaccctcggccgcggcggctccgacacgtcggccgtggcgatcgccgccgccgtcaaggcggatcgttgcgacatctataccgacgtcgacggcgtctacaccaccgacccgcgaatcgtgccgaaggccaagaggctcgacaagatcgcattcgaggacatgctggaactcgcctcgcagggggcaaaagtgctccaggtgcgctcggtggaactcggcatggtccacaatatgccgattttcgtccgctcgagcttcgacaagcccgaggatatcgacccgcatgccaaccagccgcccggcacgctgatctgcagcgaggaggagatcatggaaagccacgtcgtcaccggcatcgccttttcaaaggacgaggcccagatctcggtgcgccacatcgaggacaagcccggcgttgcggcatcgatcttcggcccgctggcggacgccaacatcaacgtcgacatgatcgtgcagaatgtttccgaggacggcaagaccaccgacctcaccttcaccgtgccggccgccgactatacccgcgcaaaggatacgattaccgccgccaagggcaagatcggctatgcgcggctcgatacggccaccgacgtcgccaagatctcggtgatcggcagcggcatgcgcagccatgccggcgtcgcggcccaggcgttctcggccctcgcccgacggaacatcaacatccgggccatcacaacctccgagatcaaattctcggtcttgatcgataccgcctacaccgagcttgcggtacgcaccctgcacacgctctacggcctcgatcaagcctaa

SEQ ID NO: 2363 - DNA, 468 bp, BradyrhizobiumColbertium
atggcgcgttacatcgacgagatcctgcaaccgggcgagcgggtcctgtattcgaccaatgcgcactggatcttctactttccggccatcatggcctggatcgtggcgctggccctcttcatcctgtcgcggcaggtgaccgtcgactggctctttctgctttgcctgggaggcgccggcctcgtggctctggccgcactgtactggaccatcaagggctggttccatcgcttcaccaccgagaccgacgtcaccaacctcagggtggtgcacaagaccgggttcatccagcgccgcaccttcgagatggcgctggacaaggtcgagagcgtcgatgtcaaccagacgattcttggacgtattctcaactacggcgatgtgaccatcaacggggtcggtgaaggtcgcgaaaccatccggacgatcgcctcgccgctcgccttccgtagttcgatcaccacgcggtag

SEQ ID NO: 2364 - DNA, 768 bp, BradyrhizobiumColbertium
atgagcatgcagcaaaatccttccctttctgcccagccgggctcgaccgtcgatgccgccgagatcgcaaaattctcgaaactctcggcggagtggtgggaccccaagggcaagatggcgccgctgcaccggatcaacccgctgcggctcggctacatccgcgacgccgcctgccgcaagttcgaacgcaacgtgcgaagcctcagttgtctcgggtccttgcgcgtgctcgacatcggctgcggcgccggcctgctctgcgagccgctgtcgcgcctgggtgcgcaggttgtcggcatcgatccttcggcaagcaacatcgccgcggcgaagctgcacgccgacaagagccatcttgcgatcgactatcgctgcacaacggtggaggaggtcgacccgcgcgagcgcttcgatatcgtgctggcaatggaggtggtcgagcacgtcaccgacgtcggcgtcttcctgaagcgctgcgcctcgatgctgaagccgaacggcctgatggtggtctcgacgctgaaccgaaactggaagagcttcgccctcgccatcgtcggcgccgaatacgtgctgcgctggctgccgcgcggcacccacgagtggaacaagttcgtcacccccgacgagctcgcaaaacacctgctcgacaaccgtctggtgatcaccgagcagaccggcgtggtctacagcccattcgctgataaatggtccctctcgtccgacatggacgtgaactacatggtggtcgcggaagcgatggtgtga

SEQ ID NO: 2365 - DNA, 900 bp, BradyrhizobiumColbertium
atgctcaccattgccagcctctggatccctttcacgatcattgccgcgctgggtcaggtcgcgcgcaatgcgatgcagcggtcgttgacgaagccgctggggacctggggcgcgaccaatatccgcttcctgttcggctttccgttctcgctgctgtttctcggcgtggtgttgatcggcaccggcgatcatctcggcttgccgccgaccctgttctggccatggctgctgctcggcgcgctcagccagatcgtcgccaccggcctgatgctgctcgcgatgaacgaccgctccttcgtggtgacgacggcgtatctgaagaccgaggcgatccagaccgcgatcttcggcttcgtcttcctcggcgatcacctgacgtggctgaaggtgctggcgatcgtgatcgcgacgatcggcgtggtcatcaccgcgctgcggcccggcggcgagaagagctttgccgaattgaagccgaccatcaccggcctcgtcgcggcggcagcgttcgcgctctccgctgtcggttttcgcggcgcgatcatcaacgttcccggcgtctccttcgtgactgcggcctcgttcacgctggtgcttggcctgttcgtgcagacgctggtgctgacgatctatctgctctggcgcgcgcctgacgtgttgcggggaatcctcaaattatggcgcccgtcgatgctcgcgggcttcacgggcgctttcgcgtcgcaattctggttcctggcgttcgcgctgacggcggccgccaacgtccgcacgctcgcgctgatcgaggtgctgttcgcgcaaggagtagcctactactcgttcaagcagtcgatcgcgccgcgcgagcttgcaggcatcgcgctgatcgtgatcggtgttgcggtgctggtcggcgtctag

SEQ ID NO: 2366 - DNA, 486 bp, BradyrhizobiumColbertium
atgatccgctacgcgcttcgctgcgaccggaaccacgagttcgagagctggttccagagttcgtcggcctatgattcccaggtgaagcggaagctcgtgacctgtccgatctgcggctcggccaaggtcgacaaggcgatcatggcgccgcgcatcgtcggcaagaagggccgtggccgcgcgacgccgccaccggaaccagtcgcgacggccgcgacacccgacgctgcggcctcaggatcgacctcgctgctgatggcgcaggagcgcgagttgcgcgccaagctcaaggagctgcgcgatcacatcgtcaagaacgccgacaatgtcggcgagcgttttgccaacgaagcccgcgcaatgcattacggcgacaaggagcatcgcccgatctatggcgaggcctcgcccgaagaggcgaagtcgctgatcgaggaaggcatcgaggtctcgccgctgccgacgctgccggaagaccggaactag

SEQ ID NO: 2367 - DNA, 879 bp, BradyrhizobiumColbertium
atgagcgaggtcaggaccttcaccgccgccatggtgcagatgcgcaccggcctgatgcccgggccgagcctcgagcaggccaccaagctgatccgccaggctgcggccaatggcgccgactacgtgcagacgcccgaagtcagcaacatgatgcagctgaaccgcaaggcattgttcgagcacctccaaagcgaagaggacgacacctcgctgaaagcctatcgcgcgctcgcggcggagctgaagatccatctccatgtcggctcgctggcgctgcgcttctcggctgaaaaggcggtcaaccgctccttcctgatcgggcccgagggcaatgtgctcgcgagctacgacaagatccacatgttcgacatcgagctgccggacggcgagagctatcgggaatccgcgaactaccagccgggcgagaccgccgtgatctccgacctgccctggggccgcatcgggctgacgatctgctacgatgtgcgcttccccgcgctctatcgcgcactcgccgaaagcggagcatatttcatcacggtgccgtcggccttcacccgcaagaccggcgaagcacattggcacgtgctgctgcgcgcccgtgcgatcgagaccggctgcttcgtcttcgccgcggcccaggccggcctgcacgagaacaagcgcgagacctacggccattcgctgatcatcgatccctggggcgaaatcctcgccgagggcgatgtcgagcccggcgtcatcatggccaggatcgatccggccaaggtcgagaccgcccggcgggcaatcccttcgctccagcatggccgccgcttcggtgtctccgatccgaaggcgggcccggatcacctgcaccttgtgcggggatcggcatga

SEQ ID NO: 2368 - DNA, 276 bp, BradyrhizobiumColbertium
atgaccgctgctgtcgagatctacacgaggccgggctgcggctattgttccgccgccaagtcgctgctgacccgcaagaaggcgaccttcaccgaattcgacgtcgccaagaactcggcctggcgtcaggaaatgtacgaccgcgccggtcagggctcgaccttcccgcagatctggatcggcggcacccatgtcggcggctgtgacgatctctatgcgctcgaccgcgaaggcaagctcgacggcatgctccaaagcgtcaaggcggtctcatga

SEQ ID NO: 2369 - DNA, 738 bp, BradyrhizobiumColbertium
gtgctgtcgcgcgcggcgcggctcgcgctcgacatcgcgctgccgacacaatgcgtgtcctgccaggagccggtcgatggcgaaggcgtttgcgcttcgtgctgggggcggctgtcgttcatcgaacggccctattgcccgcggctcggcattccctttgtgtatgaccccggtcccgacatgctgtcgatggaagcgatcgccagcccgccggcctaccagcgcgcccgcgcggcggtgcgctatgacgacgtcgcccgcaccttggtgcatgcgctgaaataccaggaccgcaccgatctggcgccggccatgggccgctggatggcgcgcgccggcagcgagctgctcacaggcgccgacatgctggtgcccgtccccctgcattggcggcgagcctggcggcgccgctacaaccagtccggagctctggcgcgtgtcatcgccctgcagagcggagtgagggtgcgaggcgacgtgctgcgccgggtgcgcgccaccgagcagcagatcggcctgtcgcgggcccagcgcgccaccaatgtgcagggcgcattccaggtatctccagagcgtcaggccgaggtccagggccgccgcattgtcctcgtggacgatgtcctcacgtcaggggcgacgctggatgcctgcgcgcgggtcttgctccgcgccagggccgcccaggtcgacgtgctggtctttgcccgggttgtcgagagcagccccggtcccatataa

SEQ ID NO: 2370 - DNA, 873 bp, BradyrhizobiumColbertium
gtggagatcggcgtaaccagcggcatggctcagaccccgcaaaccccgcccgccttgttcgatcgcgccttgctgaacgcgcggcagcggcgcgcgcaggcgctgggcgaggtgacattcctgctcgatcgcgtggccgaggacatgtcggaccggctggcggcggtgatgcgcgagtttcaggcgccggctgacctctggacgcccggcagcgggctgccggcgctgcgtacaccgcttccgtccatcacacggattgcgcccgatgcgactggcgcggaggagcttccgttcgcgccggaaagcctcgatctcgtcgtttcggctttggcgctgcaattcgtcaatgacctcccgggtgtgcttgcgcaggttcgccgggcgttgaagccggacgggctgctgctcgccgcgatgatcggcggcgacagcctcactgagctgcgccaggcgtttgccgcggcggaggctgaatgcgagggcggggtgtcgccgcgcgtggcgccgttcgccgacctccgcgacgtcggcgcgctgttgcagcgggcgggcttcgcgctgccggtcaccgacgtcgaccgtgtcgtggtgcgctatggcaatgcgttcgccttgatgcaggatctccgccgcatgggcgcggccaatgtgctgatcgagcggagtcgcacgccgacgcggcgcgcaacgctgctgcgcatggccgaaatctacgccgagcgcttcgccgatgccgacggccgcatccgcgcgacattcgacatcgtgtggctctccggctgggcgccgcatgccagccagcagcagccgctgaagccggggtcggcgaaggcgagtcttgcggaggcggtgaagaaggcggggaaggagtga

SEQ ID NO: 2371 - DNA, 411 bp, BradyrhizobiumColbertium
atggccgatctcaaactgacattggtggtggcctgcgcgctcgtcgatgccgacaagcgcgtcctgatcgcgcagcgcccagagggcaaggcgctggccggcctctgggaatttcccggcggcaagctcgaggcgggcgagcggcccgagcagagcctgatccgcgagctccacgaggagctcggcatcaccgtcgccgagccctgcctggcgccactgacgtttgcgagctacggctatgagacctttcacctgttgatgccgctctacatctgccggcgctgggaagggcaagttacggcgcgcgaaggccagaccctggcctgggtccgcgccaacaagctgcgcgactatccgatgccgcccgcggacataccgctgatcccgcacctgatcgatctgttgatgtga

SEQ ID NO: 2372 - DNA, 1197 bp, BradyrhizobiumColbertium
atgcccgtgatcgcgggcgtccgtcttgcgacggccgaggccggcatccgctacaagaaccgcaccgacgtgctgctggcggtgatggacaagggcacggcggtcgccggcgtcttcaccaagtcgaagtgtccctcggcgccggtcgaatggtgccgcgccaagctgaaaggcggcaaggcgcgcgcgctggtggtcaactccggcaacgccaatgccttcaccggcaagaccggccgcgcctcgaccgcgctgaccgcgaagatcgcggccaaggcggtcgggtgcagcgagagcgagatcttcctggcctcgaccggcgtgatcggcgagccgctggatgcgaccaagttcgacggcgtgctcggccgtctcgccgggaccgccgagcccggcgactatctcgccgcggccaaggcgatcatgaccaccgacactttcccgaaggtcgcgaccgcgaccgtcaagctcggcaaggccaaggtcaccatcaacggcatggccaagggggccggcatgatcgcgcccgacatggcgaccatgctgtccttcatcttcaccgacgcgccgatcgcgcccgcggccctgcaggcgctgctcaaggccggcgtcgaggacaccttcaatgcggtgacgatcgacggcgacacctcgacctcggacacgttgctggcgttcgcgaccggctcggccgccgaacacggtgcgccgcggatcagccgcgccagcgaccccaggctgaaggccttcgtcaaggctttcaaccagattctggccaatctcgccgagcaggtggctcgcgacggcgaaggcgcgcgcaagctggtcgagatcacggtcgaaggcgccaagaccaaggcctccgcacgcaagatcgcgatgtctatcgccaactcgccgctggtgaagaccgcgatcgcgggcgaagatgccaattggggccgcgtggtgatggcggtcggcaaggccggcgagccggccgatcgcgacaagctctcgatctccttcaacggcatccgcgtcgccaagaacggcgcacgcgatccgtcttacgacgaagcgcaggtgtcggaagcgatgaaggcgccggagatcgcgatcagggtctcgctcgggctcggcaagggccgcgaccgcgtcatgacgtgcgacctcaccaaggaatatgtcgcgatcaacggggactaccggtcctag

SEQ ID NO: 2373 - DNA, 939 bp, BradyrhizobiumColbertium
atgaccacctcgttcccggtaaccaccggccagcgctttcgccatgcgtccgccctggctgggagcctcgctctggcgctgtccctggcgttcgcgggcccgctccgggccgccgatgatccggtgctggcgaaggtcaatggcgcggaaatcaagaagagcgacgtcaccatggccgaggaggaactcgggccgagcctcgcccagatggacccggcgaccaaggacgagaacgtcctgtccttcctgatcgacatgaagatcgtcagcaaggctgccgaagacaagaagatcgccgacagcgaggagttcaagaagcgcctggcattcgcccgcaatcgcctcctgatggacagcctgctcgccagcgagggcaaggccgcgaccacgccggacgccatgaagaaggtttacgaggaggcctccaagcagatcagcggcgagcaggaggtgcgcgcccgccacatcctggtcgagaccgaggacgaggccaaggcggtgaaggccgagctcgagaagggcgccgatttcgccgagctcgccaagaagaagtccaaggacccgggctccgccgacggcggcgacctcggcttcttcaccaaggagcagatggtgccggagttctcggccgtggcgttctcgctcgagcccggcaagatctccgatccggtgaagtcgcagttcggctggcacgtcatcaaggtcgaggaaaagcgcaaccgcaaggcgcccgatttcgagcaggtcaaggcccaaatcgagcagtacgtgacccgcaaggcccaggccgaatatgtcgccaagctgcgcaccgaagccaaggtcgagcggctgaaccagccggcggcggatgcgtccaaggacgccaagtccgatgcgaagccggcggacactgccaagccgtccgacagcaagatggcgcccccggcgaagaagtaa

SEQ ID NO: 2374 - DNA, 2841 bp, BradyrhizobiumColbertium
atgatcggcgcgctcgcccgcaagtttttcggctccgccaacgaccggcgggtgaagggatatcagtcccgcgtcaacgcgatcaacgcgctggagcccgagctgtcaaagctctctgacgaggcgctcaaggcccgcaccgcggaattcaagcagcagctcgcgaacggcaagacgctcgacgacctgttggtgcctgccttcgccaccgtgcgcgaggcggccaagcgcacgctcggccagcgccatttcgacgtccagctgatcggcggcatggtgctgcacgagggcgacatcgccgagatgaagaccggcgaaggcaagacgctggtggcaacgctcgcggtctatctcaacgcgctcgccggcaagggcgtccacgtcgtcaccgtcaacgactatctcgcccgccgcgactccggctggatggggcagatctacggcttcctgggcatgaccacgggcgtgatcgtccatggcctcgatgacgccgagcgcaaggcggcctatgcctgcgacatcacctacggcaccaacaacgaatacggcttcgattatctccgcgacaacatgaagtaccggctcgaggacatggtccagcggccgcattacttcgccatcgtcgacgaggtcgactccatcctgatcgacgaagcgcgcacgccgctgatcatctccggtccgctcgacgaccgatccgatttctacaacaccatcgacagcttcctgcccaagctcgacaagaccgactacgacgtcgacgagaagcagcgcaccgtgacgctcaccgaaggcggcatggagaagatcgagacgctgctgcgcgatgccggccagctcaagggcgagtcgctctacgacgtcgagaacgtctccgtcgtgcaccacatcaaccaggcgcttcgcgcccacacgctgttcacgcgcgacaaggactacatcgtccgcgacgacgaggtcgtcatcatcgacgagttcaccggacgcatgatgccgggccgccgctattcggaaggcctgcaccaggcgctggaggccaaggagcacgtccaggttcagcccgagaaccagacgctggcctcgatcaccttccagaactacttccgcatgtacgagaagctcgccggcatgaccggcacggccgcgaccgaagcggacgaattgttcgacatctacaagctggaggtggtggagatcccgaccaacctgccggtcgcgcgcctcgacgaggacgatgaggtctaccgcacccagcaggaaaaataccgcgcgatcctcgccgagatcgagcgcgcgaatgcacggcttcagccggtgctggtcggcacggcgtccatcgagaaatcggaggtgctcgccgagtttctcaagaagaacggttacaagcagatcgatttcggcaaggagaacgcgctcgacaagctctatgccgcggcccgcgccggcaagccggccaagctgttcgcggtgctgaacgcacgcttccacgagcaggaagcctatatcgtcgctgaagccggcgtgcccggcgcgatcacgattgcgaccaacatggccggccgcggcaccgacatcaagctcggcggctcgctcgagatgcgcatccagcaggagaccgcaggaatcgaggacgaggccgagaaggccaggaagatcgagcagatcaaggccgacatcgcgcatttccgcgagatcgtgctgaaggccgaggagaccgtcgagctcgagccggcgaagggctccaagccggccaagaccgtgaagaagcccggcggcctctacatcatcggctccgagcgccacgaatcccgccgcatcgacaaccagctgcgcggccgttccggccgtcagggcgatcccggccgctccaagttcttcctgtcgctggaagacgatctgatgcgcatcttcgggtcggaccgcctcgacagcatgctccagcgtctcggcctgcaggagggcgaggccatcatccatccctggatcaacaaggcactggagaaggcgcagcagaaggtcgaggcgcgcaacttcgacatccgcaagaacctgctcaagttcgacaacgtccagaacgaccagcgcaaggtgatcttcgatcagcgcatcgagctgatgaaggacgagagcgttgccgagaccgtcacggacatgcgccatgccttcatcgacgatctcgtcgccaagcacgtccccgagcatgcctatgccgaacagtgggatgttgccgggctcaaggacgaattgaagcgcgtgctcgatctcgacctgccggtcgacgaatgggccaaggaagagggcatcgccgacgaggagctgctctcccgcatcgagaccaaggccgacgagcacatggccgccaaggtcgcgcaatgggggcccgacgtgatgcgctacgtcgagaagaccattttgctccagaccctcgaccatctctggcgcgagcacctgatcatgctcgaccatctgcgccaggtcatcggcctgcgcggttacggccagcgcgatccgttgcaggagtacaagacggaagccttcaatctcttccaggagatgagcgctcacttgcgcgaggccgtcacggcgcagctgatgcgggtcgagatcgtcccgccggagcaggaagctccggcgctgccgccgatggaagcgcacaagttcgatccgaacaccggcgaggacgagatggcgctcgccagcgtttcgctcggcgcccaggccagcgacgccgcgctgcgcgatcccaagaaccccgccagctggggcaaggtcggccgcaacgaggattgcccgtgcggctccggcaagaagtacaagcactgccacgggcggtatgcctga

SEQ ID NO: 2375 - DNA, 189 bp, BradyrhizobiumColbertium
gtgcggctccggcaagaagtacaagcactgccacgggcggtatgcctgatcggtgatctcaagacctggcgaactcgcgttgctgtttggcccgcgagttcgccatgcgttgaatgcttccgatgcatttccgatgctgctgcgtccgcagactgccggcgaccgtcgtcggtccggctgcgcggctga

SEQ ID NO: 2376 - DNA, 156 bp, BradyrhizobiumColbertium
gtgaagttgacaaatccacgcagcggaacgcagggcggcgtctacttccaccacgctgatggcaataaatggtacctggccaaaccggtgagcaacaaggccgtgggctggacgacctggaacggccaacgctatgccctctcgtgctggcggtga

SEQ ID NO: 2377 - DNA, 444 bp, BradyrhizobiumColbertium
gtggcaaaaccgtcgaaagaaaacaccccgatcaccgaacatctcgcctacctgctcgcgcaagccaaccgggagatcaaccggcagctcgaattgcggttgagcaaggagggcgtgccggtcgagcaatggcgcatcctgaaggtgctgtcggatggcaacggccattcgatgggcgaactcgcggatgccgtgctgctcaaccatccgaccctgacgaagatgatcgaccgcatggtctccgacacgctggtctatcgcgtgcaggatcccaacgatcgccgcaaggtgctgatgttcatctccgatcgcggcaaggtgctctgcaggaagctcaactcgctcgcggtggaccaggaggagcacatcctggagagctacggcgacaagtcgacgagcgagctcaagcggctgctggagagcctgatcgacagttcgaattag

SEQ ID NO: 2378 - DNA, 1185 bp, BradyrhizobiumColbertium
gtgcgcgcgacggtaaatttcccggctcacggcggtccggcgttgccgccgtcattgctgttcaggaatttgtcgtcaccggcggcggatgtcgacctgtcgccattcgacgcgcaggtcatgaagcgccgcggcgcgcgcaacaagctgcgcatcggcaatttcctcactttcaccggctcgcccggaatctgggggccgacctccaccaacagcgcaatgttggcggtcgccgagatcaacaagcgcggcggcattctgggccgcgagctcgagctcacgatctacgattccggcggcccgatcgaagacgtggtgcggcgggccgagcacgcgatcgccctcgatgaagtcgacctgatcatgggctcgcacatcagcgcggtccgcgtcgcgctgcgcaaggtcaccggcaaccgcatcccctacatctatacgcccgtctacgaaggcggcgagcgcacgcccggcgtcatggcgatcggcgaaacgccgcggtggcagagccggccgtcgatccactggctcgccgaggtcaagaaggcggcgcgctggtatctgatcggcagcgactacgtctggccatggcaatcgcatcgcgcggtcaagcgctacatcaaggaggcgggcggccaggtcgtcggcgaggagttcgtgcccgtcggcgaggacaatcatgagccgcatctggcccgcatccgtgcggcaagacccgacgtggtgctgatctcgctgatcggcaccgacagcatcaccttcaaccgcgccttcgcggaagcgggcctggcgacgtcgacgctgcggcttgcgggcgcgatggacgagacggtgctgctcggcatcggcgccgacaacaccgagaatctgttctgtgcgtccggctacttcaactgcatggcctcgcgcgccaacgacgagtttctcggcggctaccaggccatgttcggcgccaacgcgccgccggtcggctccgtcggtcagtcgaactatgaggggctgcgtttcctcgaatccgttgccaatcgcgccggctcgctggcgtttcggccgctgctgaaggccgcgcgcaacaccgtctactcggccggccgtggtcctgtaactcttcgcgatggccgtgccgagatgccgatgtatctcgctgaagccgacggtctcgacttcaagatcatcaaggcgctctga

SEQ ID NO: 2379 - DNA, 210 bp, BradyrhizobiumColbertium
ttgggctggcgtgggaagggcaactgtcacggcgctctccttgaaggcttcttgatccctggcgttggtcggaagccacatctgctcgcgcctgcatggcacggcccgatcggcttcgcgtcgttactagagacggaaatattttccttttcaagtattatttcgaagaccgctgcgacggatcagcagccgcctctcagagcgccttga

SEQ ID NO: 2380 - DNA, 1515 bp, BradyrhizobiumColbertium
gtgacagttgcccttcccacgccagcccaacttcgcagtgtcgccgagcaatgcggcctttcgctcaccgatgatgacgtcgcctcgttccgcggcctgatgcaaggctcgatcgaagcctacaacctcgttgccacgatgccggacgagctgccggaggtgaaatatccgcgcacgccgggctatcggccttcggctgaagagaatccgcgcaatgcctggtatcgcaagtcgaccgtgaagggtgcggccagcggcaagctcaagggcaagaccgtcgcgctcaaggacaacatcatgctggccggcgtgcccatgaccaatggctcgtcgacgctggaaggctatgtgcccgacttcgacgccaccatcgtcacgcgcatgctggatgccggcgccgagatcaagggcaaggtgcattgcgagcacttctgcctctccggcggcagtcacaccggctcctacggacccgtgcacaatccgcacaagatgggctattcggccggcggctcgtcgtcgggctcgggtgtcgtcgtcgcgctcggcgaggtcgacatggcaatcggcggcgatcagggcggctcgatccgcatgccgtcctcgttctgcggcatctacggcatgaagccgacctggggcctcgtgccctataccgggatcatgccgatcgagatctacgtcgaccataccggcccgatgaccgcaacggtcgaagacaacgcgctgctgcttgaagtgctcgccggcgacgacggctacgatccgcgcatcaaggcgccgaaggtcgaggagtacaccaaggcgctcggccagggcgtcaagggaatgaagatcggtatcctcaaggagggcttcgagcagccgacggcagaggccgcggtgaacgaaagcgtccgcgaggccgcaaagcgcttcaaggatctgggcgccagcgtggagaccatctcggtcccgatgcatcttctgggcggcgcgatctggaccccgatcggcaccgagggcctgacccagaccatgatgttcggcgacggctacggtctcagccgcggcgatctgtattcgacctcgctgatggattttcatcgtggctggcgccggcaggcggactcgctgtccgagacgaccaagttgttcatgctgctcggcacctacatcaacaacaatttcggtccccgcttctacggcaaggccctcaacatctcgcgccggctgacggcggcctacgacaaggcgttcaaggactacgatctgctcctgctgccgacgacgccgatgaaggccactaagctgccggagccgaatgccagccgcgaggaatacgttgcgcgcgcgctggagatgatctccaacaccgcgccgttcgacatcacgcatcatccggcaatgtcgctgccatgcggaatggtcgacggtctgccggtcggcctgatgctggtcggacgcatgttcgaggagtccaccatctaccgcgccgcccacgccttcgagaagatcggcgattggaagaagatgtga

SEQ ID NO: 2381 - DNA, 858 bp, BradyrhizobiumColbertium
atggctaacgcgttcgttgcggcgttcgagatcctgagcttcggcgcgatcattgtcctgatcgtgctggggctcgggatcatcgccagcatgatgggcatcttcaacttcgcgcagggcgagttcgtcctgctcggcgcctacatcacctatctcgcctatgccaagggcctgcccatctgggccggcatggtcgcagcgcccttcgtggtcggcgcgctcggcttcgtgctggaggcgctgatcatccgacgattctatgccgcgccgattgtcgccatgctcggcacctatgcgctcggcctgatcatccgcgaatccgtgcgcggcctgatcggcggcttttatctcaccgtgccggagccgatcggcggctcgatcgatatcggcgccatgcacatctcggcctggcgcttcaccatcatcgtcatcacgctcctggtgatgggcgcctgctatctgctgctgtcgcgcacgagctttggcctgcgcgtgcgggcgacgctggagaatccgtcgctggcacgtgcctccggcatctcaacgccattgatctacggcgcgaccttcgccttcggtgcggcgcttgccgggcttgccggcgcgctgatcgtgccggtgttcagcctgttcgccgatctcggcctgcgcttcctgatccagggcttcgtcgcggtcatggtcggtggtgtcggctcgttcatcggaccggttgccggtgccggcgtcatcggtacgctcagcgccgcgctgccctgggtgatggcgcccgtcgtcgccgacgtcctcgtcttcgtcctcgccatcgtcttcatcaaattccgcccgcagggcctcatcgctggaaaaggggtttaa

SEQ ID NO: 2382 - DNA, 1092 bp, BradyrhizobiumColbertium
atgctgaagttcatgggtgcagccaagcaagcgatccacgccgccgtcgtggatgaggcggatgtttcggtggcagaaggcgtgccagccgagcgaccgaccgcacgaaaagtcctgcctatcgtcgagggcgtcgtgctcgtcgcggcgctgctcgcgccgctggtgctgcaggactatctcacggtgttcgcgacgcgcgtcatcatcctggcactgttcgcattgtcgttcgacctggtctggggctatgccggcatcatgagcttcggacaggccctgttcttcggctcggccggctacggcgtggcgctgctcgcgcgtgacctcaacgtcaccaacatccttctggtgctgccggcgggcacgctgatcggcctgaccttcgcgctgctgctcggcggcttcctgctgctgggccggcatccctccagcgtcatcttcgtctcgctcggcacattgaccggctcctacgccgccgatcgcctcgcgcgcggctggtactatctcggcggccagaacggcatcccctcgatcgcaccgatgtcgctcggcagctatgatttcaccgagggccccgccttctactatctggtgctcggcatcctcgtcgtggtctatctgctgtgccgtttcctggtgcgctcgcaattcggtcttgcgctcgccggcctgcgcgagaacgagcagcgcatcgccttcttcggctacaaggcgcagcatctgaaagcgatcatcttcaccatcggcggggccgtcgccggtctcgccggcagcctctatgcctttcacgaaggctttgtctggcccaacatggtcggcgtcgtggtctcgacccaggtcgtgctctacgttctgtttggcggctccggcacgctgattggtgcggtgatcggtgccatcatcgtcgagggcgtcagcttctggctctcggacaattaccgcgacatctggccgatcatcctcggtctgctgctgctgctcgtgatcctgttccgcccgctcggcctgatcagcttcgtgctcggcgagcgcgagcgcgtcggcagctttggcgccaagccgaaggagaagcgcaatgccgctccttga

SEQ ID NO: 2383 - DNA, 735 bp, BradyrhizobiumColbertium
atgccgctccttgaagccgccggcgtcaagaaagtcttcggcaagctgaccgcgctcgatggcgcctcgctcaccgtcggcgagaacgaattccacggcctgatcggcccgaacggctccggcaagagcacgctgatgaagtgcatcgccggcgccgaggtgccgacgcagggcaaggtgtcgttcgtcaacaccgacattaccgagttcacgccgaccgagcgcgcccgcgccggcatgagcctgaaattccagatcacctccgtgctgccgtcgctgacgctctacgacaacatcctgctcgcgctgcaggcgcagtgctcgctgctcgatctcgtgttctcgcgcacgcgcgggctcctgcacgaccaggtcatgaccatgctgacccagttccggctcgccgaccgcgccttcgaggcggcggcggcgttgtcgcacggccagcagcaatggctggagatcgcgatggcgctggcaggcaagccgaagctgctgctgctcgacgagccgaccggcggcatgagcctggaggagcgccgcgtcaccggcgaattgctgcagccgatcaagcagcattgctcgctcgtcatcgtcgagcacgacctcgatttcatccgcgacatctgtgatcggctgaccgtgcttgaccagggcaaggtgctggcatccggcacggtgtccgagatccaggccaacaagtccgtccaggagatctatctgcgccgtgcctga

SEQ ID NO: 2384 - DNA, 696 bp, BradyrhizobiumColbertium
gtgcctgaatttttggacatcaagcatctcgacgccggctacggccgcagccaggtcctgttcgacgtcaacctcggcattccctggcgcggcggcgtcgccgtgctcgggcgcaacggcgccggcaagaccacgctgatgaagaccatcgtcggcgaattgccggcgtggaagggcgaggtcgccttcgacggccgcgacatcagccgccgcgccacccaggagcgcgtgcgcgccggcatcggctacgtgccgcaggagcattcggtgttcgcgcgcctgtcggtgcgcgacaatctcgccgtcggctcgctcgcgcgcaaggatgcctctgccgtcgaccgcgtgctgacgattttccccaagctcggccagcgcctcgaccagcctgccggcacgctctcgggcggcgagcgcaagatgctcgccatcggccgcgccatgctgggcgatccgaagctgctgctgctggacgagcccaccgaaggcgtctggatcggcgtcatcgaggagatcaccgaacgcctgatcgatctcgccaaggagatcgccgtcatcatcgtcgagcagcacctcgacctggcgctgcgcgtcgccgactacgcctacgtgctcgaccgcggccgggtcgcgctgcaaggcgaggcgggcgaggtgagaagcaatccggagctgatgcgctatctggcgccgtag

SEQ ID NO: 2385 - DNA, 1581 bp, BradyrhizobiumColbertium
gtggggtcgatcttgatttctcgttcgcttgctcgcgcgctcttggcttcggttgcgctgatgacggccggcgtcctgctctcgggctgcaacaccgaccaggtctcgctcgcgaccaacgccaaggccaaccagccggtgccgccgaagctgatcgccgcgatggccgagaaggacatggacctgcaatcgccgatcctggtccggctgttcaagcaggaggccgagctcgagatctggaagcagacacggagcggccagttcgccctgctcaagacctatccgatctgccgctggtcgggcgacctcggaccgaaggtgcgcgaaggcgaccggcaggcgccggagggattctactcgatcaatccgagccagatgaatccgcaatcggcctattacctgtcgttcaacacgggttacccgaacgcgttcgacaaggcgctggggcgcaccggctcgcagctgatggtgcatggcgattgctcctcgcgcggctgctacgcgatgaccgacgagcagatcgcggagatctattcgctggggcgcgaatccttcttcggcggccagaaggcattccagctgcaggcctatccgttcaagatgacgccggtgaacatggccaggcaccggaacaacccgaacatgccgttctggaagatgatcaaggaaggctatgatcatttcgaggtgacgcggcaggagccgaaggtcgatttctgcgagaagaaatacgtcttcgatgcggcaaagcctgcggacgccaagcgtgaccccgtgttcgacgcctcggcgaaatgcccggcctatgtgatccccgaggagatcgccagcgctgtccgccagaagcaggcgaaggacgaggccgaatacgcaaggcttgtcgccaagggcacgcccgtggcgcgcctgaacaccggcatcgacggcggcatgaacaaggtgttcgccgcgaagattccggaaggctcgaccggcctgtccgagagcgccgaaggcaccacgctgcagatgctggcgatggcgaaggcgcccggcacgatccccagccacgtcaacccgcccaagccgaatctcgacgccgtggcatccgcgcctgcatcgcaggaagagccggtcgtcgcggtgaacgcgcccgccagcacccgcgttgccaatgctgcgctggcgaataaatcccaggagaaatcacaaggcggcggcttcttctccaatctcggacgcaagatgggcatcggctcgtcggagacgacggcgaccacgccgccggcgcaaaccaccgcctcggtcgctccggccaccacgacgccgaatccgccaaccgcggcgtcgcggctcaaagccgccgtgacacggttcgtgcccgggcacgacaagtccaaggatgccgcgaaggaggcgccgaagccgatcgttgcggccaagcccgccgagccggcgaagcccgacacgcgtctcgcccagacgcgccccgcgctgaagccgtcggtgagcgatggcgcgagtgaagcgacgcagatcatgggcgccgctccggtggtgcagtcgaactcgttcgagagccgctttggggcggtgaggtag

SEQ ID NO: 2386 - DNA, 963 bp, BradyrhizobiumColbertium
atgcaagaccagatgcgcagctatctcgactttgaaaagcccgttgccgagctcgattccaagctcgacgagctgcgggccatggcagcctccggcaccgacattgccgaggaagtctcgcgcatcgaggacaaggcggcgcaggcgctggccgacctctatcagaacctgacgccctggcagaagacgctggtggcgcggcatccgcagcgcccgcatttcaacgacttcatcaagggcctgatcaccgaattcaccccgctcgccggcgaccgcaagttcggcgaggacgaggcgctggtcgccggcttcggccgtttccgtggcgagccgatctgcgtgatgggccaggaaaagggcgattccaccgagagccgcatccggcacaatttcggcatggcccggccggaaggctatcgcaaatgcgtgcggctgatggagatggccgagcggttcggcctgcccgtgttgtcgctcgccgattcggcaggcgcctatcccggcatcggcgccgaggagcgcggccaggccgaggcgatcgcgcgctcgaccgatgcgtgcctggcactgaccgtgccgaacgttgccatcatcaccggcgagggcatgtcgggcggcgccatcgccatcaccaccgccaacaaggtgctgatgctggagcacgccatctacagcgtgatctcccccgaggccgcctcctccatcctctggcgcgacggcaccaaggcgcaggaagccgccaacaacatgaagatcaccgcccaggacatgctccgcttcggggtgatcgacgccatcctgaaggagccggtcggcggcgcccaccgcgaccccgccgccatgatcgccaccacgggcgatgcgatcgccaaggccttcgacgagctgcgcgggcttgatggcgaggccatccgcaagcagcggcggcagaaattcctggagatcggccggaaactgggctga

SEQ ID NO: 2387 - DNA, 957 bp, BradyrhizobiumColbertium
atgcgcaccaagccctcagacaccaagctcatcggcctgttcctcgacatgctcgccgcggaacaaggtgccgggcccaacacgctcgatgcctatcgccgcgacctcgccgatttctcggagttcctgggccgagccggccacaattttgcggatgcggagacgcaaacgctgcgcgactatcttgcccacctcgacgcccgcggcttcaaatccaccagcgtcgcacgtcggctgtcggcgatgcggcatctctatcgcttcctgctgaacgagcgcatccggaccgacgatcccgccgcgatcctgtccggccccaagcgcggccgcggactgccaaaggtgctgtcgatcgcagacgtcgatcgcatgcttcgccgcgccaaggaattgagcgaggcgcaagacgcctctccatcgaaacggatgcgaagcttgcggctctattgcctgctcgaggtgctctatgccacgggcctgcgcgtctccgagctggtggcgctgccgcgctcggcggccaagcgtgatgcacgcatgatcgtggtgcgcggcaagggcaacaaggagcggctggtgccgctgaacgaggcctcgcgccaggcgatggccgattatctcgccgcgacggaagccgccaagggcgacaagaagaacagcttggccgcctcgaaatggctattcccgtccttcggcgaaagcgggcatctgacgcggcagcattttgcccgcgacctcaaggagctcgcggtcgcatcgggcctgcaggcccggctggtgtctccgcacgtgctgcgccacgcctttgcgagccatctgctgcacaatggcgcggacctgcgcatcgtgcagaccctgctcggccacaccgacatctccacgacccagatctacacccatgtggtcgaggaacggctgaagagcctcgtgcgcgacctgcacccgctggcggagaagtga

SEQ ID NO: 2388 - DNA, 147 bp, BradyrhizobiumColbertium
atgcccagcctgttccgcttcctgacggtcgtcgccgtgatcgcaggcatcgtctacgccgcggttttcgcgttggcgaatttcgtcagtcccaagtcgcgggagatgatcgtgacgatcccgccggataagtttctcaagaaatag

SEQ ID NO: 2389 - DNA, 624 bp, BradyrhizobiumColbertium
atgtccgacgccgcgttgccgcttcctgcttcgcccgaggccgacatcctgtcggcgctcggtgcgcgctcgatcgtgctcgtcggcatgatgggggtgggcaaatccaccatcggccgccgcctggcgacccgcctcaagctgcccttcgtcgatgccgacaccgagatcgaggcggcagccggcatgaccataccggaaatcttcgagcaccacggcgagccgcatttccgcgacggcgaggcgagggtgatcgcgcgcctgctcgagagcggacccgtggtgctggcgaccggcggcggcgcgttcatgcgggaggagacgcgcacgcgcatcgcggcgaaagcgatctcgatctggctgagggcggaccacgacgtcatcatgcgccgcgtgcgccgccgtgccgaccgtccgctgctccagaccgccgaccccgaaggaaccgtggcccgcctcctcgccgagcgcgagccggtctatgccgatgccgacctcaccatcgcctcgcgcgacgtgccccacgacaagatcgtcgaggaatgcatcgaggcgctgcacgcccgcctctgcggcggacacgccgcccaaccacctgccgacgttgcgagtgcgttaagatga

SEQ ID NO: 2390 - DNA, 1143 bp, BradyrhizobiumColbertium
atgactgcgccattgaagcattccgatccggtcaaggtggacgtcgcgctcggcgatcgcgcctatgacatcgtcatcggccgcggcgtgctggcctcggtcggcgaacggctcgcgcgcctgcgccccggtgtccgcaccgcgatcgtgacggatcgcaccgttgcgaagcactggctcgagccgaccgaagcttcgctcgccgccagcggaattccgacctcacgcatcgtggtcgaggaaggcgaaatctccaagacctacgccggcctcgagaaggtcagcgaggccctgatcgccgcgaagatcgagcgcaatgatctcgtcatcgcgctcggcggcggagtggtcggcgatctcgccggctttgcggccgcgatcctgcgccgcggcgtcgatttcgtgcaggtgccgacctccctgctggcgcaagtcgattcatccgtcggcggcaagaccggcatcaactcgccgcagggcaagaacctgctcggggccttccaccagccggtgctggtcattgccgacaccgccgtgctcgacacgctgtcgccgcgccaattccgggctggctacgccgaggtcgccaagtatggcgtgctgggcgacgaggccttcttcacctggctggagaagaaccattccgacatcgtcaagggcggcgcggcccgcgagcacgccatcgcgacctcgtgccgtgccaaggcggggatcgtcgcgcgcgacgagcgcgagaccggcgaacgcgcgctgctcaatctgggccacactttcggtcatgccctggaggctgcgaccggcttctccgatcgcctgttccacggcgagggtgtcgcgatcggcatgacgctggcggcacagttctcggcgaagctcggcatgatcggcgaagccgacgcagcgcgggtcgagcgtcatctgatcgaggcgggggtgccgacgcgcttgcaggacatcgcgggcttcgcgcaggaaggactcgccgatgccgacgcgctgatgggtctgatggcgcaggacaagaaggtcaagcgcggcaagctcaccttcatcctgctcgaagcggtgggacgcgcggtgatcgcgaaggacgtcgagccggcgctggtgcgggatttcctgaaatcgaagctgtcgcaatga

SEQ ID NO: 2391 - DNA, 1353 bp, BradyrhizobiumColbertium
atgagttcgatctcgatcaatctgctgcttgcggtcctcttgctcgctgccaacgcgttttacgtggcggcggagttcgcactcgtgaagagccgcggcttccgcgtcaaggccatggtcgagcagaaccgcttcggcgcgcacctgctgcaggccatgatgggaaacatcgaatcctatctcgcctgctgccagctcggcatcaccatggcctccctcgggctcggctggatcggcgagccgaccgtgtctgcgctgctgagcccggtcctcagcccgctcggactgtcggaagccacgctgcacttcacctcgttcgtggcgggtttcctggttttctcttcgctgcacatcatcatcggcgagcaggtaccgaagacgcttgcgatcagggagccgatgccggtgtcgcagtggatcgcgtatccgcttcatgtgtcctatctcgtgttctatccgctgagctggtgcctcaacacggcctcgggcgcgatcctgcgtctgatcggagtccaggagttttcgcagcacgagatcctgacggattcggagatcgaaggcctggttgaggaatcggccgtgcacggcaagatcgagagcggtgaggccgagtatattcacaacgtcttccgcctcggcgagctgaccgtgtccgacgtgatggttcaccgcaccgccatggtgatgatcaatgccgacctgccgccggaagagctggtgcgggaggtgctggctaccgagtacacacgcattccgctgtggcgcgagaagtcggagaacatcatcggcattctgcacgccaaggatctgctgcgggccatccgcgcgtcggagggcgacacgtcgcgcatcgacgtcaccaccatcatgctgccgccctggttcgtgccggagatgcggccgatctcccaacagctcaaggcgttccgacgccgcaagacgcatttcgcgctggtcgtggacgagtacggcgaggtcgagggcctcgtgacgctcgaagacatcttggaggagatcgtcggcgatatctccgacgagcacgatgtcgtggtcgcaggcgtgcgccgccagcccgatggctctgtcgtggtcgacggctcggtcccgattcgcgatctcaaccgcgcgctcgactggcatctgcccgatgaagaggcaacgacggtcgccggcctcgtcattcacgaggcgcgatcgatccccgaccgcggccagagcttcaccttccacggcttccgcttccgtgtcctccgccgcgagcgcaaccgcatcaccgcgctccgtatttcaccggtgccgcgcgagaccgagctggaagaggccaagccgaggcgggccggcacgtcgttttga

SEQ ID NO: 2392 - DNA, 264 bp, BradyrhizobiumColbertium
atgaaagacactatcagcaacaagttgcaggaagctttcacgccggaaagcctgcaagtcgtcgacgagtcacatttgcatgaggggcacgccggccatcgggcgggcggcgagacgcactttcgcgtctatatcgtgtctgatgccttcaaagggaagagccgggtcgaccgccatcgcatgataaattcggcgctggccgcggaactctccggcggcgtgcatgcgctcgcgatccaggcacaagcgccgggggaaggctga

SEQ ID NO: 2393 - DNA, 633 bp, BradyrhizobiumColbertium
atgccgatcgattcatcaaagttcttcgactccatccgcgtcaagccgcgcggcaagcagccggaagtgaagccgcgcgacaccgccgtcaattgcgagtgggcgggctgcgcgaacaagggctcgcatcgggcgcccaaggggcgcgagaaccagcgcgagtattggcatttctgcctggatcatgtgcgcgagtacaaccagaactacaatttcttttccggaatgaatgccgacgccgtcgcgcgctaccagaaggatgcgctgacgggccaccgcccgacctggaagatgggcgccaatggcggcaagaagaatgcggaagccgaaatcgacatggcgtccgatccgttcagcatgttctcggagatcaatggccgcgccaactggcggaagggtcccgaagcccagcccaaggccgagacgcgcaaggtgatgaatgccgagcgcaaggcgctccaggtcatgggcctcggccccagcgccacgctcgccgacgtcaagacgaagtacaaggcgctggtcaagcagcaccaccccgacgccaatggcggcgaccgctccaccgaagatcgcctgatcgagatcatcaaggcgtacaattatctgaagacggtggttcgggaggcgtag

SEQ ID NO: 2394 - DNA, 237 bp, BradyrhizobiumColbertium
atgaagaaactctcctacgccctcgctgcaggaacgctgctcgctctgtcgtcactcgcaatgccagcccatgcgctgacggctcatccgatcccgggcgctgcggtctcggcggacgtcgtgaacgctcgctatcattacgctccgcgacgagtctgcaccgtacgcacggtcgtcaagcgcggctatcacgggcgtcgcatcgtcaagcgcgtccgcgtctgccgggtgaggtga

SEQ ID NO: 2395 - DNA, 1095 bp, BradyrhizobiumColbertium
atgaacatccacctcaccaaaagccagatcgggctggacggcgttcccgcggccgagaccgtgctgagtcacgtcgacggcgagcgcggcgagctgatcatcgccggcgagcatgtcggccggctggcaagccagtccagctttgaaggcgtcactgcccggctctggaacggcgccagcaagagcaatctcagcgaagccaatgtgcgggcaagcctgggcacggcgcgcgagcgcgccttcgcacggctcggcgacctcctgccggcgacgcgcggcatgggcatcgtcgacgggtttcgcgcaggcgtcgcggggcttcgtgcagagaacgggctggcgcacgaggcgaccatcgtcggcgcgttgccgatgatcgcgggcgcgctggttcgccgcgccaaggggctcgagccggtcgcgcccgatccgaatgcgagccatgccgccgatacgctgcggatgctgcgcggctcctcgccggagccgcgcgaggtcgcggcgctcgacgcgtatctcgtgacggtctgcgatcacggcatgaatgcgtccacctttacgacgcgtgtggtggcctcgactcaggccgacctgttcgccgccatcaccgccggctattgcgcgctcaccggcccgctgcatggcggcgcgccggagccggtgctggaaatgctcgatgcgatcggctcaagcgatcgcatccggccctgggtggatgcagcgctcgcgcgcggcgaacggctgatgggctttggccatcgcgtctatcgcgtgcgcgatccgcgcgccgacgtgctcaaggctgcgatcgagcggctcgcggcggacggcgccgacctgccctttgccggcgaggtcgaggcctatatccgcagcgcgctgcgcaagaagaatccggatcggccgctggagaccaatgtggagttcttcaccgcgatcctgctcgatgcgctggcgattccgaggcaggcgttcacgccggtcttcgctgtcgcgcgcgccgcaggctggaccgcgcatgcgcgcgagcagcagcggaccgggcgcctgatcaggccgagctcgtcctatgtgggcgcgatgcctgcggactga

SEQ ID NO: 2396 - DNA, 1221 bp, BradyrhizobiumColbertium
atgaaaaattcttcggcgctctacttgtctgcccgggaagccgccgccgagctcgcggtttccccggccaccctctacgcctatgtcagccgcggcctgatccgctccgagccgacgccggactccaggaagaaccgctaccgcgccgaggacgtccgcgcgctgaaggagcgccgcgtgccgtcgccggagccgcgcggactgcgtagcttcgatgccgacctgccggtgatggacaccgagatctcgaccatcaccgaggagggtgcgatctaccgcggcgtcaattgcgtcgatctttccgagagcgatacgcttgagcacacggcgacgctgctctgggacgtctccggcgtcgatccgttcgatccggacaatcagccggagatttccgatgagatgcgcgcgatcggccaagccgcgcgccgggccgcgccgatcgaccgcgccatcgccgtgctcgcgctggccgcgagcgccgatccccgcgccttcacccgagcgcccgacggccgcgcgctcgtcggtgcgcgcatcgtccgcctgctggttgcgaccatgctcaacgccgagccgtcggccgagccgctgcatcagcagattgccggggcctgggtggccgacaacaagcatgcgcccgacctgatccgccgcgcgctggtgctgctcgccgatcacgagctgaacgcctcgaccttcaccgcacgctgtgccgcctcgaccggcctcaacctctacgactccgtcatcgccgggctcgccgcgctcaagggcccgaagcatggcggtgccggcgtgctggcctcgcaactggtgaaagcgctggtcgatcgcgatgtcgagccgatggtgcgcgagcgcgtcgcgctcggcgagcgctttgccggcttcggccatggtgtctacaagcggggcgacccccgcgcgcaatcgctgctcaatgcgctgtcgcgcgccggggcgccgcgaaagttcacccgcgaggtgccggagcggatcgccgaagccaccggcgaattcgtcaatatcgactacgcgctcgccgtcctcgtgcacgcgctgcgcctgcccgccggcagcgagctcgctctgttcgcgatggcccgcagcgtcggctggatcgcgcatgccagcgagcaattgcagttcgggaagttgatcaggccgagggcgagatatgtggggcctgcgccggggcgtcgggcgggagctgctggttag

SEQ ID NO: 2397 - DNA, 660 bp, BradyrhizobiumColbertium
gtgacatccttcctcgatcccctcatcgccttcgtctcggcccatgcctggctcggctatctcaccctgttcctggcggcgctgctcgaagccgtgccggtggtgggatcggtgatccccggttcgaccatcatcctggcgctgagcgcgctggtcccgggcggcgagctgcagctgccatgggtgctgctcgcggccgcagccggcgcgctgctgggagacggctcggcctactggatcggccaccgccgccagcgcgagatcctcagcacctggccgctgaccaattatccccgcgtggtcgccgagagcgaaaacttcttcaaccgcttcggcacgtgggccgtgttcttcgcccgcttcgtgccgccgatccgcgccttcgtgcccgtcaccgcaggcgccctgggcatggcgcctgcgagattctacgccgtaaacatcccggcgatcctggcttgggcccccgcgcatgtgctgccgggcgttctcgcggtcaccgcgctgcacgattatgccgggctgcatcatcacgagcatgtcggcaagcatatctggatgctgaccgtggtgggcgttgcggtcacggcgagcgttgggatgtggatctatcgccgtcggcggaacggcgctgccgccgtggccaagccgggggagtag

SEQ ID NO: 2398 - DNA, 999 bp, BradyrhizobiumColbertium
atgacgaccgccgccctgtccaaagttgaggaagtttccggtctgcccgacatgaaggtgtcggtgcgccaggtgttcgggatcgacagcgatctcgaagtgcccgcctattccgaagtcgatcctcacgtgcccgaagtcgattccgattaccgcttcgaccgcgccaccacgctcgccattctcgccggcttcgcccgcaaccgccgcgtgatggtgaccggctatcacggcaccggcaaatccacccatatcgagcaggtcgccgcccgcctgaactggccctgcgtgcgcgtcaacctcgacagccacatcagccgcatcgatctcgtcggcaaggactccatcgtggtccgcgacggcaagcaggtcaccgaattccgcgacggcatcctgccctgggcgctgcagcacaacgttgcgctggtgttcgacgaatacgacgccggccggccggacgtgatgttcgtgatccagcgcgtgctggaggtctccggccgcctgacgctgctcgaccagaacaaggtgatcaagccgcatccggcgttccgcctgttcgcgaccgccaacaccgtcggcctcggcgatacctcgggcctctatcacggcacccagcagatcaaccagggccagatggaccgctggtcgatcgtcaccacgctgaactatctcagccacgacgaggaagtggagatcgtgctggccaaggccaagcactatcgcacccaggagggccgcgacatcgtcaacaagatggtgcgcctggccgacctcacccgcaacgccttcgccaacggcgacctgtcgacggtgatgagcccgcgcacggtgatcacctgggcggaaaacgccgacatcttcggtgacatcggctttgccttccgcgtcaccttcctcaacaagtgcgacgagctcgagcgtcccctggtcgccgaattctaccagcgctgcttcaacgccgagctgccggaatcggcggtgaacgtggcgctgagctga

SEQ ID NO: 2399 - DNA, 1905 bp, BradyrhizobiumColbertium
atgagcaccacctccaactccaaattccgcaacaccaaggaagcgccgaccgagccgttcaagcgctcggtggcctcctgcctgaaggcgatcgcgaaagcgcccgagctcgacgtcaccttcgcggccgagcgcccgggccttgcgcccggcaaggcgcggctgcccgagccggctcggaagatgaccaagcgcgacgctgcgatcgtgcgcggccatgccgattccatcgcgctcaagatcgcctgtcacgatcccaaggtgcatcgcaagctgatgcccggcaatccgcaggcgcgcggcgtgttcgaggcggtggagcaggcccgcgtcgaggcgatcggcgcgcgccgcatggccggcgttgccaagaacctcaccgcgatgctcgacgaccatttccatcgcggcaagttcgacgagatcaccgaccgcgccgacgcgccgctcgccgatgcgctggcgatgctggtgcgcgagcgcctgaccggcatggcgccgccggccgcggccaagaagatggtcgacctctggcgtccgatcctcgaagacaagatcggcaagcggctcgaccggctcgacggcgtgctcgaggaccagtccaagtttggcgatgccgtgcatgacctgctctcggcgctcgagctcggcgacgagcgcagcgccgacagcgaggacaacgacgagaacgacgagaaccaggacggcgacaacgaccagtccggcgccgagggctcgcccgattccgacgccgcgcaggagatgagcgccgaccaggcgcaggcctcgagcgaggagatgagcgagagcgcgatggaaagcgcgcaggcctcgacatccgacaccttcgacgacggcgagctcggcgacgacgagacgccgggcgaggcgacgcgcccgaaccagcacggcaagaacgagccgcgcgggccggaataccacgccttcgcgcccaagttcgacgaggtcatcgccgccgaggacctctgcgaccatgacgagctggagcgcctgcgcgcctatctcgacaagcagctcgcgcacctgcagggcatcgtcgcccgcctcgccaaccgcctgcagcgcaagctgatggcgcagcagaaccgcgcctgggagttcgacctcgaagagggcatcctcgaccccgcgcggctgtcgcgcgtcgtcaccgatccctatcacccgctgtccttcatgcacgagaaggaggcgacgttccgcgacaccgtggtgacgctgctgctcgacaattccggctcgatgcgcggccgcccgatcacggtcgccgcgacctgcgccgacattctcgcgcgcacgctggagcgttgcggcgtcaaggtcgagatcctcggcttcaccacgcgcgcctggaagggcgggcaatcgcgcgaggcgtggcttgccgccggcaagccggccaatcccggccgcctcaacgatctccgccacatcatctacaagtcggcggatgccccctggcgccgcgcgcgcaagaacctcggcctgatgatgcgcgaggggctgctgaaggagaacatcgacggcgaggcgctggactgggcgcacaagcgcctgctcggccggcccgagcagcgcaagatcctgatgatgatctcggacggtgcgccggtcgacgattccacgctgtcggtcaatcccggcaattatctcgagcggcacctgcgccacatcatcgaggagatcgagacccgctcgccggtcgagctgatcgcgatcggcatcggccatgacgtgacccggtattatcgccgcgcggtgacgatcgtggacgccgaagagctcggcggcgccatcaccgagaagctcgccgagctgttcagcgagaccaacacggcgcccacgcaagcccccggtcgcccgcgacgcaaattgcattcgtga

SEQ ID NO: 2400 - DNA, 1098 bp, BradyrhizobiumColbertium
gtgagcacgcattcgtcccgccgcagcttccttgggcacgccgcggcgggactttccactctcgccgtctcccgcatcgcgcaggcgcaggccgcggccgagccgccgccaagaacggctcaacgcgcgcttcaggtcgagcacgcggtcgcggagcccgtcagcgtcgaggtcaatgcgcgccccattcccaatttcgagccgcgcgaccgctcgcgcacgcgcttcggctcgctggactatcgcagcggcctggtgctgacctcgccctatcgcggcttcggcggcctgtccggcctccgcttcctcgacggcaggggcgagcgcttcctcgccatctcggaccagggcggctggttcaccggcgccatccgctattccggccgcgagatgaccggacttgccgatgtcgaggccgcgccggtgctgggccccgacggccggccgatcaccgagaagaagctctggtacgacaccgagtcgctcgcgcgcgacggcaatctcgtctatgtcgggctcgagcgcgtcaaccagatcctgcgctacgatttcgccaagggcggcacgcgcgcccgcggcgaggcgatcgccatcccgccggccctgcgcaagctgccctacaacaaggggcttgaggcgatggtggccgtgccgaaaggcaaagaccagaagttgccgctcgcgggcagcctgatcgccttctccgagcgcgcgctcgatgccgacggcaatctcatcgccttcctgatcggcggcgcctcgcccggccagttcagcgtgcggcgcaccgagacctacgacatcagcgatgccgtgctgctgccctcgggcgagctgctcatcctcgaacgcaaattctcctggttcaccggcgtcaacatccgcatccgcgcgatcccgctgaaatcgatcgcgccgggcgcgctggtcgacggtcccgcgctgttcgccgccgatctcggtcacgagatcgacaacatggaagccatcgacgcccacgtcacgagcgaaggcgagacggtgctgacgctgatctccgacgacaatttctcgatgctgcagcggaccctgctgctgcaattcacgctgacggagtag

SEQ ID NO: 2401 - DNA, 1113 bp, BradyrhizobiumColbertium
atgtccgtcctgttttccccgatcaagctgcgcggcctgaccctgaagaaccgtctcgtggtgtcgccgatgtgccagtattcggccgaggatggcgtcgccaatgactggcacttcacccacgtcaacaatctctgcctgtcgggcgcggcgatgttctgcatcgaggcgacccatgtggaggcgatcggccgcatcaccccgggctgcctcgggctctacagcgacgcctgcgaagccgcgctgaagccgatcctcaactcggtgcgcagatattcctcgaccgcgatcgcgatgcagctcgcccatgccggccgcaaggccagcagtgccaggccgtgggacggcggccagctgattccggtgagcgagggcggctggcagaccgtcggcccgtcggcggtgccgcacaaggaaggcgaggccgccccgctcgcgctcgatgaagcgggcctgaagcgcatccgcgaggccttcgtcgattccgccaggcgcgccgcgcggctcggcatcgacgccatcgaggtgcacggcgcgcacggctatctcctgcatcaattcctgtcgccgatctcgaacaggcgcaccgacgaatatggcggcagcctcgagaaccgcatgcgcttcccgctggaagtgttcgacgcggtccgcgcggcattccccgccgacaagccggtcggcatgcgggtgtcgtcgaccgactgggtcgagggcggctgggacctggcgcagaccgtcgcgttcgcgaaagccttgaaggcgcgcggcgtcgactggatcgatgcgtcctccggcggcgtctcgccgctgcagaagatcccgctcggccccggctaccaggtgcagttcgcggacgcgatcaagcgcgagaccggcctgcccaccatcgccgtcggcctgatcacggaagcgaagcaggccgaagagatcgtcgcatcgggcaaggccgacatggtcgcgctcgcccgcggcatgctctacgacccgcgctgggcctggcacgccgccgccgagctcggcggccaggtcgaagccccgccgcaatactggcgctcgcagccctcgacccagaaggagctgttcggcaagaccacgttcggcgctaggtag

SEQ ID NO: 2402 - DNA, 408 bp, BradyrhizobiumColbertium
atgcgttatcctgtccgcaaagcggctcacatcttcgagcgcgtcggccttgcgatggcgggcgccgcctgcgggctgttcgtcggcgcccatgtcgggtcggctataccgatgctgacgacgcagggcttcctgctgctgatgatgctgctcggcgccatcggcttctatctcggcatcgacacgccgcagatgccgttcgacgatgcgcacagccagatcgacgccgccgagttcatgagcgccgccggcacgctgtttgcgacgctcaccgccttcgtctccgtcgtcgtcatcgtgctccggctcgacccgcacatgacctggacctggctcgtgttcgccggctggctcgccggcgtggtcatgcagattgtcgccggcgcaaaggcgaggatgcggaagtag

SEQ ID NO: 2403 - DNA, 222 bp, BradyrhizobiumColbertium
gtgaagcccgcagggctggtgtcgcggcaggccaagatcatcaccgacccgcgcgcgccggtgatcccctgcacgctgatcgactattcgcccggcggagcctgcgtcgatctcggcggccaggtgaagattcccgatcgcttcgagctcctgcacgtcaacaccaagaagcgctgccgcatcgcgtggaagcgcggcacgcgcgtgggcgtggtgttctag

SEQ ID NO: 2404 - DNA, 1332 bp, BradyrhizobiumColbertium
atggagtccgcagccaccgccgatcgcaagacggagccgaagcatctcgtcatctgctgtgacggcaccggcaacgagatcagcgagaacatctccaacgtcctgaagctctatcgctgcctgcgcaagacggacaggacgcagccgcggcagatggtgttctacgatcccggggtcggcacggtgacggagccgacgacgtggcaccgcttcaaggccaacgtcaacatggtgctggggctcgccaccggctacgggctcgatgacaatttgctctcggcctattgcttcctggtccagcattacgcgcccggcgacaggatctacctgttcggcttctcgcgcggggcctacacggtgcgcgtgctggcggggctgatccacaagatcggcctgatctcgccggagcaggcgaacctcgcagggagcgggctgatcgcctacaagcaatattccggcaccgggcacggcaacgatgccgccgacgtcgaggacgtcgctttcgacgagagcgggccggtccctaaggacaagttcgatctcgccgcgcagttcgcgcgcatcacctcgacgcggtggccgaccatccacttcgtcggcgtatgggacagcgtggccagcgtgatcgtgccgcgccccgaccgcctgttctggccgagcctggaggagcttgccttcacgctgcgcaaccccagcatcaggatcttccggcaggcgatcgcgatcgacgagcggcgctgcatgttccgcctgaagcaataccgcgagccgcaggagttctggagcaaccgctacgtgcccgacgagaagaaggtgccgcaggacatccggcaggtgtggttcgccggcgtgcatggcgacgtcggcggcggctatccggaggcggagagcgggcaatcgaaatatccgctgctgtggatgatcgcggaggccgcgaaggccgggctgaagttcaacccgcgcaccgtgaaccagctcgcctggggcgtccagcgcaagaactcgccgttccactacgtggcgcccgccttcaccggcaagaccggcacgctgcacgattccatgaactgggcctggcgcctgctggaatatgtgccgaagcgcgcgacatacagggaatggccggagcgcaaggtggtgctcggcttctacatccccgacgccgagccgcgcgtcattcccgagggcgcgcatgtgcacgagagcgtgctgaagcggatggcggtggagccggactaccggccggtgaacatgccgaaggactacgtgaccgtgccgatgccggtggagccgggggcggacctggaggcgggggagatggcggagccgtga

SEQ ID NO: 2405 - DNA, 309 bp, BradyrhizobiumColbertium
atgtctcgccgctgcgaactgacggccaagggccccctcgtcggccacaaggtcagccactccaacatcaagaccaagcgccgcttcctgccgaacctcgtcaacgtgacgttccagtcggaggctctcggccgcaacgtgcgcctgcgcgtctccaccaacgcggtcaagagcgtcgaccacaatggcggcctcgaccccttcctgctcaaggccgacgccgacaatttgtcgccgcgcgccctcgagctgaagcgcgccatccagaagaaggtcggcgacgccgctccggcgaagcaggcgagctga

SEQ ID NO: 2406 - DNA, 324 bp, BradyrhizobiumColbertium
atgaggcgttgtcggcacgaaacaatccaatcggagcgcgatgcgctgttacttaagccaaaaaccgcggcaagcaatgtagccgggcccgaaagggccgggaactccactggactcatcaagcgcgaatacgccctttatgtgatggtaaggcgcgacaaacattgccgttttgatgatggggcggctgccgcgggctcccgcctctcccgctctctccgacgtcatgccccggctcgatcggggcatccggtacggcgcggctcctctggccagccgcgccgcctcggcgtactggatcgcccggtcaaggccgggcgatga

SEQ ID NO: 2407 - DNA, 885 bp, BradyrhizobiumColbertium
gtgccgacaacgcctcattttgcgcaagagctgcgcccggtccgtccgcgttttgccggcaggctggtggcgctttgcgcgctgggcctcgggtccggcctggcgttcggcgcggcgccggcggcggcgcagggcaagctcgaggcgcaatatgaggcctcgctggccggcattcccgtcggcaagggcgcctggaacatcgatatccaggacgacgtgttctcggcggccgcctccggcggcacctcggggctgctcaagtcgttcaccggcggggcccgcaccggcgccagccaggggcgcgtcgtgggtggcgcgctggtcgcgaccggctaccaggcctccaccaccacccagaagaagaccgaggaaatccgcatcaccctcgacaagggcaatgtgaaggatttctccatcctgccggagccgccggtcgatcctgaccgcatcgtcgtcaccgaggcgcatcgccgcggcgtctgggaccccatgaccgcctcgctgctgcgcgtgcccggcaccggcgatcccgtctcgccggaagcctgccgcaacgcggcgccggtgttcgacggccgcatgcgctacgaactcaagctcgatttcaagcgcatggacacggtgaaggcggaaaagggctacaagggcccggtcgtggtctgctcgatctatttcgtgccgatcgccggctacatccctgatcgccccgtgatcaagtacctcgccgcccagcgcaacatggagatcgcgttcgcccccatcgccggcacgcgcatcctggtcccgttctggctgaaggtgccgacgccgctggggccggccatgctggaagccaccagcttcgtcacctcggcccagcccccgcgcgtcgccaagacgcagtag

SEQ ID NO: 2408 - DNA, 198 bp, BradyrhizobiumColbertium
gtgtggggattaggtagtgccgatttgggcgaatgtcagtgctggatggggcggtgtgggggctggcagtgtcagccatgtctccgaacgccgggcggccagccacgcgctccgctgtcatgccccggtgtgggaacgcccatcccccgaaccccgcgcaactgtttcactttgcgacgcttttcccgttcgctttaa

SEQ ID NO: 2409 - DNA, 3384 bp, BradyrhizobiumColbertium
gtgcctggcgcgggcgtcaccgcggtgctcgggccgaccaacaccggcaagacccatctcgccatcgagcggatgctcgcgcatccctccggcatgatcggcctgccgctgcgcctgctcgcgcgcgaggtctacaacaagatcgccgccagggccggtgaagccagcgtcgcgctcgtcaccggcgaagagaagatcaagccgaagaacccgcgctattgggtctcgacggtcgaggcgatgccgcgcgacctcgacgtctccttcctcgccgtcgacgaggtgcagatcgccgccgatctcgagcgcggccacgtcttcaccgatcgcatcctcaaccgccgcggccgcgacgagacgctgctgcttggggccgccacgatgcggccgatcatcgagcggctgctgccgggcgtctccatgatcacgcggccccggctgtcgcagctcgaattcgccggcgaccgcaagatcacgcgccagccgcgccgcaccgccatcgtcgcgttctcggccgatgaagtttacgccatcgccgagctgatccggcgccagcacggcggcgccgccgtggtgctgggctcgctcagcccgcgcacgcgcaatgcgcaggtcgcgatgttccagaacggcgacgtcgattatctcgtcgccaccgacgccgtcggcatgggcctcaatctcgacgtcgaccacgtcgccttcgcctccgaccgcaagttcgacggctaccagttccgccggctcacgccgtccgaattcgcgcagatcgccggccgcgccggccgcgccacccgcaacggcacgttcggcaccacgggccgctgcgcgccgttcgagcccgagctcgtcaacgcgctgcagaaccacaccttcgatcccgtgaaggtgctgcaatggcgcaacgccaggctggatttctcctcgctcggcgcgctccaggtctcgctcaacctcgctccaggccatgaggcgctgacgcgcgcgccgatcgccgaggacatgcgcgtgctcgatcacgccgcccgcgacggcgaggtgcgcgatatcgcgcatggcaaggttgcggtggagcggctgtgggaagcctgccaggtcccggactatcgcaagctgtcgccggccgcccatgccgagctggtgacgacgctgtacggcttcctgatgcagaagggatgcatccccgattcctggttcgaggcccaggtcacccaggccgaccgcatcgacggcgacatcgacacgctgtcggcccgaatcgcgcagatccgcccctggaccttcgtggccaaccgccccgactggctgagagaccccgagcgctggcaggggatcacgcgggaagtcgaaaataaattatcggatgcgctccatgaacgcttgactgagcgtttcgttgatcgccggaccagtgtattgatgcgccgcctgcgggagaacacgagcttgaatactgaaatcggcaagaccggcgaagtcatcgtcgaaggccatgtcatcggccgcctcgacggcttcacctttgcaccggatgcggcggaagccggctccgatgcgaaagccttgcaggctgcagcgcaagccgtgctcgccggcgagatcaacgcccgcgccgaaaagctgggcaatgccccggacgagcagttcgtgctgacctccgaaggcatcatccgctggaccggcgatgccgtggcgcgactgtctgccgcagacgaggcgctgcatccgcgcatccgcatcatctccgacgagcgcctgaccggcccccctcgcgacaaggtgcaggcgcggctcgagctctggctcaagacgcatatcgagaagctgctcgggccgatgttcgagctgtcgaaggccgaggacgtcaccggcatcgctcgcggcatcgcctatcagctggtcgaggcgctcggcgtgctggagcggcccaagatcgcgaacgagctgaaggatctcgaccagccctcgcgcgccgttctgcgcaaatacggcgtccgcttcggcgcctatcacatctatttcccgggcctgctcaagcccgccgcgcgtgcgctcgcagcgctgttgtgggcgctgaagcaggacaatgtcgatctctccgcgctctcgggcgcgcagcatctggcatcgtcgggccgcacctcgtttccggtcgacaaggctctgccgcgcgacgcctatcgcgtgctcggctacaagcaggccggcgaacgcgccgttcgcgtcgacatcctggagcggctggccgatctgatccgcccggcgctggcctggcgcgagaattcgcccggcgaaaagccggccggcgcgttcgacggccgcagcttcgtcgtcacacaggcgatgacctcgctcaccggctcggccggcgaggacttcgcctcggtgctgcgcgcgctcggctatcgcatggagaagcgtccgccgctgccgccgaagcctgtcgtggccgagacggtcgctgcagaaacggtcgctacagagacggtcgtggccgagacgccgccggtcgaaggcagcgcggagacctcgaccgagactgcggcagaggccgttgccggcctgccggcggaaatgactcccgcgaccgaagccgctgtcgaagctgtcacggtcgaagacgcgcccggaatggagccgcgcgacgagcccgctcaagaggagccggcgctcgaagcgactcccgaggctcccgtcacgcccgaagatgcccccggcatagcgccgccggccgaagaggctcctgcgtccaccgaggctgccgggctcgaagccgctgctgccgagactgccgcggttgaagctgccgcatcgcccgacgctgcggcgcccgaggctccggccgcgcccgcagagcccgaactcgtcgaagtctggcgtcccgccggccgtcacgaggatcgcaagccgcgccacgagcgccatcgccatcagcgtcaccacaaccagccgcgcacacagccgggtgctgagactggagctgcacccggtgcggcgagcgccgcgcccggtgaagcggccgaaggcgcgaagccgggccatcgccatggcggacatcgcaaggacttccgcaagggccgcgaaggtggcgagggcggcgatcgccgcgacgaccgcaatcgcagcttccagggcaaggatcgcgacaacaaggatcgcgatcgcaaccgcgacaacaagggcaaattcggcggcgatcgtgacaagggccgcgagcatcgcggccgcgaccgcgacaaggggcgcgatcgccagggcggtccgtcgctgcgtccctacgcctcgagcgcgaacccgcgcgagcgcgatcgtccggctgatccgaactcgcccttcgccaagctcgccgcgttgaaggagcagctctcggggcggaaggagtag

SEQ ID NO: 2410 - DNA, 225 bp, BradyrhizobiumColbertium
gtggtgaaggcgcgcagctcggccgctgagctcgtcgtcaccggccacgtccgcgtcaacggcgcgcgcgagacatcgcccgggcatgcgatcaaggccggcgacgtcctcaccatcgcgctcgatcgcaccgtccgcgtcctgaaggtcatcgccttcaacgaacgccgcggcgatgcggcctcggcgcgggtcctctatgaggagctcgggacgcgcaattaa

SEQ ID NO: 2411 - DNA, 339 bp, BradyrhizobiumColbertium
atgacttacgtcgtcactgaaaactgcatcaagtgcaagtacaccgactgcgtcgaggtctgcccggtcgattgcttctacgagggcgacaacatgctcgtcatccaccccgacgagtgcatcgattgcggcgtgtgcgagccggaatgccctgccgacgccatcaagccggacacggaaccgggcctggaaaagtggctcggggtcaacgccgagtacgccaagagctggccgaacatcacccagaagaaagaatcgcctgccgacgccaaggagttcgacggcatggagggcaagttcgagaaatatttttctccgaacccgggctccggcgattaa

SEQ ID NO: 2412 - DNA, 828 bp, BradyrhizobiumColbertium
atgcctaacaagactgccaaaccggccgcgaaagcgaccgctgccaagcctgctgccgccaagcctgccgctgcgaagtctgctgccgccaagcccgtgactgccaaggctcccgctgccaagcccgcgacgaaggcccctgttgctgctgcgcctgccaaggcgcccgccgtcaccaagcccgctgccgcgccgaaggtcgaggaaaagaaggtcgtgacccagcgtcagggcttcaaggccaacgaattcgtcgtctatcccgctcacggcgtcggccagatcctcgccatcgaggagcaggagatcgccggggccaagcttgagctgttcgtcatcaacttcatcaaggacaagatgacgctgcgcgttccgaccgccaaggtcgccaatgtcggcatgcgcaagctgtccgatccggcgctggtcaagaaggcgctggagacgctcaagggccgcgcccgcgtcaagcggaccatgtggtcgcgccgtgcccaggagtacgaagcgaagatcaattcgggcgacatcgtcgcgatcgcggaagtcgtgcgcgatctctaccgctcggaatcgcagccggagcagtcctacagcgaacgccagctctatgaggcagcgctcgaccgtctgtcccgcgagatcgcggtggtgcagcactcgaccgagaccgaagcggtcaaggagatcgaggcccagctcgccaagagcccgcgtcgcgccaacgccaaggcggaagccgccgatggcgagggtgacacggatgccgagggcgatgccgatgataccgatggcgacgacaccaccgtcgccgacgaggcggcgtaa

SEQ ID NO: 2413 - DNA, 240 bp, BradyrhizobiumColbertium
atgaagtttcctcgtttcgctatgtccgcctttgcagccaccgtcggaattggcctgctggcagtctccgcctcgtactcgcccgccgctgcaggcgctttcggcccggactacagctggatgggcaatcgaaaatacatggactgcctgaaatatatgggggcgttcgggcccaactatcccggacgggacaagaacatcgcgatctgcaagagagagtttcttccgggcggtcgctga

SEQ ID NO: 2414 - DNA, 534 bp, BradyrhizobiumColbertium
ttgacggctgaccgttcgctcatcgtcgtcgaggacgacgccggctttgcacgcacgctgaagcgctccttcgaacgccgaggctacgaggtcgtgctcgccgcctcgatcgaggaggtacgacaggtgctggagcaacgctccttcagccatgccgtggtcgacctcaagctgggaggagcctcaggcctcgcctgcgtcgagctgctgcacgcacacgatccggacatgctgatcgtggtgctgaccggtttcgccagcatctccaccgccgtcgaggcgatcaagctgggcgcctgccactatctcgcaaagccgtcgaacaccgacgacatcgaggctgccttccacaaggccgagggcaatgccgaggtcgccctcgatgcgcggcccacttcgatcaagacgctggaatgggaacggatccaccagacgctgatcgaaacggaattcaacatctcggaaacggctcggcggctcgggatgcaccgacggacgctcgcgagaaagctcgagaagcgtccggtgaagtag

SEQ ID NO: 2415 - DNA, 1401 bp, BradyrhizobiumColbertium
atgctggaacgatcgccgagcccacctgacgacgggaagacgctttcccagacgcttgcgcgcggcgggctggtcacgctgcaatcgcaggccgatgcgcgtagcgagctggtcgggacggccccgaccgatcacgagaccaaccgcaagaacatggcgctgctcatccagctgcgctggacggcggtggtcggccagatggtgaccatcggcgtcgtgcattttggtctcggcatcccgctgcctctggaacggatgggcgccgtgatcggcgccctggtgctgctcaacgtctcgagcctcgtgtgggtgcgccatcgcgccgcgatcaccaataacgagctactggtcgcgttgatgttggacgtcgccgcgctgaccgcgcagctctacctctccggcggcgccaccaatcccttcacctcgctgttcctgctccaggtcacgctgggcgcagtgctgctcgattcccgctcgacctggtcgctggtcgccctgacctgcgcaagcttcgtctggctgacattggcctaccgcccgctcgatctgccgcccaaccccttgagcgagacctatagtctcaccgtgcttggcatgctcctgggcttcgtgctcaacgccgtgctgctggtggtcttcgtcacccgcatcaacaggaatttgcgcgagcgtgacgccaatctggcagcgctgcgccagcatgccgccgagcaggatcatatcgtgcgcatgggcctgctcgcctccggagcggcgcacgagctcggcacgccgctcgcctcgctctcggtgatcctcagcgactggcggcgcatgccggatctcgccgccgatcaggagctcgccgaagaccttgcggagatggaaacctcgctgcagcgctgcaagtcgatcgtcacggggatcctggtctcggcgggcgaagcgcgcggcgagggctcctcgccgacgacggtgacggcgttcgtgactgcgctggtcgaggagtggcgcgacgcgcgctcggcccgaacgctctacttcgtcaacaccttcggcgaggacgtcgcgatcgtctccgacgtcgcgctgaagcaggtgatcttcaacgtgctcgacaacgcctatgaggtctcgcgcgattgggtcgagctcgtggccgagcgcgaggacgacaatctggtgctgtcgatcagcgaccgcggccccggctttgcgccggaaatgctcgcgcagctgggaaagccctaccaatcgagcaagggccgcaccggcggcggcctcggcctgttcctggtcgtgaacgtggtacgcaagctaggtggcaccgtgaccgccaggaaccacaggaagcgcggggccacggtgcgcctgacgttgccgctcgcaacgctcgcgatcggagggaattttgacggctga

SEQ ID NO: 2416 - DNA, 813 bp, BradyrhizobiumColbertium
atgcacagcaaggctgtgcgtccgccctccttgtggttcacggtcctctcgctcaccgctcttgtacttctgatcgctctgggcgtctggcagatcgagcgccgcgcctggaagctggctctcatcgaccgtgtcgagcagcgcgtccacgctccggcccagccggttccctcggccgcttcatggcccatcatcagcgccgcaaacgacgaatacaggcacgtcggcctcagcggccgcttcctccacgaccgcgagacgctggttcatgccgtcaccgaggaaggccccggctattgggtgctgacgccgctccagcgcgatgacggcacgcaggtgctgatcaaccgcggcttcgtgccgtcggagcggcgcgacgcatcgacgcgcagagacggcaatccggagggcctggtcgagatcaccggtcttcttcgcatcaccgagccgaagggtggattcctcaggaacaacgtgccgcagcacaaccgctggtactcgcgggacgtcgccgcgatcgcggccgcgcggggtctccacgaggtcgcgcccttctttgtcgatgccgacgccaaatcacaaatcgctggcgggccgatcggcggattgaccgtgatccgctttcccaataaccacctgatctacgcgctgacgtggtttgccctggctttcatgctggccggccgactgttcgtcacattcggcggcgggctgttccgccgcaaacgcttcgtccacgacaaggccggcggcccgaatgccctcgcccgcaggacgggatcagatgctggaacgatcgccgagcccacctga

SEQ ID NO: 2417 - DNA, 381 bp, BradyrhizobiumColbertium
atgagcaccgatacgaacgccgcgcacgctcacggccatcatcacggcgacggccacgcccacggcacgttctcgagctacatgctcggtttcgtgctctcggtcgtgctcaccgcaattccgttctggctggtgatgagcggcacactgccgagcaagcagatcaccgcgctggtcatcatggctttcgccatcgtgcagatcgtcgtgcacatgatctatttcctgcacatgaacgcggcctccgagaacggctggaccatgatggcgctgatcttcaccatcgtgatggtggtgattgcactgtccggatcgctgtgggtgatgagccacctgaacagcaacatgatgccgatgcaccagatgagcgggatgaagtga

SEQ ID NO: 2418 - DNA, 630 bp, BradyrhizobiumColbertium
atgaccgtcgctgttcatccctcgcagaccggcgagccggtcttctatctcgccgacgagcacccgcatccggaaggctggagcacgtcgctcggcttctggatctatctgatgagcgactgcctcatcttcgcgatcctgttcgccacctacggcgtgctcggcggcaactatgcggccggacctgcaccgaaggacctgttcgacctgaacctggtcgcggtgaacacctcgatgctgctgctgtcgtcgatcacctacggcttcgccatgctgacgatgcagcagaacaaggtcgcacagacccaagcgtggcttgcgatcaccggcctgttcggcttggccttcatcggcatcgagctctttgaattcgcccacatgatccatgagggcgccacgccccagcgcagcgccttcctgtcggccttcttcaccctggtcggcacgcacggcctgcacgtctcctgcggcctgatctggctggtgacgctgatggtgcaggtccgaaagttcggcctgatcgaagccaaccgccgccgcctgatgtgcctgtcgatgttctggcactttctcgacgtggtctggatcggcgtcttcaccttcgtctatctcctgggagttctgcgatga

SEQ ID NO: 2419 - DNA, 1998 bp, BradyrhizobiumColbertium
atgtctcctgatcttcccaagctcatcttcggccggctcaccctcgagtcactgccgctgcacgagccgatcgtcgtcggcactttcgtggtggtcgcgctcggcggcgccgcgctgctcggcggcctcacctatttccgcctctggggctatctctggcgcgagtggttcaccaccgtcgaccacaagcgcatcggcatcatgtacatgatcctcggcatcgtgatgctgctgcgcggcttcgccgacgcgctgatgatgcgcggccagcagatgctcgcctttggcggctccgaaggctatctcaatgcccatcactacgaccagatcttcaccgctcacggcgtgatcatgatcttcttcgtggcgatgccgctggtcaccggcctgatgaactacgtcgtgccgctgcagatcggcgcccgcgacgtgtcgttccccttcctgaacaatttcagcttctggatgacggtcggcggggcggtgctggtgatggcctcgctgttcatcggcgagttcgcccgcaccggctggctggcctatccgccgctgtcgaacatcggctacagtccggatgtcggcgtcgactactacatatgggcgctgcagatcgccggcgtcggaacgacgttatccggcatcaacctgatctgcaccatcgtcaagctgcgatgccccggcatgacgatgatgaagatgccggtgttcacctggacctcgctctgcaccaacgtcctgatcgtcgcctccttcccggtcctgaccgtcgtgctcgtgctgctgtcgctcgaccgctatgtcggcaccaacttcttcacgaacgacttcggcggcagcccgatgatgtacgtgaacctgatctggatctgggggcaccccgaggtctacatcctggttcttcccgccttcggcatcttctcggaggtcacctcgaccttctcgggcaagcggctgttcggctacacctcgatggtctacgccacggtggtcatcaccatcctgtcgtacctggtgtggttgcaccacttcttcacgatgggctcgggcgccagcgtcaactcgttcttcggcatcaccacgatgatcatctcgatcccgacgggcgcgaagatgttcaactggctgttcacgatgtatcgcggccgcatccgctacgagttgccgatgatgtggacggtcgccttcatgctgaccttcgtgatcggcggcatgaccggcgtgctgctcgcggtgcctccggccgatttcgtgctgcacaacagcctgttcctgatcgcgcacttccacaacgtgatcatcggcggcgtggtgttcggtgcgttcgccggcatcaactactggttcccgaaggccttcggcttcaagctcgatccgttctggggcaagatgtcgttctggttctgggtcaccgggttctatctcgcgttcatgccgctctatgtgctcggcctgatgggcgtgacccgccgcttgcgcgtgttcgacgatccgtcactgcagatctggttcgtcatcgccgcggtcggagccctcttcatcttcatcggcattctctcgatgctcatgcagttcgcggtcagcctgctccggcgcgagcagctcaaggacgtcaccggcgatccctgggatggacgcacgctggaatgggcgacgtcctcgccgccgccggactacaacttcgccttcacccccgtcgttcacgacaacgacgcgtggtgggacatgaagcgccggggttaccagcgtccgctcaccgggttcaagccgatccatatgccgagcagcaccggcacgggtatcatcatcgccggccttgccaccgcgatgggctttgctctcgtctggtacatgtggtggctggcagtggtgagcttcatcgcgatgatcgccgtcggaatcggccacaccttcaactatcaccgcgacttcgacattccggctgaagacgtcatccggaccgaggacgcgcgcaccaagctgctcgcgggagtcaattga

SEQ ID NO: 2420 - DNA, 1161 bp, BradyrhizobiumColbertium
gtgtcccgtctcaagatcctggcgctgctccctctggctgccgctctcagcggctgcgactacgtcgtgctggcgccagccggcgacatcgccgcccagcagcgcgacctcgtgatcatctcgaccgtcctgatgctcctgatcgtgctgcccgtgatggcgctgacggtgctgttcgcgtggcgctaccgccagtccaacaccgacgctcgctatgaaccggattgggatcattcgaccgctctcgagctggtgatctggtcggcgccgctcctgatcatcgtctgcctgggcgcgctgacctggatgggcacgcatctgctcgatccctatcgcacgctcggccgcatccatgccgagcgcgccgtggaccagtccaaggctccgctcgaggtcgatgtggtcgcgctcgattggaagtggctctttatttatccgggctacggcattgcgaccgtcaacgagttggccgcgccggtcgatcgtccgatcaccttccgcatcaccgcgtcctcggtgatgaactcgttctacatccccgcgctcgccggccagatctatgcgatgccgggcatggagaccaagctgcacgcggtcgtcaatcacgccggcacctacaagggcttctccgcgaactacagcggcgccggcttctccggcatgcacttcaacttccagggcctggatgacagaggcttcgacgcctggatcgccagcgccaagtccgccggcggcacgctcggccgcgccgagtatctccagctcgaaaagcccagtcagaacgagccggtgcggcgctggggcaccgtcgatgccgatctctatcgcctgatcctcaacatgtgcgtggagaccggcaagatgtgccagagcgagatgatggcgatcgacgccaggggcggcgccggtcatcagggcctcaccaacaccctgccgctggcctacgacaaatacgcccgccgcggcaccgcgcttgggcctgagccgaccttcgtcgccggcacctgtacacccgatgcgccgcagggcaggaccaccgcctcgatcgcagcacccctcgataccgcgcctctgctcggcgccggcctgaagcgaccctcgttcatgccgctcaaatcctcgtccttcttcctcggacagcgtccgaaatcagactcctaa

SEQ ID NO: 2421 - DNA, 1329 bp, BradyrhizobiumColbertium
atggcgacggcacagacccccgcaatggcagacctccacaccggcgagcacggccacgaccaggccagtcccggcgagatcgccatcggcgtcatcatcggccgcacctcggaattcttcgacttcttcgtcttcgcgattgcctcggtgatcgtgttcccgcgcctggtattcccgttcgcgagcgaactgaccggcacgctctattctttcatgattttcgcgctggctttcatggcccggccgatcggcaccgtcatcttcatgacgatcgaccggagttacggcaagaccgccaagctgatctcggcgctgtttctgctcggcacagccaccgtcgcgatcgcgttcttgcccggctatccggagatcggcgccgccgcgatctggctgctggcgctggcgcgaatcgcacaaggtcttgcctggggcggcgcctgggacggcatggcttcgctgttggcgctgaatgccccgccttcccagcgcggctggtacgcgatggtaccgcagttgggcgccccgctcggactgatcgtggcgagcgcgctgttcgcctattttgccggcaatctgtctgccgacgatttcttcgactggggctggcgctatccgttcttcgtcgccttcgccatcaacgtcgtggcgctgtttgcccgcctgcgcatggtgacgacggaagaatacgcctcgctgttcgaaagtcgcgaattgcagccgtcgcgcatctccgagaccgtcgcgcgcgaaggccagaacatcatgctcggcgcattcgcgccgctggcgagctttgcgctgttccacatggtcacggtgtttccgctgtcctgggtgttcctcttcacccatgaaagcccggttcgcttcctgatcatcgagatcgtggccgccgtgttcggcgtcggcgcgatcgtggcgtccggcatcatcgccgaccgcgtcggccgcaagtcgctgctgatgggatcggcgatcgcgatcgcgatctatagcggcttcgccccgcaattgctcgacgccggggcattcggcgagaccatttacatggtgatcgggttcatcctgctcggcctgtccttcggccagtcttccggcgcgatcgcctcgaacttccggcagacgtaccgctacacggcttcggcgttgacttcggacatggcctggctgttcggcgccggcttcgctccgctggtggcgctgcttctcgccaccaatctcggcgtcatcgcctcgggtgcgtatctcctgtcgggcgcgttctggaccttgctcgcgctctggctcagcggccagcgcgagaagggggatatggacacggggcggtag

SEQ ID NO: 2422 - DNA, 1392 bp, BradyrhizobiumColbertium
atgggccggttccacaccgcggcgaccccggcggccgtcgtgatgcccaagccgaagcccgcgatcgcgcaaacgccggccaccgagaaggagcacgagcgcatcctgtcgagctatggcgggacctatgacgatcccaagctcgaggcgctcgtcagcaagaccgtcgaccggctggttgcggcctccgaccgtccggaccagggctacaaggtcaccattctcaattccggcgcggtgaatgccttcgcgttgccgaacggccagctctacgtcacgcgcggactccttgcgcttgcgagcgacacctcggaattggcctccgtgctcagccacgagatggcccatgtgctgtccaagcatgcggcgatgcgcgaggaccaggcccgccaggccgcgatcgtcacccgtgtcgtcacggacatgagcaacgatcccgatctcaccgccctcgcgctcgccaagaccaagctcaccatggcgagcttctcgcgcaagcaggagatcgaggccgacggcatcggcgtcggcatctccgccaaggcgcatttcgacccttatggagcggcgcgcttcctctccgcgatggagcgcaatgccgagctgaaggccggaaagaactcgctcgatccgcgcgcgcaggatttcacctcctcgcacccggcgacgcccgagcgggtgcagaacgcgcagaacatcgcgcggcaatacactgcgccggaaggcgccgagcgcgaccgcgagagctatctcgccgcggtcgacaacctcgtctatggcgaagacccgagcgaaggtttcgtccgcggccggcgcttcctgcatccgaagctcggcttcaccttccaggcacccgagaattttacgctcgacaacaccgcgcaggccgtgatcggcgtgcgcgagggcggcgcgcaggcgatgcgcttcgatgtcgtgcgcgtgccggccgaacagtcgctcggcgagtacctgaactctggctggatggaaggcgtcgagaaggcctcgaccgaggacatcaccatcaacggttttccggcggcatccgccaccgccaagggcgaccagtggcagttcaaggtctatgcgctgcgcttcgggagcgacgtgtaccgtttcatctttgcgacacggcagaggtcgacggaaagcgaccgcaatgcgcgcgagaccgtcaattcattccgccgcctgacactcgacgagatccaggccgcgcgcccgctgcggatcaaggtcatcaccgtgcagcccggcgataccgtggaatcgctgtcccaccgcatggccggcgtcgaccgtcccgccgagcgcttccgcgtgctcaacggtctcgaacgcaacgcgcaagtgaaggtgcgcgatcgcgtgaagatcgtggcggactga

SEQ ID NO: 2423 - DNA, 732 bp, BradyrhizobiumColbertium
gtggccggacattgtgcgttcgccgcgccctgccagttcgaagccctcggcgagggccgcgtcgcggcgatcatcgatccgcgcagcgtgcgcctcgctgacgggcgcgaggtccgcctcgccggcatcgagccgacggcggccacgaagcaggcgctggtgtcgctgctcgccggccgtgacgtgacgctgcggagtcccgacgacatgcccgatcgatacggccgccagggcgcgctgctgttcatcggcggaagcgacacgtcggtgcaggccatgctgctggcccagggcgatgccatggtctccgccgaaatcgtggacagggactgcgcggcagtcttgatggcgtccgaagccgcagcgcggcgccaaaaaatgggcagctgggctgactcgtcggccataaaaaacgcggaaagtccggacgatattttggcggagatcgggcgctttacggtggtcgagggcaaggtcctgtcggtccggcaagctggggcaatgacctacctcaacttcgggcgaaactggacacggagctttgcggcgactatttcaaggcgcacgctaccggcattcgaaagcaccggaatcgcccttaagtccttggagaataaacgtattcgaattcgaggctgggtcgaagggaacacggggccgcggatcgatatacgcctcgtgggacaggtcgagttgctgggcgcaaacgagccgataggggtaaggccttag

SEQ ID NO: 2424 - DNA, 123 bp, BradyrhizobiumColbertium
atgtccggccacgagcagaaatgcgacgatgaggtgaagccgtggcgtcacgtgaccggagaggttgcgttgtctgccgagcatagctcaagcgtgctggattgcgaagagacggttgtgtga

SEQ ID NO: 2425 - DNA, 177 bp, BradyrhizobiumColbertium
gtgtttgctattgccgcaatcatgccgcatgcgcaacagcgcagcaagcgcgagggggttgcgatagcagaattgccgcgcatgatttccgcaaaacggaatggcgagtcggccgcgaaggtttccacgcgtcattgcgagcgcagcgaagcaatccaggatctcacgatggaatga

SEQ ID NO: 2426 - DNA, 1206 bp, BradyrhizobiumColbertium
atgaagatgattttgtccggcatttttgccgccgcgtttgccctcaatgcgagcgccgcgcaggcccaggacaagccgccgctgaagatcggcggcatcctcgacatgtcgagcctctatgccgacatcacgggtcccggcagcgagaccgcggccaagatggccgtcgaggatttcggcggtgaggtgctggggcgcaagatccaggtgctggcagccgatcatctcaacaaggccgatctgtccgccaacatcgcccgcgacatgctcgacaatcagggcgtcgagatgatctacgacgtggcggcctccgcgaccgcgctcgccgccggcgagatcgcgaaagcgcgcaacaagatcatcatgttcaacggcccgggctcgatccgtctctccaacgaggcctgcggcccctacaccatccactacgtgttcgacacctacggtcaggccaacgtcaccggccttgcggccgtgaagtcgggcctcgacagctggttcttcctcaccgccgactacgccttcggacaggatctggagaaggacaccagcgcagtcgtgaccaagaccggcggcaaggtgctcggcagcgtgcgccatccgctcaacacgtcggatttctcgtccttcctgctccaggcccaggcttccaaggccaaggtgatcgggctcgccaatgccggcggcgacaccatcaacgccatcaagcaggcggcggagttcggcatcaccaagggcggccagaaggtctcgccgttgctcgccttcgtcaccgatatcgactcgatcgggctggagaccgcacagggcttgctgcttgcggaagcgttctactgggacctcaacgacgatacgcgcgcattctccaagcgcttcatggagcgcaccaagcgggtgccgacctcggcgcaggccggggtctattcctcggtcacgcattacctgaaggcggtgaaggcggccggcaccaccgacgccgcggccgtgatcaaggtgatgaaggagacgccggtcaacgacttcttcgccaagaatggcaagatccgcgaggacggccgcatgattcacgacatgtacctgttcgaggtgaagaagccctcggagtcgaagggccgctgggatgactacaagctgattgccaccgtgcccggcgccgaggcgttccagccgctggagcagtcgcgctgcccgctggtgaagaaataa

SEQ ID NO: 2427 - DNA, 792 bp, BradyrhizobiumColbertium
gtgagcaacgacatggtcttgcaaaagctcgaaggcgggctgctcaccatcacgatgaatcgcccggagcgcaagaacgcgctcaaccccgagatggtcgtcgggctggtcgaagcggcacgacgcgcagccgacgatcccgaggtgcgggcggtgctgttcaagggtgcgggcggctccttctgtgtcggcggcgatgtcaagtcgatggcggcaggccgcgcaccgctgccgttcgaagtgaaaatggccaacctgcgccgcggcatggaggtctcgcgcatcctgcaccagatgccgaagccggtggtggcccagctcgacggtgcggcggccggcgcggggctgtcgatggcgctggcctgtgacctgcgcatcgcctccgaatcctgcaagatcaccacggccttcgccaaggtcggcttctccggcgattacggcgggacttatttcctgacgcagctgctcggcagcgcccgggcgcgcgagctctatctgatgtcgccggtgctgacggcgaaggaagcacatgcgatcggcatggtgacgaaggtggtgcccgacgccgagatcgacgccgccgcgcacgaactggcgctgtcgctggcgcagggcccgtcgatcgcgctcggcttcatcaagcgcaacatcaacaatgccgagcatctggcgctggaggattgcttcgacggcgaagcgatccatcacacccgttgcggcgataccgaggaccacaaggaggccgcaaaggccttcgtcgagaagcgcaagcccaccttcaagggcgcatga

SEQ ID NO: 2428 - DNA, 750 bp, BradyrhizobiumColbertium
atggcgccctatatgcggctgcggcagatctgcctggttgcgccgcagctcgagcccgtcatctcggacatcgccgagatcatgggccttgcggtctgctaccgcgacggcaatgtcgcaaaatacggcctggagaatgcgctgctcccggtcgacacgatcctgctggaggtggtcgcgccgttcaaggacggcaccacggccggccgcttcatcgagaagaccggcggccgcggcggctacatggcgatcttctgctgcaacgatcccgacgagcgcggccgcaacgccaacgcgatgggcgtgcgcaccgccaatgtcatcgaccatgcgccctatcacggcgtccagctccacccgcgcgactgccgcgccgccttcatcgaattcaatcacaccgaaggcagcgacgacatcctcggcgcctatccgccggcgggaccggactggcagaaattcatccgcaaggatgtgacgcaggcgctgacggcggtggagatgcaaagcccggatccggcggggctcgcggagcactggggcaagatcatcggtgttgcgccgagtggcgatgccgaactgaggctgccgaacgccaccttccgcttcgtcaaaggccgcagcgagatcatgagcgcactggagttccgggtcgccgatgctgctcgtgtgctgcatgccgcgcgggcgaaaggccttgcggtgaccggaaatgagttcttgttgggcggtgcgacgtttcgcgttgcttga

SEQ ID NO: 2429 - DNA, 813 bp, BradyrhizobiumColbertium
atgagcacctataaagatatcggcgtcgagaaggtcgggcatgtcggcaccatcgagatccgccgcccgccgctgaacttcttcgacatttcgctgatcaaccagatcgcggatgcgctggaggagttcgaccgcgacatcgagatccgcgcttccgttctctccgcgcagggcaaggcgttctgcgccggcgccaatttcggcgatccggcgcggcaggcccaggaggctcaagaggccgagaagaagggcgatccggccgacagtctcggcccgatcaaccatctctacatccaggccgtccgcatcttccgcgccaagaagccgatcgtcgcggccgtgcagggcgccgccatcggcggcggtctgggcctggccgtctcggcggatttccgcgtcacctgtcccgaagcgcgcttctccgcaaacttcaccaagctcggcttccatcccggcttcggcctgaccgtgacgctgccggaactgatcggcaagaacaacgccgagctgatgttctacaccagccgccgcgtcaccggcgaagaggcggtgaagtggggcctcgccaacgagctggtgccgcaggatcaggtgaaggcggccgcgatgaagctcgctggcgagatcgccgaatgctccccgctcggcctgctctcgactcgcgccaccatgcgcgccggcctcgccgaccgcgtcatggccgcgaccaaccacgaactcgccgagcagacgcgcctgcgcgccacggaagacttcaaggaaggcgtgaaggcgaccgaagagcggcgggtcgcgaacttcaagggacggtag

SEQ ID NO: 2430 - DNA, 1161 bp, BradyrhizobiumColbertium
atgaccgctgccctccgtttcgatccgatccgcctccccgagaagtgcgagcaattgcgcaaggaagtgcgcgccttccttgcggaggagatcgccgccggcaccttcgatccgcaccagcccaaccgcgaagacaccgatgcgccggaattttcccgccgggtcggcgccaaaggctggctggggatgacctggccgaagaaatatggcggccaggagcgctccttcctcgaacgctatgtcgtgaccgaggaaatgcgtgtcgccaacgcgccgacgcggcgcttcttcgtggccgatcgtcagagcggaccggtgctgctgaaatatgcgcccgagcacatcaagatggacatcctgccccgcatctgccgcggcgagatctgtttcgccatcggcatgagcgagccgaactcgggctccgatttgttcgccgcgaagacgcgcgcgaccaagaccgacggcggctatctcatcaacggcaccaagatctggacctcgtcggcgcacatcgccgactacatgatcgcgatcttccggacctcgccgccgaccaaggagaaccgccgccacggcctgacccaatttctggtcaagatgaagcagccgggcatcaaggtgaacccgatcggccagatcaccggccagtacgagttcaacgaagtcgtcttcaccgattacttcatccccgatgatcacgtgctcggcgaggtcgacggtgcctggaagcaggcgacgagcgagctcgcctatgaacgctccggccccgagcgcttcctcgagacctattacgtgctcaccgagctcgtccgcgcggtcggccccgatcccgatacgcgcagcgccgagggcatcgggcgcctcgtcgcgcaactccatacgatgcggcgcatgtcggtctccgttgccggcatgctggaagcgggcaaggagccggtggtggaggcctcgatcgtcaaggacatcggcaccgtctgggagcagcagctgccgcatcgcgtgcgcgatctcgccgccttcgtcgaggagaccgcgaccaaccgcgagaccctggagcggcagctcgacttcgccatcaagaccgcgccgaaactcaccatccagggcggcaccacggaagtgctgcgcggcatcatcgcccgcggacttggcctgcgatag

SEQ ID NO: 2431 - DNA, 1065 bp, BradyrhizobiumColbertium
gtggcggagagtgacaatatcgtcgtcgagaccgcggagaagatcttcgccgatctcgccgatccgcaaaccatcaacaacgacaagaaagattcatggcaggcgccgctctggcaggcgctgagcgaagccggcctgccgctggcctgggtgcccgacgatctcggcggctccggtgccagccttgccgatggctttgccttgctgaatgccgcggggcgtttcgccgtcgcggttcccctggccgagaccatgctggcaggctggctgctggcgcaggcgaagatcgcctcgcccgaaggcgagatgacggtgctgccggcctcaccgaaggaccgtgtaacgctcgatgccgacggcgcgctttccggccgcgcgcgcggcgtgccatttgccaaggcggcgaagcactttgcggtgctggtgcacagcaaggacggcgtttccatcgccctggtcgatgcggccaaggtgcgcatcgaggcgggcctcaacgttggctatgaccacagcgacaccgtgacgctcgacagggtccagcccgtcaccatcaagcctgcgccgaaaggcctcgaccagaccaatctgatgctgatgggcggcgttgtacgcagccttcagatcgcgggtgcgctggagtccatgctcgacatctccgtgcgctattccaacgagcgcgtcgctttcgagaagaagatctcgaaattccaggccgtgcagcacaatctcgcgcgccttgccggcgaatccgccgcagcgctggccgctgcaacatccgcggccgacgccatcgcgaatgcaaagtcgttcaacgacgaggtctatctcgaagccgcctcggccaagatccgctgcgccgaagccgcggagaaaggcggcggcatcgcgcatcaggttcacggcgccatcggcttcaccatggagcacatcctgcaccgttattccctgcgcgcgctggcctggcgcgacgatttcggctcggaaagctactgggcggtcgagctcggcaagctggtcgcaaaccgcggcgccgacgaattgtggccgctcgtggcgtcgcgctga

SEQ ID NO: 2432 - DNA, 786 bp, BradyrhizobiumColbertium
atggcaaaggacggcttatgcgcaatcgtgacggggtcggcgtccggtctcggcgcggcgactgcggaaattctcgcccggagcggagcgcggctcgtcatcaactattcgtcgagccagaaggaggccgaggccacggccgagctctgccgcaaggccggcgccgcggaggtcctggtcgcgcagggcgacgtctccagggatgacgattgtcgcaagatcgtggctgccgctgcgccctggggccggctggatatcctcgtcaacaatgccggcaccaccaagcatgtcgctcacgccgatctcgatggattgtcagcggaggacttccagcggatctacggcgtcaacaccatcggcccgttccagatggtgcgcgctgcgcgcagcctgctcgaggccggcgccaaggcttcggagcgaccgtccgcggtggtcaacgtctcctcggtcgccggcatcagcggcgtcggctcgtcgatcgcctacgccgcgagcaagggcgcgctcaataccatgacgctgtcactgtcgcgcgcgctggcgccgctgatccgcgtcaacacggtctgccccggctatatcgacacgccctggttcaccaagggccgcggcgaggccggcgccaagcaggtgcgcgacagcgtggtggccaaagtgccgctgaaggtcgcgtcgacagcggaagacatcgcccagctcgtctgcttcctggcaatgccggcctccagcaacatgaccggcgaagtcgtgcgcatggatgcgggcatgcatttggtgacgtga

SEQ ID NO: 2433 - DNA, 273 bp, BradyrhizobiumColbertium
atgagcatgggcggcctgttgtggatcatcgtcgtcggcttcgtcgccggcctcatcgcgcgctggctcgcaccggggccgaacaatccgagcggcttcatcctcaccaccatcctcggcatcgccggcgcgtttctcgccacctggctcggccaggccatcggccactacaaccccgaccagggcgcaggcttcatcaccgcaaccatcggcgcggtggtggtgctgttcatctggaatcggctggtggcgagcggcgtgatcaaggggtag

SEQ ID NO: 2434 - DNA, 567 bp, BradyrhizobiumColbertium
atgggtctactcgatgtcctcaacggcatgcagaacggcccgcgcggtccgagcacagcgagcaccgacaaatcctccggcggcatgtcgccgatgaccatggcgctgctcggcctgctggcctggaaggcattcaagcatttcaccggcaaccagtccggctctgcgccccaaccgtcaccggcacccgcacctccgcctgtgaacgcaggcacgggcggcggtctgagcgacatgctcaagggcggcctcggcggcctgctcgccggcggtgcggccggcagcattcttagcggcgggctcggcgatctcctcaaccagttgcagcaaagcggccacgccgacaccgccaattcctgggtcggcaagggcgagaacaagccgatcgcgccgggcgatctcgccagcgcactcggcgccgaccagatcgacagcctgtccgcccagagcggcctgtcacgcgaggacctgctctccggcctcagccaatatctgccgcaggtggtcgatcagctgacgccggacgggcggctgccgaccgaagacgagctctcgggccgaatctga

SEQ ID NO: 2435 - DNA, 1008 bp, BradyrhizobiumColbertium
gtgatgacggatcgaccgatcgtggtggccggcgcgggcgccatcggctgtttcgtcggaggcatgctggcggcggcaggccgccgcgtcgcgctgctggtgcggccccgggtgaaggccgagatcgaacgcttcggactgtatttgaccgatttcgacggctccgagaagaagctcgatgtgagccggctgacgctggcagaggatcccgtgatcttgcacagcgcaggcatcgtgctggtcacggtgaagagcgccgacaccgccgctgtcgccgagcagatcgcgcagcatgcgccgcaggacgcggtcatcgtctcgcttcagaacggcatcggcaatgtcgcggtcctgcgcgagcggctcggcggccgccgcgtgcttgccggcatggtgcccttcaacgtgatcgcgatgggcgagggccgcttccaccgctcgacctccggcgatatccacgtcggagaggatccacagaatacggccgctgcgctctcggttgccggcctcgcggtgcgcgcgagcggtgacatcaccggcgtgcaatggggcaagctgatcatcaacctgaacaacgcgctcagcgcgctctccgacatgccgctcgccgcgcaactggccagccgggactggcgcaggctgttcgcggaccagatggccgaggggctggccgtgctgaaggccgccggcatcgtgccggtgtcgtcgacgccgatcccgatgaactggtctccgaccctgctgcgcttgccggatgcgatcttcaacgcgatcctggggcgcacgatgaagatcgatcccgaggcacgctcctcgatgtggcaggacctcaagctgggccgcaagaccgagatcgactatctccagggtgcgctgatcgcgctcgccgagcaaaacaatgtcagcgtgccgctgatgcgccgcattgttgcgctgatcaaggaagccgaggcgaccggcagcggtccccttcgcctgacaccgcagcagatccgcgggaacgcgtga

SEQ ID NO: 2436 - DNA, 216 bp, BradyrhizobiumColbertium
atgaagcgtcgttttgtgatcgggctcgcgctgaccgcgttttgcggtgcatcgacgctagcccatgcgaggccgccgacggtgatgaactctccgggctacgacaggcgattgcaggagagcaggtcgcagctggggagttcgccgacggtagtggagcctgcgagtccgcccgtggtcaaaccgaagcgcagcaagaagaagcgcgcgcgctga

SEQ ID NO: 2437 - DNA, 633 bp, BradyrhizobiumColbertium
atgtcgaccggagatacatcgcgtcgtgcggcgctgcttcccgcggccgcagcaggatttttcctgctgatgcctgcacacgccgaggcgcaatggtggagacgcgcaccggtcgatttcgaggaatgcgctgacgccgccgagaaagccgcaaccaaggcggagaagacggcggcccttgccgattgcaacgccaagtttgccggccgccgcaagccgggcggcggctattcctactacgacttcctccaggatcgcaccttcgacatcgccggccccaatccgacgccggaggaacagaagaagatcgacgaagcctataccgcctatctcgccaagcagcgccgcagcaatgaagcggcgcaagccacggcccgccagcagcgcgagcaacaagagcaacaggtgcagcagcttcagcaggtcgcgctgcgaaccgaagtcgagcgcgtgccgatccccgtcggtcggccgaaggttcagcaggccgccatcggcgatacgcgcgcgcgagcgaagggcgcatgcaccaagggctccttctcctgcgaatggccacgcctgtcggaagggttgaacgatctgaagaagctgttcaacccggcacccagcaagccggcgaagaagggttga

SEQ ID NO: 2438 - DNA, 1518 bp, BradyrhizobiumColbertium
atgctgttgcccctgtccgatgtgccgcgctggtatgccgagcgcaagccgcaaggcacgatcgccattcgtcacgggcaggacaccctgacatgggacgagctcgagcgcggcgccaaccggcgcgcgcgggcgtttgcggccaagggcgtcaagcccggcgatttcgtcgcgatcggattgcccaacggcaacgcgttcttcgagacgtcatttgcggtctggaagtgcggggcgacgccgacctcgctgtcatggcggctgccgcgcggcgaagcggccgccgtgctcgacattctcaggcctgcgctcgtggtcggcggcgaggccgactggaatgcgccgaaccggttgcccgccgagttcgtgccggaaggtttctcggatgagccgctgacgccgccggtggcgcgctactggaaagcgatgacctcaggcggctcgaccggccgtcccaaggtgatcctcgaccaccagccggcggtgaccgataccgcggccgccccgccgctcaatattcccttcggcgtctcgctgctcaatcccggcccgctctaccacaacgccccgttcatcgtgtcgcactacgcgctgttcgtcggcggcatgctcacggggctcaccaaattcgatgccgaggaaacgctgcgccagatcgagcgcgagcgcgtgcaatgggtcaatttcgtgccgacgatgatgcaccggatctgggccctgccggagagcgtgcgcaacgcctacgacctgtcgagcctgcagacggtcttccacatggcggccccgatgccgccgtggctgaaggaaaactggatcgcctggctcggacccgagcggatctgggagctctatggcggcaccgagcggcagggcgcctgcatcatctccggtaccgaatggctgacgcacaagggctcggtcggcaagatcggcgacatggcgcgcttgcgcatcatcggcgaggacggcaacgacgtcgcgcccggcgagaccggggagatctactttctcaacaacgacggcaaggacgccacctatcactacctcggcgcggagccgaagcgccgcgccgacggctgggaatcgctcggcgatatcggccggctggatgcggagggctatctctatctgggcgaccgcctcgccgacatggtactgcgcggcggcgccaacatctatccggcggaggtcgaggccgcggtgtccgaggctcccggcgtgcgctcctgcgtcgtggttgggctgcccgatccggaactgggccagcgtgtgcatgccatcatcgagccggagcccgatgcggacggccaggccatcgccgacgggatggcggatttcctgaaggaccggctcagccgctacaagcatcccgagagcttcgaattcgtcaacgccccgccgcgcgacgactccgggaaggtccggcgcacgcttttgcgcgacgaacgcgcagcatggatgaaggaaggtcgcgccttccggattctgccggcgagagcgcgggcgcatgccgactga

SEQ ID NO: 2439 - DNA, 639 bp, BradyrhizobiumColbertium
atgacgatcgccattgcagcgaacagcgtgccgaaaccgccggccgacatcatcgcgggctttcgagacgcgccgacctcgatcatctccgacaatctctcccgcctgcccggcgcggtggggctgaggccctttcatcgcggcgccaagctggtgggcgcggccttcaccgtgcgcacgcggcccggcgacaatctcgccatccatcgcgcgctcgaactggtcggtcccggcgacgtcatcgtcgtcgatggcggtggcgatgagacgcgcgccttggtcggcgagatcatgaagaacatcgcgcaatggcgcaaagccgaaggctatgtcatcgacggcgcgatccgcgacgtcgcagccttcgcggccgacgactttccgtgcttcgcccgcgcggtgatccatcgcggcccatacaagaacggtccgggtgagatcaacgtgcctgtcaccatcggcggcagcgtgatctcgcccggcgacatcgtggtcggcgacgaggatggcgtggtgtcgttccccgctgccggcgcaactgcgctgctgcaggcggtccgtgcccagatgagccgcgaggaggagacgctgaaggcgatccgcgagggccgctaccagggctcttacggaaagtcctga

SEQ ID NO: 2440 - DNA, 372 bp, BradyrhizobiumColbertium
gtgagccagaaggacgagttccacaacatcgacgatacgaacgatggccttttccgcgagctggccgccggagtgacgacgcgcatcttctccggggagcaggcgatgctgtctgttgtgacgctggccccgcatgcgcaaggcacgctgcaccatcatcccgaggagcaatggggcgtgctgctcgacggttcggccatccgcgttcagggcgatgaggaaatcgcggtgaataagggcgatttctggcgcacgccgggtaacgtgccgcacaccatgcgcgccggacccgaaggcgcccgcgtgctggacatcttcagtccgcctcggccggaataccggaaagcagggtcgggcttcggaacgacctga

SEQ ID NO: 2441 - DNA, 162 bp, BradyrhizobiumColbertium
gtgacgatcacacgacgggcgctgctggccgtgcccgccatcctcgcgatggcaccggcgcgcgcccgggcctcgaaaatcacgctggtggtgccgtttccgccgggcggatcgaccgatgcgatggcgcggctgctgcagagcaatctgccacccagctga

SEQ ID NO: 2442 - DNA, 360 bp, BradyrhizobiumColbertium
atgatcgacagcatcagcgccatcacgctcggcacccatgacatggcgcgcgccgtgcatttctaccgctcgctggggttcgagctcctgtatggcggcgaggccgcggcgttcacgagctttcgcgccggcaccggctatctcaacctgacggcacagcccgatgacaggcagtggtcctggtggggccgagtcatcttttatgtcgccgacgtcgacgccacctatgagcaggctcgcgcggccggatggcagccgtcgaccacgccgcgcgatgcggaatggggcgagcgctactttcatctcaccgaccccgatggccatgagctgagcttcgcccgtccgctgcgcggcgcgtga

SEQ ID NO: 2443 - DNA, 74 bp, BradyrhizobiumColbertium
ggtcccgtagctcagccggatagagcggcggtttcctaaaccgtaggtcggaagttcgagtcttcccgggatcg

SEQ ID NO: 2444 - DNA, 726 bp, BradyrhizobiumColbertium
atgtcgacctacgttctcgtccacggcgcctggcacaccggtgccgagttcgagcccgtcgccgcaccgatccgcgcggccggccaccaggtccacacccccaccatcaagggcaaccgtcccggcgatgccaagacgaccgggctgaaggaggcgatccagtcgatcgccgaccaccttgccgagaacaatctgaaggacgtcgtcctgctcggccattcctatggcggcatgatcatcaccggcgttgccgacctcgcgccggagcgcatccgccgcctggtctactggaatgccttcgtgcccaacaacggcgaatgcctcaacgacatggtgccgccgcactatgtcgggctgttcgacgcgatcgcagccgagcgcggcgacggctccgtcgtcttgcccttcccgatctggcgcgaggctttcatcaacgatgccgacctggagacggcgcaacgcgcctatgacgtcctcaatccgcacccgctcgcgaccttcaccgacaagatcgcgctcaaggccaatccggccgagatgccgctggccaaatcctacatcaactgcaccgaggacaccgcgctgccgcacagctatggctggcatccgcgtctgtcggagaagctcggcctgttccgcctggtgcaggtgccgggaagccacgagctgtgcttctccgatccggcgcggcttgccagggcgatcatggaggcgggaagggactga

SEQ ID NO: 2445 - DNA, 981 bp, BradyrhizobiumColbertium
atgcagctgatcgagcgcgccgtttcgtcacgccaatcggcctgggacaccgggggcgtccggccggcggagcagttcgcctattatcgcgaggcgatctgccaggccttcatgaatctgacgccggagccggcggccgcagccggctttcctgccagcgtcgaacacatccgtctcggcgatgccgcgatcaaccgcgtcagctttcccgagcacgtggtgcggcgctcggcggccgacatcgcggcgtccgagcgcagctgcttctacctcaatttgaagcttgccggacgttgtcgcattcaacagggcgatcgcgaggtcagcctgtcgcccgggcaggtcggcatcttcgacagcgatcggcagtttgcgcttctgcacgaccgcggaccgcaattgcgcgtcgcctcgttctgggtgccggccgaggccttgcgcgaatgcctgccggcatcgttcggcgtcgctgcggcgcgcgtctccgatgatccctatgtcggccatctcatcgtcgagaccgcgcgtacgctcagcgacggggccttgcgcatctccgaggaggagggcgtgcttctgttccgggcgttgatcgagctcgtcgcggtgagcctgtcgcggcgcagccgggcaggcgcagcggaatctgaaagtctcgccgatgcaactgcgctggcggtgaagcgcgccattcaccggcggctccgcgagcccggccttgcggttgccgatatcgccggtgccgtgggcatcagcgagcgctatgtgcacaagctgctggcgcgatcgggctccagcttcaccgactacatcatcgaccgccggctcgacggcgcggcgagggatctcgcggatcccgcgatggcggatcgtgcgatcggcgccatcgcgttcgactggggtttctcggatctctcccacttcacgcggcgcttcaagcagcgcttcggctgccggccgcgcgactggcgtgcgcgatga

SEQ ID NO: 2446 - DNA, 1146 bp, BradyrhizobiumColbertium
atgcattaccgatcgtcgtggatgaccgaagagctggacacgttccgcgaccagttccgcaagtatctcgccaaggacctggcccctcacgccgagaaatggcgcgagcagaagatggtcgatcgcttcgcctggcgcgggctcggcgagatgggcgcacttctggccagcgtgccggaggaatatggcgggctcggcgcgaccttcgcctatgacgccgccgtgctcgacgatctcgaaagcaccgtgccggagctgacgaccggcgtctccgtgcatagcgccatcgtggcccactacatcctcaattacggctcggaggagcagaagaagcgctggctgcccaagatggcctccggcgagatggtcggcgccatcgccatgaccgagcccggcaccggctcggatttgcaggccgtgaagaccacggcgaagaagcagggcaattcctacgtcatcaacggccagaagacgttcattaccaacggacaggccgccgatctcgtcatcgtggtcgcgcgcaccggcgatgccggtgccaagggcatttcgctgatcgtggtcgagaccgcgggcgccgagggctacaagcgcgggcgcaacctcgacaagatcgggctgcacgcctccgacacgtcggaattgttcttcgacaacgtcaccgtgccgccggaaaacctgctcggcaaggaggaaggccagggcttcgttcagctgatgcagcagctgccgcaggagcgccttgcgctggcggtcggcgccgtcgcctcgatggagcgcgcggtcaagctcgccaccgactacaccaaggaacggaaagccttcggcaagccgctgatggaattccagaacaccgcctttacgctggccgagcgcaagaccgaggcgatgatcgcgcgcgtcttcgtcgactggtgcattgagcgcctgatcgcaaaggatctcgatacggtgacggcgtcgatggcgaaatattggtgctcggaaaagcaggtcgagacggccgacgaatgcctccagctgttcggcggctacggctacatgcaggaatatccgatctcccgcatcttcatcgattcccgcatccagaagatctacggcggcaccaacgagatcatgaagctgctgatttcgaggtcgctttag

SEQ ID NO: 2447 - DNA, 828 bp, BradyrhizobiumColbertium
atggcaaaactgcagggaaaggtcgcgctcgtcaccggctcgggccgcggcatcgggcgcgcgatagcactcaagctcgcgcgtgaaggcgcgcgcgtcgtcgtcaatgacctcgatgccgaaccgggcgacgccgtggtcgcggagatcagggcgctcggcggcgacgccgccgccgtgaacggcagcgtctcggagacgggtttcgccgaccgcttcgtcggagccgcgctggacaagttcggcgggctcgacatcatcgtcaacaatgccggctacacctgggactccaccatccagaaaatgacggacgagcagtttcaggccatgctcgacgtccacctcgtcgccccgttccgcatcctgcgcgccgccgccgagccgatccgcgtcttcgccaggaaggaagccgaggaggggcgcgaggtgttccgcaaggtcgtgaacatctcctcgatcgcgggcctctacggcaatgccggtcaggcgagctattcctcggccaaggcctcgctgatcgggctgacccgcaccatgtgcaaggagtggggccgctacaaggtcaacgtcaattgcgtcgccttcggcctcatcaacacccgcctgacccagccgatcgaggcgcagcagaagaccatcgacgtcgccggccgggacatcaaggtcggggtgcagccgcacatgctggaagccatgtcgcgcatgatcccgctcggccgcggcggcacgccggaagaagcagccgacgccgtctatctgttctgcagcccggaatccaactatatcagcggccaggtggtcgtcgccggtggcggcctgattgtctga

SEQ ID NO: 2448 - DNA, 411 bp, BradyrhizobiumColbertium
atgacggcacccggagacatcagggccggcgaccggatcgtccacaaggtctttccgccgatcacccgtcacacgctggcgctctattgcggcgcttcgggcgaccacaatccgatccatgtcgatctcgacttcgccaaggcggccggatttccggatgtgttcgctcacggcatgctggcgatggcctatctcgggcaggcgctgacggatgcggtgccaccgtcgcggctacgcagtttcgcgacccgattcgtcgccatcacccagcttggcgccaagctgacatgcgaaggcacggtgaccgagctcttcgccgaggatggcgagcgccgcgcaaggcttgcgctcaccgccgccgacgatcgcggcgaggtcaagctcgaaggcagcgccgtcgtcgcgctgtaa

SEQ ID NO: 2449 - DNA, 453 bp, BradyrhizobiumColbertium
atggtcgatcagtccgccgtagggcgcagcttcacgcccgtcaccgcgcgggtggagccgggccgcctccgctattttctcaatacgctgggtgaagagaacccggtctaccgcaacgcggacgcggcgcgggcggccggattcgacggcatgccggtgccgccgacctacttgttctgcctggagatgatggacgtcgacgaccccttcgagatgttcagcgcgctcggcatcgatctcgcccgcgtgctgcatggcgagcagagcttcgcctatcacgcgccggttctggtcggagacaccctgacgttccggccgcgcgtgaccagcgtgacggacaagaagggcggcgcgatgacgctgatcggcattcgatgcgaggtgaccaaccaggacggcgtgcacgttgccgataccgcgcgcaccatcgtcgtccggaacgaggtgacgtga

SEQ ID NO: 2450 - DNA, 1182 bp, BradyrhizobiumColbertium
atgtctgacgtcatcgtcgcaggggtcggcatgattcccttcgccaagccgggagccagcgcgccctatcacgagatggggacggaagcggtcaagctggcgctcgccgatgcgggcctcggctacgacaaggtgcagcaggcctacgcgggctacgtctatggcgattccacctgcgggcagcgcgcgctgtaccatgtcgggatgaccggcatccccatcgtcaacgtcaacaacaattgctcgaccggctccaccgcgctgttcatggcgcggcagatgatcgcgagcggagcgctggattgcgtgctggcgctcggcttcgagcagatgaagcccggcgcgctcggcagcgtctataccgatcgtccgagcgcattcgaggaattcgacgcggcagcggaccagctgatcgacgctcccggcattccgctggcgctgcgctatttcggcggcgccgggctgagccacatgaagaagtacggcactccgctcgacgccttcgccaaggtgcgcgccaaggcgagccgccatgccaagaacaatccgctcgcactgtttcgcaaggaggtcacggcggacgacgtcatgaacgaccaggtgatctggcccggcgtcatgacgcgcctgatggcgtgcccgccgacctgcggcggcgcagccgccgtgctggtctccgagcggtttgccgacaagcacggcatcggcaaggaggttcgcatcgcggcgcaggccatgaccaccgacacgccctcgaccttcaaggccggcgacatgatgcagctggtcggctacgacatggcaaaagaggcggcaggccgggtttatgaaagcgccggcatcgggcccgacgatctcgacgtggtcgagctgcacgactgctttgcccacaacgagctgatcacctacgaggcgctcggcctttgcggcgagggcgaagccggcaagttcatcaatgacggcgacaacacctatggcggccggatcgtgaccaatccgtccggcggattgctgtcgaagggacatccgctcggcgccaccggacttgcgcagtgctacgagctgacgcggcagctgcgtggcacggccggctccacgcaggtcgagggtgccaaggtcgcgctgcagcacaatcttggcctcggcggcgcctgcgtcgttacgctctacaagcggcactga

SEQ ID NO: 2451 - DNA, 744 bp, BradyrhizobiumColbertium
atggattcagcgccgcccgttccgccctcattgccgtcctcttcgccctggctgccgttcgaaagccgccgccgcgcccgcgacgaaaagcgcgaggcggtgctgcgcgccgccgtgcagctgttcctggagcagggctatcatcgcgtgacgctgaacgaggtcgccgagcggctgaacatcaccaagcccgcgctgtacaattatttccgcggcaaggacgagatcctgttcgaatgctggtcgatgggcgccgagctcgtcgacagcgtcatcacggagatcaacggcggcggcggttcggggctggccaagctgcgcaagctggtgcacgcctatgccgcgctgatggcgaccgatttcggcgcgagcctggtgcgtttcgacctgcgcgacctgaccgagcggaacgccgcggtcgcgcgtgccgccaagaagcggatcgacgccaccttccggcgctacatcgccgcaggcacggccgacggctcgatcaggccttgtgatcccaagcttgcagccttcgcgatcgcgggcgcgctcaactggatcggccattggtatcgccgcgacggcgagctgtcgccgagcgaaatcgccgacgagttcacggttcgcctgacggagggcctcgcaaccgagagccggcagcagatgacaaagaagacgccgggggcgccgcaacggcgcaactcaggacgcacgacggcagggaagaagcgtacaggaggaggaacgcgatga

SEQ ID NO: 2452 - DNA, 1557 bp, BradyrhizobiumColbertium
atgaacatcacgcacggactgcggcgcgcgctgcagatcaacccgaagggactcgccaccgtctatggccagcggcgtcgcagctggggcgagctcggcgaacgcgttgcaaggctggccggcgggctgcgctcgcgcggcgtcagtgatggcgatcgcgtcgccgtgctgtccttcaactcggatcgctacctcgagctctacctggcgaccggctgggcgggcggcgtgatcgtgccgctcaacatccgctggagcgcccttgaaaacgaggatgcgctgcgcgactgccgtgcctccgttctgttggtcgacaaggcctttgcgcaggtcggcgcgcagctcgccggcgcaattccgggtctgaagctgatctatgccgacgacggcgaggtgccggccggaatggagagctatgaggaaatggtcgcgggcagtgcgcccgttgccgatgccatgcgcaagggcgaggatctcgccggcatcttctacaccggcggcaccaccgggcgttccaagggcgtgatgctcagccaccagaacctgatggccaatgcgctcaacgctctcggcgaaggactgtttccggcgagcacgatgtacctgcacgcggcgccgatgtttcacctcgccaacggcgcggccatgtattcgctgctgctctccggcggctccaacgtgatcgttcagggcttcacgcccgaaggtgtgatggccgcgatgcagagcgagcgtgtcaccgacgtgctgctggtgcccaccatgatccagatgctggtcgatcaccccgcgatcgggaactacgacctgtcctcgctcaagcacatcatctatggagcctcgcccatcagcgaggcggtactcgaccgtgctgcgcgcgcactgccgcatgtgcgtttcacccaggcctacggcatgaccgaattgtcgccgatcgcgacgctgctgcatgcgaacgagcatgtcggggaggggcgcaggaagggacgtcaccgcggcgcgggccgcgccacgctcggctgcgaggtgcggatcgtcgacgagaacgatcaacccctgcccacgggcgctgtcggcgagatcgtggtgcgcggcgacaccgtgatgatgggctattgggagcggccggaggagaccgcgcgggccgtcgtcgacggctggatgcacacaggcgacggtggctacatggacgaggacggcttcatctatgtcgtcgaccgcgtgaaggacatgatcatctcgggcggcgaaaatgtgtactcggtcgaggtcgagaacgcgctggcgcagcatccctcggtgctgcaatgcgcggtgatcggcgttcccaatgagcaatggggagaacaggtccacgccgtcgtggtcaaacgcagcggtgtcgaggtttcgcccggcgagctgatcgagttcacgaagacgttgattgccggttataaatgtccccgcagcatcgagatcacagaaacgccgctgccgctgtccggcgccggcaaggtgctcaagcgcgagctgcgcaagccgttctgggaggggcgggaacggcgggtcagctag

SEQ ID NO: 2453 - DNA, 675 bp, BradyrhizobiumColbertium
ttggtcgagacgcgcgagctcaagctcgacatcgaacgcattggtacggtctcggcgatcctgacgcggccggaccatgcgcgcgcctgctacgtgctggcgcacggcgccggcgccgatatgcggcattccttcatggagaaggtcgcggaggggctcgcgagccgcggcatcgcgaccttgcgcttcaattttccctacatggagaagaaacaagggcgtcccgaccagccggctgttgcgcatgccgccatccgcacggcagtcgaggaggcggcgcggctgtgtcctggcctgaaacttgttgccggcggcaaatcgttcggcgggcgcatgacctcgcaagcgcagtcgaaggcaccgctccctggtgtcaagggcctcgccttcctcggctttcccctccatgccgccaagaagccgtcgtccgagcgcgccgagcacctcgccggcatcgcgatcccgatgctgttcctgcaaggcacgcgcgacgagcttgccgatctcggccatctcaagccggtgaccgaaatgctgggcgcgaaggcgacgctgcatgaggtcgaaggcggcgaccactccttcgcggtgctgaagaagtccggccgcagcaatgacgaggcgctcaaggaggtgcttgatactctcgcggcctggatcgaccagcgcgcctga

SEQ ID NO: 2454 - DNA, 975 bp, BradyrhizobiumColbertium
atgcgtatctgcattttcggtgcgggcgccgtcggcagccacattgcggtacggctggcgcgcgccggccacgaggtctcgtgcgtgatgcgcggcgcgcatctcgaggccgcgcgcgcgggcggcctcaagctgcgcgtcggcgattccgaggtcggcgccaaggtgaacgcaacaggcgatccggcccagctcggcccgcaggacgtggtgatctcgacgctgaaggcgacggcgctgcagggactggtctccagcatcaagccgctgctccaggacgacaccgccatcgtgttcgcccagaacggcattccctggtggtacggtatcggcctgccgccgcggcatcccgccccgcccgacatttcatttctcgaccccggcggacgcttgcgcgcctgcatcccgaaggagcggatcatcggaggcgtcgtgttctcctccaacgaggtgatcgcgccgggcgtggtgcagaacctgaccccggaccgcaaccggcttctgatcggcgaatgcgacgaccgcaattgcgagcgcatcacgaagctccgcaacgtcctcaacgatgcccggctggaatcgccgccggtggccgagatccgcgaggcgatctggtcaaagctgctgaccaacatgtcgctctcggtgctgtgcctgctcaccggccagaccgcgcgcggcgtgcgcgacgacccggccttcgcggacgtgattccgcgcatgctgaacgaggccaacgagattgcccagcatttcatcccagaggtcaagcgcgtcacgcgcagcggccccgccccaaatcacaagccgtcgctgctgcaggactacgaactcggccgcgccatggagatcgacgtgctggtcaaggcgccgcaggccttcgcgcggaccgccggcctgtcgacgccgacgctcgacctgatcggcgcactggcgatccagaaagcgcgcgacaaggggctctattcagcctga

SEQ ID NO: 2455 - DNA, 804 bp, BradyrhizobiumColbertium
atgaccgccaaccccgtcctgtggacatcagatgagcgtggggttgcgaccgtcacgttgaaccgcccggaggtcaacaacgcctatgatggcgcgctgatcgcgggcgtgctcgcggccatggacgatctgtccaagaagccgaacctgcgcgtcgtcgtgctcaggggcaacggcaagcatttccaggccggcgctgacctcaagtggatcaatagcgtgcggccgcaatcggctgaggccaacgaagcggcctcgcgggcgacgttcgaggctgtgcagcggctcaacacgctgccgatccccaccgtcgcgctggtgcagggcggctgttttggcggcggcaccggcgtgatcgcggcctgcgacgtcgtgattgccgcggataacgcgttgttctcgattaccgaggtgcgctgggggctgacggcggcgatcatcatcccgcagctctgcgacgccattggtgtacgccaggtccgccgctacgcgctcaccggggaacgtttcggcgccgaggacgcccgccgcatcggcctcgtccacgaggtggtgccgctcgccgatctcgaaggcgcaggcagcaaggtggtcgagcaattgctcgccaacggaccggatgcgatggccgagaccaagcgtctcgcgctcgagagctcgttcggcggcatggcggtgggcgatgccgcctacacccggctcgtgcagttgcattcgctcaagcgacagagtgcggaggcagcggaagggctggcgtcgttcgccgagaagcgggcggcgaattggggcggcggtaagggctga

SEQ ID NO: 2456 - DNA, 270 bp, BradyrhizobiumColbertium
atgtatcgtatggccaagaaatccgcgctcgttgccctggtcgccttcgtgctcccatcgggccatgcagcggcattggagcagaactgccgcttcatccgggaaaagcctgaccgcgaagcctgctacaagcggcaggaggatgagcttgcggccaagcgcaggcccgagccgcctcgcgaaagtaccgcgctcgaaacgctccgcgagatgcggcagaacgacgacgcagtctatcgcagcatcaacaacatctgccgcggctgctga

SEQ ID NO: 2457 - DNA, 1365 bp, BradyrhizobiumColbertium
atgcggcccaggatgatcgaagaaccggcacggaaagtgccgctctatggcgaatacgaagtggtcgtgcttggcggcggtccggccggcatcgtggcggcggcctcggcctcgcgggccgggcggaagacgctgctgatcgagcgttacgggtttctcggcggcatgggcaccgcagccggcgtcaccaacttctgcggcctgcatggcaatgtccatggcgagcaccggcggctggtgcagggcatggcgtcggagctgctggcgcggatcgatcgcttgaacggcctgaacacgccgcatctgatcctcggcaaggtctatgcgcaggcctacgacaccgcggcctacaagatcgcggccgatcaactgctcgccggtcaccaggtgaacatccttttccatgcgctcggcgccggcgtcgtgatgggggatgaccgccgcatcgacgcgttgctggtcgagaccaaggctggccgacaggcggtgcggtccgagatcttcatcgattgctccggcgacggcgatcttgccgtgtgggccggcgcgccgttcgagctcggcgatgagcacggtcatccgctctacccttcgatgatgctgcgcctcaacggcatcgatccggagaaggcgggcgatgcgtggcgcaccattccgcaattgatggacaaggcccttgcggccggcacccacacattcccgcgcaagagcgcgatcgtgcggccgcaaaagtccggcatcgagtggcgggtgaacttcacgcaggtcgcgcgcgaggacggccacgccatcaacggcgtcgagcccgacgatctcacccgcggcgagatcgagggccgcaagcaggcgctggccgcgttcgagttcctgcgtaccgtgccgggcttcgaaagatcctatatcgtcgacttgccgccgcagctcggcatccgcgagacccgccgcatcaagggcggctaccagctcagcggcgaggacgtgctcggctgcgcctcgttcgaggattccatcggcgtcaatggctggccgatcgaggcgcatgttcccggcgacgtcgtctttacattcccgccgatcccggactcgcgcggctacaacgagctgccttaccggatgctggtgcccgaaggcgtcgacaatctcctggttgcgggccgctgcgcgtccatgacacatgagggccaatcggccgcgcgggtctccggtgcctgcttcgcgatgggcgaggccgcaggttccgccgccgcgctcgcgctcgctggaaatcggattccgcgcgacatccccattgaaaaattgcaggaaaccttgaaacaacagggcgccttcgtcgggcgggaccaggcgctgcctgaaggcctgtag

SEQ ID NO: 2458 - DNA, 1005 bp, BradyrhizobiumColbertium
atgatcgggatggtgcggctcgtgctcgcgggcctggtggcgatcatggtgatgggtacggcgcgggccgaggacggcctgaaggccaagatcggcgtgctccgcctgtcctcctccgcgcccgtcttcatcgcgcaggataagggctatttccgcgacgctggcctcgaggtcgagctgaaattcttcgatgcggcgcagccgatcgcggtcgccaccacctcgggcgacgtcgatttcggcatcaccgccttcaccgccggtctctacaatcttgccggcaagggcacgctgaaggtgatcggcggtatgagccgcgagaaggccggctatcccctgatcggctatttcgccagcaacaacgcctatgcggccggcctgaaaacgccgaaggacctcgccggcaagcgcgtggcgatgacgcaggttggctcgagctttcactattcgctcggcctgctcgccgataaatacggcttcaagctcgccgatgtgaggatcgtgccgctacaatcgctttcgaatgcggcggcagcgctcaagggcgagaccgtcgatgcggcgctgctgccgatctccacggcgcgcaagctgatggacgatggcggtgcgaaattcctgggttgggtcggcgacgaaacgccgtggcaattgggtgcggtgttcgcctcgccgaagacactgaccaacaagatgctggtgacaaaactgctcggtgcgctcgccaaggccgatcgcgaatatcacgacgtcatccttgccgcgatgaaggacggcgtcgccccgattaacgagcagacaaaaccgctgctggagatcatcgccaaatacaccaacttgccggtcgagcaggtggtcggcaactgcgcctatatcgatcccgacggcaagctcgacgtgaagaacgtcgacaaccagatcaaatggctgcaggagcagggttttgtcgacaagggctttgatgtgaacacgatcatcgccaaggactacgtgaaggcggactga

SEQ ID NO: 2459 - DNA, 774 bp, BradyrhizobiumColbertium
atggacctgatcgccagccacatttcccaccgcttcggcgatctcgccgtactcgatgacgtctcattcacggtcggcgccggcgaggtggtggccgtcgtcggtccttccggttgcggcaagagcacgctgctgtcgatcctgggcggcctcttgcaaccgacctccggcgcgcccgagttgcgcgggacgccgccggcggacagtctcaatccgctgactttcgtattccaggattttgcgctgctgccctgggccacggtcgaggagaacgtcgaattcccgctgctgcacacccagctcacggccacgcagcggcgcgcgttagtcgaggacgccctgcgacgaaccagcctgaccgattttcgccagacctatccaaagcagctctccggcggcatgcgccagcgcgtcggcatttcgcgcgcgctggcggtgaggcccgccattctcctgatggacgagccgctctcggcactggattcgcagactcgcgaactcttgatggaggatttcgtccgcctgctctccgatggcggcatgggtgcggtctatgtcacccacaatctcgaagaggcggcgcggctcgcggaccgcatcgtcgtgctgtcgcggcggcccggacgcatccgcgaggttgtgacggtgccgatgacgcgcactgagcgcggtgagaccgcggcgcgtgaaaggctgctggcgctgcagacgcagatctggtcgctgatccgcaacgaggcgatcgatgccgagcgcgaggtccagcatgcttga

SEQ ID NO: 2460 - DNA, 825 bp, BradyrhizobiumColbertium
atgcttgatcgcgcgcctgccgaggagaccttgaaggatcaggcgacgcgccgcgtccgtttccgcggcgccggcttcgtgcctgcgtcgagtcggttcggcggctggttcgcgctcgcgcttgtcatcgcgatctggcaggccgccagcagcgccggcctcgtcaatccactgttcctgccggcgcctaccgcgatcgcgcgcgcgatctaccagctcgcgatctccggtgcgctctggcagcacgtttcggcctcgctgctgcgcattggcatcggctggctgttgggaacggcggctggcgtcgccgtcggctttgccatcggcctgtcgcggctcgcgcgcagcgtcggcatcaccttcatctcggcgttgttcccgatcccgaagatcgcgctgctgccgcttttgatcctttggctgggcatcggcgaggagccgaagatcgcgaccatcgcgctcggggtgttcttctcgaccgcgatctcggtctatagcggcgttgatgcggtgccgcgcaacctgatccgcatggcgcagagcttcaacgtgccgttcgcgaccatcgtgcgcaaggtgatctggccgggagcgctgcccgcgatccttgccggcttccgcatcactgcatcggtcgcgctgctcctcgtcgtcagcgccgagatgatcggcgcgcaatatgggatcggggccttcgtcttgcaggccggcaatttgatgcagacggatcagctgctcgcgggcgtggtgatcctgtcggtgttcgggctcgcggtcggcaaggtgatcggctggctggagacgcggctgctgcactggcgctga

SEQ ID NO: 2461 - DNA, 1041 bp, BradyrhizobiumColbertium
atggaagccgtggccaagacgccggaacgcgaggcattctacagaaagatcgacggcgaaaacctcaccgcgctgtggacggtgatgagcgatctcatcacgccggagccgaagagcgcctgccggcctcacctctggaaattcgacgtcatccgcgattacatgacggaagccggcaagctgatcacggccaaggaggccgagcggcgcgtgctggtgctggagaatcccggcctgcgcgggcaatccaagatcacgacgtcgctctacgccggcgtgcagatggtggtgcccggcgacgtcgcgcctgcgcaccgccacagccagtcggcgctgcgcttcgtgctcgaaggcaagggcgcccacaccgcggtggacggcgagcgcaccgcgatggagcccggcgacttcatcatcacgccctcgatgacctggcacgatcattccaatgaaaccgatcagccgatgttctggctcgacggtctcgacatccccctggtgcagttcttcgactgctccttcgcggaaggttcgaaggaggatcagcagaagatcacgaagcccgccggcgacagctttgcgcgctacggccacaacctgttgccggtcgatgtgaagcgcagctcgaagacctcgccgatcttcagctatccctacgcctacacccgcgaggcgctggagaaggcgcgcacgagccaggagtgggacgcatgccacggcctgaagctgaagttcagcaatcccgagaccggcgatttcgccatgccgaccatcggcaccttcatccagctgctgccgaagggcttcaagaccgcgcgctatcggtcgaccgatgccaccgtgttctgcccgatcgaaggcaaggggcgcagccgcatcggcgatgccgttttcgaatggggcccgcgcgacctgttcgtggtgccgagctggcactgggtcacgcacgaggcggacgaggacgcggtgctgttcagcttctcggaccgcccggtgcagcagaagctggatctgttccgcgaggaccgcggcaacgcgtga

SEQ ID NO: 2462 - DNA, 633 bp, BradyrhizobiumColbertium
atgaagctgcacggctatttccgctccagcgccgcttaccgggtgaggatcgcgctgaacctcaagggcctcggcgccgagcacctgccgcaccatctgcgcaagggcgagcaatgcgcgcccgcctatcttgccatcaatccgcaaggcctcgtgccggcgctcgaaaacgacggcggcgccgtgctgacccaatcggtcgcgataatcgaatggctcgacgagacccaccccaatccgccgctgctgcccaaggatccgctgcgccgcgccaaggtgagggcgttcgcgctcgcaatcgcctgcgacacccatccggtacagaacctgaaggtgctggcgcggctgcgcgagctgggcctgcccgaggagaaggtccaggattgggcagcctgggccaatcgcgagggcctgtcggcatgcgagaccctgatcagggacgagccgggcccgttttgcttcggcgatgagccgagcctggccgatctctgcctcgtgccgcagctcaccaatgcgcgccgcttcggcgtcgatgtctccgcctatccgcgcctgctcaaggccgaggccgcggcgaaggcgctgccagcgtttgcggatgccgcgccggagaagcagcccgatgccgagtaa

SEQ ID NO: 2463 - DNA, 513 bp, BradyrhizobiumColbertium
atgccgagtaagccgcttcctccgatcacgatggacgcggtctatgccgcgccgggttatctgttccggcgcatgcagcagattgcggtctcgatcttcatggaggagtgcaaggcattcgatctcacgccggtgcaatatgccgcgttgatcgccattcacacccatcccggcatcgacgccacgcgcctctcggcggtagtcgccttcgatcgctccacgctcggcagcgtgatcgaacggctccaagccaaggattacatcgagcgcaagccggcgccggaagacaagcgcatcaagctgctccccctgaccagatccggcgccgcgatcctgcgcgagatcatccccgccgtcgagcgcgcccaggcgcgcatgctggagccgctgaagcccgccgaccgcaaggtgttgatggaccttcttgggcagctcgtcgatctcaacaacgaggcgtcgcgcgtgccgctgcgggcggaggatgcgatggagcatctggggaaggcgggctag

SEQ ID NO: 2464 - DNA, 1614 bp, BradyrhizobiumColbertium
atgagcaacgagattcgcgaccaggtgccagccgacagcgcgggggcacgcgagatcggctttgtcgtccccgacacctacaatgccagccgcgtgctgttcgacaatctcggcaagggccgtggtgagagatgcgcgctcatgggcccggcgggtacgcgaacctatgccgaactctgcgcggaagcgtgccgctggggcaatggccttgcctcgctcggcctgaagcgcggcgaccgcgtgctcctgttcctcgacgacacgccggcctatccggccgcgttcttcggtgcggtgcgggccggcttcgtgccgctcctgatcaacacgctgacgccgccggacctgctgcaattctatctcgccgattccggggcgagtgtcgcggtcgcggacgcggagttctgcgcgcgcttcaatgcggaggcctgcaaggacacccggctgcatacgctgatcgctgtcaacggcgcgcccggcgaccacgccgcaccgagggtgctcgcggcggcagactggcttgcgcaattctccacccagctgagggaagcggacacccatcgcaacgacatggcgttctggatgtactcgtcgggctcgaccggaaagcccaagggcatcgtgcatctccagcacgacatggcctatagcgatctcgccttcgcgcagaacatcctgaagctgacgcccgacgacatctgcttctcggtgccgaagatcttcttcgcctacggcttcggcaattccgtcaccttcccgttctcggccggagcggcgacgctgctgctgccgggtcagccgaagcctgccgcgatcttcgccgcgatcgagcggtacaagccgaccgtgttcttcggcctgccgacgctctacacatcgctgaccaaggccgaaggcgcggacaagacggatttctcgtcattgcgcatgtccctttcggcggccgaagtgctgtcggccgaggtgttcaacggctggaagaccctgaccggcctcgaaatcgtcgagggtctcggctcgaccgaggtgctgcacatctatctgtccaaccgtccggagcagaagaagctcggcgccgccggcctgcgcgtgcccggctacgaggtcgcattgcgcgacacggacggacgcgacgtcggcgacaatgaggaaggcatcctgtgggtccgcggcgattccaatacgccgctgtactggaaccggccggacaagtccgccgagaccatccgcgacggtggctggatctataccggcgaccgcttcatccgcgatgccgacggcttccattttttccgcggccgcgccgacgacctcatcaagatctccggccaatgggtctacccgctcgaggtcgagctgtgcctcgccgaccaccccgacatccgcgaatgcgctgtgttcgccgccgaactgccggaccgccgcatgacgctgaaggcggtggtggtgatgaacaaccgcgccgttgaccacggcgaaacgacacgcaggctgcaggactatgtgaagggcaagctgctgccctacaaatatccgcgcgaggtcatcttcatcgacgagctgccgaagaccggcacggggaagatcgatcggcaggcgctgctcaggttgtag

SEQ ID NO: 2465 - DNA, 1140 bp, BradyrhizobiumColbertium
ttgcggatcgccgtgattggcggggggcccggcgggctctacttcgcctatctctggaagaagcgtcaccccgaggatcaggtcgatctgttcgaacagaacccggccgacgcgacctggggctttggcgtcgtgttctccgatcaggccctggagttcctgcgcgccgacgaccccgaaacggtcgatgcgatcgcgccgcacatggagagctgggagaacatcacgctgcacctgcacggcgacagcgtcgccatcgatggcgtcggcttctcctcgatcgggcggctcgagttcctcagattcctgcagcagcgtgcgctcggcgtcggagtgacgcctcgcttcgacacgcagatccacaccatcgaccagctcaacggccatgacctgatcgtcgccgccgacgggctgaactcgctggtgcgccgcgccttcgaaggcgatttcggcacctccctgtcctactcctccaacaagttcgtctggtacggtacgtcgaaacgcttcgacacgctgtcgcagaccttcgtgaagaccgagcgcggcgccttcaacgcccatcactaccgttattcgcccagcatgagcaccttcctggtcgaatgcgatcacgccacatggcaggcctacggtttcgcctacaaggacgtcgagcaatccaagggagtctgcgaggaggtgttcgccgacacgctcggcggccattgccttgtctccaacaaatcgatctggcgcaactttccctgggtctggaacgagcactggtcgttcaagaacatggtgctgctcggcgacgccctgcattcggcgcatttctcgatcggctcgggcacgcggctcgcgatcgaggacgcgatcgcgctggtcaaggcgctggaatccgacgcgcatcttgcgacggcgctgcatcgctatcaggccgcgcgcaagcccatcgtgcagaagctcgtcaacgccgcgcgcacgagtgcgttctggtacgaacacttcgccgagcacatgaagcttcccctgctggatttcgcctacagctacatcacccgctccggccgcatcgacgacgcacgcctgcgccacatgtcgccggccttcatggcgcgctacgaggccgccaggaatgccggggatgcggcatga

SEQ ID NO: 2466 - DNA, 957 bp, BradyrhizobiumColbertium
ttgcaggtggggctgaagcggccaatgatatcggtcgcgggcaccactcgcgacgattgcaatcgcatcacatctcaggaagccgacggcgtttgccgacaggggcgggaaagcagtcagatgttcaatacgttgaagcacacatccgcgcgcgtgaccttgctggcggcagcgctcctcgcaacggcaacagtggcgatcgcgcagacaccgaccgaggcccagaagagcgcgatccgctcttcatgtcgttcggacttcatggcacgttgttcgagcgtgacgcctggcggcgcggaagcgtttcaatgcctgcagaagaacatgtccagcctgtcaccgggatgccagactgccgtgcgcgcgctcgagcctccggcggcgccgaaggctgaagccgctccggctgcacccaagaccgaggccgcgccggcggcacccgcagcaccgaaggcccaggccgcgcctggtgtgcctcccgcagaacctgccaagccggccactgccgcggcgcctaagactgctcccgccaagcagccgagcactgcccaggtctcggccatcaagagcgcttgccgtggcgattatcccaaggtctgcgccagcgtgcccccgggcggaacggccgcgctcgaatgcctggagaaaaacaaggccaaggtctctccctcctgccaagccgcgttgggcgcggcatccggcacagcggcgacggctgcgcccgcaggcgcagctcccgcgacggcgcccgctgcggcgccgaccgtgctcgtgctccgcccgctgcggccacgcgagcagctgttcgtcgcccaatcggcctgcggagccgacatccgcgcgatctgcgccggcgtcgaggctggcggcggccgcatcatccagtgcctcgccagcaatgccgcatcgctgtcaccggcctgcagggacgtgctggggcgattcgccgcgcgatag

SEQ ID NO: 2467 - DNA, 213 bp, BradyrhizobiumColbertium
ttgatcgtggtgaagcggctgaccatgcagggcttcatcgtgatggactacatgaaggagagccagcgcgcactcgccgacctgcaggcatgggtcaagtccggcagactgaaggtgcaggaagacatcattgatggcctcgagaacacgccgaaggcgctgatcggattgctcgcgggcgaaaaccgcggcaagcgcatgatcaggctttga

SEQ ID NO: 2468 - DNA, 837 bp, BradyrhizobiumColbertium
ttgaacgccggcatcgataatcagaccatcgacgagggaatgtccatgagcagcaacgtcaatcgccagattctgctggtggagaagcccagcggcaagctgggccccgagcatttcaagatggtggagggcgccgtgccggagccgaaggacggcgaggccttgctgcgcgtccgatacatctcgctcgatgctgcgaaccgcgcctggatgcacggtgcgacctatcgctcggctgtcgaagccaacagcgtgatggccggcggcgccatcgccgaggtcgtcagctcgaaggcgcccgagcttgcgcccggcgacatcgtattcggcgacaccgggtggcaggaatatgccgcggtgccggcgaagcatctcaccaagatgccgaagctcgagccgatgacgcacctgctcagcgtgttcggcatcgccggcctcaccgcctatttcggcctgctggagatcggcaagcccagggagggcgagacggtcgtggtctcggcggccgcgggctcggtcggctcgatcgtcgggcagatcgccaagatcaagggatgccgcgtcgtcggcatcgccggcggagccgagaagtgcaactggctgacctccgagctcggcttcgatgccgccgtcgattacaaggacggcgcattgttcaaggcgctgcgcgcagccgctccgaaaggcatcgacgtctatttcgacaatgtcggcggggacattctcgaagcctgcctgccgcagatgaacaattacgggcgcatcgcctgctgcggcgcgatctcgcaatatgacggcgcgcccctgcacacggcccgcgcggcgtgcctggattga

SEQ ID NO: 2469 - DNA, 147 bp, BradyrhizobiumColbertium
ttgcacaacgggaacatcctgccaacggctggacgccgacatcctgctctccggcgtggcgcgcgcgacaacgcgccgctcaagcacatctctccgagcgtgatctcgatgtggcgtgtgccggccgagctgctcgctgccgtctga

SEQ ID NO: 2470 - DNA, 210 bp, BradyrhizobiumColbertium
atgaatgaagcgcaccaattggctctggcgatgttcgtgctcgcctgtgcggccgtgacactggtcgcggggcagctctacatgcagcagagcatggatgcgcagactttcaccggcagacacgtgccggcgcgattgctgggcacttcgccggccacggagatgcgcggtcacgcaagaccggatttcaacgtgacgggacggccctga

SEQ ID NO: 2471 - DNA, 201 bp, BradyrhizobiumColbertium
atgaatcattcgatttatagcgccgaccgcgccactcattcgaggatcgtcatcgtcgcgctgctggttgccgcggccgtcgccggccttgccgtttcccgccacgccgatgtgagaaccgtatcggtcgagagggccgccgtattcaagcctagcaaggcggtggttctgagcggttcggccatcgtcgccgtccgctga

SEQ ID NO: 2472 - DNA, 114 bp, BradyrhizobiumColbertium
atgcgaatgagcagaactgaggccgggattgccaacaagccgtttgacgcggcgttctggtccgttgcagccgtccttagcggggcggttgtctatctcgcccgtctgatctag

SEQ ID NO: 2473 - DNA, 804 bp, BradyrhizobiumColbertium
atggcgagcggcgagcgaatcttcgttcaggcgatcaggcgctattgcgcggagcatggcatcgcggtcgatgtccgcgcgggtggctggctgatcgcgatgcgccagggtgcgaagcgtcacttcgccttcggctacgacatcggcctcaacagcgccatcgcccaccgcctcgccaatgacaagtcggccaccgccgaggtgctgacgctggcgggcgtgccgtgcgttccgcatcacctgttcctcaatccgagcctgggcattcacgtcgccggcaccgattggcgccgtgagatgctgatgctgctcgcccagaattcgcaaggcgtcgtggtgaagccgaacgagggcacctcgggccgggccgtgttcaaggcgacgacggaggcggagctcgaccgcgcggttcgcgacgtgttttcgatgagcgccggactcgtgatctcgccctatgtcgcgatcgaggacgaagtccgtgtggtgctgctcggtgatctcccgctcgtcgtctacagcaagcggcgtggcacagattggcggcacaatctcgatgccggcgcaacgccgatattgctcggcgatggcgaggttcgcgcggcttgcgtcagactcgcaagcgccgccgcaagcgccatcgggatcgcgttcgcgtccatcgacgtggtccgcgtcggcggcgaatggaaagtgctcgagatcaattccggcgtgatgatggaagcgctgggcaagctgcatccggaaatggtgcatgcggcgtatgaggcggcgctggaccggatcttcgaggcggagcactga

SEQ ID NO: 2474 - DNA, 855 bp, BradyrhizobiumColbertium
atggcaatggtgtccgcccccatttcagggccgggctacgcttttgcccgaaagccgcaactattcggaatatcgagaatcatgagcgcgttttaccgagagaaggttctttccgtccaccattggaccgacacgctgttcagcttccgcgccacgcgcgataccggcttccggttccagaacggccagttcgccatgatcggcctcgaggtcgacggtcgtccgctgctgcgggcctacagcatggcgagcgccaaccacgaggaagagctggaattcttctcgatcaaggttcaggacggcccgctgacgtcgcgcctgcagaagatcaaggaaggcgacaccatcctggtcggccgcaaggcgacgggcacgctgatcaccgacaacctgcttcccggcaagcggctgatgctgctgtcgaccggcaccggccttgcgcccttcgcgagcctgatcaaggatcccgaggtctatgagcagttcgagagcatcgtgctggtgcacggctgccgccaggtctccgagctcgcctatggcgagaagctcgtcgcgaccctgcgcgaggacgagctgttcggggagctgctcgcggacaagctcgtctattatccgaccgtgacccgcgagccgttcaggaatcgcggtcgcatcaccgacctcatcagctccgagcagatattcaacgacatcgggcagtcgcccctcgacatcgaaaccgaccgcatcatgatgtgcggcagcccggcgatgctcgaagagctgaaggcgatgttcgagagccgcgacttcgtggaaggctccggcaacaagcccggccattttgtgatcgagaaggccttcgtcgagcggtaa

SEQ ID NO: 2475 - DNA, 132 bp, BradyrhizobiumColbertium
gtgatcgtgcgccacgttcagctcgtcgtcccggctctgccgctcaagcttgcccgggacggcagctctgtctggtggcggctgtcgcccttccatcctcttgctgcaccgcaacccggtccatcgggctga

SEQ ID NO: 2476 - DNA, 1695 bp, BradyrhizobiumColbertium
gtgatcgtggccgaggacaacaagacgcagcaatctcccaaacgtctgccgctggcggaagaggggatcatggagaccctgctgcttccattctcgccccgcttcattgtgctgacgatctgcgcgatcgtcaccgcgcttctcatcggcatcggcctggcggatcgcaagatcttcgacatcatgctggtcccgatcctgatcttcggcgcgctgacgctgctcggggtgcgcgatctcctgcagaagagccacgcggtgctgcgcaactacccgatctccgcgcatatccgcttcctgctcgaagagatccggcccgagatgcggcagtatttcttcgagagcgagaaggacggcatgccgttctcgcgcgacacccgcgcggtggtctatcagcgcgcgaagatggagctggacaagcggccgttcggcacccaggaggacgtctaccgcgaaggctacgagtggatgcatcattcggtgtcgccgaagccgcatgccgcggaaaaattccgtgtcgtcatcggcgggccggattgcgcaaagccctactccgcctcggtgttcaacatctccgcgatgagttttggcgcactcagccccaacgccgttcgggcgctgaatgccggcgcgaagaagggcggcttcgcgcacgacaccggcgagggcggcgtcagcccctaccaccgcgagatgggcggcgacatcatctgggagatcggctcgggctatttcggctgccgccatctcgacggcaccttcgatcccgaagcgttcgcgcgcgtcgcgagcgacgaccagatcaagatggtcgagctcaaggtcagccagggcgccaagccgggccacggcggcgtgctgcctgcggcgaaggtctcggaggagatctccaagatacgaggcgtagcgatgggtgaggactgcatctcgccggcctcgcaccgcgccttctccacgccggtcggcatgatgcagttcgtcgccgagatgcgccgcctctccggcggcaagccggccggtttcaagctgtgcatcgggcacccctgggagttcctggcgatctgcaaggcgatgctgcagaccggcatctatccggatttcatcgtcgttgacggcaatgagggcggcaccggagccgcgccgctggaattcatggatcatctgggcatgccgatgcgcgagggcgtcaatttcgtccacaacgcgctggtcggcatcaatgcgcgcgaccgcatcaagatcggcgcctcgggcaagatcgcgaccgctttcgacatggcgcgcgcgatggcgatcggcgccgattactgcaactcggcgcgcggcttcatgttctcgctcggctgcatccagtcgctgagctgccacaccgaccgctgcccgaccggagtcgcgacgcaggatccgacgcgcgcccgcgcgctctacgtgccgctcaagatcgatcgcgtgtacaattatcaccacgcgacgctgcactcgctgacggagctgatcgccgcggccggcctcgaccatccgcagcagctgcggccgatccacttcacccagcgcagctcgacgacggacgtgaaatcgtttgcgcagctctatccggcgctgcgcccgggcgagctgctcgaaggcactgaagacccgcgatttcgcgacgcctggcgaatggcgcgcccggagacgtttcagccggcgctgtag

SEQ ID NO: 2477 - DNA, 207 bp, BradyrhizobiumColbertium
gtgctgaaggccggaacgatcgagttcggcggcggcgcgatcgactgcaccgtccgcaacctttccgacaccggtgcggcgctcgatgtcacgagccccgtcggcatccccgagcgcttcaccctcttcgttcaggcggatggaactcaccgggcctgtaccgtggtatggcgcaaggaaaggcggatcggcgtgaagttcgggtaa

SEQ ID NO: 2478 - DNA, 1296 bp, BradyrhizobiumColbertium
atgctctcactcgaactcgctatcgtcgtcgtgctgatcgtcatcaatggcctgctctccatgtccgagctggccgtggtctcgtcacgtccggcgcgtctgtcgctgctcgcggccaagggcgtgcgcggcgccgagcgggcgctgacgctggccgccgatcccggcaagtttctctcgacggtgcagatcggcatcaccctggtcggcgtgctctccggggcgttctcgggcgcgacactcggacagcggctgacgcaatggctgctcgagctcgggctgtccaagggcattgccgacatcgtcggcgtcggcatcgtcgtcacgctcatcacctacgcgacgctgatcgtcggcgagctggtaccgaagcaggtcgcgcttcgcgaccccgaaagcatcgcagtcagggtcgcgcccgcgatgcacgtgctcgcgaaaatatcgctgccgctcgtctttctgctcgacgtctcgggaaagctgatcctcacgctgctcggccgcggcggcaaagcggacgagaaggtctcggaggacgagatccatcacctcgtcagcgaggccgagagcgcgggcgtgctcgagcccggcgagaaagagatgatcgcgggcgtgatgcggctcggcgatcggccggtcggtgcggtcatgacgccgcgcacggaggtcgacgagatcgacctgaacgacgatccggcggtcatccaggaaatcatcgccaagagcccgcattcgcgctttcccgtctccgacggggaccgcgacacgccgatcggcgtgctccaggccaaggacctgctggtcgcctatatgaacgagcgcgatcctgacctgcgcgcgctggtgcgcgaggcgcccggcattccggtgtcggctgatgcgcgcgacgtgctggccatcctgaaagctgcgccggttcacgtcggtttcgtctatgacgaatacggttccttcgaaggcatggtgacggctgccgacatcctcgagtccattgtcggggccttccattccgaggcgggaccgccggagccggcctatgtcaggcgcgccgacgactcgctcctgatctccggctggatgccggccgacgaattcggcgagctgctcggcatcgaattgccgccgcaccgctacaacacagtggccggcctcgtgctgcaacagttcaacgtgctgcccagcgccggcgatgccttcgacgccggcggctggcgcattgaggtggtcgatctcgacgggcgcaggatcgacaagatcctggcgacccggcggagcgagcaggccgcggcgtga

SEQ ID NO: 2479 - DNA, 1554 bp, BradyrhizobiumColbertium
atgatcattggtgcgcgtcgcctgctgcactgcctcgccggcgatgcgcgcggaatcctggacttgacggctgatctcgtccacagacgaggccatctcctcggccgcggcggcgacggtctgcacgttggtcgaggcctgctcggacgcggccgccaccgtcgcggtgaccttttccgactgctcggccgtgctcgtcaacgttcccgccgacgcttccagctccgaggaggccgacgagacggtattgatcacgtcgccgatcatggcttcgaactcgcgcgcgatctggtccatgcgctggctgcgcttgagcttcgcttcggcttcggccgcggcggcctcgtcggcggccttcttggcgagcagcgaatccttgaagtgctggagcgagcccgcgacctggccgatctcgtcgttgcggcccgttgcagggatctcgacctcgtgccgtcctgcggcgagcaccccgatcacgtcggcgagcttcgcaagcggcgtcaccacgcgcctgcgcaacatgatcgtcacgccagcgagcgtcccgagcagcgccgtcacgacgacagcggcgagcgcgagcatcgccagcgcgccgtcgcgcgcggcggaggcgcgcgcggctgcttccgccagcgcggcgtcacgcacgccgtagaacatctggatcgccggcacgatgactttcgcgagctcgtccgccgtggcgccgtacttgccgtcgctccgggccgcaggaagctccttgtccacggcgaccgctgcttgtccgaagtaggattccgttgccgccttcagcgcggcggcgatgcgggcgggatttccaagctggtcgactccggcctcgatgcgctcgcgatcggcctccacgcgtccctgcatgcggtccatcagcgacagttcagccgcggtgagcgggcggcgtgcggagagcgccggggacagcgtggcggcgcggctgccggccgagacacgcagatcctgagccgttcgcgccaggctcaggagtgcggccagcgaggaatcgacattgacgacctttgcctcgagacggttcatgaccggttcgatgtggccgatgacctcggcaacaccgggcaggaagccctttgtcgccgcgctgtcacgcgccgcgagcggaacgctcatcgcccgatcggcagcggtggtgatatccttcagtcgccgtgcggcccggtcgatattctcggcgatggcggccccgtcatccagcaccaggacagcgcgccgtgccgcctcgaagcccgcctcggcagctttcgcagccttcgtcgcagcttcgagctgcgcctgcgtcgcagcgccttcctggaagatcggtccgatgtagggcgcgcgaaggctcgcgacgtgctggctggccatcagcgtcgcgccaaaagcgtcgacggttttgatcgcgtccgagcggttcgtgaagatgcgcgcctggggtatcagcacctctgcgccgaggatgactgcaaataccgtcaccgtcagcatcgacagtgcgaagagcttcccaatccgcatctttcagtccccagctag

SEQ ID NO: 2480 - DNA, 258 bp, BradyrhizobiumColbertium
atgtccgagatcgcgtccgccatcgcatcggcggtcgaggagcagggcgcggcgacgcgggagatctctcgcaacgttcagcaggccgcgcgcggcacccagcaggtctccgccagcatcgtcgacgtgcagcgcggcgccagccagaccggatcggcctccgccaacgtgctgacgtccgcgaagtcgctgtccggcgagagcacccgtctcaaggccgaggtcggaaaattcctggacgcgatccgggtggcgtaa

SEQ ID NO: 2481 - DNA, 1965 bp, BradyrhizobiumColbertium
ttgcggacggctgcggcgattgcctggggcgcgctggcttttcccgccgccggccaggcggctgatctggtgctgaaggcccccgccttgaaagcggtctacgactggaccggactctatatcggcatgcacaccggattcacccgcggcacgtcctcggccacgctcgccgatcccacggtcgcgaccgacaaccacgtgttcaacggcatgaccgggggcgtccaggccggctacaattggcgcctcagctcgggggtcctgctcggcgtcgaaggcgacatctcgtttccgaactacctgccctccaatcacgtcgtgtcatcggctgcgaccgggctgtcgagcgcggaggagcgctgggactatgtcgcgagcctgcgcgcgcggcttggctacaccagcggcaactggctcctttacgcgaccggcgggctcgcctttgccggcgagcgctttctctcgacgcccatcaacgacgtcgaggacaggcgactgcacacgagactcggttgggcggctggagccggcctcgaatacgggtttgcgccgcactggacggcacggctcgaatatctctatcagggtttcgaccgcgcggcggtgagctttccgtcgggcgtgaactacgcatcgacgttgaacatgcacgccatccgcctcggcctcaatcgcaaggtcgattggccgggcctgccgagctacaacccgaaaagctctcttttcgacacggaatccgatcgctgggagatccacggccaaagcacctatctgccgcaaggctatccgtcatttcccgcgctctatagcggaccgaactcgctctcgccgtcgcggcaggccaaggcgacgtggagcaacagcctgttcctgaacgcacggctctgggacggcggcgaggtctattacaatcccgaactgcttcagggttttggattgaacgataccgtcggtgcagcgggctttcccaacggcgaggcgcagaagtcgaacttcccttacccacattacaacgcctcgcgcctgttcgtgcgccagacgtttggatttggcggcgagcaggaggagctcgcgagcggccagctgcagctcgcccagaaggccgacgtgtcacgcctcaccctgcaggccggcaagttcgcggtggtggacgtgttcgacggcaatgcctatgcaaaggacacccgccgggatttcatgaattggtcgatctgggcgcccggcgccttcgactattccgccgacagagtcggcctcacctacggcgtcactgccgaactcaaccagcggcaatgggcactgcgcggcggctatttcctgatggtggcggagtccaatgggaatcacttcgacaccagggtcggggagcgcgggcaatacttactcgagctcgagacccggctctcgctgttcggccgccccggcaagctcaggaccataggctggctggacagcgccaatatgggcagcttccgcgagacgctggacaatcccggactcaacctcgacatcgcgcggacccggcgcggccgcctgaagtacggctatgtgctcaacgtcgagcaggcgatcacggacgatgtcgggctgttcggccgctggagctggaacgacggcaggaccgaaaccctcgccttcaccgacattcatcgcagcctgtccggcggcctctcgatcaggggcgcggcatgggggcgctccgacgacgtgatcggcatcggcggcgccatcaacgcgatttctcgggactatcgcgacttcctcgccgccggcggcctcggcgttctcgtcggcgacggcgcgctcaactaccgcaaggagcgcatcctcgagacttattacgcctacgcgctgaacaagaacctcaccctcaccggcgactaccagctcatcgtcaaccccgcctacaacgccgatcgcggacccgtgtcggtgttctcggggcggctgcacggggagttctga

SEQ ID NO: 2482 - DNA, 264 bp, BradyrhizobiumColbertium
atgtcgaccaggaccaagattgccgccgtcgccttcgctgccctcgccgtcgccggcagcatcgtgtccaccacctcctcggctgaagccaagcagcccgcctgggtctggggtatgggtgccggcctcgccaccgccgccgtcgtcggctccgcgatggctgccagcaacgacccctattactacggctatcatcgctgcggctgggtcgcccaatacaacgccttcggccagtacgtcggccgcgttcgtacctgctactga

SEQ ID NO: 2483 - DNA, 807 bp, BradyrhizobiumColbertium
atgacgccgcctcgcgactggatcgacatcgactgggctcatgcgagcctcgcggatgtgtcgcgatggatcgcggtgctgccgctggctgcgacggagcagcacggcccgcatctgcctgtgacaaccgacgtactgatcgcggacgcctatctggcgcgcgtacgcgagttgttgccggcgtccgttccggcctgtttcctgccggtcgagacaatcgggatctccaccgagcatatcgactttccggggacgcagacgctgccgaccgaaaccgcgctgaagagatggacggggatcggcgaggacgtcgcacgccgcggcgtgaagaagctcgtcatcgtcaccagccatggcggcaacagcgcggccatgatgctggtggcgcaggatcttcgcgcgcatcggaagctgttcgtggtgacgacgtcgtggtcgcggctctccggcgccgacaagctgttcccggccgatgaagtacgccacggcattcacggcggcgcggtcgagacctcgatcatgctggcgcgctatcccgaccaggtgcgcaagagcgcgatcgcggattttcctgcaagcagcatcgcgatggagcggcagtatcgctggctgtcgacccagcgtccggcgccgttcgcctggcaggcgcaggatctgaatgccagcggtgcagtcggcaatgcgacgctggcggtggccgagaaaggcgagcagctgatcgatcagggcgcgacgggcttttgcgagctgctcggcgaggtcgataacttcgacgtgaacaggctggccaaaggccccctcggttag

SEQ ID NO: 2484 - DNA, 1023 bp, BradyrhizobiumColbertium
atgaccccctctcatttgcggctagcgctaacggcgggcctgatcgccgctctggtcgctcttgcaccggcccgggccgagacgctggacaaggtcaccttcggcaccaactgggtcgccgaggccgagcatggcggcttcttccaggcggtcgccgacggcacctacaagaaatacgggcttgacgtcactatcgtcccgggcggccccaacgagaacaaccgcatgctgctgatcgcgggcaagatcgatttcttcatggccgcgaacacgctgatgtcgttcgacgcggtcaccaacaacgtgcctgtcgtcaccatcgccgcgattttccagaaggatccgcaggtgatgctgacgcatccggacgcgaaggtcggcaagatcgaggacctcaagccgctgacgctgttcgtctccaaggagggcatgaccagctacttccagtggctgaaatccgaatacggtttcggcgagaagaacgttcgtccctacaatttcaatccgcagcccttcatcgccaatcccaagagcgcgatgcagggctacgtcacctccgagcctttcgcggtcgagaaggcggccggcttcaagcccaacgtgctgctgcttgcggattacggcttcaacacctattcgaccctgatcgagacgcgccgcgacatcgtcgagaagaagcccgaccttgtccagcgcttcgtcgatgcttccatgatcggctggtacaactacctctaccgcgataactccgccggcaatgccatgatcaagaagctcaatccggagatgaccgacgatctgctcgcctattccgtcgccaagatgaaggagcacggcatcgtcgattccggcgacagcctgaagaacggcatcggcgcgatgagcgacgagcgctatacttccttcttcaacaagatggtgaaggccggcgtcgtgaaggcggacctcgacttccgcaaatcctatacgctgcgcttcgtcaacaagggcgtcggcgtcgagctgcgccccaacaagccgtag

SEQ ID NO: 2485 - DNA, 816 bp, BradyrhizobiumColbertium
atgatggcgaatccgacgccacccaccgtcgaggccaagctgacggctctcgccgtcagcctgcgcggcgtgacgaaagcctatgacaacggcgtaatggcgctcggccccctcgaccttgccgtgcgcaagggcgacttcatctcgctgctggggccgtccggctgcggcaagtcgacggccctgcgcatcatcgcaggcctcactgcggcgtcttcaggcacggtgcgggtggcgcggccggagggcgagatgcagccgggccacggcatcggattcgtgtttcaggagccgaccctgatgccctggaccagcgtgcgcgagaacgtgaggctgcctctgaggcttggtcggattccgaaggcggaggcatgcgcgcgtgccgacgcggcgctcgccagcgtcgggctggccgatttcgccgacgcctatccgcgcgagctctccggcggcatgaagatgcgggtgtcgctcgcgcgcgcgctcgtcaccgatcccgacattctgctgatggacgagccgttcgcggcgctcgacgagatcacgcgcttccgcctcaacaacgatctgctggcgctatggcgagcgctcggtaagaccgtcatcttcgtcacccattcggtgttcgaatccgtctacctgtcacagcgcgtcatcgtgatgaccgcgcggcccggccggatccaggccgacatccgcatcgagaccgtcgagccgcgagccgaggagtttcgcacctcggccgcctattcggactactgccgaagagtgtcggctgcgctggcgccatcctatgcgggacggtcgacgctatga

SEQ ID NO: 2486 - DNA, 819 bp, BradyrhizobiumColbertium
atgaccgcgcaagctgccgtcaccgcaaaaccgtccggcgcacgacgcgcgatgcgtttcgtgcttcccctcatcgtgttcgcggcggggctcatcgcctgggagctgctggtccgcctcaaggggatcccgccctatgtgttgccggcgccgtctgtcatcgtcctgacgctgataaaggactgggccgtgctttcgcaatcgctggccaccacgctgctgaccacgctggagggttttgtcgccgccagcatcggcgggattgcgctggcgctgctgttcaaccagtcgaaatgggtggagtactcgctgttcccctatgcagtcgtgcttcaggtgacgccggtcatcgcgattgcgccgctgcttctgatctatctcgagcagcagactgcggtcgtggtgtgcgccttcatcgtcgccttcttcccggtgctgtccaacaccacgctcgggctgaattcggtcgatcgcaacctcgccggcctgttccagctctatggcgcctcgccgcagcagaccctgcgctttctcaagctgcccgcggccttgccctacattcttggcggcctgcgcatcgccggcggcctgtcgctgatcggcgcggtcgtcgccgagatcgcggcgggaacagccggcgccggctccggcctcgcctacaggatcgcggaatcgggatatcgcctgaacataccccgcatgttcgcggcgctgcttctgttgtcgctcgccgggattgtcatctatggggtgctggcgctagtttcgcacctcgttttgcggcgctggcatgagagcgcgcttggaaaggaagactga

SEQ ID NO: 2487 - DNA, 990 bp, BradyrhizobiumColbertium
atgaccgccggttcgatttcgtccgagaagatcgaccttctgatctatgggccggtgcggccgatcctagaaaacggcttctccgatcatttcgtcgtgcacaaggccgagacgcgcggcgatctcgagcggctgacgccggcggtccgcgacaagatccgcggtgtcgcggtgacctatcacaccgtgcgcgccgacagggattcgctgtcgcagctgcccaagctggaaatggtggcgagctttggtgtcggctacgaccacatcgatgccaaatatgcggccgaacacgacatcatcgtcaccaacacgcccgacgtgctgaccgaggaggtcgccgacgttgcgatgggcctcttgatcgccaccctgcgcgagttcatcaaggccgaccgctatgtccgctccgggctctggcagacccagaactatccgctgagcgtcggttcgctgcgcgaccgcaaggtgggcatcgtcggcatgggccggatcggccaggccatcgcgcgccggctcgatgcctcgctggtgccggtggtctatcactcccgcaatccgtccaaggacgtttcctacaagcactatcccgatctgatcgagatggcgaaggcggtggacacgttgatggtgatcgtgcccggcggcgcctcgaccaacaagatgatcaatgccgaggtgctgaaggcgctcggcccgcgcggcgtgctgatcaacgtcgcgcgcggctcggtggtcgacgagccggcgctgatccaggcgctgaaatccggcaccattctcgccgccggcctcgacgtgttcgcggccgagccgaacgtgccggacgagctcaagtccatgcagaacgtcgtgctgctgccgcatatcggctcggcctcggtggtgacgcgcaacgcgatggaccagctcgtggtcgacaacctcaaggcctggttcgccggcaaggcgccgttgacgccggtcgcggaaacgccggtcaaggggcgctga

SEQ ID NO: 2488 - DNA, 642 bp, BradyrhizobiumColbertium
gtgggttctgcgcgtgcgcaggatgcgacgagcctgaagaagcagatgcccggtcagtgggagctctcgaccaccgagcgcagcaagacctgcgtcgtcacgctgaagggtgatgccgctggccagggcttaaagctggagctcgagccggcctgcaagacggcgctgcccttcaccaaggacatcgtcgcctggagcgtcaggggactcgacatcgtccgcctgcaggatgcggccggcgaggccgtcatcgacttcaccgaggtcgaggccggcatcttcgagggcttgcggcagggcgaaggcgtctacatcctgcaggatctcgccgccgcgcgttccatggcgaagtcgatggaccagatgatcggcgactggtcgatggtgcgcggcaacggccagccggtctgcgggctgacgctgaccaacaccgaagcggacccggacaatttccaggtcttcctcaagccgagatgcgacgcggcggttgcgcagttcaatccgacgcaatggcgcctcgagcgcggccagatcatcctgatgtcgaaatcgggtgaggcctggcaattcgaggccgacgatcacgcccaatggcgtcgtgtccccgacaccgccgatcccctgatcatgctgcggcagtag

SEQ ID NO: 2489 - DNA, 804 bp, BradyrhizobiumColbertium
atgggccgaagatcgcctgccaaggcaattcccgttcgaacttttctcgcatctggagagaccaagacgggaatcgctcaaattcgatcgggctttgacatgaaactgtttgccctggccttctcgtgtcttctgcttttcgcggtgtccgccagcgcgaatgacacccgcaccttcaatgcgatggtcgcattggccaatcgcggagattccgaggcgcaatatcatgtgggcatgatgtacaacaacggcatcggcacgcagcaggatcgcagtcgggccttcgagtggtttcagaaatcggccgccgccaacgaccccctcggtgcctacaagctcggctgctactatgacggacaaggcgcaggcatcatcacaaccgacgcggatcaagcactgaagtacaagctcgttgccgccaatgcgggttatgcgcgtgcccagcacgatgtcgctctcacatatgaccggcgaggcaatccggaagaagcgctgaaatggtggaagctggcgggcgatcaggggcttcccgaggctctcttcagcctgtcccgcgcctattcggccggaaagggaacgccgagagatttgtcactgtcgtatgcctatttcaagctctcgaaggtggcgccggcgaagaacgtgaacgagatggcttccatgttgtccaagcccgagctcgagaaagccgagaaactcgctgccgcatggaagccgcgaccgaccgccctgacgctcaaggcattcgccggcatcacagccgcggaagaccatttgaaagccgccaggaaccaagtgttctga

SEQ ID NO: 2490 - DNA, 714 bp, BradyrhizobiumColbertium
atgccccgcaagaccgaccagccagacaatccatccgccgaggcgccgcactatcacggccatcgcgagcggctgcgcgagcgcttctacagcgcgggcgcggatgccctcagcgactacgagctgctggagatggcgctgtttccggcgctgccgcggcgcgacaccaagccgctggcgaaatcgctgatcaagacgttcggctcgttcgccgaggtcgtccatgccccggtggcgcgcttgcgcgaggtccacggcgtcggagaggccgcggtcaaccagctcaagctgatcgccgcggcggcgcaccgcatcgccaagggcggcgtcaacagccgcaacgcgctgtcgtcctggaacgaggtgatcgattattgccgcaccagcatggcctttgccgacaaggagcaattccgcctgctcttcctcgacaagcgcaaccagctgattgccgacgaggtgcagcagaccggcaccgtcgaccacacgccggtctatccgcgcgaggtgatcaagcgcgcgctggagctctccgcgaccgcgctgatcctggtgcataaccatccaagcggcgatccctcgccgtcgcaggccgacatccagatgacgaaggccatcatcgacatcgccaagccgctcggcattgccgtgcacgaccacatcatcgtgggcaagaatggccacgcgagcttgcgtggaatgcggttgatttag

SEQ ID NO: 2491 - DNA, 960 bp, BradyrhizobiumColbertium
atgttcgagatttcacgccgggatctggtcctcggaagcaccggggcggcactggtcttcggcctcaacggaccagtgtctttcatcggagccgcttctgcacagcgcgccgccgacagcctcaaatacaaggtcggcgacatcgaggtgttcagcctccatgaaggctcgatcgaacggccggtgaccgagggcatggtcaagaatgccgggctcgacgaggtcaagaaggcgctgaccgcagccggcatcgggcccgacaagatcgacaacccctttacggtcaccgccatccgtaccggcggcaaggtcgtgctgttcgacgccggtttcggcggcaacggccccgccagcgtcggcaagcttgcgagcaacatgaaggctgccggactcgatccggcgacggtatcgacggtggtcatctcgcatttccatccggatcacatttcgggcctgtgggtgaaggaaaccgacgcgcaggtatttccgaacgcggaaatcatgatgcccgaagtggagtacaagttctggaccgatgcggccctggtggagaaagtgcccgaggccaatcgcccccacgtcaagcggattcaggcgaccttcccgacctggaagaacatcaagcagtatggcgacggcgccgacctcgcgcccggcgtcaaggccatcgccacgccgggtcacacgatcggccacatgtccttcctggtggcctccggcgggcagcagctcttcatccagagcgacgtcaccggcatctatcagctgttcgtcaagaaccccggctggttctccggcttcgacagcgacgggccgaaggcggaagccacgcggcgcgccttcttcgaccgcgtaatcgccgaaaaggggatgatcgccggctatcatttcggctttccgaacgtcggcacgctggccaaggacggcaacggctacgccttcgccgccgtcaaggcctga

SEQ ID NO: 2492 - DNA, 825 bp, BradyrhizobiumColbertium
atgagctacgtcgaagccaccgatacatccctgcgcaagaccggacagatcaagctgcatgggccgaacgcctttgcaggcatgcgcaaggcgggggcgctggtggcaaaatgcctcgacgagctcactgacatcgtcgggccgggcgtgccgacctcgaagatcgacgaattcgtccgcgacttcgccttcagccacggcgcctatccggcgacgctgatgtatcgcggctatcgctactccacctgcacctccctcaatcacgtggtctgccacggcatgcccggcgaccgtccgctgaaggaaggcgacatcgtcaacatcgacgtcaccttcatcgtcgacgggtggtatggcgattccagccggatgtatgcgatcggcccgatcgcgcgcaaggccgagcggctgatcgaggtcacctatgaagcgatgatgcgcggcatcgccgcggtgaagcccggcgccaccaccggcgacatcggccatgccatccagagcttcgtcgagccgcagggcatgagcgtggtgcgcgacttctgcggccatggcctcgggcgcatgttccacgacgagccgaacatcatccatgtcggccggcccggcgagggcgttcagctcaagcccggcatgttcttcacgatcgagccgatgatcaatctcggcaagccgcatgtgaagatcctctccgacggctggaccgcggtcacccgcgaccgctcgctgtcggcgcagttcgagcactcggtcggcgtcacggcgacgggcgtggagatcttcacgctgtcggagcggcacggcgagaagccgtgggcggcagcgtaa

SEQ ID NO: 2493 - DNA, 1311 bp, BradyrhizobiumColbertium
atggacctcaaagacttcatggagttcgtgcagacgaccgcacgcagcgtcggagcggaaatctcctcaccctggttctacctgcaattcggtctcatcctggccgcggccggtatcgcctatgcggccgaagccgccattcgcagccgtctcgacatgacctcgctggcgatgcggtggccgctgccgctccggcacttcgcgcgggtgatgatcgccagcgcttccacggcggtgttcacgttgctcgtgatcatctcgcgggtcgtgatgtaccatgcgacctggccaagccgcagctatctcctgatggtcgcagccaagctgggcttcgcctggctggtaatccggctcgtcacctcggtgctgcgcaacgccttcatcgtcaaggtggtgtcggtcacggcgtggctggtcgcggcgctctccatcgtcggtcagctcgatgcgaccgtcgacctgcttgattccttcgcgatcgtgctcggcggtctcaggttgaccccgctcctggcgatcaaggccggcgccctcctcctcatcgcgctctggctcacgaatatcgcgagcaatttcgccgagagccggatcaacgcgaccaccgacctgacgccgtcggtgcaggtgctgctgatgaagatcatccgcatcgggcttctggccgtcgcaatcgtcattgcgctcggcgccgtcggcatcgatctgtcggcgctcgcggtgttctccggcgcggtcggcgtcggcatcggtatcggcctgcagaagatcgtcgccaatttcatctcgggcatcatcctgctcgccgacaagtcggtgaagcccggcgatctcgtcaccatcggcgacaataccggtcgcatcagcgcgatgaagacgcgatacatctccgtcgccgccggcgacggccgcgagttcctggtcccgaacgaggatctggtgacgcagaaggtcgtcaactggacctacaccgacaagaacacgctggtgaagatcgccttcggcaccaattacgacgccgatccgaagctagtctgcaagctcgcgaccgagatcgccgccgctcatccacgcgcccagaagggcaagccgccgaactgtatcctgaccgagtttgcggaggccgggatgaagttctcgctgaccttgtggcttgcggatcccgacggcatggacaccgtcaagagcgacgtgatgctggcgctgtgggacgcgttcaagcgcgaaggcatccgggttccctaccccgtccgcgaaatccgcatccgcggcggcgtcctgccggtggaaaccaccgtggaagtcccggattag

SEQ ID NO: 2494 - DNA, 174 bp, BradyrhizobiumColbertium
ttgcatccatatcgtcggtggactctcgcgccaacccattttctgcggctcgcggcaatctgccaggattttacggccttaacgcgcttcacttggcggtgtatcgatggctcggccgtgccccttgtgggattctccggccccctcgcatcaatccctcctccgcttccctga

SEQ ID NO: 2495 - DNA, 1794 bp, BradyrhizobiumColbertium
atggcttccctcgattccgtcagtctcgccatattgctcggctccgtcctcgtcatggccggcatcctgtccagcctgcttgcgctgcgcttcggcgcgcccctgctgctggtcttccttgcgatcggcatgctcgccggcgattccggcccggggcagctccagttcgacgacgtccgcaccacctatttggtcggctcggtcgcgctggccctgatcctgttcgacggcggcttgcggacgcgctttgccagcatccgcaccgtgctggcaccctcggtggcgctggcgaccatcggcgtgctgctgaccgctttgatcacggcacccttcgcgaagtacgcgctcgacctcaactggtcggaatcgctgctggtcggcgccgtggtggcctcgaccgacgcggccgccgtgttcctgctggtgcacacccagggcctgcgcctgcgcccgcgcgtcggcgcgacgctggaggtggaatccggcacaaacgatccgttcgcgatcttcctcacgctgatgctggtggaatacatctcgctgggctcgagctcgcccggccatgtgctgatggagttcgtcctggaggcggtgctgggcgccatcgtcggcatcatcggcggccgcctcgtcgtgatggcgctcaacaaggtcgccttgccgcaggggctgcatgcgccgttcgtggccacggcagcgctcgtcatcttcggcggctcgcagatcatgcacgcctccggctttctcgcggtctatcttgccggcatcatcataggcaaccggccgacgcgcgcgcataattcggtggtgaccttcctcgatgccgcaacctggctggcgcagatcgtcatgttcgtgctgctcggccttttggtctcgccgagccggctcggcaccagcatattgccggcggtcgccgtcgcgctcgtcctgatgctggtggcgcggccgctcgcggtgttcctgtgccttgcaccgttccgcttcaactggcgcgaaaggatattcatcgcctggacgggcctgcgcggcgccgtcgcgatcttcctggcgtcgatccccatgctggtcggcctgtccaaggcctatctttatttcgacgtcgccttcgtcgtcgtcatcatctcgctgttgctgcagggctggaccctggcggccgccgcgcgcaagctgcacgtggcactgccgcgcgtcgagcgcggcccgcgccgcgtcgagctggacctgccgggccagctcgagcagcagctcgtcggctatccggtgcggcccaagagcctgtatttccgccgcggcctgatcccgtcctggtccaagccgacgctggtgatccgcaacgagcacatcctgacgccgacggaagccgacccggtcgcgcccggcgactacatctatctgctggcaccgccggaaaaagccgagtcgctcgaccggttcttcgtcgacatgcagccgagctcggcgccagatccgcatttgctcggcgacttcgtggtgtccggcgagcacacgctggccgagctcgccgagatctacggcgtgatggtgagcgaggatgcgagcaagctcacgctcgccgattatttcgacgtgcatctcgaccacgcgcccaaggagggcgccgagctcgccctggataccatcgtcctcgtggcgcgcagcatctccggcggccgcgtcaacgtcgtcggcctgcgcctgcccgaggaggacgagaccccgccgccgctgacgcgcgcgcaagcgctgcggaagaagctcgcggatgtgtgggcctcggtggcgggggtctag

SEQ ID NO: 2496 - DNA, 663 bp, BradyrhizobiumColbertium
atgctgcgggtcgacatcgaaaagcagctcggcgacttctcgctgcatgcatccttcagcagcgaagggcgcgtcatcggcctgttcggcgcctccggtgccggcaagacatcgctggtcaacatgatcgcggggctgttgcggccggatcgcggcaccatcgtgatcgacggcgagacggtggacgacaccgcggccggcattcacgtgcccacataccgccgccgcatcggctatgtgttccaggatgcgcggctgtttccgcatctgagcgtggcgcagaacctcgactacggacggcggatgaacgggcttgccttcgatccggcgcagcacaagcgcatcattgacctcctcgacatcggcgcgctgcaggatcgccgccccggcaagctctccggcggcgagcgccagcgcgttgcgctcgggcgcgcgctgctgtcgaagccacggctgctgctgctcgacgagccgctgggcgcgctcgacgagggccgcaagctcgagatcctgccatatctggtgcggctgcgcgacgaggccaacgtgccgatggtctatgtcagccacgacgtcgccgagctgcgccagctcgccacgcagatcgtgatgctgaagcaggggcgggtgacgagtctcggcggcgtgaaggtgctggcgtag

SEQ ID NO: 2497 - DNA, 696 bp, BradyrhizobiumColbertium
atgaccgagatttctcccgccgaatggacggcgatcctgctctcgctcagggtcgccatcatcgcaacgctggtggcgacgccattcggcattgcgctggcgtggctgctggcgcggcgtgacttctggggcaagtcgctgctcgatgccctcgttcatctgcctctggtgctgccgccggtcgtgaccggctatctgctcctgctgacgttcggccgccgcggcctcgttggcggcttcctcgccgaccatctcggcatcgtgttctcgttccgctggaccggcgcggcgctcgcctgcggcgtgatgtcgtttccgctgctggtgcgcccgatgcggctgtcgatcgaggcgatcgaccgacggctcgagcaggcggcaaagacgcttggcgcggcgccgtggaaagtgttcctcacggtgacgttgccgctggcgctgcccggcgtgctcgccggcatggtgctgggcttcgccaaagcgatcggcgagttcggcgcgaccatcaccttcgtctccaatatccccggcgagacgcagacgatctcctcggcgatctattcgctgatccaggcgccggacggcgatgccgctgcgggacggctggtgatcgtctcgatcgtgctggcgctcggtgcactcatcgccgccgagtggttcgcccgccgcgccacgcagcgcctgcacgggaattga

SEQ ID NO: 2498 - DNA, 786 bp, BradyrhizobiumColbertium
atgtttcgtctgtcccggcttctcgccgccttcgtgatccttgccaccgcacccctctcacctgcggtcgccgaggacaagaccatcaccgtgttcgccgcggcctccatgaagaacgcgctggacgagatcgacgcggcctataccgccaggaccggtgtcaagttctcggtcagctatgccgcaagctcggtgctcgccaagcagatcgagcagggcgcgccggccgacgtgttcgtgtccgccgacaccgactggatggactacgcgatctccaaaaagaccatcaacgagccttccagagtcaacctgctcggcaacagcatcgtgctgatcgcgcccaaggattccaggatcgacaacgtgactgtcgcgcaaggcttcgatctcgccaggctcgccggcgacggcaggatcgcgacgggcgacgtcaaatctgtacctgtcggcaaatatgccaaggctgcgcttgaaaggctcggcgcctggcaggccgcggagccgaaattcgcgatggcagagagcgtgcgcgccgcgctgacgctggtcgcacgcggcgaggccgcgctcgggatcgtctattccaccgacgccaaggtcgagccgggcgtgaaggtcgtcggcacctttccggcggattcgcatcccgcgatcatctatccggtcgccgcaaccaccacggcaaagtccgagaccagcggctatctgaccttcctgcgctccacggcggccaagtccatttttgagaagtacggcttcaagttcctgatcagtcccgtaacttag

SEQ ID NO: 2499 - DNA, 975 bp, BradyrhizobiumColbertium
atgcggcaattgcgttataaggacgacagcatgagtcgccgcggcatcaccctcctcctgcttgcattggctttcccgggcgccggcggcgcgctggcccaggacaagggcagcgtcaccccgaagccgctgccgccgctcgccaatccgaacgaccccgatctcgccgccaaggagctgttcgcgcgaaagctgctgccgtcgaaggggccggcccatgtcatcggctcctataccaggggctgcatcggcggcgcggagcagattccggtcagcggcgagcattggcaggtgatgcgcctgtcgcgcaaccgcagctacggccacccggacatgatcgcgctgatcaagcggctcgcggcgaaggcccacagggatgcgggatggccgggcatcctggtcggcgacatcgcccagccgcgcggcgggccggcgctttcgggccatgccagccaccagatcggcctcgatgccgacatctggctgacgccgatgccgaaccgccggctctcgcgcgaggagcgggaggagatgtcggccgtgatgatggtgcggcccgaccggctcgacgtcgatcccaaggtgttcacgccgggccatgtgctggtgttgcgcgatgcggcgcgggagcccgcggtgcagcgcatcttcgtcaacgccgcgatcaagaaggcggtgtgccgcgaggccaagggtgatcgcgcatggctgtcgaagatccgcccctggtggggccacgactatcacttccacatccgcatgcgctgccctgccggtgccggcgcatgcgagggccagccgtcacaggccgaggacgaaggctgcaagcccgcggatctcgcctattggttttccgacgcggtgctgcaccccaagccgccgccggagccgccaaagccgaagccgacgatgacgctggcccagatgccggcggcctgcaaagcggtgctgcacgccggcgatgcgaagcggtaa

SEQ ID NO: 2500 - DNA, 240 bp, BradyrhizobiumColbertium
ttgcgttcgctttcttgttcttcgagatttcaaactcaacttcacgcgtcccagtgcgcccggcggccgcgagtcttgagacaagtgtctgaaaaaaaagtaatcttgcccggtggcgatccgcgcgaggcggaccttgctgcctgtttgcgaggcgcggctgcgacggcaggcaccgtcaaaatgggttcagcgccgcaatcagggatcgatctggcgcaaaattgcgcgcgcacctga

SEQ ID NO: 2501 - DNA, 2166 bp, BradyrhizobiumColbertium
gtgcttgcaagcgtcggcaaaagggcgcgcaagccgcgctttgcggtcgcgtcgcgagttccttccgagcgcagcgaagtgctgcgcagccgtgccgaggcggaagccgcgatcgcggaagcacgcaaatcccatgaacgcctgcgccaggccatcgatatgctgccgcagggcatcgtgtttctcgatgctgaaggccgctacgtcctctggaacaagaagtacgccgagatctacagcaagaccgccgacctgtttgcggaaggagcgcgccttgaggacacgctgcgcatcggcgtggcccgcggcgactatcccgaggccgtcggcaacgaggacgagtggatctccgagcgcctgcaaaagctctatcagcccggtgcgcgccacgagcagaagctgtcggacggccgcgtcatcctgatcgacgagcgtctgaccgatgacggcggcgtcgtcggcctgcgcgtcgacattaccgagttgaagcagcgcgaggcttcgttccgcctgctgttcgagggcaatcccgtgcccatgatcgtctgcgcgctggacgacgagcgcatcatcgccgtcaacgacgccgcggtcgcgcactacggctacagccgcgccgagttcgagcggctgaagatccgctccttgcaggcctttgacagcgagccgccctggaccgccgacgtgaccggggaggagcaggcaggccgcacctggaagcacgtcaaggcagacggcgcgctgatcgaccttgcgatctattcccgcgagctgacttatgccgagcggcccgcggtgctgctcgcgctgatggacatcaccgagcgcaagcgcgccgaggcgcggctcgccttcatgtcccagcacgacggtctgaccggcctgcccaatcgcagcctgctgcgtcagcaggtcgacgagatgctgctgcatacgcggcgcagccccgagaaggtcgcgctcctgatgctggggctcgacagtttcaaggccgtcaacgacacgctcggacatgcggtcggcgataagctcctgcgcggcgtcgcgaagcggttgcgttccacccttcgtgaggaagacgcgctggcgcggctcaattccgacgagttcgcgatcgtgcaaagcgggctgacgcgccccgaggacgcggtgatgctggccaagcgcctcctggcggcgatcgccgatccctatctgctcgacggccattccgtggtcatcggcgcctcgatcggcattgcgatggcgcccggcgacggcgacgattccgagaagctgctcaagagcgccgacatggcgttgtcgcgcgccaagctggacgcgcgcggcaccttcgccttcttcgaggccgcgctcgacgccaaggcgcagagccgccgcaagatcgaggtcgagctgcgcgatgcgatccagaacgacgtgctgcgaccctattaccagccgctgatcgacctccagagcggccgcatcaccggcttcgaggcgttggtgcgctggccgcatgcggagcgaggcatggtctcgccggccgagttcatcccggtcgccgaggacaccggcctgatcaatccgctcggcgggcagatgctgcgccgggcctgcctggatgccgcggcctggcccgacgacgtccgcgtcgcggtcaacctgtcgccgctgcagttccgcagcggcaatctgctctcggtggtgacggacgcgctgaaacattccggcttgccgccgcgccggctcgagctcgagatcaccgagaccctgctattggagaagagcgcccagatcctggcgacgctgcatgcgctgcgcgcgctcggggtgcgcatctcgatggacgatttcggcaccggctattccagcctcagctatttgcgaagcttcccgttcgacaagatcaagatcgaccagtccttcgtgcgcgatctcggctccaaccgcgaagcccaggcgatcattcgctccatcgtcagcctcgggaagggcttgggcgtcaccatcaccgccgagggtgtcgagaccgaggccgagctgagctgtctccgcgccgaaggctgccatgagggccagggcttcctgttcagcaaggcccggccccatgcggagatcgtcagcctgctggcggcgcagcgcggcatcgacggcaacgaggacgccgccctggtggcgtga

SEQ ID NO: 2502 - DNA, 1965 bp, BradyrhizobiumColbertium
atgttcaagatcaagtcgattgccgcccgcctgatcctcgccatcgcactcacagtggcagtggcctgcgccatcctctccggcttctcgatcacccagcagcgggcgctgacgcggatggcgctcgatcagcagctcaagctgcaatatgagagcgtgattgcggcgatcgactatgaagggcgttcggcactggccgtctccgccgtgatcgcggcgctgccgccggttggcgatgccatagcgaagggcgaccgcgacagcctggccgcactgctcggcgaggccaacaaatcgctgaaagcgcagggtatcccactcatcaccttccaggttccgcccgcggtcgcattttaccgtgtacatgctcccaaggtgttcggcgatgacgtctcggcgcgccgggagaccgtggtcgaggcgatcaagggcggccggcagatcgtcggcgtcgagcccggccgggaggcgcttggcatcttcggcatgacaccgatcgtgcgaggcggcaaaagccttgccaacgttgatatcggcgcagccttcggcaaggaattcgtcgaccgcgccaagaagcgctttggcatcgacctcgcagtctactcgctcgacggcaagaacctgaacaagctgtcgtcaacctttggcgacacggtcgtcaccacgctggatcagctgaagaacgcaatcgacggttcggtggtccggcatgcggccgagctcgacggtcatccagtcgaggtctatgccggacttatcaagaactatgcgggagcgcccgtcggcgtgctcgagatcatcaaggacacgagcgagtatgaggccgcgttcgccacagccgagcgcaacctgatcctcggcacgcttgcgatccttgccgtcacgatcgtgctggccctgctgctcgggcgaggcctgtcgcggccgcttaccgcgatcactgcggtcatgaaccggctgtcgagcggcgataccagcgtcaccattcccggaagcgaacgcacggacgaactcggcaccatggccaaggcggtcgacgtgttccgccgcaacatgctcgaggcgggcgccctgcgcgaggcgcaggaagcggacagggccagggccgagatcgagaagcaggcactccagcgccagatggccgaccgcttcgaggccgacgtcaagggcgtggtggccgccgtggcaaaggcgaccgagggcatgcagagcgtggccggcgagatcaccaccagcgtcaacggcacctcgcagcgagcttccgccgcagcgacggcctccgaggaagcctcggccagcgtcaatgccgtcgcggcagcgacggaggagctggcctcatccgttaacgagatcggccgtcaggtcacccattccagcgaggttgcgagcggcgccgtccgcaaggccgcggagacgaccgagatggtcacgagccttgccaccgccgccgagcgcatcggcgacgtgctgcggctgatcagcgaaatcgccagccagaccaacctgctcgcgctcaacgccacgatcgaggccgcccgcgcgggcgaagccggccgcggctttgccgtggtcgccgccgaagtgaaggagctggcgagccagaccgcgaaggcgaccgacgagatcgcaagccaggtcaccgcaatccaggccgccaccggaaattgcgtcaccgcaatctccggcatcagcgacaccatccgcgagatcagcggcatcgccaacacgatcgctgccgcggtcgaggaacagggctcggcaacgcgggagatcgcccgcagcgtgcagcaggcatcggccggcaccacggacgtctcggccaatgtcgccggcgccagccagtccgccgaccagtcccgggcgctggccggcgacgtcatggttgccacgggcgagctgggacaacatgcctcggtgctgatccgaagcgtggatacgtttctggccggactgcgggcagcctga

SEQ ID NO: 2503 - DNA, 1134 bp, BradyrhizobiumColbertium
gtgaattggaattcgaccataccggcacctctgaaggagcgcgatcttcggatcgatctctttcggggcctttccctatggtggatctatatcaatcacatcccggaaacttatctcaacaggttcacgcccaagaatttcggcttcagcgatgcggcagagattctcgtgtttctgtcgggcctggcgtccggcatcgtgtacggcgatctgttgcgcagctccggctttgcggcggcgagcctgcgcatgttgcggcgttcgttcgaaatctatatcgcgcagattttgacggtcgtcctgttgctggcggaagtgtcctacatcgcggcatggcagctcgacatgttcgatcacgccaacctggccgtcctgctgcaacagcccgcagaaacactgctgcaggccgcgctgctgcgatatacgccggtcaatctggatcctctgctcctgatggtcatacttcacttcgcgctcgttctcatcgtgccgttgacgatcggcgcctggccgctggccctggccggatccgtggctctttatgtttgcgcccacctgttcgactggtacatcccggcctatccaaaggggcaactctacttcaatccgctgaactggcagttgctgttcgtgatcggcatctggtggggagcgaaccgcggtgattggcagctcgccattctcaactcccggacgcttgccgtcctggcggcgggctatgtgctgttctcgttcgtgatcactctgggctggcagattcacgcgatcgaagcctatgtgccggcctggctgtcgcgtctgatctatcctgtcgacaagaccaatctcgacatcttgcgattgttgcattttgctgcgctcgcgctgctctgttggcgttttcttccaagcaatgccagcatcttgaaagccagatcgctggtgccgctgatacggtgcggcgagtattcgctcgcgatctattgcgtcagcgttctgctgtcctttgcggcccatgcgctgctcagcctgggctcgaacggcctggcatcgcagacgctggtcaccctgctgggcttgggcctgatgagcgccctggcgatgtcgctcgccgcgattgatcgcggcgtcttgcccaatctcaggccattgtag

SEQ ID NO: 2504 - DNA, 1221 bp, BradyrhizobiumColbertium
atgagcaggccagcacgcttcgactatggctgggtcgttgtcgccgcgggcgcactgatgacctgtgtcgggttcggcacgatgctgtcgctcgcggtgtttctgcagccgatctcggaagcgatgggctggtcgcgcgccggcgtctcggcggcggcgacgctggatttcctctgcatgggatttgccgcgttcctgtggggcacgttgtcggatcgtttcggcacccgcatcgtggtgctctcgggaagcctgctgctggggctcgggctggtgacggcgagccaggcgacaaccctgtggcagttccagctttgcttcggcgttctgatcggcatcgccgtcggcagcttctatgcaccgatgatggcgctcgcgagcgcctggatcgagaagaaccgcagccttgcggtggcgctggtctccgccggcatgggcgtttctccggtgacgatcgcgccggccgcgagctggctgatcacggcctatgactggcgcaccgcgatgctggtgatcggcattgccgcctgggcgctgttgatccccgcctgcttcctggtgcgtccggcgccggcggcccccgcgccggcgacggcggacgaggcagccgccgttgagctgaccgcagcgcaggcgctgcgcacgccgcaattcatcgcactcgccgcggcccatttcgcctgttgcgccgcgcattccggcccgatcttccacatggtgtcctatgcgatggtctgtggcatcgccccgctcacggcggtgacggtctacagcgtcgccggcgtctccggcctcggaggacgcctgctgctgggcgtgctggccgatcgcatgggcgcgaagcccgtgctggtcggcgggctgttcgtgcaggcgatgtgcatcgcgacctatctcgcggtggcgcaactcggcgaattctacgcgctctcggtggtgttcggcctcgcctatggcggggtgatgccgctctatgcggtgctggtccgcgaatacttcggcgcgcgcatcatgggcaccgtgttcggcgcggtgtcggccttcgccagcctcggcatggcgctggggccctgggccggcggaatcgtgttcgataacttccagcgctacacctggctgcacgccggctcattcgcgatcggcctcgccgccgtcgcagtggcgctgagctttccgaccaggcgccggccatcgctcgatctcggtcgcgccgcggtctga

SEQ ID NO: 2505 - DNA, 1302 bp, BradyrhizobiumColbertium
atgaggcgggaagcgctctgcaggctgcgcgattgtcgcaggctgttcgtttccgtcattttcgccgtcgcggtctcggcacctccggcatgcgcacaggacggcagaagctcgctgggtgagccggggccggtcttctcggacagcggtcccgacgccgaactctacggcgcggccgagggctatccggtcggcacccgggccacagccactcagctcgacaagctggtcggcgtctacagccgtttcggcgacatccatcgctcgcgcacggttcgtcgcgcggcggcgccgtggcacttcaagcgcgcgcctgagccatcgataacgtacagctttggtaccgaacggctgagcatcggggactatctcaagcgcaacccggtgacagggctcctgatcgccagggacgacaccatcctgtacgagcactatcaatattcgcggaccgaccgcgaccgctttctctcgcagtccatggcgaagacgctggtggccatgctggtcgggatctcggtctcggaggggcggatcaagtcgatcgacgacgtcgtctcgacctacgtccccgccctcgcaggaacggaatatggcaacacatcgctgcgcgctttgttgaacatgtcgtcgggcgtcgcgttttccgaagtctatgatgggaaagatgacattgcccggctgaggcgggcgctgtttgctggtgagccgagagaccccgcggagatcgtcgcgcaattcaacaaccggaccgcaccaccggggaccagatggcactatgcaagcgttgagaccgagatactcggcctggtcctgcgctccgtcaccggcacgccggtcgccgactatctccacgatcggatctgggaccccatcggcaccgaagcggatgcgtcgtgggcgatagacggtagcgggcaggagatcgcgttctgctgcttcaacgcaaccttgcgggactacgcgcgcctggcccgcttgctcgcccatgacggcgcttgggaaggtcggcagctgatcccgcggcagtggctgctggatgccacgaccgtcaggcccgaggatcgccatctcgctccgcgcgtggccacgccctatttcggatacggctatcaggtgtggctccttccgggcgagcagcgccgatttgctctgcgcggcattcgcggtcaggtcatcctggtcgatccggcctccaagctcgtcatggtgcacactgccgttcgcaagaagccgaccgagcccggaggcctcagggagccgctcgcgttgtggtctgccgtgcttcagcaactcgggcaatga

SEQ ID NO: 2506 - DNA, 414 bp, BradyrhizobiumColbertium
atgaggatcaccgtcgaaaccagcgtagcagccccgatcgatcaggtctggcgtgcctatacgacgcctgccgatatcgtgaagtggaatgcggcgtccgacgactggcatacgaccaaggcgacggtcgacctgcgggagggcggggctttctcgtcccgaatggaagccaaggacggcagcatgggcttcgacttcgccggcacctacacgaagatcgtggagcacaagcggatcgagtacgcgttcggcgaccgcaaggccgaggtcgagttcgtgcccggcgcgaatggcgtcctcgtccgcgttgtcttcgatgccgaaacgacgcactcagaggagcagcagcggggcggttggcaggcgatcctcgataatttcgcgcgatacgtcgaggcgaagcagaaggtgtga

SEQ ID NO: 2507 - DNA, 1812 bp, BradyrhizobiumColbertium
atgacgaccgtccccatttccaacatccgcaacttctccatcgtcgcccatatcgaccatggcaaatcgacgctggccgaccgcctgatccagatgacgggcggcctctccgaccgcgagatggcgggcaaggagcaggtgctcgattccatggacatcgagcgcgagcgcggcatcaccatcaaggcgcagacggtgcgccttcagtaccgcgccaaggacggcaaggattacatcttcaacctgatggacacgcccggccatgtcgacttcgcctacgaagtctcgcggtcgctggcggcgtgcgagggttccctgctcgtggtcgacgccagccagggcgtcgaagcgcagacgctcgccaacgtgtaccaggcgctcgacaacaatcacgagatcgttccggtcctgaacaaggtcgatctgcccgccgccgagcccgagaaggtcaagcagcagatcgaggatgtcatcggcatcgacgcctcggatgcagtgatgatctcggccaagaccggcctcggcgttcccgacgtgctggaggccatcgtcacccgcctgccgccgccgaagggcgatcgcgacgcgacgctgaaggcgctcctggtcgacagctggtacgacgtctatctcggcgtcgtcgtgctggtgcgcatcgtcgacggcacgatgcggaagggccagcgcgtgcgcatgatgggcacgggcgcggcttacgacgtcgagcgcgtcggcttcttcacgccgaagatgcagcaggtcgaggagctcggccccggcgagatcggcttcatcaccgccgcgatcaaggaagtcgccgacacccgcgtcggcgacaccatcaccgacgacaggaagccggtcgccgagatgctgccgggcttcaagcccgcgatccccgtcgtgttctgcggcctgttcccggtcgatgccgacgacttcgagacgctgcgcgccgcgatgggcaagctgcgcctcaacgacgccagcttctccttcgagatggagacctctgccgcgctcggcttcggcttccgctgcggcttcctcgggctgctgcacctcgagatcatccaggagcggctgtcgcgcgagttcgacctcaacctgatcgcgactgcgccgagcgtcatctacaagatgaagctcaccgacggccaggagatcgagatccacaatcccgtcgacatgcccgatgtggtcaagatcgcggagatcgacgagccctggatcgaggcgacgatcctgacgccggacgaatatctcggcagcgtcctgaagctgtgccaggaccgccgcggctcccagaaggagctcacctatgtcggctcccgcgccatggtgaaatacgacctgccgctcaacgaggtcgtgttcgacttctacgaccgcctgaagtcggtctccaagggctacgcctcgttcgactatcacctcaccgactacaagccggccgatctggtcaagatgcagatcctggtcaatggcgagccggtcgacgcgctctcgatgctggtccatcgcacccgcgccgagggacgtggccgcgccatggtcgagaagatgaaggagctgatcccgccgcacatgttccagatcccgatccaggcggcgatcggcggcaaggtgatcgcgcgcgagacggtgcgcgcgctgcgcaaggacgtcaccgccaagtgctacggcggcgacatcacgcgcaagcgcaagcttctggagaagcagaaggaaggcaagaagaagatgcggcagttcggcaaggtcgacatcccgcaggaggccttcattgccgcactgaaggtggatagctga

SEQ ID NO: 2508 - DNA, 1509 bp, BradyrhizobiumColbertium
gtgatccagttcgccatcctgcatgcggtgctctggaccttcatcctgatcaatctcaaggcggcgcaggacgttcacatggacgtcgcagaagcctggggctggggccagaaattcctctggggctatggcaagcccccgccgctgtcgggctgggtggccggcctctggttcagcgcgttcccggcggcggactgggcgacctatgcgctcgcgatgacgacggtgagcgtcggcatggtgatctgctggttcgtgagcttgcgcgtggtggatgcgcgccgcgcgttcctcgtcgtggtgatgatcgcgctctatccgatcttcaatttcaagggattcaagtacaacccggatctgttgcagctcgtcacgctgccgctgttggtgctcgcttatctgaacgcattcgagaggcggagctggcaatccggaatcctgctcggcctcgccggcgcgctggcgctgatgaccaagtattgggtgctgaccatgatcggcgccatcggtcttgccgcgctgatccatccggagcggctgcgcttcctgtcgtcgcctgcgccgtgggtcgcgatcgtgacgatggtcgcggcgatgatcccgcacatcgtgtggcttgcagatgcgcatttcgtgccgctgacctatgccggcgacacctacagcctcgccgacagcgctcaggtgcaccagctcgtcgcgggctacgtgctgcataatctcggactgctggccctgccggtggcgctcgcggcgctggccatggcgctggtgccgccttggggcaggctgctgctgcgcgccccctcgcgcatcgtcacgcgtgcctgggcgcgcggcggcagttccggcgtcaatgcctcgcaggcgctgaacgtctggatcatccaggtcatcgtcgccctcggcccgccgctcggtgcgctggtcttcagcatctacatgaagaccgattggggcatctcgctgttcttcctggtgccgctcgccctggtcgcgattccgacgctgcgcgtgcagggcgccgtgctgttcaacatcgccgcgatctggctcgtgctcagcgtcgcgacactcgctgcctcgccctggatcgccgcgcgggagatggcggccaatgccggcaacaccgcgacctacggcgcgcgctcggagctggcgcgcgagctgacccaggcctggcacgcgcgctttgcctcgcgctgggccgtcgtcgccggcaccatggagtcgatccagccgatggtgttctacagcccggatcatccgtccgcattgctgccgctcgaggcctgggattccgggttgacctcgcgcgatgacgccaagacgtacggcttcatcggcgtgttcgatccgaccgacggccggctgcccaagttcgagaaatgggtggcggaagtcgcgcccaacgccgagcgcatcgtgatgacgacgcgccgcttcacccacggcaaggccggcccggcgatgagctggaacatctacatcgcgccaccggcgaagtga

SEQ ID NO: 2509 - DNA, 318 bp, BradyrhizobiumColbertium
atgagcgacgaggcgtcacaagcggggacaggcgtgcccgcgggcgcgatctccaaggatcttcttatcgtcaacaagcgcggcctgcatgcccgcgcctccgcgaagttcgtccaggcggtcgagcgcttcgatgcacaggtgtgggtgacgcgcggcggcgagaccgtcggcggcacctcgatcatgggcctgatgatgctcgccgcagggcccggcacgacgatcacggtatccgccgccggcaccgatgccgaagcggcgctcgcggcgatcaccgagctggtcgagagcaagttcaacgaggaaggggtttag

SEQ ID NO: 2510 - DNA, 402 bp, BradyrhizobiumColbertium
atgattggtctagtacttgtgacccacgggcgccttgccgacgaattcaaggcggcgcttgagcatgtcatgggtccgcaaaaacaaatcgaggcgatcacgatcggcgccgaagacgattccgatctctgccgaagcgacatcatcgaggcggtcaaccgcgtcgattccggcgacggcgttgccatcctcaccgacatgttcggcggcacgccctcgaacctcgcaatatcctgcatgagccggcccaaggtcgaagtgctcgccggcatcaacctgcccatgctggtgaagctcgccaaggtgcgcgaggagcggtcgctgcccgatgcgatcgcgatggcccaggaagcgggccgcaaatacgtcaccatcgccagccgcgtgctcgccggcaaatga

SEQ ID NO: 2511 - DNA, 522 bp, BradyrhizobiumColbertium
atgagcgatgggcccagcgttcacgcctccgccgtcatggtcgggacttgtgcggtgctgatccgcgggccctccggctcgggcaagtcgcgcctcgcgtttgatttgatcatggcgggacgcgccggcctggtcgaaaggaccgttctggtcggcgatgaccgtgtccatctggcgacagtcggccatgaaattgaggtccgccccgccgcgccgctggtgggactgatcgagatccggggcctcggcatccgcagctgcgacttcgtggagcatgcgaccgtcggtctcgtcgtcgatctgcatgccgcggacgcggagcgactgcccccagccgagtccctgaaaaccagcattttgggtgtcgaaataccgcgaatcccggtggcccgcgactattcgccccttcccctggttgtcgcggccttgaccactaccaagagttcatcttccgttaacctttccggcgattgtttgaagggaaatggtaaccatatgaaccccagtatcgcgaccgagtga

SEQ ID NO: 2512 - DNA, 1797 bp, BradyrhizobiumColbertium
ttgcttgaccgaacgcagcctgatcccaacccgagcgccggggatagcacctccaacggcgttcaggagctcgttgccgaggacaagccgtcaggcttccggccgctgaactggctgaagcgcgccgggcagttcttcttcgctctctccttctcgagcctgacccgccgcatcgtctccctcaatctcgccggcctcgtggcgctggttgcgagcatcctctatctgtcgcaattccgcgccggcctgatcgacgcgcgcgcgcagagcctgttggtgcaggccgagatcatcgccggggcgatcgcggcctccgcgacggtgcagaccaacgccatcaccatcgaccccgacaggctgctcgacctcaagccgggcgagacctatggcggcccggacgagtattcgccgctggacttcccgatcaatcccgagcgcgtcgcgccggtgctgcgcacgctgatctcgccgaccaagacccgcgcccgcatctacgatccgaacggcagcctgctgctcgacagccgaaacctcgagaacgtgctccgcttcgatctgccgcctccggccgccaagcccggtttcgtcgagcgcggcatggtcgcagtgcgcacctggctgaatcgcggcgacctgccgctttatcgggagctcgggcccgagaacggcaatggctatgcggaggtgggcgacgcgcttcaagggcagaagcgctcgatggtgcgggtgaatgcgcgcggcgaggtgatcgtctcggtcgccgtccccgtgctgcgctcgcgggccattcacggcgccttgatgctgtcgacgcaaggcgacgacatcgatcagatggtcaccgccgagcgcctcgccatcctgaaggtcggtggtgtcgccgccgccgtcatgatcatgctctcgctcttgctcgcgagcaccatcgcgggccccgtgcgccggctcgccgacagtgccgagcgcgtccgccgccgcatcaaggcccgcatcgagattcccgatttcacccgccgccgcgacgagatcggccatctctccggcgcgctgcgcgacatgaccagcgcgctctacagccgcatcgaggcgatcgagatgttcgccgccgacgtcgcccatgaattgaagaacccgctgacctcgctgcgctcggcggtcgagacgctgccgctcgcgcgcaatgagaacagccgcgcacgcctcctcgaggtgatcgaacacgacgtcaagcggctcgaccggctgatctccgacatctccgacgccagccggctcgatgccgagctgcagcggcaggatgcggtcccggtcgatttgcgccgcctgctgacgacgctggtgtcggtcgccaacgagaccaagctcggccacgacgtcgcggtcgagacccgcttcgagggccgcagcccgaccgacaccttcgccgtgagcggccacgattcgcggctcggacaggtcgtctccaacctgctctccaacgcacaatcgttctccgaacgcggcagcaaggtgcgcctcacctgccgccgggtccgcggcgagatcgagatcgtggtcgacgatgatggtcccggcattcgcgacgacgcgctggagcgcatcttcgagcgcttctacaccgaccgaccgcatcagggatttggccagaactccggcctcggcctgtcgatctccaagcagatcgtcgacgcccatggcggacgcatctgggccgagaaccgcgcaggcccgcccgatgacgaaggcgtcccgaccgtatcaggcgcgcgcttcgtggtgaggctgccggcgctatga

SEQ ID NO: 2513 - DNA, 702 bp, BradyrhizobiumColbertium
atgcccacaatcgctttggtcgacgacgaccgcaacattctcacatccgtctcgatcgctttggaagccgaaggctaccgcatcatgacctacaccgacggcgcctccgcgctcgacggcttccgcaccacccagcctgatctcgccatcctcgacatcaagatgccgcgcatggacggcatggagacgctgcgccgtctgaggcaaaagtccgacctgccggtgatcttcctgacctcgaaggacgaggagatcgacgagttgttcggcctcaagatgggcgccgacgacttcatccgcaaaccgttctcgcagcgcctcctggtcgaacgcgtcaaggcggtgctgcggcgctcggcgccgaaggatccgaccgttgcgccgaaggagaacgacgccaaggcgctcgaccgcggcctgttgcgcatggatccggaacggcatacctgcacctggaagaacgagccggtgacgctcaccgtcaccgaattcctgatcctgcaggcgctcgcgacccgtcccggtgtggtgaagagccgcaacgcgctgatggacgccgcctatgacgaccaggtctatgtcgacgaccgcaccatcgacagccacatcaagcggttgcgcaagaagttcaaggtggtcgacaacgagttcgagatgatcgagacgctctacggtgtcggctatcgtttcaaggaggcctga

SEQ ID NO: 2514 - DNA, 750 bp, BradyrhizobiumColbertium
atgcaaccgactcccgacttcgaccctggaaagctagccaaatcgctgctgaggcggtctcggcaaggcgccctggcgacgctgatgaccggcagcggcgatccctattgttccctcgtcaatctcgccagccaccccgacggctcgccgatcctgctgatctcgcgcctcgctgtgcacacgagaaacatcctcgcggacagccgggtctcgctgatgctggacgagcgcgtggccggcgatcccctggaaggggcccggatcatgctggcaggccgggcggaagaggcgggcgcagacaaggatctgcttcagcggcggtatctcgctgcccatccgtcggcagaaggctttgtttcctttacggatttttccttctttcggatccggccgacgggaactcacctggtcgccggatttggccggatcgtcgatctcaagcctgagcaattcctgacggatctcaccggcgccgaggacctgctggcggcagacgagggcgcggtcgagcacatgaatgccgaccatcgggacgccatgaacctctatgcgacaaggctcctcggtgcggcctcgggcgactggcgctgcaccggttgtgaccctgaaggcctcgatatgcagcacggccaggcgacgctgcggctggacttcccggagcgggtcacggacggcacagggctgcgcaagatgctggtccgcctcgctggtgaggcgcgcaagaaggtggagcagggcgcaacgccttga

SEQ ID NO: 2515 - DNA, 2469 bp, BradyrhizobiumColbertium
atgagcgccggcaaatatgcggaagcgcttccgctcgcccaggccatggtcgcgagcctggagaagaccaacgacggtcgcgaactgtccgccgcgctcaacaatctcggccaggtctatgccggccagggccgcgacgatctggccgagccggtctacaagcgcgccattgcgttgatggagaagtcgctcggcctcgacacgggcttgatcgcgcccgaactgaacaaccttgccgcactgtatcaacggcaaggccgcttcactgaagcggagccgctgttcaagcgcgcgctcgccgtcagcgaaaagagcctgtcgcgcgagcatcccgatataggccgagctttgaacaatctcgccacgctccatgtgaagcaagagcgttttgccgacgccgagccgctgtttcagcgggcgctcgcgatctatcatcaagccgccgggcccgagcatcccgctgttgcaaccgtcctgaacaacatcggtcagctcaatcgcgatctcaatcgcgacgccaatgccgaagcgccgatcaagcgctcgctcgcgattcgcgagaaagtgctggggccggagcatcccgacgtcgcccgctcgctcaacaatctagccgggctctacgagcaccagaagcgccatgcggaggcagagcccctttaccgccgggccctggcgatacgcgagcatgcactcggagccgatcaccctgacgtcgcgacctcgacgagcaatcttgctcatttcctgcaagcgacgggacggacggtcgacgctttgccgctcgcgcagaagacgctcggcgcgaaccgtgcgcagctgcccgtcgtgttgccgatcctgttcgctgcgcgccagcaatcgctgctggcgagcgacaaggcgctcgatgacgcgctcgcagcgatccagcgcggcacgcaatcctccgcagcgtctgccgtgaacaagcttgcggtgcggcttgccgccggcaccgaccggctcgccgagctcgtgcgcaaggaccaggatctcgcggccgaagctgaagcgctcgacaaggcgatcgtcgctgcggtgtcgaagtcctcggcgcaacgcgatgttggggccgagcagcgcagccggacgcggatcgcttcgattgcgaacgaacgcgcggccctgcagaagacgctcgccgtcgagtttcccgaatattcctcgctctccaatccgctcccgctggccgtgaaggacatccagccgttgctctcggccgacgaggcgatggtgatctattccgtcaccaagggtcagagctatgtggtcgcgatcacgcgcgagggtgtcgactggaaggagatcaatgtcggagcggatctgctggcgcagaaggtgtctgcttttcgcaaggggctcgacgtcggcaaggcgcgggacagctccggaaaatcgggactgttcgatcttgcgctggcgcacgagctctatctcgcgctgcttggcccggtcgaggtgctgacgaaggacaagcgtaacctgctggtcgtgccgtcggcggcgctgaccgcgctgccgttccatctgctggtcacggagaagccgcaggctccgatcccggacaagctcgaaggctatcgcgatgccacctggctgctgcggcgtcaggcggtctcggtgctaccgtcggtggtcagcctcaaatcccttcgggcctttgcgcgcagggaccacggcgtcaagccgatgaccggtttcggcgatcccgtgttcaaccctgctgaaggacccgccgatcgtcgtgccgcgggcggcaagatcgccgcgcgcagcatcgcgacgattgcctatgccgaattctggcgcggtgccggtgtcgatcgcgctcgactggctcaggcgttgccgcaactgcccgataccgccgatgagcttaacgcggtggcgagggacgtcggtgccgccgcggccgacatccatctcggccgcgaggccagcgaaacgacgctgaagcgtgcagcgcttgcccaatacggcatcgtctactttgccacccatggcctcgttgccggcgacgtcaagggattgggtgagccctcgcttgcactttccattcccgaccagccaacggagctcgacgacggcctgctgaccgcgagtgaggtggcccagctcaagctcaacgccgattgggtggtgctgtccgcctgcaacaccatcgccggggacaaacccggcgcggaagcgctgtcgggattggcgcgctcgttcttctatgccggcgcgcgcgcattgctggtctcgcattgggcggtggattccgaagcggccacccgcctgaccacgtcgacgttcgcgctgctcaagaacgaaccagcgatcgggcgtgccgaggccctgcgccgcgcgatgttaacgtttgttgatgacacctcctcgccccagaacgcctatccggcgatgtgggcgccattcgcactgatcggcgaacgcgaggtaagataa

SEQ ID NO: 2516 - DNA, 1617 bp, BradyrhizobiumColbertium
gtgcaagagacgggcgtgcgcaacggtgccttcggcgccgacaaattcggcttaaagaatctcaagcaggttcactggaatctgggtgcgccgcaactctatcaatactcgcttgctgcgggtgaggcggtgctctcctcggacggcgcgctctgtgccgacacgggcgagttcaccgggcgcagcccgaaagacaagttcacggtgcgtgacgccaccaccgacaagaagatgtggtgggccggcaaccagtcgatcaccgccgagcagttcgagacgctctatcaggatttcctcaagcacgccgaaggcaagcggctgttcgcgcaggacctctatggcggcgccgatccggcctatcggatcaagacgcgcgtcttcaccgagctcgcctggcactcgctgttcatccgcacgcttctgatccgccccgaggcaatcgagctgtcgaccttcgtgccggagctcaccatcatcgacatgccgagcttccgcgccgatcccaaacgccacggcgtgcgctcggagaacgtcgtcgcgatcgatttcgcccgcaagatcgtcctgatcggcgggtcttattatgccggcgagatgaagaagtcggtcttcaccacgctgaactactatctgcccgagcgcggcgtgatgccgatgcactgctcggccaatgtcggggccaagggcgacaccgcgatcttcttcggcctgtccggcaccggcaagaccacgctgtcggccgaccccaatcgcacgctgatcggcgacgacgagcacggctggggcccgaacggcgtgttcaatttcgagggcggctgctacgccaagtgcatcaagctgtcgaaggaagccgagccggagatttatgcggcatcgacccgcttcggcgcggtgctcgagaactgcgtgctcgacgaggacacacgcgtggtcgatttcgacgacggctccaagaccgagaacacgcgctcggcctacccgctcgacttcattccgaacgcctcgcgcaccggccgtgcgccgcagcccaagaacgtggtgatgctcgccgccgacgccttcggcgtgctgccgccgatcgccaagctctcgccggcgcaggcgatgtatcatttcctgtccggctacaccgccaaggtcgccggcaccgagcgcggtctcggcaacgagccgcagccggagttctccacctgcttcggctcgcccttcctgccgctcgacccctcggtctacggcaacatgctgcgcgacctcatcgcccagcacaatgtcgattgctggctggtcaatacggggtggaccggcggcaagtacggtgtcggctcgcgcatgccgatcaaggtgacgcgcgcgctgctcaccgcagcgctcgacggttcgcttcgcaacgtcgcattccgcaccgacaagtatttcggcttcgcggtccccaccgcgctgccgggcgtgcctcacgagatcctcaacccggtcaatacctggaaggacaaggacgagttcgacaagaccgcccgcgcgctggtcggcatgttccagaagaactttgccaagttcgaagcccaggtcgacgcggaagtgcgtgcggccgcgccggacgtgaagctggcggcggagtga

SEQ ID NO: 2517 - DNA, 816 bp, BradyrhizobiumColbertium
atgcactccaagctcccgcaccccttcgacgacgccacccgcatccccgccggtgactcaagctggcaggggcacaccagcgacgattactgggccttcgtcggcccgttcggcggcgccaccgccgcaaccatcctgcgcgcgctgatggagcacccgcaacgcaccggcgatcccttggcaatgaccgtcaattactgcgcgccgatcgccaagggagcgttcgatctcgacgtgcggctggtgaaggccaaccgctccagccagcattggagcgtggagctgtcgcagaacggcggcgaggtcgcaacgctcgccaccgccgtgttcgccgagcgccggccgtcctgggagcaccgggtggtcgaggtccccgacgcgacgccgttcgaacagacgctgccgttcccgaagatctcggcggcgtgggccaaccagtacgaattccgcttcgtcgagggcgagatgcggatcggcccgcggcaggccgaccccgccagcacctattcgaagctctggatcagcgaccgcacgccgcgcaagctcgacatgctgtcgctgatgtcgatgtcggacgccttcttcggccgcgtcttccatgcgcgacgcgagctggtgccgttcggcacggtgtcgctgacgacctacttccacaccacgagcgaaaacctcgccgccgaggacaccacgcgcgtgctggcgaccgcggacgccaagatctttcaccggagctacggcgatcagcatggcgagctgtggtcgccgaacggccgcctgctcgcgaccacgacgcagatcgcgtacttcaaggcgtag

SEQ ID NO: 2518 - DNA, 2517 bp, BradyrhizobiumColbertium
ttgcaggattcatcgttccagcccaattattccgcccccggacagcctatcgacgaactcgcgctgaccgagatcaagggcgccatcctggcaaagctgcgccttgccatcggcaaggacgcgggcatggcgacaaagcacgactggtaccaggccgcggcgctggcgctgcgcgaccgcatcgtgcatcgctggctcacggccgagaagcacagctacgataccgggcgcaagcgggtctattatctctcgctcgaattcctgatcggtcgcctgttcaccgacgcgctcaacaatatgggccttctgaatatcttcgagctcgcgctcggcgatctcggcgtctcgctgcccgagttgcgcaaatgcgagccagacgccgcgctcggcaatggcggcctcggccggctcgcggcatgcttcatggagagcatggcgacgctgtcgatccccgcgatcggctacggcatccgctacgattacggcctgtttcgccagatcatcaatcagggctggcagcaggaatatccggacgaatggctgggcttcggcaacccctgggagttgcagcggcccgaggtgatctacgacgtcaatttcggcggcggcgtcgagcatgtcgacgacaagggccgcgaccgcgcgatctggcatccggccgagaccgtgcaggccatcgcctatgacacgccgatcgtgggctggcgcggccagcacgtcaatgcgctccggctgtggtcggcccgctcgcccgatccgctcaagctcgacgcgttcaacaagggcgattacgtcagcgccagcgccgaacaggcgcgcgcggaggcgatctgcaagttcctctatccgaacgacgagagcccggcgggccgcgagctgcggctgcgccaggaatatttcttcgtctccgcctcgcttcaggacctggtcaagcgacatctgtcgtccgatgggcagttgcgcagcctggcaggcaaggtcgcggtgcagctcaacgacccccatccgagcctcgccgtaaccgagctgatgcggatcctcgtcgacctccacaatttccgctgggacgaggcttggaagatcacggtcgccaccctctcctacaccaaccacacgctgctgcccgaggcgctcgagacctggccggtcgagctgttcgagcggctgctgcctcggcatctggagatcatctaccgtatcaacgtgcagcatctggcgctcgccgaagcacgctgccccggcgacatcgacttccgcgcctcggtctcgctgatcgacgagaagagcggccgccgtgtgcgcatggggcagctcgccttcgtcggctcgcaccgcatcaacggcgtctcggcgatgcattcggacctgatgcgcgagaccgttttccacgacctcaaccatctctatcccggccgcatcaccaacaagaccaacggcatcaccttccgccgctggctgatgctggcgaacccgaagctgaccgagctgttgcgcgagacctgcggcgatgccgtgctcgacgatccgacccagctcggcctgatcgaggcgcgcgcgagcgacgtcgaattccagaagagattccgcaacgtcaagcaccacaacaagacggccctggcgcgcgtgatcggcgagcggctcggcatcaaggtcgatccgagcgcgctgttcgacgtgcagatcaagcgtatccacgagtacaagcgccagctgctcaacatcatcgagacggtcgcgctgtaccaggccatcaaggacgatccgaacggcaactgggtgccgcgggtgaagatcttcgccggcaaggctgcggcgagctatcgctacgccaagctcatcatcaagctgatcaacgacgtcgccgagatcgtcaacaacgatcccgcaatcgacggcaagctcaaggtcgtgttcctgcctgactacaatgtcagcctcgccgaggtgatcattcccgcggccgacctgtccgagcagatctccaccgccggcatggaagcctccggcaccggaaacatgaagctggcgctcaacggcgccatcacgatcggcacgctcgacggcgccaatatcgagatccgcgaccatgtcggcgcggagaacatcgcgatcttcggcatggaagccggcgacgtcatgatccggcgcaagcaggggctggacgcatcggacgtgatccgcaattcgccgaaactgcagcgcgccatcaatgcgatcggcgccggcgagttctcgcccggcgaccccggccgcttcgaatcgatcgcgcatgcgctgcgctatctcgaccattacatggtcagcgccgatttcgattcctattacgaggcgcagcgcgcggtcgatgcgcgctggcaggtgataccggcctggacgcgggcctccatcctcaacgtcgcgcgcatggcctggttctcctcggaccgcaccatccgcgaatacgccgaggagatctggaacgtgccggtcaatccgaccacgccgctgctgccgaacctgcgcgacgccgcgggctga

SEQ ID NO: 2519 - DNA, 225 bp, BradyrhizobiumColbertium
gtgctgatcgaaatcgctactgccctcctcgtcgtctgcatcggcgcctccagcgcggcgcttggcgccggcaaatccggccgcagccccgacggcctcagctgcggcttcacggtcccagagaaggcgtctcccgcagctcgctgcgctgcgatcaagcgccaatgtggcggcaagttctacgcaaatgcgtgcggtgacagattgatctccgcagcaagctga

SEQ ID NO: 2520 - DNA, 876 bp, BradyrhizobiumColbertium
atggaggccgcaatgctcgatctggagctgctgcgcagcttcgtctcggtcgtcgaggccggcggcttcacccgcgccggcgcgcgcgtccaccgcacgcaatcgaccgtgagccagcagatcaagcgcctggaggaggatgtcggccaggtgctgctgcatcgcgacggcaaggacgtgcgcccgaccgaggcgggcgagcggctgctttcctatgcgcgccggctgctctcgctcgccgaggaggcgcgcgacgtgttgcgccagcccgacggcgagggcgcgatccggctcggtattcccgaggatttcgcggcctaccgcctggcgaagctgctgggcgcgttctcgcgctcgcatccacgcctgcgcctcgacgtgcgcgcgggccagagcaagcacctcgcccacgatctcgaacgcggcgagctcgaccttgcgctctacaagcgggaggccggcgagaagggcgcggtcgcggtgtggccggagcgggtgcactgggtcaccagcaagagccatccggtcgacgtcgacgtgccgtccgtgccgctgatcggctttccgctcggctgcatctatcgcgccggcgccatccacgcgctggaaagcgcgggccgcgcctggcacaccgcctacacgtcatcgagcctcgccggcatccaggccgcggtcgccgccggcatggggctgagcatcctgtcggagatgtcgatcctctcagaccaccgcgtgctgacggcgaaggaaggctttgcaccgatcaacaagaccgagctcgcactgatggcctcgcccaatgcgagtccggcaacgctgcggctcgccgatcgtctggcgcagttttgcgatgcggtgcaaacgaaggcggcttga

SEQ ID NO: 2521 - DNA, 921 bp, BradyrhizobiumColbertium
atgtcgctcgctccctcggtttctgttcctcgcagccgtttcaacacgctgccgctcgctatcggtctgttctgcctgctctggagctacgccttcatcgccggcaagatcggcgtcacccatcgcccgccgctgattctgctcgccgcccgcttctcgctcgcaggcattctgatcctgggcgccacgctgatacggggcgatgattggtccctgtcctggcgcgacgctgcggtcttcgcagtgctcggcatcgccaacaacgcgctctatctcgggctcggctacaccggcctgcaatcggtttccgccggtcttggtggcctgatcgtctcggcgaacccggtgttcacggccgcgctcgccgcgcttctcctcggcgagggcatgacctggcgcaaggcgggcggcctcatgcttggcgtgatcggcgtgacggcgattgtctggcaccgtctctcggtcggcacggactcgctgcacggcatcctcttcacgctggcctcgctggcttcgatcgtcgccggcaccatcctgttcaagctgctcgcgccgaaggggtcgttgtggatcggcaacggcgtccagaacctcgccgccggcatcgtgctgacgccggtcgcgttcaccttcgccgatatccacgcgatcgactacacgccgagtctgatcggcgcgttcgccttcctcgtgctcggcggctcgatcctcgcctactggctctggtttcatctgctgaaggtgtgtggggcctccgctgccagcgcctatcatttcctgatgccaccgctcggcatgctgttcgcgtttgtcgtgctcggagagcatgtcgaggcgcgcgatctcttgggaatcatcccggtggcgctcggcatctatctggtgacgcgaccggcgaaggcggcggcgtctgcaagctga

SEQ ID NO: 2522 - DNA, 771 bp, BradyrhizobiumColbertium
atgattcgcgtgcttctcgccatcgctctcgtcctgctgctcggcggcgccgcgcgggccgagcggctgatcgtgtcagtctccaaccatcgggtcacggtgacgccgaactattcgggcgaggagctggtgctgttcggctcggtggaaaaggacgccacgacgccggccgaccgcacggcctacgatctcgtggtcaccgtgatgggcccgcgcgcggacatggtgacgcggcgcaaggagcgcaccttcgggatctggatcaacaccgactaccggcagttcctgcaggtgccgagctatctcgcgctgttcgccaaccgccccttcgatgcgatcacctcgcccgagatcgcgcggcgacagcagatcgggctcaacaacgtgctgctgacgcagcgagtcggcggcgattacgccgacgtggtgccccacgatgtgttccgctcggccttcattcgcctgcgcacccagcgcggcctctaccgcgaggattcgagcgcggtgacgttcctgacgccgaccctgttccggaccggcattccactgccgggagaggtcccgatcggcacctatcaggtcgagatcaagctgtttgcgaacggggcgttcatcggcaagaccgacaccgccttcgagatcgtcaaggtcggcttcgagcagttcgtcgccaacagtgcgcggcacaacgggttgctctacggccttgcaacagtggcgatggcgctgatgacgggatggatggcgtcgatcgtgttccggaaagactag

SEQ ID NO: 2523 - DNA, 918 bp, BradyrhizobiumColbertium
atgcagctctaccttccgatcgccgacctcccggtcaacgtcttcctggtgctcgccatgggcgcggcggtcggcttcgtctcgggcatgttcgggatcggcggcggttttctgatgacgccgctgctgatcttcatcggcatcacgccggccgtcgcggtcgcctccgtcgccagccacatcgcggcctcgtccttttccggcgcgctctcttactggcggcggcgcgcgatcgatccggcgctggcgaccgtgctgctctgcggcggggtgaccggcacggcgctcggggtttgggcgttcacgcagctgcgcgcgctcggccagctcgatctgatgattgcgctgtcctacgtcgtgctgctcaccacggtcggcggcctgatgttctacgagggcctgcgcgccttgatgcgcacccgacgcggcgcgctgccgccacgccgcacgcacaactggatccacggcctgccgctgaagatgcggttcaagcgctcgaagatctatctctcggtaattccggtcgtggtcgtcggcatcgcgatcggcttcatcggcgccatcatgggcatcggcggcggcttcatcctggtgccggtcatgatctatctgctcagagtcccgacctcgacggtgatcggaacctcgatggtgctgacgctggtcacgatgctgttcgcgaccatgctgcacgccgtgaccaatcacctggtcgacgccgtgctggcgctgatcctgatggtgggcggcgttaccggtgcgcagttcggtgcccgcgccggccagaagatccgcggcgagcagctgcggctgctgctcggcctcttgatcctctcggtcggaatccgctttgcgatcgagctggtgatccagccctcggacctcttcaccatccgcgagctcggagtgagcggatga

SEQ ID NO: 2524 - DNA, 147 bp, BradyrhizobiumColbertium
gtggtgaatgggcgcgacggcggcatcgacgcttttgctcctcaccccgaggagccggcgcagcaggcgtctcgaagggcgaggcccggaccgagaggcgggcctgcatggttcgagacgcgcgcgagggcgcgctcctcaccatga

SEQ ID NO: 2525 - DNA, 3390 bp, BradyrhizobiumColbertium
atgaattcgcgcgtatcgtggagtgctgacggcatcgatccatccgtccgggagcgggccgaagctgctgcgcgcagggccggcatgtcgctcaacgactggctgaactccacgctcggcgagactgccccgccgaactttcgcgcggcctacgaccagcgtccgcagcacatgccgagtcaggagagccgcgaagtcgccgacattcaccagcggctcgacgcgattacccagcagatcgaacggatttcgaagcccacgccgcgccaggagatctcgcgcgagcagggcgtcgcgcgccagctcaacgacgcgatctcgcggctcgacgcacgcctgtcgcaaatctcccgtccgcaacagcctcaggcgccgcgtccggctcctgcggcctcgcccatcgaggcgcgccagcgccaggccgatgcggtcgagcgcgcggcggctcaagtctatcgcaactcccctccccttagtccggcttcattcgacgtcgcggtcgccgagatcaccgcgcgccagagcgagctcgatggctttacgccgaggcagatgccgccgcgcgccgcgccgccgattgcacccacggcggctccttacgcgcctccagtggcgccgcccggccctgcctacgcgccgccgccgcctccgcagccggggccggatttctcctcgctcgagcgccatctgctcaagatcacgagccagatcgagtcgctgcagcgtcccgacaataccgagcaggcgatcaacgccttccgcagcgagcttgccgaaatccgtgccgccatcaccgaggcgatgccgcggcgcgcgatcgaatcgatcgagaacgagatccgctcgctgcaccgtcggatcgacgagacgcggtccaacggcaccgacggccaggtgctgtcggggatcgagcacgcgctgtccgagatcaagcaggtgctgcgcacgctgacgcctgccgagcagctcaccggctatgacgaggcgatccgcaatctcggagccaagctcgacctgatcctgcgcgcgaatgacgatccttcgaccgttcagcagctcgaaggcgcgatctccgcgctgcgcgccatcgtctccaatgtcgcctccaacgaagcgctcgcgcggctgtccgaagacgtgcagctgctgtcgtccaaggtcgaccagatcacccgcgcctccggccagggtgacagctttacggtgctggaacagcgcattgccgcgctcaccgccgcgctcgaaacccgcgagcggcctcagccgtccgaaagcaccgagcatctcgaagccgcaatccgcgcgctgtcggaccgcttcgaccgcatgcaggtcggcaacgactcggcctccaccttcgcccatctcgagcagcgcgtctcgtatctgctggaacggatcgaggccgcctccgatccgcgcaacggcaacctgagccgcgtcgaggacgggctgcacgacatcctcaggcacctggagcggcagcaggcgacctatgccgcgctggccgaaagccgcaactccgcgccggccgccgatcccgacatggtcgatctcgtcaagcgcgagctctccgacatccgtttcagccaggccgagaccaaccggcacacccaggattcgctcgaagccgtccacagcgcgctgggccacgtcgtcgatcgcctctcgatgatcgagggcgatcttcgcggggtgcgcactgcgccgcagcccgccgctccgcagccgatgccgtccgcggctccgatggagcccgcgccgatggcgcgcgagccgcggccgcaagcacagccgccgaaatacgatccgaagccagagctgcccaaccccgccgccgcgcaagccgcacaggccgccgccttcgtcgccgcgccgcgcgaattccatgccgccgctcccgccgcgccgcccccggtaccggcgatgccccccattccgccgcgcgcgatcagcgagatcctggagccgcatacggccccgccacgcgccgccctggcgccggaattgccgccggatcatccgctcgagccaggcacacggccaggcggacgcgtcgccacgccatcggagcgcatcgcggcgtccgagagcgcgatcagcgaaattcccgccgggccgaaagagccggtgtcgtcatcgagcttcatcgccgccgcgcgccgtgccgcccaggctgccgcagcccagccggaaaagaccggccgcgccgccaaggcggggaccgaccgttcgaaggaaacgggcaaggacggcggttcgaccatcacctcgaagatccgttcgctgctggtcggcgcgagcgtggtcgtgatcgtgctcggtaccttcaaaatggcgatgaacctgctcgacggcgacggcccgccgccggcgccgcaggcgatgcagaacattccgagcgagccggcggcgcccgccccgccgcctccagtcgaaacaaagccggcaacaccggagcaggtgacgccgtcgatgacatcgccgacgccgatcggacggcagtcccagaacaatgccgcgccggcgcaagcggccaatccgggcagcgcggcctcggtcgaaatcccgcccgcacccgccgcggctccgctgccgccggccgccggcgaaatcaccggcgcgttgtcggggacgagccgcgccaagctcggcctggtccaggtgccgccgagcgagagattgcccgacggaatcggcggcccggccttgcgcaccgccgcgatgaagggcgatgcgaccgcggcctacgaaatcggcctgcgcttcgccgaaggcaagggcgtcgccacgaactacgacgaagccgccaaatggtacgaccgcgcggcgcaggccggcgtggtgcccgcgatcttccggctcggaacgctgtacgaaaagggcctcggcgtgaagaaggacgccgacatcgcccgacgctactacacgcaggctgcggagcgcggcaacgcgaaggcgatgcacaacctcgcggtgctcgatgccgacggcggcggacgcggcgcgaactacaagagcgcggcccagtggttccgcaaggcggccgatcgcggcgtcgccgacagccagttcaacctcggcattctctatgcccgcggcatcggcgtcgaacagaacctcgccgagtcctacaaatggttcagcctggcggccgcgcagggcgatgcggacgccgccggcaagcgcgacgacgtcgccaagcgcctcgacccgcaatcgctcgctgcggccaagctcgcgatccagaccttcagcgccgagccccagcccgacgacgccgtcaacgttgcgacgcccgccggaggctgggacagcgcgccgcaggcgaacgccaagccggcgccgaagcaagtcgcaaccaagcgctcggcatccgcggcgcattga

SEQ ID NO: 2526 - DNA, 591 bp, BradyrhizobiumColbertium
atggcactgggcgacgcaatcctcgcatgcctgacggaacgtccgatgactggctacgagctcgccaagaccttcgattcctcgatcggcttcttctggaaggccgaccaccagcagatctaccgcgagctctccaagctgcgcgaccgcggctacatccagggccgcgaggtcgtgcaaacaggcaagcccaacaagctcgtttatacgctgacgcccgagggtagaacagcgctgcggcactgggccgcgcggccaagcacgccagcctcgaccaaggacgacctgctggtgcgcctgcacgcgctcgacagcatcgacatcgagcccctgcggaccgacctgatggcccgcctggagcaccatcgcgaccgccatgccaactacgagcggatcctgaagaagcgctttcccgacggcagggcagaaggccggctcgaccttggcaacctcttgctgctccgtctcggggcccgccacgagcagatggtggccgatttctgcgaggaggcgctggaggcgctgtcggcggagagtggcaagggcacggtggtgccgctggaggatggcaagcgcgaggggaaggggtag

SEQ ID NO: 2527 - DNA, 387 bp, BradyrhizobiumColbertium
atgaccggcctcgattcctggtacgcctacatgaagtcccacgaccgcgccgcgctccgggacctgctgcatcccgatgccgtgttcgagagccccgtcgtgcattcaccgcagcgcgggcgcgacatcaccttcaaatatctctccagcgccgagaaggtgctcggcggccccggcttcacctatgtcggcgagtggaagaacgagcgcggtgccgtgcttgaattcaagacccagatcgacggcatcgagatcaacggggtcgacatcatcagcttcgacagcgagggacgcatcacccatttcaaggtgatggtgcgcccgctcaaggcgatcaacatgctgcaccgcctgatggcggagcagcttgccgccgcccaaccataa

SEQ ID NO: 2528 - DNA, 1791 bp, BradyrhizobiumColbertium
atgccgacctataaagcccccgtcgaagacgtgaacttcctgctcaacgacgtcttccagatcgaccgctacgacaatctgccgggcttctccgacgcgtcgagcgacgtgcgcgaagccattctcggcgaagccgccaagctcgccgaagaggtgctgcagccgctcaatcgcgtcggcgatctcgaaggctgcaagcgcgccgaggacggcagcgtcaccacgccgaaaggcttcaaggaggcgttcaagcaggtcgccgagggcggctggctcggcctctcggcgccgaccgaatatggcgggcagggcctgccggtgacgctctcccaggcggtcaacgagttccagatctccgccaacatggcgttctcgatgtatggcggcctcaccatgggggcgaccgcggcgctgctggtgcatggctctccggagcagaagaagacctatgtgccgaagatgattgcgggtgagtggaccggcaccatgaacctgaccgagccgcattgcggcaccgatctcggcatgctccgcaccaaggcggtgcggcaggcggacgtcagcttcaagatcacgggcaccaagatcttcatctcggccggcgagcatgatctcgccgacaacatcatccacctcgtgcttgcccgcatcgagggcgcgcccgccggcatcaagggcgtctcgctgttcgtggtgccgaaattcctggtcaatgccgacggttcgctggggcaacgcaacggcgtcgtctgcggctcgatcgagcacaagatgggcatccacggcaattccacctgcgtgatgaactacgacaacgccacgggctggctgatcggcgaagagaacaagggcatgcagggcatgttcgtgatgatgaacgaggcccgcctcggcgtcggcgtgcaggggctcgcgcagtccgaggtcgcctatcagaacgcggtcgcctatgcccgcgagcgcatccagggccgttcgctgaccggtgcgaaggcgccggacaagccggccgatccgatcatcgtgcatccggacgtgcgccgcacgctgctctcgatccgcgccttcaacgaggccgcgcgggccttcgtgatctggaccgcgctgaagagcgacgtcgcccatcgctccgaggatccgaaggaccgccaggccgccgacgaccacatgggcctgatgacgccggtgctgaagggcttcctcaccgattacggcttcgccaacgcggtgcaggcgcagcagatgtatggcggtcacggctacatcgccgagcagggcatggagcagttcgtgcgcgatgcccgcattgcgatgatctatgagggcgccaacggcatccaggcgctggacctcgtcggccgcaagctgccgcgcgacggcggccgcgccatcatggccttcttcggcgaggtcatggcctttgccaaggagaacggcggcgacgaggcgctcaagcccttcatcgccccgctgtcgacctcgctcggccatctccagcaggcgacgacctggctgatgcagaacgcgatggcgaagccggataatgccggtgccgctgcaaccgattacctgcatctcttcggcttcgtcgcgctcggctacatgtgggcgaagatggcgaaggtgacgaatgcgaagattgccgagagcggggcgacgccctatctctccacgaaactcgtcaccggccgtttcttcatggagcggatgcttccggagaccgcggccaatctcgcgcgcatccaggccggctgcgccaccatcatggaattgccggcggaagcgttctga

SEQ ID NO: 2529 - DNA, 1209 bp, BradyrhizobiumColbertium
atgcctgaggcattcatctacgatcacgttcgcaccccccgtggccgcggcaaggcggacggcgcgctgcacgaagtcactgcgctggcacttgccacggtgccgctgaaggcgctgaaggaccgtaacaacctgccggaagattcggtcgacgacgtcgtgctcggcgtggtcgatcccgtcggcgaggcgggttccgacatcgcgcgcttcgccgcgctgaaggccggtctcggcgaagccgtgcccggcgtgcagatcagccgcttctgcgcctccggcctcgacgccgtgaactttgctgccgcacagatcatgagcggccagcatgagctcgtgatcggcggcggcgccgaatcgatgagtcgcgtcggcatcggcgcctcaggcggcgcctggccgatggacccgtcgatcgcggtgccggcatatttcatgccgcagggcgtctcggccgatctgatcgcgaccaagtacggcttctcgcgcgacgacgtcgacgcctatgccgtgcagagccagcagcgcgcggccaaggcctgggacgagggacgcttcgacaagtcggtcgtgccggtgaaggacatcaacggcctcaccatcctcgccaaggacgagcacatgcgtccctcgacgacgatgcagtcgctggcacagctgcagccgtcgttcacgatgatggcgcagatgggcggcttcgacggcgtcgcagtgcagtcgcacccggagatcgagcgcgtcaattacgtgcaccatgccggcaactcctcgggcatcgtcgacggcgccggcgccgtgctgctcggcagcaaggaagccggcagcaagtacggcctgaagccgcgcgcaaagatccgtgcgttcgccaacatcggctcggagcccgcgatgatgctgaccggtccggtcgacgtcaccgagaagctcttcgcgcgttcgggcatgaagaagacggacatcgatctgttcgagctcaacgaggctttcgcatccgtcgtgctccgctacatccaggccttcgacatcgacaacgccaagatcaacgtcaatggcggcgccatcgccctcggccatccgctcggcgcaaccggcgcgatgatcctcggcaccgtgctcgacgagctcgagcgtaccaacaagtccaccgccctcgtcacgctgtgcatcggcggcggcatgggcaccgcgaccatcatcgagcgcgtgtaa

SEQ ID NO: 2530 - DNA, 2214 bp, BradyrhizobiumColbertium
atgtcgtacaagaacttcaaggttgagaccgattccgacggcatcgcgctcgtcacctgggatatcccgggccgttcgatgaacgtgctcgacgagacctccaccaacgaactcgaggcgatcgtcaaggcgaccacggcggatgctgcggtgaagggcgtcgtcatcacctcggccaaggaggccttctgcgccggggcggacctctccatgctcgaaggcatgaaccaggcctacgcaaaagtcttcaaggagcagggcgagaccgcggcgaaccagatgctgttcgaccagagccggcgcttctcgcaggtgctgcgctcgatcgaaacctcaggcaagccctgggcggccgcgatcaacggcctcgcgctcggtggcggcttcgagatcacgctgtgctgccactatcgggtcgcggcggagaatcccaagacccgcctcggcctgcccgaggtcaaggtcggcttgttccccggcgccggcggcacgcagcgggtgccgcgtcttgtgccgccgcaggacgccatgacgatcctgctcaagggcgatcctgtgacggtggagaaggccaaggcgctgaatttgattcacgccgtcgttcccgccgccgatctcgtcaaggccgcgaaggactggatcaagggtggcggcaaggccgtcgcgccctgggacgagaaaggcttcaagcttccgggcggtccggtgttctccaaggccggcatgatgatgttcccggctggcaacgccatctatcgccgcgagacttacgacaattacccggccgctcgcgcgatcatgagctgcgtctatgagggcctgcagctgccgatcgatgccgcactgcgtgtggagtcgcgctacttcacttcggtgctgcgatccaaggaagcggcggcgatgatccgcagcctgttcctgtcgatgcaggagctcaataagggcgcgcgccgtccgaaggacgtggccccgaccaaggtgaagaagatcgccgtgatcggcgccggcttcatgggcgcgagcgtcggctacgtctcggcccgcgccggcctcgacgtcgtcctgatcgaccgcgaccaggagagcgccgacaagggtaaggcgcatgcgcagaaggtgatcgaggagcagatcaagaagggccgcgccaagcctgcggatgccgaagcactgctcgcgcggatcacgccgaccgcggactacgccgcgctgaaggacgtcgatctcgtcatcgaggccgtgttcgaggaccgcaaggtcaaggcggacacctttgccaaggcgcagcaatatctcaagcccgacgtgatcttcgcctccaacacctcgacgctgccgatcacctcgctggccgagagcttcaaggaccagggcaagttcatcggcatccacttcttctcgcccgtcgagaagatgatgctggtcgagatcatcctcggcaagaacaccggtgacgtcgcactcgcgaccgcgctcgattacgtccgccagatcggcaagacgccgatcgtggtcaacgactccagaggcttcttcgccaaccgctgcgtcggccgctacgtcgccgaaggcaacgagatgttcctggaaggcgtgccgccggcgatgatcgagaactgcgccaagatggccggcatgcctgtcggcccgctctcgctctcggacgaggtcgcgctcgacctcggcctcaagatcatgaaggcgacggaagccgatcttggccccaatgccatcaatcccgaccagaagaagctgatggtggagatggtcgagaagcagggccgcctcggccgcaagaacggcaagggcttctacgattaccctgagaagggcaagggccagaagagcctgtggccgggcttgtcagcgctgcagccgaagcaactcgaccctgacacgctcgacgtcgaggagctgaagcagcgctttttggtggtacaggcggtggaagccgcgcgcacggtggaggaccacgtcatcaccgatccgcgcgaggcggatgtcggctcgatcctcggcttcggcttcgcgccgttcaccggcggcacgctgtcctatatcgacttcatgggcacgaagaagttcgtcgagctctgccgcaagctcgaggccaagtacggctcgcgcttcacgccgccgaagctgctggaggagatggcagccaagggcgagaccttctatggtcgcttcgcgccgaagaaggcagcggcttga

SEQ ID NO: 2531 - DNA, 288 bp, BradyrhizobiumColbertium
ttggtcgcgagcggaatcgcgggacttgcgacgggactgttctttcgggtctgggctctgttgctcgtttcaccggcgactgcgattgttgcagcaaccgtgctccagagctcggagttcggattttgggcgggtattccgatcgtgaccgcttgcctcatgatgggccagttcgcctacctcgcagcgacgtttcatctgtacagaggagaactctcaatgcaggacgaaaccaacggcgaaccaggcaagcaaagccataaccacatcggcggtcaaaacgagtaa

SEQ ID NO: 2532 - DNA, 315 bp, BradyrhizobiumColbertium
atgagcggggcgaggtcgacagaggcgcatgaagctcgaaatcgcggggacgatctgaagctgaagtccagcgacctgctcccggcgctgggactcgacaacgatcaaatcgtgaccgaaggtccggtgattgtccagatgaacgccgatagaccgcccgtgacagcgtggggcacaagttccggccacggcgacctcatggaccagcagttgcggcggccgacagttcatcaagataccggcttgaaagataccgacttgaagacccgcgtctcggcgtggcgatgtcaatttgatacgcattgtcccggttaa

SEQ ID NO: 2533 - DNA, 495 bp, BradyrhizobiumColbertium
atgaaacgcagaccatcgaccgaggcaacggccgcctggatccgcctgatgcgggtgcagagccgcgtgctcgattgcgtcgagcaggacttgaagaaagccggctttccaccactggcctggtatgacgcgctgctcgaattgtcgcgggcgccctcgggcgaactgcgcccggtcgaactcgagcggcagatgctgatcccccaatattccacatcgcggctgatcgaccgcctggtcgatgagggccttgcctcgcggcgcgaatgcaagatcgacaagcgcggccagttcgtggagatcacggaagccggccgcgagctgcagaagcggatgtggggcgcctattccgctgcgatcgaaaaatatgtcggttcgaaactgtcagatgccgacgccgtcaagctcagcggtctgctcgaccgcctgggctgctcgtgcggcgagatgaaactgccgcccgcgggcgccaacgaaagcatgccgtcgcgatga

SEQ ID NO: 2534 - DNA, 1371 bp, BradyrhizobiumColbertium
atggcgcgagaccagatcgatatgacgcctctgcaatcgcgcgacgaactcgtcgcgtggttcgaggccggctgcaaggacccgtcggaattccgcatgggcaccgagcacgagaagacgccgttcacgctcgaaggccaccgtcccgtgccttacgaaggcgcacgcggaatcggcgcgctgctcgaaggcatgaagctcctgctcggttgggagccgatcatggagaagggcaacatcatcggtctctacgacgtcaccggcggtggcgcgatctcgctcgagcccggcggacagttcgagctgtccggcgcgccggtcgagaacgtgcaccagacccagagcgagttgatggcgcatcttgcacaggtgcgcgagatcgcaacgccgctcggcatcggcttcctcgggcttggcatgacgccgacctggtcgcgcgccgacatcccggtgatgcccaagggccgctacaagatcatgaccaactacatgccgaaggtcggtcagtacggcctcgacatgatgtaccggacctgcaccgtgcagaccaatctcgacttctcctccgaagccgacatggtcaagaagctgcgcgtctcgctcgcgctccagccggtcgcgactgcgctgttcgccaattcgccattcaccgaaggcaagccgaacggctttctctctttccggtccgagatctggcgcgacaccgacaacgcccgcgcgggcatgatgccgtgggctttcgaggacggcatggggttcgagcgctatgtcgactacgcgctcgacgtgccgatgtatttcgtcaagcgcggcgaggagtacatcgacgtgtcgggctcctcgttccgcgcgttcttcgagggccgcaacaacaatcttcccggcgagcgtccgacgctgtccgactgggccaatcatctctcgacgatcttcccggaagtgcggctcaagcgctatctggagatgcgcggctccgacggggggccatggggccgcttgccggcgctgcccgccttctgggtcggaatcctgtacgacgacgcttcgctcgatgccgcctgggacctggtgaagcactggaccgcacatgaacgtcaggctctgcgcgatgacgtgccgcgtctcggcttcaaggcgcggatcaaggaccgttatctcttcgagatcgccaaggagtgcctcgttctggctcatgccggcctgcggcggcgcagccggatcgaccagctcggccgcgacgagacccggcacctcgagccactcgatcgcatcgtcgattccggcaaaactcccgcggaggaaatgctggagaaattcaacggtccctggaagggttcggtggaaccagcctatgtggagtacgcgttctag

SEQ ID NO: 2535 - DNA, 567 bp, BradyrhizobiumColbertium
atgcggaagggccgcctatccggggccgtcatggccagcgtcgtggcatctgccgcgctgctttcgctcgcatttgcgggcgtgccggcgcttgcccagacggcgttcgatcggcccggtggcgactacttcagcacaccggtcgcctcgggcgatcccgaagattgcgcgctgctgtgcgagcgcgaccgccgctgccgcgcctggagcttcagctatcccgacgtcgaaggcgggtctgccgtttgctggctcaagaacaccgtgcccgcacgcgtgccggggagttgctgtatctccggagtgcgcggtgcgggcgtgattgagccgcggatcgagggcgtcgaaacctcgatcgaccgccctggcggcgatctgcgcaacttcgacttgaaggacggggagggtgtggaggtctgcaaggctgcatgcaccgccgacaacaaatgccgcgccttcacctatgcccgccccggctacaccgggcgcgaagcgcgctgtttcctgaagaaggaaatcaagcccccgcgccgcaaggcgggattcacgtcgggcgtggttcgttag

SEQ ID NO: 2536 - DNA, 570 bp, BradyrhizobiumColbertium
atgacccgcgacgaattcctcgcgttggcgctgcagaatccggtcaacgccgcgatcgtcgatgaactcgatcggctcgcgctgcccgatgcgtggcttgtcgcaggttgcctcgtgcagacggtttggaacgcgcttaccggccgtgcgatcagccacggcatcgccgactacgacgtgttctattttgaccccgatacctcgtgggaagcggaagacactgtgatccgcgggctgcatgcgcgtcttgcgcatctcggcgccaaggtcgagatccgcaaccaggcgcgagtgcatttatggtaccccgacaagcatggcctgccctatccgccgctggcgcgctcgactgacggtatcgaccggttcctcacggagaatacgcaactggggatccggccctcaggtggagagttcgacgtctatgcgccccacggattcgacgacatcgcaaagctgatcgtacgacccaaccgggcgctgaatttttccgccgccaattacgcggcgaaggtcgcgcgatggaaggcgctatggccggagctgacggtgattgaggcggacgcatga

SEQ ID NO: 2537 - DNA, 780 bp, BradyrhizobiumColbertium
atgagcgttgaagagaaggtcactgccacccccaagcggaagagcagcggctgggccgggcaacttgctcagctcgccggcatcgtcgccgcggtcttcatcgccaagggcgcgctcgccgaaccgttctatgtgccgtcaggctccatggagccgacgctcttgatcggcgatgcgctgctcgcctcgaaattcccctatggttacggcacctcgtcactgccgatccagatcagcctgcccgaaagcggccgcgtcttcgcggaaacaccgaaactcggtgacgtcgtggtcttccgctggcccggcgatcgctcgcaggcctgggtcaagcgcgtcgtgggcttgccgggcgatcgcatccagatgcggcagggccagctcttcatcaacgaccgtccggccgagctgaagcccgatggcatcggcaccgccgaggacgaccgtggccgaagcgaacccgcctaccgctatgtcgagacgctgccgaacggtgtttcgcatttgatcttcaagatgcgcgacagcggtccgctggacaacacgcctgaagtgaccgtgccggccggccatctcttcgtgctgggcgacaaccgcgacaattccgccgacagccgtgtgccgctgcggtcgggcggcgtcggcctgctgccgatcgacaacctgatcggtcgtgcggacgctgtggtcggctcctgggatctcggcatgcgcagccaaccggtgtggacttggctgtccggtttcaggctggcgcggttcttcaccgccgtgcattga

SEQ ID NO: 2538 - DNA, 1428 bp, BradyrhizobiumColbertium
atgaccaaccctgccacaacctccctgctcgaccgcgccaatctcgaccgcgaccaggttcgccacgagatcgcgcgggggctttcgggcgccgacgacggcgagctgttcctggagtacagccagaccgaagccctgatgttcgacaatgggcggctcaagcaggcgacctacgacacctcgcagggcttcggcttgcgcgccgtcaaggacgatgcggtcggatatgcgcactcctccgacgtgtccctgccggcgctgatgcgcgcggcggatgcagtttcggccgtgcgcggcggctattccggcagcttcgccgcgccgcccccgcacaccaatgtgcggctctatggcgacgacaatccgctggatgcgccgggcttcgagaccaaggtcaagctgctcgccgagatcgacgcctatttgcgcgacaaggatccgcgggtgcggcaggtcagcgtcagcctgggcgcgacctggcaggtcgtcgagatccttcgccccgatggcgaaagctatcgcgacatccgtccgctggtgcgcgtgaacatttccgtcgtcgcgggccaaggcgaccgccaggagagcggcagcaagggttatggcggccgcgccggctatgccgaattcatcgagacgaaatcctggcgcgaggctgccgatggcgcgttgcgcgaggcgctggtcaatctggaatcgatcccggcccccgcgggggaaatggacgtcgtgctcggtgccggctggcccggcgtgatgctgcatgaagcggtcggtcatggactcgagggcgacttcaaccgcaagaagacgtccgccttcgcaggcctgatgggccagcaggttgccgcgaagggcgtcaccgtggtcgacgacggcacgatcgcctcgcggcgcggctcgctgtcgatcgacgacgagggcacgccgaccaatcgtaccgtgctgatcgaggacggcatcctcgtcggctacatgcaggaccgccagaacgcgcggctgatgaacatgaagccgaccggcaacggccgccgccagggttacgcccacgtgccgatgccgcgcatgaccaacacctacatgctcgccggcgaccgcgatccggccgaaatccttgcctccgtgaagaacggcgtgttcgccgcgaatttcggcggcggccaggtcgacatcacctcgggcaagtacgtgttccagtgcacggaagcctacaagatcgagaacggcaagatcggcgccccgttgaagggcgccatgctgatcggcaacggcccgaccgacctgcatcgcatccgcatgatcggcaacgaccttgcgctcgacaccggaatcggaacctgcggcaagaacggccagggcgtgcccgtcggcgttggccagccgtcgctgctgatggaacgcattaccgtgggtgggacgggcgcatga

SEQ ID NO: 2539 - DNA, 513 bp, BradyrhizobiumColbertium
atggcaaggccggccaacggcctcccggcgctggccctgctggcttcgatcgtcctgccggcgctcccgggcctcgctcatgcgcaaggcgcggtccgctccgtccatggcgactggcagatccgctgcgacaccccgcccggcgcccagaccgagcaatgcgccctgatccagagcgtggtggcggaggaccgttccaatgccggcctgaccgtgatcgtgctcaagaccgccgaccagaagagccgcttgatgcgcgtggtcgccccgctcggcgtgctcctgccctccggcctcggcctcaagctcgacaaccaggatgtcggccgcgccggcttcgtccgctgcctgcccaatggctgcgtcgccgaggtcgtcctggaagacaagctgctgggccagctgcgcagcgccaagaccgcgaccttcatcatcttcgagacccccgaagaaggcatcggctttccgctcagtctgaacgggctgggtgagggatatgacaagctgccgtag

SEQ ID NO: 2540 - DNA, 855 bp, BradyrhizobiumColbertium
atgaggatgtcgatgggtcgggtgggccggcaattgctgggattggccaccatcttcgtggcggtggctggcatcatgctggcgacggggggtgcggcattcgccgagctcgggcagccggcgccgtgggagtggacgctgcagcagtccggttccccggtgatggacaacatcatctggttccacaacttcctgttcgtgctgatcaccctgatcacactgtttgtcctggcgctgctcgtcatcgtggtggtcaagttcaacgcgcgggccaatccggtgccgtcgcggaccacccataacacgctgatcgaggtggcctggacactggttccggtgctcatcttggtcggcatctcggtgccgtcgttccggcttctgttcctggagctcgacgtgccgaaggccgacctgaccatcaaggcgaccggcaagcagtggtactggtcctatgcctatcctgataacggcaaattcgagttcgactcgctgatggcgcaggacaagcaaccccgcctgctcggcgtcgacaacgagatggtggtgccggtcaacaaggtgattcgggtccagacgaccggcgccgatgtcatccacgcctttgcggtgccggctttcggcgtcaagatcgatgccattcccggccgcctgaacgagacctggttcaaggccaccaagaccggcatgtactacggtcagtgctcggagctttgcggcaaggaccacgccttcatgccgatcgccgtgcgagtggtgagcgatcaggagttcgcctcctgggtcgaagcggcgaagaagaaatatgcgagcggcggcaccagcacctacgcctccgctgctggcccgacgcagtag

SEQ ID NO: 2541 - DNA, 162 bp, BradyrhizobiumColbertium
gtgggcctgcgcgtgatcgccgtgtgccgctgcgctcgttgccattttcaaatcctgccttgcgtcccgttcggacctctggaggtcccgcccttttgtcgctttcagtccctcaagccgtcacccgacgcctactgcgtcgggccagcagcggaggcgtag

SEQ ID NO: 2542 - DNA, 1626 bp, BradyrhizobiumColbertium
atggcaacgagcgcagcggcacacggcgatcacgcgcaggcccacggacatgacgagcacgcccatccgaccggatggcggcgctacgtctattcgaccaaccacaaggacatcggcacgatgtacctgatcttcgcggtcattgccggcatcatcggtgccgcgatgtcgatcgcgatccgggtcgagctgatgtatccgggcgtgcagatcttccacgaggcccacacctacaacgtgttcgtgacctctcacggcctgatcatgatcttcttcatggtcatgcctgcgatgatcggcggctttggcaactggttcgtgccgctgatgatcggcgcgcccgacatggctttcccgcgcatgaacaacatctcgttctggctgctgccggcgtccttcgcgctgctgctgatgtcgaccttcgtcgagggcgagccgggctccaacggtgtcggcgccggctggaccatgtacgtgccgctgtcgagctctggccatccggggcccgccgtcgatttcgcgatcctggcgctgcatcttgcgggcgcctcgtcgattctcggcgccatcaacttcatcaccaccatcttcaacatgcgtgcgccgggcatgaccctgcacaagatgccgctgttcgtgtggtctatcctggtgacggtgttcctgctgctgttgtcgcttccggtgctcgccggcgcgatcaccatgctgctcaccgaccgcaatttcggcacgacgttcttcgcgcctgacggcggcggcgacccggtgctgttccagcatctgttctggttcttcggtcatcccgaagtgtacatcctgatcctgccgggcttcggcatgatcagccagatcgtctccaccttctcgcgcaagcccgtgttcggctatctcggcatggcctacgcgatggtcgcgatcggcggcatcggcttcgtggtgtgggcgcaccacatgtacacggtcggcatgtcctcggcgacgcaggcctacttcgtcgcggccacgatggtcatcgccgttccgaccggcgtgaagatcttctcgtgggtcgcaacgatgtggggcggctcgatcgagttccgcgccccgatgatttgggcggtgggcttcatcttcctgttcacgatcggcggtgtcaccggcgtcgtgctggcgaacgcgggcgtcgaccgcgtgctccaggacacctactacgtcgttgcgcacttccactacgtgctgtcgctcggcgcggtgttcgcgatcttcgccggctggtactactggttcccgaagatgtcgggctacatgtacaacgagactttggccaaggcgcacttctgggtcaccttcgtcggcgtcaatatggtgtttttcccgcagcacttcctcggtctgtcgggcatgccgcgccgctatatcgactatcccgatgccttcgcgggctggaatctggtctcgtcgatcggctcctacatctccggtttcggcgtgctgatcttcctgtactgcgtgttcgacgctttcgcccgcaaggtgccggctgccgacaacccctggggtgcgggcgcgaccacgctggaatggacgctgacctcgccgccgccgttccaccagttcgaagtgctgccccgcgtgcagtaa

SEQ ID NO: 2543 - DNA, 945 bp, BradyrhizobiumColbertium
gtgtccgtcctcgaccagaacgccatcgacatcaatccccgcatctccgaagcggaggttggcgattatatcgcgctgctcaagccgcgggtgatgtccctggtgatcttcaccgcgctggtcgggatggcgatggcgccagggcactttcacccggtgctggcgatcacctctctgctctgcatcgcggtcggtgccggcgcctccggggcgctcaacatggcgctggagggcgacatcgacgccaagatgtcgcgcacggcaaaccgcccgatcccgcgcggccgcatcacacgtcccgaagccatggcgttcggcacgacgctcgccttcttctcggtgatgacgctcggcatcctcgtcaattgggtcgcgggcgcgctgctcgccttcaccatcttcttctacgtcgtgatctacacgatcggcttgaaacgctggaccgcgcagaacatcgtgatcggcggcgccgccggcgcgctgccgccggtggtggcctgggcttcggtcacgggcacggtcgatgtcgaaccgctgctgctgttcgccatcatcttcttctggaccccgccgcatttctgggcgctggcgctgtttcgttccgacgactacgcgcgcgccggcattccgatgctgcccaacgtcgccggtcccgacgcgacgcggctccagatcctgctctacaccgtcgtgctgatcgcggtcgccgcggcgccatgggcgcttggctatttcgacgccgtctacggcatcgtctcgctgatcctgggggctggcatgctggtgctcgcgatcaacgtctacctgcgtcgcgaacgcagccagtcgctgcgcgcgacccgcaagctgtttgcattctcgatcctgtatctgttcgcgctgttcgcgaccttgctggccgaggtcgtgtaccgggcgctcgtgccgatggcagggggcgcatga

SEQ ID NO: 2544 - DNA, 177 bp, BradyrhizobiumColbertium
atgatcacagcgatggccgacaaacccgagccagacggaatcgtcctcaccgaggcgcagcggaagagccgtcgtcagcgttcgatcgcaatcgcgctcgcgctcggcgtgctcgtggtgctgttcttcgccgtcaccatggtcaagggaccggcggtactcgtgcggccgatgtag

SEQ ID NO: 2545 - DNA, 654 bp, BradyrhizobiumColbertium
atgaatcacgagccgatcatatcacgggacgtcagcgccaagccggccgatcgtaagccggccgggagccgtgcgctgcggcgcgatgtggtggtggcttccatctgcggcggcgtggtcgcgctgatggtcggtgcttcctacgcggcggtgccgttctacaactggttctgccgtgccaccggcttcaacggcacgacgcaggttgcgacctctgcgccggcctccggcccgatcgcgcggaagatatcggtgcgcttcgattccaacgtcgcgcccggcctgccctggaagttcgagccggagcagagcgagatcgaggtcaatatcggccaggtcgtgaccgtcttctacaccgtgaccaaccaggccgcgcgcacaacggccgcgcaggccgcgtacaatgtcgcgccgctgacggtcggctcatatttccagaagatcaactgcttctgcttcaccgagcagaccctggctccgggcgagaagcgcgagatgccggtcgtgttctacgtcgatccatcgatcgccgacgaccgcgagaatgatgcgttgaacaccatcacgctgtcctacacgttttatccggtgagggatccggtggtgaagccgctggcttcgggcgaaggcgacaagcgcaagggaaatctctga

SEQ ID NO: 2546 - DNA, 897 bp, BradyrhizobiumColbertium
atggctacggcgcacaccaagcatcacgactatcatctggtcgatccctctccctggccggcggtcggctcgctctcggcgttcatcatggccgtcggcgcggtcgcctggatgcaccacatgttctctgcggcgccgatcgtgttcggcgtcggtaccgtcggcgtgctctacaccatggcgagctggtggggggacgtgatgaaggaggcccagtacaagggcgaccacacccgcgtcgtgcagctgcatcatcgctacggcatgatcctcttcatcgcctccgaggtgatgttcttcgtcgcttggttctgggcctatttcaacgccgcgctgttcccggccgacgcggtgcaggcgacccgcgacgccgtgttcggctgcggtctcgggacccaggctggcgcctgctcggtccccggcacttggccgccgaagggcatcgagactttcgatccctggcatctgccgctcctgaacacgctgatcctgctcacctcaggcaccactgtgacctgggcgcaccatgcgctgctcgagaacgaccgccagggcctgaaatacggcctgatcctcacggtcgtacttggagccctcttcacctgcgtgcaggcctacgagtacagccatgcggcgttctccttcgccggcaacgtctacggtgcgaccttcttcatggcgacgggcttccacggtttccatgtgctggtcggcaccatattcctgctggtctgcctgttccgcgcctatgccggccatttcacgccgaagcagcatctcggcttcgaattcgccgcctggtactggcacttcgttgacgtggtctggctgttcctgttcctttgcatctacgtctggggacgcggcgccgagaccatggctcacgctgcccactaa

SEQ ID NO: 2547 - DNA, 402 bp, BradyrhizobiumColbertium
atgaacgacaccgccggcacctccccgtccgaaaccaccgtcctgcagagcgcgatgcgcgggcttgcctgcaagtgcccgcgctgtggccagggcaagctttatgcgggcttcctgacgctcgcccccgcttgcgaccgttgcggtctcgactacgccttcatcgataccggagatggcccggcaatcttcattatcatgctcgccggcgccatcgtcgtcggctgcgcgctcgtcgtcgaggtcaagtaccagccgccgttctggctccatgcggcgctctggctgccgctgatcctcgccaccacgctgctgccgctgcgtgcgatgaaatcgctgctgatcgcgctgcaattccaccacaaggcggcgcccggccggctggttgatcgcgcgaaatga

SEQ ID NO: 2548 - DNA, 753 bp, BradyrhizobiumColbertium
atgaacgaggccgcgcgcaagggccgcgtggccggcttcgcgctgttcacgctgttcctgacagccgtgtgcgtcgcgctcggtgtctggcagttgcagcgtcggacagccaagcacgagctgattgcggccctcaccgagcggcttgcggcggcacccgtcgcgctgcctttgccggtgctatggtctggtctcaatcccgcccgcgacgaattccggcgcgtcagcttcacggcgacgtatgcgccgctgcccgatgcgatggtctattccgcgggctccgcggtgcgcaaggacgcctccggccccggcacctgggcgttcctgccggcgcggcttccgagcggcgagaccgtcgtgatcgatgcgggctttatcgagaacacgatgcaggatcgcgatgtcgaggatcgtgcggtgaagaagctcgtcacgggtgagccggtcacgctcaccggctacctgcgctttcccgaggcgccaggctggctgacgccgggggagaatcgcgccaagcggctctggttcgtgcgcgatcatctggcaatggcaagcgcgctcggctggggcgctgttgcgccgttctatgttgacctcgagcagccagcacctgcgaatggcattccgcgtccggggccgctcgtcgtgaatctgaaggacgatcacctgcaatacgccatcacctggttcacgcttgcgggcgccgtgctgatcgccttcgccgtgtgggcaagaggccgccggcggagctga

SEQ ID NO: 2549 - DNA, 378 bp, BradyrhizobiumColbertium
gtgagcgacttcgatcagatgggaattgtcgtcgactgggtggacgcctgccggaagggcgacctcatgacgttgctcggcctctacgcggatgacgcccaggccgaatgtacgtgtaacggcacccagcgctatagcggtcgaagcgagctcgaggcgtattggcagccgcggctcagcactttctcggcggcgggtttcgggcttgaggagattcatccggcacccgacggcgtcgacctcgaatactccgttgccggcgcgttgcgcattcacgtctcgttccgcttcagcccggaaggcaagatccgcagcacgctgtgcgaaccggcgctgcagaacgtgcgagatggctgctggtgccggctggcctcatga

SEQ ID NO: 2550 - DNA, 1335 bp, BradyrhizobiumColbertium
atgtggcagcgactctcgttcaggacgcaactgtttcttccgctcggcgcgagcttcctggcggtgctgatcctgggcggcgtgctgctccagatattcgcaacgggccagctggccgaggaacgcgagccgggaaggcgatcgatccaggccatcgccaccgcgctcaacaacaccttgcgtgcatcggacaatccgcggcagacgctcgacgcctttgtccattccttggacacctcctcggatattcaattccgtgccctgggagcaggtcccacgccgtcaccgaaggacgactcgcgcaagtcgcatggcgtgccgcaatggttcatccgccttctcgccattcccgaaatcgacgcggcatccccggtcatgatcgatggccaacgtgtcggcgacatcgtcttcctgtcggacatgtcggccgatctgttcgagaagtggatcggctttctggcgttcaccggcctggtggccgtgctgatggctcttaccggcacgatcgcctacgtcttgtcgggatctgccctgcgccccatgcaggatctcggcgaaggtctcacgcgaatacgacagggcgactacaccaggccgattccggtcagggggccgccggagatccggcagggctgcgaagaggcgaatgcgctcgctgcaacgctggcgcaattgagccgggacaatcgcgatctgatgcaccgcctggtgtcgctccaggacgacgagcgacgcgatctcgcccgcgaattgcacgacgaactcgggccgctgctgttcagcatccgcgcgggcacgatcgcgctcgtcgaggcctcaccgcccgtgggaaatctcggcaacccggcgcaggatctgctgcaatcggtcgaggcactccagcaaaccaaccgccgtatcctcgaccggctccgaccgctctacatcgaggaactgggcctttcgaccagcgtgcagacgctgcttcggaactttcgcaagcaggcgccgcatatcgtcctgacggacacgatcgacccggacctgaacgtgatcgaggggccgtcggcacagaccgtctatcgggtgacacaggaggcactgaccaatgtgctacgccacgccaaggcaggcagcgcccatgtgcaggcgatcgtcaccggtgagacggtcgtcatcgagatttccgacgatggcgccggttttccggccggcaacgtcttcggccggggcctgaccggcatgcaagagcgcgtgcgcgcgctcagcggatcgctgtccctgctgcgcatgaacgaacggacttatgtgcgctgccgccttccggctaaggcaagtcgggacccggcgtcatga

SEQ ID NO: 2551 - DNA, 645 bp, BradyrhizobiumColbertium
atgcaagataccgccaagctggcgaccagggtcctgatcgtcgacgaccatcccgtggtgctgtccggttgccggaccttgttcgcttccgaccagtcgatacgcattgacgaagcgaccgatgccaaatccgggcatcgcgcctatgtcagcaagcggcccgacgtcaccgtgatcgacatcagcctgcccgatgtctccggcttcgagctgatgcgacggatccgcaaggacgatcccgccgccaagatcatcatgttcagcatgaacgacgatcccgccttcgtggtgcgcgccgtggagcttggggcccagggctacgtctccaagggcgatgatcccaggctcctgctaaaagcggtgcgcaaggtggtcgcgggggacaatttcatctcgccgcagcttgcggaagccgtcacgttttccggcgcggcaatcaaggccaatccggcctcgcagatgacgccgcgggagctcgaaattctccgcctgctcggacgcggcgacaagatcgtcgaggtcgccgaggcgctcggcatctcctacaagaccgtcgccaacaccacgtctctgctcaagcagaagctgggcgccaaaaatcactccgacctgattcggattgccgtggaaatcgggatgaactga

SEQ ID NO: 2552 - DNA, 1419 bp, BradyrhizobiumColbertium
ttgactcgttatatctcgacccggggcgaggcccctgaactcggcttctgtgatgtgatgctgaccgggctggcccgcgacggcggcctttatgtgccgacgacatggccgcagcttccgaccgagaccatcgccgccttcttcggccgcccctattgggaggtcgcggtcgatgtgattcgccccttcgccggcggcgagatcaccgacgttgaactcggccggatggcgaacgaggcctatgccaccttccgccatcccgcagtggtgccgctgcgccagatgtcgccgcatcagttcgtgctggagctgttccacggcccaacgctcgccttcaaggatgtggccatgcagctgatctcgcggctgatggaccatgtactggccaagcgcggccagcgcaccaccatcgtggtcgcgacatcaggcgataccggcggggccgcggtcgaagcctttgccgggctcgagaatgtcgatctcatcgtgctgtttccgcacgggcgcatctccgaggtgcagcggcggatgatgacgaccacgggtgccgccaacgtccatgcgctcgcggtcgagggcaactttgacgattgccaagcgctcgtgaaagcgatgttcaacaatcatcgcttccgcgatgcgacctcgttgtcaggcgtcaactccatcaactgggcgcgtatcgtcgctcaggtggtctactatttcacctctgccgttgccgtcggcgcgccggcgcgcgcggtcgatttcgtcgtgccgacggggaatttcggcgacatcttcgcgggctacgtcgccaagcgcatgggactgccggtgcggaccctgcgcatcgccgccaacgtcaacgacatcctggcgcgcacgctgaagactggtatctacgaagtgcgcgaggtgcatgcgacggcgtcgccgtcgatggacatccagatctcgtcgaatttcgagcggctgctgttcgaggcaggccggcgcgatgcggctggcgtgcgccgcttgatggagtcgctcaagcagtccggtcgcttcgtgctgcccgatgcgacgctggccgcgatccgcgaggagttcgacgcagggcgcgccgacgagaccgagacggctgccgcgatccgcgccgcctggcgcgaagcaggcgaactggtcgacccccatacggcggtggcgctcgccgtcgcggaccgcgacaccaccgacacgcgggtgccgagcatcgtgctctccaccgcccacccggccaaattccccgacgctgtcgaggcggcctgcggccagcggccgcaattgccggcctggctcgacggcttgatgaccaaatccgaacacatgagggtgatgaagaacgatcaggccgagatcgagcggttcgtgctgtcggtcagccgcgccgcaaagcaaggagttgccggatga

SEQ ID NO: 2553 - DNA, 1290 bp, BradyrhizobiumColbertium
atgagcgtcgagatttccaagcttgcctccggcctgaccgtcgttaccgacgagatgccccatcttgaaaccgcggcgctcggcgtctgggccggcgtcgggggacgcgacgaaaagccgaacgagcacggcatctcacatttgctcgagcacatggcattcaaaggcacgaccaagcgctcctcgcgcgagatcgtcgaggagatcgaggcggttggcggcgacctcaacgccggcacctcgaccgagaccacgtcctattacgcgcgggtgctgaaggcggacgtgccgctcgcgctcgacgtgctcgccgacatcctcgccaatcccgccttcgagcccgacgagctggagcgcgagaagaacgtcatcgtgcaggagatcggtgccgcgcaggacacgcccgacgatgtcgtgttcgagcacctgaacgagctctgctatcccgaccagccgatgggccgatccctgcttggcacggccaagacgctgcgcgccttcaaccgcgacatgctgcagggctatctgtcgacgcattatcgcgggcccgacatggtggtggcggcggccggcgcggtcgatcacaaggaggtggtcgccgaggtcgagaagcgctttgccagcttcgaggggacgccggggccgaagccgcagaccgctcagttcggcaagggcgggaccaaggtggtgcatcgcgagctcgagcaggcgcatctgacgctggcgctggaaggcgtgccgcagaccgatccgtcgctgttctcgctccaggtcttcaccaatatcctcggcggcggaatgtcctcgcgcctgttccaggaggtgcgtgagaagcgcgctctctgctactccatctattcgttccacgcgccctataccgacaccggcttcttcggcctctacaccggcaccgatccagccgacgctccggagatgatggaagtcgtggtcgacatcatgaacgattcggtggagacgttgaccgaggccgagatcgcccgggccaaggcgcagatgaaggctggccttctgatggcgctggagagctgctcctcccgtgccgagcaactggcccggcatgtgctcgcctacgggcggccgcagacggcgcaggaactggtgactcgcatcgatgccgtcagcatcgaatcgaccagggacgcggcacgtgcgctgctgtcgcggagcaggcccgccgttgtcgcactgggcagcggcaggggtctggacaccgcggtatctttcgcggaaggattgacccgggcgcgcgccaaggcgcggctgcactag

SEQ ID NO: 2554 - DNA, 588 bp, BradyrhizobiumColbertium
atggctctctttcgcctgccatccagtggacccgccgccctcgcgccgcgcggcaacggtctgctgctgcgcgccccgcaaatgtccgacttcctgcaatgggcccatctgcgcgaaaccagccgtgactatctcacgccctgggagccgatctggccctccgacgatctcacccggtccggcttccgccgccgcctgcgccgctattccgaggacattgccgcggaccgctcctatccgtttctggtgttccgtgagctcgacggcgcactagtaggcggaatcacgctcgccaatgtccggcgtggcatcgtgcaggccggcaccatcggttactgggtcggccagccgtatgcccatcgcggctacatgacgtcggctctgcgggtgttgttgccgacgctgttcggcgagctcaatctgcaccgggtcgaggccgcctgcattcccaccaatgcgccctcgatccgggtgctggagaagtgcggcttctcacgcgaggggctggcgcgccgctatctctgcatcaatggagtctggcaggatcatctgctgttcggcctgctgcacgaggatttccgcggctga

SEQ ID NO: 2555 - DNA, 654 bp, BradyrhizobiumColbertium
atggtgaaggagcttcggtcatcgcggaatgcatcgcggcggggaacagcggtcgcgttgatgctgtcggctgcgctcgcctctgtctccccggcggcggcccagtccttaaccgaccgcttcaagagcctgttcggcggcaagtccgacgagtcggcgcagcccactccggcgcccgcgcccggtcagcccgccgaagaagatgacttggattgcccgcaggtcaccgtgcgctccggcgcctccacctatgcggtcggtgcgagcggcaagcaggccgtcggtaacgacatccgcttccaggccacgatcaccaagatggcacgcgagtgtgcccggaacggcggcgatatcaccgctcggatcggcattcagggccgcgtcatcgcaggccccgccggggcgcctgcgaccgtcgaggtccccttgcgcgtcgcggtcgtgcagggtggcatcggcgagaaggtcattgcctccaaggcctaccggaccacagtctcgatgtcggagggcggcagtgtacccttcactttcgtcgccgaggacctggcctatccgatgccgtcacccgcggtcgccgacaactatatcttctatgtcggcttcgacccgcaggcgctttcgcccgagccgaagggacggaagaagaagtag

SEQ ID NO: 2556 - DNA, 486 bp, BradyrhizobiumColbertium
atgttcttcacacctgagttctgggtcgccgtcgccttcgtgatcctgatggtgatcttcggctatgtcggggtgttcaagactgcgatgtcggcgctcgatcatcgtgccgctcgcatcaaggccgagctggacgaggcggcgcgcctcaagcaagaggcagccaaggtgctggccgattacaaggcgcgcactgcatcggctgaacgcgaggccgccgacattatcgccaacgcaaacgccgaagcagagcgaatcgcagccgaggccaaggcgaaaatggaagacttcgttgcacgacggaccaagaccgcggagggcaagatcgcgctcgccgaggctcaggctctcgccgacgtccgtgccgctgccgcggaagccgccgtgcaggccgcttccgcgatcctgtcgcaatccgtcaggggccaagtcgccgacgacctgctggccaagggcatcaacgaggttcgacagaagctgaattga

SEQ ID NO: 2557 - DNA, 561 bp, BradyrhizobiumColbertium
atggctgagagtcatggcggcgccacgggtaccggcgctcacacggaggccgatggcggtcaccacggcggtggctttccgccgttcgagagcagcacctttgcctcgcaactggtgtcgctcgcgatcgccttcgtcgcgctgtatctgatcgtctcccggctcgcgctgccgcgtgtcggcggtgcgatcgaggcgcgtcagaacaagatcgaaggcgatctcgccgaagcgcagaagctgaaggatcagtccgaggccgcgctcaaggcctatgaaggcgagctcgcggcggcgcgcgcgcgtgctcaggcgatcggcaacgaatcccgcgaaaaggcgaatgcgcaggcggacgccgaacgcaagacgctggagcagcagctggccgccaagctcgccgaggcggagaagacgatcgcctcgacccgcgcgaccgccatgagcaacgtgcgcggcatcgcggctgatgcggccggcaccatcgttcagcagctcacgggcgtcgttccggatgcagcgtcggtcaatgccgccgttgacgcatccttgaagggttag

SEQ ID NO: 2558 - DNA, 231 bp, BradyrhizobiumColbertium
atggatccgcaagcagcgaaatttctcggcgcgggcatcgcgtgcatcggcatgggcggcgccggcatcggcgtggccttcatcttcggcaattacctgtccgcagcgatgcgcaacccggcagctgcccagggccagttcggcaacctgattttcggcttcgccgtgaccgaagcgctcggcatcttctcgctgctgatcgctctgctgctgctgttcgtcccgctctga

SEQ ID NO: 2559 - DNA, 825 bp, BradyrhizobiumColbertium
gtgccgctcgccggcacggccggccggccgaccttgataggtcggctcgtccggcagacgagagatgccgcgcggatgaaaatcgacccgatccaccagttcaacgtcgaaccgctctttacgatcggccgtatcggcgatcacacgatcgccttcaccaatgcctctctctacatgtttgtggcggtggggatcattgcgctgctgctgctcaccagcggcaagcaactcgttccggggcgcctgcagtcggtgtcggaactctcctatgagttcgtggccagcatgatccggagcactgcgggcgcggacggcatgcggttcttcccgctgatcttctcgctgttcatgttcatctgcgtctcgaacctggtcggcatcgttccctacacgttcactgttacgagccacctcatcgtcaccgcggcgcttgcgctgctggtgttcttcacggtcctgatctacggcctctacaagaacggcctgaagttcctgaaagtgttcgtgccctcgggcgttccgggttacatcctgccgctggtcatggcgatcgaggtgctgtcgttcttcctgcgcccggtctcgcacagcgttcgactgttcgcgaacatgctggccggccacatcgcgctgaaggtgttcgccggcttcgtcgcgatgctcggcgcctctcttggcgtggtcggctggatcggcggagtgatgccgctggcacttgccgtcgcgctcaccgcgctcgaattgctggtcgcgttcctgcaagcctatgtgtttgcgatcttgacctgtatctacctcaacgacgccattcaccctggacactga

SEQ ID NO: 2560 - DNA, 198 bp, BradyrhizobiumColbertium
atggcgcttggttttcggttatcctcggagttgatcgccggggtcgctgtcggggcggggattggctggggcttcgaccacttgctgtcgacgtcgcctttcgggttcatcgtgttcctgttgcttggcttcgccgccggcgtggtgaatgtggtgagaacggcaggcgccggtcagaacaggcgcggtggttcgtaa

SEQ ID NO: 2561 - DNA, 516 bp, BradyrhizobiumColbertium
atgagaccagcgacgtcatccacaacatcatggctagcggtggttgccgccgtgttcgtcgtcagcggcagccccgtagccgcgcaatctgctccagacggcgaaaatggccgctacagcatgacgcccatccccgagggcgtgctgcggctcgacacgcgcactggcacggtagcgacctgcaccagaagcggcgcaggctgggcctgctacgcggtgccggacgagcggaccgcactcgacgccgagattggaaggctccaggccgaggtcgaacggctgaagggacagctggcggcagggccgactgtgtcgggcaaaatcgacgaggcgctgccgaaatccgacccgctgaagaaggccgaacccaaggtcgccgagggcgagcgcaagatcgagattccgttgccgagcgatcaggacgtcgatcgcgtgatgtcgttcctcgagagggcctggcggcggctgatcgacatggccaaccgcgtgcagaaggacgtgtcggggaaaatctag

SEQ ID NO: 2562 - DNA, 474 bp, BradyrhizobiumColbertium
atgacatcagccaaatccgtcacgcgctcggcagcatcgtccgtgcaagcctccaccatcgcttcgtcattgctgacagtacagacgccgggccgcggattcagcgatctcaccggcgaagccgcaaagttcgtcgccgaggtgcacgcaggcgagggcgcattgacccttttcgttcgccacacctctgcctcgctgacgatccaggagaacgccgatccttccgtgctcgtcgatctcaccaccgtgctgtcccggctcgcgccggaagacggcgggtggacgcacgatgcggaagggcccgacgacatgcccgcccatatcaaggcgatgctgacgcagacttcgcttcatgttccggtcctgaacggcaggcttgcgctcggcacctggcaggcgatctatctgatcgagcatcgcagccgcccgcaccgccgtgagatcgtcctgcaattcatcggtagcctgcagtaa

SEQ ID NO: 2563 - DNA, 1626 bp, BradyrhizobiumColbertium
atgacgaaggacgaacggttcgtcattctcgcctcctcgctcggtaccgtcttcgagtggtacgacttctatctctatggctcgctcgccggcatcatcggcgcgcagttcttctcggattatccgccggccactcgcgacatcttcgcgctgctggcgtttgccgcgggcttcctggttcgtccgttcggcgccatcgtgttcggccgtgtcggcgacatcgtcggccgcaaatacaccttcctggtcaccatcctgatcatgggcctgtcgaccttcatcgtcggcctgctccccaacgcggccaccatcggcatcgccgccccgatcatcctgatcgtgctgcgcctcgcccagggcctggcgcttggtggcgaatatggcggtgcggcgacctacgtcgcagagcacgcgccgaacggcaagcgcggctactacacatccttcattcagaccaccgcaacgctcggcctgttcctgtcgctgctggtgatcctgttcacccgcaccgcaaccggcgaggccgagttcgcgaagtggggctggcgcattccgttcctggtctcggtggttctgctcggcatctccgtctggatccggctacgcctcaacgaatcgccaatcttccagaagatgaaggaagaaggtaagggctcgaaggcgccgctgacggaagccttcgggaattggcagaacggcaagctcgtgctgctcgctttgctcggcggcgtaatgggccagggcgtggtctggtacaccggccagttctatgcgctgttcttcctgcaatcgatcctgaaggtcgacggctacaccgccaacctcctggtcgcctggtcgctgctgctcggcaccggcttcttcatcgtgttcggcatgctttccgacaagatcggccgcaagccgatcatcctcggcggctgcctgatcgcggcacttaccttcttcccgatcttcaagatgatcaccaccaatgccaacccggcgctggagaaggccatcgagcaggtcaaggtcgaggtggtggccgatcaagcgggctgcggcgatctgttcaatccggtcggcacccgcgtcttcaccgcgccgtgcgataccgctcgcgctttcctgtcacagtcgtcggtcaagtactcgaccacgccagccccggctggctccggcgtgaaggtgatggtcaacggcaaggaagttccctacacgagcgccaaggacagcaacccggccgtcctcgccgccgtgcaggcagctggctatccgaaggctggtgacgccggcatcgtgaagatgtcgcatccgttcgacgtcttccgcccgcaggtggcagctgtcgtcgggctgctgttcgtcctggtgctgttcgtcaccatggtgtacggcccgatcgcggcaatgctggtcgaactgttcccgacccgcatccgctacacctcgatgtcgctgccctaccacatcggcaacggctggttcggcggcttgctgccggcaaccgccttcgccatcgtggcctcgacgggcgacatctatgcgggcctctggtacccgatcatcttcgcctcgatcaccgtcgtcatcggcttcctgttcctgccggagaccaaggacgtcgacatcaaggcgaactga

SEQ ID NO: 2564 - DNA, 681 bp, BradyrhizobiumColbertium
atgaacgctccctcgactcatctcgtcatcgccgatgaccatcccctgtttcgcgacgcgctgcggcaggcggtggccggggttctggcctcggcaaggatcgatgaggccggatcgtttgaggatctgaccaagcttctggagcagacctcggacgtcgacctgatcctgctcgacctctcgatgcccgggatctccggcttttccggcctgatctacctgcgcgcgcaatatccggcgattccggtcgtgatcgtctcggcgtccgacgacagcgcgacaatccgccgctcactcgatttcggcgcctccggcttcattccgaagcgattcggcgtcgagacgctgcgcgatgccatcctcaaggtgatggagggcgacgtctgggttccggccgacacggatctgtcggccgcggccgaccccgagatgacgcgcctgcgcgaccgtctggtgactctgacgccgcagcaggtccgggtcctgatgatgctgtcggagggccttctcaacaagcagatcgcgtatgaactcggcgtctccgaggccaccatcaaggcccacgtatcggccattctgcaaaagctcggcgtcgagagccgcacccaggccgtgattgccgcggccaagatcgccggcggccagtggaagcaggggagtgccgacgggatgagccgctag

SEQ ID NO: 2565 - DNA, 2841 bp, BradyrhizobiumColbertium
atgaccgagccggccggcaccacgacgggaactctatcgttcgggccattctccgtgaggccgcatgaaaggctcgtgatgcgcgacggcgtcgccgtgccgctcggcgcgaaagcattcgacacgctcctggcgctgatgtcgcggccgaacgaggtcgtcagcaaatgggagctgatggcgatagtttggcccggcatcacggtcgaagagagcaacctacgctttcacgtcgcagcccttcgaaaggcgctcggcgacggcaaggatggcgcgcgctacatcgccacgctctccggccgcggctattgtttcgtggcgccgatttcgcaagcgcagcttccggccgcgcgtcgctccgcacctcgggccgagttgccgccagtcaaactcccgaaccggctgcagcggatggtcggacgcgacgaggcgctcgccgccatctccgagaagctcctgaccgcacgtttcgtcacggtcgccgggccaggtggcgtcggcaagaccgccgtcgcggtggcgctcgcccatgatctgctcacgactttctccgacgccgcacatttcgtggaccttgccgcactgagcgatccccatctcgtgatcacatcaatcctgctgatgcttggcttgccggccgaggccgaggatcccctgcccgcgctgctggcgcatctgcgggacaagcggatgctgctgatcctcgacaattgcgagcacgtcattgccgctgcggcgccgttggcggctgagatcttccatgcggcgccgaacgtccatatcctcgcgaccagccgtgaagccctgcgcgttgagggcgagcaggtctatcgattggccccgctcgccgttccgcccgacggcgccggagtgacgatcgctgcagcacaagtctatcccgcgcttcaactgttcctcgaacgtgccgcagccagcggcgcgcagataacgctcgatgatgccaatgccgtgatcatcgccgggatctgccgcaagctcgacggcatggcgttggcgatcgagctcgccgctggccgggtcgaagcctacggcctggagcaaacggctgcgctgctcgacgagcgcctcaatctactctggcaaggccagcgaacggcgccaccacggcagaagacgttgcaggccacgctcgactggagctaccggctgctgtcggatcttgagcgcctcgtgctgcgcagacttgcggtcttcgccggtcacttcaccatcgatgcggcactcgaggtcgtgccggacgagcgcgtcgaccgcacccgcctgttcgatgccgtcgacagtctcgttgccaaatcgatggtcgcgccgcgccccataggcgccatgatgcgctaccgcctgctcgacacgacgcgcgcctatctgctcgagatcgaaccggccgacgccgccctcgccgcccgccatgcgactttttaccggcgatggctggaacaggccgggacgacatgggcggccgtgccgagcgcggacgagcgagcggctcacttctcggcgcttcacaatgtgcgtgccgcgttggaatggtgcttcggcgcagagggtgatttcgacatcggcattgcgctcgccgctgccgcggcgccgatcttcctggcaatgtcgctgctaatcgaatgccgacgctggtcagaacgggcgctgcttgcgattgccccctcctcgcgtggcagcgccgaggaaatgcacatccaggccgctctcggactgaccttgatgttcacccgcggcggcagcgaagcggcgcggagcgccctgaacaggagccttgcgattgccgcggcgcgcggcgacgcaccgaaccagctccagttgctcggtcggatgcatatcttccacgaacggatcgggcggttcgaggccgcgcttggctatgcgcagcaaagccttgcggtcgcgcgatcgcttggcgatgccggctcaatcgccctctctcgttcgctcatgggagtctcgctccacctggccggcgagcatcgggacgcgcttaagatgctggaggtcgcctggcaaggtccgggcacggagcgaatcagcaccgtccacggcttcgatcatcgcaaccgggccggcatcacgctggcccgcgagctctggttgcagggccggcccgcggaagcgctgcagctggcgcagcagacgatcgccgaggccgcgcagatggagcacccgatcacgctctgtatcgcgctgatctgggcggtctcgatctcactttggggaggcgacctcgacgccgcggaagagagcatcgatctgttcatcgcacatgccagatctcggtcgatgggtccctatcttgtggttggccgcggcgtgaagggagagctggcgatccggcgaggaaacgccgcgcatggcatccagacgatcaatgcttgcctgcgcgagctccacggggccggctacgaactgctcaccacgacattcaacatcgcgctcgttcagggcttggtggcgcttggacagttcgaacagggcgcaatcctgatcgatgacgcgatccggctggtcaagcaaagcggcgatcatctctacatgcccgaactgcttcgaatgaaaggtatgaccctcttgtcgctgccacggcctgggggcgagcaagcagaggaccagttgatgcaatccctggctttgagccgccgcaagggcgccacagcctgggaactgcgcaccgcgatcgatctcgcccgactgtttgccgaacgcgggcagcgggaggaagcgaagcgattgctccaatcgtcgctcaagggctttgccgatgggtccgagacggcggatatcagagcagccaacggccttctgaccacactctag

SEQ ID NO: 2566 - DNA, 330 bp, BradyrhizobiumColbertium
ttggacgtcaagctgtcgccgccgggcggcgcgggcatcggtaccaatcccgagcaattgttcgccgccggctggtcggcctgcttcgaaggcgcgatggagatcgcagcgcgcaagcggaagatcgagcttcccagaaaatgcgctgttgatgccgaaatcgatctcatgctggacgagggcgcctattcgctccgggcgcttctcaatgtcagcctgccgggcctagatcgcgagatcgcaagcggcatcgtcgacgatgcgcatcggacctgtccttattccaaagcagttcgtggcaatgtcgatgtcacgatcgccctgatctga

SEQ ID NO: 2567 - DNA, 1032 bp, BradyrhizobiumColbertium
atgaagcaaaccatcaaccagcagcgccgcagcttccttggcatcgcggcgggaaccgtcgccgccggtctcggcgtgattgagttcgctcgcgccgagacggaagcgaggtcgtcctctgcatcaaatgcgtccttcagcacgatcaagcaggtcgatgcgggcgtcctcaacgtcggttatgccgaggtgggaccgtcgaacggccccgtcgcgatcctgctgcacggctggccttacgacattcacgcgttcgtggacgtcgcgccgatcctggcaaaagccggctatcgcgtgatcatcccttacctgcgcggctatggcacgacgcgcttcctctcgggagagacgccgcgcaacggcgagcctgccgcaatggccgccgacatcatcgcggtcatggacaagctcgacatcaagaaggccgtcgtcgccggcttcgattggggcgcgcgtaccgctgacatcatcgccgcgctgtggccggagcgctgccgtgcgctagtgtcggtcagcggctatctgatctccagccaggctgccggcaatgcgccgctgccgccatcggctgagctgcaatggtggtaccagttctatttcgccaccgagcgcggccgggccggatacgagaagtacacgcatgattttgccaagctgatctggaggctcgcctcgccccagtggaagttcgacgacgccacgttcgcccggagcgcggcggcgctcgacaacaaggatcacgtcgcgatcacgatccacaattaccgctggcggctgggtctcgcccagggcgaagcgaaatacgaacatctcgaaaagaagttggccggggctcccgtcatcgacgtgccgacgatcaccatggaaggcgacgccaatggcgcgccacaccccgatccaagcgcctatgcgaagaagttttcaggtcgttacgagtttcgtctgatcaccgggggcatcggccacaatctcccgcaagaagcgccgcaagcctttgccaaggccgtcatcgacgtcgacggtgcctggtga

SEQ ID NO: 2568 - DNA, 561 bp, BradyrhizobiumColbertium
atgacgtccttcgaaaccgaaaacaagaagcgctcctatgccacggcgattacgctggccgtgctcctcctcgtcattgtcttgacttgcgtgccatgtctggtctcgatcgctctggctgcggaacctgcgcaaaatgcggccgaggcctcgccgattttcggcgtcacgattccgtcggactacaggcagtgggagttgatcgcacctgccgaagaggccgcgccgctcgacgagcttcgcgccgtcgtcggcaaccagaccgcattggaggcgtatcaagccggcaagctcccgtttccggacggcaccattctggtcaagcgtgcctggaagcggaagaagtcgccggaatttgcgtccgcaacgattcctggtgccgccaccacggtccaggtgatggtcaaggactccaagacgtacgccgcaacgggaggatggggctttggccgcttcgtcgatggcaaaccggtcgacgaggctcagcatcgcacctgcttcgcgtgccatgaagcgcgcgccaagggccgcgattatgtgttcacgcggctggcaccttag

SEQ ID NO: 2569 - DNA, 3504 bp, BradyrhizobiumColbertium
atgctgcacgactggggcgtgatcgccgtcgccttcggctatatcggcttcctgttcctggtggcgagccatggcgaccgccgctcgccggccaggcgcgcctccgggctgatctatccgctgtcgctggcgatctactgcacctcgtggaccttcttcggctcggtcggcttcgccacccggacctcgaccgacttcctcgcgatctatgtcggcccgatcctgatgatcgggctcggcgccggcgtgctgcgccgcatgatccagctggccaaagcccacaacatcacctcgatcgcagacttcatcggcgcccgctacggcaagagccaggcggtggcggcgaccgtcgccggaatcgcgatcatcggctcggtgccctacatcgcgctccagctcaaggccgtggcctcctcgctcgaaacgatcctgaccgaagaccaggccttctcccacatcccgctcgtcggcgacgtggcgctgatggtgacgctggcaatggcggcgttcgccgtgctgttcggcacgcggcaaaccgacgccaccgagcaccagcacggcctgatgctggcggtcgcgacggaatccatcatcaagctcgtcgccttcctcgccgccggcatcttcgtcaccttctggatgttctcgccgcacgaactgatcgagcgcgccatgaagaccccggaggcggtgcgcaccatcaactattcgccgtcgatcggcaacttcctgaccatgacgctgctgtcgctgtgtgcgatcatgctgctgccgcgccagtttcacgtcagcgtggtggagaactcctcggacgccgaggtcgggcgcgcgcggtggctgttcccgctttacctggtcgccatcaacctgttcgtgatcccgatcgcgattgccggcctcgtcactttcccgttcggcgccgccgaccccgacatgtacgtgctggccctgccgatggaggggggcgcggacctgctcagcgtcgtcatcttcgtcggcggcctgtcggcggcgaccgcgatggtgatcgtcgaatgtgtcgcgctctccatcatggtctcgaacgacctcgtggtgccgctggtgctgcaacgccggccggagggacgcgccggcggtgccgatttcagcgacttcctgctgcgttcgcgccggctcgcgatcttcgccatcatggtgatggcctatttctactatcgcgcgctcggcagtacccagctcgcggccatcggcctgctctcctttgccgccatcgcccagcttgcaccgagcttcttcggcgggctgctgtggcgacgcgcaaccgcgcgcggcgccatcggcggcatgctggtcggcttcgcggtgtggctctatacgctgttcatgccgagcttcatggattcctcgacatcaggcatcatgctgctccagcacggcccgttcggcatcgaggcgctacggccgcaggcgctgttcggtgccgacctgccgccgctgatgcacggcgtcatctggtcgctgtcgctcaacatcctgacctatgtgctgctgtcgctggcgcgtcagccgtcgtccatcgagctgttgcaggccgatctgttcgtgcccaatacgctcgcgccgatctccccgagcttccgccgctggcgcaccagcgtcaccgtgcaggacatccagaccactgtggcgcaatatctcggacccgagcgcgcgcggcattccttcgaggcattctcggcgcggcgaaacgtgcggctggagcctggagcgcctgctgatttcgagctgctgcagcatgccgagcacctgatcgcctcctcgatcggcgctgcctcctcgcgtctcgtgatgtcgctgctgctgcgcaagcggacggtctccgccaaggccgcgctgaagctgctcgacgactcccacgcagcgctgcatttcaaccgcgagatcctccagacggccctcaaccatgtgcgccagggcatcgccgtgttcgatgccgatctgcagctgatctgctccaaccggcagttcggagatctcctcaacgttcccccgcatttgatccagttcggcacgccgctgcgtgagattctggagtttatcggtgtgggcgatcccgaggatccgttcgagcgcgacgccgcgctggagcggcgccttgccgcctacaccaccgacagcgagccttatctcgaacgcctgccggagcgccacatggtgatcgaggtgctcacgaaccacatgcccggcggcggcttcgtcatcaccttcaccgacgtcacgcccagcttcgaagcggcggaagcgctggagcgcgccaatgcgacgctggaaaagcgcgtgcgcgaccgcaccgaggagctgacccggctgaactccgagctggcactggccaagagcgcggccgaagacgccagcatctccaagacgcgtttcctcgccgccgccagccacgacatcctccagccgctgaatgcggcccggctctatgtcaccagcctggtcgagcgccagcacaatggcgaggagacgcggctggtggagaacatcgacgaatcgctgcaggcgatcgaggagatcctcggcgcactgctcgacatctccaggctcgacgccggcgcgatgacgacctcgatctcgagcttcaagatggccgacctgatgcgttcgctggagatcgagtttgcgccgattgcccgcgccaagggcctggagctcaccttcgtgccctgctcgctgccggtcgagtcggaccgcctgctgctgcggcgcctgctccagaacctgatctcgaatgcaatcaagtacaccccgcgcggccgcgtgctggtcggctgccgccgccgcggcgccgcgctcaagatctgcgtctacgacaccggggtcggcatccccccggtcaagcgcggcgagatcttcaaggaattccatcgcctggaacagggggcgcggatcgcgcgcggcctggggctggggctctcgatcgtggagcggctggcgcgcgtgctcaaccatggcatcgccatcgacgccaatgccagcggcggctcggtcttcttggtgacggtgccgacggcgaaggcgatcacccacaccgcggccgtgaccagcgcaacgccgctggcgcgcacgccgatctcgggcgcgctgatcgtctgcatcgagaacgatgcggcgattctcgacggcatgcgcacgctgctgatggcctgggacgccgaagtgatcgcggttgccgatccggaaggcgcgatcgccgcgatcgaggcggccggcaagcgcgtcaccggcctgctcgtcgactatcacctcgatcgcggcaacggcatcgcggccatccgcgagatccgtcgccgcttcggcgatggcatccccgcgatcctgatcactgccgatcgcagccccgccgtacaggtcgcggcgcgcgaggagcgagtcgcggtgctgaacaagccggtgaagccggcctcgcttcgcgccctgctcggccagtggcgcacgcagcagatggtggcggcggagtga

SEQ ID NO: 2570 - DNA, 1260 bp, BradyrhizobiumColbertium
ttgggccaggttccgctgcaggtttcgccgatggattacaaccagttcttcgattccgccctcgatcgtctccacaccgagcggcgctatcgcgtgttcgccgacctcgaacgcaccgccggccggttcccgcacgcggtctggcactcgcccaggggcaagcgcgacgtcgtgatctggtgttccaacgattatctcggcatgggccagcatccgaaggtggtcggcgccatggttgagacagccacgcgcgtcggcacaggcgccggcggcacccgcaacatcgccggcacgcaccatccgctggtccagctcgaagccgagctcgccgacctccacggcaaggaggccgcgctgctgttcacctcgggctacgtctcgaaccagacgggcatcccgaccatcgcaaagctcatcccgaactgcctgatcctgtcggacgagctcaaccacaattcgatgatcgagggcatccgccagtccggctgcgagcgggtcgtgttccgccacaacgatctggcgcatctggaagagctgttgaaagcggccggccccgatcggccgaagctgatcgtctgcgagagcctctattccatggatggcgacgtcgccccgctcgccaagatctgcgatctcgccgagaagtatggggcgatgacctatgtcgacgaggtccacgccgtcggcatgtacggcccgcgcggcggcggcatcgccgagcgcgacggcgtcatgcatcgcatcgacatcctcgagggcacgctggcgaaagcattcggctgcctcggcggctacatcgcggccaacggccagatcatcgatgccgtgcgctcctacgcgccgggcttcatcttcaccaccgctctgccgcccgcggtctgctcggcggccaccgccgcgatcaggcacctgaagacctcgagctgggagcgcgagcgccaccaggaccgcgccgcccgcgtcaaggcgatcctcaatgccgccggcctgccggtgatgtcgagtgacacccacatcgtgccgctgttcgtcggtgaccccgagaagtgcaagcaggcctccgacctgctgctcgaagagcacgggatctacatccagccgatcaactacccgaccgtcgccaagggcaccgagcggctgcgcatcacgccctcgccctaccacgatgacggcctgatcgatcaactcgccgaagcgctgcttcaagtgtgggaccgcctcggcctgccgctgcgcgcgaagtcgctcgcggcggaatag

SEQ ID NO: 2571 - DNA, 255 bp, BradyrhizobiumColbertium
atgcgccagcacacatttgaggcaaggcgagcgggtatattgatagcggcggatggcgcgggattgttgatttggatcaaccgcctagcgcttctgcagcccaggaccgggtttcttcggggaggtcagggctgtcgtggacattttgtctatggtgcgctcgccgttcatgattggcggaccggccacaccgacgccgcagctcccgcagggtcggccagcgcggcgcactcgcgcgaaaggacgccccgatga

SEQ ID NO: 2572 - DNA, 420 bp, BradyrhizobiumColbertium
atgatcctcaacggccccaacctcaacatgcttggcatccgtgagccgcacatctacggcaccacgacgctcacagaggtcaacacaagctgcgagcaggctgccgccatgctcgggctcaagcttgccttccaccagtccaaccatgagggtgtgctcgtcgacctgatccaatcggcgcggcaggacgccgacgccatcgtcatcaacccggccggtctctccttcacctcggtctcgatcatggacgcgatcaagacgttcgagggtccggtgctggaggtgcacatctccaacatccacgcccgcgacgaatatcaccgccactcgaagatctcgttcgtggcgaccggcgtgatctgcgggctggggccgttcgggtacatcgcagctctgcacgcgatcgcgaacatgaagtga

SEQ ID NO: 2573 - DNA, 156 bp, BradyrhizobiumColbertium
ttgtctccaatatcgctggcaaacgccgccgccgccggcgacctcggctatgtcgtgctcgacgccgatctcggtggtcaggattccggcgaattgctccagcagatccgcagcctcgaggggacggtcggcgcacggctggtgttcgagcattaa

SEQ ID NO: 2574 - DNA, 369 bp, BradyrhizobiumColbertium
atggctgcgcggccggagagcgcggtgacgccggcacaggccgggctgctcttcattctcggcaagcaggatggcgtgcttatgggcgaggcgggcgcggcgcttgatctggggccgggcggcatctcgggcctcgtcgaccgcaccgcagccgcaaagctgatcgagcggcgggctgatcgcgaagacggccgcgcctggcggatctggttgacgccgaaggggcgcgccgcgctggcgcaggccaaagcaggtgcggcagaggtcaacgcggcgctgacggaaggatttacggcagcggagatcgacatcgtcgcgcgctggctgacgagcattccgcacaagtttccaagaggagcagacgaatga

SEQ ID NO: 2575 - DNA, 771 bp, BradyrhizobiumColbertium
atgaccgagcacgtccggatcgataacagcggcggaattctcacgttgacattggcgcgccccgacaagaagaacgcgctgaccgatgcgatgtacggcaagctcggcgatgcaatcgaatctgccgagttcgatccgtccgcccgcgtgatcctgattcgcggcgagggcgacatgttcaccgccggcaacgatgtcggggagttcgccgctgtcgcagccggaaaatcggaaggcagccgcaacgtcgtgcgcttcatccagtcgctggcgcgctgcacccggccgctggtcgcggccgtgcagggccgcgccgtcggcgtcggcaccacgatgctgctgcattgcgatctcgtcgtcctcgccgacaatgcgcaattatcgacgccgttcgtcaacctcgcgctcgtgccggaggctgcttccagtctgctgatgccggcgcgtatcggccatgcgcgcgcctatgagatgtttgcgctcggcgagaccgtgccggccaagtcggcgctggaatgggggcttgccaaccgtgtggttccgctcgagaggctcgatgccgaggcgcttgcactggcgcagcgtcttgcgcgccagccggccggtgccctcacagcgaccaagcggctgatgcgcaacggagaggctctggtcgctcagatgcaggccgaaggcgagcagttcgcgcagcgcctgcgcactgccgaggcgcgtgaggcgttcacggcattcgccgagcgccgccctccggatttcacgaaagtggcgtaa

SEQ ID NO: 2576 - DNA, 246 bp, BradyrhizobiumColbertium
atgaccgcgatcgccgccgcggtcgagcagcaacgcgcggcgaccaccgagatttcgcgcaatttccagcaggcagctcagggcacccgcgaggtcaccgacaccatcggcagcgtcgcgagacttaatcaggagaccggcaacgccggcacggtgctgtcggagtccgtcaagaagatgtcggccgacgcggatcgcctccgcgtcgcggtcgagggcttcctgggagcggtgaagaccgcataa

SEQ ID NO: 2577 - DNA, 939 bp, BradyrhizobiumColbertium
atgccggtcaccccacacaaggccccgcgtccctatcgcggcgtgttccccgtcgcgcccaccattttcgacgagcgcggtgaactcgacctcgaaggccagcgccgctgcatcgatttcatgatcgatgccggctcccacggcgtctgcatcctcgccaatttctccgagcaattcgtgctcaccgatgcggaacgagaggccgtgatgcacgccgtgctggagcatgtcgcaggccgggttcccgtgatcgtcaccaccacgcatttcagctcggccgtctgcgcggcccgcagcaagcaagcggaggcggcgggcgccgctatggtgatggtgatgccgccctatcacggcgcgacgttccgggtccccgagaaaggcatcatcgaattctttaaggtcctctccggcgcgatcgacattcccatcatgattcaggacgcacccgttgccggcacgccgctgtcggtcgagctgctcgcgcgactggcgcgcgacttctccaacatccgctacttcaagatcgaggtggccggcgcggccgcaaagctccgcagcctgatcgaggccggcggcaaggacatcgaaggcccatgggacggcgaggaggcaatcacgctgctggccgacctcgacgccggcgccaccggcgcgatgactggcggcggctatgccgacggcatccggcagatcgtggacccctatttcgccggcgatcgcgaaaaggccaaggccgcctacgagcgctggctgccgctgatcaactacgagaaccgccaatgcggcctgatcgcctgcaaggtgatgatgcaggccggcgggatcatcaagtcggatgcggtgcgccatccgctccagccgctgcatccggcaatgcgggcgggcctgctggagcttgcgaaggagcgcgacgcactggcgctgcggtggggaaagtag

SEQ ID NO: 2578 - DNA, 699 bp, BradyrhizobiumColbertium
atgacaggtcttccccgctacgcgatctattttgccgcaggccgcaacagcgccctctcccgcttcggcgcggagctgctcggctatgatgcctgcaccggcaacgaactagcctttcccgccgacgctttgcagctcgctgcggactggagcgacgtcaccgccgacccccgcaagtacggttttcacgcgacgctgaaagcgccgatggtgctagcgtccggcaagaccgaggtggagctgatggccgcctgcgcggcattcgccggcaggtcacgaccgcgccccgtgattcggccgattgtggattccatcagcggattcattgccgtcattccggccgaaccggtcgatgcactgcaacagctcgccgccgattgcgtgcgcgatttcgatccgtttcgcgccgcgctgacggcggaggatcgcgcacgtcgacggcccgagaagctgagccagcggcagcgcgattatctcgaccgctggggctacccttacgtgatggaggagttccgcttccacatgacgctgaccgggcggctggatgtcgagcggcgcgggccgatcctcgagatgctgcgggggcgatttgcagggctgaagctcgagagcttgatgatcgaccgtatcgcgctgttcaggcaagatgatgccaaggcgcgcttccgcgtcattggcgagtggctgctggccgagtaa

SEQ ID NO: 2579 - DNA, 1194 bp, BradyrhizobiumColbertium
gtgacagacatagtcctcgaaagcggccgggccctgatcggcaccgagttcgtcgaaacctcacttctggtatccggaacggatatcgcccaggtcgatgcttctcgaggccgtgcgcggctggcgctagatgcccgcgacctgctggtgctgccgggcatcgtcgatttgcacggcgatgccttcgagcggcagatgatgccccgcgcaggcgtcaatttcccaatcgacgtcgcgcttgccgacagcgatcgccaggcgatcagcaacggcatcaccacggtgtttcacgccacgacctgttcctgggagccgggcctgcgcagcgccgacaatgcgcgcggactgctggaagccatcgagcggcagcgcccgcaattcgctgccgatacccgcttccacctgcgccacgaaacctacaatctcgacgccgaggccgagatcagccagtggctcgctgacggccgcgtcgacctgttcgccttcaacgaccacatggacgggaccgtcgccgacatggccaagccccgcaagcgcaaccgcatggtggagcggacctgcctttcgatcgacgagttcgatcggctggtcgagcgcgtggtttcgcgcgccgacgctgtgccggcctcggtatcgcggctggctgcggtcgcccgcgctgccggggtgcgaatgctttcgcatgacgatgcgacgccggcgatgcgccggcattttcgcgaactcggcgctcacatcgcggagtttccgatcaacgaggagacggcgcgcgctgctgcggatgccggtgacgccatcgtctacggcgcgcccaacgtcgtgcgcggcggcagccacaccggctggaccagagcatcggacatgatcgccaagggcctctgctcggtgctggcgtcggactattattatcccgcgcagctgctcgccgcgttccggctcgctgccgacggcgtgctgccgctggcgaaggcctgggacctggtctccgccggccccgcgcgcgcgaccggccttgccgatcgcggcatgctcgcggaaggatgccgcgccgacattctcctcgtcgacggcagcatggcgctacgcccgcggctgatcgcggtgatctcaggtggcaagctcgtgcatctcagcgatgcaactcggctgctcaccgcggcagcggcgccgcgccaggctatcgtggccgcctaa

SEQ ID NO: 2580 - DNA, 669 bp, BradyrhizobiumColbertium
atggccaaaattctctcggttcagccgaccatcgacccttcggccgtgctgcatgagacccggctcggcgcctataccgaggtcggcgcacgcaccatcctgcatgaagtggcgatgggcgattactcctatgtcgtgaacgattcgcagatcacctacaccactgtcggaaagttctgctcgatcgcggcaatgacgcgcatcaatccgggcaaccatccgatgcaccgcgcgacacaggcgcatttcacctaccgctccagcgcctatttcgagggcgagagcgacgatgccgaattcttcgagtggcggcgccagcatcacatccatatcggccacgacgtctggatcggccacggcgccgtcgtgctgccgggtcgcaacatcggcaccggcgctgtgattgccgccggcgccatcgtcaccaaggacgtgccggcctacaccatcgttgccggcaatccggcccggatcgtgcggcggcgcttctcggaggagatcgctgggcggcttgccaggctcgcgtggtgggactgggatcacgacaagttgcgccgggcgctgccggattttcgcaagctcgggattgaagattttcttgcgacatacgaagcacaggcgagccctctcaccaattctcccgccggcaaacgaagcgcgatcgcgtga

SEQ ID NO: 2581 - DNA, 810 bp, BradyrhizobiumColbertium
atgctggtggtggatggtctgacgtgtcgcttcggcacaaaagccgctgtggacgacacctcgtttcaagtgtcccccggcggcttcgtcggtgtgatcgggcgatccggcgccggcaagtcgaccttgctgcggagcatcaatcgactggtgacgccgaccgagggacgcatcctgttcgatggcgtcgacgtcaccgcattgcgcggcaaagagttgcgccaatggcgggcgcggtcagcgatgatcttccagcagttcaatctggtcggccggctcgatgtcctcacgaacgtcctgatgggacggctagcgaccatgccggcctggcgctcactgtcccaaatttggccggagcaggacaaggcgctggcgatgtccgcgctggaacagttcgatatcgcgtcgcttgccgcccagcgcgccgaccagctctccggcggtcagcagcagcgcgtggcgatcgcgcgcgccctggtgcaacagcccgatattattctggccgacgagccgattgcctcgctcgacccgcgcaacaccaaggtcgtgatggatgcgcttctgcgcatcaacaagcatttcggcatcaccgtgctctgcaatctgcattcgctcgatctcgcccgcagctactgcgaccgcctgatcggcatggccgcgggccgcgtggtgttcgacggcgcgccgtcgatgctgaccgatcaggtcgcgcgcgagctctacgatctcgaagccaacgaggtcatgggtggcgcgccggccgccgcgcccgagggtgttccggcgctcggcagcgctgccgccgcctga

SEQ ID NO: 2582 - DNA, 930 bp, BradyrhizobiumColbertium
atgattactcgtcgattggttcttgccggtgccgcggccctggccttcaccacctccgcctccgccgaagactggcggaagaaatacccggagatcactctggccgtcgttccggcggagaatgcctccggtgtgaccgagcggtttacgcccttcatcaactatctgtcgaaggagctcggtacgaaggtcacgctgcgcgtcaccaacgactatgccgccgtgatcgaaggccagcgcgccggaaacattcacatcggctattacggccctgcagcctttgcccgcgcccggctgaccggtgtcaagaccgatgcgtttgcgatcgaggtcaatgctgacggctcgaagggctactactcggtcttttacgtgctcgcgaaatcgccctaccagaagatcgaggacctcaagggcaagaacctcgggttggtcgacccgaactcgacgtcgggcaacaacatgccccgcttcaagctgaaccagatgggcgtcgatcccgaggcctatttctccaaggtcgtcttcaccgggagccatgaaaacgcggtgctggcgctggcgcaaggcactgtggacgtcgccgccaactggtggaacgccgaggatgattccaacctgacccgcatgctcaacaagggcatggtgaagaacgccgacggcgcgccgatgaagaaggaggacttccgcgtcatcgtgaaatcggacatgatcatcaattcgcccgttgcctatctcagcgaccttccggacgacatgaaaaccgcgatcaagaaggctttcctggacgccgcgcagaaggaccccgaagccttcaagaagctctccgacggcaagaacaagccctgggatccggtcaccaacgaagagtacaacaaaacgatcgagctgattaagttcgtcgaccatctgcgcaagaaggcgtcctga

SEQ ID NO: 2583 - DNA, 885 bp, BradyrhizobiumColbertium
atgacaattgcggtttcgatccttcccgagcagcagctgactgtgctgaatgcggtctatcgcaaggcggtcgcacgcaagcggttacggctgctgcttggcactgtgctgttcatcgccgcgctgcttgtcgctgcggtcggcgccgaagtgaacttgcgcaccttattcacccatttcggcaatttcgtcagctacttcgatcgtattctcacgctcgacactggccagcgcgtctggaccgatctcggcgagtggttctggggctggcgcaaatggctgaagctgctcgccgaaacgcttctggtgagctatgtcggtacgttgatcggggctatcctcgccttcggcttgaacttctttgcggccgcgaacaccgcgccggcgcgctggctgctcttcgtcgtgcgtcgcctgcttgaattcgcccgcaccgtgccgagcatcgtattcgcgttgatcttcgtcattgccttcggcctcggaccgatggcgggcgtgctggcgatcgccatccactcgaccggcgcgctcggcaaattgttctccgagatcgtcgagaatgcggacatgaggccggtcgaaggcgtgcgctcgaccggggcaagctggctgtcctgcatgcgctttgccgtgctgccgcaggtgatcgcaggctatgccagctacgcgctgctgcgcttcgagatcaatgtacgagaagcctcggtgatgggctttgtcggggccggcggcatcggacaggagctgattgttgcgatccgcaagttctactattcggacgtcagcgcgatccttctgaccatcatcgtcacggtcttccttatcgacatcggcaccggctggctgcgcggccgcctgttcggcagcgaggcgcggacatga

SEQ ID NO: 2584 - DNA, 849 bp, BradyrhizobiumColbertium
atgagccgccaccccgaggtcgatacggtacagcttcgcgcgcgccacccgaatgtcttcaaccggccggcgtcggcgcggctcgcgacgccggcgatgcttgccgccgcgctcgcgctcctggtgttcgggctggtcgacctcgacttttcgccgtcgcgtttcgttgccggcgtcaatcagcttggctggatcacgatgatgatgatcccgcccgatcccggctcgtcgctgccgctctatctgaaggcgctcggagagacgctgtcgatcgcgctgctcggtaccacgctcgccgccctgttcgcactcccggtgagcctgcttgccgcgcgcaacatcgtgccgtcgggcttcttccgtttcccggtccggcgcttcctcgattcgattcgcggcgtcgacacgctgatctgggcgctagtctggatcaatgtcgtgggtctcgggccgtttgccggggtgctggcgatcgcggtgtcggatttcggcgcgttcggcaaattgttctcggaagcgatcgaggccgccgaccagaaggaggtcgagggcatccgtgcctccggcggcagtgccctgcacgagatccgtttcggtctgatgccgcaggtgctgcccgtcatcgccggccaggtgctctactatatcgaatcgaacacccgatcggccaccatcatcggcatcgtcggcgccggcggtatcggcctgcaactagccgagcagatccgcgtgctggaatggcagaaagtctcgttcctgatcctgatgatcctgatcgcagtcgccgcgatcgatttcatctcgggcaagctgcgctttgcgatcatcgggcgaaggccggtggtgtag

SEQ ID NO: 2585 - DNA, 729 bp, BradyrhizobiumColbertium
atgagcatgcaggacacagcctcttcgggcgtcgcgctctggcgtctcgtcgccgacggcatcgagcgcggcatcgcggacggccgctttgcggcgggcgacaagcttcccggtgaggtggagatcgccgaggcctatcgcgtcaaccgtcacaccgtgcggcgcgcgctggctgcgctcgccgagcgcggtctcgtgcgcgccgagcgcggcagcggaacctatgtcgaggcgcagaagctcgcctatcccttgcgctcgcgcacgcgattttccgagatcgtcggcgccggaggacgggagccgcatgggcgtctgatcgaggcaagcgatgatatcgcgacgcgcgagctcgcgcgggagctggggttgaagaccggcgcaccgctggtgcgaatcgaggcgatccgcctcgctgatcgcacgccgatctgcgtctcgaccacctggctctcggcggaactgtttccggacgcgggcgccgtgttcgcagccacgcactccatgaccaagctgctcgcgcattacggcgtgcgcgactaccgccgcggcgcgacccgaatcaccgccggcattgtcgacgcgaccgatgccgtacggctcgatctggcgctgggtcggccgattctcgtggtcgacgccaccgaccacgatctcgcgggcaaggcgctgctgaccaagcattcgcgcttcgcggcggagcgggtggagttcttggtggagtcgtag

SEQ ID NO: 2586 - DNA, 465 bp, BradyrhizobiumColbertium
gtggagcaggtgacgcagcacaacaatcagcaagcccagcgcagggccgcgatggcggtgctggcgcacgcggaggcgggcgagatcgccgctcgcctccgcaacctggcactcccggcccatcaggatctgcgcgcgcccgaaaacggcctcgtcatgctgcgcggcagggtcgggggcgacggagcaccgttcaatctcggcgaagccacggtgtcgcgcgccgcggtgcggcttgcgaccggcgagatcggcttcggctatacgctgggacgcgacggtgagaaggcgcggctgatcgcgctatgcgatgcgctggtgcaatcccgtgaattcggcagcgcgctggagcgcgacgtgattgccccgttgcgcgaccagctcatgatcaagcgtcagcgggccgcggaagagaccgctgcgacgaaggttgatttctacaccatggtgcgcggtgaggggtga

SEQ ID NO: 2587 - DNA, 624 bp, BradyrhizobiumColbertium
gtgaggggtgagatcatgaccacgattgcagaactgccgcccggtttcgtagacaaggtgttgtcggcacagtcgaccttccgctcggtcatggatgcgatggcgcggccgggttcggtccggcgcattgtgccgggagcggggacgccagggccgatgatgcggggcaccgctgcgatcgcgctgacgctgttcgatcacgacacgccgctctggctcgacgcgcggatggcggagagctcggacgtggtgaagtggctcaagtttcacaccggcgccccggtggtgcaggacacgtccattgcaggcttcgcgctgatcggcgatggcgcagctttgccctcgctggagcgttttgcgctcggcaccagcgaatatccggatcgatcgaccacggtgattctccaggtcgattcgctcgatgccgggcgcggcttcgagctgcgcggccccggcatcgacggtgtcgcgacgctcaaggcgtcgatcacgccttacgatctattcgagcgcctgcatgtcaacgaggcgctgtttccgcgcggcatcgatgtggtgctggtcgcggatgatgccgtggttgcgatcccccgcactacgcgcgtcgtgagcaaggaaagctga

SEQ ID NO: 2588 - DNA, 1104 bp, BradyrhizobiumColbertium
atgtatgtcgcagtcaagggcggcgaacgcgccatcgagaacgcccaccgcctgctcgcccataagcggcgcggcgaccagggcgttccggaggtcacgctcgcccagatctccgagcagctcggtctcgccgtcgaccgcgtcatgagcgaaggctcgctctacgaccgcgagcttgcggcgctcgcgatcaagcaggcgcgtggcgacctgatcgaagcgatcttcctggttcgcgctttccgcgccacgatgccgcgcttcggcagcagcgagccggtggacaccggcaccatgcgagtacggcggcgggtatcggccacgttcaaggacattcccggcgggcagattctcgggccgaccttcgactacacgcatcgcctgctcgatcccttgcttgccgaaggccttgcgccggaagcgccggcgacggccgacgcgcacaccgcgccaacgccgcgcgtgacggacattctcgggcgcgatgggctgatcgaatgttcgccgccggccgacgacggcgcaagcgtcggcgatcttacccgcgagccgctgaactttccggcggatcgtgatttgcggctgcagaacctcgcgcgcggcgacgagggtttcctccttgcgatgggctattccacccagcgcggctatggccgcaatcaccccttcgtcggcgagattcgcttcggtgaggtcgaggtcgaactgttcgccgaggacgccggctttgcggtgccgctgggctcgatcgagctgaccgagtgccagatggtcaaccagttcaagggctccgcgaccgaagcgccgtgcttcacccgcggctatggcctcgccttcggtcagagtgagcgcaagaccatgtcgatggcgctggtcgaccgggcattgcgtgcccgtgagctcggcgaagaggtgcgtgcaccggcccaggacgaggagttcgtgatgtcgcattcggacaacgtccaggcgaccggcttcgtcgagcatctgaagctgccgcattatgtcgacttccagtccgagctcggcctgttgcgcaagctgcgtcaagagtttgccgatgccagcacgcccgatgccatgaaggaggccgcggaatga

SEQ ID NO: 2589 - DNA, 885 bp, BradyrhizobiumColbertium
atgaacgcgcccgcctacaatttcgcctatctcgacgagcagaccaagcggatgatccgtcgcgccatcctgaaggcgatcgcgatccccggctaccaggtgccgttcgccagccgcgagatgccgatgccctatggctggggcaccggcggcgtacaggtgacggctgcgatcctcgggcccgaggacgtgctgaaggtgatcgatcagggctccgacgacaccaccaacgcgatctcgatccgcaagttcttcgccaagaccgccggtgtcgccacgacgacggcgacgaatgaagctaccgtgatccagacccgtcaccgcattccggaaacggcgctgcacgagaaccaggtgctggtctatcaggtgccgatccccgagccgctgcgtttcctcgaaccgcgcgagaccgagacgcggcgcatgcacgcgctcgccgaatacggcctgatgcacgtgaagctctacgaggacatcgcccgcttcggtcacatcgcgacggcctacgcctatcccgtgaaggtcaacgcccgttatgtgatggatccgtcgccgacccctaaattcgacaatcccaagatggacaattgcccggcgctgcaattgttcggcgccggccgcgagaagcggatttacgcgatcccgccttacacccaggtggtctcgctcgatttcgaggatcatccgttcgagccgtaccgtttcaacgcgccctgtgcgttgtgtggcgcagagaactcctacctcgacgagatcgtcaccgacgacaagggaggacggatgttcgtctgctcggacacagactattgcgaaggccgtcaggccaccggccatcacggcagcctcagcgccgcgccgtacaaggagaaggcgcatggttga

SEQ ID NO: 2590 - DNA, 798 bp, BradyrhizobiumColbertium
atggttgatcaagccgcgcttgaaagcgaccagccgctgctgacggcgaaatccctcggcaagtccttcggccgcatcgccgcctgccgcgacgtttccttcgcgctctatcccggcgaggtgctggcgattgtcggcgagtcagggtcgggtaagtcgacgctgttgcagatgctgtcgggccagctggcgccgagcgccggccatgtgtcctaccgcatgcgcgacggcgtcacccgtgatctcacgacgctcggtgaagccgagcgacgtttcctgtttcgaaccgattgggggttcgtacaccaggatcccgcgcagggcctgcgcatggcggtctcggccggtgccaatgtcggcgagcgtctgatggcggtgggctggaatcactacggccgcatccgcgacacggcgtccgattggcttagccgggtcgagatcgacgtcgcgcgcatcgacgatgctccgcgcacctattccggcggcatgcgccagcgtcttcagatcgcccgcaacctcgtcaccgagccgcggctggtattcatggacgagccgaccggcggcctcgacgtctccgtgcaggcgcggctgctcgatcttgtgcgcagcctggtcgccgagctgcatctggccgtcatcatcgtcacgcatgatcttgccgtggctcgccttttgtcgcaccgggtgatggtgatgaaaggcgggcgcgtcatcgagaccggcctcacggaccaggtgctcgacgatccccgagagccctatacgcagctccttgtctcctccattctgccaccatga

SEQ ID NO: 2591 - DNA, 699 bp, BradyrhizobiumColbertium
atgaccgcgatgatcgacgttgccaatgcccagaagacctttacgatgcacttgcagggcggcatcgagctgcccgtcgtgcgcggcgtgaccttccacgtcaatcctggcgaatgcgtcgtcctctccgggccgtcaggcgccggcaaatcgtccatcctgaagatgatcttcggcaattaccgctgcgatagcggccgcatcggcatccgccatcgcggcgtggtcatcgaccttgccactgccgagccgcggcagatcctcaatgtgcggcgtgccacgatcggctatgtcagccagttcctgcgggcggtgccgcgcgttgccaccatcgacgtcgtcgccgagccgctgatcgccggcggcatgacacgcgccgaagcgcagcagcgtgccggcgcgcttctgcagcgtctcaacatccccgagcggctctggcagctgccgcccgccaccttctccggcggcgagcagcagcgcgtgaacatcgcgcgcggtttcatctcggatctgccgatcctgctgctggacgagccgaccgcctcgctcgatgcagccaatcgcgccgtggtggtcgagttggtcgccgcgaaaaaacgccaaggtgtcgccatggtcgccattgtccatgacgacgaaatccgtcatctgatcgccgaccgcatcgtcgacgtcaccagctttgccgccgcggcctga

SEQ ID NO: 2592 - DNA, 1158 bp, BradyrhizobiumColbertium
atgaatgccaagccgaaagaagccgtgatcggcaatgccaggatcgtgctgggcgacggggtgatcgagcaggggtggcttgctcttgccgacggacgcatcgccgaaatcggtgagggcagggctcccgtcggtgcggaggatgccggcggcgatctgatcatgccgggcctggtcgagctccacaccgaccatctcgaagcgcattacgtaccgcggccgaaagtgttctggaacccggttgcggccgtggtctcgtatgacggccagctcgcgacgtcgggcatcacaacggttttcgattcgctacgggtctggcgcgaggacggcgccgaggaggtcgatggccgcgccggcgtgctcgctgccgcgatcaccacggcgcgcgaggccagcctgctgcgcgcggaccatttcctgcatctgcgctgcgagatcccgatgccgagcgtggtcgaggaagccaaggagctgatcgaccgccccgacgtcaagctgatgtcgctgatggatcacacgccgggacagcgtcagttccgggacgaggtcaagctgcgtgactattatcgcgggaaggggggcggcaagaccgacgccgagctcgacgagctgttcgcaaagcgcttcgagtaccagaagcaatatgcggcggccaacatgcgccagatcgtggcgctggcgcacaagtacaacattccgctggcaagccacgacgacactaccgaggagaacgtcgccgacgccgtgcgcgatcgtgtctcggttgcggagtttccgacgacgctcgaagccgcgcgcggcctgcatcaggccggcatcgacatcctcatgggtgcccccaatgtcgtgcgcggcggctcgcactccggcaacatcgccgcggtcgatctcgcgcgcgagggtctgctcgacattctctcctcagactacatcccgtcgagcctcctgatggccgcgctgcaattgccggagcatgtaccggcgatcagccttcccgcggcggtgcgcaccgtgacgaaggcgcctgccgaggcggtcggcctcaccgaccgcggcgaagtcgcgatcggcaagcgcgcggacctgatccgcgtgcatgtcgcgggtcacattcccgtggtgcgcagcgtctggcgcgaaggaagtcgcgttgcatga

SEQ ID NO: 2593 - DNA, 597 bp, BradyrhizobiumColbertium
atgagcgagatggtcgcaaccgcacgggacgaggcgggcgcgatcggccccggccggctcgtgctggtggtcggccccagcggcgccggcaaggatacgttgctgcggctggcacaagcagcctgcatcgatgaccccgatatcgtcttcccgcgccgcgtcgtgacacgagagtcctccgatgcggaggacaatatcgccgtgagccccgacgagtttcgtcgcgcgcgcgaacagggcgatttcgcagtgtactgggacgcccatgggcattcctacgcgctgccgctcgatatcaacgacgatatccgcgcggggcgcactgttgtcgtcaacgtctcgcgcaccgtgatcgccgccttgcgccgggcctatgtcaatgtcgtcgtggtcgcgattacggcgccgccggacgtgctggtgcagcggcttgccgcccgtgcccggcaaagcgacggcaacatcgtcgagaggctgtcgcgcagtgtcggcgacgtgccggcgcaggccgatgtcaccatcctcaattcggggagcgcggactatcacagccgccagctggtgcgcgcgatcaggaatgaatgctggcaagagtag

SEQ ID NO: 2594 - DNA, 612 bp, BradyrhizobiumColbertium
atgacggtgatcgagacggtcgaacagctggaagagatctacggccccaccaatgatgcctcgaccgtgaaagtcgccgaccatgtcactccgctctatcgcatctttatcgagaaggcgccgttcgccgcgctcgcgacgattggacccgaaggtatcgactgctcgccgcgcggcgatcttcccggcttcgtccgcatccatgatcccaggacgctgatgctgccggaccgtcgcggcaacaaccgggtcgattccctgcgcaatatcgtgcgcgacccgcgcgtgtcgctgatgttcctgattccgggctccggcaatgcggtccgtgccaacggccgcgcttatctttcgatcgacccggaactcctggcctcgttcaaggtggagggcaaggcgccgcgcagcgtcatggtgatgaacgtggaagaaatctacttccagtgcgcccgagccatcgtccgttccgacctctggaatcccgacaagcgggtcgatccgaagatgttgccgacgcccggacagatcctcgccgagatgagcgagaacaaggtcggcggggcggagtacgaccgcatctggccggaacgcgcagcggcgacgatgtggtga

SEQ ID NO: 2595 - DNA, 732 bp, BradyrhizobiumColbertium
atgtcagggacactcaaggggcgcacggcgctggttaccggcggttcacgcgggatcggcgccgccgtctgtcgcgcgtttgcggaagccggcgcggccgtggcgatcaattgccgcgagcggatagaggaggccgggcagttggcccgcgagatcggcaagcagcgcggccgagccattgtcgtcactgccgacgtgtcgcagcgcgagcaagtggctgccatggtggaggacgtcacagccgaactcgggcccattgacatcctcatcaacaacgccggtatcgccatcccgcgcggcatcgacgatctcacggaggaggatttcgaccgaacgatcctggtcaacctgaaatccgctttcctctgcacgcaggcggtgctgccatcgatgcgggcccgaaaatggggccggatcgtcaacatctcctcgggcgcggcgcgcggcgccggctcgatcgggccccactacaacgcatccaaggccggcatggagggcctcacgcgaggctatgcggcccgcctcgtgaaggagagcatcaccgtcaatgcggtcgcgccgtcactgatcgagaccgacatgatgcgcgatcaaccacagctcgtcagccgcatcccgctcggccgcttcgggacgcccgaggaggtagcgaaagccgtaatgctgctggtcgacaacgcctacatgaccgggcagacggtcgcgctgagcggcgggatggcgttcaattag

SEQ ID NO: 2596 - DNA, 504 bp, BradyrhizobiumColbertium
atgccaagacaggaagttgttcgcaaagccaggcgggacaaacgagttggcaaatcggcgagcacgcaggccggcgaattcgtcaaggaccagatcgacaggatccggaagggcaagcatggtgcgcggtcgaccaagcaagccattgccatcggcctctccgaggcgcgccgcgccggcgtcgacctaccgccaccgcgaaaagggcggaccaagaagtcaacgcgccgcagtgccaaatacgcgtacgaggtcggccagggcaaacgtacgccgaagcgccggccgaaagtatcgcgcgctgtcgcgaacgttctgaagaaagagccacgttcgactgcatcgcgcagcgcgctgtcgaagcaaggcaagcgggcggcgagccggcgaaccgccgcatcgcgttcggccgcagcccgaaaggcgagccgcaccaagggagccaggtcccgctccgcggccgcgaagaaggcggcgcgcaccagagcgaggcgcagaggctga

SEQ ID NO: 2597 - DNA, 783 bp, BradyrhizobiumColbertium
atgaagctctccgtcaacggcactgaagtgttcgcggcaaccggcggccgcgacttcgacaagtcgctgcctgcggtcgttttcatccacggcgccggcttcgatcgttcgacgtgggcgctgcatacgcgctggttcgcccatcacggctttggcgtgctggcgcccgacctgccgggccacggccgctcggcggggccatcgctcggcagcatcgccgagatggccgactggaccgcggcgctgctcgatgcggcgggcgcttcgaaggcgcatttgataggccattccatgggctcgctgatctcgctggagacggcggcgcgccacccggaaaaggtttccgccctgagcctgatcggcaccgccgcgaccatgacagtcggcccggatctgctcaaggaagccgaagccaactcacaggatgcaaacgacatggtctcgatctggggcctcggcttcagggccgaactcggcggcagccttgcgccgggcctgtggatgcatggcagcgcgcaggcggtgctgaaggcttgcgagccgggcgtgctgttcagggatctgtccgcgtgcaattcctatacgaacgcacttcaagccgccgcgagcgtgaaggtgccgacgacgctgatcctcggcgagcgggacatgatgacgcccgccaaggccggcaaggcgctcgcggctgcgatcccgcatgcgaaaacagtcatcgtgccgggcgccggtcacatgatcatggccgagcgtccggatgagttgctggcggcgctgaggagctag

SEQ ID NO: 2598 - DNA, 1296 bp, BradyrhizobiumColbertium
atgcccgcgccaaagccgcctgccttcgagaccctgagcctgcatgccgggcagcatccggatcccgtcaccggcgcccgcgcagtgccgatctaccagaccacgtcctacgtgttccaggattccgatcacgcggccgcgctgttcaacctggagcgcgccgggcacatctacacacgcatctccaatccgactacgggcgtcctcgaggagcgaatcgcggcgcttgagggcggcgtcggcgcgatctgcaccgcgagcggcatggccgcgctgcatctggccatcgcgacgctgctcaatgccggcgaccacatcgtggcgtcgagttcgctctatggcggcaccatcaacctgctcgcgcatacgctgccgcgtttcggcatcaccacgacgttcgtcaaaccgcgcgacctcgatgcattccgcgcggcgatcaagccgaacaccaagctcgtgatcggcgagacgatcggcaatcccggcctggaagtgctcgatatcccgaaggtcgcggcgatcgcgcatgaggccaagatcccgctgctgatcgacaacacttttgccacaccctatctcagccggccgatcgagctaggggccgacatcgtcatgcattcggcgaccaagtggatcggcggccacggcatcgcgatcggcggcgcgatcgtcgatggcggccgcttcgactggcgcgcatcaggcaagttcggcgtgctgacggagccctatggcggctaccacggtatagtcttcgacgagcagttcggcaccgcagccttcatcatgcgcgcgcgcaccgagggtctgcgcgatttcggcgcctgcctctcgccgacgaacgcgttccagctgttgcagggcatcgaaacgcttcccgtacgcatggaccgccacatgcagaacacgcatctcgtactggaagcgctgaaatccaataaggcggtcgactgggtgctgcatccctcgctggagacgcacacggactaccaactcgcgaaacaactcctgccgcgcggcgccggctcaatcatctccttcggcattaagggcggccggccggcgggccgcaagttcatcgagagcttgcgcatggtcagccatctcgccaatgtcggcgacgccaagacgctggtgatccaccccgcatcgaccacgcatcagcaaatggacgccgagcagctcaaggccgccggcatcggcgaggagctggtgcggctgtcggtcggcatcgagacggcaagcgacatcattgacgatctcgcgcaggcactgcgcatctcgcaaaaggtctga

SEQ ID NO: 2599 - DNA, 804 bp, BradyrhizobiumColbertium
atggacaaggcaaatcccagaaggccagcacgcaacagtgcatcggaaccgcgctcgggcgcacaggcaatccggcgcgccctcgcggtgctgcgcattcttgccgcaggccgtgaggccggtgtgccattggccgaggtggtgcaggccaccggcctcacccgccccaccgtgcatcgcatcgtgcacgtgctgatcgaggagggcatcgtcgagcgaaacgagcggagcggccactacgcgatcggcaaccaggtgcctgaactggcgctggcacggccgcggccgtcgcgattgctgatcgccgcaaacccctcgctgcaacgcgcgtccagcgagatcggcgacacgctgttcctgaccgtgcggaccggcaacgatacgctgtgcgtggatcgccggatcggaatctatccgatacaggtgctgtccatcgaggtcggtgcccgcaggccgctcggcgtctccagcgccggcgtcgccattctcgccgcgatgccggcgcaggacgcgcgaaggatcgtcgcggccaacgagaagaggttcgaagcgtacaaaaccgacatcgcgacggtcctcggcgaggtgaccgccgcacgacggctgggatacggcaggcgagagatcgggctggtgcagggcacgaagtcgatttcaacctggatcaagacccccgacggccgccccgccgcggccatgaccgtttccgcagtgcgaacacggctcgggccaagacgcgaacaggaggtcgcggaggttctattgcgggaggcgcggatcatcgaacaggcaatcggaggttaa

SEQ ID NO: 2600 - DNA, 966 bp, BradyrhizobiumColbertium
atgagattaatctggattgccatagctgccgtcactgcgatgctggcgggacctgcgtcaggccaggaatggccggcgcgcaacgtcaagctgatcgtgccctatcccgccggcggcaacgtcgacagcgccgcgcggatcgtcgccgataagctccaggaaaagctcggccagccctttgtcatcgagaacaaggccggagccggcggcatgatcgcgggcgaggctttcgccaagtccgcgcctgacggctacacgctgttcgtcggcgctaacggacccgtgctgtttgcgaccgagatcaacaagcgcgacgcctacaactggaagaaggacttcctcccgatctccacgatctcgatgacgccgctggtgctcgaggttcatccgtcggtacaggcaacgacgctcaaggagtttctcgatctcgccaagcgcgagcccggcaagctgaccatggcctcgcccggccccggcaccaccaaccatctgctcagcgagctgatgcagtcgaatctcggcctgcaatgggtcactgcgcactatcgcggcaatgcgccggcgatcaatgatctgctcggtggtcaggtccagttcgcgttcgaccagctcacggtcagcctgcagcatatcaaggccggcctgttccgtgcgctcgccgtcaccagcccgcaccgcctgaagtccctgcctgatgtgccgaccttcgccgagctcggctacaaggaattcgacggacagacctttaccggcctgttcgcgcccgcgggcacgccggctcccatcgtcgacaagctgcacgagacgctggtcgcgatcctcaaggaccccgccgtgatcgacaagttcgagaagctcggtggcgaagccacgccgatgacgccagccgaattcaaggcctatctcgaacgcgaggacgccaagtggattcccgtggtgcgcaaggccaatatcagggcggactga

SEQ ID NO: 2601 - DNA, 618 bp, BradyrhizobiumColbertium
atgcggatcgatcccaccgagctcggcgcggagcgcatctaccggctgatgaccggcatcgtggtgccgcgcccgatcgcgtgggtgacgagcctgtccagcaagggcgtgctcaatctcgcgcccttcagcgccttcaccttcgtttcgcagaagccgccgatgctcgcgatcagcgtcggccgcaagggcgccaactacaaggacaccgggcacaacatcctcgacaccgaggagtatgtcatccacatcgccgacacgcctctgatgaatgcggtgcacgatagctcggtcgagcacccgcctgaaatcagcgaggtcgagcatctcgggctcgaaacgctgccctgcgatctcgtcaaggtgcgccggcttgccgccgcaccgatcgcgatggaatgccgcttccggcagtgcctcgaattcggcgaggccaagagccggctcatcgtcggtgaggtcgtgatgttccatttgcgcgacggcctcgtgaacgacggcaaggtcgagaccaaggcgctcgatccgatcgcacgcatcggcggcccgcgctacgcgcggctcggcgagatcgtgacgctcaacaccgtcttccagactcccaaatcgaaagactga

SEQ ID NO: 2602 - DNA, 861 bp, BradyrhizobiumColbertium
atgcgactcctgagctatctcctggacggagagccgcgctatggcgcggccgtcgaaggcggcgtggtcgatctgaccaaacgcatcggccgtgacttttgcgacctgaaggcgctgatcgcggcgaatgcgcttggcgatgcgcaggaagcggtcgccggacagaagcccgattacgcgctggacaagctcgtcctgctgccgccggtactggcgccggaaaagctctggtgcatcggcgtcaactatgccgagcgcaatgcggaatacaaagacaattcggacctgcccaaatatcccagcctgttcgtgcgcagcatgtcctccatgacgggctccggccagccgttggagaaacccaaagtctcggatcagctcgactatgaaggcgagctcgtcatcgtgatcgggcagggcggccgccacatcccgcgagagaaagcatggtcgcacattttcggcatgacgctgtgcaacgagggcacgatccgcgactggctgcgccacggcaagttcaacgtcacgcagggcaagaatttcgaccgctccggcagcatcggtccctggatcgtcaccgcggacgagctcgacccgcgcggcccccacgacatcgtcacgcgtgtcaacggcgaggtacggcagcaggacacgaccgagcggctgatgttcccgttcgatctcctgatctcctatctctcaacattcgcgacgctgaagcccggcgacatgatcgtgacgggtacgccgactggggccggcgcgcgctttgatccgccgcgctggctcaaggctggcgacgtcgtcgaggtcgaatccagccgcatcggcgtgctgcgcaacaccgttgccgcggagcaatag

SEQ ID NO: 2603 - DNA, 804 bp, BradyrhizobiumColbertium
atgctggacgctgccacgatcgaacgtctcgccgcccggcttgacgaggccgaacgcaccaagacgctgatcccgatgttctcgaaggaatatccggatttcagcatcgaggatgcctacgccgtccagcgcgcctggaccaagctgcagctcggccgcggccggatcatcaaggggcacaagatcggcctgacctcgaaggcgatgcagaacgcggtcggcatcagcgagcccgattacggcgtgctgttcgcggatatgttctatgccgacgcgacgcctgttccgttcgaccgctttcacgcgccgcgcatcgaggtcgagctcgccttcgtgctgaaggcacctctgcgcgggcccgattgcaccatcttcgatgtgctgaacgccaccgactacgtcacccccgcgctggagatactggagacgcgcatgcaccgcgtcgatccggagacagggaagacccgcaaggtcatggacacgatctcggacaacgcggccaacgccgcgctggtgctcggcggaaggccgatccgcccgatggatgcggacctgcgctggatcggggcgctgctgttccgcaacggcgaggtcgaggagaccgggcttgccgccggcgtgctcaatcatccggcgaatggcatcgcctggctcgctaatcgcctcgcgccgcatgacgagcatctggcggccggcgaggtcgtgctggcgggctcgttcatccggcccgtcgacatccgccgcggtgataccttccatgccgactacggcgccttcggctcggtgtcgtgccagttcgtctga

SEQ ID NO: 2604 - DNA, 396 bp, BradyrhizobiumColbertium
atgagtgctcacacgcggcgcaggagcatccacatcggcggcttcaagcacgtcaaccccattccgaacgcctgccgcatcggcaatctcgtgatgtccggcgtcattcttggccgcgatcccgcgaccaacacgatgcccgagagtctcgacgcgcaatgcgccaacatgttcgcgcatatgaaggcgacggttgaggccgccggcggcacgaccgacgacatcatcaagatgacggtgtggctgaaggaccgcgccaatcgcgatcccgtcaatgtcgagtggctcaagatgtttccggacgagcattcccggcccgcgcgccacgcgctgccgatggacaacatggatggcggcgcgctggtgcagtgcgacttcaccgccgtgatcgactaa

SEQ ID NO: 2605 - DNA, 876 bp, BradyrhizobiumColbertium
atgccgacctatctgccgttcgatcccaatccgcgccgtcccggcaaggcgccgccgccgaagaccgtcgacagccagtttcacgtgctgggtccgatcgagagatatccggagcgtcccggcgccgcctatcgaatgccaacggcgacctgggaggcggcgctgcgcatgcacaaagcactcggcatcgagcgcggcatcatcgtgcagaccacgacctacggcgccgaccacgccgtcgtgctcgacggcctcgcagcgatgggcccgaactatcgcggctgcgccaacgcgctggtgttcgccgaagcgagcgattcctatctcgccaagctggacgatgccggcgtgcgcggcgcgcgcttcagcttccgccaggagctcggcgccgtactatcggatgccgatttcgcccgcgccattgcgcgcatccgcgagctcggctggtacgtcaagatccagccggagaaggacggcatcatgtcgagcgttgccaagtacgaggatctcgacgtgcccgtgctgatcgaccacatggcgcgcccggatcccgaagccggcaagaacgatccgaatttgcgcaagatgctggagctgctcggcaagggcaatttctgggtgatgctgtcgctcggcgaaaagacctcgaagaccggtgcaccctatgacgacgtgatcccgatcgcgcgcgcctacatcgaggccgctcccgaccgctgcgtctgggccagcgactggccgcatccggtatcggtcaagcagccgccgaacgatgccgacctgctcgagctgatgtaccgctacgcgccggaccaggcggagctggaaaagatcctggtgcacaatccggccaagttgttcgggtttgcggactag

SEQ ID NO: 2606 - DNA, 1005 bp, BradyrhizobiumColbertium
atgatccccttctccatcctcgacctcgcgccgatccgccagggcggcgatgccgcccaggcgttccgtaactcgctcgatctcgcgcagcatgccgagaagtggggctacaagcggttctggctcgccgagcaccacaacatgaccggaatcgcgagcgcggcgacgtctgtggtgatcggccatgttgcgggcgggacgaagacgatccgggtcggctccggcggcatcatgctgccgaaccattccccgctggtcatcgccgagcagttcggcacgctggagtcgctttatcccgggcggatcgatctcgggctcggccgcgcgccgggcaccgaccagttcacggcccgggcgctgcggcgcgatctcgccaccacgtccgagaactttccgcacgacgtgctggaattgcaggccctgctcggcgacgtgcagccgaaccagacgatccgcgcggtgccaggcatgggaacgaaggtgccgctgtggatccttggctccagcaccttcggcgcgcagctcgcctcgatgctgggtctgcccttcgcgttcgcctcgcatttcgccccgcagatgatgatgccggcgctgcgcgaatatcgcgcgcgcttcgagccgtcggcgcagctcgacaagccccatgcgatgatcggcgtcaacgtgttcgcggccgacagcgaggtcgaggcgcagcggatgttctcatcgctgcagcagcagttcatcaacctgcgccgcggcacgccggggccgctgccgcccccggtggacgacatggacgcgctgtggtcgcccgcggaaaaggccggcgttgcgcaagcgctgtcgtgctccgcggtgggctcacccgccgtcgtggaagagaagctgagggcgctgattgccgagaccggcgcggacgaattgatgacgacggggcaaatctacgaccacgccgcgcggctgcgctcgttcgagatcgcggccgaggtgcgggaccggctggcgaagcagccgatgtga

SEQ ID NO: 2607 - DNA, 504 bp, BradyrhizobiumColbertium
atgaccacggtcgcaatcaaccgccggagcctgctcgccgctggcgggtccgtcctcgcaaccggagttttgacttcgggcgtttccgggttgctgctgccggcacgtgcggcaggcctcgcaccgaccgaaacgatgtcgggcggggcgaacaactatcgaaagggcgcgccggtcgtggagcggattggcaagggcggcttctggatgagcggcaccgtccgccgcgccggcgacggcgcgccgctcgccgggcagcgcatccagatctgggcgcacacggtcgaaggccaggagcacgagccgcagagccacggggccacgctcaccgacaaggacggcaagttccggctcgagatgccgcagatcattcccgttttcggccagccgcacggccatctcgcctatgacagcggcgagttcaagaccgtgttcctgcggccggtgatgcgaagcgccaaggaaaccagcctcgaagcgcacttcgtgcttcagccggcctga

SEQ ID NO: 2608 - DNA, 615 bp, BradyrhizobiumColbertium
gtggtcctgatctgggccgcccttgccttggcgattggcgtgccgattgccgctgctgcaggcagcgagctgctcgcatggcgcggtccgatctatatcctcgccgggttcgccgggatcgttgcgcttgggcttgtgcttcttcagccgctgctgatcggcggctatctgccgggcctgtcggcctatcgcgggcggcgcgcgcaccactggatcggcggcgcgctggtggtggcggtcgttatccacgtcgccggcctctggttcaccagcccgcccgacatgatcgatgccctgacctacgcatcgccgacgccattctcgcctttcggcgtgaccgcgatgtgggcgatcttcgtcgtcgcgctgctggcttccctgcgccggtggttgggattgcgcctgcgaacgtggcgcttcattcacatgccgctggcgatcgtcatcgtcacggggagcgtggtccattgcctcctcatcgaggggacgatggagacgatctcaaaggcggccctgtgcgtgctggtactcacggcaaccgcgaaggtcatgattgacctgcaggtgtggcgaaagcgaaggacgctgcgcggggagagtccagcgcagcagtag

SEQ ID NO: 2609 - DNA, 477 bp, BradyrhizobiumColbertium
atgacgctcacggctcccgatctgaaagcgttcctgctcgcgacgccgttcttcggcggcctgtcggacggaagcctcgacctgctgatatcgatgctggccgaacgccggttcgaggccggcgacaccgtcgtggcggaaggcgagccgggacgatcgatgttcatcgtcaaatccggccggctcgcggtgagcaagaggacgagtgcgggtcgcgtcatcccgctgtccgttctgcagcctggtgatttcttcggcgagatgacgctgatcgaaatgcagaaccgctccgccacggtggtcgcggaagcgccgacggtgctgtacgagctgaccgccaagaatctctacgcctgctacaagacggacatccacgcctatgtgatcgtcctgcagaacatcaaccgcgaactttgccgtcggctgcgaagggcggacaatcgcctcaccagtcgccaggcagggaacgacaattga

SEQ ID NO: 2610 - DNA, 144 bp, BradyrhizobiumColbertium
atggtcctcgccgcggatgatgaaccagaggctccgacagtgtttgcgtttttcctgatcgttactggaatcgtgttgcttctctccagcctcgttgccttcggctttcatagaaactcactgcactcgatggcgctgctctag

SEQ ID NO: 2611 - DNA, 351 bp, BradyrhizobiumColbertium
gtgatcaaacgctccctgccctatgaaggactgctccacgagatcgtcgagcataacggcgtgctctatctcggcggcatcgtccccgaggacaccgggctcgacatggcgggccaaaccgacgatgtgctgcgccagttgaagaccctactcgagggagccggctccgatctttccggcgttctgcaggtgaccatcttcatggccgatctcgccgacaaggcggcgttcaaccaggtgtggaagcgctatttcaccgcggaccatctgccggcgcgtgccgccattggcgttgcggatctcggccccggcgtcaggctggagctgacggcgatcgccgcacgtcgctga

SEQ ID NO: 2612 - DNA, 72 bp, BradyrhizobiumColbertium
gctgccgtagctcagtggtagagcactccattggtaatggagaggtcgacagttcaatcctgtctggcagca

SEQ ID NO: 2613 - DNA, 198 bp, BradyrhizobiumColbertium
atgacggaccaggtgatgacggaccaggacgacaagagcgtggggcaggcgagggcatcgcgggacgatcgcctgaaatcggcgctgcgcgagaacctgaagcggcggaaggtgcaggcacgcgaacgtgccgcgatgaccggggccttggagaacgacgacggttccctagatgaggggaccgccggcgagacctga

SEQ ID NO: 2614 - DNA, 1716 bp, BradyrhizobiumColbertium
atggtggcgatcgggcaggacgaaccgcaaagaaccgaaggcgacgtgctgatgtcccggttcacccggccagaacagacttttccaaacctgacacccgccgagatcgagcgcatcaggcagttcggcgaaatccgcacctatgcggatgacgcgttcctgttcgagaccggcaagcccggccccgggatgttcgtcgtgctgaagggccatgtcgccatcacccagcgcgacgggctcggtcatgtcacaccggtgatcgaccaggggcccgggcaattcgtggccgaactcagccagctctcaggccacccggcgctggtcgacggccgcgccgagggcgaggtcgagactctgctgttgccgccggaccggctgcgcgcgctgctagtcgccgaagccgagctcggtgagcgcatcatgcgcgcgctgatcctgcgccgggtcaatctgatccagggcggcgtcggcggtcctgtgctgttcggcccgtcgaactccgccggcgtggtgcggttgcagggcttcctcacccgcaacggtcagccgcatcatctgcttgatcccgagcgcgatcgcgacgccgccgagctcattacgcgctattcgccgcagcccgaggactggccgttggtcgtcaccgctgacggcgccgtgctgcgcaaccccgatgagaccgagcttgcgcgcgccatcggcatgatcggcgggccgaagggcgaccgcatctacgacgttgccgtcgtcggctgcggacccgcggggctcgccaccgcggtgtatgccgcgtccgaagggctgtcggtcgccgtgctcgacacccgcgccttcggcggtcaggccggcgccagcgcgcgcatcgagaactatctgggttttccgaccggcatttccggtcaggcgctgaccgcgcgcgccttcacccaggcgcagaagttcggcgccgacatcatgattcccgtcacggtgaagtcgctcgactgcacgcgcaaggacggcgcgttttcggtcgcgctcgaaggcagcgaccccttgcgctcgcgttcggtcgtcgttgcgagcggcgcgcgctatcgccggcctgatatcgcgaacctcgacaagttcgaggaacgcggcgtctggtactgggcctcgccagtcgaggcgcggctctgcgcaggcgaagaggtcgctctggtcggcgccggcaattcggccggccaggccgccgtgttcctgtcgggtcatgccaaacgcgtgctgatgatcatccgcggcggcggcctgggtgccagcatgtcgcgctatctcatcgagcgcatcgaagcgaccccgaacattgaattgatgttcaacaccgagatcaccgcgctggaaggcgacgaggcttcgctgctgcgtcggatccgctggaagagccggttgtcggatgacgaagactcagccgacatccgcaatctctttctgttcgtcggcgccgatcccgccaccaactggctcgacggctgcggcgtgacgctcgatcgcggcggcttcgtcgtgaccggcgcgcagtccgagcagaaccagggcaagctggtggcgccgctggaaacctccgtgcccggcgtctacgccgtcggcgacgtccgctccggctcggtcaagcgcgtcggtggggccatcggggagggcgcccaagtcgtggcctccctgcatggctatctcggcgacgccgcaaagccggcgctttag

SEQ ID NO: 2615 - DNA, 399 bp, BradyrhizobiumColbertium
gtgcatctgggccgttcatggttcgagacggcgctcacgcgcctcctcaccatgaggatctaccagcaaaaaacccaacgggaggaccaaatggctgaagtcgtcgtgctctacaaaacacccaaggatgctgccgccttcgacaagcactacgccgaaacgcacatcccgctcgcgaagaagcttccaggcctgaagaaatacgccgtcagcaagggaccggtttcatctcccgcaggtccctccggaattcatctcgtcgccgtcctaacgttcgacagcgtggccgatatccaggcggcattcggcagcccggaaggcaaggcgaccggcgccgacgtgccgaaattcgccagcggcggcgccgacatcttgatcttcgacaccaaggaagtgtga

SEQ ID NO: 2616 - DNA, 510 bp, BradyrhizobiumColbertium
atggtccttgggttgagcctgcctgctcttacgctgatccatgtcgtcatcagcctgatcgccatcgttgccggcctggtcgtgatgttcggcctgctcggctcgaagcccatgccgggcctcactgcgatcttcctgctgttcaccatcctcaccagcgcgaccggtttcctgtttccattcaaggagctgctgccctcgcacatcatcggcatcatctcgctggtgctgctcgcggtcgcctgcgtcgctctctacggcatgaagctcaaaggcgtctggcgtccggtctatatcgtgaccgcgatgatctcgctctacttcaacgtcttcgtgctggtgatccaatcgttcctgaaggtgccggcgctcgccgcgctcgcaccggccgtagcgccggcgccgccctccggtcccgtgttcgccgtcgtgcagggcatcgtgctggtgttcttcgtcgtgctcacaataggtgcgtggcgccgcttcaggccgatggcgtttgcctga

SEQ ID NO: 2617 - DNA, 858 bp, BradyrhizobiumColbertium
atgcaactgatcttcatcgaaagagagacatccatgcccaccatcaccaccaaagacggcgtcgagatcttctacaaggactggggatcgggccagccgatcgtgttcagccatggctggccgctgtcgtcggacgattgggacgcgcagatgatgtacttcgttacgcgcggctatcgcgtcatcgcccatgaccgccggggccacggccgctcggcgcaggtcgccgacggtcacgacatggatcattatgccgacgatctcgctgcgctcactgcacatctcgatctcaacaatgccatccatgtcgggcattccaccggcggcggcgaagtcgtgcactacatcgcccgccacggcgagagccgggtggcgaaggccgcgatcctctcggcggtgccgccgctgatggtgcagaccgctgccaatccgggcggtttgccgaagagcgtgttcgacgatttccaggcccagctcgcggccggccgctcggccttctatcgcgacatcgccgccggcccgttctacggctacaatcgccccggcgtaaaaccactcgaagcggtgatccagaattggtggcgccagggcatgatgggcagcgccaaggcgcattacgacggcatcgtggcgttctcgcagactgatttcaccgaggacctcaagaagatcaacgtgcccgtgctggtgatgcacggcgatgacgaccagatcgtgccttacgccgattccgccccgctgtcggccaagctgctgaagaagggtatcctgaaaacctacaagggcttcccgcacggcatgccgactacgcacgccgaaaccatcaacgccgatctcctggcgttcttcaaggagtga

SEQ ID NO: 2618 - DNA, 939 bp, BradyrhizobiumColbertium
atgatcgactggaccacggcaggcatccccacgctcggcggcatgaccgccgtcgtgaccggagcgacgggcgggctcggttacgagacggcgatggcgctcgctggcgccggtgccatcgtcatactcaccggacgcaacgacgcaaagggcctgcaggcgatcgaaggcatttgcgagcggtttcccgacgcgctgatcgcctacgagcatctcgacctcgcaagccttgcctcgatcgccgattttgcccggcgctttgctgccgacaacgaacggctcgatctcctcgtcaacaatgccggcgtgatggccgtgccgaagcggcagcagacggaggatggattcgagatgcagctcggcatcaattatctcggtcattacgccctgacggcgcggctgttgccgcagcttcgccgcgccattgcgccccgcgtcgtcaatctctccagccttgcgcaccgcgccggtgcgatcaatttcgaggatctgcaaggcaaacactgctatcgtccgtggcgcgcctactgccagtccaagctggcgatgctgatgtttgcgctggagctccaacgtcgcagcgtcgccgccggctggggtctgatgagccttgctgctcatcccggctacgcgcggactgacctcattgcgaacgggccgggtgccaacacgttccaagggcgggtcggccggctgctgcagcctttgatcagccagtccgctgccgaaggcgcgctgcccacgctgttcgccgcgacctcccctgacgctgagccgggtggctactacggtccaagcgggttttgcgaattgaaggggatcccggggccggcaaggatcatgccgcaggcggaggatctcgcggtggcggccatgctgtgggatgcctcggcgaccttgaccggtctatccttcgatgagatcgcggcggccgcgtga

SEQ ID NO: 2619 - DNA, 651 bp, BradyrhizobiumColbertium
atgatcttcggcgcgaccggcatggtcgggcagggcgttttgcgcgaatgtctcgtcgatccgggcatcgatcatgtgctcgtggtcggccgcagcccgaccggtgtgcggaacgccaagctcacggagatcatccacgatgacttcctgaattattccgcgatcgaaggcaggctcaccggctacgacgcctgctttttctgcctcggcgtctcctcgatcggcatgagcgaggagcgctaccgccaccttacctacgacctcacgctcgcggcggccacgatgctggcacggctcaatccgcggatgattttcacctatgtcaccggcgccggcaccgattccacggagcagggctcgcggatgtgggcgcggatcaagggcaagaccgagaacgaccttctcaaactgccgttcaaagccgcctacatgtttcgccccgcagcgatccagcccctgcacggcgcccggtccaagaccgcctgggtgcaggccgtctatgccgtgagcggaccgctctggtcggtgctgcgccggatatcgccgcggcttgtgacctcgaccgagcagatcggccgagccatgatccgcgtggccagagaggggtatccgcgcaaggtgctggaggtggaggatatcaatagcctctag

SEQ ID NO: 2620 - DNA, 444 bp, BradyrhizobiumColbertium
atgtcgccccagctcaaactgatcgcgctcgatgccgacgatctcgccgtgatctcgacccatgtccaggatgcccgcgtccagacgtccgacatcatctggcggcagagcgagaagcggctcgtggtcggaatgagccggctggactgggagcagacattggagggcgaggccgagccgcgaaggctggtcgccgcgctccgtttcgaccgtgtgctcgcctgcaagtcgcgcaacatcgatctcgccgcgccggacaaggtgctggacctcgtcgggatcgaatttcacccccaggacgggcgtcacgaggagcccagcggcagcgccctgcttttgttcgccgagggcggcgccatccgcctcgacgtcgaatgcctggaatgcgagctgaccgacctcggagcggacgcgctggggacgggaccgggcatcgaggaatga

SEQ ID NO: 2621 - DNA, 1296 bp, BradyrhizobiumColbertium
atgcccgttcgcctcgaccgcagcagcgacgattttgaccagcgattcgccgccttcctcggcgccaagcgcgaggcttcggccgatgtcgaggctgccgcgcgggtgatcgtcgacgacgtcgccaagcgtggcgatgcggccctgctcgaagccacggcaaagttcgaccgcttgaagctggatgccgggggcttgcgcgtttccgcagcccagatcgaggacgccgtgaaggcctgcgaggcggcgacgctggatgcgctcaagcttgcgcgggatcgcatagagacctatcaccgccgtcagcttccgaaggacgagcgcttcaccgacccgctcggcgtcgagctcggctggcgctacaccgcaatcgaatccgccggcctctatgtgccgggcggcaccgcggcctatccatcctccgtgctgatgaatgcggtgcccgcaaaagtggccggcgtgtcgcgtctggtgatggtggtgccttcgcccgacggcaagctcaatcccctggtgctggcggccgcgcatctcgggggcgtcaccgagatctaccgcgtcggcggcgcgcaggcgatcgccgcgctcgcgcacggcacagcgaccatcgcgccggtcgcaaagatcgtcggccccggcaacgcctatgtcgccgccgccaagcggctggtgttcggcaaggtcggcatcgacatgatcgccggcccctcggaggtgctcgtgatcgccgacgacaccggcaatgccgactggatcgccgccgacctgctggcgcaggccgagcacgatgccagtgcacaatcgatcctgatcacggactccgcgcgccttgccgccgatgtcgagaaggcggtcgaagcgcaattgaagacgttgccgcgcgccgcgatcgcgggcgcctcctgggcagagttcggcgcggtcatcttggtgaagaacctcggcgaggcgatcccgctcgcggacgccatcgcggccgagcatctcgagatcatgactgacgatcccgatgcgctcgccgcgaagatacgcaatgcgggtgccgtcttccttggtccccatacgcccgaggcgatcggcgattatgtcggcggctccaatcacgtgctgccgacggcccgctcggcgcgattttcctcagggctctcggtgcacgatttcataaagcgcacctcgatcctgaaatgcggcccagatcaattgcgtgcgctgggcccggccgcgatgacgctcggcaaggcggaggggctggacgcccattcgcgttcgattggattgcgcctcaatctgtcatga

SEQ ID NO: 2622 - DNA, 498 bp, BradyrhizobiumColbertium
atgacaaagccgcccgtacaggacgactcgaccaaccgcatcgtcggcgtcacgctcgacgaggaatcgatcggccgttccgggcctgacatcgagcatgagcgcgcgatcgcgatctacgatctgatcgagcagaacctgttcgcgcccgagggcgcggagggaaagggcccgttcacgctgcatatcggcatcaccggcaaccggctgatgttcgacatccgccgcgaggacggcacgcccgtggtcgcgcatctcttgtcgctgacgccgttccggcggatcgtgaaggattatttcatgatctgcgacagctattatcaggcgatccgcaccgcgaccccggacaagatcgaggccatcgacatgggccgccgcggcatccatgacgagggatcgcgcacgctccaggaacggctgaagggcaaggtgcgggtcgatttcgagacctcgcgccggctgttcacgctcatcaccgtccttcattggaaaggctga

SEQ ID NO: 2623 - DNA, 468 bp, BradyrhizobiumColbertium
atggctgcgccctcacgcgcaagcaatccgcaatcggtgctgttcgcctgtgcgatgaacagcgtgcgctcgccgatggccgcaagcctgttgctgcacatgtttccccagggcctctacgtgaagtcggccggcaccaggaaaggcgagctcgacccgttcgccgtggccgtgatggccgagctcggccaggatatctcggctcacaagccccagaccttcgaggagctggaggattgggaggggctgaatttcgacctcatcatcacgctctcgcccgaggcgcatcacaaggcgctggagctgacgcggacgctcgcggccgacgtcgagtactggccgacgcaggatcccaccacgatcgaaggcagccgtgagcagaagctcgcggcctatcgcgaggtctgcgaccaactcctgatgcgcatccggagacggttcgccaagacaggcgcggcgagcggctag

SEQ ID NO: 2624 - DNA, 630 bp, BradyrhizobiumColbertium
atgcttggccgccccaaattcgtacttgcctccggttcgccgcggcgcctgtcgctgctcaaccaggccggcatcgagccggacgcgctcaggccggccgacgtcgacgagacgccgaggcggggcgagctgccgcgcgcctgcgccaaccggctcgcgcgggccaaggctgacgccgcgctgaaatcggtgcagctcgacgacgagctgcgcggcgccttcatcctcgccgccgacaccgtggtcgcggtcggccgccgcatcctgcccaaggccaacctcgtggacgaggccgcgcaatgcctgcggctgctgtcgggccgcaaccaccgtgtctacaccgcgatctgcctcgtcacgccgcgcgaggccttccgccagcgcctggtcgagacccgcgtccgcttcaagcgcctatccgaggacgacatccaggcctatatcggctcgggcgaatggcgcggcaaagccggcggctacgccgtgcagggcattgccggctccttcgtggtcaagatggtggggtcctacaccaacgtcgtcggcctgccgctctacgagaccacggcgctcctcggcggcgagggctttccgatccgcttcggctggctcaataccaccgccgtgtaa

SEQ ID NO: 2625 - DNA, 183 bp, BradyrhizobiumColbertium
atgaatgaccaagccgaaaagcccgccaccccgcggaaggcctgcccgatctgcggcaagccgcagtcggagaagacccgcccgttctgctcctcccgctgccgcgacgtcgacctgaaccgctggctgaagggctcctatgtcatccccggccgcgatgacgacgtcgatgaggaagaatag

SEQ ID NO: 2626 - DNA, 73 bp, BradyrhizobiumColbertium
gcccaggtagctcagttggtagagcatgcgactgaaaatcgcagtgtcggtggttcgattccgcccctgggca

SEQ ID NO: 2627 - DNA, 1290 bp, BradyrhizobiumColbertium
gtggatgaattgagcgacacaaaaatccgcaacgcgacgaaggcagacaaggaatatgcgatagccgacggccagggcctcagcatcgtggttcggcccaatggcaccaagctctggctgtaccgctaccgtttcggcgggaagcgcaagaatatgtcgttcgggacctttcccggtgtcggactcaaggccgcgcgcgacaagcgccatgacgccgaaaagctgctcgatcaaggccgagatccggtcgcagtgcgtgaggccaagcgacaggaagacgaaaagctcaagcacacttttcgggtagtcggggaagaatgggcgaccacgaagctcgaaaaagaaaacaaggccaaggcgacgatcaaacgggaacgttggaatctcgctcagctcaatcgtgagatcggcgaccgaccgctttgcgaaatcgctccgccggaattgctgacagcattccggcgcgtcgaggcccgtggccgatactacaccgtcgggcgcctacgctcgaccgcttcgcgggtgttccaatttggcgtcggcgcctcgtattgcagcagcgaccccactcgcgacttgaagcacgcgctcaccaaagctcctaagggcaatccgcgtcccgcgctgaccgatcccgacgacgtcggcgacctgatgcgccgggttgaagtctacgacgccaagaacggcggactggtgcgctacgcgctcaagctgatcgccttgacgatggtgcggcccggcgagttgcggctagctgagtggaccgagttcgacgagaagaaccgcatatggctgatccccgccgaaaaaatgaagatgcgcgatgatcacgaagtaccgctctcccgccaagcgctagccatccttgccgagttgcgacctttgaccggccgcggccgctacttgttctcccatgacaatgatgtgcctatgtccgacaacacgatcaacaaggccctgcggatcatgggctacgacaccggccccggtggtgaccactgtgcgcatggcttccgctccagcgcctcgaccttgctcaacgaagaaggtgcattcgacggcgatgtggtggaagctcagctcgctcatgaaacggacgaaaaaaagcggcggcgccgcgacgaggtggtgcggcgccagcttgccaagggcgacaagaacaagattcgcggcatctacaatcgggcagcctattggaatgaacgcgtgcgcctgatgcagcattgggccaatcgtctcgaccacctgcgcaagggaattgccgtgccgctgcgcagatcggcctaa

SEQ ID NO: 2628 - DNA, 1395 bp, BradyrhizobiumColbertium
gtgacgcgcgaagcggatcgcagtcagcgccaacagaagagtgctagagttggcgctgcgatcattcgcggttcgaatccgccactacgtcgcgcctgggatgccaacgcacccattcgcaatttgttttcaatcttgaaggaaagtccgatgacgcgtcgggatcaacgtgagggtcagacctcaagcgtatttccgatgaacatcgtggggtgggcgaggagctttgcgccgggaactgcttctttagcggctggtgctttggcgcttcttgccgttggccttttcggctggcgcgctggactcgggcccaggcaaatccttgagttcggtggcgctgtcctcgtcctcggctttgccggggctgtgctggcgacgctcgtaggaacgcgtcggcacacaactcttcaatccaatgctctgtcctggattgtggtggtctttatcgccatcgttctcacgctgctgcttcttgcagcgtttacgcctcttttgcctcaaggatcaatttttctagcccgaacactagggtgggcggaattgcttccggtatccgatcatttgcgccctgtcgcaaacgacgtccatctcgaaagtctcggagacctcgtcgctccgatatcgaatagcaaggatgccatatctcgagtgaaggcgttcaacgatcgaggcacattgagaatcgctgacggtggcagattgatcgcgagtaataatgatccgcgaaccatcgcggttcacacccttgagttagataatggggagatcgtaacgaacggcgcgagcctcactattgaagttgtagacctaaagtcgaacggtggccgcttggtctcttttgatccgaacaacagcgcttctaatggagcgaacgcgctgaaggtcggtaagacgactctcatcgtgcatggatccatctcgggccagctcaaagtcgatcttgctgggcagggagggtcaaatggggacaacggccagccgggagcggcaggtgctgacggaggtgccggcgctaacgcatcatctggtgtcggttgcgaacgaggcgcggagcgaggaagggatggtcagccaggtcatccaggtgctgcgggatcccccggtggcaggggcggtgatggtggttcgctgattgtcaatgctcgggatcctgctgcggcgagatcagcgatcgacttctcagctcctggagggctgggtggccaaggtggcaatggtggacctggtggaccgggcggccggggaggcagcggcggtggtccgcgtggtttttgctcgggtggcgcgcccaatggagttagtggccctcaagggccaacgggacctaacggagcaaatggccagactgggcgagacgggaatctggttgtcgagcctattccaacaaacttttag

SEQ ID NO: 2629 - DNA, 555 bp, BradyrhizobiumColbertium
atggacgatgaggcgacgcatcttacccccggcgaggttcgccgcatcatcagccggctgcgcgggccggatctcgtgcggcttgcggtgcttgcccgggtctgggcgaccggtctgcgtcagcatgatgcggacgacttgctcaacgcggccctcgaccgtgtcctgtccggacggcggccctggccgatcgatgtaccgctgcctgccttcctatcgcaggtgatgcgcagcatcgcaagccaatggcggcaggagaatcgtcgcgaaccgctcaaggaggatgagaccggggaggtatttgaggaagagattcaaagtccggccgcctgctacgagatgagcgacttgatttcgcggatgcggcaggcactcgcgaccgacccgccggcgcttggcatcttcgaacacatgctcgcggatagcgaccgcgaggatgcgcaggccgccctaggcatgaacgccacacaatatgatacggcgcgccggcgaatggtgcgccagctatttgaagcatttcacgcaggatggaatcatgagcccaagcgtcactga

SEQ ID NO: 2630 - DNA, 3219 bp, BradyrhizobiumColbertium
atgagcccaagcgtcactgacgatcgcacccttgcccttcttgcggagggcgtcctcgacgccagccccgaggatatcgtgcgcgtcgccgtcgccaatggcgttgacgtggccgcgctcgagacgaaagttcgcgccatgatcgcggcgcgcatggctgcggccgagctatcggaacgggtcagtttctcggtcggcgagaccgtggccctgcgctccgaccccaagcgggtcggcgtggtgacctcgatcacgccgagcaaccgcgagactcgttacggcgtgttcattgacgggcgcgtggagacactctacgcgagtcaattgctgcccgcagacatcgcgccggcggcaatcggtgcgaccgtcaacgagttgaatgcgcgattgacggcactgcagctcgccgcgcccagcctcgccaacctctattcgctccaagccggccgcatcgatttcatctcctaccagtttcgcccggtgctgaagttcatccgtgccgatcggcctcgccttctggtcgccgatgaagtcggcgtcggtaagaccatcgaagctggactgctgctgcgcgagttgcaggcgcgccgtccgttgagatcggtgttgatcgtctgctccaaggcgctggtcgtcgaagagaaatggcatcgcgagatgcgccgcttcgacgaggagttcgtagctctgtccagtacggatttacgtcactgcctggaccagacggacttggatggggaatggcctgagcgctacgcccgcgcaatcctgcctttttccctcgtcaacgagaacttggtgcacggctttccgacccggcgcggccgggcgcggtcgaaagggcttgtgacgctcgacacgccgccacgatttgatctactgatcgttgacgaggcgcacaatgcgcgcaacaccgacaccaacctctatcacggcctgagacttctcgccgataatgccgaggccgtcgtgttgctgaccgccacgcccgttcagctcggcaccggcgatcttttctcgttgcttaacctgcttcgacctgacctggtcatcgaccgtccgacgttcgaacgtatggccgcgccgaatagcgagatcaatgccgcggtcgcggcgatccgcgctggccgggcccgctggcagcaggaggcgctcgatcatctaagccgcgccgcggcgaccgattggggccgggtcatgctcggaccctctccggaatatcgcgccgtgacggccgcaatccgtgaaacgcgcgacgacgacggccgcgttcgcctcatccatcgctccgaggcgctgcacagcttcgcctcgatgatcagtcgtacccggcgccgcgacattggcgcgttcacgacgcgcaagccgcggaccgaagccgtaccattcactctcgagcaacaagctgtccatgacgcgatccttgaggttcagcgcgccgtctatcagcggacgcatggctcagggccgctcggattcctcatgacgacgattcggcggcaggctgcgagctcgttgcaagggcttgtgccgttcctggagacgatcctcacccgccgcttgtcggagatcgaacgcgtcgagatcgacgacgaagccatggacgcactggacgccggtgttgacgcgatcaagaacgatatcgctgcggtcctggcgcaggcgcgccttttgcctgagggcgatccaaaactggatcgactgctcagcatcgtcgcagaaaagggcaggatggcaaaccggcggttgctggtgttcagcgcgttccgccacacgctcaactacctagagaccgctttgcgccgtcaaggcatacgtgtgggtctcattcacggcgatattgttgacgacgaccgccgggcgcttcggcgcgcgtttgcgctggcgccgaccgacctcgatgccgtcgacgttctgctatcctcagaggtcggttcggaaggattggacttccagttttgcgacgccctggtgaactatgacattccttggaatccgatgcggatcgagcagcgcattggccgtatcgatcgctatggacaggccagtgagactgtcgcgatctacaatttggtgacgcccggcaccgtcgacttcgacatctatgagcgttgcctcttgcggatcggaatcttcgagcgcgccatcggcggcagtgaggcgattttgggagagatcgcgacgcgactgcagcaggtggctgaggacttctcgttaaccgacggtgagcggagcgctcgactccagcagcttgctgataatgaaatacggcaaatcgctgagaccgaagcgctggaagaacgcgaggccgagttgttcggcgtgcggatatcgcggcgaatcgacgatgagatcgcaagggcttcgagccactggctggagccggcggcattggaacggctcgtcagtctccatcttgagcgcacattggaggtcggccgcactccaatttcgggtcagggcccaatcaaaaccctacgactgtcggcggaagcccgccgccgacttgtgccgtcgcgagcgcggggtgtgcgcccaagcctcgccgaacgagattgggaagcgtggctgcgcggcgatcaacagatgcttggtctcacctttgaccaagaggccgccaatgccgatcggaaactagcgttcattacgcccgtgcatccgctgactcaggccgcagcgcgtgccctggttggtgacgaggaggttcatgtgtcactcgccgcgccagcatccggcttggccctcggcgctcatcccttcgcgatctaccagtggcaactcgtcgggctgaaggaggacgcaatccttgtgcccgtcgtcgccgacatcgacgttgcacacgccattatggaactgcttctcgcggcgcgagacaccacgtctgccgtgccgcccaccgcgtcgatgctcgaggcgctcgacagctggcatcacgagctttggttggcacgacgcgcggcgcacattgccgagacagctgagatcgcccggtttcgtcgcaatagccttgatgtgagccatagggcacgcatggcggttcttgaggagcagctctcgcttgcgagcgaagagcgaattcggcgtatgcgtaccgcccaaatcgcgcgcgctgccgccgaccaccaggaggcactagcaaacctggcgcgagacgaagagcgggcagacatccttgcccggcgggttgccgccggcgtgatcgagttggaggccgactga

SEQ ID NO: 2631 - DNA, 3075 bp, BradyrhizobiumColbertium
atgctgagcttcgagtcatggttcgacgagctgcggcaggtaaacgctgatctcctggcagctgcaaaaaaggctaaggccgacaagtttcttcgtcggtcggccgtggagaaatatgccgaaccgacgcatttcatctttgagctgttgcagaacgccgacgaccaagaagcaaagaaggtccaattcaaactgttgccacatcgcgccgagttcttgcattggggcaggccgttcaagcgcgatgatgtcgagcggatcacgcgccttggtgacagcgacaaatccaacgaagtccacaagatcggaagctttgggattggcttcaaatcggtattcgccgtgacggagcggcccgaagtgtattgtcaactcaatggccgaccattcgccttcgctattgaggagctcattgtgccagttgcactagccccagccgcgcgtcagggagaagagacgcttttcctcctcccttacagcaagaaacaaagcgttgatcgatcgtccgaggcggcggcacaactgaagaagactggtcccgaagtcctgatgttcctcaaccatatcgaggagctggtttgggaagacgatgcaggcaatggagaacggtaccgctgcgtacgcggcgcggatgggattacagtcttcgagcgaaccgcgctcggcgccggaaagaaacagcccgatgcgacgggctatcgtgtatttcggcgaccggtgacgctgccggacgggaaaccatcagaagtttgcatagcgtttcaattaaacgcgcgcggcaaagccgttggcgaaagtggtcccgcgaagctctgggtttatttcgaaacagaagagcagatcgggtttcggttccgtgtgcatggaccattcaagctcacagacaatcgagccaacatcatgcgcagcgagccgttcaaccagcaattaattggcgaactatccagtcttgcggccagtgctctgactgagcttcgggacgaaaagcggcttgtgcgggaaacgttgaatgcgttgccaattccggccgatgagatcgcggaaagttggaccgagcttggcgattccatttggcgaatgctgcgcgaagaaaagatgctgccgacggcagccgaggcctatgctgatccgccttctctgtggcagggcacccaggacctgcgggcagttttggaggacgaagatcttacggtgattgctagccgggaaaaatcttggaccgtctcggcagggcagcgcaacggccggatcgatcgccttctttctcatgtcggagttgaagaactcacgctcgacggtctactcaaacagctggaaagcgtagcacagcgcgttgaccggctagagtcatggctcgctgcccacgacattgcttggctacaacgcctatatttgctcttgaatggtatcaagggttatcaagtctcgcggctcgcttacgtaccgatagtgcgcaccgccgatcggaactacgtatgcgccagcgaggtgcggtttgcgccggtggatgagagcgccgaccgcgagattgaggtgcgtggagtgaagcttgttgctcctggtctcttagccggtaggaagcaggttcgcgacgaggttacggcatttctgcgacgcattggggtcaaggacgtcgacgaggaggattacattcgcgcgcttgtggctgagcactaccagccgggcggctgtgttgcggacatgaaggcgcacctgcgccacatagaacgctttgctgtctggctcaccgctcatccgttcaaagtggtcttatttcaagacgcgagcctcttcctagcagaaggatcagacaaactgcacaagggagaggcgctctatttggacaaaccgttccatgagacgggcctctcagccgtttttggccctcagggtccattagcgaacacgaaaaagccactcgctaaacgttatcgaggcacgaagggtgtgctcgatttcgcgcgcgctcttggggtcaagcaacacttgcgcccagcaagcgtgtcgacgagcaatcacccagagagaggcgccctttgggccgactactaccgctatggtgcacgatggggtaattcgacgaatgttgattggggcattccggacctggaacgtttgcttgccacgcccgacgcagcagtgtcgctatgcttgtggcgaagccttcaggctttcgatcgctccgttttcttcgcgaagttccgacatgcggagagttatcccgtgcgcgaaaaacccgcatctttcgtttatcacctcagatccttcgcatggataccttccaccaaagggggcttccgaaagcctgcggatattaccgaggaggaactgccgggcgagttcgataccgacgaccgcaccggctggcttgaaatgcttgggcttggtaacaacgcgaagcgcaaggcagctgagtaccaacagcaacgcgaggccgtgctgcgtgccggcatcccggatgaattcgccgaacgcttccaggatctatcagaggaagagaaacggtcggtcctcgaagcgggcttccaggagttggcgacgagcacatcctcgcagccgacatttcccgaacgcgaggcttccaatcctgagcggcgcgcgtcgcgcatggccgaacgcgcacgcgatgcgccaccgaagacgtatgaggcccgtgaacgcagcgtccgcacaagtgatagggatgcccgcaagctagcggagccctatcttgtcgatctctatacaaacgccgatgacgagatggtctgccaagcctgccatctggcgatgccgttcaaccttccggatggttcgccctatttcgaggctccggaagtattgtccgaggctccggtcgagctggtagaaaaccaccttgcactctgcccaacgtgctgcgccaagtggcatcatgcgcgggccacttccgatgccaacatcattgccgcattaaaatctgcgcacgcgccacagatctcggtgacgcttgcgggtgaaccaacggttatccgctttgttcaggttcatctcgaagaccttcgtaccatcatttccgtcacagtcgacggcgcaattcctgtcaattccaaatga

SEQ ID NO: 2632 - DNA, 1611 bp, BradyrhizobiumColbertium
atgagcgatatcgttatcgggtcgagaattcttgacgtccttaccaccgggatgtacccggacgccctcgatgccatccgcgaatacattcagaactctttcgatgcgatcagacgggcggagcgcgcccacatccttgagcccaacttcggtgagatcgtcatcacaatcgatcccgaaaaacgagaggtcgcgatccgcgacaatggcatcggactccccatatccgaggcgcgtagctctctcctttccatcggcgcgtccaagaagaaaatcggagatgacgccggttttcgtggcatcggacgcttggctgggcttgcctactgcgaaaggctaagctttacgacggcgtccaaagacgaagcagtgcaaaccgagcttaccttcgatgccgccgcaatacgccagagcatttcgccaacggccaccgaggcgattgaaacagccactgaattacttacccggttgacaaaacatcgtcaggtcgaccgcaaaccgggccagccattttttgaggtgaggctcgtcggggtcgatcccaaggcttgccagtttttgaacgctgaagacgtgagaacatatctacgtcaggtggctccagtcgagtttcatatgcaatcgttcgtgtacgggaattcgaagatcaacgccttcctgaaagagcacggcgcacgcaagattgtaaacctcacgctaatgcacaatggccgcccagacaaaattaacaagccgtacaaaacgtatcacgaggcaggaaaccggacgaacaagcgtgtagaaataaccgacattgaaacctatgtggatccatcgccctccccgctttggattgcgtggctgtcgaaagctcacgatctcgtcgggactatcaactccgaggaggtgcgcgggatccgcttccgcgcgaacaatattcaagtcggcgatcaccgaacgttcgcccggatcttcgataaaatcggtaagacaacttcgcggtttaatggatggttctctggggaagtgcatattctcgatccccgcatcatcccgaactcgcggagggacttctttgaggataacgaggcctggcgccaggcagagcacactctaatcgaatgggcgaaagatctccagaaacgcgctcatcaaaagtccagcgaccgaaatcgttcagtggagttgatcgaacaggatgcggacgaatttattgatgacatagaacggacgaccctcgagggctttgcttctgactcgcaacgagtgcacacgcttcatgatatcgatgaacgcgaaaagcagatcgaaaaggcgatatcggcaggcaggcccgaaaccgagaatgagacgcttcgccgaaagaaggaggaagtttcaaacctgcgggcaaaagcagctcgaccaaaatccttgatcgacgaaagcgaactcaatcgccatgagcgcaggattttgcggttagtaatgaatgccgttcacagcgtttgcgggcccgaattagcgaagaagacggctgaagaagtgaataagaggctcaaagacaaaatccaaagacggccagtcgcatcgcagcagaaacagaatgacgataatgctgaagaagcaacgggtcagccaggctcgccttag

SEQ ID NO: 2633 - DNA, 1656 bp, BradyrhizobiumColbertium
atggcaggtactattgggcgagtcgtcgccaccgaaaaaagtccctctacgaccaacaaggttgagttctggatcgagaaagacgtcgtcatcaaaccgttcgatgttgtcatgatacgacacatcaaagatagcacgacatatgcgatcataaccgaacttaagtacctgacggactcgggcgggtacctttcagattgggtgtcatcggacttcggcgacgtacaatccacgccgcgcaacgagcgcatcgggacaacaatcgccgaggctgaaatactgtcaaacgataaagatttcgaaatgccgatccgcaacggcgctcccgtcgaatgggcagacgccgaaggcgtgcggcgctcgttgggcctatctagcctccggcagccgatacccgccggctggtttacgatgtctaatggcgaggagatcatcgtcgatttcgaagcgaattatgtgatcggcccggaaggcgcccacctgaatattgcgggtatttcgggtctcgctaccaagacaagctatgcaatgtttctttgtagtgccttgcagcaacgccgatctgaagacgtgtcacttgtgatcttcaacgtgaagggcttcgatcttctatcaattgacgaggaggccaagcccgcggacctctcggaaaccgacaagcgaaattgggaaaagtgccggctcaccgcgacgccctttagcaacgttacctacttttatccctactcggatgtgcaatctcaggcatataaccagtcgaagcttcctcgggaggtccatcggcggcagatcgaaagcaacaagtgctttcattacatctatccgatcgaatacgggcgaaaacggctatcgctcctcctgaccgatgtcgaggacgatacccatacgatggagtcctgttcggatgatatcgccgaaggacaaacgttcggcaattgggaggcgctccggcaagatctgagaaacagaacgcagacaggcggaggcggcggacggcaggcttcgatcacagttcagtcttggcggaagttcttccgtttgatcaagacacggaccaagaatgacattttcagcgaggaagctgccagtcgacagaccgaacgtcgccagcgccccacatcggatatcctcaagtttatcgggccaggcaaggtggtcgtagtcgatatcgaaccgttgcccgactacctgcaaactttagttgtaggcgacgttgtcgagcaaattatcaatgcgaagctcggagggggcgacgaccagcaggatgaacagcctgacctcggccgagtcgtaattttcgcagacgagctcaacaaatacgcaccgaacaagggtggtgggtccttaactgaaaagctactcgaaataaccgagcgcggtcgctcgctcggcattgttctcttcggcgctgaacagttccgatccggcgttcatgaccgcgttatcggcaattgcgcgacgaacgttttcggcagaacatctgctgtggagattaggaaggcgtctgattacggtatgctcaatagcacacagaaagcatctctctcgcggcttccgcaggggacattgatggtgcagcatccggtcttcacgtcggcggttgtgaaagttaatttcccgaggccagcatacgcgcagcccaagggtgggaagtag

SEQ ID NO: 2634 - DNA, 1506 bp, BradyrhizobiumColbertium
atgtgccggccactattctcaaccgagcagctgggctctcatccacggtgcgacgctctgctgtcggtgaaacaaagctcttacatcgcgaaccaacgactaacctctgatcaacctgtcggaacccgcgccactataaactgcaatcctcctggcatcgcagccagcgcgattgcaactactttccccaacttttacagtactttagcagtgagggacgcccgtttctgccttttcaaactcgggtattgccgatatgaaggagctatccggccgaaagaagcctgttatcgaaaaaatcggcaacgaggatcgctgtctctgcctgtaattctgtccgccattgcggattcgccagctgcatttggaacacgcctacacatgccgcaaaagaccgtcagcgatgtaatgcaagacgtttttgaaggatcgagattcaaatgcttgccttacgaaaagcggaacctcgaccaggacccggattctgagtaccgcgagtacgactctcgcattcggggacgaatgtttgaaaatcccgagagcaatacgatcagcacggtcccgaccaccggcgtagacgagaaggttccgaccatcctgacctacttcatggacggatcgagacgagtctttcggttcagtgacgtgatcctgcctgacggccgatactatccggtgttagccggccaggttggagtggcagtgctcaagcgagcggatgatggttcggttggtccaatgcacaagcatctccggtacgagaacatgctcgtttttcccgacacgcttgagcaaaccgataggaatgcgctgaaggccgagctcgctaataggaaactggaattcatacttgctacttacgccaccggacagagtgggtctggtcaaaacgaagattacatcagcatcgggaccaagaagattctggattcgatgcacgatttcgaattgggcgcagtcaggcggatgatggacgacagggatcttcgcgacgacgcgatgctcgttgtcgatggaagcctgcaatttcgacgagaagtgctgcggcggaatgattttccgattactcagctggcgaacgtggtcggcatcagcaagtccttcacgccaagccagccggttatcggtgctcgaggcagcaagcatttgggaactttcttgcagaaccttgaatacggtcagcgcactccggtcttcaaggctgggcacgacgaattcgaagacgtccttggggtttggtatctgcgcatccgaccgcgacggatgatgacgaatccgctagccggaatcatcaaggtcgaagtgctcgccaatggtgatgaacaggagaacgggctcgaccgcgaccgcgttgatcatctttctgcactcattctctctgagcgcaacgtcacgccatatggcactgacagccgttgggcaaaccacatctatcccatctacctgacggagcttttcctgaagtctggcttcctgtcggatgtgtatttcaaagggctcttataa

SEQ ID NO: 2635 - DNA, 1260 bp, BradyrhizobiumColbertium
ttggaagagccaaaatttttgcgtctgtttcggcacttgatcaatctgcgcactgacaagttacccgacaatctgtgtctgccaccagtcgctttggacgtcgccgacgcggaaatggttgcgcgaaccatagggaaggttagcgctctgcgcagttgggctacaacttgggtattccagattgagcacgcgccgccgattctttggtccaacggcgacttttttgatgattttgtcgagaagcgactcaacgcggcgtttagaaatttaaaagagaaggcggatcctctgaactttctccacgcaggattcaacgattcggatcggcccttgcaatatccgatagcccaaggattggagtattatctttttacaaatgtctgttgtgatctcggcgagtacgcgctttctcgcttttcagagacagcgcatcggatattttatgaggtgcttggcataccgcgcgataggcacccgacatttggaatcgggacaccgcagaccgcattcaatcaggacgaggctgcaatcaaggagttcgctgttggtttgctcaatatgcccagcagctactaccttgtggcgagggaaggacgaatatcgattgttccaaccactgagcatggctggttcgatgcctcaaccgacgcaaatgcagttagtcgggttaacgagcgacggcttgcgactgtagcgacgagctctcttccaaatttcgatcagcggatggctgagctcgaaaccttgattaatagtccatctacaaaagaggcggatcttcaagaattcttccgcgtttatccgcaattcctgttcgcgttggacgagcgatattgcgaaatcaagccgcacgtttgcctcttcgaccaacgccgcaatcgattggtgccagatttcatggcacgaattgagagtgagcatatttgggacgtgattgagctaaagcgaccacaacacgcatttgtcggcgataccaaagatttggagagactatcggcctttgccgcgcgtggaattgcgcaattattggaatatcgtgacttctttgcgtcgcgaagcaatcgcgcccgtgtcagcaactcgttcggctcagcgccttacgagccagctctcgtcctggtgatagggcgcggccgcgcgcgggatccgcttcactggacggccgcaacgcctggtttcccatctgtcaaagtagtttcctacgactatcttttccagcgggctcaagagtgccgtgcctatctgtctggcgtgcaatag

SEQ ID NO: 2636 - DNA, 1095 bp, BradyrhizobiumColbertium
atgacggagacgaacggcggcgcaaaccaggatacggatgccaccaacggcgtcgtggaccggccccctcccgccaaccaaggccagcaagccaccgccaacccgcagggcggcgacgctggaccgccgccgccacccaaccgggacccgaacggcaacgccgcactcgaaaccccggcccaacgcgctgccaggcaattgcctgatctggtcaggcagggcgagcggaccgttgacaatctgaagcggctctttgcggtggtcttcgcgacgagtttcgcgattgctggtggcagcgttatcgcaaagctgaaggaggttctgcttcagcaaataagctctccacccgcttggctttgggccttgaatatcgagatgatcgtggtgttcctggtgacggccgcagtcttttaccatcagagcgtgaagtttctcgacatccgctacgccaggcttccgcttgcgcaagcgcacccttggggctttgcaatggactatatccaattggtcctgacggcggctcccttcttcctaatggcgaattcgcttggcctcgacctgactcataaggtcggttacctctggttcttcgtttcgtacgtttcgttgttggcgctggggctgattttgctaatcgtcagtcaaattcgccattcaggagccgtccgccacggaatctggggtgagcagattccggaacaggaagttcagcgcgaggctttgctacgcgcatattggatggtgatgaatggcgccatattgctcatcctgttgggtaccttctggtacgtgtcgcggggcgggacttgtcccgcgaatcctcgtgacggaacacttccatggatgctgtatttcttcggcgtcgtcgcgatggcgcgggattatctggatttccgatgggcatggccctttctctatccgattggagacgacaatccgaccagtcaattgttgcaaccgttgcgctggatgcaaagtcgtcgggttcacaggaattcgatttggctcggaatcgtgctgattggggccgacgtctacctgctcttccttctgaaattttgggactttgcgaaatggactgcagcgtgtggatga

SEQ ID NO: 2637 - DNA, 1614 bp, BradyrhizobiumColbertium
atgccgaacaagcgtatacttttgattgagcctggttataaaaacaaatacccgcccatcgggttgatgaagatcgcccaatatcatcgtggcaagagtgacaccgtggtcttcgtcaagggcgtcgatgaccgttcggtgcttcttcggcattgggaccgggtctatgtaacgacgctgttctcgttcgagtatgcaaagatctccgaggccatcgacttcgccgtcgaggtggtccacggccaaacacagcgtgttttcgtcggtggcatcgcggcctcgctcatgcatggtcggttcctgtcggagacccgctggcgaggcattcgcttcatcaaggggcttctcgataagccgcctgccatcgcgttggggctggacgagtatgacggagacttctacgccggcgatatgagtggtaccccgatcgaagacctcattccggattacgacatcctgaagcaggtgagttatgagtatcctgttcgcgatgcctacttcgcgtacgcatcgcgtggctgcatccgcaaatgccacttctgtggcgtgccgaagcttgagggggcgcagcgagatgcaacgccgttgaccgaattcgtcaaggcggttgacgcaatgtatggtcagcgtcgtgatctgctcttgatggacaacaacattgtcgcttcagcccgattcaaggagatcatcgcggagatccgggatctcggctttgcgccgggcgctaagctggccaagggcgaccgaagcgtccagcgccgcgtcgatttcaaccagggcgtagatgcgagaatactttgcaaagatcgaatgtacctgagggagttgtcgtctatttgcctcagtcctcttcggatcgcgttcgaccaccttggcctcaaggggccgtatgagaccgcaatcagatattcccatgagttcggcatgaacgacctgtcgaactacatgctctacaatttccacgactccccgctcgacctgttcgaaagaatgcatttgaacgtccggttgaacgaagagctgggtatccggatctattcttttccaatgcgctaccagccgaccgatcttcccgaccgttcgcacgtcggtgagaagtggaatcggtatatcctgcgttctgttcaaatcgtgctgcaagcaacccaaggagtggtctcgggcgagccggacttcttcaaagctgcattcggttctaccgcggacgagttcgaggcaatcctgttgcggccgcaccacatgattttcaatcggcgctggttcgaattctacgaaggaagggcggaatttgacgactatctctccacgattggcaagctgtccgcaacggaaagatccgagctgatcgagtttctgtgcggccggatgccggggcgctacaagcaggatctcagctcgctgagcggatcggtgctcaaggcggcgagattttacgttcccttggaacgcgagcgcgagctcgaaattcgacggctgcagcgtgaacgcagggatgcttcgcccgatatccgtctttcgcccggggaaatcgtcgaagacgccggccttgaggagcaggaattcacggcgccgccgatcacggtgcggcggcgctccaaggagattgtcgcatga

SEQ ID NO: 2638 - DNA, 1488 bp, BradyrhizobiumColbertium
atgaagctgaacgccaaaccggacgctccggtccggcccgtgtcccccgacgacgtcagagtaggaaaggacgtcatcgagatcttgaccagcggcatgtacgtatctccgctatcggtctaccgcgaatacgtacaaaattccgcagactcaatcgaccaggtcgaaggaggggcaggcgtcccctcgggacgtgtcgcgttggatatagatcacgccgcgcgcagcgtggtcatccgcgacgacggcggcggaataccggccgacaaggtgggggacgtgctgttggccgtaggcggatcgcgcaagcgaggcacagcagcaagaggcttccgtggcgtcggtcgactgtcggggctcgcctactgccggcagatcgagttcgtcaccaaggccaagggcgccgaccggatttcgcgcgtcgtctgggattgccggaagctgagggaattagtctcgggcaacaacggctcggacgacctgcggaccgtcatggccggcgcggtgtccatctcgaccgagagcgtcgctcgcgacgagccgtcgttcttcgaggttcgcatgagcgacgtggcccgcctccggagcgacctgctgctgaacgaacgtctgatcgccgattatctcgctcaggtggctccggtcccgttctcgccggagttctcgttcgcgtcccggatcgacgacgaattgcggaagcggttgaagttgtcgcgccttcagctcagcgtcaacgggcaggccgtcacccggccgcatcgtgacgaactgctggcggggtcggtcgacaagtcttcccgcatcaaggagatcgaattcttcgaactggccgacgtcgacggcgaagtcggtgccatcggatggctcgcccatcacgactacgtccgaagcctgtcggccaatctcggtgtgcgcggcctgcgcgctcgagtcggcgacctgcaggtcggcgaatccaatctgttcgaggaatcgtacaaggagacgcgattcaattcgtggacgatcggcgaaatccatatgctcgaccggcggatcgttcccaatgctcgacgggacaatttcgaagctaatcaccattacgcgaacgtgttggttcagatagggcccgtcgcggccaggatctcgcagcgctgccgccaggcatcgttgtcgaggacggcgctacaggtggtcgacaatctgatccagcagatcgaggaccgcctgaagcagaagcggccacgcatcgagcgggcggagctttcgagactgaaggctgcggccgtccgcgccactgcaaaggccagcaaaatcgaggacgaggacgaccaaaggaagtcgctggcgaggcttgccaagttgcaaaagaaactctccggtctgacgccccgtcggggaccggcgacggtcgccgtgtccgaggtcgcatcgctcatcgcgaaattcgtgacgagccgcgagcaacgggaaaagctggtggccgcactcggcaaactcgtcgactag

SEQ ID NO: 2639 - DNA, 1842 bp, BradyrhizobiumColbertium
atgaagctcgatccactggttcgcgactatcgggcctatctggacgaattggccggcgtcgtggactcggccgcgacccgcttctatctcgacacctcgttgctgttatggctcgtccggctcggggccacggcgcgccaggaattcctgacttggtgccaagcgcggtcggtgaaggtgccggtgtggtcggctcacgaattccatcatcatatcgtcgagaatacgctcggcaccaacgtgaagaagctgctcgccgagacccagaagaaggtcgacgagttcgtcagattggcggccgagcgggcggacgagggcatctgtcgcgacaagggatacgcaggacgcgaatccttcgtcagcgacgtcgagcaggccttcgtgaagttcagggagttcgcgaaagtcgtcggcgacgatgccggctacggcgcggccgcacaggaagtcatcgatttcataaacgcgcacgtgctcgcttcggatttggctccgatcgtcgaaacgcttggcgaagtcggagagttccgctacgagcatcggatacctccgggctttcgggacaacaaggacgaaaacaggttcggcgacgcggtcatttgggaagagatccagagagacgtaaaagcctcgaatccaacagtccccgttgacgtcgtcttcatatcgcgggacgacaagacggactgggtatcggccgcgcgcacggtggcggtcgacgacaagcgcaggaaggcaaaccgcgaccaagatctcgatgtgatccgtccgcatccgcttttggtccacgagttctctgcggtgtcgagcaacggtcgaatctacattctccagcccggctttctcgcatctgtcgtcgactacgcgtcgcgaacgacgggctcgcggaattccgttgcgacctggatcgccgccgcgcaccggcccgatcttctgtccgaactcgcgggtgccggattggcgcaacaggctgtgacccggccggagaatactgcacaagcggcctcgcccgacgtacagcaggcgccgccgactggcgccgccgaaccggagccgacgctcagggacatcatgggcagcgacgtctcgggcgatgtcgccgcgtacgcgcaagcgctgccccgcgaccaggaacggacgatccgggacgcgcaggacgagctggtgtctggcaacgggtctccgatcaagttcggtagactgctcgccgaattggcgctcgagggtcgtgccgaagtctccgaccggatccttgcgatcgtggaagggttgaagagcagagtgaatccgacgtcgttgaaccggttcgtcctcgcgatcgccgcgtccacatacttcgacaagtacgccgaactcctcaagaggccccggcaggaacttcgctcgatcgtcgttgcgttcgagagcgacgacgcctaccgatccaccttcgtcaatttgcggagttttctcgaagagaagggggccgagcttccgtacatgccaggttcgggtcgccagaagatgccgttcaaattcgagtttctcgatgggtcgtcttcgccacagatcatcaggcaagtgcgcgtgggtgaccagacggcattcatcgattccgtggcggaggcgagcgaccgaaatttgaccaagctgctcgggaagtccgcctcggaaggatgctccggcaaggaaatccggatgctgattgcggcgcaatatttcattcctcccgatcttctttccgatcagttggacaagaagaagtactcgtggctagcgggcacaggcctcgtcccgatcgatactaccagcgagggcggattaagcgcgacggacgacgacgaggacatcgatcgtgaatga

SEQ ID NO: 2640 - DNA, 1560 bp, BradyrhizobiumColbertium
atgaccatgcccatcccccacatcggcgccttcgtgctggagacgctgaccctaggcatgtatggcgagcctcgtcacacgttgcgtgaatatgtgcagaattcgttcgacgggatacgcgcagctcagcggacgcgcttcctgaccgaacgggggcaagtcactatatccatcggggaggacgagatcacgatccgggacaacggtatcggagttccgacaagccaggcctggaagacgttgacgtcgatcggcgcgtctaagaaggatcgacagcgggacgccggcttcagaggcatcggacgcctggcgggaatggcgtattgcgacgaactgatctttcggacgaccttcccaggcgaggccgagaccagcacgttgacgttcgactgcgacgcgttgttgaaggccatgaatccagacgaaggcggcgacgtagagctttcgggcctgttgtcccgctccatccggatgaccacgaccgccgacgaatctcagaaggatcagcacttctttgaagtaacactgaaggggttgtcgaaggcgccggagattctcaagaacgctgacgaagtgcgcgactatctcgctgagaccgtgccggtggatttccatcctgactgggaacggaggaaggccatagaagaccgctaccgcgacaatttcggggcctcgctggaaacgatcgacgttttcgttaaggtgaatgactctgccgagcagatcttcaaacactacggagagtcgtacgaacatgccaaaggggagatggagctcgagtccatagaatatttcagcggcagcggaaaccgcttctgggcatgggtaggcacgatgagcgagtcggcggccgtgaccgactggcgtacgcgcgggttgcgcgtgcgggtccgtaacatccaggtcgacggcacggaaatctccgagagtctgttcagtcgggtcaagccgtcgtacggaagatttagcacgtattatgtcggcgaaatctacattgatcccgagagcgtgataccgaacgcgcgtcgggacggcttcgaggagactaggaattggctcgacatccggtccgagttgataacctccgtctgccagccgctcgcagcgcgagcctatagcgcttcgcagctcggccagctcgacgtcgacaaggtcgtgggcgagatcaacgatctgatcgaaaggggcaatgcgatcgccgacagcacgaagtcgtcgtacgatcaggtcgtcggactgatgaattccgcgaaacgattgcgaaaacgcgccgcctccgcattgaagatcgtggacgacctcgatgcatccgccgtcggcgaaggacagcccgggcttcagaagtccgttgcgctccaggatgccgcgaagtccgtcgagaccgtcgaaacgcaggcgcggatgctagtcgggcggttcctcggtgaagacgacaagctgacggcgcttaaggcgaggctcagggaggagattcttcaagaagtactggacgtggtgaacgccttcgtcgatcccgcgacgtttcagaagatcaaacgacagctactcaagagcaaatag

SEQ ID NO: 2641 - DNA, 1110 bp, BradyrhizobiumColbertium
atgaacccgccggaccatgaacagaacactgccgagacgcgacagcgcagaatcattcatatcgacatggatgcgttctacgcttcggtcgagcagcgggacaatccggacttgcgcggcaaaccggtcgccgtgggcggatccagggagcgcggcgtcgtcgccgctgcgagctacgaggcgcgcaagttcggggttcggtcggcgatgccttcggtcaccgccaagcggcaatgtccggatttgattttcgtgaagccacgcttcgaggtctacaaggagttctcgcgacagatccggtcgattttcgccgagcacacggaaatcatcgagccgctgtcgctcgacgaggcctatctggacgtcaccgaaaacatccaacgcatcacgatcgcgaccgagatcgcgaccatgatcagagcggagatcctgagcgagacaggactgaccgcatcggcgggcatctcctacaacaagttcctggccaaactcgcgtccgatcaacgtaagccgaatggacagttcgtcatcacgccgaagatggggccaagcttcgtcgaggatctcgccgtcggcaaattccacggaataggtccggcgacgagtgcgaagatgaatggcctcggcatcttcattggcagggatatgcgtaagcagacacttgagttcatgaccgccaatttcgggaaagccggaacttactattactggatctcgcgcggcatcgacgagcgtcctgttcgcgccaaccgggtccgtaagtccgtcggcgccgagacgacattctcgcaggacctcgccgactacgaagccctggcggcggaattgcagccgctggtcgagaaggtctggcgtcactgcgaaactacaggcgcgcggggacggacagcgacgctcaaggtgaagttttctgacttcgaactgatcacccgcagcaagtcagtaggcctcatcgacactgtcagcgctctctctggcctggcgctcgaactgctgaagcaactgatgccgccaaagaaggcaatacgacttatcggaatttccgtttcaggatttgccgatgtcgaaccggaggatcaactgccactcctatttgatgatcaggagtga

SEQ ID NO: 2642 - DNA, 192 bp, BradyrhizobiumColbertium
atgattgagcaaaaaaagattgcaaagacgccacgcgagcacttcatgcaggctgccgccgatgaactggcaagatttgtacgcaaggagatcgcatttcaaaaagccgaccgcgacgagcgtgcgatgaagcttcgccttcccatttcattcggaaatcgggcaacaggctttaaccgagcgcgcgagtaa

SEQ ID NO: 2643 - DNA, 264 bp, BradyrhizobiumColbertium
atgctgatgaccagagagcgccgatctgcgatccggacgctgcgcggctgggcgatctcggtgctgcaggaagccggcgccattcgcgaatgcgaggagcacggctggatgcaggaccgcgccgatccacacgcccgcgagcgcgccttcgacatcgcccgccaggatccgcccgcgggcgtctcttcgcaggctgcagcaatcgcgatcgcggaggtgctcgactcgattggagatagctgtccggagtgcccggccgaatag

SEQ ID NO: 2644 - DNA, 2073 bp, BradyrhizobiumColbertium
gtgctcgcgtcgacggccacatcatatcttgagacgcttaatccggagcagcgccgagccgtcgagcatggcgtctccggcaacaatcacgtcggaactcccctgctggtcatcgcaggggcgggatctggcaagacgaacacgctcgcccaccgtgttgcgcatctgatcgtccgcggcgccgatcctcgccggatcctgttgatgacgttctcgcggcgggctgcgtcggagatggccaaacgagtcgagcggatcgcccgcaaggtcctcggtgctaacgccggcatcatgacggacgcgctgagttgggccggcaccttccacggtatcggtgcccggctgcttcgcgaatatgccgagcagatcggcctcaatcccgctttcactattcacgatcgcgaggactctgcggatctggtgaacctcgtcaggcacgagcgcgggctttctaagaccgaaagccgctttcccaccaagggtacttgcctttccatctactcgcgctgtgtcaacgccgagagcgaacttgaacatgtgctcggagcatcttacccgtggtgctccggctgggccaccgagctcaaggagctttttgcggcgtatgtcgaggccaagcaaaagaacaacgttctcgactacgacgatctccttctctactgggctcagatgatgtccgacgccgccatagccgacgacatcggcggccgcttcgatcacgtgctggtcgatgagtatcaggacacgaaccgcctgcaatcgtcggttctccttgctctgaagcctggaggacgcggcctcaccgtggtcggtgatgacgcgcaatcgatctattccttccgtgcagccactgtgcgcaacattctggacttccctgagcaattcagcccgaaggctgagatcatcacgctcgaccgcaactatcgttcgacccagccgatcctttccgcagcaaatggcgtcattgagcttgccagggagcgcttcaccaagaacctttggaccgaacgtacttcgtccgcgaagcctcgcctcgtcgccgtgcgggacgaagctgaccaggcgcgctacatcgtcgaacgcatcctcgaaacccgcgaggaaggcactcttctcaagcagcaggcggtgctcttacgcacctcctcgcacagcgggccgctggaggtcgagcttacgcgccggaacatcccgttcgtcaaattcggcggcctgaaatttcttgacgctgcgcacgtcaaggacatgctcgctctactgcggttcgtggagaacccgcgcgatcgtgtcgccggttttcgcgtactgcatctgttgcccggtgtcggtcctgcgtccgctcagcgcgtcctcgatcagatggccgaggctagcgacccactcggcgcactttgcacccttccctcaccgccgcgcgccggcgaagactgggccaccttcatcgatgcggtgggaaaccttcggtattcggaatggccctcggttttggagcgggcccgcctctggtatgatccacatctggatcgcatccatgaagacgccgaggtccggcgcgccgacctcattcaactcgaacagatagctggcggatatccttcgcgcgaacgcttcctgacggaactcaccctggatccgccggacgcgaccagcgaccaggccggcgtgccgctgctggacgaggactatctgatcctgtcgaccatccactcggccaagggacaggagtggaagtcggtttacgttctcaacgtggtcgacggctgcatgccgtccgacctcggagccggcacctccgccgagctggaggaagaacggcgcctcctttacgtcgtgatgacgcgagcaaaggacgacctccacctggtggtgccgcagcgcttcttcacacacggtcagcatgcccaaggtgatcggcacgtctacgcatcgagaacccgcttcattcccgaaaagctgctcggactgttcgagcgaacaaactggccgctcgcgcccacgggcgccgccgcacgcagcccagctcaaggtccacggatcgacatcggagctcgcatgcgagggatgtggcgctag

SEQ ID NO: 2645 - DNA, 663 bp, BradyrhizobiumColbertium
atgtgcaatctctattcgatcacgaccaaccaggcggccattgccggcttgttcaggcgcatgaaccagtacgtcggaaatttaccgccgatgaccggtgttttccctgactatccggcaccggtggtccgcaacgtcggtgatgcggaggagatggtgttgatgcgctggggcatgccgcccccgccgcggaccggtggcccacccgtgaccaacatccgaaacacatcctctccccactggcgcggttggctgaagccggagaatcgctgtctggtgccggcgaacagtttcgccgagtacgcgcctgagacgaatccggaaaccaagaagaaggacgtcgtctggttcgcgctcgacgaaagtcgaccgttgttctgcttcgccggcatctggaccgagttcaaaggggaccgcggcacaaagtcgaagccgattcccgggccgcacctggtctacggtttcttgacgaccgcgccgaacgccatcgtcgcgccgattcattcgaaggcgatgccggtgatcctcaccaccgaggaggaacgcgatgcatggatgcgcgctccttgggacgaggcgaaggcactgcagcgtccgctgcccgatcatgcgctccagatcgtcatgcgcggggccgataaggaagacaaggtagcagcgtag

SEQ ID NO: 2646 - DNA, 297 bp, BradyrhizobiumColbertium
atgaagcatcaggacaagctttctttcatcacggatgatcaggccgagcacgtgggagccgacatggcgatccagttcatgctcatgacgctctttcagctcgtgtcggaaatggcggatgacccgcgcggcttccgtgcggatgttcataaggagcttgccgacctcgttgcgacctataagctgccaccgatgccggcggatgccgagcaaaagatccgcgccgcagctcgcaagattctcgacggcatcatgttgcgatcgttcgaaccaaacggcgtgaggaaggcatcttga

SEQ ID NO: 2647 - DNA, 207 bp, BradyrhizobiumColbertium
atgtcctcggtctctcagccgaacgaacaggatgatgggctggagaccgccgtcgatcaggcaatcgccgtttgcgacggcgatccgcgcgcggctgttcgcgcgctgatcgttgcgaacaaccttttggaatccgagatcgcagaattgaagaaggccgtctcgcacgcctacatgcgcgggcgctttcgaacctacactggataa

SEQ ID NO: 2648 - DNA, 495 bp, BradyrhizobiumColbertium
gtggtcaaggacgccaacggcgtgatcttggcgtggctctattgtcgcgatgacagccagcgctacagcttcggcgtgagcaaactctcttcagatgaagcccgccgcatcggcaaagcgatcgcgcgcattcccgaattcatgatgccgcgccaaggcttctacccgcgtggggctgggccgcgctggcgcgccgatcggccgtaccatgttgcgctggaagaccgttacatccgtgagcactgggatgaaatctatgcgctctgtcggctgaacagcctgccgttcaacgggacgggcgaagttatacagaatgatggcgtttggagagtctatgagtttgcctggcagatggatgcgatcttgttctgggagcgctttgaggggcgctggctgcgcggcacggagtttcattatccggagcgacccgagaatctgccgtcactcaagccgcttcagaactggccaaaattcaatccacgcaatttgcgataa

SEQ ID NO: 2649 - DNA, 198 bp, BradyrhizobiumColbertium
atgattgcgaccgcccacgaattgccgacttcaggttatgcgcttgaagtcgacggtcgactcaaagccgaatttgcgaccagggacggagccgagatgggtgcggtagagttgaagaagcgttttcccatgcttcagatcaagatctatgacgcgcagaccaagacgcgggaagaagtgctgtttccgcaggcctag

SEQ ID NO: 2650 - DNA, 657 bp, BradyrhizobiumColbertium
gtgagcgcggacggaccagactgggcgcgcctttttcgcatcgcctgctcgctgatacgccaggtcaactccgaacagctcatcatcgattcatggtcgttcggcggcggcacggcgatgatgctgcaagtcggccaccgcgagagccacgacgtcgatatcttcctgcctgatgcgcagctcctgtcctttctcgatcccaagctgcacgatttcgagttcgagatcaggccatcggactacggcggcgacggcacaggtttcctcaaactggctttcgagggtctcggcgaaatcgacttcatcgtggctcacgacgtcacggacatcccgacgacgaggcagacgatcgagggcgaggaagtcgacctggaaacggtcgccgagatcattgccaagaagattcactaccgcggcgcgaccatcaagccgcgtgacatttttgacattgcagctgcggctcgtcacgatcgcgattccatcatcaaagcgctgaagcaccacaaggatgacgtcaccaaaacgctgagcgcgatcgaacgattgaaaccggacttcgtcaatgtgaccatcgcggagctcgcgatcaaggactcattcaaaccgatcatcggcacggccctcggcgaggcgaccgaactcctgaaatcgatttga

SEQ ID NO: 2651 - DNA, 288 bp, BradyrhizobiumColbertium
atgtattttgagacagtgaaggtcatgggcaagtttcccgcgtctgttctgacgaccgtgaatgcgccgtacagcaagaagctggacgcgccgacgcttgcccactgtctgacgcatcctgaggccgccaaggcctggccgggacagatgtcggcatttttcggcgaagttgcgccggagttgcagaaggcctttgcgggcgcatttcacatcagcgaaacagagctcgtcaccgccgcaaagacattcgcgcaattctccggcgaatcctatccactcgccgcgtga

SEQ ID NO: 2652 - DNA, 1194 bp, BradyrhizobiumColbertium
atgaacatgcagattcttgatgcccgccgcgacgccagtggcggttacagggtggacgtgagccgcggcgagcgcgtcggccgggtctcttccgagtggttttcccgtccggcagaccagcgctatctgtcactcaacgaactagcaagcacggtgcgtgatcgcaccgaccgcagccgcacgcgcgtggtcgaaagcgcgctcatccatgtggaagcaaaccgcaccgatcccgagcgattggccttgatgctgcccggctcggacaagcccgtcgcgccgacccattggagcttcggtcagcttgcaagccaagttggtgctccggccgcttacctccggcaactccccgcggcactcgcaggcatcaacctgcaatacggcctgaccgccgatcgcgccgaacaaatcaagacgctcgagaccgacgatggccgtgttgagcttcgtgccgtcaccagcccggactatggccggatctttgaccatgaactcgttgaggcggtgcagcgcatcgccggcaacggcacaggtgatacacgctggaaggtgccgggggtgctcgactggtcaaccagaatctacaatccacgtgtcgatatttcaaagagcacgacgaccctctatgcatcggatagagatgttttccttttcctggtcgatgacctgaatccgatcgaagccggccgtctcccggacggctcgcccgatctctatttccgaggcttctactgctggaactcggaggtcggggcgaagacgctcggcatggcaagcttctatctccgcgcagtctgccaaaatcgcaatctgtggggtgtggaagatttcgaggaaatcatcattcgccattccaaatacgcctcgtcccgctttgcccacgaagcggccccggcgctgctcaacttcgccaactcgtcacccatgcccttcgtcaacggcatcaaggccgcgcgcgagcggatcgtggcgcatagtgatgaggatcgcaccgagtttctgcgtcgtcgcggcttctccaaggccgatacagccaaggtgatagaaacggtgctggcggaggagggccgcccgcctgaaagcatcttcgatttcgtgcagggcatcacggccgtcgcgcgcgataggccgcatcaggatgctcgcctcgatatggaggcaaaggcgaagaagctgttggatcgcgccgcctga

SEQ ID NO: 2653 - DNA, 2136 bp, BradyrhizobiumColbertium
atggcaaaggccgttcagaaaatcaaaatgtcgtcctcgcgcgacattccattccacaagctggtgctcagccagtcgaacgtccgccgcaccaagtccggcatctcgatcgaagacctcgccgaggacattgcccgccggaagctgctacagagcctcaacgtccggcccatccttgatgccgatggccaggaaaccgacatgtgggaggtgccggccggcggccgacgctatcgtgcgctcgaattgttggtgaagcagaagcgccttgcaaagactgcgccgataccctgcgtcgtcggcgaagccggcggcgggatttccgcggaagaggactcgcttgccgagaacgtgcatcgcgtcgcgcttcatcctctcgaccagtttcgtgcattccagaccctgcgcgagcaatgcaaatccgaggaggagatcgcggccatctttttcgtctcagtcggcgtcgtgaagcagcggcttcggcttgcggcagtttccccaaaactgctcgacgtgtacgccgacgacggcatgtcgctcgagcagttgatggcgttctccgtcacggacgatcacgctcggcaggagcaggtctgggagaacgtcaaccgctcgggctatgacgagccgtatcagatcaggcgcgttctgaccgagcgggcggtgcaggcatccgacaagcgcgcccgtttcgtcggcctcaccgcctacgaggcggccggcggcaatgtgctgcgcgatctgttcgaagaggacggcggcggttggctcgaggacatcgcgctgctcgagcgtctcgtcgccgagaagctccgctctgaggccgagacgatcgcggccgaaaattggaagtggatcgaggtcgccccgagcttcccctacggtcacgatcacgggctgcgccggctcgaaggcgaaccggccgatctcaccatcgacgaacaggtaagcctcgatgcgctccaggccgagtatacagcgctacaggagaaatacgaggatgccgacgaaataccggatgaggcggacacgcggctcggcgaactcgaggaggccatcgcggccttcgaggaccggccgcatattttcgacgcggccgccatgccgcatgccggcgccttcgtcagcattgatacggatgggacggtgcaggtcgtgcgcggctatgtccgccgcgaggacgaactggcgttcgttgcggcactagttcggcccgatcctgaagccggctcggcaacgcctggctccgacgatggcgatcaacccgtgcccccggttcagggcagcgtgattagcatggccgggcaggtatcgccggatgaggaagaggatgatgccatccggcccttgcccgatcggcttgtcatcgaactcaccgcgcaccgaacgttggccctgcaggacgcggtcgcggcccaaccgcatgtcgcgatgaccgcgctcttgcaaaagctctgcctcgatgccttctatcggacttacggtccgggctgtatcgaggccggcgtgcgtcatgtgcagctttcgatccaggcgcccgaattgaaggatagcgcgtcggccaagtcgatcgccgctcggtacgagggctggagagccgacatgccggccgacgaggctgccctgtgggattggttggtcgcgctcgacgattcgagccggttagcgttgctcgcccattgtgtttccttcggcgtgaacgcccttttcgagaaggccgatcgccatggcgggcccggcattaccacccatggactgcagcgccggcttgatcaagctgatcgtctcgcccgtgcggttggtctggacatggcggagtccgggtggcgtccgacggtcgacaattatctcggccgcgtaaccaagggccgcatcctcgatgccgtccgtgaggcaaggggtgaatcttcggcccaactcatcgaccatctcaagaagtcggagatggctaaggaagccgagcgcctgctcgaaggcaccggctggctccccgagccgctgcgcatcgccgccgtggcttcgccttcggagaatcccgactctgccgcagagccgcttcccgaatttctctccggcgatgaggaatcaaccgagggcgtcgagagtgagcagccgcaggccgtcgccgccgaatag

SEQ ID NO: 2654 - DNA, 516 bp, BradyrhizobiumColbertium
atggccgactactattccccggccgtgatccagcagacgatacccgaggcggacatgaccccgctcgaacgtctgctgctatcctacgtgttcgacgccgaacgcgacggagacgggtggtatttcttctccgacctgggcccggcagacatgaccgtgatcgagcgcgcggcgctggaagccgcgcaagctgcgtccgagctcgatgtcgacaatacggccaatgcgttcgtcagaaagcatctcgcgggtatagagaatgacgaactccaggatactcacttggacatagatcttagcgagacttcctggcagctcatccttcaggatatcgtgcgacgttcgtcgaccctcaaatacgtgtcggcggtatcgtccttcacctgctcacggatgcgtgccgacggcttcggtggtgctgtcgtcgtgatctcggccgacaccattctcggcaagtccacgaacgatcttctcgaggaattcatcgaccaggtctcaccttgcaccgatggctga

SEQ ID NO: 2655 - DNA, 309 bp, BradyrhizobiumColbertium
atgtgcagggttctcaacaagcatcacgcaggcattccggcaggcgccgtctacatcgggcgcggcagcaaatggggcaatccgttccggatcggcggcgacggcgaccgcgcggccgtcatcgccaagtacgagcgatggctggcgaaccagcaccatctgctgcgcgcgcttgatgaactgcgcggacgcgatctcgtgtgcttctgcgcaccgcgcgcctgccatggtgatctcttgctgcgtctcgccaacgccacgcgcgaggtgcgcgtcacgtggtggcgcgccatggaggccgcggcatga

SEQ ID NO: 2656 - DNA, 372 bp, BradyrhizobiumColbertium
atgtcgaaaacgtacagggagttcgattttcgaaagtctgtcgcccatcacgccgaggccaagcgcctcttccacagtcgtgcgagatcccagctccgccgtattgcggccgcgctggggcttgagcctggttcctacgacctccgttccaaccaggctggcgttgccgtttccggcgaaattaccctccacggcgatcacctctacgtgcaggtctcccaatcggcgatgggccaccacagcggcgttttgtttcggacctgcaagggccggaaagactatgtcggtggcccgaacaatttcgcatcgctcgatttgctcaacaggcccgacgaactcgcgcattggatccgcggggtgtgccatatttga

SEQ ID NO: 2657 - DNA, 168 bp, BradyrhizobiumColbertium
ttggatccgcggggtgtgccatatttgatgtcatccgccgccgcacagccgctgtcacgtcgtggacaggccgtcaccgttatcgctgcggcgcgcgagtcagccgatggacacgagcctggcgttatgccgtcggacggctttcggcagaccaggcgcagcgattga

SEQ ID NO: 2658 - DNA, 276 bp, BradyrhizobiumColbertium
ttgatgctcgactgccggtatgcagcgggctggcatccgctgctcgttctgaccgtgggggatacgctcgagcaagcccgcgaagagatcgccgatcatcccgatctgctccgtctcgtcgcggacggctgcgcccgcgtcggcgacaaatgggagccctactacggcgaactgttggaagcgcgatgctgggcaatcaacctcgccaagaattatgccatcgacgagggcatcacattcgttctgctcaatgatgagcacgattccaacatgtga

SEQ ID NO: 2659 - DNA, 4335 bp, BradyrhizobiumColbertium
atgaccgaatctctcgtcagcggcgccagcgccgcgccgctctcgatgcgtgccaccgcagccgtcgcgtccgcgatcgtcagcgccgcacgccagcttttgaccgaactcgaacagggacgtcgcatcgatgccgccgtcctgcgcaatgccatgcaggcagcgttcggcggctccgatgcgaccggggtgtgggactggaaggccgcctatgatgcctgcgaagcggcgaccgtcctgttcctgcgacggcatggcgctgccatgcgcgccaggtcggcgtcgccggcggccatgctgtcaatgctgatgcggatcgcaagtctccttccgacccaaacgcgccggtccgaggaaagccaattcctccagcagttctcgacgccgatcggattggcgtatgtctcgagcgtcgccgccgcgatgacgccagccgatgtcgtgctggagccgtcagccggcaccggccatctcgccgtcttcgcagagttcgacggcgcctcgctcgttctcaatgagatcgccgagagccgtgccggcattctcgggcagatctttcctgccgtgtccaccacgcactttgacgccgcccatatcgacgactacctcgatgcacgcatcgtgccgagcgttgtcctgatgaacccgccattctcggccacggttcatgtcgatcgcgcgatggcggacgcggcattgaggcacgtcggctcggcgttagcccgtcttcgagaaggcggacgcctggtcgcgatcacaggcgcgaacgtcgcacccgacaatcccgtgtggactgattccttcaagcggcttcaagaacagagccgcgtcgtgttctcggcggcgattgacggcgcggtgtatgccaagcacggcaccaccgttgacacccgcctgaccgtcatcgatcgcgtgccggcggacgacgccgcgtcattgccggcatccgctggcatcgcgcgagacctgccgactttgctcgactgggtgatccggggcgtgccggcacgtcgcgcaattaccggcacgccgactgcggcggtgccagcgattgccagccccgcaacgccccggaccgtccgcgcctacgtcgcgcggcgccagcccgcaacggcggcgccagcatccgatctcgtggcggcggaagtcgcctatgaggccgtcgactggacgcccaccgatgccagcaagatcaccgacgcgctttatgaatcctacgcattgcagtcagtccgcattccgggcgcgcaggcccatcccacaaggctcgtgcagtcggctgcaatggcctcggtcgcgccgccaaagccttcttatcggccgcatttgccagccagggtcctagcggatggcattctgtcggacgcgcagctcgaaagcgtcatctatactggcgaagcgcattcggaatttctcgctggttcctggacggtcgatgcgacctttgacgtcgtcgcggccgcgcgcgaggacgcggataatgccgttcgctttcgtcgaggctggtttctgggcgatggcaccggggcgggcaagggacggcaggtcgccgggattctgctggacaactggctcaagggccgtcgtcgtgctgtctggatcagcaaatccgacaagctgatcgaggatgcgcagcgcgattggtccgcgttcggggcggagcggttgctcgtgacgccgctttcccgtttccggcagggcacgccaatccggcttggggaaggcgtcctatttaccacctacgctacgctacggaccgacgaccgcggcgaaaagctttcgcgagtcgggcagatcgtcgaatggttgggctctgatttcgacggagtgatcgtcttcgacgagagccacgccatgcagaacgcggttggcggcaaaggcgagcggggtgaccaagcggcctctcagcagggccgcgcgggcctgcggctccagcatgctttgccgaatgcccgtgtcgtctacgtctccgcgaccggcgccaccacggtgcacaatcttgcctatgcccagcggctgggactgtggggcggcgaagactttccattttcgaccagggccgagtttgtcgaggcgatcgaggagggcggtgtcgcggccatggaggtgctggcgcgcgacctcaaggcgctcggcctctatgctgcgcgttcgctatcttacgagggcgtcgaatacgagctggttgagcaccagcttacggctgaacaggttcgcatctacgatgcatacgccggcgcatttggcattatccataacaatctcgatgcggccatgcgcgccgccaacatcaccggcgagaccggtacgctgaacgcgcaggcgaagtccgcggcgcgatccgccttcgaaagcgccaagcagcgcttcttcggccatctcttgacctcgatgaagacaccctcgttgatctgctcgatcgaacgcgatcttgatgctggccatgcggccgtcatccagatcgtctcgaccggcgaggcactgatggagcgccggctcgcggagattccgaccgaggagtggggcgatgtgcaggtcgacatcaccccgcgggagtatgtcctcgattatctcgcccattccttcccggtccagctctacgagcccttcaccgactcagagggcgatctttcctcccggcccgtctatcgcgacggtcagccggtcgagagcagggatgcggtcaagcgccgcgaccgcctgatcgaaaagctcgcatcgctcccgcccgtggcgggtgcgctcgaccagattgtccagcggttcggcacagacatggtcgccgaggtcacgggacgttctcgccgtgttgttcgtaagcggaatcagttgatggtcgaaaaccgcgcggcctcggccaatctcgccgagaccgcggccttcatggacgacgccaaacgcatccttgttttcagcgacgccggcggcacgggacgttcgtaccacgccgaactgtcggctcggaatcgcagattgcgtgttcactacctcctcgaacccggctggaaggcggatgccgccatccagggcctgggtcgcacgaaccgcaccaaccaggcgcagccgccgctgttccggcccattgcgacgaacgtcaaggcggaaaagcgctttctctctaccattgcccgccggctcgacacgttgggcgccatcacccgaggtcagcgccagaccggagggcagggcatgttccgccctgaggacaacctcgaaagccattacggccgtgacgcgctgcgccaactgtacctgcttctcgttcgcggcaaggtagaaggttgctcgctcggggcattcgaggacgcgaccggtttgaaactgatggatgccaacggcatcaaggatgaacttccgccgattacgacattcttgaacaggctgctggcgttgaccatcgacctgcaaaacgtgttgttcgccgcgttcgagcaactgctctccgctcgcatcgaaggcgccatcacgtccggcacttacgatgccggcctggagacgctgctcgccgagagcttcgtcgttactgaccggcgtgccatctacacccatccggggaccggcgcggaaacacggctcctgaccatcatcgaacggcggcgcaatcgtcccgtgacgctcgaggaggcgttcgatcggctcaccgattcttccgccatcccgttgatcaacgaccgctcgggccgcgccgctcttcaagtcccggcgccgagcttcatgctcgatgacggcgagattgaacggcgcgtgcggctaatccggccgatggaacataacagcctttcgtcgaagatgatggcggaaagccattgggcggaagttgaccgcgaacgtttcagcgcggcctggcaggccgagctccatgacgtgcccgaattctcggaaagcaccatccatgtcgttgccggcttgctgttgccgatctggaagcgcctgccggacgagtcgacgcgcgtctaccggcttcagaccgatgctggcgagcgcgtcatcggccgcaaggtctcgccggcctgggtggcgacggtgctggctggcgacgcaccggcgctgacgccggacgccgccttcgccgcgctgctcgaaggtcgcacggtactcagcctggccgagggcctccagcttcgccgagtccgtgtcatgggtagacaccgcatcgagctgtctggattcaacgacacgatgcgcgatcgcctcaggacgtatggcctcttcagcgagatcatctcctggaagctgcgcatgttcgtgcccactgacgagggcggcgtcgaagtcctggcgaaggtgcttgagcactacccaatcgagcgcatcgctgaacgggaggccgcgtga

SEQ ID NO: 2660 - DNA, 1068 bp, BradyrhizobiumColbertium
atgcgccgcgacgcctccgaactggcgcatcgcctcgcgcgcgaggccggggcggtgtgccgccactacctttccaatggaaagcgcaagggacggtattggctggttggtgatgtccataatacgctgggccgctcgatgttcgtacggctccagaactcgccgaaggggctggcgggcaagtggaccgatgccgccaccggcgagcatggcgatctcctcgacgtcattcgacatagccttggactctgtgacttccgcgaagttgccgaggaggcgaggcggtttctcaagctgccccgcactgaatcggagccggtaccacaacgaccaccagcgcgttccgtcgtcgcggcgggatcgcaagaagccgcgagacggttgtttgcaatctcaggtccgatcgaaggcaccatggtagagacctatctgcgtggccgcggaatatctcgtgtgcaccatggtggcagcctccgcttccatccgcgttgctactaccggcctgacgatcacctgccgaccgagacatggccagcgatgattgcctgcgtcaccgacctcgacggccagatcaccggcgtgcatcgcacctggctcgatccagacggctttgatcgcattcggctcggcaaggcgccgatcgacacaccgcgacgggccatgggcgatctgctcggcaatgcggtacgtttcggcgcagcagacgacgacgtgatcgttgcgggagaaggcatcgagacgatgttgtcgctacgttgtgcgctgccaacattgccaatggccgcggcgctgtcggccaaccacctcgcggcgatgctgctgtcttcgagcttacgtcggctctatatcgcgcgggacgccgatgccgctggagatatggtgcaagctgttctgttgcaacgcgcgcaaaccgccggcatcgaagcgatcccgctatcgcctcggttgggcgacttcaacgaggatctgcacatcttcggcctcgacaccctccgggcagcattgcggattcagttggcaccggaggacgtctcccgctttctgctcctcccggcccctgtggcttag

SEQ ID NO: 2661 - DNA, 981 bp, BradyrhizobiumColbertium
gtgatcgccacgaaggccgcgatggacgcggccgatccggcaaaaggacctcatcccatgaccgatcgcgacgacatcgacttacagcatacggcatctccgaccgacctcgtcctcaacgaattgcagctctttggctaccgtccattcgatgaccagcccgatccgagacctctacccgaaggcaagatgatcgcgggcgccgttgccgacatcttcgacgcattggtcgccaccctgaacgatacaaggctcgaacctgacctgccggacctgctctggtcgaccgtcaatctctttcaccgggccacggaccgcatagaacgcgaactggacaacaacgagcagggccaacgcaaaagccagcgcgagcagaacggctcggaagtacgatcagtcgagctcgaacgcctgacggccgaaggcatcaccttgatcgagcgccgcaactgcctcgaactcttccgagagcaggccatcgagctcttcgaggtccacaccggctcagcctggcgcccccgatcggggtcattggtcaaccatcggacacttaccgcggcaatgatcgactcccgcgactttctcgcagccaaacgccgcaccgagactgaggtcatgttgccggcagggccgaaggtcgcactcaccggaggcctcgacttcaacgatcaccagctgatctgggatcgcctcgacaaggttcacgccaagcatcccgacatggtcctgatccacggcggctcaccgaaaggcgcggagctcatcgccagcaaatgggcgactaatcgcaaggtaccgcaaattgcgttcaagccggactggaccaagcacgcgaaggcggcgcccttcaagcgtaacgacgccatgctcgaactactgccgataggcgtcatgcatttcccgggcaccggaatccaggacaaccttgccgacaaggcaaaacgcttcggcattgcggtctggaaatttggcggcgcatag

SEQ ID NO: 2662 - DNA, 480 bp, BradyrhizobiumColbertium
atgatagctctcggactcctcctcaacgctgctggtctcggcgtgatctgctggctgatgttcacgctggcagtttacatcctgccatttttcgtggcgctcaatgctggcttttgggcctaccatagtggcgccggagtactcggcactccaattgttgccatcgctgttggcggcctgacgctggcgatcgcgcaaatcgcgttcgccatgacgcagtctctgaccttgcgagccatcattgcggccgtgttcgctttaccggcgacacttgctggctatcatctcgcccttgcgatggcacacttcggagtgccctctccagtttggcagcaggtcttcgcttgcctcggcgcggtctttatcggcggcacagcatggacgcgattgaccatcttgaccgagccccagccgccagattcgggcacggcggtcgcgagcgatcctcaagcagttctcgccgcggtgcatcggaagtga

SEQ ID NO: 2663 - DNA, 537 bp, BradyrhizobiumColbertium
atggaggcatcgcacgcacaggcccaaaccgtcaccgccgatcccggtgcgtggcgctccatgtcgtatgcgaaccttcaggtgccctcgcccgcgacggcgacttatatcgacatttggaaggatgcgatcgacgagaacaaccgtcattatgagcaacggggcgatcgtcggttcgccggcgcgaacgcccccgccaacgaagcgcacttcgtgatctggagcagccgtcgctcggtcgtcttcagcgtcctcgataccgcaagccaatgcgaggcgaagacggccttccctgccgtcggcgccaccgtgaaactctgcccgatgcggatcgccatctatgaaggcctgcaggtgcgcacgatggatggcggcaaggcttgcttcctcgaactcgacaagccgtcgccgaccgacgcgactgcctcaggcagctatgcatcctatgacgtcgcgcgccgggcgctcaagaccggactgatcgtcaaccacgttgccgtcgacggctgttcgttcgatgtcccgattccccggtaa

SEQ ID NO: 2664 - DNA, 543 bp, BradyrhizobiumColbertium
atgacacgaaaaaggctgttcgcactcctgcccctgatcgcaacgctcgccggatgcgcggcacgcgaagaaccgcccatcatccccgccggtcccgatgcactgtacgtccccgagcgggtcgttcccggacggctcgaatacgcgccggatcggtcgaccttcgccccgatcctgaccgagcgatttgcctatccgacccagcccgaggcgaacgcggcctatctccggctcatcgcggccgcacagccgggcccggcctatcccgcgtcggtctggctattcggctgcaagccgggcgcgctcgatgcgcaaaccgcgaggatcgctcgatatcacggtcctgtcgtccattgcgcaaccgatttcctcgatcgcggcggccgccgcctgcggcggggaacggcaaatttctactatgacaatcacatctggtcgatgcagccggtctatcccccgaggacgagcgtcgcctggcgcaaccgcgagagctccccaaaggatttctggtggtggctgccgggcaggccacgctacgaatag

SEQ ID NO: 2665 - DNA, 591 bp, BradyrhizobiumColbertium
atgccgctgcgtgaggcccgggtcctggcggcagctgccctcgccgcctgcacggcgctgccctgccacgcccaaaacggcggcgatccggccagtctttaccaaccgaagctcgccgcgcaactgccgccgttgcgcgtcgaggtgatcgacggcatccgcttccgcgacatcgagacgaagacgatcttccgtctctacggaatcgacgcatgcgcgtcagaccagatcgccacactcggccggcagccatggccttgcggcacgatggtccgagcgtggcttgtgacggcaaccttgaacacctggcttgcctgcgccgtgatccgggatgaacccggcgagcgtgtcgcacgctgtgctaccgcagcccatcgcgatctttcggccgacatgttgcgcgagggtgtcgccgtcctcgctcccgccacggacggcgagcccgtcatcggggactacgccgcggccgaacagcaggctcgcaaggcctatcgcggtctctggtcgagtgccttccagatgccctgggactggcgagctgcccgcaaggcagccacgaatgtcgcagtacaagccgaggcgacgccatga

SEQ ID NO: 2666 - DNA, 342 bp, BradyrhizobiumColbertium
ttgcgaacgaccaatctgttcatcctgcgcggccgcgtcggccaggcgccgaaagcgttcaacaaagcggcgaaagtcagcgtcgccaccgatcgggcgtggaccgatggaaaaggcgagcgacgcgaggagaccgattgggtgacggtcaccatcctcaacgagaaggcggcggaatgggtgctcgccaacgtcgccaagggcgacgccgtctatgccgaatgccgggttgcggacggatcctacaagggcaaggacggcgagaccgtctatacgacggacatcatcgcgaatgcgttccacaagctcgacctcggatcgcgcgacgatgccgctgcgtga

SEQ ID NO: 2667 - DNA, 591 bp, BradyrhizobiumColbertium
atggcgagggcgcgactgataacctttgcgcttctctccgcccttgcggcaaccccggtcttggcgcaagtcacgtcgtccggatggtttccggtcccgcccgacgccgccttcgacaccggcgacagctggtcgaacgccggcaccacctaccggctctacggtgtccaatcctgcctgcgcggcacgtccttcaccaacgcgcacgggatcaagcgcgattgcggcgaggcctcgctcgccatgcttgtcgcgctgatccgagatctgagaccccaatgctatgaggccgccgagttgccgcagacgaggaccgcgttcgtcttttgcgtcgccgtgcggaccgaaggtgcgggcaagggctcgcggatcgatctcggcaccgcgctgatcgcgacgggcttcgccttcgctgcgctgaagcccgacggatctcccgtccatgccccctatctcgaggcgcagcatgtcgcgcagaagagccgtaccggcctgtgggctttccccgatcttcccgacccaaacaccatcatccttcgcgccatccgccaggcatcgccctcggcggccgcgacgccgccgccccaatag

SEQ ID NO: 2668 - DNA, 501 bp, BradyrhizobiumColbertium
atgaagcgcgcagcacctaccttgatgatcggaatggcattgctgggtctcgtgccgatgcgcgcggcgcacgcccaggacgcctcattcggctgcaaggtgctgttatgcgcagccgccagcgcgccgagctggtccggtattccctactgcgtgccggtgatgcaggacctcttccgtcgcctcgcccatgggggcagctggccgacatgcccggagggcaacgcaagcggtctcggatacgagccgtatcagccatgtcccgccgggatgacagcagcgcagggcggttcggacggaaatggcggattgacgccggcggcgaacggcaatctgtgcgtcgacttcacgaagccacggcagacctgctttggcggccatgacggctgcacgaccgagtatccgacaagctcgcgcgcgcttcgaagcgacccctattatgtcgacatctcgacggcaaacggcgcccagcgtttctatttctcactgcagggctactga

SEQ ID NO: 2669 - DNA, 306 bp, BradyrhizobiumColbertium
atgaagacatcgtttgcacgcgttacactggcaggatcgctgctcctggtgacggcagccgacgcgttcgcgcaatcgacgggcggcacactccagccggtccagtccacgcttcagcagctcgtctcgaccttgacgggaccgatcgccaccgctctggcgaccctcgccgtgatcgcctgcggcctgtttgcctggagcggacggctcacctggggcatcgccggcagcgtgatcttcggcatcgtgctggtgttcggctcggcgcaaatcgtgcagttctttcagtcggcggtcggccaatga

SEQ ID NO: 2670 - DNA, 297 bp, BradyrhizobiumColbertium
atgaccgaagacgagctcgaggatccgctgatcacaccccttgtcaaggcgctcacacgcgcaccgacgctgatgggtgtcccctacatgtatttcatgttcaacggggtcgtctccagcatctgctttcttgtctcccacaatctcttcatgctgctggtcgcgatcccgctgcatctgttcggctatgtcatgacgcttcgggatgatcgcatctttgaaatcctgttcgtcaaatcgaccaaatgcccaccccgctcgcggtccttctgggccgccgacagctattcggtgtga

SEQ ID NO: 2671 - DNA, 2412 bp, BradyrhizobiumColbertium
atggtggcgcgagcacttctcgatgagctgacctacggagcggtctcgcgacgcgagcgacccgtggcgtcgcacgtgccctatacgaggcatgtcgacgaccacatcatccggacccgggacggtctcgtcctgacgatcttcaagctcgacggttattcgttcgaaacctccgacatcagtgaagtgaatgcgcgcctgctcggccgcaacgacatcgtccgcacgcttgccaattctcgctttgcgctggtttcccacatcgtgcgccgggaggtgcagccgcgcatcgattccaccttcgacaacgcgttctgcgccgagctcgatgagcgctacaacgccgcgctctcgaagcgccggatgttcgtcaacgatctctacctgacgatcgtgcgcaggccgctgcagggacaggcgggcaccttcgacatgatgctgacgaagctgctcggccgcaaggacgaggccggcgaatcggtcgcgcgccagacggccctcaacgagctgcgcgacgtcgcgaccgccgtgcgcgagagccttgctgcctatggcgtgcgccagcttggcgtcgtcaaccgcgacggcgtgtggttctccgagccgctcgaattcctcgtccagctcctcaatggcgggctctcgcgtcccatgcatctgccgcggatggatcttgccgatgcgctcgccatgaagcgcgtcttcttcggccgcaacgcgatcgagatcaaaggggcgggcccggcggacacgcgcttcggcgcgatggtgtcgatccgcgaatatcccgcccagaccgggccgggctccttcgacaacctccttcgggtcccgcacgagttcatcgcgacgcagagcttcgcgatcgtcgatcgtccggaagcggcaaagcagatcgaccgggtgtcgcgccaggtcgacatgtcggacgaagcaggatcggtcattgccgagcatcttgacgacgcacgcgatgagctactgggatcggaggcgatctacggcgagcaccatatgacggtcatgtgtctcggccgcgatcttgccgaagtgggcgcggccgttaccgccgtcggcgcggcgctcacggatcggtcggtgatctgggtgcgggaggatctcaactgcgagcccgccttctggtcgcagcttcccggcaactttgcctacatcgcacgcaaaggggtgatttcgtcgaaaaatttcgccggcttcacgtccctgcacaattacccgagcggccgtccgagcgacaatcattggggaccggcaatttcggtgttcgagacgacgtcgcagaccgcctactattacaatcatcacgtccgcgacatcggcaatttcacagtggtcggtccaaccggatcgggcaagacagtgtttctgtcgttcatcgcggcgcagacccagcgcatcgtgccgcgtccgaagctcgtcttcgtcgacaaggatcgcggcgccgaaatcttcatccgtgcgctcggcggccaatacgagacgctggtgccgggcgaaccgaccggcttcaatccgctgtcgcttcccgacaccgcggcgaaccgtgaattcctctaccagctcttcgccttcatgctgcggcccgccaatggcggcgacttgacggcctccgaggagcaggtgatccgcaatgcgatcgcggccgcgctctcggccggacccgaggggcggacgctcaaggcattttcgacgctgctgcgtggtcgcatccgggcgggggaaggcgatctgctcgcacgcctcgaaagctggatgcgccccgaccagcggggctggctcttcaacaacgaagaggaccagttctcgatctcgagcgtgttcggcttcgacatgacccgcgtcctcgacgatccggtcatccgcaccgctgcgctgatgtacatcttccatcgcacggaggaattgctcaccggcgacccggtgatgatcttcctggacgagggctggcgcctgctcgatgacgacgtcttcgccttcttcatccgcgacaagctgaaaaccatccgcaagcagaacggcattatcggcttcggcacccagtcggccgccgatatcgttcgctcgaaggcctcgaacacgctgatcgagcagaccagcacgaacatcttcttcccgaacccgaaggcggacgacgaaagctacaagcaggccttccggctgtcgggacgcgaggtgaactggatccgctcgactgcggccgagagccgctccttcctgatcaagcacggacgcgacagcgtcgtcgcgcggctgaacctcgcgggcatgcccgatctcatcaaggtcctttccggccgcaccgagaccgtcgccgaactggatgcgatcagggcgaaggtcggagacgatcctgcggcctggttgccgatctttctgggaaggagcgagccatga

SEQ ID NO: 2672 - DNA, 837 bp, BradyrhizobiumColbertium
atgaagctatcggccattctcgccgtcctgctcgtcgtcggcgccacgccggcttttgcgaatataccggtcaacgatgcggcccaactgacgcagaagtccgacacggcgagcacgaccatcaagctcgtgccggtgacgacgcagcgcaaggaggccaacagcggcgtcaaatgcgcggtcacgacgggcaagaaagcgagcatcaccaatccggcggtgcagcctcaagcgggcgccggcgcccagtccatccagtcgtatggtcccgatctgccgctgagcaaggacgcgaccgcgcagggcgccgcgctcaacagtcaaaccctgttccagtccagcggcgacgtggtcggcggcctcgacgccagccgatcgacgatcaccgcggcgaaatcggggttccagaccgccaccggccaggtcggtaccgcacagacggtgatggccgcgctcgacatgaacagcgccgcgcggctgcagaacaatctcgtctggaacaatgtgatcggctcggcgaacctctgggtcacggcgatcaacgctctcaacctggcgcagaccagcgatatgagccgtgccgccatgggaatgcgcgcgacggcgagcccgccgacgacgacgcaggggccggcctgcccggccgggacgatcggggcgggcacgccgagcgatccctgccgttctccatcgacatgccagaccacgccacccggcgccacgcctgatcccgcctgcgtatccgcccgctatgtcgataccaacaacaacgtcctgttctttctcgcgcaaatccagaatgcggcaaatgccgcggccacattgaccggtcgctag

SEQ ID NO: 2673 - DNA, 654 bp, BradyrhizobiumColbertium
atggcgcaggtcccggtgattgacaacgccaatctcgcgaaggcgcaacagatcgcgaccgacaccaagtcgatcctgacggccgatcagcagatcatgcaatttacccagaagacgctgcaggcggtgaccggcgatcgcacgtcgcaggcgcaggggtcgctggcgcagatggcgctcggcagcggtttcagcatggcccaggcgccatcgctggggtcggtgatctcgggcggagcgctgtcctttgccggcatgggcgccggctcccagaacatcgtctcgacgctgatcaacggcctgcagctcgtacagacgatcaccgggctggcaaatggccagacccatgcggtcgacacggcttacaagaactcggtgaacgtcgccgcgacgctctccggcctgatcaactcgacacagagcgccgtccagacgcgatcgcaggccttcacccagggtgggcaacagatcggcagcgcccaggacctcaagggcagcgtcgaccagaacacgcaggtccagatccagacgggccagaccgtcaacgagctgaacggtgtcgtgaacaatgcggcggctgccgccaaccaggcaaaccttgaccggatcgccgcggagtcctccgccgcccgcgccatgaagtttacccagtga

SEQ ID NO: 2674 - DNA, 189 bp, BradyrhizobiumColbertium
ttgtcaccacgcgttatcgcagttgccatcgtcgtcgctctcgtcctcggctttgccgccggacgcgcctacttctcatccggccacccgagcgccgccaacaatccgagcaccgcaacacaggatgacgcagccgccgctgcctcccgggcgatgaccttcacccagccgaaggcacccgccaaatga

SEQ ID NO: 2675 - DNA, 195 bp, BradyrhizobiumColbertium
atgacgatcactttgcgctgctgcattctatgtctcctggccgtcgcactcgcgggctgcgcttataagcctctcaaagcgccgtgttctcccgacgaaggcggaacgccgctcgcctataccgacactccatcgcaccaggtcccggcggcgttcacggcgctcgacagctgcggcccgatgcggccgatctga

SEQ ID NO: 2676 - DNA, 717 bp, BradyrhizobiumColbertium
atgagcgacgcgaccgcatccgaaccgaagcgcattgatccgcgctattatgccgatggagcgacctgggagcacgacatcgcgcgccgcaatcgcaactcgcgcgcgctcgcctggatcgtcgccgccgtgatgagcgtggtcgccgtcgtcgctctcggcgtccttgcgctgctcgtcccgctgaagacctacgagccctatatggtcgtggtcgacaagacgacgggcttcgtcgaggtcaagcgccctatggccgaaggcgcactgacgcaggacgaagccgtcacgatgttcaacgtcgtgcgttacatcaaggcgcgtgagacctacgatcctcgcgccctcaaggataatttcgacctcgcgcagctgctcgccacgggtgatgccgcgcgcgagctgaccgagatttattcgccagccaatccgaacaacccggtgaagctgcacggcacgaacagcgagatcgcggtcaatatcaagtcggtcaccttcccgaacaaccgcacggccttggtgcggttctcgacggacgaaaaaaccgcgaccaacgtcgtgacgcggaattgggtttcgctcgtgcgcttccgctatagcggcgcgccgatgcgcaacgaatggcgtttcgacaatccgctcggcttccaggtgctggaatatcggcgtgatcaggaatccgcgccgtcgccgggcacggccggagcgcagcaatga

SEQ ID NO: 2677 - DNA, 804 bp, BradyrhizobiumColbertium
atgatcgcacggatcctcggcaccgctcttgccctatgccttgcaacggcacccgccttcgcagaggccctgccccggccggggcggaccgactcgcgcgtgcgcgacgtcagctacaacaaggacaatgtcacggcgatcgacgcgagctacggcacctcgacgatgatccagctgcagtccgatgagaagatcgagacgttggcactcggcgactccgtcgcctggaaggtcgagccgaaccgcaagggcgatatcatcttcgtcaagccgattgagaagaacgcgcagtccaatctcaatgtcgtgaccgacaagcgcatctatgtgtttctgttgcgatcgaatacgcgtccggcaggcaatcagatctatgcggtgcgctttcgtttccccgaggacgagacgaatgcgaagctccttgcggaggccaaggagcgggccgccaacccgaacctggcgagcctcaacatcgccaacgcgaacagcaattacggctacaagggctcgtccgcgaacaagcccgtcgccgtcttcgacgatggaacgaagacctggttccgcttcgagggcgagacaccggcaatctacattgtcgacgccgatcgcaacgaaagcctcgtgaattttcgtaccgagggcccatacgtcgtggtcgacaaggtctcgccgcagtggacgctgcggaacggacaggaatcgacctgcatcttcaatcgccggctgacgaacgtccatgagccaaacggactggagccctatgcgccgcagcgcgtcggcatggccgcaaacgggggagggtga

SEQ ID NO: 2678 - DNA, 1179 bp, BradyrhizobiumColbertium
atgacgacgccggacaaggaggaattcacgacaacgcagttccccgcgccgtcgctttccgcgccgcggccgcagaccaatcaggggacgatcgtcatcccgaaagctcctgacgtccctccgccgccaccggtgcccccgccggtcaccatccagccgccggcggcgcccgaacctcctctgacgcttaatcccccgaatgacgacgaagcacgccggctcgccgagctcgaacgtcagcgtaaggaagaagaggagcgccggaaatgggagcgcctgcgcgcgccgcaggtgatctccgacaatgccgcagcgacggccggttcggtcaatcctgacagcaatggatcctcgaacgcaacgcagccggacgatgatccgaaccggcgcttcctcgcttcggtgtcggccgccggcgtcgatacggcgcgagccaccaagaacccgcgcatcgacgcgcttgtcgcgcagggaacgatgatccgcggcgttctcgaaacggcggtgcaaagcgatctgccgggcatggtccgcgccgtggtgacggagaacgtctggtcgttcgacggacgccgaattctcattcccgccgggacgcgcctcgtcggcgaatacaagtcgggtatcacacagggccagacgcgcgtcttcgtcgtctggacccgccttctgcgctccgacggcgtttccgtgcagctcggctcgaacgggaccgacgatctcggtcgcgccggcaatgcgggcttcgtcgacaatcactatgtcgaacgcttcggcgccgcgatcatgctgtcggtcgtcggcggcgcggcacaattcctgagtgcctatggccagaacaataacaacattggcaacggaacgatcataaccacgaccgatccggtaaccggcgcaattacccagacgcagactggggtcaatcagaaccagctgagcctgcaggcgcgccagatcgcggcccagaacgtttcgcagacactgaccaacatcgcgcaggaggcacttcgcaactcgattaacattccgccgacgatctatctcgaccaggggacgcggatcatcgtcttcgttcgccgggacctcgatttctcggccttctatcccgacccggtcaaggaagccttgcaggagatcagacgtgaacgcgccggccagaagcctgacggtcttcattga

SEQ ID NO: 2679 - DNA, 1056 bp, BradyrhizobiumColbertium
gtgaacgcgccggccagaagcctgacggtcttcattgaccgggcgctggagccggtgcgcccctggctcgaggacgatcaggttgtcgagatctgtgcaaacggaccgggcgaggtctgggtcgagcgcttcggccaagcggcgatggaacgccatgtcgtcgatcagctgaccgaacaggcgatccgccatctcgccgagcgggtcgcgggtcattccggtcagagcgtcaacgaggagcacccgcttctgtcggccgcactgccaaccggcgagcgttttcagggcgtgattccgccagcgacgactggcggcgggggctttgcgatccgcaaacaggtgatcaaggagatgcggctcgatgactatcgcaagctcggctcgttcaaacaggtggaaacggcgggcgagggcgcgctctcggacatcgatcgccagttgtgtgagcatctcgacgcgggccgcatcgaggagttcatcaggctggcagtcgtcaaccgctattcgatcctcctgtcgggcggcacgagctcgggcaagacgacgttcctcaacgcgatcctcaaggaagtgcctgaagacgagcgcatcatcaccatcgaggacacgcgtgaggtcaaaccgatccaaaagaactacctgccgcttgtcgcgtcgaagggagatcagggcgaagcgcgcgtaaccgtcgagatgctgctgcaggcctccttgcgcctgcgccccgaccgcatctttctcggtgagatccgtggctcggaggcctattcgttcctgcgtgcgatcaacactggccacccgggaagcatcacgacggtccacgccgacagtcccgccggcgccttcgaacaactggcgctcatggtgatgcaggctggtcttggcctgcggcgcgaggagatcgtcgcctacatcaaatctgtccttccgatcgtcatccagcaaaccaaggtcggcggctggcgcgggacctcggcgatccatttctcgcgcatggccgaatggcggcaggagcgcgaagcggggagcagccatggcacgcatcgtcgtctttag

SEQ ID NO: 2680 - DNA, 2181 bp, BradyrhizobiumColbertium
atggcacgcatcgtcgtctttagacttggggtcgcgctgatctgcgcggtcgcgttttgcctgttgtggagcctcgcctacgagattgccgtcggctggcgttgggcgccgacccgctttccgagcgaaggcgccacccgctgggctttgctgcgcatgcagaacgcggaccgctcggcgggcttcttcctggtcgcctggcagcatttctatgagcgcatcctctatgcgccgactcggatcgaaacgctgatccgcggcgcatatgcggccggaggtgttgtcgctctcgggatcgcgggcctcatcttcggcatcgtcaatcgccggcagatgccctatggcgcggcgcggtttgggaccctgatggaggccgccaagcagggcctgacaaagaagcagggcatcatcctcggcacgctgaacggcgccaccatccggtcggacgaacccgcgcatatcctcgtcgtcggcccctcacgatccggaaagggcaccggcttcgtgcttcccaacggctacctctggcaaggctcggccgtcttcttcgacccgaagcgcgagaatttcgacgcgctggcgaaccatcgcaaggcgatcggcaacaaggtcttcatgttttcgcccggctctcccgacacgcaccggtacaatcccctcgatttcgtccggcgcgacgagcgcatggccaccgactgcctggtcgtcgcctccttcgtgatccccgagaaggccgatgatacctgggccggcgccggccgcctgctgctctcgtcgctgatcggctatgtcctcgcatccccactcaccaagggcgcggagcacatgcgcacggtcgcgcgcatgacgacgacgggcaaggacatctcgacggtcctgcgtgcgatcgtgaagaccgagcgctcgcatctgccgacctgggtcatcgatagcttcaatcaatatatcgcgctcgagcccgagacgcggaacagcgcggtcttcaacgtcaacatggcgatgagcctgtggaacaatgggctcatatcggcggcgacggaaacatcggacttcgacattcgcgagctccgccgcacccccatgaccatcttcatcggctgcacgatcgccgagctctccatcttccggccgctgatccgtatcctgttccagcagattcacgacctgctgatggagaagatccctggcgccgacgagccgcaccaggtgctgctcatgctcgacgaattctaccatgtcggccgcatggattcgctgatctcgaaaatcaccatctcggccgggtacggttttcggatggcgatcgtgatgcaggatatcgcgcagctcgatgagctctatggacgcagcacgcggattacgacggtctccggttcgcagatcaaactcttcatccagatcaacgatctcgacacatccgaattcgtctcggagatgctcggcgagacgacgcaggtctacaagacgcccgtcatgcggccggggcaggggattttcgcgccgcgcgtctggacaccgcactacacaccgcgaccgttgcgcagcccgctcgagctgcgcgagatgtcagcgcggttgtcgattctcatggtgaagaactccccgtcgttcgaactcaccaagatccgccactatctcgataagccgtaccgggctctctatgaggcggcaaagggttcgccaccgtccctgccgcggctcaaggaatggcaggacgaggagttgtccggagcgatcgctccacgatcggacacagaaacaatcacggccgaagagcctgctccgcccaagtccacggccgcgaagaaggctgtatcgcagcccgcgcggcgcaaagccccggcccggcgcaagaaggagcctgcagcggccggagcgaccgagagtgcgccacgtccagagcaggagccgccgaggccgctggagttgggacctcagcggacaacgttgcgcccgcctgccaggacgatttcgcttggcgcagcgccgacgccgccaaccggcgaaaactgcgatgtgcgcgaaatccttgcagccgcgacggacgggcaggacgatgaattcgattcgatgatgaaggttctacgcgcagagtcgacgcccaaagttcgcgcggccgccgaagctctgcgctccttgaatcaatcgtttggcgacgacgcgccgcgagcgcctgattga

SEQ ID NO: 2681 - DNA, 807 bp, BradyrhizobiumColbertium
atgaacatcaagggcaagcgtgtcctcatcaccggtggctcgagcggaatcggtttcgcgctcgcacaggcgctcgttgcaaagggcgcgagcgtcgtcgtcagtggccggcgcgaggctgcgcttgcgacggccgtcgccgagctcggccgcaccggcgccgcggtctcgagcgtcgccgcggacgtttccacccccgctggccgcgatgccacactcaaacacgcgatttcagcgctcggcggtctcgacatcctcatcaacaatgccggtggggtcagggctggacgcctcgaaaacactcctgaagaagagctgcaggcgatgatcgaggtcgacctcgtcgcgccgatactgctgacgcgtgaagcgcttccggctctgcgtcagagcggagatgcgatgatcgtcaacgtcgcctccggcatcgcgctcatcggcgcgccgttctacgccacctatgcggcgacgaaggcgggtttggcccggttcggagaagcgcttcgccgcgagctaaaaggtgaaggaatccacgtcctcaccgcctaccccggcggaaccgacacgcccatgatgcagtcgaatcgtgccggaccggagctgggctttagccgcgagccggcgtcggccgttgcggacgccatcgtcgacgggatcgaggcgaacgccttcgaagtcgttcgaggcggcgaagcccgagcacagatgatcgcgctcaatcgcgacaatcccggcgccgtcgatgaacggtttctcggcatgaaggccgcgcttgaggacgccgtgaaggatcattcggcgttatga

SEQ ID NO: 2682 - DNA, 879 bp, BradyrhizobiumColbertium
atgacgagctcctctgactatacaccgccgaagatttggacgtggaccaagcccagcggtggcgcgttcgccaacatcaaccggcccatctcgggcgccactcacgacaaggatctgccgatcggcaaacatccgctgcagctctattcgctgggcacgccgaacggcgttaaaatcaccatcatgctggaggaactgctcgcgcttggtcactctggcgcagagtatgatgcatggctcatcaagatcagcgaaggcgatcagtttggaagcggcttcgttgccgtcaatccgaactcgaagatccctgccctgatcgaccgcagtggcgcggccccgatccgtgtcttcgagtcgggttcgatcctgctttatctggccgagaagttcgatgcgttcctgccgaaggatctgcccacgcgtaccgaaacgctgaactggctattctggcaaatgggaagcgcgccgtatcttggcggcggttttggccacttctacgcctatgctcccagcaagatcgaatacgccatcgaccgcttcgccatggaggtgaagcgccaactcgacgttctcgacaggcgcctcgctgacagcgattacctcgccggccaggaatacacgatcgcagatatcgcggtgtttccctggtatggcgggctcgcaaaaggctggcagtatggcgcagccgagtttctctcagtgcaagactacaagcatgtgcaacgctgggcggacgccatcctggcgcggccggctgtgaaacgcggtcgaatggtcaaccgcatggcaggtgcaccgtcggaacagcttcgtgaacgccacgacgccgccgatttcgacacgaggacccaggacaagatcgaagaggtgaaacaatga

SEQ ID NO: 2683 - DNA, 705 bp, BradyrhizobiumColbertium
atgatccgcttctatttccacccgacgcccaaccccgcgaaggttgcgctgtttcttgaggaggctggtcttccctatgaggctgtccccgtcgacaccagcaagggcgaacagcactcgccgtcgttccgcgccatcaatcccaacggcaaggtgccggcaatcatcgacaccgagggccccggcggcaaagaggctcgcgtgttcgactcgaccgcgatcctgatctacctcgcggaaaagaccgggaaatttctcggcaaaccggaggatcgtcccgaactcctgtcgtggtcgctctttttggcgtcgggcctcggcccgttctcaggccaggccgtccatttccaattcgccgcccccgaaggattagactacgccgtcaatcgctatcgcagggaggccgagcggcactatcaggtgctgaacgaccacctcgaaggcaggacctatatcgtcggcgacgattacacgattgcagacatctcggcctggggctggttggaccgtgcctctcgggtgctcaaaggagcggaagatcctcttggtccctatcccaatctcaagcggctgtttcaaacagtagacgctcgccctgcagtcgcacgggcacgcgcagtcggtaagaaccatacattcaagacggtgaatgatgacgagaccaagcgctcgctcttcccgtcgaactatccgccggcagcgtga

SEQ ID NO: 2684 - DNA, 858 bp, BradyrhizobiumColbertium
gtgattattttctccggctggttcgtggccacgcgcttcagcgttacacgcgaactccggatttgggatatcacggctttgcgcttcggcatcggagcgcttcttcttgctccgacgatcatgcgcggatcgtcgcggctcccttgggcggcatggagacaggggttcgtctttgctatgctctggggcgtcccttttgtcctgctcgtcgcgcttggactaaggcttacgtcggccgcggaggcggcttcgattgcgccgacaatcatgccggttttcgcaggtgtcttcgccttcgtattcatgcggcaatcgcaaggccccatgcgatggatagggtatgccgcgatccttgcgggattggcatgcctgctttccgccgcggcgctcaatcgcggcgcgccggatccagtgggagtggcggcactcgtcggcgccggcggcttgtgggccgcctatacgctgatatttcgcgcaagcggcctcactgcaacgcaggcggccgccctgatctgcatttggtcagcagctctctttctaccggtctatctgtttttcgggcttagccgcttcgccctcgcctcctggtccgagcttctgctgcagatcatctaccaaggcgtgctgatgagcggtgtcgcgatattctcgttcaatcgcgccgtctcgcagctggggccttcggcagcaactgccatcatcgcgctgctgcccgccgtcgtagcgatgcttgcgattccagttctcgctgagacacccactctcgccgaagggctatcgatcgccgtcatcgtcatcggggtgctgcttgcctccaggcctgctccatcgcccgtgcattcatccgtccaaacctaa

SEQ ID NO: 2685 - DNA, 654 bp, BradyrhizobiumColbertium
atgggactgaaacaagagctcgacgcctttaaagcccagtttgtgcaaacggctccggcgggtcgcttcgcattgtacaccgccaagatcgaagagcttcggcaaagcttcgcccgcgacaatgcaatcaccgaaggagacattgctccggacttttcactgccggatgcgaaaggtggctctgtgaccctttcggcactcctggcacagggcccgaccgtgatcaccttctatcgtggcggctggtgtccgtattgcaatattcagctgcgagcctatcaggccatcctgccgcagatcgcagccgcgggggcaagcctcgtcgcgatttctcctcaggcgcccgaccgaaccttgtcgacagcggagacgaacgccctcaccttccatgtcctcagtgatctggaaaaccgggtggcccgcagcttcggtcttgtctattcgctgcccgaagaaatccgtgcggcactgcgctccgtcaacaaggcgcttcccgagattaacggcgacgatagttgggagcttccagttccatcgacctacgtcgtgaccggcaacggccgcgtcacactcgcccatatcgacgtcgactacacccaacgcctcgagcccgaggagattctcgccgctttgcgctctcgcaaggcggcatga

SEQ ID NO: 2686 - DNA, 576 bp, BradyrhizobiumColbertium
gtgctcgacgccgccatggagtgtttctggaaccggggctacgaggccacgtcgatgcgggatctcgtcgacaaaacggggatcactggagcaagtctgtacaatgccttcggcgacaagcgggcaatctatcagcgcgcgcttgatcgctacgtcgaggggagcgttgcagcccgtcttgcgcgctgcgaggagctccctccgctcgaggcgatcgtcgcctttttcgacgatatcgtgtcgcgatcggtcgaggatcgttcccgaaaaggatgcatgcttgtcaacgcagcgctggacgtcgcaccccatgatgacgaattccagcgtattgtcgcggaggtcatgacgcgtatcgagcttttcttccgcgattgcgttcagaagggccaggagcagggcgccatcacgtcgacgatgtcggcggaagaactgggccggcaccttttgggtgtgttgctcggggttcgcgttctggcccgagtccgtccggatcggattttgctggaaggcgtcgtgcgtcccgcgatcgagcttctcgatataggctccagtccgcgacaccgagatcattga

SEQ ID NO: 2687 - DNA, 1335 bp, BradyrhizobiumColbertium
gtgcgtagtcctcaactcgacaaaccatcaacacagcgtgtcgtaatcgtcggcgcgggctttgcggggcttgccgccgcaaagcagttgggcggatcaggcttcgatgtgaccgttgtcgaccgccacaactatcatttgttccagcctctattatatcaggtcgcgaccgcaggattgtcgccagcggacattgcatcgccgatccgcagcatccttagcaggtacaagaacattcgggtcgttctcgcgaatgtttccggcgtgtcgatcgacgaagggacggtgatcgctgaagaacgtcagataccctacgatgttctcattctggcgacaggagctcagcacgcctattttggtcatgacgaatggtcggtgcatgctccgggcttaaaaagggtggatgacgccacttatttgcgccgccgaattctggtcgcatttgaaagagctgaaagcgaagtggacgaagcaaggcggcaggcgttgcttacgttcgtcgttgttggcggcggcccgacgggtgttgagatggctggggcgattgcggaactggcgcggaaagcgctcgcggcggacttccggcatatcgatcctcgaaacgcccgtattatccttgtccaggccgcaccgaggttgcttccgacatttccggaaccactctccgagcgggccaaatttgcgcttgagcggctcggtgtcgacgtgcgcctgaatcagtccgttacgtcctgtgatggtgagggcgtacgtctgggcgaagtgcccatcgaagccgcgacaatcgtgtgggccgcgggcgtcatggcatcgccggccggaagatggctgcaagcggaggcggacaatgccggtcgcgtacgcgtcggcgaggatctcactcttcctggccacccggagatcttcgtgattggcgacactgccaattgcattggcaatgatggccggccgttaccaggcgttgcaccagtggccaagcagcagggagaattcgtcggccagcttctcaaggcccgcgccgccggcagaacgcttccgcgttttcgctatcgtgacttcggagcgatggcgacgatcggcaggaagagcgccgtggctcaactcggcccgatacggctgcacggtctgcctgcctggctcctttggtcggccgcgcacatctactacctgatcggctttcgcaaccgaataacagtcgtgttgaactgggcgtggaactacgtgacgtttcagcgcggaacccggcttattaccggtttgtccggctcgcgcgtcgaagatatggctgcccccgctccgatggagcccgatggcgtgggaaatctcaatcgttag

SEQ ID NO: 2688 - DNA, 636 bp, BradyrhizobiumColbertium
ttgaaaacagacgaattcatcaacaccctcaccagcgacctacggccccaacgctcccttcattgggttttgctctgtggactgctttgcggcgcgttgctcgcagcgctggcgtttgctgtgtttctgggttttcgctctgatatcctctcggcgctcacctccatcaggttcctcttcaaattcgtggtcacattgacgttggccataaccgggacctacgcgacgttgagtttggcgcgtcccgatagcgcaggcaaccatcgctcatggagcttgttgatcacgcccgtgatcctcgtgggcgcggtcgcggttgaactgatggtgctgccgtcccggtcgtgggaagacaatctcgtgggccataacgcgacgcactgtttgacagtgatcccgctgttgtctgccggtcccctcctgtgcatcttcgctgcgctccgcagaggtgccccatccgaaccgggactcaccggtgcagtagccggattagcggcaagcggcattggcgcaacgttctatgcggccaactgtaccgacgacagcccattgttcgtcgtcgcttggtatcctctcgccgttctaatcgttgctggcgtagcttatttcatcggcgcaagagctcttcgttggtga

SEQ ID NO: 2689 - DNA, 444 bp, BradyrhizobiumColbertium
atggcttgtcgccgctgccgcatcgtcggcgtcgcggagactgaagcagaagatattgtgcaggaagttctcctcacaatccatctcaagcgcacgacgtgggacccgtcgcgtccgattcgtccgtggatcgccgcgatcacgcgcaacaagttcgtcgatgccctgcgtcgtcgcggtcggcatgtcattgtcccgatcgatgacttcctcgaaattctcggcgaggaggagaaggatgacgggctgtcggcccgcgaaatggaccgattgctgtcgcagttgaagacgcagcaacgggcaatcgtgcaatcagtctccatcgagggaaatagtatcagggacacggccgcgcaattgaagatgagcgagggtgctgttcgggttgcgcttcaccgcgcgcttaaaatgctggcatcgctctatcggagtcatgaagcttga

SEQ ID NO: 2690 - DNA, 663 bp, BradyrhizobiumColbertium
gtggaaacggccgcgaagttcggcttcacatcgatctttgccggccgcgtgcccgcggtgcatccgccactatcgccggaggccgtcgccggcaacgttctcgtcagcaccatgcccaaggattggtcgctgcgctacctggaacgcgggtatctcttccgcgatcctattgtgcaactgctacgcagcaaatggtatccgttcacttgggctcatgcttacgatcttggcgccgaaagagcggacgtcgaaatgatcaggggtgaagcgtcggaattcggcctgcgcgaaggatatgtcgtgccgattggcctgctcggcggtgtgcaactcgcattttcgtttggagcgaactctatggacgtctcgcctgatgagctcgggacgcttgctttcgcaacaaacatcgcggccggccaactcctggagctaacggcgtcgcgatcaaatcaaggcgaagcacgcctggccctggtgacggcacgcgagcgagactgccttgcctgggcggccgaaggaaaaacggattgggagattgccgccattctcggtatctctgtttcgaccgtgcgcaaacatctcgcatcgacgcgagagaaacttgaagccgtcaacaaataccatgccgttgcgctcggcatccggtccggcctcctgcgttaa

SEQ ID NO: 2691 - DNA, 366 bp, BradyrhizobiumColbertium
atgaagatcatatcgacccaacagcacgccattctcgattacatcacggtactgattttcgtgctggctccgactattcttggaatatctggcgctccagccgtcgtttcatacatccttgccgtcgttcatttgacgatgacagtcctgacggatatgccgctcagcctcgtcaggctggttccgcttaaattgcatgcgcttgtcgaggcgatcgtgggaccggtgctcatcatcggcgccctcgcgttgcttcctgcgacaaccgcccgatggttctacatcgcgatgggggtcatcatcgtcggcgtatggcttctttccagctacgagtcgtccaacgagggtggagcgacccctcgctaa

SEQ ID NO: 2692 - DNA, 525 bp, BradyrhizobiumColbertium
atgatgaggcttggccgagcaagtttctacaacgcgttcggttcaaagcacgagctcttcatcgaaacacttgatctctatcttgagacgctaacggcgcacttcgaatcgcttctcgcggcagaggataatgccgaaagcgcacttgtgtcgctggtcgatggaatcctcgccattgcgaagccgaccgacgacctttggcggggatgtttcatcggcaacactgcgctcgaacttggagcggccgacccgaaggtggcggagcgtctcaagattggaatcgcgtctgtgcgttcgctgtttgagagagcgctctccctgccgttgcgaccatctcgcctgctatcagaggactcaagacgcctgcgtgcattgcagtgcacggcaagcctccaaggcctcctcgttctcgcaaagtccggcctgccggcagtcgaactgcaggccatgcgcgacgcactgatcaacaccgcattgcaatcgccggatgcgtcgacgcgtgccggaagaggaaaagggaaatga

SEQ ID NO: 2693 - DNA, 720 bp, BradyrhizobiumColbertium
atgttcggcacgctgggcctcgcgttcctggcgggatgcgtttcggtcctgtctccctgcgttatccctctgcttcctgtggtgctgggcgccgcggttgcacagcacaggcttgcgccaatcgcgctcgcctttggtctggcgctatcgttcacggccgtcggcatctttgtcgcgaccattggcttcacgcttgggatcgatgggggcgtgtttcggaacgctggcgcaatcgtgctggcacttgtgggcggcctgctgcttcttcccgcgcttcaaactcgtctggccgtggcggcaggtcctgctggaaactgggtcgatcagcacttcggcggcttctcatcgcaaggcatttccggtcaatttggcgtcggccttctcctggggtttgtctgggcaccctgtgttggtccgacccttggcgcagcatctttgttggccgcgcgtggagagaatctcggcgcggttgcggtgactatggctgcattcggtatcggcagcagtgtgccgttgatcgccctgggattgttgtctcgcgagaccgtgcttcgtctccgctccggcctgctcggagctggcaagaatgcaaaatacggaatgggtcttctcttcatcgcaatggccgtcgcgattttgacgggcgctgaccaccggctcgaaacggtgctggtcgactggtcgccatcctggctgaccgcattcaccacgcgcttttga

SEQ ID NO: 2694 - DNA, 396 bp, BradyrhizobiumColbertium
atgaacgtcgtgcgttccctcaaattggccatttttgcctcaaccgccctgatttacgcgctgccggcgctcgccttcgacgcgcgcccctttgacggtaaagccttcgaggccgcacaggcttctggaaagcctgtgcttctggaaattaccgccccgtggtgcccgacctgcagggcgcagaagccgatcctggagaagctcggagcagagcagaaatttgcgcccatcgtcgcctttaccatcgacttcgactcgcaaaaggatctcttgcggaaattcaatgttcgcgcccaaagcaccctgatttcgttcaagggtaaacaggaagtggcgcgttcgaccggcgagacgactgaagctgcgatcgaggatcaactcgataagtcgatctag

SEQ ID NO: 2695 - DNA, 975 bp, BradyrhizobiumColbertium
gtgaaggccgtcggcgccgcgacggcgctgttgttgagcacgccggccttcgccggctgggagccgaccaagccggtcgagatcgtggtcgcggcgggcgcggggggcgcctccgaccagatggcgcggatgatgcaggccgcgatccagaagaacaatctgatgaagcagccgatggtcgtctcgctcaagggcggcgcctcgggcgcggaagcgctgatgtacatgaagtcgagcgaaggcgatccgaacaaggtgctgatcgcctattcactgatctacatgctgccgctgtcggcgaagatcccgttcaactggcgcgagctgacgccggtgtcggtggtcgcgctcgaccaattcgtgctgtgggacaacagcgccggtccaaagacggtgaaggaatttgtcgcagccgcgaaggcggcaagctcgccgttcaagatgggcggcaccggctcgaagcgcgaggaccatgtgctgaccgtcttcctggagcagaagacgggcgcgaaattctcttatctgccctacaagtccggcggcgaggccgccacccagctggtcggcaaccacacccaggccaacgtcaacaacccgtccgagaatctggaagtctggcgcgccggtcaggtgcggccgctctgcgtgttcgacaaggaacgcatttcctacaccagcaaggtgaccgatacccagtcctgggccgacattcccacctgcaaggaagagggcgtcgacgtgcaatatctgatgctgcgcgcgatgttcctgcccggcaaggttacgccggagcagcaggcgttctacgtcgatctcttccacaaggtgacgcagaccgccgagtacaaggagtacatggaaaagcaggcgttgaagccgatcttcctcaccggcaaggacatggtgcaattcctcgaggaggacgatgcgctgaacaagtcgctgatgacgcaagccggtttcgttgcgaagtag

SEQ ID NO: 2696 - DNA, 795 bp, BradyrhizobiumColbertium
atgaacgcaccgacgaccaacgaagatctgctctactccgtccaggacggcatcgcgcggatcaccttcaatcgcccgcaggcgcgcaacgcgatgaccttcgccatgtacgatcgcatggcggatatctgcctggaaatcaacgccgatcggtcgatcaaggcgctgatcctgaccggcgcgggcgacaaggcgtttgcctccggcaccgacatctcgcagttccgtgccttcaagaccgcgcaggatgcgctcgattacgaggcgcggatcgaccgcgtgctcggcacgctcgagcagtgccgtgtgccggtgatcgcggccattgccggcgcctgcaccggcggcggtgccggcattgccgcctgctgcgatcttcgcatcggcaccgagacgacgcggatgggctttccgatcgcgcgcacgctcggcaactgcctgtcgatgtccaacatcagccgcgtcgtcgcgctggttggtcctgcccgtaccaaggatctgatcttcaaggcgcgcctcgtcgaggcgcaggaagcgctggctctcggcctgctcaatgaggtcgtgcccgacgtcgagacgctacagcgccgcgccgacgacacggcgaagctcgtcgccagccacgcgccgctcacgctggaagcgaccaaggaagcggtgcgccgcatccgccgcacgctgtcgcgcgaggagggcgaggacctgatcctgaaggcctatatgagcgaagattttcgcgaggggatggatgccttcctcaacaagcgcgcgccggtctggaagggcaggtaa

SEQ ID NO: 2697 - DNA, 1200 bp, BradyrhizobiumColbertium
atgaccgtgcatactggaaggcatttcctacagattccaggaccgaccaacgtacccgatcgggtgctgcgggcgatggacatgccgaccttggaccatcgcggtccggagttcgccgaactcggtttcgccgtcctcgccgcgatgcagcgcgtgttccgcaccaagcagcccgtgatcatcttcccctcgtccggcaccggcgcctgggaagcggcgatggtcaacgtgttttcgccgggtgacaaagtcctgatgtgcgagaccggccagttcgccgtgttgtggcgcggcattgccgacaagttcaagctcgacgtcgacttcatcccgagcgattggcgccatggcgccgacctcgccgagatcgagacgcgcctggctgcggacaagcagcacgcgatcaaggcggtctgcgtcgttcacaacgagacctcgaccggttgcgtgacgccgccgctggaggtgcgcaagctgctcgatcgcatcaagcatcctgcgctgctgatggtcgacaccatctcgggactcggctcgatggaatacgagcacgacgcctggggcatcgacgtctcggtcgcgggttcccagaagggcctgatgctgcctcccggcctcggcttcaacgcgatctccgagaaggcgctcagcgttgccaaggccaatccgggcatgcgctcctattgggactggcaggaggtcatcaacttcaacaagctcggcaccttcccctatacgcccgccaccaacctgctgtacggcctgcgcgaagcggtcaagatgctggaagaagagggcctggagaacgtctggtcccgccacaagcgccacagcgcggcgacgcgcgccgcggtcaaggtctggggcctggagacgcaatgcgccgatcccgccgcgcattccccggcgctgaccggtgtgcgcgtgccggaaggacacgacgccgacgccttccgcaaggtagtgcttgaaaacttcgacatgtcgctcggcacgggcctgaacaaggtcaagggcaaggtgttccgcatcggccatatcggccatttcaacgatctgatgctgatgggtacgctcgccggcgtcgagatggggctcgacctcgccaagatcccgcatcggagcggcggcgtgctggcggccatggatgtgctgaagggacgcgacgttttgccgatgacgaaggcccaagttgcttag

SEQ ID NO: 2698 - DNA, 3036 bp, BradyrhizobiumColbertium
gtgccggcgaacaagcgaaagtggaccatggcggcggaagtggctggaaaattgccgaaatcggcccagaaggacggcctggcggcgcgtctagcccgggaaatcaccggtgacgtcctgttcgacccctacagccgcggccgctacgccaccgatgcctcgttctaccagatcatgccggccggcgtggtggtgccgcgcagcatggacgaggcactgcgggcgctggcgatcgcccgcgatcaggggctgaaggtcaccccgcggggcggcggcacctcgcaatgcggccagaccgtcaacgacgggctggtaatcgatctttccaagcacctgaaccggatcctgtcgctcgatgtcgagggccagacctgcgtggtcgagccgggaatcgtgctcgacgagctcaaccggcagctcaaaaggcacgggctgtggtttccggtcgacgtctccacggcctcgcgcgcgaccatcggcggcatggccggcaacaattcctgcggcgggcgcagcctgcgctacggaaccatgcgggacaacacgctgtcgatcgaggccgcgctcgccgacggcacgctgagccgcttcggcgaggtttcacgcgatctttcccttgtcgaggtcatggacagcacccgcgcgctgttccgcgacatgctcgatctcggcgcacgcgaagccgaggagatctccgcacgcttccccaaggtgcagcgccgggtcggcggctacaatctcgatgcgctggtgccgcgcaacgccccgaataacatggcccatctgttggtcggctccgaaggcaccctcgccttcaccaccaaggtcgagctgaaactgtggcccgtgatccgcaacaaggcgcttggcgtctgccatttcggcagcttctacgaggcgatggacgcggcgcagcatctggtgaagctaaaaccgatcgccgtcgagctggtcgaccgcaccatgatcgcactcggccgcgacatcgcgatgttcgcacccgttatttccgcagcgatcaagggcgatccggacgcggtgctggtggtggagttcgccgaagaggaccaggcggataatctcgtgcgactcaaacagctcggcgagctgatgggcgatctcggcttcggctggaacaacgacacgcgcaaatggggtggcgtggtcgagatcgtcgagccggcgctgcagagcggcattgccgattttcgcgccgcggggctcaacgtcatgatgtcgatgaagcaggagggcaagccggtctccttcgtcgaggactgcgcggtgccgttgccgcatctcgccgactacaccgcccgcctgaacgaggtgtttgccaaacatggcaccagcggcacaatgtatgcgcacgcctccgaaggctgcctgcacgttcgccccgtgctgaacctgaagctggacaaggacgtcaaggcgatgcgcgcgattgccgaagaggcgttcgcgctggtgcgcgagtacaagggctcgcattccggcgaacatggcgatgggctggtgcgctcggaatttcacgagagcatgttcggcgagcgcctcgtcgccgacttcaagtacgtgaagcagcgcttcgatcccgagggcgtcctcaatcccggcaagatcgtcgatgcgccgaggatggacgaccgctcgctgttccggttcaagcccgattatcgcgtgagcgagctgagaacagagctcgattggtccgcttatcccggcgcggacggcggcttccagggcgcggtcgagatgtgcaacaacaacggcgcctgccgcaagctcgaaggcggcgtgatgtgcccatcctatcgtgcgacgcacaacgagaaggatgtcacgcgagggcgtgcgaacacgctgcggctcgcgatctccggtcagctcggccccgatgcgctttcctccgacgagatgatggagaccttaaaactttgcgtctcgtgcaaggcctgccgccacgaatgcccgaccggtgtcgacatggccaagatgaagatcgaggtgctcgccgcacgcgcgcggtcccatggcctgacgttgcgcgaccgactggtcgcgtacctgccgcgctatgccggcctcgcctcgcgcttcgcgccgttggcgaatctgcgcaataacagcccgctcttgcgaaggttgttggagcggattgcgggcatcagcgcgcgccgcgctctccccgccttccgcagcgatgtgttcgcatcgccggccgacagcgtcgggcctgagggcggccgcgaggtcgttctgttcgccgatacgttcaaccgcatctatgagcgcgagaatctcgacgccgcgctgcgcgtgctcacggccggcggctatcgcgtgcacctgccgaagcaggcaagcggcaccaggccgctctgctgcggccgcaccttcctgtccgcgggactcgtctctgaagcgagggccgaactggatcggctcgtgaccgcgttcgcgcccttcgccgcgcggggcgtgccgatcgtggggttggagccgagctgcctcttgacgctgcgggacgagctcgcttcgctgcgcaaggacgaccaagccaaggctgtcggcgctcacgcgctgaccttcgaggaatttctggtgcaggaagccggagctggccggctgcagctcccgctcggcaccatcgccaacaaagccatcgtgcacggccattgtcaccaaaaatcgttcgacgccttcaagccggtcgagcaggtgctgcgcctcgtcccgggcctcaaggtcgaaaccatcgaatcaagctgctgcggcatggccggcgcgttcggctacggcgccgacacctatgacgcctcgatcgagatggccgagctgtcgctgctgccggccgtgcggcgcgcggaccagacgacgctggtcgtcgccgacggcacctcgtgccgtcaccagattcatgacggcaccggacgcgaggcacttcacgtcgcccgcgtgctcgcgatgagcctcgaccgcgccgaaacccattccacctctcaagctgcaaaggaagccagcaatgactga

SEQ ID NO: 2699 - DNA, 429 bp, BradyrhizobiumColbertium
atgactgacctcacgctcgataccgctcgcaagatccttgatgccgccttcgcgaaggccggtgagctcaagctcaagccgctggtcgtcaccatcctggacgcgcggggcgtgctcaagctcgcagccgcgcaggacggcaccagcctgatgcgcgccgagatcgcccacggcaaggcctatggcgcgctcgccatgggcatgggttcgcgggccctgttccagcgcgcgcaggagcaggcgtatttcatcgatgccgtgaacacgattgcaagaggcgcgctggtgccggtccccggcggcgtgctgatcatggacggcgcgaccctgctcggcgcggtcggcgtctccggcgatacgtccgacaatgacgaggcctgcgcagtggccgggatcgaggccgcggggctgaaggccaacgcgggctga

SEQ ID NO: 2700 - DNA, 396 bp, BradyrhizobiumColbertium
atgttcgccgccaaggcagcgatggcggatatccttggatgcggggttcatctcgtctcgccgggaatgatgcgccgcatcaggggcagccagagcaaggccggcgaatcccccctcgagtggctcgcccggatcgctatcattgataccgtcgccggcaacatctcggcggacgagcccgtcatcgtgcggcactccggcatcatgggtggcaaaccggtctttcggggcacgcgcgtgtcgccggggcccgtctttgccctgctggccgacacgtcgatcgacgagttcgtgcgtgcgaagtacccgtcgctagaacgagacgagatcacaaccgccctgcagcaggcctgccgtctgctggagcgaaatgcgccatgggtagagcaaggatga

SEQ ID NO: 2701 - DNA, 120 bp, BradyrhizobiumColbertium
atgaccgtcgtcaacatctgtctcgtcgacgcgcccgcggactgctcccccgcgtcgcagaccttcgccatcaacaatggtccgcagagggcgctgcgacggccggcatcagcaagctga

SEQ ID NO: 2702 - DNA, 1527 bp, BradyrhizobiumColbertium
gtggaaaacgccgtctcgacaggcgcggcggcggattccgccgactgtgacgagcgcctgaagggagtaccgcgccttctgcgctatgccatgctggtcaccgatggtagccagcacgtcatcgagcggctgatagcagagatccatgagctgtgcccgcaattgccgcacaccgtcgcttgggcggtcgcgcgcacgcttgacagcgcattagagttggcggccgagctcgaccatcgtgcggtcgctcaggaccagccgaacttgcgcagcctggccgactgcgtccggctgctgtcgctgccgacgccgcatggttccgactatatcgaggagcaccgaagggtcggcaaggcgctagtccaggctttttatgcgagcgccaggcatgtggagcaggagctctgctgcgatctcgagggattcacgttcggctgggcagcgctgccggcctgcaccggcatgctgtccagaagggcgtcggcggcgacgaatgcggcctatcttggccgccgcattgcggagcagcgtgtcactgccgcgaaggcggcagtccggcggaagctagcggaagagcaccggaaaaaacgggaggccgaagagcaggaaacggcagccaccttgcaagtgacgccggcggcgaccgcggaagccattcccgccggccacgtcatcgtggcccacctcgagaagagcgagatgatgaatcccaagctgaaggaaattctcaaaccactcgcgcacgtcatcaatacgcccctgccgctggtcgaggcgccgccgctgcttagggtccgcaacgcgcttgcattcgagtttccctatgcactgaacgtgatcgacttcgcgctggccgaccttgtcggccgcgcgaccgttcgcctgcggccgctgttgcttgttggtgatcccggcgccggcaaaagcagattcgcccgtcggctcggcgaaatcctcggcgtcagtgtgtggcgggaggacgcctcgcgctccgatggcgcggtgtttggcggcaccgatcggcgctgggattcggtcgaaccctgccatccctttctcgcaattgcgcgaggtaaaattggaaacccgctggtgctcattgacgaactggaaaaggcgggcacgcggtcggactacggccgcttgtgggattgcctgctcggcttcttggaagttgagaccagcgcccgctatcctgatccggcacttcagacgaccctcgacgtctcgcaggtctcctacgtcgcaactgccaatagcatcgagccgttgccctcgccgatccgcgaccgctttcgcgtcgtgatgttcccgaaaccgtcagccgacgacctcgacgcgctgctgccggctgtgctggatgacctcgcacgggagcgtggcctcgatgcggcctgggtgccgccgctggacggcgtcgagcgcgccgcgatcgggcagagttggcgcggcggctcgatgcggcggctgcgccggatggtggaggcggtcctgcgcgagcgcgatcagcgggcagcgcgaaattga

SEQ ID NO: 2703 - DNA, 612 bp, BradyrhizobiumColbertium
atgcgtgacacgacagacgcccagaccccgaacgatttttttatctcggccaagaccaccactgcgatccctgtgcgacacccgacagtccgggatgcgctgattcaggcgtccctcgatccgcaggtgcgttccatcgattacgtcgccagcgcccaggttgcctccgcgcaggtcgcgctcgatgccgtcgtcctccagcgcgagcatggtcgttatgtcctcgacatcgtgccggcgcgacgcgtcctcgacctcgacgagggaggcctcgcgctgatcgcatgggatgagctcaagctcgagccgcttgaagtgacggctgaagagctaagccgcgagccgcggcgcagcaatgcgaacctggtctggacgtatagcggcgtggcagttccggtcggcgttcgcctgcgcatccagcaagtcctgctcgaggaagggccgatggcgctcggccagctcctgaaggctttggacggagagggtgagcccgcggtagcagtgatggcgctcgcctgcgccaatctcgtctgcctcgatctcttctcccagccgctgagcccgaccacgctcgtccggctctgcgtacaagcgggcacgcatgggctctga

SEQ ID NO: 2704 - DNA, 795 bp, BradyrhizobiumColbertium
gtggaactgacgcgaggctgggacctgccggctcccgatgcgcggccgcggttcgacgtcctggtggtcgccggcgatctgatcccccgcatggagcggggcgtgaggtggctgcacgaacgcgtccctgatcggccagtgatctacgtgcccggcaaccacgaattctacggcgccgatatcgatcggacggtcgagaaggcgagagcggcagcagccggcacgaacattcatgtgctgcagcacgactacgtccggatcggtgatgttactttcgccggcgcaacaatgtggacggatttcgatctgttcggcgacgcggatcgcgccatgtttcttgcgggcgagcggatgaacgatttccggaagatccggatcgggggctatgccagacgattccgaccgccccacgcgctgatccggcatcagcaagcccgtgcattcttcgaatcgcagatgcgcgggccccgtccgggcaggctggtcgtgatctctcatcatgcccctcatcccggcgcgccttcgccgctgtccgatcccccgaggccggacgagatcctcagcgccgcctatcgcagcgacctgaccgctctcatgcgcccggccgccaatgatggacgcggcacgctgaagcccgctgatctctggatctacggccatacccacgcgtccgatgacaccgtgatcggcgcaacgcgcgtggtttcgaacgcaaaaggctacggaccctggccgccgcagcagcgcgcctgggacaaccggagcttcgatccaaaactgactatcgagatctga

SEQ ID NO: 2705 - DNA, 894 bp, BradyrhizobiumColbertium
gtgatggcgcgtgacgagagggattggcggggcgaactcgtgcgggcctacccggatttatttcatcccgccggcgatccgccgcctgcgcggaccttgccggacgtcgccgacggctggcgcgatctgctggagcgtgtctgcgcgcgcatgcaagcggcgctgcagccgggcgagacgatccggatcatccagatcgacaagaagtccggcagcctgcgggtctactggcgcggcgacgtcactccgcagaccgccgccaggctgcacgaagcgattgcgcttgccaaggcacgctccacctgcacctgcgagtcgtgcggcgcggaggggcagctttgctttgttggcagtgtctacatgatccgttgcgccgcccacgtccaaggcgagctgattccgaccccgccaggccgggagaacgtccaccttgtccgtgtctcgatggcggatggctaccggatagtggcgcgacgctacgaccgcctggctgaccgtttcgctgacgaggacccggaagttcgagaaacaaggaggcctgagacaactgttaccgcggattggcgcgtcgatctcatgcaggctcatccaaagctgttcgcgatcgtgcaggccaagcctcaggcgtcgttcggttatccatcctgccggtcagggtggcgagatgttctcgaccagctttgccggagaattgaagccgcattggcgcataacgaaactttcaagttcgtccgcatcggcaccaaactgggcctgctctggatcaagtgggagggcgaggtctcgggcgagagtcgcgcgaagatcgaagacgccatcagcctcgccgtccagcgcgcaagctggacctgtgacatctgcggcctggagggatcggtcgctgcagcatgctga

SEQ ID NO: 2706 - DNA, 201 bp, BradyrhizobiumColbertium
atggccgagcaaggaaaacccgcaaaagcaggcaagacggcggtcccgcagccaagacgcaacttcttcgcaaccctggacgccgagctgatcaaatcgatcaagcgcgtcgctctcgaggacgacaccagtgcctcggagatccttgaggaggctgcgagagactggctcgaacggcggaagaagtcgccaaagcgctag

SEQ ID NO: 2707 - DNA, 648 bp, BradyrhizobiumColbertium
atgtccaattccacggcaatgccggggcacgagccccggcaagatggcgaggcccgtctccgcggccgtcttggcgaaggcggcgcgccgatcgagagcaccgcgccggctggaggggcggcgacgcatccgggtgcggatcacgatggccggatgctcgatgtctcatcgccgatcgtccgtgcgctcgtcgagatctcgccgctgcgctggtggcggtcgatgccggcggacgcttttcgggcggcggagtacctcgcggtccggtccaccctcgaggaggtcacaaggctgatcgaaggcgccgaggtcgagccggcgctgcaaggggatgccgaagcggccatcgcgctggcgcgctcattgatgccgatcaagcgcttgggcgggatcaagaccgacattgcgatgactgccttattgtccctcgcgctcgagggggagcccaggtgcgcgctcgtgctcgctcacgtgatcgatcgcgccgagcacgatgcccaaaaagcagatcaactgtgcggctcctggttggcgtttcgcttcggccgctcggccagctgcggcggcttcagtccggccgagacagccttgctgaagacgctgcgggccttcgatgccctgcgcccgggcagggaaggccgcgcatga

SEQ ID NO: 2708 - DNA, 933 bp, BradyrhizobiumColbertium
atgaaatttcccaacgagaccatcccgatggtgcagccttgcacccacacgatctatcgcccgttcggtggcgtcgaggattatcgccagatccacgatccggccggccggctcgcggtcacggcgtttccgctgtcgatggccaggagcctggcggcgacctgcgagctgtggtccgcgtgctacgtcattgccgggcgagacgaagcctatatcggggagagcaaccgcgcggtcaggtgcgtcgccgagcatgccgcggctgcctccaacatctttggcgcggaggcctacctgctccacgcacaggagccgcacgtactgccatggtcggcgcgactccgcctcgcgcatcgtttgaacgaactcgccaaagaggcaggtctggtcaccctggccaacaccgttgagccgcggggtcttccttgcccgggagaacacgccgcagccctggagcggctagtggccgatggccgccgcctgctgttcgatgccggctgccggatcttcaacgccaaccttgtgaggcagctgccggcggaggccgagttcgatgacaatcaggctgtgaatgcggtcgtcgagaccggcttgccgatggcgccgccagccgaaggcgagcttgaattcgattattgctgcatctgggcgcgcgggcaccacgatcgcgaagggttcgtggtccgggccggatcggaggtgcgcaacatcgagaccccaagcctcaggcagaacatcaaaaagctccgcgcggatctcctcgccacgggcgtcgtggtaccgatcgccggcatcaaggatcgcctgcgcttccaggtcgactggcgcttcttttctgccgcggtcgcagccaagttcgtcgcgggagcgcatgtggccggcaccaagtgggtgcgcccgcgcactcccgggccgatcgcgggcgcggagtag

SEQ ID NO: 2709 - DNA, 150 bp, BradyrhizobiumColbertium
ttgcagcttgcctggcatgatccgcagagatcgaggacgccaggattggcgtcctcgatgcgcggaattgccagcgcaggccacggaccgcgaccgattcatgcgacgccgtcgcgccgcatgacgtcgggcctcgcgacccgcgcctag

SEQ ID NO: 2710 - DNA, 1890 bp, BradyrhizobiumColbertium
atggcggtgcggctggatgtcgaatgcgtggaggcaagcgacggtgagccgaacccgcacgctcacagctggctctcgcaacgcgtgttgaagccacacggcttcggtccgaaggagcgcatcgaatggagccggctgttcctgtacgacgacggcaggtacgtgcgggccctgatcggggggaggcttacgcttggctgcgcgattctgggcattgacgcctacgtcgacccgcgccggaataaggcgaagggagagggaagtccggagaagcggcggccgcggtggatgtttcgcgccagcaatgagggcaggaaggtcgaggcgatcgaacagctggcgaagggccgagagctgaagaagaagggcgaggcgacgaagcaagatccagagccggaggaggggagcgtgatcgtgacaaacgccgccatgtattctgtccccaaaaagcggtcgggcgaacttagggaaaagttcgcggatgcggcgcagaaggcgggttacgaggtttatgcgcgatcgggctccaatgcgctggcgctccatgggacgtctgtcactttcgcgggcggcaaatttaggatcgcggcaacgggcaggtcggaggatgctgctatcgttgcgaggttcgctcgcgaactcaactggccagccttggtcgtgaagggaggtgcacgccttgctgacctggtggcaatcgaggcagcaaaggaacacgtctttatggtcaatcgcgccccccgcggccctgcccgggatctcattgcgcgggcgttctacagcgagatgaaggacgacattgcgcgccacgatctgctcgggatcgccgcagggttctacgcgaagttcgaggcgaaccaggctgccccgcaagtagctgaagcgctcgatgctgccctgcaggtggatgtgggctgcgatcttcaaatgccggcaaagccggtggtgccgaacaccgcaccagcccggtggagcaatgtcgctgagccggcatcggtcgctgtgccgaccgcaacgtcggagaacgagaaacacgtaaccgtcgggtgggatgatgtgaggcgagccgctgctttctcgtccgaggcgatcgctccaacgtctggagatcgcagtgaggctcgccggccgtccagagtgggcgggccctccaaccctcctcgatcgccggcagacctgagggtaccgagcaccgctccaatcgaggcgagcgaggtcggcgcgctcgcttcagcggtcgcgcccattgcgagcccagggaatggcagccggcgcgtggccaccgacggggacgtgaggcgagccactgcttcctcatccgaaacgatcgcacgagcgtccggacatcgcagagaagcctcccgattgcctcgactgggtgtggcatcgaacagcccttctcgatcgccggcaggcccgagggctctgagcaccgctccgctccgcccgagcgaggtcgccggcctggcttcaacggttgcggccatcgcgacgtcgggcaacgacagcccacacgaggccgctggtgccgatgcgaggcgaaccgccggttcatcgtccgaacccctgggaggcttcgaaatgccgttgcaggccgattcctggaaggtcaaacccgatccaatcaggtcggggcgcgatgcgcttgcgcttgaggtcggtttcaagcggcagcggcaaattcacgaggagctcgacgaattcctgcgtcggaagacggggcaatcgcccgggcttcggcgtgagggcgccgcttcgccgaggaacgcgaagcttcagcagccgacgaggcctccccagccgatcccgcagtggcctgccgaaattcccggcctcaatgatgaggcggtcgagacggaggagcccgactaccaagcgccgcgtttttga

SEQ ID NO: 2711 - DNA, 156 bp, BradyrhizobiumColbertium
gtgagagtcgtctgcaatctcactggagacgaggggcgcttcggaggggctgaagcgcttcatccgcagcgtctcgccgccggggtgatctggctgaggtcgattcaggtggtcgtgctgaccggctgtgaccggcaggccgaagggctttgttaa

SEQ ID NO: 2712 - DNA, 360 bp, BradyrhizobiumColbertium
ttggtggtctcgaaagccaaccccgcctggaccgtccaatcgattgacgaggggcagaattcggatgacggcctgaaggccaagctccgcttcttcaacctcgtgcccggctgcgcagccattctgaagattgcggacggccccacaatcttcgagcaaagtccatttgcctccgtccggtctcgggccatcaatcccgtatccgcacggcttgaaggatcctgcggcgagggcagcgccagcctgacgcttcctcaattgcgtgccggggatcactacagcgtgttccttcggaaggagtcccaacggcttcgtctcaccggcggcttggatgagaccgagcctcatcgggagcgctag

SEQ ID NO: 2713 - DNA, 1380 bp, BradyrhizobiumColbertium
atggtattcgtcagcgactcctttgtttttctcttcctgcctctgttcctaactgtctacgcagttgtttccgcgcgcctgcggaatgccacgatcctcctattcagcctcgtcttctatggttggtggcggttcgattttctccccctcctcattgcgatcgcgtcctggtcctgggctacggggctctggatcgtccgaagctcaggccgcgaacgtcagcttgccctgaccgcggccattgtggccccactcgcaagtctgatctggttcaaatacgccaaccttctcgttgaaaccgcatcggtcttaggtgcaccggtcgagcattggacagctattccattgcccatcggcctctcattcttcgtgttcggcgcgatctcatactcggtggatgtcttccgaaagaccgtcgccgccgagcccagtttcgtgaactacgccacctatcaggcaatgttcggccatctcgtcgcgggtcccgtggtgcgctatcagtccgtggccgagcggctgtcttcacgcaccttccacctttcggagttcaccgagggctggcgccgcttcatgctgggtttcgcgcagaaagttctccttggagatacactcgcgccactcgtcgatgccggctatgcgctgcccaaccccagcgtggccgacgtcgcgttgacggttaccgcctacacgctgcacctttacttcgactttgcagggtacagcagcatggccatcggtctcggactgatggtcggcttgaagtttccggagaatttcgacaatccctatctgagccgatcaattaccgaattctggcgccgctggcacatcagcctgtcgagttggctgcgcgactatttgtacataccgcttggcggcaaccgcgttggcaaggttcgctcctacttcaacctgctgatcaccatggcgctcggcggcctctggcacggcgccagctggacttttctggtctggggcatctggcatggtttggggctgatcgtagcacggctctggaacgtagccggcgcgcctccgatccccacattcatttcccatctgctcactttggccttcgtgatggtcggatggctcttgtttcgcgcccaggactggcaggctgcgcaaacaatgttgtccggtctgctgggctttcatggacttgccctgtcatcgccgatggctgctgctgcaaggccaacggagttgctgacagtctgcattgggctccttgcggtctacgctccgacgctgccgccctctcgtctgcgagcctatatcgcccgtccaccgttcgaattggcgctcctcttgtggctatgcgccttgtggacgatacagagccgcaccgttattccttttctgtatttccagttctag

SEQ ID NO: 2714 - DNA, 1053 bp, BradyrhizobiumColbertium
atgctcagggttgtcctcgtactcgcagtgatcttctcggggctggtctccgtgctgatcagaggtcatggttctctgggcgaagtgctgaagacgacgacgttgaacgaccttgccgatggtcgcttcgcccagagaatcgacaaggcggttcttggtgcagtaccacgcagcactgacctggacggcctcgtttccggaatcgaatatcgattgctcggcgatgccggaccacaggtccgcgccggttgcggtgattggctcttcaccatggaggaattgcgcgcagagcgtcacgccggagccaacatggcgctccgggcagaactgctgcgggggctggcgcatgcagtcagacaatccggcacgcgtctcatcattgtcccggtgcccgacaaagccgcgcaggtcgaagacaggctctgcggaatcactgcagcgcaatcgcgattgcgagaccaattctggaacgagctcggccgcatggaaggggcggttgtcgtcgatctccgcgataactggccccgtccaggctattggaagacggacacacactgggatcaaaccggcgcccgctttgctgccgagcggatcgcacaagccgtcgcacacacgctcgaacccgcgccagagacggtgaagctgattgaagggaccacgcgacagcgcacgggtgacctcgccagattgtctgggttgaccgatgcgccacgtgtgctcgcgccacagcccgagcaggagcgagaattgaaggcggacatctcgcgatcaggcggattgctcgacgacacgcccgaaccttctatcattctcgctggatcgtccttttcgatgaattcggggttcttcgagtatttccagaactcgctcgctcgagaagtcgcgcaggtcagctggcctggcggagggttcgccggcgcgctgctagaacttctcgagacacgatctggcagcttggagaaagccaaggtcgtgatatgggagtggccaatgcgatcattgaccttccctccaagcgaagccgagaaaaacttcctacgccggatcaggtga

SEQ ID NO: 2715 - DNA, 981 bp, BradyrhizobiumColbertium
gtggcgcaaagtgtaacgcgattgatggtgattactgctgccgcgctcctggcgtccgcaccgctgacgtcggtcgcaactgcgcgcgatgccgtcatcgaaggcaaatccaactggctctttgccggctgggaaagcctcaccgtcgcgcgtcctgacgccgagcgaagctccatcgagctgatttcggaggtcgggcagctcttggctcagaaaaatgtcaagcttatcgtcgccattgtcccgctcaagcccaggtactatgaaagcctgcttcccgatggctcaaagctgtccgacatcgttcggcagcgttacgatcgggaactcaccggactgcgcactgccggcgttgcagcgcccgatcttcgagacgctctcaagaccgtcatcgccgacaagaaggaggtcttctaccgcactgattttcattggacgacgtttgccgccgaagcgtccgcggatctcgtcgccagcgcaatcaccgccgacggccccctccccggcaaagccggaagcggtgcgcagcttggcgaatggatgaacgatcgccaccttggcgaccttgccgccaatttcctgccgccggatcgaaaacgggcgatcggccccgaagcctacgttatccggggccccgccaaaccagccgtcggattgctcgatgaggatccggctccagtcgccgtcgtaggcaacagctttgtgcaaccgtatttcggctttccgcagcggctgtccagcaagatcgacaggccggtggcgctgaagtggaatcccggggatgtcggaccatgggccacactcctgcaattcttgcgctcagccgaattcaggacgtcgccaatcagatacctcgtttggcagttcaacgaagcgcaagtccagaacgggcccgacgccgtcggcgaatgggcttcgcagagtatttccagccgcgtcgagtggcgaatgaaggttagcgatgccttgaaaaatcggtaa

SEQ ID NO: 2716 - DNA, 2286 bp, BradyrhizobiumColbertium
atggcggcgctcgcaactttttcctcgaaccaggagctggagtcccggcaatccagtattcgccagcggcttgcacagcaaccggccggcgagggctacaaggcacttgagcggggagacccaaaggccgctgttcgcgccgcccgcaaagccgtggagtatgggccggatgtgatgtcataccggctgcttctgcttgccgcccaactcgccgacgacaaccttgttggtgccgcagagaccgcctcggaggcgatcaaactcgattccggcaattacgttccgctcgtgtggcgggcatatatttcccagaagctcggcaaccggacgctcgccgtcgcagacttcaatgcggcactcgccgttcccgaccttaccgacgccgagaagaagcagatccgattgattgcatccgatgcggccctggcttccggcgacgcccgcgcggttcagatcctgcttcagccatatgccaagacagatccatcggtcgttacgcggattggcgatgccgatgctgctgccgaaggcaaggcgaccctgaagggcgacggcaggctcatgccgatgccggtgcaggattgccgcgacacgccatacggctcggtctgcagtctgcaggcgccgctcgttcagagcatcgccacgcccatcgacaagaaggccgaaggcatggaggcggcaggcaaggcctacgaggccgcccgtgccaagaactacagcgtggcgatcgagcaagccaagaaagcggtggcggataccccggagatcgccagcacccggctgctcctcatcaacctgcagctaaccgccggtcggccggccgaggccgaagccacagcgagccgcgcaatcgcggaaggcgtggttgatgccgagatctacgcacagcgcggattcgcgcgcagccgcatcggccatgacaagggcgcaatggcagattgggagacagcgcttgcgcgtgggcttccaggcgatcaaatccggaacgtccgtctcgcgctggtcgacacggcgctgaaggccaaggatccgcaacgggcgctgcggtcgcttccgcgcgtaggcctagactacgacttcacaattcgccgcgcatatgcctatcaagctttgagccgcaaggaagaggcgctgcgcgacttcaggtcggctgagcgtctatctgtcaccaatgttcagcgcgatggcgctatccaggcacaaatcaacaccctgctggagcttgatcgcaagcccgaggcacgagcgatcttcgacgcggcgattgctcggggccagctcaaatcgatccggggcgcagatgtcgcctatatcggcgttgccgtcggcaacgataaagtggcgctggagctgttcgatcgcgcgaaggcaaacggtgcgttgccgccccgggccaccatcgatgccggctacaccgcgatgcggcagttcctaaatccaaaggcaatcgcctatctcatggagggcatcgacgcgaaggccgacggtcgcatcaacatcgacgatcagaagttgttcgaaacacggcggacggttgccgatctgacgcgcgtatgggggatcaacagctcgatctcctacggcaaggtggggtcagctcccaatcctttcctgacgatcaactcgcccgcaagcacctacacgtcccaatttggatcggagctctactaccggccggaggcgttcggaaaccgtaacggcgccctgttcgaggttttcggccgcctcttcgagacactgtacgacgaggcgggcggacctacccggctacgtacgacgcaaggcatggccggcgcccggtggaagccgttctcggatcacaacctcgtattcgaggtggacaaactgttcaggcttggcaacgccgcccgcgacgatacgctgctgcgagcggcctattcgtacacggtcggaacggacttgcgggcaatagacacgcattggccgacctggtatatctatgcggaggttgatcgcttcttccagaagacacagctcatcggattgttcgaaggacgctttggtcacagcttccgcctggatccgatcagcaggaacctggtgttcttcccccacgcagttgttgccgccagctacgacgattcatttgctgttcgcgacgccttttctgccggcgtcggcagctcgatccgctattggtttggtgaaacgaaatatcttgcgcctccctcttactgggagctgacgctgcagtatcgcttcaggctcgccggcgacaggcgcgccgagggcatcttcgcgcaaacgtccatcaactactaa

SEQ ID NO: 2717 - DNA, 138 bp, BradyrhizobiumColbertium
gtggccaacgttatcctctcggacgtcggccacaacttccgccgcatcctcgcctggctcagggctcttttgtgcctcttcctggccactctcatcgcagccatcagcgaccgctccccgctgcaatcggcttcttaa

SEQ ID NO: 2718 - DNA, 123 bp, BradyrhizobiumColbertium
atgaactccaagttagcttcgcggcttaccttccgcgatccgatcaccttcgcaacgtcctcaggcaggggacgggcaacaccggacggcttgctgcgccatgcggtgcggcgcttcgcgtaa

SEQ ID NO: 2719 - DNA, 1527 bp, BradyrhizobiumColbertium
atgccgatcttgcgtcaatgggccgagcgtcatcctgagaaaatcgcagcgcgcgtcgccttctcgaaggacatcctcacctatggcgaactcgaccggcgagcgaacggtgtgacccagatcctcgtctggatgggccttaccgtcggcgatggcgtcgccatcatgctcgacaacgacctcacctatttcgagcttctctggggcgctcggcggcacggcgtctattacacgcccgtcagcacccatctgcagcccgacgaggccgcctacatcgtccgggacagcggcgcgaagatattctttgtcgcagcgcgcttcgccgacaccgtgcgcgcgctcaaggccaacaatactaaccggtgcgccatcttcgtgatcggcggctccgatgacggcagcttcgattatgccgccgagctctcgcgtttcgaccgcatgatcgaaatcggagacggtcccgtgggcaaggacttcttctactcctccggcacgaccgggaagccgaaaggcatcaagcagccgctgttctctagcgtccggcaggcccaggcctccggcgactgggtccgcagcaatttcaactttgcgcaggacaccgtgtatctttcgcccgcacccctgtatcacggcgcgccgctgcgcttcaccatgcgcacgctggaaagcggcgggaccgccgtcatcatgacgaagttcgcggccgagccggcgcttgccgccatcgcgcgctaccgcgtcacccacagccaatgggtccccacgatgttcttccgtttgctggcgctgtccgccgagatacgcgcccgctacgatctgtcatcgcatcgcttcgccatccatgccgccgcaccctgcccgccagttctgaaggagcagatgatcgaatggtgggggcctatcgtgtgggaatactatgcaggctcagagcgcaatggcgccacctgtatctcgactgcagaatggctcgctcatcgcggctcggtcggtcgcgcctgcgtcggcaccatccacattctcgacgaggcgcagaacgagctcggacctggccagatcggcgacgtctattttgacggcccgcaattcgtctatcacaacgatcccgagaagaccgcgcgatcccgcaacgcgctgggttggtcgaccatcggcgatgtcggctatgtcgacgaagaaggctatctctatcttaccgaccgtcgatcgcacatgatcatttccggcggtgtcaatatctaccccgccgagatcgagcaccgcctggccttgcacccgcaggtcgccgacgtagcggtattcgggattccgaacccggaatatggcgaagaggtcaaggcagtcgtccagctcaagaatccgtcgcaggcctcgcccgcgctcgcacaggatctgattgcgttctgccgggcggagctctcgcacgtgaaatgtccgcgctcgatcgacttcgagctcgaactgccgcggcaggagaatgggaagctattcaagcatgtgctgaagcagcgctacctgcagcccgcctga

SEQ ID NO: 2720 - DNA, 1065 bp, BradyrhizobiumColbertium
atgtcgggaacctcacaggccagaagccgatcagctcaaacgccgccgcgttcggcaatcgacaccggctatgtcggcctggtgctgagcggtgcgcgggaggccgggctcgacatcaatcggctcctgagacgcgcgggaatcgcgaacggtcagcttgacaggccgggcacccgtctgccgcaggagcagttcgcgcgcatgatcgcaaccttgactcgccaaacgcgtgacgaactctggctgctgtgcagcaggcccatcaagcccggcacgtttcgcatgatgtgccgcctgctcatccgctgcaccaacctgcgcgaggccatcaggataggttgccagttctatcatctcgtcgtagacgacttcgccgttcgactcgccgaaggcgagcacgacgcctcggtctacgtgaccgacaggatcgaccagccgaaccgccggcgaatggtcaatggcgccatcctgttgttcacctacggcctcatgtgctggcttgtgggccgtcgtctgcccctgatcaccgtgcattacgtcttctcggaggagcccttcagctccgagctcgagcctttctaccgggctcccatgctgttcgatcagccgcgcaccgaaattcgcttcgacgccgagttgctccatctgccgatcatgcccgacgaagaacggctgcggcggtttctagcctccatgccgaacgcgctgctcgtgcgctacagggacgacagcagcgttgccgaacgcgttcgcgccattctgcgccgcaacctcaaacgtcccatgtcgctcgaggacgtcgcggagacgctcgccgtctcgccgcagaccctgcgccgtcgcctgatcgaggaggagcagtgcggcttccaggagctcaaggatcgcgtcaggcgcgacattgcgacacatatgctcaagaaatcccgcctgccgctcgaggagattgcgctgtcgctggggttctcggagctcagcacgtttcaccgtgcattccggcggtggacagggctgacaccgggcgaattccgcgagcgtcacgccgccgcggcggacgcgcggtag

SEQ ID NO: 2721 - DNA, 876 bp, BradyrhizobiumColbertium
gtgaactacccggatgtactcaccattcaggaccgctaccaggtcaagacacctcgccccttcgcaccgggcggcgaagtcgctggcctcgtgtcagcggtgggaccgggcgtgacggcgttcagcgtcggggatcgcgttgccgcccgtaccgggacagggggcatggcagagttggtcgccgttgccgtcgaccgctgcattccgattccggacggcatgtccttggccgacggcgcggtcatgcaattcacattcgagacggcctactatgcgcttcatacccgcgcccggcttcaagcaggcgagacggtgcttgtgctcggcgccggcggaggtgtcggcatcgctgcggttcaggttgctcgcaatctcggagcccgcgtggtcgccgcagcgtcgtcggaagagaagcttgccttcgcctgtcagcacggggctgctgagggggtatcctatccggtggagatgccaaagcaacgcagcgaggttgccttacgtttgaaggctgcagtcggtccgaatggtgccgatgtgatcatcgatcccgttggaggctggctcgcggaggccgctatccgaagtgtcgcagaaggcggacgttatctcgttcttggcttcgccgccggcattccgtcgttgccgctcaaccttccgctcctgaagaactgcgacgtgctgggtatcaattggcgaacattcaccctgtcggaagatccgcggatcgttgctaaccggcgtcagctccaggactggtatgaacaaggcctgttatcgccaggaattacggccgagttctcgctgcgggagggcggtgaggcgatccggcgtcttgcctgccgacaatcggtcgggaagattgtcgtagtcatttga

SEQ ID NO: 2722 - DNA, 816 bp, BradyrhizobiumColbertium
atggataaggctttcaccaaggggctgcgtctcctggaagcacttgctctgagcgagcagccccgcggggtgacggacctcgcgagcgagctgaagctcaccaagagcaacgtgcatcggctcctgatgactttgcagtcccagggctatgtgcgccagattcccccgcacagcacctacgagctcacgaccaagatctgggcgctcggcagccatgtcatccaccggatggatctcatcaacatcgcgcggccggcaatgacgaagcttgccgagatcaccggcgaaaccatccacctgtccgtgctcgaagataccgacgtcgtctacgtcgacaagatcgagagcgctcaccatatccgcgcccatacgagcgttggcatgcgcgcacctgcgttcaccatggcgacagggaaggcgatgctcgcccatatgccagatgactatctggaacgcttccggccgcatctcaagcggtatacggaaacgacgcgaacgacgatcgaggagctgcgcgaggacatcgagctggcgcgcacgcagggttactcctccgtcctccatggcgagtggcgcgagggcatcgcagcctgcgcttgcgccatcctcggccgctccggcgaactcgtcggggcgatcggcgtatccggccccgacacccgcatcaagcgcaagcagatcaaggagtactcggtccacgtaatggaggcagcccgggccatcggcgcagccctcggctattccaacaggccggcggcgcaccctgccccgagaagcgattcgatgccgtcacatcaaccacgacgcaccccttga

SEQ ID NO: 2723 - DNA, 1131 bp, BradyrhizobiumColbertium
gtgacacagatcaacttcaactggaggaaagagaaaatgctgggaatgaaacgctggcgattgacggcttccgtattggcttcggccctgttcatcgcgatggggacgggcctggctcaagcgcagagcaacgtcgtgatcatgcaggatccgggcggcggatatggcgatgcattgcgcaaggtcatgtacgatccgttcgagaaggagaccggcatcaaggtggtcaccgtccaggaggcccgcagcggcccccgcatcaaggctcaggccgaagccggcaaggcgcaatgggacctgacgttcatcttcgaccaggagacgaagttgctcggcgactgctgcctggccgatatcgactattccaagctgtccgacgcggcgaaacagacgctggcggcgatgccggacaatctgaagcgcaagaagggcgtggcactgcaggtgatcggcgtcggcctcgtctacaacaaggacaagtacaagggggcaaacgtaccgaccacgtgggccgacttctgggacgtgaagaaatttcccggacggcgctgcatgcccgcctggccgcgtttcgtattcgaagcggcgctgatggccgacggcgtggagaagagcaagctctacccgatcgacatggagcgggcgctgaagaaggtcaaggaaatcaagccacacatcgccaaatggtggaccacatccgcacagccgccgcagctcctgctcgacggcgaggccgacatgtgcatggcctacaccggctcgatgagcaagctcgccctggagggcgccccgatcgagctgaccttcaaccagggcttcgtctactacgatttcttctcgatccccaagggagcgccgaactacgataacgcgctgaaactgctttcctggcggctcgatcccaagcgcgcagcgcagctcacctcgaccttcccggtcgcgcttccctcccaggtcgtgttcgaggcagcgacggacaagaagctcgcccgctactgggccaacaatccggacaacgtctcgaaggcaatcgaatggagcccggactattggggcgcaccctcgccggccggaaactccaccaatgaagagtacggccaggagaaactgaacgccttgctggcgcaatag

SEQ ID NO: 2724 - DNA, 1791 bp, BradyrhizobiumColbertium
atgacctcggcatcgctcggcgccctggcggggcgccctgggactctcgatctcgtcaggaggttgaaggatccggcgctgctgctcctgcccgcgctcgcgtttctggctttcatctatctcctgccgctgatcgatctcatccgtatcagcgtgagcgggccgtcgtggtcgtcctacttcgagcgggtgtttgcgatcccgctctattgggattcgctcgtccgcacgatgcagatctcggtcaccgtcgcagggctgtgcctgctgttcggatatccgactgcgctgctcattcaccgcagtcgcggcattgcccaggtcctgatcgcgactgcgatcgtgctgccctatttcatcgccatcctgatccggacctacgcctggatggtcctgctcggccgcaacgggccggtcaacaagctgctggtttcgatcggcatattgagcgagcccgtgcagctgctcttcaatcgcggcaccgtgcttctcggcatgaccgccgtgctgctgccgctgatggtgctgacgatctattccagcgtggcgcgccttgatcaaagcctgacccgcgcggcgctggccagcggcgccgggcccattgcggcgttctggcgcgtgttgctgccgctgaccttgcccggcatgggcgccggcttcctgctggtcttcgtcgcggcgatcggcttcttcataacccctacgctgctcgggggacccggtgaccagatgttcgccatgcatatcacccagcaggcagactcggtcacatcggaaggcttcctgcaggcattgggcgtggtgctgctgacgatcacgctggcggtcgtcgcggtggcgggacgcttcctcggtttcgagttcatatggggtggccgcaagctgaccgaggcaacaccaagaaccactgaccgccccgcagccgatgtcggccgccgcagcctcagcgccacagctgccgactttgtcggctggccgcttctgaggcttttcgggcggctgccggcgagcttcggaacttggaccgttcgtctcgtgggcggattggtcattgccattctcatcctgccgatcatcgtggtgatgatcatttccttcagcagcgcaagctatctgacgttcccgccgccgggcttctcattccgctggtacgagcagttcttctccgactcgaactggatgcgggcattctggacatccttggtcgtcgcggcgatgtcagccggcatcgcgatcgtgctgggcgcctcggccgccctcggcatcgtcagaagcagcattcgcggcaaatccgccatcatgctgcttctcgtaagtccgatcatcgtccctcccgtcgtgctcggcctgtcgctgtacagcctgttcctgcgtttcgatctggtcggctccgtcttcggccttgccgcggcgcatgcgatcggcggccttccccttgtcgtggtgatcctgtccgcatcgcttcaaggcgtcgataccaggctcgaacaggccgccgccgtccatggcgcatcgtccctgacggtattccgcctggtgacgctgcctgccatcatgccgggcttggctgcagcgacattcttcgccttcctgcactcgttcgacgaactggtgctgacgctgttcctgtcgagcgcggagctgaagacgctcccgctcatgctgtggggcgacatcaactatcggctcaatccggtgctggccgtggtctcgacgctggaggtgctgctggtggtcgcggggctcgtccttgcgcgacccgttctcgccacgtcgcggaaggcgacgtga

SEQ ID NO: 2725 - DNA, 1155 bp, BradyrhizobiumColbertium
atgggtgagcctgcggctcagcgcgcgatgcgctccggcgatgcgaacgttcggacattgccgaccggccgcctccgggaccgcgacgcgatcggatcgagcatttccgtccgcgaggcggtgaaaacctacggcagcttccatgccgtcgaccggatcagcatcgatatcgagccgggcgagttcatcacgctccttggaccatccggcagcggtaagacgacgctgctcaacctcgtggccggattccagagcctcgacagcggcgagattctcgtcgacggcaagccggtccacaacgtacccacgcacaagcgcggcttcggcatggttttccagagctacgcgctgtttccgaacatgacggtcagccagaacgtcgcgtttccgcttcgcatggcgggtgtcgaccgggcaactgcagagcgccgtgtcgccgaaacgctggagatcatgcggctgacggagcatgcggcgaaatctccctcccagatgtcgggcggacagcagcagcgcgtcgcgatcgcccgggccatcgtcaggaggcccaaggtcgtgctgatggacgaacccctcagcgccctggaccggcggttgcgcgaacagatccagatcgagatccgcgaccttcaccagaccatcggcagtacgatcctgttcgtgactcacgaccagggcgaagccctgacgatgagcgaccgcatcgcggtgctcaacgccggcaagatcgttcaaatcggccgaccgctggacatctaccggcatccgaccgatcgcttcgtcgcctcgttcgtcggcgagagcaatctgatcgaggcggaaattctgcagaagcgcggatcgacactgacgatgaagaaccgtgcaggatacgtattcagcgccgaaagccgggatacgatcgacgtcgggcgcgcaactgtgctcgtgcgtccggaacgcatcgccgtgtcgaacgagccggctgcgaattccacgcccgtcagcgtcacgtctgcgatcttcctcggcgagatcctgcggatcgaggcgcaaatggatgggggagatccgctcctgatccggtgcaccgacatggccgaccggcccctgccggccgttggggatcgtctgcatgtgagctggggcgccgcggactgttgggtgctcgcatga

SEQ ID NO: 2726 - DNA, 807 bp, BradyrhizobiumColbertium
gtgttgagcgagcctcgcgcaatggcgaagcacatcgagccgggcatgcgcgtggcgctgccggtcgactacgccggcgtctccatggccatgacgcggccaatgatcgagcatggtgcgggtgatctcgatctcgtctgcgtgccaaccggcggattgcaggtcgaccagcttatcggtgcgggtctcgtccggacggtggagaccagcgccgtctcgctcggtgaagcgggtggagcgccccggttcaatgctgcggtcaaggatggcgcggttcgactgaaggacgcgacgtgccccgccatccatgcgggcctggtggcggcgcagaagggcagtcccttcatgccgctccgagggctgattggaacggatctgctccgccatcgtgacgattggcgcgtggtcgacaatcccctggcggacggcggcgatccgatcgtgctgattcccgcgatcaagcccgatgtcacgatcttccacgttcccatggctgatcgtttcggcaatgtctggatcgggcggcgccgcgagctcgccgccatggcctatgcttcgcgaaccgttctcgtcacggtagagcgcatcgtcgaagaaaacctgctcgccgacgagatgagcgctgccggtgtgttgccggcactctacgtcacggcagtcgcgcgcgcaccgaagggcgcgtggccgtacggtctttggggcgagtatccggccgacagcgccgagatcgcgcgctatgcgaaggccgcgcgaacggctgaaggcttctccgcctatatggcgcaggcgcagatggagccggcgtga

SEQ ID NO: 2727 - DNA, 759 bp, BradyrhizobiumColbertium
atggcggacgttctccctcgcgaagtgctgatttgcacgatcgcgcggctgctcgatggggtcaggcatgtcgctgtaggcgcctcctctccgattcctgccgcgggtgcgatgcttctgcgcgcactgaaggaagcgggcggcgccgtcggtccacgcatctccattctcggttctgtcgagcataatttctttaccaacggttcggccgagctgttcgattgtgcaggtcaaggacggatcgacgcgttcttcctcggtggtggccagatcgacggcttcggcaatgtgaacctcgtcggcgccggtgattatccgcgctccagcgtgcgctggcccggctcgttcgggtcggcctatctctactttgtcgtgccgcgggtcatcctcttccgcgaggagcatacgccgcgcgtcttcgtcgaacatgtggacttcatcagtgcccccggcgtcagcgcagagggagtctttcggagcggcggtcccgttgctctcctgacgggcaagggtctctttcggttcgacaagacacggccgggattcgaactcgagagcattcaccccgggcatgatcttgccgagatcaagcaggcgaccggctttcagtttaaacatgacgccgagccgcggcagaccccgctgccggacgggtcgacgctggagctgctccgcggccgcgtgttcgacgaactcgccgagacctatcccgaattcgccgcgcaaatccggcgcgatctggtggcggtcgacgcatga

SEQ ID NO: 2728 - DNA, 2313 bp, BradyrhizobiumColbertium
atgagcaggatcaagcgggtcccgcattgcagccattggggtgcttacacgatcctcgtcgaggataatcgcatcgtgggcgtcgagccgttcgagcacgatccggcgccttccccgatcatccattccgttgccgaatgggctaatcccgaccggcgcgtgctgcggccgatggttcgttccggttggttggacaagcgagaaaagagtgatcgccgcggtcgtggccgggacaagttcgtcgctgtcagctgggacgaggcgacgacgctggtcgccgacgaagtacgccgtgtggcgggcacgttcggcaatgcgtcgatcttcgcgggctcctatggctggaccaactcgggtcgcctgcaccatgcctcgtcgcttctgaagcgcatgctcaacctggttggcggcttcaccaggcatgtcgacacctattccatcgccgcgggtcccgtgatcctgcgccacacgctgggcagcgacgacgcatgcggcggccgcgccaatacgctcgacacgatcgcgcagcataccgagacgctggtggtgttcggcgctctgtcgccgcgaaccgcgcaaaacgaggccggaggaatcggcagccaccgcctcgagacttatctcaggaagatcgtcgagcgcggcgtcaagatcatccacgtctcgccgctgagggacgatctgccggactgggtcgatgccgaatggtggccaatccggccgaacacggacgccgcgctgatgctaggccttgccggcgagatcgtgaaggcgggccggcacgacacggatttcctcgcgcgctgcaccagcggcgcggatcgttttcttcgctatctcgaaggccaggccgatggcggtcgaaaggacgccgcgtgggccgccggcatctgcgggctcgatgcaggccagattgccgagctcgcaagccgcctggtcgacacgcggagcatgctgacggtgagctggagcctgcagcgcgcccatcatggcgaacagccgttctgggcggcgctcggacttgcatcggttgtcggccagatcggattgccgggcggcggcgtcggctacggctacggatcgctgggcggcgtcggggccccgatcaacgtcggcaagtctccggctatttcgcagttggcgcgaccgatcgacagcttcattcccgtggctcggatcagcgatatgctgctcaatcccggcgcgtcgttcagttacgaaggagagacacgctcctatcctgacacgcggctggtctactgggctggcggcaacccctaccatcatcaccaggatctcaatcgcttatcggaggcctggaccagaccggaaacgatcatcgtgcaggatccgatgttcacggcgacggcccagcgcgccgacatcgtcctgcccgcaaccacgtcgatcgagcggaatgacatcgccggcaacagacgctcggatttcattctggcgatgaagaaggcgatcgagccgctgggcgaggctcgatccgactttgagatcttcaatgagattgcggccaagctcgggatggccgatcgattcaacgaaggccgagacgagatgggctgggtccggcatctctacgaagcctgccgcagtgacgcatcgcagcgcttcggctttgcgatgccggatttcgatgcgttctgggaagccggctatgcccgctgcccggtcaagacggagcatacgttcctggctgacttccgcaacgagccggaggcgcatgcgctcaagaccgagagcggaaagatcgtgctcggcagcgaaactctggccaggctggactatgccgactgtcgcccgcatcccgcgtggatcgagccggctgaatggctcggcaatgccgccgacgcaggccaaatgcacctcatctcgcaccagccggccggtcgtcttcacagtcagctcgaaaccggcgcgtcgagccgggccatgaagcgcaatggccgtgaacaggctcgccttcatcctgacgacgcggcagctctcggcatcgatgacggccagacgatccgcatctggaatggtcgcggggaatgcctcgcgacggctgaaatcaccgacaaggtccgtcagggcgtactggtgcttccgaccggtgcctggttcacgccgacaggcaatagcggcctggaaatcgccggcaatccgaacgtgctcacgctcgatatcggcacgtcccaattcggccagggctgctcggcccataccagcctcgtgcgagtcgagccgtacgccgccgatcagcgcgacgcgttcggggcctatcaggaatcgctcgtcgcgctcgcggcagtctaa

SEQ ID NO: 2729 - DNA, 570 bp, BradyrhizobiumColbertium
atgtctgcgcccgccatcagccgctttcccgtccccgacatcgcgacgcttcctacggatatccgctcgcgaatcgaggcggttcaggaaaagtccggcttcgtccccaacgtcttcctgatactcgcgcatcgtcctgacgagttccgggcgttcttcgcctatcacgacgctctgatggacaagcccgggccgatcaccaaggccgagcgcgagatgatcgtcgtcgcgaccagcagcgccaatcaatgccagtattgcgtcgtggcacacggcgccatcctgcgcgtgcgcgcaaagaatccgcagattgcggaccagatcgccgccaattaccgcaaggccgacatcaccgcgcggcaaagggcgatgctcgatttcgcgatgaaggtctcggcgcgggcctatgaggtagacgactccgacatccaagatctcaaggcacacggattcaccgaggaggacgtctgggatattgcggccatcgctgcattcttcggcatgtcgaaccgcctcgccaatgtcaccagcatgcgtccgaacgacgagttcttctcgatggggcgatga

SEQ ID NO: 2730 - DNA, 660 bp, BradyrhizobiumColbertium
gtgacgttgcgcgccccgccgccgcttgagcggccgctcgatgtgctgacagggaccgacggcgggatcgagttgcgcgagagcggcaagccgctcgcgacggcgcatgcagcacgcgtcgatgtgccggacgttcccagggtgagctacgaaaccgccgaaaacgcggtcggcagaacgccctacgacgaacagagccacaaccttccaggatgcttcgtctgtggccccgcacgcagccatggcgacggtctccggatcttcgcaggtccgctcgaggcaggggcagtcccgggcaagccggtcgtgttcgctgcctcctgggtgcctcatggcagtctgtccggcgaggacggtcatgtcgcgcccgaattcctctgggctgctcttgactgcccgaccggctattgcagcgtgggtgcccggcacctgggactgaatggtgacgagacggccctgctcggacgaatggcagcgcggatcgatcgtcggccgcgtcccggagatcgctgcgtggtggtggcgtggccgaccgggcgggccggccgcaagctctttgccgagagtgccttgcttgatgcggagcaggaggtgctggcgaccgcccgagcgacgtggttgttggtcgaccggcaggtccagctcggagcaagtgcatga

SEQ ID NO: 2731 - DNA, 693 bp, BradyrhizobiumColbertium
atgagcgggcgcgaagcagagttcgaacttcgtcaatccatcatcgacgcgtgccgcgagatggcggcgcagggcatcaaccagggaacgtccggaaacatcagcgtccgaaccgatggcggcatcctgctgacgccgtccggccttccctacgaccgcatgaagcctgaagatatcgtggccatgaactgggacggctcgtggacagcgtcggccggcaacgttccctcgacggaatggcgctttcacctcgacatcctgaggtcgaagcaggaggtcggcgccgtcgttcacgcccatccgatcttctgcacgatcatcgcgatcatgaaccgctcgatccccgcgattcactacatgatcgccgctgccggcggaaacgacatcccttgcgcgccctatgctcaatacggcacggccgagctgtcgcaggcggccctgaacgcgcttcgctatcgccgcgcttgcctcctcgctcatcacggcctgatcgccatcggtcccaacctgcgcaaggccttgtggctcgccgtggaggtcgaggtgcttgccaagcagtatcacggctgtcttcaactcggctctcctccgctgctgccggacgaggaaatcgacagcatcctgaagcgatgggggcagtacggcttgcgcgataacgacggcaagcccgagacccgccatccgtcgagctag

SEQ ID NO: 2732 - DNA, 963 bp, BradyrhizobiumColbertium
atggctcacactcacgatgtcagcgtctgcggtacttacattctggacattctaggcgtcccggtgacggagattccgcccggtggcggccgcttgctgatcgaagaaattcggctcgcagtcgcaggcaccgccggcggaacggtcgttccttgcgcacgtcttggtctcaaggcgctcgcggtcggcgcagtcggctccgacgagaaggcggattggatgctgaacgcgcttgagcgtgaagggatcgacatctctctcatggagcggatggccgacagcccgacctcggccacgatcctgccgatccggcccgatggctcgcgtccggtcatgcatgcaaggggcgcctcggcgcgctggcggatcgcacccgaaacgcagaaggcggcttgccgcagcaaggttctgcatctcggcggagtcggctccctgctcgcgatggacggagcgccttccgtcgcattgctgcgcgacgccaaggcggccggttgcatgacgacgctcgatctcatccaggcgcggcgtgaaacgctggcgctggtcgagccgctgctgccttatgtcgacttcttcatgccgagcatcgatgagaccaatgccatggttggaaccgacgatccggccgcgtgtgcgcgcttcttcattgagaagggagcgggggcctgtgccatctctcttggggccgacggatcgttcgtgatgacgcgggacggacgtcaattctccgtgccggctttcgaagttgcggtccgcgatacgtcgggatgcggcgattcctacacgggcgggttcattgcgggtctggtccgcgactgggacctgctcgactgcgccagacttgcgaccgccaccgccgcgatcgtcgcaacgggtctgggctccggcgccaacctcgtatcattcgaggagaccgtgaaagccatgaacaccttcccggtccgcaagtctgctcgcgcctga

SEQ ID NO: 2733 - DNA, 747 bp, BradyrhizobiumColbertium
atggcccgacatgcgatcgtgacgggagcaagccgcggaattggccgcgccattgccatcggccttgccaaacgcggctacgatctcgcgctgaccgacatcgcagcgcaggagaaggtccttctggagaccgtcgccgagatcaaggagattggcggccgctgcatcccggtgctgggcgacgtcagcgcgatcggcgattgcaggcgggccgtggcggaagccgtcgggggctttgggcacatcgacgtcctcgtcaacaatgcgggtatcctcaggctggcgaccatcgacgaactgacgaccgatacatgggatcagacgttcgccgtcaacacccgcggcgtgttccaaatgacccaggctgtggttgggcacatgaaggagcgcaagtacgggcgcatcgtaaacatcgcttcgctcgctgcccgaacaggcggcccgggacagtcccactatgccgcgtcgaagtccgccgtggtcggctttacacgggtctcgtccatggagttcggaggccacggcatcacggtcaatgcggtatgcccgggcatcatcgtgactgagatggggatgaacaatctccgcgatcccgagcgcgtcgcctatttcgagaaggtcacggacttgcaccggctcggacaaccggaggacgtggtcggtccagtcgcattctttgcgtccgatgattctgccttcgtcaccggccaggcccttaacgtcgatgggggtatcttctacagctaa

SEQ ID NO: 2734 - DNA, 615 bp, BradyrhizobiumColbertium
atgaccatgccgatcgactttcacgacatcgacccgaaccgcgtcgccgcgatcctctatcgtccgcaggacgacgtcgacgccctgcttgccgagtttgcacagaacctcgggcggtcgggcggccggatcggcggcgtggtccagcgcaacgtcaaggatggcgccgactgccaggttggcatgcaggccatcgacctcatgaccggcgcggagatctcgatctgccagccactcggctcgggcgccatggcctgcaggctcgacgctgcgggccttgctgaggcggcggtcgccgtcacccgcgcgatcgcggccgacgtcgatctcgtcgtgatcaacaaattctccaagcaggaggcagccggcgaaggcctgcgcgacgagctggcctgcgccatcgccgccggtatccccgtgctcacggcagtgccggaaaaatgcctggacgcctggaatgattttaccggcgggatcggcacaactctcttgtgcgagcgagcagcgatcgagggctggtggcaggagctgtcgtcacggttgaaacaggcccgcacggcgcacgcgcccgccgatgcgcctgcggcgttacttgccgatcatcacgtcggatga

SEQ ID NO: 2735 - DNA, 288 bp, BradyrhizobiumColbertium
gtgctcggcttcgcacacacggtcggcgagttcgggctcgttctgatgatcggcggcaacattcccgatcgcaccaaggtgctgtcggtcgcgctcttcgattgtgtcgagacgtcccggtggcgtgaagcgagcatgctcgcaggcctcatggtgatcttcgccttcgcggtgatcctgaccatggcaatcgccgacaagtgggccgcaaggggtgcggcatgttgctgccggtactctatatcagccacgacatggccgagatcgagcgcttcgccgatcatctga

SEQ ID NO: 2736 - DNA, 762 bp, BradyrhizobiumColbertium
gtgtgcgaagccgagcaccgttcgccgggggcggcgctggagcagggcgccccgatcctccaagcgcgcggttcggccccggatctgctctggagctggaaggtggcgcagaccttgatcgagatctggtcgggcgtggccagcgaggctcgcgtcatcatcgctgcggcgcgggcggttgcacccgagattgcggtcgcctgcacgcgcaagaacgtgccggggaccaagcgctttgcagcggcggccgtgaaggcgggcggcgccgtgatgcaccggctcggccagtccgagaccgtgctggtgtttcccgagcaccgtgcgttcctcggcgaactgccgctgtttcaagcggtccagcgattgcgccgggcggcgccggagaagaagctggtgatcgaggtgaagaccgccgacgccgcacttgccgcggcggttgccggcttcgacgtgattcaggccgagaagttttcgccgaccgagatagctgcattggtcaagcgcatggcatccatggcctatacgcgtgctcgtccgatcgtcgccgccgcgggtggtgtcaatgcggcgaatgccgctgcttatgcagaggccggggccgatgtcctggtcacatcctcgccctacttggcgaagccgagagacgtcgaggtgcggattgcggcaacggtcgaaagcagccgtcccgcatggaccggaagagacgcgagcgttcctgcgagccggcatgcccgagaaccagaagggcgtgttgaactctga

SEQ ID NO: 2737 - DNA, 1362 bp, BradyrhizobiumColbertium
atgggaagcaagccggtgatcggaaccagcgtctgcaaatggaccgtcagttacttcgcgctcgcagtcgtgtggctgctgctcgcagaagtcctgatggttgccggcttcggctttccgcacagcgacatcggcggaccggatacgctcgtcatcgtccacatggtttgcgtcggttggttgagcaccgcgttgtgcggcgcgctgttccagtttgtgccggtgctggtcgcaaagccgctctatgcggaacgctggacgccgctggctctggcgctgctgacgcttgggctgattgtcctgctcgctggctttctggcgctcggcggccacctcaacgggccgagctggctgctaccgctcggcgcgggcctgttggttgcaggcttcgcgttggtcgttgccaatctcggcatgacgctctggtcggcccggccgctgccggcggctgcgcggtttactgccgtcgggctcgcctgcatctgtgtcacggccgcattcggcggcactttctcgctggtgctgtccggaacgggcgtcggagcgttatggccggacctgctgccatcgggcgtttcgatccacgcgattgcggggcttggcggctggctgacgttcactgccatgggcgtcagctatcggctacttgcgatgttcatgctcgcgcccgatggtgatgcggagctaggccggcttgcctggcgcagcggagccgcggccctggcggtcgttgtcgtcggcggggtgcttgcactctggcgcgcgaccgggctgaaccttgtgcttctgcttgcaggagctgcggcccttctatcgctcgccgcatacggcagcgacgtattcggtctgtaccgcacccgcaaacgccgtgcgctcgagctcaacacgcgcatgagcctgctgtcgctggggaacctcgttgcggctgcaatccttggcgcagcgtctgccgcggccggttcgttgcagtcgcatgcgggagcgctggccttcctcgtcgcgttcggctggctcaccggtctcgtgctcgccaatctctacaagattgtcccgtttctgacctggctcgagacgtacggcccggtgatgggcagggcgcccacgcctcgcgtacaggatctcgtcgccgaacgtcgcgcctcaaaatggttcgtcctgttctttgccggaacttgggcggccgtgttcatgctgtcgatcgacagcgcgctcggcttccgcattgctgtcgcgcttgtgacgctggcaacgctcggactctgtgaggagctcgtcagggccaggcggcttgcggatgtggcggagtcgctacgcctgccgttgggagccacagtcccccatcttctggtctcgcgcaattga

SEQ ID NO: 2738 - DNA, 510 bp, BradyrhizobiumColbertium
atgactgatttcatcgacgtcgatgtccggccgattctgcgtgcgggcggcgagccgttctcgatcatcatggccgcgctcgaacggctggagcccggagaaggcttgcggctccttgctcccttcaagccggttcctctgttcgacgttatggcgagcaagggcttcgcgcaccgcgatgccgagctcgaaggcggcgactgggagatcctgttcaagccgcacgatggctcgctcgaagcgggcgaacccgcgcccgtggcgttgagcgatgacgattggccggagcccgccgttcgcctcgacaaccgcgacctggatccgccggagccgatggttcggattctcgcgtcggtggagcggctcgcgcccgggcagacgctctccgccttgctcagtcgcgaaccggtcttcctgtttcgggagctgaccaagcgcggccatcagtggcgcggcggcttcacgccgcagagggacgcctatcagctgacggtgaaggtgctcgcatga

SEQ ID NO: 2739 - DNA, 324 bp, BradyrhizobiumColbertium
atgaaggccgatgacgacgatgtcgtggcgcggataaggcagtcgctgaaggtcgtgatcgatccggaactcggacacaacatcgtggacctcggctttgtctatgatgtgtcggttgacgatggcgttgcgcacatcaccatgacgacgacgacgcgaggctgtcccgccacgtccttcctcaaggagggcgccgccaacagcgcgcgtcttgttccgggcgttgaagcggtcgaggtcaccatgacattcgaaccgccctggcagccctgcatgatctcgccgggcgtgaaagcctcgcttggcttcgccgaggtgaattga

SEQ ID NO: 2740 - DNA, 123 bp, BradyrhizobiumColbertium
ttgatccggcgggacggtttcgacgagctagttgctttccggacctgggccggaccagatcttttgccggtgcccgcgatcggatacgagccgctggcgatcgaggcgccgacgtctgaatga

SEQ ID NO: 2741 - DNA, 318 bp, BradyrhizobiumColbertium
atgacctgcgccaatctgctgggcgaggcgggagtactgcacgagagccacatcggctcgctgcgcctgttgccgcaggattgcgacatggttgctgtcgtccaagcgtttcgcgacgtgctggacgggcgtgatgatgtcgactgcggcaaccgccgcattgccgcggcctatccaggtgtgcctttctcgtacgggttcctgcgagcggagcctgggcacgtctaccgccttgaccgcgcagagccggcgcagggcgcgacgtggcaagccggaactctgttgcccgaggtaactgccgcgttatgcgacgactga

SEQ ID NO: 2742 - DNA, 858 bp, BradyrhizobiumColbertium
atgaccgactatccaaagccgccctatccttcacagcagcaaccgatgcccggctcgacgcgggcgatgcagccgcgaccggatcatggcgaggagagttacaagggcgcggggcgcctggccggaaagaaggcgatcatcacgggcggtgacagtggcatcggccgcgcggtcgcgatcgcctacgcgcgtgagggcgcagacatcgtcatatcttacttgaacgaggacgaagatgcggccgaggtgaaggcgctggtggaacgggagagacgcaaggtcgtcctgatccccggcgatatccgcaatcccgagcactgccgcgccatcgtgcgccgcgccgtcgaggagctcgggggaatcgacatcctggtcaacaacgcggcgcatcaggccacgttcaaggatatcgccgacatcagcgacgaggagtggcagttgacgttcgagaccaacatccacgccatgttctatctgaccaaggctgccgttccccacatgcggccgggagccgcgatcgtcaacacggcctcggtgaactcggacatgccgaacccgagcctgctggcttacgccacgaccaagggggccattcagaatttcacgggcgggctcgcccagatgctggccgagaagggcattcgggtgaacgcggtggcccccggtccgatctggactccgttgatcccctcgaccatgtcggaggaaagggtcaagaacttcggcaagcaggtcccgatgcagcgcgccggccagccggcggagctcgcgaccgcctacgtcatgctggccgatccgctctcgagctacacttccggagcaacgctggctgtcaccggcggaaagccattcatctga

SEQ ID NO: 2743 - DNA, 516 bp, BradyrhizobiumColbertium
atgggattcttcaccaaggacatcaaatcgatggaggacctgctgctgcacgtgctgcaggacatctactacgcggagcagcagatcctgaaggcgctgccgaagatgatcgacaaggcgaccaacaaggatctcgttgccgggctgaaggcccatctggacgagacaaacaagcaggtcgagcgcctcgacaaggtgttcgcgaagctcggcaaggagccgagcggcaccaattgcccggccatcgacggcctaatcaaggaagccgacgaaaccgccggggagatcgaggacaaggccgtgctggatgccgctatcgtggcgaacgcgcaggcggtggagcactatgagatgtgccgctacggcacgctgatcgcctgggccgaagagctcggccacgacgacatcgtacgcttcctcacgaccaatctgaacgaggagaaggccgccaacaccaagctgaatactgtggcacttcgcaaaggggtcaacgccaaggcgtccaacgcggcgtga

SEQ ID NO: 2744 - DNA, 183 bp, BradyrhizobiumColbertium
gtggatcattttgcgagcctgctcggacgtgccgcactggacgtgtggggcgacataccccgagacattcaggaagcgctgttcgagaccgcgatgaaggggcgcgaagcggagcgcgaggatctggcgcggttgctgcatgagcggcatccgcgcactcttcatccagaccggcccggctga

SEQ ID NO: 2745 - DNA, 2322 bp, BradyrhizobiumColbertium
atggacgacacgattggcttccccgacccaggtctcgacctgtcggacggcttcaagccgcatacctcgcattggggcgcgttctctgcgcgtcagggcgcggccgggctggaggtcagggcctatgcgggcgaccccgatccgaacggcatcatcgacaattttcccggcgcactccggcaccaggcgcgcatcgcccagccggcgatccgtcgcggctggctggagcgcgggccgggccccgacgatcgccgcggccgcgacgacttcgtctccgtcagctgggagaaggcgctcgacctcctcggcgacgagctgggccggatccgcgatacccgcgggccgggcgccgtgttcggcggctcctatggctggtcgagtgccggccgctttcatcacgcccagagccaggtgcatcgcttcctcaacatcgcgatgggcggctatgtgcgctccgtcaattcctattcctcgggcgcgtcctcggtgctgctgccgcagatactggccggctacgaagacattaccaagcgtaatgtcacctgggagcagatcgcgaccgacactgacatcgtgctggccttcggcggcatggcgctgaagaactccatggtggccggcggctcgatcagcaagcatgtcgagcgcggggcgatggcagcggcacgccggcgcggctgcgagttcgtcctggtcagcccgctgcgcgacgatctgcctgtcgaggccggggcggaatggattgcttgcgtgcccggcaccgacactgcgctgatgctcggcgtcgtccatacgctggtcagtgaaggcctgcacgaccaggcctttctcgatcgctacaccgagggctggccggtcttcctgcgctatctcaccggcgaaagcgatggccagcccaagcacgccgaatgggccggggcgatctgcggcgtagaggcggaggcgatccgcaaccttgcgcggcggcttgccggcaagcgcgcgctcatcaccgtctcacactcgcttcagcgcgccgagcacggcgagcagccggtgtggatgggcatggtgctggcggcagcgctcggacaaatcggtcttcccggcggcggctacggctattcgcttggagcgatcggctattacggccgccgcgtcaacgacgtgccggcgccgacactagggcaggggcgcaacggcgtcgccgatttcattccggtagcccgcatcgccgacatgctgctcaatcccggcagtacctatcgctacaacggcgaaactcgcagctatccggacattcgtctggtctactgggcgggtggcaatccctttcaccaccatcaagacatcaaccgtttgcgcaaggcgttcgcgcaagtggacacattcgtggtgcacgagctcggctggaccgcaacggcccgccacgccgacatcgtgctgcccgcgacgatgacgctggagcgcgaggacatcggctattccaccaacgatccgctgatgatcgccatgcaccgcatcgccgagccgttcggccttgcgcgcgacgactacgatatcttcgccgatctcgccgaacgtctcggggcacgcgagccgtttacggaagggcgcacgtcgcgacaatggctaaagcacctctacgagccgacccgcgcatcgcttgcgaagcgcggcctggaagcaccgagcttcgaagaattctgggcgcgcggtagcctggtcgtgccgcagcaacccgatgacggtggccggctgcgccgcttccgcgaagatcccatcaatcatgccctgccgacgccgagcggacgcatcgaaattttctcggccaagatcgcaagtcatggcgatgccgattgtcccggccacccggtctggctcgagaagaccgatatgcccaggccggaggcgccgtgcttcctcgtcgccaaccagccggcgacgcgcctgcacagccagctcgatttcggcggacactcgctggccgcaaagcatcgcggccgagaggtcgcgcgcatgaacccgatcgatgcgaacgcgcgaggcatcaaggacggcgacatcatccgcctgttcaacgagcgcggcgcgtgcctcgccgcggtccatctcaccgacggcatcgcgcccggcgtggtgcagcttccgaccggcgcctggtacgatccgatggacccggaagacgaggcgccgctctgcgttcacggtaatcccaacgtgctcacccgcgatatcggcacctcgtcgctggcgcagggctgcaccggccagctgacgaccgtcgaggtggagaggttcatcggaaatctgccgccgattcgggcgttcgacccggtgtag

SEQ ID NO: 2746 - DNA, 423 bp, BradyrhizobiumColbertium
atgatccgcaaggcaacggcagtctggaagggcaccggtcgcgacgggaccggtcatctcacgagcgaatccggcgtgctggcgcagacgccctattcgttcaagacccgctttgagaacgagaagggtaccaatcccgaggagttgatcgcggcggcccacgcaggttgttttaccatggcgctggcgttcggccttcagatggccggtttcacgccggaggagctctcgacggaagccgcggtgacgctcgagccggaaggcaagggcttcaagatcagcaagtccgcgctgaccttgcgtgcaaaggtgccgaacctcgacgaggccggcttcgcgaagatcgcaggcgaggccgagaagaactgcccggtatcgaaggtgctcaacgccgcgatcacactcgacgccaagctgggctag

SEQ ID NO: 2747 - DNA, 471 bp, BradyrhizobiumColbertium
atgcaggatctcatccgcaagcagccgggcgtggtctccacccgggtcggctacaccggtggtcacgtgaagaacgccacctaccgcaatcacgagggccacgccgaggcgatcgagatcatgttcgatccggccaggaccagcttccgaaccatgctggagttctttttccagatccatgatcccaccacgctcaaccgccagggcaatgatctcggcaccagctatcgctccgcgatcttctacacgagcgaggagcagaagcggatcgccgaggataccattgccgatgtcgaagcatcgggcctgtggcccggcaaagtggtcactgaggtcgcgcccgcgcgcgagttttgggaggccgagccggagcatcaggattacctcgagcgctatcctgacggctacacctgtcacttcatccggcccggctggaagctgccgcgccgtgcggctgcgttgggcggctag

SEQ ID NO: 2748 - DNA, 1155 bp, BradyrhizobiumColbertium
atgtcttctgccgatcggccggcgacccgcctagcgaccaggcttgcctttctcgtcgcgggcttcggcatcgcgtgctgggcgccgctggtgccgttcgcgaaggcgcggctcgcggtcgacgacggcgttctcgggctgcttctgctcagcctcggcatcggctccgtcctcgcgatgctgctgaccggcattctcagcgcgcgctacggcagcagaccgatcatcatcgcaggcgggctcggtctcacgctggtgctgccgctgctggcgatggccggatcccccacgacgctcgcgctggcgctgttcgccttcggcgccgcgctcggctcgatcgacgtcgccatgaacatccacgccgtggaggtcgaacgcgccgcaggacgaccgctgatgtccggcttccacgcgctgttcagcatcggcggcttcgccggatctgcgctgatgacggcgctgctatcgctgcaactccgggcgcttgtttgcacgctgatctgctccgtcctgatgctgatcgccatgctcgtgacctggccgcgcctgctgcggtccgtgtcagtgcaggagggcccattgttcgtgcttccgcacggatcggtcctgctgcttgcgctgctcggcgccgtcaccttcctcgtcgaaggcgcgatgctcgattggggcgcgctgctcctgatcggcgcggggctcgtgacggaggcgcaagggggagccggctacatcgtgttctcgatcgcgatgacgacaggccggctcggcggcgacgcggtggtagcgcgtatcggggaccgcgcgacattgctctggggcagcctgatcgcgatcgcggggtttgtgatcctgctcaccgcaccctttgcagcggctgccatcggtggtttcctgctgatcgggctcggcgcctcgaacctcgtgccggtgctgttcagacgcgcggcgcggcaaaaggtgatgcctgccggcctggccgtcgcggccgtcacgaccgcaggctatgccggcgtcctcatcggtccggccggcgtcggcttcattgcacagatcggcgggctgccgctggcgttcgggctgctggcggcgctgatgggcctcgtcacgctatctgcgcggatcgtcacgacgagcgcacgtcagggcacggcgacctag

SEQ ID NO: 2749 - DNA, 1326 bp, BradyrhizobiumColbertium
atgagccgctcagccgagatcgtggcgctgttcagcctcaggcggatcagcggccagatcgcggcgctggtgctggtgtcgctggtcctgatccacatcctgattgccggatatttcctgctcagccggccgaagatgctgacggacagaccggtcgagcagctcgagttgatcgtggagatcatcgacaacacgccgaaagcacagcgcgccatggtgctcgacaacatccgccgaacctatccggcactgaagctgcaattgcgcgaaggcgtctccgcctcgcccatgccggagcggtcgccgctgaacgtcccctcgccgctggccggcaaggtcgacctcattcgcggtgccacctccgacgacaaccgcctctggttcgatctcggcaacgacgacgtgctcgaggccacgatcggatcgcccaagatgccagctttcgtcagcggcctctggacctccacgctgctgttcctggtggcgagcgtcacgctgctcggcatctgggcgggccgggcgctctcctcgcctttgtcggccttcgcgcgcgcggcagagagcttcagcctgaatcagtcatcgcagccattgccggagaacgggccggaggagatcaggtccgcagccagagcgctgaaccggatgcgcgagcgcatcggtgcgctgatgaacgacaggacgcgcatgctcgcggccatcagccacgatctgcgtaccccgctcacgcggctgcggctgcgctcggaattgatcgaggatccggctcagcgcacccagacggtgcgcgatctcgaccagatgcagtcgatgctggagtcggtgctctcgttgttgcgcagtgaaagcccggtcaagccgacgcttgtggacgtcgccgcattgctcgagatggtgtgcgagcagtttaccgactctggccacgcggtgagctattcgggccccgccagggccgccttcgtgttgcggccggacgagatcgtccgcgcggtcagcaacctcgtccacaatgcgacgcgcttcggaacccgggtcgaggtcgcgctgtcaacatcggaggatcggcttgtcatcgaggtttcggacgacggccccggcattcccgatgagaggaaggcggcgatgctcgaacccttcgtacgcggagaggacgcccgcaccatggacgagacggctggatttggccttggtctttcgattgcacaggcgatcgtgaccgcgcatggcggaacgcttgaactgctggacaacgcgcccacgggcctacgcgtccgtttgctgctcttcggcgcaagtcgcgacaatgcgggcacgtctcggacataa

SEQ ID NO: 2750 - DNA, 789 bp, BradyrhizobiumColbertium
atgaccgtagttcttcggacgagacaaacgtcctcaaatcgaccaacgatcggcactcccgatgcgagttcgatcatgaccaatggcaccccgaacatcctggtcgtcgaggacgatcggcagacccgcgacctcatcctgcgctatctgggcgagcattccttcgcggtccacgcggccacgaatggccgcgagatggaccggcaattgtcgcagaaccgcatcgacctgatcgtgctcgacctgatgctgccgggcgaggatggcttgagcctctgccggcgggtgcgcatggagtccatgacgccgatcatcatcctcaccgcgaagggcgaggatctcgaccggatcctcggcctcgagatgggcgccgacgactatctgccgaagccgttcaatccgcgcgagcttcttgccaggatccacgccgtgctgcgccgccaagcgagcggacttgccgccggccccacggcaacgcgcctcaagttccagggctggatcattgatcttcgcttgcgggaattgcgcgaccccgagggcgcgcaggtgccgctgaccagcgccgagttcgatctgctgcaagcgttctgcgaacgggccggccgcatcctcacccgtgacaatctgctgagcatgacgcgcggccgtcccggcggcaactttggccgcagcatcgacgtgctggtcagccgcgtgcgacgcaagctcgaccgcacccaggagacgtccgtgatcaggaccgttcgcacgggcggctacatcttcacgccggtggtggaggaagcatga

SEQ ID NO: 2751 - DNA, 1965 bp, BradyrhizobiumColbertium
atgaccgattccatcatctcgctcgagaacgtccggcgcgaattcacggccggcgacaccagcgtggtggccctcgacggcttctctctggacatccgcgccggggagatggtggcgatcatcggctcgtccggttcgggcaaatcgacgctgctcaacatcctcggctgcctcgaccggccgacgtcgggcacctatcgcgtcgccggcaaggacgcctccaagcttgatgcggacgcgctggcggcgctacgccgggagcatttcggcttcatcttccagcgctatcatctgctcggagacctctcggctgccgcaaatgtcgagatccccgccgtctatgccggcgtcaatgcccgcgagcgccggatacgtgcgaacgcgctgctcgaacggctgggcgtcggcgcccgaggaggccatcgccccaatcagctctccggcggccagcagcagcgcgtctcgatcgcgcgggcgctgatcaacggcgccgaggtcatcctggcggatgagcccaccggcgcgctcgaccggcgcagcggcgaagaggtcctgaagattctcaaggagctgcaccgcgagggccggacgatcatcatcgtcacccatgatgccgatgtcgccgcccgggccgagcgcatcatcgagctgcgggacggcaggatcgtttcggatcgccgcacggagaccacggccgcggcggggcccgtagctcccgccgcccgaaccaccacatgggacagccgccccggctggtccggcgccttgcggcggccgcgcgaggcgtcccgcatggcgctggtggcgatggccgcgcaccggctacgggccttcctgactatgctcggcatcatcatcgggatcgcggcggtctcgtccgtcgtcgcgctcggcaacgcctcgcagcgcaaggtgctgtccgacatctcaagtctcggtaccaacacgatcgaggtatttccgggcaaggatttcggcgacgcccgcgccgccaagatcaagacgctggtgctcggcgatgcccgcgcgctcgcccgccagagcttcatcgccggtgtcacgccgaccgtgtcgaccagcacgacggtgcgctatcgcggcaacgagtcgaacgtgctcgtgaacggggtcggcgaaagctattttctggtcaagggcgccaagctggcgatgggccgcctgttcgacgcagacgccgtccgcaacatcgagcggcaggcggtcatcgacgacaatacgaggaaaaccttcttcgccgacgaccagacgtccggcatcggccgcgtgatctggctcggcaaggtgccatgccgcatcgtcggcgtgatcgcgcagcagcagggcgggttcggctcgaaccagaacctctcggtctacctgccctacaccacggtgcaggctcagttcaccggcgaccgcgcgttgcgcagcattctcctgcgaatcagcgatgagatctcgaccaatctggcgcaggacgcggtgaccacgctgctgacccagcggcacaacaccagggacttcgtcatcctcaacaccgacgacatccgccgcaccattaccagcacgacgcagacgctggcattcctggtggcagcaatcgcggtaatttcgctggtcgtcggcggaatcggcgtcatgaacatcatgctggtatccgtgtcggagcggatcagcgagatcggcgtgcgcatggcggtcggcgcgaggcgcagcgacatcctccagcagttcctcgtggaggcgatgctgatctcgtccatcggcggcatcgcgggcattctgatcgcggtcctgctcggcactgccgtcaacatcgcggtgccggacttccaaatcagctattcgccgctctcgatcggcgcggcgttcctgacctcaaccggtatcggcgtcaccttcggcttcttccccgcgcgccgcgccgcctttctcgatcccgtagtggcgctgagccgcgactga

SEQ ID NO: 2752 - DNA, 1230 bp, BradyrhizobiumColbertium
gtgactgatatcatcaccgccaggcgcctgaaaatcgccgcggccctgattgtcatcgtcgcaaccgccgtcttggcggccacacgtttcctcggcacgtcgagcaagacgcagtcctacattactgcgcccgtgatcgtgagcgatctgcgggaagaggtgctcgcgagcggcactctcaagccggcgcggctgacggccgtcggtgcgcaagtgtcgggccggatcaccgcgctcaacgtgcgcgtcggcgacacggtcaaggccggggatgtcatcgcccagatcgaccccgtcaccaagcagaacgacttgcgcaactcggaagccgcactgaagaactaccgcgcgcagaaggccgagaaggaggctgccctggtgctggccgaggcgaatctcgcgcgccagcaggcgacactggcgcagcgcgccacctcgcgcagcgattttgacagtgcggattcgacggtgcggcagacccgcgcccagatcgcagctctcgaggcgctgatcgtaggcgccgaagccagcgtggagacggcgcgggtgaacctcgactacacgcgcatcaccgcgcccatcgacggcacggtgctcgccaccgtggtgcaggagggccagacggtcaacgcggtgcagtccgcgccgaccatcgtcgtgctcggccagctcgagacaatgacggtgcgggccgagatttccgaggccgacatcgtcaaggtccggccgggacaatcgctctacttcacgatactgggagaccaggaccatcgctacgaggctcggctggagcagatcgagccagcgcccgaatcgatcaagaacgacgcgagcttctcctcgaccacgacgtcgagttcgggctcgtccagttcatcaagctcgaccagcacggcaatctactacatcggcgtcttcaacgtgccgaacaaggactatgcgctgcggacgtacatgaccgcggaagtgcatatcatcaccggcgacgcgaagcgcgtgaaggtcattccggcgctggcggtgatgcgcaaatccgacggccgcagcaccgtccgcaccctggacgcgtccggcgaggtcagcgagcgtgaggtcaagaccggcctcaacgaccgcaccatggtcgagatcaggtcaggactgtccgagggcgaacgggtcgtcacgggagaagcaaacgagcagattgtatcgcgcggcatgccgggcggcccgccgggaggcccctga

SEQ ID NO: 2753 - DNA, 1488 bp, BradyrhizobiumColbertium
ttgcacgccgccctctcgcgcgccggatcggcgtgcgcagcgctgttgctgggctgcacactggctggctgcgcagtcgggcctgactataccgggccgccgaagctcgacatgccccgggagtggagcgtcaagccgggatcgcgccgccagaccgctacgctcgatcgctggtggcttcgcctgcgcgaccccgtactcaaccggctgatcgaacaggcagtcgaagccaacccggatgtcgccaaagccaaggctgtcgtgcgcgaggcgcgcgcaacggtgcaacagaccagcgccggcctgctcccctccgtcagcggttctgcctcggtgacaggcaacaaaaccagcgcgggctccgcctccgccgtggtcgatacggcgccctacacgcttcaccaggccggcttcgattcgagctgggagctcgacctgttcggcggcacgcagcggaacattgaagccgcggtgcgcgggcagcaatcggccgaggaggatttgcgcgacagcctcgtcacgctgatcggcgacgtcgccgcctattatgtggacgcgcggggataccaagcccggatcgagctggcgcggcgcacatctgtctcgcagcgcgacaccgagaagctcacccgcagcaagtacgaggccggcagcggcaacgccgtcgatctcgccaaggcaaccgcgcaagccgcgagcacggaagcgaacgttcccacctaccgcgcggcgctcgcggccgacatccatcggctcggcatcctgctcggacggccgcccgacgccgtcgcttcgctgatggcacggcccatgccggtgccggcgccgcgcatgccgctccccacgggcctgcccgccgaccttctcatcagccgtccggacgttgcgagcgctgagcgcaagctcgcccaagccacggcccagatcggcgcggccgaggccgaccgctaccctgcggtgtcgctgacgggctcggtcggcacatctgcgctgcgcgcaggcgatctcgcaaaatattccagcgtgagctggtcggtggggccctcggtaacggtgccggtgttcgatgcaggcaagcgcctcgcgaccgtcaggatcgcggaagcgcagcgcgatcaggcgttcgccacgttccattcgaccctgctcaccgcgctcgaagacgtcgagaatgcgctggtgtcgctgtcgcaggagcgcgtgcgggcggccaagctgactgaagcggcgaagaactatcgcgaggccgcccaactatcccggtcgctgttcgagaccggcagtgccagtttcatcgacgtgctggacgccgagcgctcgctctattcggcggaggattcgctgatccagagcaaggtgtcggccgccaaggactacatttccctcgccaaggcgctcggcggcggctggaccgatccggtcgaaacgtcgacgcccatcatcgtggacaccaacacgggacctcacttccgggagacggtgaagtga

SEQ ID NO: 2754 - DNA, 153 bp, BradyrhizobiumColbertium
gtgcaacaggggcctcgtcgggcaatggtcctcctctgcggatggcgcgggaatcgcgtcggacaagtgtggctgcatcgaattggcttgagacccattggccttaccgcggtacgggcggtgcccatggcccttggaaggaagaaggaatag

SEQ ID NO: 2755 - DNA, 387 bp, BradyrhizobiumColbertium
atggattatctgccgatgaacgcgctcgtcgcgaccagaacggtgctggtcgccctcctcctcagttctaccctcaccgcgcatgccgcaaacaccggcaagcgcgatcaacaacagacgacgcagaatgccgtctacgagtacgttccgcgcggccccaatcggtcttaccaatccggtccgcgaacgcgcatctatgtgagcaagcggtcgtggctggatggcgggaccgaagtgctgcccggcgagcggaagttcacagactatgcctttccacccggtgcttcgttcgcgcgtagcaacaacaaccggccgctcgatagacagccgctgagcccggatgcggacctgggcggactcatgcagcgaattccgatttcctggtga

SEQ ID NO: 2756 - DNA, 2514 bp, BradyrhizobiumColbertium
atgtcggtttggcgggccttgctgatcgtggtggcgatgagtggtgtatcgattgcgagttcaattccagcggtgctattgccgcagccggcgtccgcgcagaacgtggacacgatcgtggtcgagggtaaccgccgcgtcgatgccgagacgatccgctcctacttccggcccgccgcgggaggccgcctcgatcaaccggccgtcgatgagggaatcaaggctttgatcgggacaggcctgttccaggacgtgaagatcagtcgggccggcggccgcctcgtggtatcggtggtggagaacgccgtgatcggtcgcgtcgccttcgaaggcaacaagaaaatcaaggacgagcaactctcggccgagatccagtccaagccgcgcgggaccttctcgcgggcgctggtgcaatccgacacgttgcgtatcgccgagatctatcggcgctcgggccgctacgacgtgcgcgtcacgcccgagatcatcgagcagccgaacagccgcgtcgacctcatcttcacgatcgaggagggcggcaagactccggtcaagtcggtcgagttcatcggtaatagtgcattctcggcctcgcgcctgcgcgacgtcatcaagactcgcgagagcaacctgctcagcttcctcgccagcaacgacatctacgatcctgatcgcgtcgaggccgatcgcgacctgattcgccgcttctatctcaagaatgggttcgccgacgtccaggtcgtcgcagcgcttacagaatacgatcccgagaagaagggctttctcgtcaccttcaagatcgaggaaggacggcaatatcgagttggatcggtcgacttccgttccagcattcccagtttcgacgccggttcgctccacacctattcgcgcgtcaacgtcggctcgctctataacgtcgaagcgatcgagaagtcgaccgaggagatgcaaatcgaggcctcgcgccgcggctacgcctttgccgtggttcgccccgccggcgaccgcaatttcgaggcgcacaccgtatccgtcgtgttcaacgtcgacgaaggtccgcggacctatatcgagcgcatcgacctgcgcggcaacacgcgcacgcgcgattacgtgatccgccgcgaattcgatctctcggagggcgacgcctacaaccgtgcgctggtcgaccgcgccgaacggcggctgaagaacctcgactttttcaagagcgtcaagatcgtcactgagcccggctcctccagcgatcgcgtgatcctgatcgtcgatatggaagaaaagtcgacaggcgacttctccgtctcgggcggctattccaccagcgacggtgcgctggccgaggtctcgatctccgagcgcaacctgctcggtcgcggtctgtacggcaaggcgtcggtcagctacggccaatattcgcgcggcatatcgttgtccttcgtcgagccctatctgctcggctaccggatcgcgctcggtttcgacacatattggaagcagcagaagtcgaacagctatacgagctacggcgtgaccacgcttggcttctctccccggattgggctggccttgcgagaggacctctcactccaactccgctattcgctctatcagcagagcatcacgctggccagcgcctacaacaactgcaacaacaacgcgtccaacccctcgctcgcgtacaatcccacaccggcctacatccagagcgtactggggggcgcggatccgaccaactcgacggattcgggcgtctatggatatggctgctacggcgacggcgagtcgagcctgccggttcggaaagaactggccaacggcgcggcctggacctcggcgctcggctacacgctgaactacaacacgctggacaacaccaggaacccgacggacgggttgctggtcgacttcaagcaggattttgcaggtgtcggcggtgacgtcacctatctgaagacggcgttggacaccaagtactacactccgctcgtgtctgacattgtgagcgtgatccatctccagggcggtctcctcagcaagcttggtaaccaggatctgcgcatgctggatcacttccagatgggcccgaacctcgtgcgcggcttcgcgtccaacggcattggtccgcgcgacatcacctatcggagcctgggtgcgagcggcgattcgcttggcggcacgaagtattggggtgcctccatggagttgcagatgccgttctggttcctgcccaaggaagtcggtctgaagggcgcggtctacgccgatgccggatcgctctggggctaccaggggccgacctcgtggtcggcgacgggcgaagtcaacaccaaggcgtgcccgacctgcggactgcaatacgacgacggcaatgtggtgcgatcgtcggttggcgtcggcctgatctgggcctcgccgtttggaccgctgcgcttcgactatgccgtgccgatcacgaagggcaagtacgacaccgtccaggagttcagattcggcggcggcacgtcgttctag

SEQ ID NO: 2757 - DNA, 1236 bp, BradyrhizobiumColbertium
ttgctgaacatgcctgacactcgcgccgacggacatcgcgtcctcgctgacctccatgcgctgcgcgcctttggcgcctacaagaccggcgtgcacaagccgaccttctcagagccgcacaagctctccctggaatggctcgtgcagaagctgccagaggccaatctctccgcggctgtagacggcatcggcaatgtcttcggcacaagcgcgaagcatgggcccaagctgctggcaggctcgcatctggagagccagaactacgccggctggctcgacggcccgctcggcgtcgtctacgcgctggaagctgcgcgcgtgctgaacaccgatccttcgttcaatggcgcagtggaagtcgccgcctggtgcgacgaggaaggacattttggtcatttcctcggctcgcgctcctatgtcggacaagtgaccgacaccgaaatcgatgccgcgcgtgaccgcaccagcggccgcgccatgcgcgaggcccttgccgacatgggcctcgcgggacgcccgcgcgaaaccgccgagccgggacgacacgtcgggtatctggaggcccatatcgagcaaggcgacacgctcgagagcgggcgcctcgccatcggcgtcgtgacgtccatcgtgggcatctggcagtaccagatcaactttgtcggcgagcagaaccacgccggcacgacgcgcatggcggtgcgcaaggacgcagggctcgccctggccaagttctgcgtcgcgatcgacgagcgctttccgactgactgcggcccgcgcacggtctggaccaccggtcgcatcacgctcgatccgggcgcaccgagcatcattccaggcggggcagagatgctgttccagatgcgcgacgatgatccggccgtgatcgcgcggctggagcagctgctgcggaccatggcggacgaggccagtgcgattggcccctgcaccgtcacggtcacgaagctgcgcactggtgcgcccgcaatgatggatgcgggctttcaggacgcgatcgaggcagccagcaaggccgtcgccggtgcccggtccatccgcatgcccagcggggccgggcacgatgcgcagatgctcgcgaccgtgatgcccgcaggcatgctgttcgtgccatcaatcggcggcatcagtcaccactggaccgagaataccgctgatgccgacatcgtcaccggcgcagaggtcttcgtcgatgcctgccggcggatactcgggggctag

SEQ ID NO: 2758 - DNA, 786 bp, BradyrhizobiumColbertium
atgacgacgctcaggatcgaacaggtttctcgcacctttcccgcacgtcacggcaatgcgcccacgaaagcgctggagccgaccgacctcgtcatcggcaacaacgacttcgtcaccatcctcggcccctccggctgcggcaaatccacactgctgcgcatcgtcgccggccttgaccgtccgaccagcggacgggtcacgctcgacggacgcgaggtaaccggcccgggcgccgatcgcggcatggtgttccagtcctatacgctgtttccctggctgaccgtgcgcgagaacatcgccttcggcctgcgcgagcgcggcgtggccgaggcggagcggaacaaggtcgcggacgccttcattcgccaagtcgggttgtcgggcttcgagaaccactggccgaagcagctttccggcggcatgcagcagcgcacggccattgcgcgtgcgctcgccaacgatccgaagatcctgctgctcgacgagcccttcggtgcgctcgacaaccagacgcgcgcgctgatgcaggagatgctgctcgggatctgggagcgtgaccagaagacggtgctgttcgtgacccacgacatcgaggaagccattttcctcggcagccgcgtcatcgtcatgagcgcgcgtcccggccgcatcaaggccgagatcaatgtggacctgccgcatccccgctcctacaagatcaagaccacgccggaattcgtccagctcaaggaacggttggtcgaggagatccgcgctgaagcgctcaaggttgctgaacatgcctga

SEQ ID NO: 2759 - DNA, 774 bp, BradyrhizobiumColbertium
atgcgccctctggatcccgttacatcgaggcagcgcgcggcctatggccttgcgttcttcgtgctgttcgtcgccctctggtcctgggcgacgttcggcggccatgtgtcgaagaccttcctcgccaatccgctgaccatggtgcaggaaggccttgagctcctcaccaagcacggcttcctgttcgacatcggcatgacgatctggcgcgtcgtcggcggtttcgcgctcgcggcaatcatcgccgtgccgctcggcgttctgatgggcgcctataagccggtcgaagcgttcctcgagccgttcgtctccttcgcccgttacttgcctgcctccgccttcatcccgctcttgatcctgtgggcgggcatcggcgagttgcagaaactgctcgtcatcttcatcggctcggtgttccaggtgatcctgatggttgcggtgaccgtcggcgccacgcgccgcgaccttgtcgaggcagcctatacgctgggcgccggcgatcgcggcatcatccgccgcgtgctgctgccctcctctgcgcctgatatcgccgaaatcctgcggctggtgctgggctgggcctggacctatgtcatcgtcgccgaactgatcggctcgtcctcaggcatcggtcatatgatcaccgacagtcaggccctgctcaacaccggccagatcatcttcggcatcatcgtgatcggcctgatcggcctcgtctcggactttctgttcaaggcgttcaacgcctggctctttccgtggaagctggcatga

SEQ ID NO: 2760 - DNA, 945 bp, BradyrhizobiumColbertium
atgcgtagttcaaaggtatttgcgacaatcattgctctcgccgcctccactcccgcgctcgccgacggcgtcaaggtcggcatcggcatttccggatggaccggcttcgcgccgctgacgctggcgaaggaggccggcatcttcaagaagaacggcctcgacgtcaccatcaagaagatcccgcagaaggaccgccatctcgccatcgcatccggcgacatccagtgcgcggcgaccacggtcgagacctggatttcctggaacgccaacggtgttgcgaccaagcagatcttccagctcgacaagagctatggcgccgacggcatggccgtgcgcaacgacgtcgccgcgatcaaggacctgaagggcaagacggtcgccgcctccgcaccaggcacctcgccctactttgcgctggcctggatgctcaagaagaacgggctgtccgtgaaggacgtcaccgtcgtgaacctggagccggctgccgctgcgcaggccttcgtttccgggcagaacgacgccgcgatgacctatgagccttatctttcgacggtgcgtgcagcgcccgacaagggcaagatcatagcgaccacgctcgactatccgatggtcatggatactttcggctgcacgccgaagttcctgaccgagaatcccaaggcggccaaggccctcgccgacagctatttcgaggcgctcgagatgatcgccaaggaccaggccaaatcctacgagatcatgggcgccgacgtgaagcagaccggcgagcagttcggcaattcggcgaagtatctgcgctggcaggacaaggccgcgaaccagaagttcttcgccggcgatttcctgaccttcaacaaggaggcggccgagctcctgctcgagatcggaatcatcaaggccgtgccgaaggtcgaggacctctacgacgccagcttcatcaagtaa

SEQ ID NO: 2761 - DNA, 726 bp, BradyrhizobiumColbertium
atgagcctcgtgactgataccgataagccgacgctctacaagcgcatccgcgccgacatcgaaaagcgcatcctgaccggcgagtggccgcccggtcaccgcatccctttcgagcacgaactggtggcacgctacggctgctcgcgcatgacggtgaacaaggcactgtcggagctggcacaggccgatctgatcgagcggcgccgccgggccggctcgttcgtgcggcggccgcagcatcagtcggcggtgctcaagatcgcggacatccgcgccgaaattaccgcgctcggccgcacctacggctacgagctgatccaacgcaagctgcggacagcgaccagcgctgaccgcgatcgtctcggcgtctcgaaagccggcaaggtcgtcgcgatcgcctgccggcacagcgccgacaacgtgcccttcgccgtcgaggacaggctgatcgatttgtcgtccgtccctgatgccgcgaccgcggatttctcgcgcgagccgcccggctcctggctgcttcaccatgtcccatggacggaggcggaacacaccatcagtgccatcgttgcggacgaacgcgcggcggaagcgctcgacatcgccgtcggcgcgccctgcctcgtgatcgaccgctacacctggcgcagcgcgcgcacgatcaccgccgtgcgcctgctctatcccggtgactctcaccgccttgtcgcacgattcaagggaggctga

SEQ ID NO: 2762 - DNA, 1359 bp, BradyrhizobiumColbertium
atgtcccgactgcatttcgcctccgcgctcctgccttcaggctgggcccatgacgtgcaggtggtgatcaccgccggcacgatcgcagaggtgatgccgggcgtggcgccggctgtcggggacgagcgccacgccatcgcgcttccgggattggcgagcctgcacagccacgccttccagcgtggcatggcggggctggccgagctgcgcggcgattccaccgacacgttttggacctggcgcgaaacaatgtatcgcttcgcgctcgcaatgacgccggacgacgtcgcggctgttgcgacgctgctctatgtcgagatgctcgagcagggttttacccgtgtcggcgaatttcattacttgcatcatgatcgcgacggctcgccctatgccgacgtcgccgaaatggctacgaagattgcgcaggctgccgaggcgtcgggcattgccctcacgctgctgcccagcttttatgcgcacggctccttcggcggtgctgcacctcatgccggccagcgccgcttcgtctgctcggtcgatcagttcgccgcattgatggccgcatcgcgcaaggcggtcgcagcattgcctggcggcaatatcggcattgcgccgcacagcctgcgcgcggtgacgccggacgagctcacggcgatcgttccgctggccgacggcgggccggtgcacattcacgcagctgagcaggtgaaggaggtccaggattgcctggcctggtccgggcggcgcccggtgcaatggctgctggagcacgcgccggtcgaccagcgctggtgcctcatccacgcaacccacatgaccgaccaagagatcagcgcatttgccgaaacgggtgcggtcgccggcctctgtcctgtcaccgaagcgagcctcggggacggcatattcccggcgcacgaatttctcgccgcaggtggcgcattcggcgtgggcaccgattccaacgtgctggtcggcgtcgccgatgaactgcgccagctcgaatatggccagcggctgcagcatcgccagcgcaacgtgctctcaagcggcgccggacgttccaccggtcgcacgttgttcgaccacgcactcgctggcggcgcccaagcgctggcgcaaacgaaggcgggcctcacgccaggtgcgcacgccgacattgtcacacttgacacgtcgcatccatcgctggcgggacgcaccggcgatgccgccatcgacggctggatctttgcggcgggcagcggtgcgatcgattgcgtctgggccggcggccgcaaggtcgtcgaaggcggccggcacggattgcgccaagccgcgcgcgagcgattcaacgcgacggtgcggaggctcgtcgcatga

SEQ ID NO: 2763 - DNA, 1215 bp, BradyrhizobiumColbertium
atggcagagcgcttcgaccggatctggcacaatgcccggctcgccacgatgcgggccgaccgtcccgatctcggcgagatcgagcttggcgtgatcgcagcgctcggtggccggatcgtctatgccggagcgcaggccgattttccggcggacgccgatgcgattgagcggatcgactgcgacggacgctggatcacccccggcctcatcgactgccacactcatctcgtctacggcggcaaccgcgcgcacgaattcgagttgcgcctgaagggcgcgagctatgaggaggtcgcgcgcgccggcggcgggatcgtgtcgaccgtggccgcgacgcgcagggcgagcgaggcggacctcatcgcgagcgcgttgccgcggctcgatgcgctgatcgccgagggcgtcaccacgatcgaaatcaagtccggctatggtctcgacactgaaaccgagatgcgccagctcgccgccgcgcgcaaccttggccgtcagcgtccggttgcgatccgtacctcctttctcggtgcacatgcgctaccggtcgaggctgatggcgacaaagaccgttacatcgaccttgtctgcaaggagatgctgccggcggtggcaaggactggacttgccgatgctgtcgatgcgttcatggaaggcatcgcgttttccgccgaccagaccgctcgggtgttcgagacggcgaggggacttggactgccagtcaagctccatgccgaccagctgtcgaatcttggcggtgccgcactcgccgcgaagttctcggcgctctcggctgatcatctggagcacaccgacgaagccggcgctgccgcaatggcgagatctggaacggtggccgtgctgttgcctggtgcgttctacttcatccgcgagacgcagaaaccgccggtcgagacgtttcgcgaggccggcgtccacatggcgttagcgaccgactgcaatcccggcagctcgccgctgacctcgctgctgctcgcgatgaacatgggcgcgacgctgttccggatgacggtcgccgaatgcatcatcggcgtcacccgtgaaggcgcacgggcactcggcgtggtcgatgaaaccggcacgctggaagcaggcaaatggtgtgaccttgcgatctgggacatcgagcgcccggccgagctggtctatcgcatcggcttcaatccgttgcatcgccgggtctggaggggacagtga

SEQ ID NO: 2764 - DNA, 1254 bp, BradyrhizobiumColbertium
atgatggcgctgaagatcgtctcgctgggtcgcggcgcctccggcgttcgccgcgaggtgatcaagcagctgcaggacatgttggcgcaggccgtccatccgctggtgccgcagcagggctccgtcggtgcctctggagatcttgcaccgctggcgcacatggcggccgtgatgatcggcgaagggcaggcgatcatcgacgggaaaaccgtatccggcgccgaggccctcaagcgcgcgggcctcacgccgctgacgcttggtcccaaggaaggcctcgcgctgatcaacggcacgcagttctcgacggcttatgccgtctcaggcgtgctgcgcgcgtttcgcctggcgcgcgcggctctcgtgaccggtgcattgtcggtggacgcggccatggcctcgacggcgccgttccgccccgagatccaggcattgcggggccatgccgggcagatcgcggcggccgcgacgctggtcgcgttgctcgacggcagcgacatccgcctgtctcacctcgaaggtgacgagcgcgtgcaggatccctattgcctgcgctgtcagccacaggttgccggcgcagcgctcgatctgatcacgcaagccgcgcgcacgctgatcgttgaggccaatgcagtcaccgacaatccgctcgtcctggtcgagaccggcgagatcgtctccggcggtaacttccacgccgagccggtggcctttgctgccgatgcgatcgcgctggctctgtccgagatcggcgcgatcagcgagcggcgcatcgcgacgttggtcgatcccgcgctcaatttcggcttgccaccgttccttacccccgatcccggcctcaattccggattcatgatcgccgaagtcaccgccgcggcgctctatgccgagaacaagcagcgcgcgctcgcctgctctatcgactcgacgccaaccagcgccaatcaggaggaccatgtctcgatggccgcgcatgccgcgcggcggctgtccgacatggccgacaatctcgccgccatcctcggcatcgagctcctggtcgcagcccaaggcatcacgctgcgcgcgccgcatgcgaccagcaggccgctggctgccgttatgactgcattgcgcgagcaggtgcccgcactcggtgctgaccgctacatggccggcgatcttgccagggccgccgcattgatcgaagccgacgctctcccggccattgcgatcaccacacttccatccgatccgtttccgagactcgattaa

SEQ ID NO: 2765 - DNA, 522 bp, BradyrhizobiumColbertium
atgaaccgccgactggataatgaccgcaccattcgtgccccccgcggcagcgagatcagtgccaagagctggctcacggaagcgccgttgcgcatgctgatgaacaatctcgatcctgatgtcgcggagcgcccgagcgaactcgtggtctatggcggcatcggccgcgccgcacgcgactgggagagtttcgaccggatcgcggcggctctgcgcaagctcgaagcggaccagacgctgctggtccagtccggcaagccggtcggcgtgttccgtacccatgccgacgccccccgcgtgctgatcgcgaattcgaacatcgtgccgcattgggcaacgctcgatcatttcaatgagctcgatcgcaagggcctgatgatgtacggccagatgaccgcgggctcctggatctatatcggcagccagggcatcgtgcagggcacctacgagaccttcgtcgaggtcggccgtcgccactatggcggcagcctcgccggaaatggattctcaccgccggcttag

SEQ ID NO: 2766 - DNA, 1113 bp, BradyrhizobiumColbertium
atggccggtgcttcgatgctcgcggtcgaatgccagccgagccgcatcgagatgcgcttgcgcaccggctatctcgatcgccaggccgcgagcctcgacgaggcgctcgcgatcatggcggattcggcgaagacgatgaaggcggtatcggtcggcctgctcggcaacgcagcggagatctttccggaactcgtgcgccgcggcgtcaagcccgacatcgtcaccgaccagaccagcgcacacgatccgatcaacggatatttgccgaagggctggacgctggcggagtgggaagcaaagcgcgcttccgatcccaagggagtcgaacgcgcatcgaagacctcgatggtcgagcacgtccaggccatgctggatttccacgcgctgggcatcccgacactcgactacggcaacaacatccgccagatggcgcaggacatgggcctgaagaacgccttcgatttcccaggcttcgtccccgcctatatccgccccttgttctgtcgtggcgtcgggccgttccgctgggccgcgctttcaggggatccagaggacatcttcaggaccgatgccaaggtcaaggaactgatgccggacgacaagcatctgcacaattggctcgatatggccaagcaacgcatcaagttccagggcctgcctgcgcgcatctgctgggtcggtcttggcgatcgtcatcgcctgggccttgccttcaacgagatggtggcgcgcggcgaactgaaagcgcccatcgtgatcggccgcgatcatctcgacagcggctcggtggcgagccccaaccgcgagaccgaggcgatgaaggacggatcggacgcggtgtccgactggccgctgctcaacgccttgctcaattgcgccagcggcgcgacctgggtctcgctgcatcatggcggcggcgtcggcattggttattcccagcacgccggcatggtgatcgttgccgacggtacgccggaagcggcagagcggatcgagcgcgtgctctggaacgatcccgccagtggcgtcatgcggcatgccgacgccggttacgacatcgcgatcgactgcgcccgcgacaaggggctcgatctgccgagcatggcgagctag

SEQ ID NO: 2767 - DNA, 726 bp, BradyrhizobiumColbertium
gtgcgattcatcgacgaaatggcccgaaaagcgcagagaaccgcgaaacgaccggtccgcaagcggaccgaggcaggcagcaagtctgcgccaaagcgccgcaacatgcgtgcggcagatcgcgagcgtgcgatcgtcgaggaggcgatccgtttcttcgccgagcacggcttcgaaggccagacacgtgagctcgccaagcggatgggcatcacacattcggcaatctaccggcacttcccgagcaaggaggcgctgatcgagcgagtctatcaggaggtttatctcagccgctggtcgcccgactggggtgccatgatccgcgagcgggccctgccgctggaggcccggctcacgcgtttctatctcgactatgtcgaccgcgtgttcgaatataactgggtacggatcttcgtgttctccggcatgaagtcgttcggcatcaccagccgctatctcgacatcgtccgccgcgagatcatcgagccggcggcggccgagctgcgtcatgagctgaagctgcccgggacagaggttcacgccttgagcgagcgcgagaccgagctgttctggggcctgcacggccgcatcttctatctcgccattcgcaagttcatctacgcgacgccaattccatccgacctcgacgccattgtccgcgacgcggtccggactttcatggacggcgccaagacgacgatgccaaggctcctggaaagcgactga

SEQ ID NO: 2768 - DNA, 861 bp, BradyrhizobiumColbertium
gtgaaggcgagggctttcagctattttcgtgctgcgaccatcgatcaggcgctggacgctcacgcgcgcgcaggggacgatgctcgcttcattgccggcggccagagcctcgtgccggcgctttcgcttcggctgcaggcgccgcggctcttgatcgacatcacccacatcgacgagcttcgcggggtcaggcgcgaaggcggttacctgcgcatcggcgcgctgacacgtcattgcgagatgctgactgaggcgtcgatcgccgagtccgccccgctcttgcacgtggcggcgccgttcgtcgcccatcccgcgatccgcaaccgcggcactattggcggcagcgttgcgctcgccgaccccgcttctgaatttccggcgatgacgctggcgctggacgccgagatcgagatcgtcggtccctcaggtcgccgccgcgtcaaggccgatgatttcttcatcgacctgttcgagacggcgctgcaacccggagagctgattgcggcgatccacgttccactgttcagggccgatcagcgctttgcgttcgatgagctggcgcggcggcgcggagactacgcgctggtcggttgcgggatcatggcgacgtgtcagggcagccgcatcgaggacatccgcatctcgttcttttccgtcggaaatacgccgacacgggtgaagggggctgaacgcgccctgatcggcgcgcgtctcgatgttgagcgtatcgcggccgcgcaacgagcgctcgaatgcgatctcgccccgcccgagggtgacgaggtgccgccggccatgcggctgcatcttgcccgcgtgctgcttggccgcctactcggacgtcttggagagggcgcatga

SEQ ID NO: 2769 - DNA, 522 bp, BradyrhizobiumColbertium
atgagcggcttcgacgagaccctgttgggtgaggccgacgagacagtgcgggtgcgtttcgtcgtcaacggccgcaaggtcgcctgcgaggtcgcgccgcgcgagacgctggtcgactgcctgcgcgaaaagctcgagctgacgggcacgcatgccggctgcgagatgggcgcctgcggtgcctgcctgatccagctcgacggccgcgccgtgcattcctgccttatcttcgcggtgcaggccgacggcgccaggatcgatacaatcgaggggctgtcggagagcggcgtgattgcggacctccaggccgaattccaccgccgaaacgcgctgcaatgcggcttctgcacgccgggtatgctggtcaatgcggaagaactgctgtcgcttgtggcgcagccgagccgcgagcagatccgcgatgcgttgtcgggcaattattgtcgctgcacaggctatgaggcgatcatcgacgccatctacgcggtggccaaagcgcgctccggcggagtcaccacatga

SEQ ID NO: 2770 - DNA, 2376 bp, BradyrhizobiumColbertium
atgagcgcgcctctgatttcgctcgaccggcccaattcctatatcggccgttccctgccgcggccgaatgccaagcgcctgcttgccgggcgaggccggtatgtcagcgatctccatctgccacgcatgctccatgctgcgttcctgcgcagtccgcatgcccatgcgaagatcgtttcgatcaataccgacgcagtgcgcgcggtcgaaggtgtgcatctcgtcgcgacggggccggatctcgcaaagatctgcacgccctggatcggcacgctcgaccatttcaagggcatgacctcttcaccgcaattgccgctgccgctggatcgcgtggtctggtccgggcaggcggtggtcgccgtcgtcgctgaaagtcgcgcgatcgcggaagatgcgctcgagctgatcgaggtcaactacgaggagcttcccgtcgtcgtcgatgtcgacggcgcgcgtgaggtcggcagccccttggtcaatccgggcagtgccaataacgtttgcttccgcagccagcttgataacggcgctgtcgacgacgcgtttgcgaaagcctcccatgtggtggaggaggagttctccttcggccgccatacagcggtgacgctcgagccgcgcgccatcgtcgccgactacgatccggcagccggcatgctgaccgtgcatcatgcgacgcaaacgccataccaattccaggacctctactcgcggcactacggcattcccgaggcccgcgttcgcgtgatcgcgaccgacattggcggctccttcgggatgaagctgcacgtctatcatgaggacatggcggtggtcgggctctcgatcctgctgggacggcctgtcaagtatgtcgccgaccgtatcgaatccttcgtctccgatatccacgcccgcgaccaccgcgtccgcgcgcgcatggcgctggacgccaggggcgggattctcgcaatggacgttgtggatctgaccgcgatcggcgctttctcgacctatccgcgcaccagcgtggtcgagggcaaccaggtgatccgcctgatcggcgcgccctattgcttcaggaactaccgcgccacgctggaggtgatctttcagaacaaggtgcagaccagtcagtaccgcgccgtcggccatcccattgcctgtgccgtcaccgagcggctgctcgacatggcggcaagcaaggtcggcctcgatcccttcgccatacgcgcgcagaatgtcattgccgacgatgcctatccgcatacctcgccgaccggctaccgtttcgaggcgctgtcgcatcaggcctgcctcaagcgcctgcatgagatcatggactatgactcgctgcgagccgagcaggcggacttgcgcaagcgcggcgtctatcgcggcatcggcattgccacgttcgtcgagatcaccaatcccagcccggcattctatggggttggcggcgcccgcatctcctctcaggatggcgcgatcgtcagcctgacgccgtcaggtgaggtgcgttgcctgatctcggtcaccgagcaggggcagggcaccgagtcgatcatcggccagattgtggccgatcagctcggcctcgcgcaggagcgcatcaaggtcatcacgggagataccgaggtgacgccgcatggtggtgccacctgggcctgccgcggtgccggcatcggcgggggaaccgcgctgcagtccgcccgcgcgctcaagcgtaacatcctggagatcgcggcgctcgtcctgcaggagcagccgtccgcgctcgacatcgtcgatggcgaggtcgtggacgcgtcgacccggaaccagcggatgccgatctccgagatcgcgcgcatcgtctacttccgttctgatacgctgccacccggtacgcaggctcagctcaccgtcagccatcatttcgcgccgcagggctatccgttcgccttcacgaacggcattcagggctgcctgctcgaggtcgacgtcgagaccggcttcgtcaagcttctcaagcatttcattgtcgaggactgcggccgtgtcatcaatccgatgctggtggacgagcagctccgcggtggcatcgtgcaggggctcggtgcagcattattcgaggagtgccgatatagcgagaccggccagctcgtgaacggctcgctcgccgactacctcgtgccgatgccgatggagatgcccgacatagtcatcgcccatgtcgagacgccgaccgccgacaccgagctcggcgcaaagggtgtcggcgaggccggcaccgcagctgcgtctgcctgcgtgctcaatgccgtcaacgatgcactcgcgccgctgggcgcgaccatcaactccatcccgattacgcccgcaagagtcctaaaagccctgaagcgattctag

SEQ ID NO: 2771 - DNA, 1254 bp, BradyrhizobiumColbertium
ttggaggagatcatgcccaaatccggttcgacttggaagataacccgccgcgccgcgctcgccggcctctcggccagcgcagcgctgctcgccgcaccccggctcggccgcgccgcggacgagacgatccgcatcggctttccgactccgctgaccgggccgttcgcggcggaagcgcgcgatcaggtcaaatgtgctgagctggcggtgaaactcgtcaacgacaagggcggcgttgccggccgcaaggtcgaactcctggtgcgcgacgacaagctcaatgccggtgaagccgcgacccgcacgctcgagctgatcgagaaggacaaggttcacgcggtggtcggcgcgctctccagcgccgtgcagctcgcggtcaacgaggtcacccgcgcccgcggcgtgatctacgtgtcgatcagccagtccgacaccatcaacgaggccaaggatttcagcaaatacaccttccatgaggcgctcaatccgcacatgacgacagccgcggtggcgcgccagaccctgaagaagggcatgaaggtcgcccatctcgtcgccgactatgcctacggccacgagatgctgcgcggcttcaagcgcgctcaagcggcgatcggcgcggacaacgttggagagatcctgcatccgttcggcgccgcggactactcgacattcatgccgcgcctgatgtcgatgcggccggatgtgctgtgcatctcaaatttcggccgtgaccaggccaatgcgatcaagcaggcggtggattttggcgtcaagcagcagatgaagatcgttgtcccggtgatcctgcacaaccagcgcctggccgtcggccccgacgtgttcgagggtgtgatcgggggagccaattactactggggcctcgaggcgcaaagcaagtcggcagcggctttcaacgcagccttcaaggcggccaatggcggcgcgattccgaccgattacggcgcctatggctactcaggcgttgcctcgctcctgctcgcgatgcaggctgccggcggcaccgataccgacaaggtcgtcgaagcgctggagaagctgaagtacgacctcaccaagggcccgcaacactaccgcaaatgcgaccaccagtcggtgcagtcggtgctggtgctggagtccaagaagaagtcggccatgacaggcgagagcgacctgttcgcgatcctcgccagcgatgccggttccgaggacatgctgcgcagctgcagcgagctcggccacgcgacctga

SEQ ID NO: 2772 - DNA, 876 bp, BradyrhizobiumColbertium
atggatctgtcgcttatcatcatgcagcttctctccggggtcgcccttggggcggtcctggtgatcactgcgcttgggctgacgatcgtgttcggcatgctgggggtggtcaacttcgcccacggtgcgctgttcatggtcggggcctatgcgggactgtatctggcgtcgctcaccgggagcttctggtggggtctgctgcttgctcccgtcctgatcggcgccttcggcatgctgatcgagctcgtcctgatccgcaggctctatggacgctcaattgacgatccgctgctgctcacctttgggctcagctacatcctggtcgagggcgtacgcattgtgttcggcagcgatggtatcccgtttccaaccccgccgcagctgatcggtgtggtcgatctcggcatcggtttcttcccgcgctaccgtctgttcgttatcgtgctggtggcggtggtgctgctggcgctctggctgacgctggaaaagacccgcgtcggcctgatcgtgcgtgccggcgcccgcgaccccaccatcatgcaggtgctcggtgtcgatatcggccgggtctggctcgcgatctttgggctcggggtggggctcgccgcgcttggcggcgtgctcgccgggcccatgcgtagcgtcaatccggagatgggctcgctggttctggcggaagccttcgtggtcacggtaataggcgggctcggctcgattgtcggcgcggtcgtcgccggcctcatggtcggcatatccatcagcatggtagcgctgttcgcgcctgagatggcgaccatcgtcatgttcgcgctcatggctgtggtgctgctgatccgcccgcaaggcctgttcggcgtgagagggaggacggcgtga

SEQ ID NO: 2773 - DNA, 999 bp, BradyrhizobiumColbertium
gtgacgcacccttcgagcggcgaggcggtcgccaaaccctcacccggcgggctcggccgggttctcgaccagcgggtgctgctgtccatcgccgtgctcgccctgctaccctggctgctgccgtcaaaagcgctggccgtcaacgtcctgatctacggtgtcgtggtgatgggctacaatttgctgttcggctataccggattgctgtcgttcggccaggcggccttcttcggcgcgggcgcctacttcaccggaatcgcgatcggtcgctacggcgtgccctggttcgccgcggtgccggccgcggtcttgctcagcacctgcctcgccgccgcaatcggcctcgtctcgacgcgcacccgcggcatctacttttcgatggtcacgctcgcgctggcgcagctcgtctactacgtcgcactccaggcggcgtccttcaccggcggcgaaaacggcctgcgcggctttaccgtcgaccgcatcagcctgctcggctttcaggtgaatttcctcgaccccgtcaacaaatactacgtgctgatggccttcgcggcactggcgatgtggttccagtcgcgcatcctgaattcgccgttcggcgccgtcatcgaggcaatccgcgagaacgagcagcgggcgcgcgcctgcggctatgacgtcgaacgcagcaagctggtcgtgttcatgctatcgggcgcgatctcatcgctcggcggctgcatgctggcgttgcatctgtcgatcgtgccgctggacatcctgcactaccagacgtccggcatgatcgtgatgatggtgctgctcggtggcgcccgcagcttcttcgggccgttcgttggtgccgccagtttcctgatcctggaggacgtgatctcgctctggacgccgcattggcagatcttcgtcggcgcgatcttcgtgctgttcgtgctgtttctgcccaggggtatctggggcacgcttctcgatgccatgggcagcggaaaggcgcggcgatga

SEQ ID NO: 2774 - DNA, 756 bp, BradyrhizobiumColbertium
atgagcggcgagctgcttcgcgccgaaggcatcggcaaacgtttcggcggcttcgtcgcgctggaaggcatcactctttcgttcgcagccggccagctcacctcgatcattgggccgaacggcgccggcaagagcaccttcttcaacatcctctcgggagtgttgacgccgagttcgggcaagctgcacttcagaggacgggagctgaatggcctgccgcagcatcgcttcgtccatcagggcatctcgcgctcctaccagatcacgaacatctttccggatctgtccgtgcatgagaatgtgcgcgtagcagcccaggcgctgatcgtgagctacgatatcttgcgaaaccgcgcgcagctggttgagctcggtgcgcgcgcagacgctgcgctcgacgctgtcgggctgctgaccaggcgcagcgaactcgcaagattcctgtcgcacggccagcagcgcgcgctggagatcgcgatcgcgctggtctcggagccggaattgctgttgctggacgagccgaccgccggcatgggcccggaagaaaccaaggacatggtcgctctgctcgaacgtctcgccgacaagcgcaccgtgctcctggtggagcacaagatgaagatggtgctggggctcagcaagcgcgtcgtggtgctgcatcacggccgtttgctggccgacggcgcgccggatgagatccggagcaatccggaagttcgccgggtctatctcggacagagtgagggctatggctga

SEQ ID NO: 2775 - DNA, 720 bp, BradyrhizobiumColbertium
atggctgagaccgcgtttctccaagtcgacgatctccatgcctggtatggcgccagccatatccttcatggcatcaccctgcatgtggacccgggcgaagtggtcgccctggtcggccgcaacggcgccggaaagacgacgaccttgcgcgcgatgataggcctgatgccgaaggcgacggggcgcgtgcgcttcgcaggcagggaactgttgccgctccgcgcgcatcagcgcttccatctcggcctcgcctacgttcccgaagagcgccgcatcgtccccggcctgaccgtccgagagaacctccggctcggcctcgtcgcagtcggctccgatatcgaggagcgcgcggcgatcgacgagatcgccgaaacctttccgcgcctgaaggagcgcctcgatcaagagggcgtgacgctatcgggcggcgagcagcagatgctggcgattgcgcgcgcgctgatcgcaaagcccaagatgatcctgctggacgagccctccgagggcatcatgcccgtgctggtcgaggaaatgggcgttctgttccgtcgcttgcgcgacgagggcaagacgctgctgctagtggagcagaacgtcgaatgggcgctgcggctcgccgatcgcgcggtgatcatcgatcaaggcgaggtcgtgcatcaaagcagcgcagcggcactgctcgcggacagagatatccaggagcggtactgcgcggtgtga

SEQ ID NO: 2776 - DNA, 2010 bp, BradyrhizobiumColbertium
atgccgattattgatttgaagtcttatcttgccgccgccatgcggttgtttcgcgttccggccgacaatccggatctgacgcgcgcgcagttcgacgcgttctccaagcagatcccgctgctctacttcatcctcatcagcaacacgatcgcggtcgcctacacctatgtgaacgtggcgccggactggctgacgatcatcgtgccgagcgtgctgaccgtgctcgcaggcttgcggaccttctggtggctgcgtcagcgtcacctcgtgcgcagcgacggcgacatcctgcgcaatctgcgcaccaccaactggctgaccttgccgatcggggcgggcttcaccgcctggtcctttgcgctctacccctacggcgaccccttcgccaagagccaggtcgcattctacatggcggtcaccgtgatcggctgcatcttttcactgatgcatctgcgctcggcggccttgatcgtgacgctgatcgttgacgtgccctatgtgctgttcttcttcgcaacgggcgagccgacgttgaaggcgatcgccgtcaacaacctcctggtctccggcgcgatggtgacggtgctgttcatctactatcgcgacttcgccgatctcgtcgccagccgcaagtcgctgcttgcgcagcaggcagcgacgcaggcgctctcggacgagaatttccgcctggccaatctcgattcgctcaccgagttgccgaaccgccgccgcttcttcgccgagctgtcgagcgccttcgccgatgccgagcgcaggaaagttcgcgttgcggtcggaatcatcgacctcgacggcttcaagcccgtcaacgacaattacggccattcggtcggcgatcgcgtcctgatcgaggcgggccagcgcatccgtgaggtctgcgagggcttcggcccacagcgcgtggagttcgcccggcttggcggcgatgaattcggcctcgtcgtgtgcggcgatcccgacgacgccgacctcatgcggctcggcgaacgcatcggcggccaggtcaggctgccttaccaactcgacacggcccataccgggctgtcctgctcgatcggcttcgcatcgttcccggactccgcgacgacgtcggaggcgctttatgagtgcgccgactactcgctgtatcacgccaagcgacatttgcgcggccgcaccgtgatcttctcgagcgcgctcgaggccgagatccgcagccgcggtgtcatcgagaacctgctgcgcacggccgatttcagtagcgagatggatcttgtgttccagccgatcgtcgacgccatgagcgagcataccgccggcttcgaggtcctcgcgcgctggcgcagcgcccgtctcggcctagtttccccggccgacttcattcccgccgccgagcgtatcggtctgatccggccattgacccaggcgctactggtacgcgcgctcgcgactgccagaacttggcccgatcacatccgtctatcgttcaacctctccgcccatgatgtctgcgccgcagagggcatcctgccgctgatctccatcgtcgagaaaagcgggctagcgccacatcggatcgacttcgagatcaccgagaccgccgtgaccttcgacttcgtgcgcgcacagcagtcgattgcgtcgttgaaggcgatgggctgcggcgtttcgctggacgatttcggcaccggctattcgtccctgagccacgtgcaccggctaccgctcgacaagatcaaggtcgaccgcagcttcgtctccgacattaacgaaaatccggtgagccacaagatcatcaagtcgctcaccggcctctgcgacgacatggagatcgcctgcgtcgtcgagggcgtcgaaacccgcgcccagctcgacagcctgcgccgcctgggctgcgacttcattcaaggttactattttgcgaagcccatgccggccgaggcaattggcgcgtatctcgcgaaagaagaccggcgccttgaagccaacggagcaaaggtcgtcgcctga

SEQ ID NO: 2777 - DNA, 120 bp, BradyrhizobiumColbertium
atggccaagtgtttcgggcacaatttcgcctgccgcagctacggcctgctaaccatggctgccagcacggcgcaggggggaagtgcgcatgcgatcaccaaggcagggacatcagcctag

SEQ ID NO: 2778 - DNA, 1152 bp, BradyrhizobiumColbertium
gtgctttcgagactgatatcgttgctgcgccgcatccctgcggtagactgggcctttgcccgacttcggccttcgccgcacagcggcaatattgaggtcgcgccgaccgacagagacgcttcgccggccatcattgaggacaccacttccactgatgcagctccaatccccgaggtcagcagcgctccggtgcgtgacgctgacttcgccaccgaggctccggtcccagagaaggatgcggctgcgtccgtcgtcgcggagaaaccgttcaccgatatctgcgtcagcgacgtctcatcttcggatcgagcgacggaaatcgagacacccgcgacgacaccagtcgccgcagaggtgttagcttcgtcggccgaagcggagaacgaaccaactgcagtctctgacctcgccatcgctgccgacgatgaagcgcccgctggcaactgcgcagaggttgactccgtcctcgcagaagagattgtggcttcatcagcggacggcgcgaccgcttcgactattctccccgacgtcatcctcgaggcagtttcctcacccgaggtttccaccgatttcgaatcggttgtcgtcgagacaatgccggtgctcctcgtcgaggccgacagcgtcgcggtcgaagccaatcccgacagcgaaccagtgctgatcgtcgagatcgcgcagacctccgcgagcgatgttcctctcactacagccattgcgccggagacaaacgagccagcccgcgttggcgagatcgaaccggctccagcgcacgagcctcctgccccggagatgcgcaatgcaccgaaagtgcgcgcgcggcccgcggaaccgacggatcgcaccgcgctgatccggcagcgctgggccgagaccggaatcaggatgtggaatccgcggcttcacggcacaggcgaggccgcgctgaacatccagggaagcatcgggctactgccgccggcggccggcgagactatgccgcgctacgacaagctggagttcaagatgctcggcggacagatcgtctgcgagggcgtcatcgtcgaggcacccgcacagccgggcaaccgcagctttacgcggctcgtcgaacccaggaacaccgagcgagtccgcgagccgacgcgggagcgccaagccgttctcgcctga

SEQ ID NO: 2779 - DNA, 150 bp, BradyrhizobiumColbertium
atgacgacgggacgttcgtcgaacatgcagaacgaggccagcgacagcaagggcgcccaatcgccctcggccggcggcagcaacgcgaacaatatgggcagtcaggctggcggcagcgcaggttctggaggcgccggcgccggcaaatga

SEQ ID NO: 2780 - DNA, 150 bp, BradyrhizobiumColbertium
atgatctttttcatcggactctccttgattacgtccccagacaacccgcttgcaccaacgacgttcctgccgacgcgcgccagccctttgcatcaattgtcgttgctgcctaaggtcggggttccagtcctcaacgccagcggctattga

SEQ ID NO: 2781 - DNA, 810 bp, BradyrhizobiumColbertium
atgagaaaacttgccaccgtcggagcggtcttgctctggtccaccatcgcattcgcacaggatcgcactatcaccgtagcctcgaccacctcgacggagcagtcggggctgttcggccatctgctgccgttgttcgctaaggctgagggcatcagcgtgaaggtcgtcgcggtcggcaccggccaggcgctggatatcggacggcgaggggatgccgacgtggtgttcgtccatgaccggcccgccgaggacaagttcatgtccgaaggacagggcgtgaagcgctttgacgtcatgtacaatgacttcgtcatcgtcgggccaaagagcgatcctgcgcggataacgggcagcaaggatgtggtcgatgcgctgcgcaagatcgcggcggccaaggcgccgttcatctcgcgcggcgacaagtccggcacgcacgcggccgaactgaggttatggaaagaggcgggtgtcgacctcaactccggcaaggacagctggtaccgggagattggtcagggcatggggccggcgttgaacatggcatcgtcgtcgaacgcctatgttctgtcggaccgcggcacctggctgtcgttcaagaaccgcggcgagctcgccatcctgaccgagggcgacaagcggctcttcaatcagtacggcgtcatgctggtgaatcctgaaaagcatccgaacgtgaaggcgaaggacggaaaggccttcatcgactggctggtttcgccgaaggggcaggacgcgatagccggctacaaggtcggcggcgagcagctatttttccctaacgcgtcccactag

SEQ ID NO: 2782 - DNA, 699 bp, BradyrhizobiumColbertium
atgaacgatttcgcgcgatccatcggggccgccttcacgctgatcggcaacgccgacgccgagctgctgggcatcgtcgctctctcggtacgggtcagcctgacggccagcattgtggcgctgctgatcggcgccccgttcggcgccctgctggcgatcacgcacttccgcggccggcaagtcgtcatcgtgctgaccaatgcgctgctcggccttccgccggtcgtggtcgggctcgtcctctatctgctgctgtcgcggtccggcccgctcggggcggcgggcttgttgttcaccccggccgccatggtgatcgcgcagacgctgctggccacgccaatcgtggtggcgctggtgcaccggccggcgagcctgctgtgggcggagtacggcgatctggcgcggatcgacggactgtcagccctccgcagcatggccctgctattcgcgctgggccggacctcgctgctgaccgcctttcttgcggcgttcgggcgagccattgcggaagtcggcgccatcatcatcgtcggcggcaacatccgcggcttcacgcgcacgatgacgacagcgatcgctctcgaaaccagtaagggcgacctgccactggcgctgggtctcggattgatcctgcttgcactcagcgtcgcggtgtcgaccgtcgcgttcgtgctagtgggacgcgttagggaaaaatag

SEQ ID NO: 2783 - DNA, 186 bp, BradyrhizobiumColbertium
ttgattgtggcgaccgcagcggcgagaaccggtgcagttgccgtccgtgaatgtgcgtggacggcccggcctgccgccgaggtggaccgaagctgtcagggcgggctgccgaggaccaaggatttcgcgatggacgtgaccaggatcaccggcatcgagccggcgcaacagcgtcaggccggatga

SEQ ID NO: 2784 - DNA, 852 bp, BradyrhizobiumColbertium
atgatccaaaccgttggcatcatcggggcagggaccatggggaacggcatcgcgcaggtctgcgcggcggccgggctttcggtcgtgatggtcgatatttccgatgcggcggtgaaccgcggactttcgaccgtcggtggcagcctcgagcgcctggtcaagaaggagaagatgtcggcggccgaacgcgaagcgacgctcaagcgcatcaccggcacgaccgatcgggcaaagctttcggattgcgatctcgtcatcgaagccgcgaccgagaacgaggagctcaaggtcaagatcctcaaggacctctgcgccacgctgtcgccgcgcaccctggtcgcgaccaacacctcgtcgatctcaatcaccaagctcgccgccgcaacggatcgtcccgaccgcttcatcggcatgcacttcttcaacccggtgccggtgatggcattgctcgagctcatccgcggcctgcagacctccgatgacacccatgccaaggcgctggacttcgccaagcgcgtcggcaaggtggcaatcactgccaagaacagcccgggtttcgctgtcaaccgcatcctctgcccgatgatcaatgaggcgatcttcgcgctccaggaagggatcgcgacggcagaggagatcgatgctggcatgaagctcggttgcaaccatccgatcggcccgctggcgctggccgatctcgtcgggctcgacaccatgctttcggtgatggaggtcttttataggggcttcaacgaccccaagtatcgaccggcgccgctgctgagggagatggtcgatgccggtcatctcggccgcaagaccgggcagggcttctacacctatagcgcctga

SEQ ID NO: 2785 - DNA, 465 bp, BradyrhizobiumColbertium
atgtcggatcgattgaaggccgaacgcgaggcggcggctgcgcggcggagcctgttaacccaggatgcgatcgagcgcaccgggatcaccgaggagatgatcggggaactcgtcacccgcttttatggacgcgtgcgcgaggacgcgcttctggggccggtgtttgccgtcgtccagaactgggacgaacatctggccaagctccgggatttctggtcgtcggtcgtgctgatgagcgggcgttatcatggctcgcctatgcgggcgcacctgccgctgagcctggccggcgatcatttcgaccgctggctcgatctgttcgagcagaccgcgcgcgaagtctgcccgccgacagcagctgcgctcttcatcgacaaggcgcggcgcatcgccgacagtttcgagatggcgtcagcaacggtcgcaggccgtatcgcatcgccgcgtcacgtgctcaggtcgtga

SEQ ID NO: 2786 - DNA, 654 bp, BradyrhizobiumColbertium
atgtcgagagcatcgtgcaacgtcaactcaccactacctgggaatattgcggaagctgacgccgacgcgcgaaccgggcaaacgcggcgcacgctgctgctcggggcgcttgcgaccagcgcgtgtctcggctgttccccccaagtgcgagcaggcgaagatccgcctggctccgacgaacgcccgcggaagggcgatctgctcgtcttctccgagggcgacaacgagggaaagctcataaccgcagcagacgtgccagctggtggacctcccgtgcatgcgtggccgaaagatccgaacacatcggtcgtgcggagcgcctcgcggctcaatgaaatcctgatcatccggctcgatccggccgagctcgatgagaagactcgcgcgcgcgccgtcgacggcatcatcgcctattcggcgatctgctcgcatgcgggctgccccgtcaccgcctgggtgaagagcgatgtcggcgacaaggaggtgttcaagtgcatgtgtcacaactccgaatatgatccacgctcgggcgcgcaggtcgtgttcggaccggcgccgcgacggctcgcggcgttgcctctggcgctggcagacggatcgctcagcgtcgccggcaatttcatgggaaaggtaggtggcgcgcagccaggatga

SEQ ID NO: 2787 - DNA, 1725 bp, BradyrhizobiumColbertium
atgaccaggaagcaatggttactgtccggcatcgttgccttcacctgcctcgcctcgaccgccgccatgtcaggcccgatcgagaactattctccggtcaccgcgcagcgcctggaaaatccggagccaagcaactggatgctctaccggcgcacctatgatgggcatggctacagtccgctcgaccagatcaacacctcgaacgtgaaaaacctcacgccggtctggacctttgccaccggtgtggtcgagggccaccaagcgccgccgatcgtcaataatggcgcgatgttcgtgacgaccccgatgggtcaggtgatagcgttgaacgcgaagactggcgacgaatattggcgctacaagcggcagcttcccgacgatcttttccagctgcatccgaccaaccgcggggtcggcctgtgggaggacaagcttttcctcgccaccacggatgatcacgtggtcgcgctcgaagcaaagaccggcaaggtggtgtgggacaccaaggtgcaggactacaggaagggtcagtacatgaccctgatgccgttgatcgtcgacggcaaagtcatcgtcggcggctccggcggcgagttcggcgtgcgcggctatatcgccgcttttgacgccaaggacggcaaggagctgtggcgaacctatacgatccccggcgaaggcgagcccggtcacgacacttggcagggcgacgactggaagaatggcggtgggtcggcctggatgaccggcaattatgacaaggagaccaggacgatctattggggtgtcggaaacgcggcgccatggcccggtgagacccatcctggcgacaatctctacaccgcatcggtgctggcgctcgatcccgacaccggcaagatcaaggcctatcaccagtaccaccagaacgattcctgggattgggacgaggtcgaggcgccgatgctgatcgatctgcagcgcaacggtcgcaccatcaagagcctggtccatccgggacgcgacgcgatcttctgggtgctcgagcggacgcccaccaagatcaactatgtcgccggctggccgttcgtcttcaccgatgtctggaagggcatcgacgagaccggcaagccgatcgtggatcctgcacacaagccggtcatcggtaagcgcgtcgagttctgtccatcattgtggggcgggaaggattggccgtcggccgcctatagccagagaaccgggctcgtgtacgtgcctgccaacgagaacttctgcggcggttttaccggcgagaaggtccccctcaagccgggcgagctctggctcggcaccaagccggaagatatcggcctgaaaacaaagccgggcgcggatcatttcggcgagctccaggcttgggatccttccacgggcaagaaggtgtggcagcacaacttccccaagtcgcagctgttcggatcagtcacggcgacggcgggcgatcttgtcttcgtcggtgggaccaacgaccgcaacttccgagccttccatgccaagacgggcgaattattgtgggagcagaagaccaactccggcatcgtcggcatgccggtgtcctatgagatcgacggtacgcagtacatcgcgatccagtcgggctggggcgtggacgcgcagcgcatccaggatgcgctcgtgacgaacaatatcggcatcgaagccaacgtgccgcagggcggcgtcgtctgggtattcgcgctgaagaaatag

SEQ ID NO: 2788 - DNA, 258 bp, BradyrhizobiumColbertium
atgatcaacatctcaaaggcgctcgcggtctcgctggcgagcgcctttcttttgacggcctccggcgcgttggcccagagcaatacagccccgcccgccacggccccgcggccgactggaccggaccagaactcccttccaaacgccaacgccccgcccgcctcgaccaaccagaccaccgggcaacacaatcccgatccgaagattcgtgagatgaaccagaaggaaaaggacaaggtcgaacgtatgggcaaatag

SEQ ID NO: 2789 - DNA, 2313 bp, BradyrhizobiumColbertium
atgaatttcatcgacaatccccgcaagcttcgcggcttcgaaaggcaaatcaaggtcgagaagatctcgcgccgcagcatcctgaaaggactcggcgttaccggcggcttcgtgctcgccgcccccgtgatctcgcgccaggccctcgcctatgagaccggcgccggcaagatgccgcacggtgtcgtggtcgatccgcgcgtgttcgtttcggtcgctccggacggcatcgtcaccatcatcgggcaccgttcggaaatgggcactggcgtgcgcaccagcctacccttgatcgtggccgaggagatggaagccgattggtccagggtcaaggtgcagcaggcccatggcgacgaggtcaagttcggcaaccaggacaccgacggctcgcgcagcacgcgccattatctgatgccgatgcgccagatcggcgcctccgcccgcaccatgctggagcaggccgcggccaagcgctggggcgtgccggccaccgaggtcaaggcggtcaaccatgaggtcgtccacagcgccagcggccgcaagctcggcttcggcgagctcgccgcggacgcagccaaggaatcggtgccgagcatcgaaggcctgaagctgaagaatcccaaggacttccgctatctcggaaagggacaggtgggcatcgtcgatcttcacgacatcaccaccggcaaggcgctttacggcgcggacgtccgcttgcccggtatgaagtatgccgtgatcgcccgcccgccagtgacgggcggcaagctggtttcgttcgagcctgacgcggctctgaaagtccccggcgtcgagaaggtgatgcaggtgcgcggctggccgtggccctccaaattccaaccgcttggcggcgtcgccgttatcgcgcgcaacaccggcgccgcgatcaagggccgcgacgccttgaagctggtctgggacgacgggcccaacggcaaatacgactccgtcgcctatcgcaaggagctcgaggaagcctcgcgcaagcccggcctcgtcctgcgcaaagagggcgatgcggacgctaccttgaagggcgccgacaaggtgatcgtcggagagtactacattccgcatctcgcccatgtcgcgatggagccgccggtggccgtcgccgacgtcaagggcgacaaggccgagatctgggcgccggtgcaaagccccggcggtacccgcgaggacgttgccaagacgctcggcatccccgtaggcaatgtcaccgtcaacgtgacgctgctcggcggcggtttcggccgcaagtcgaaatgcgacttcgcgctcgaagccgccttgctgtcgaaagagctcggcgcgccggtgaaggtgcagtggacgcgggaagacgacatccacaacggcttcctgcacactgtctcagtcgaacgcatcgaagccggcctcgacaagagcggcaaggtggtcgcctggcggcaccgcagcgtcgctccgagcatcgcttcgacctttgccgccggcacggtgcatcaagcgccgttcgaggtcggcatgggcctcgtcgatatgccgttcgagattgcaaacatctcctgtgagaatccggaagcggccgcgcatacccgcatcggctggttccgttcggtctcgaacatcccgcgcgctttcgcggtgcaatcgatggtgggcgagatcgcgcaggcgaccggccgcgatcagaaagacatgctgctcgagctgatcggctcgtcccgcatggtcaagcccaacgtcaaggacctctggaactatggcgaaccctacgacagctacccgatcgataccgcgcggctgcgcaaggtggtcgagctggttgccgagaagggcgattgggggcgaaaggtgccgaagggccacggtctcggcatcgcggtgcaccgcagcttcgtcagctacatcgccacgatcgtcgaggtcgccgtcgacgacaaggggaaactgacggtgccacgtgtcgacacggcgatcgactgcggcacctatgtcaaccccgagcgcattgcctcgcagatcgagggtgccgcgatcatggggttgagcctcgccaaattcggcgagattaccttcaaggacggcaaggtccagcagaagaattttgacgacttccaggtcgtcaggatggatgactctcccgtcgtcaccaacgtctacatcgtgccggccgatccggacacgccgccgagcggcgtcggagagcccggcgttccgccgttcgcgccggcactgatcaatgcgatcttcgccgcgacgggaaaacgcatccgcgcgcttccgattggcaagcaattggaggcatag

SEQ ID NO: 2790 - DNA, 459 bp, BradyrhizobiumColbertium
atgatcatgatcaaggtgaagatcaacggccaggaacagagctgggacggcgacccggatctcccgcttctctggttcctgcgtgacgaagccgggctgaccggcaccaagtacggctgcggccaggccttgtgcggctcttgcacggtcatcgtcgacaagcaggccgtgcgcgcctgcatcacgtcggtcaacgacgttgccggacgcgaggtcaccacgatcgagggactgcatccgaatggcgatcatccggtgcagaaggcctggcgtcaggtcaacgtgccacaatgcggcttctgccaggccggccagatcatgcaggcggccgcgctgttgatggaaaatccaaaaccctcgcatgaccagatccgcgaggcgatgtccggcaacatctgccgctgcggctgctatcagcgcatcgagaatgccgtccatctggcatcgacgggggtgtga

SEQ ID NO: 2791 - DNA, 156 bp, BradyrhizobiumColbertium
ttgcgtcagagccaaatttgcaagccgattgacatcgatccgctcgcctatctcaccgacgtcctgaccaagatcgtcaaaggtcatcccaaccgcgacatcgaccagctactgccctgggcctaccgcactcaatccctcaaagccgtggcctga

SEQ ID NO: 2792 - DNA, 174 bp, BradyrhizobiumColbertium
atggccaaagcggaagtggaagtaatcacttcggagcagcgacggcggcattggtcgcgggttgacaaggagcgcatcgtcgctgcagcgttgcagccgggtgcgacgatcctgggcgtggcgcgcgcgtttggtggtaagcgtcgtcttcaggccacggctttgagggattga

SEQ ID NO: 2793 - DNA, 144 bp, BradyrhizobiumColbertium
atgcattatgccgttccgcaatctgcgcacaccatgatcatccaattccgtccaggagcgcacggggtcggcctgaggcaaaagatcgaatggcaattcgaaaggcaaaaattcgacgctttcgacacgcggctggctcgataa

SEQ ID NO: 2794 - DNA, 282 bp, BradyrhizobiumColbertium
atggcgtgccagtttggctgcggctcaaagggaaagctcgccaactatgtggcgagcggcgattgcaacgcacgcaacgtgaaggacggaaatggcgtcagcgtctgcacctatctcctgcgcggcgccggctatgacgtgtcctgcttcaccggtcagcaatccaatgtgtgcgtgcagacgccgaccggccctggcgatttcccgacctctaccgggatcgcgtcgaatccgccatcggcttcgaccgcgtcgatcatcgtcggcccgaccgagatctga

SEQ ID NO: 2795 - DNA, 177 bp, BradyrhizobiumColbertium
gtgaccataattggccgcaccctgcaaaaagccctgtttgccggccgctcagacgaagtcgtgttctgggcgctggtccacgcgcattacagaggcggcaatctctgcgccgaggttgaagaacaactcaacggattctcacgtttcattctgcgcgatccgaccgagctcaactag

SEQ ID NO: 2796 - DNA, 231 bp, BradyrhizobiumColbertium
atggccaatcgggtcgatacggtgagcgccgtcatcgattggcgtcttatggtcatcgcgatgcaacttcgcttcttcgtgcggccccttggatttccgacgcgcatgggaagggacgaggtcgtcgctctgcggatgtccttcaaccgcgagacccttgccgccctgcatgatgcgcgcggctgcacgcattccgttctcaacgacgcgtcatggccgacggctgcctag

SEQ ID NO: 2797 - DNA, 1689 bp, BradyrhizobiumColbertium
atggaaggcgtgatgatcggcccggaggtcggatcatgcggtgtcgcggcttacacgcgaaagccggtcttggtaaccgatatctcggctgatccgaaatggacgaaatattgcgctttcccgacaagccttggcctcaaggcctgctggtcggcgcccgtgattgatgacggtgagcccatcggtgcgctggcggtgttcttcccggaggctcgcggtccctgcgacgatgagctggcggtgttcgcgagctgcgtggatttgtgtgcgatcgccatgcgccgtcacgaacgggctttggagcgcgagcggcgggcaagcgtcgatgcgctgaccgctcttccaaaccgggccgccttcaacatcgccctcaagagcctcgcgtgcgatgatccgggatcgtggggtctgttcgtcgtcgacctcgacaacctcaagatcgtcaacgatacgttcggccatcgcgcgggtgatggacttctgcagaccgcgagcgcgcggattgccgcggccgtgtctccggacgtgacgtttcggctcgggggcgacgagttcgctgtcgtcatacggcggccggaggccctggccgatctggatgagacggcgcatcggatcctcgaggctcttcgcgcgcctgccgactgcgacggcaacgccatcgttccgtcgggcacaatcgggggcgccgttgtctcgacaggcgatgagagcgcggaagcggtctacaagaatgccgatttcgcgctgtatcacgcaaaggagacaggacgcggcggctttgtgcggttctggccggggatcgacacgcggatcgtcaaccggcaagcgacgatcaaggatgtgtcggcagcccttggggaaggccggatcgatgcgcactatcagcctgtgatgcgcctcgacacgcgcgagatcgtcggtgtcgaagcgctgtgccggcttcgcaaaccaaatggcgaaatcgtacccgccgcgcgctttcgcgatgcgacgtcggacgcacgggtggcggttgagctgacaagcaggatgctggacgtcgtggcgagggacgtgcgccactggattgaccttggcattcccttccagcatgtcggcgtgaacgtttcgactgcggacttttacagcggtgatttgctgagcaagctcgaggcgagttttggccgggtcggtgtgccgctcagccacatcattatcgaggtcagcgagaacgtctcgatcggttgccgcaacggtgatgtggatcgcgtggtcgagcggctgcgcgcgagcgggatccgcgtggcgcttgacgatttcggaacaggacacgcttcgcttacgcatctcctcaacgttccagtcgatgcgatcaagattgatcaaacatttgttgctcgcctgaaacgccacgatgccagcctcgccatcgtgcagggcatcatcgacattgcgcgcaaactcgacattcgtgtgatcgcggaggggatcgaaactgaggcgcaggccgagcagcttgtgtcgatgggctgcaggttggggcagggcttcctgttttccgccgccgtggatcgcgattccatgaccgagatgttgcttcagcgcgcgcagggcatggcggaattcattccgatgttttacgagcagccgccagggtcggagcaaatcttcgatgccgtcacggagacggaattggcgcgcagcgcctaa

SEQ ID NO: 2798 - DNA, 288 bp, BradyrhizobiumColbertium
gtggccgcgctgcttcgggcaccaggtctcatcctcgcgcggaatggcaacgtcctttcttgtcgggaagtaaccaaggacattgcaaagatcgcgatagacgatccgccggcgttctttctccgcttcagccaggtcctgctgttcctggtgttctgcgctggaaatcccatccggccgacatcgcggacaggtcgccatgtgaatcacgcgttcccacgcgacaagggcatccacgtaaaccttgtgggcctcgacggctctcccttcgagctttttccacggtaa

SEQ ID NO: 2799 - DNA, 579 bp, BradyrhizobiumColbertium
gtgaagccccggcccggctcggcgacctggcgctatctcacctcggagcgcgcgctgctcgacgatgtcgttgctcatgcaacggcggccgactgcctgcgggaaggcccgcacggcagcatgtgggccgcccatcggtcggccaacggcgccctcacgggatgggaggaacgcgggtcggcctggcgcgggtttgccactgacggcgccaaggagctcttccgcctcggaccggcgagcgccgagcggatctgcgtcaccgaggcggcgatcgacgcgatgagccttgctgcgatcgaggtcctgcgcgccgatacgctctatgtcagcaccggcggcggctggtcgcccctgaccgacgaggcgcttcgccggatcgccgcgcgaggcggcgtcaccgttgtcgccgcaaccgacaacaatcggcaaggcgacatctacgccgagcgcatccgtgcgatcgccgcggagaccggcgccggctacgtccggtcgcggccgcgaggggatgattggaatgaagacctgaaaaccttgctggcgcgcttctcagcgcaccggcttgcagcccttgcataa

SEQ ID NO: 2800 - DNA, 906 bp, BradyrhizobiumColbertium
atgtccaaagccacgatacttgtcaccggagcgaccggcttgcacggaggcgtcggcggttataccgcgcggttcctgcgggaggcgggagcaaccgttcgggcactggttcgcacccgcgatcacagaagcgaggcgctcgacaaacttggcatcgagaccgttgtcggtgacttcatgaaccttcagagtctgcgcgatgccctgaaagatgtcgatcgcgcgctcttttgctatccgatgcggccgggtctgctcgaggcggcgatcaatatggcaatcgccgctcgcgacgccaaactgcggatactcgtcgatctgtcgctgatcccggcacgggagggcagtccgagcgacgaggcgagggagcattggctggcctcgcagatgttcgacatggctggcctgaacgtcgcgcatctcatgggcggtttcttctatgaaaacctcgaattcctcgcgggatcggacatggtcgcgcgtggagtgctggaagcgccgttcggcgatggcgacacgccgctgtcatgggtggcgggcgaggacattgcgcggtttgctgcatcagtgctgcaaaatccggacgcctacgtggggacgacccgttatgtaaccgggcccgaagcgctgacctttcgtcaggtggccgcgatcgtatccgatgtgttcgaaacacctgtccgatacgaaagcgatatttcgatcgaggcgtgggcggacagactgagcaagcatccctttggaaatgcgcggctggtgaagcacgcgtccgtgctcgcgcaggcgttcggaaaaacgaaggtgtcgttcggccaggtaaccgacgaagtcttcaacgcaagcggcgtgaaaccgatcaccctcaaagaattcctgttgggcaaccgagccctattcagcacctaa

SEQ ID NO: 2801 - DNA, 867 bp, BradyrhizobiumColbertium
atgagtgaaccaggttttgccgtctatcgtgaaggaccgatcgcggagatcgtgctgtgtcgtccgcaggcggcgaattcgcttactgaagatttctggatccgtttccctgaagcaattcgggagcttgatcaggccggcagcgtaagggcggcgatcattcggggggagggcgcgaacttctcgtcaggcatcgacgtggagttgctggaacgttttctcggtggagatgatgatgtcgagcccggtcgatttcgggcaagtttgcggctgatgttacttcgaatgcacgaagtgatgtccgccatggagcaggcgcgatttccgatcattgctgcgatacatggtacctgcatcggcggcgcgctcgatctcgtctgtgcttgtgacctgcgtctagccgcgacgggcgcctactttagcattcaggaaatccagatgggcatggtcgccgacctgggggtactgcagcggctatccgcgctgataccgcctggcatcgtgcgggagctggcgatgaccggacgcaggatgcccgccgaggaggcgcaccgttttgggttcgccaacgcgatggcatctgatgccgatggcacggtcgcggcagcaagggcgttggctgacgacatcgcgagcaaatcgccacttgcgatctggggcaccaaagaaattctgaatgatttcgaccgtcgacggattgaggacggcctgcgctacaccgcagcgtggaacaccggaatgttcatgccagaggatgtgcagcggagtgtcgccgctgcgcggaaacgggcgaaggcatcctatcgtgacctgctcgatgtcgactacccggcagtcccgcgccagcgaacaactgtgaaagagtaa

SEQ ID NO: 2802 - DNA, 411 bp, BradyrhizobiumColbertium
atgctggtcgtgcgtgaagcgttcgcggggacgacacttttcgacgaattcgtcgcctataccggcgcgacaccccaagtgatctccgaacggcttaagcgactggtggaggccggcattttcgaaacccgtgccaaggacaaggggcgcggttctgaatatgtgatgacggagatgggacgcgatctacatccgatcatcagcaccatcatcgtattcggcgacaaatggctgtcggacgggaaaggtccgccgcaggttacacgacacgtcggatgtggatgtgtaaccgcaccgcgtctcgcctgttccgagtgcagtgagttcgtctcgccggcaaacctgacgcgagagccaagtcctgcgatgcagcgctatcgtgcacgcatgctgactgctgcgtccaagtga

SEQ ID NO: 2803 - DNA, 678 bp, BradyrhizobiumColbertium
atgccgctgtttacgatcgagaccacctatcgcctgccggtctaccgccaccgcacctatgaagccgatagcctcgaggctgcttgccgccttgctgtcgacgatgaaggctggggcgatgccgaagaggacgtcgattcctcgggcgaaacctatgtcaccggagcatgggatggccgcgactgcgcttacagcggcccggcgctggccgtgccgtcgcatttcgacgagaccgtccagcgcaaggcggatcatttcgagatcctgctcggcctggtcaaggttcttcgcggcgcggctgacggaaaacacagcgcctattggatcggtcgcgccggttcggccatcgccaaggcggaagcgatccttgccggttcgcgtgatcccgcttctgacgtgtccatgccgcggccgcacatcctcgtgtccttcgatgagagcgaggtgcgttcgacgatcggggagatcatcgccggcgacgagaccctcgcgatgttctcggcggattcgatcggtgacgacgacatccataccgcctgcgtggcggccgtcgcagcagccgacttcgcggaagagagaggatcggtcctgttcaaagcggccatcgctgccattcgctcggtttggagagcgcctgattggggagaaagacgaagggagatggaaagggaggaatga

SEQ ID NO: 2804 - DNA, 603 bp, BradyrhizobiumColbertium
atgacccgctcttcgatccgcaaggtctatcaaggcgccgccgaccgccggcagatgttccgcatgttcgatcggcacaaggagcgaccgaaccgcacggacgacgacgcgaccgcgctttacgcgggcgagtggttcgagatcggcacagccgagcatgactacatgttcgagatcctgccgccattgtggatgcgcggtgatatgttcgccatgcgcgaattcctcaccggcagtgtcacgagcgtgttcttcgagctgaagatcgacggccgcgtccgctatttccacgcctattgcgaccttggcgaccggcagtcgcccgaacggatgcgcgccgcgatcatcgagcgcgagtcgcgtccggtccgcgccatgacgcgcgaggagcgcctcgagcatatctggtcgagcacgcacgatccctatcgtggctatgccgactggcgctttcccgccgcagagcgcggcaagcgcatcgtgatcgtctacggccaggatggcaggcatgatttccgcttgctcgaccggctgaccgacgcggatatcgcggtgaagctgccggtgcatctgcgctacctgcccgacgcgatcgcggcatag

SEQ ID NO: 2805 - DNA, 399 bp, BradyrhizobiumColbertium
atgttcaccttctccgtgacggcgatccacgccgtgatcacgcgcgggcggatcgacgcccgcatgaacggcggcttccgcaatccccattacggcctggcgcccggcaaggacgaaaagcccggcgtctggctggtcggtgacgaaggcgtctacatcatgtccaacggcaagctcgccgatgggcaacgctccttcgtcatctatgccgaggaatgcgatccgaagaccaaccccgattactggcactacaagcgccagtatttcggcggcgatgacggcatcgacttcctcgatgccgaactgctcgtgcggtcgatcgaggcactagcctcggccacgcacctcacgatcgagatgaccgacgacagcatggcgatcacgccgatccgccgctga

SEQ ID NO: 2806 - DNA, 1047 bp, BradyrhizobiumColbertium
atgaccaccacacctttggcctcgatcggcatcgacatcggcaaggaagtcttccatgtcgtcggtttcggcactgacggcaagatcgctttccgtcgcaagatcaagagactggcgctacttgaggtcttcaagagactgcctcccagcatcgtcggcatggaggcttgtctcagcgcgcactttgtcagccgtgctctgcggcaacttggccatcagcccaggatcatccctgcgatctatgtaaagccgttcgtgaagggacagaagaacgactacaacgacgccgaggccattgcagaggccgccctgcggccgaacctgcgcgtcgtgcgcgagaagacacaggatcagctcgacctccaggctttgcatcgggttcgctcccgcctggtctcgcggcgaacggcgaccatcaaccagatccgtgcctttctgatcgagcaaggcatcgcggtcaggactggggcgatggctctgcgaaactcgctcctggcgatcctggagaaccggcaggacgaaatatcgccgcgaatgcgcgatctcatcgtgggtctctacgaagactggatacatctcgatgagcggatcgcgaccctcgccggcgagatcgatcagatcggcgagaaggaagccaactgtcagcgcctcatgagcgtccccggcatcggtccgctgatctcgaccgccgtcgtggcggccatcggcaccggtgaggcattcgagcgcggacgagactttggtgcatggcttggcctcgtgccacgtcagtacagcacgggtggccgatctattctgggacgcatctccaagcgcgggagcaagtatctcaggaccctgttcatccaggctgcgaacgtcatcctgatgcgcccgcacaattgggatcgcttcagcttcggagcatggctgcagaacgcagctccacggctacaccgcaacaagctggcaacggccctggccaacaagctggcgcggatagcatggagcatcttgcgcaacgagaagaccttcgacgcaacccattacgaagtgatcgcaatctga

SEQ ID NO: 2807 - DNA, 198 bp, BradyrhizobiumColbertium
gtgaccggcgtctcttcgctgtcgaacggagattactacttccgcggccggatcacgcgcggctctctctctagctcgaacagttcgaatgtcagcgtaacgatcgcggtcgcatctcatgcggtcgaattggaaggctcaaccgacctcattgaacttgagggcaccaccgacaacatccaactggaggccgcataa

SEQ ID NO: 2808 - DNA, 9051 bp, BradyrhizobiumColbertium
gtgaagttccgcgacaacatcgcggcaatcgagaccctgaagaccatcgagcgcgagaaccggcgggcgacccccgccgagcagcgcacgcttgcccgctatgtgggctggggcggcctcgccaacgccttccgcgacaccgagggcaacctgaaggcggactggaaggaccgcggcgaacagctcgagtccctgctgaccaaggacgagctcgcggccgcgcgccgctcgacccgcaacgcgcactacacctcgcgcacggtcgtcgatgccatgtgggaggccgcgcgccatctcggcttcaagggcggcctcgccctggaattgtcctccggtaccggcaacttccttggcctggtgccggatgagatcgccggcaacacgcgctttgtcgccgtcgagttcgacagcatcaccgcgcgcatcgcgaaggcgctctatccgcaggacaccgttctgcactccggcctccacaagctgccgctgcccgagggcgaggcggtgctgaacatcggcaatccgccgttcggctcggagtcgctgcgcttccagtacaagcccgagctgaacgggctttccatccacaatcagttcttcctcgccgggttggacgcgctgcagccggggggcctgcagatcctcgtcgtctcgcgctacctgatggatgcgcaggacacccgcgcgagggagatgcttgcgaagaaggcgaagctgctgggcgcgatccgcctgcccgacaccgccttcaaggagaacgcccgcacggaggtcgtgaccgacatcctgttccttcagcggcacacggccgccgaggaggaatatgcggccgagcagttcgagaacgccaaggacgagcgcaaggtctccgacatcccggattgggtgaagacgacgaccgtccgcgatccgctcggcggcgagccgatggtggtgaactcgtatttcgcgaagaagcccaacatggtcatgggcaagctggaacgctccggcacgatgcgcgagaagggcgaggtcaacgtcaccctcgccaagggcgcggatctcggcgcgatgctccgcaaggcgatccagaccctgccgcgcaatgtgctcgacctccatcaggaggtgatggatgccacgctcaagcgctaccagaccatgggcgagtcccttgagatcgcgctggccggtcacgagatcggccacgtcgagcagaccgacggcaagctctaccagatcagcgagcgcgagaccccgaccggcggctatgagccggtcaagcgggaggtcacgccggatagcccgtggtcccggcagttgctgatggacagcgaggggcgctggtacaccctcgaaccgaaggtcgatgcgaagggcgccaaggtcaaatctggcgcccgcaacgtctatgagcgcagctatttcgagggcaacgtcgtcccggccgcgatgcggctcggcaaggcgaagtatgataagctcaaagccctggtgaacctgcgcgatctcacgaagcgtcagctcacccttgaggcggaggatgcgccggccgcggagatggagggcaaccgcaagaagctggcggacgcctaccaggcattcgtcggctcgaacggctatctcaacgaccagggcaacctccgcctcctgaacgaccttccggacggcgcgctggtgctggccttggagaccggctaccgcgctcccgtcacgcacgcgaaggcggctcgcaccggagaggcggccaagcccgcctccgccaagcccgcgccgatcatgtcgcgccgcgtcgtgccgaaatacgagcccgccacccgggccgacactccgcaggacgcgctctcgatctcgctctcggaagtcggccatgccgacatggaccggattgccgagctgctcggcaagacccgtgaggaggcgatcgaggagctgaccgccggcgacaagcccctgctctacaaggacccggagaccggcgcgtacgaaactgcgaacggctatctctcgggcaacgtggtgcggaagctgaaggcggccgaagccgccgggctgacgaagaacgtcgaggccctgcagaaggtccagcccgagcggtggagcgcggagaacatctccgccatgccaggcgccaactggattccgccgcaggtctatgccgacttcgcaacccacatgctcggcgtcccggccaaggtccactattcgcaggtcacgaactccttcaacctgtatgtcgacgactatagccgcgagaaggcggaccagtggggcaccgccgatgttccggcggatgcgatcctgcgcggcatcctcaactcgcgcgtgcccaaggtcatccgcgaagatggcgaagggcggaagtatgtcgatcaggaggcgaccgcccttgtctcgctgaaggcaaaggaaatcgagaacgagtttgctgattgggtgttcgccgacagcgcgcggcgcaatctgctgacggacatctacaacgaaaagttcaacacccgcgtcaatcgccagcacgacggctcccacctcgccctccccggcaaggttccggatgaggtcatcaagctgcgccgccaccagaagaacgcggtgtggcgcggcatctacgagcgcttcatgctgctcgaccacgtcgtcggcgccggcaagaccttcaccgcgatcgcgcgagtgatggagcggcggcggatgggcctgtcccgcaagcccatgatcgtggtgccgaaccatctcgtcgatcagtggaccgcggacgtctaccgcctatacccgggcgccaaggtgctcgcggccggcaaaaaccagttcgagaagaaaggccggcgccggctgttcgccaagatcgccaccggcgattgggacgtcgtgatcgtcccccactcctcgttcggcttcattggcatctctccggagaccgaaagccggttcctcgaggaggagctgcgcctcgcccaggaggcggttcaggaggcgcaggaccaggccgcggccgacggcatcggcggacggtccaaaccgttcacggtcaaggaggccgagcggctggtgacaaccatcgagagccggctcgattccctgaagaaggccggtcgcgacaacatgctcaccttcgagcagatgggcgtcgacgacctgaccgtggacgaggcccacgagttcaagaacctgttctattcgtcgcgcctgacgggcgtgcgcggcatgggcgacaagagcggatcgcagaaggcgttcgacctctacaacaaggtgcgcgtgctacgggatagcccgaacggaaccgtcaccttcatgacgggcacgccgatctcgaacagcgccgtcgagatgtacacgatgatgcgctacctctcggcgcaggatctgaaggatctcggcatcgagcacttcgacgcctggcgctcgcagtatgtctcggccaccgcaaagttcgagccgaccgaggccggcgggttgaaggaagtcacccggctcggccgcaactggtcgaacatgcgcgccctgatggagctctattactccttcaccgacgcggtctcgcaggaagacatcaacaagtggtacgccgaggacaataacggcgcccgcttccccgtgccgaaggtcaagaccggcggtcgcaaggaggtggtggtcaagccgaccgaagcgcagtcggcgatgctgcggggcatcgtggcagggttcaacggcctgccgaacatcagcgacccctacgagcgcaatgccgagcgcctgaagctgatggatcgcgcccgcaaggtctcgctcgacgcgcgtgcggccgaccccaccgtgcagagcgacgaggccggcggcaaactcgatcagatcgccgacaagatctcggacatctacgaccgcacccaggcagatgccggaacgcagcttgtgttcatcgaccgcagcgtcccagcggccaagagcgacaagaaggtcatcaaggactatgacgacctgatcgcccggcgcgatgcggcgctggccgccggcgacgaggcccggtaccgcgacctcgtcgagcagttggagaagttcgacgccaacgagatcgagaccctgcgcgcggcccagaggggcggctggaacgcctacgaccagctcaaggccaacctgaccgcccgcggcatccctgccgacgaaatccgcttcgtgcaggaggccaacaacgacgccgagaagaaggccctgttcgacgccgtgaatgacggtacggtccgcgtgctgatcggctcgaccccgcgcatgggcgccggcacaaacgtgcaggagcggcttgtcgcgctccaccatggcgatgtgacgtggaagccctccgacatcgagcagcgcgagggccgcatcatccgccagggcaacaagctcttggagaagtacggggctgacaacttcgaggtggacatcctcgcctacgtcacggagcgcaccgttgacgcaaagatgtgggacctgaacgccaccaagctgaagatgatcaacggcatccgcaagtacgacggtgccttcaacatggagttcgaggacgaggactccgtcggcatggcggagatcgcggcgctcgcctccggagacccgctcctgttggagcgcgtgaagctaatcgccgagatcgacaagctcgaactgctcgaacgcgcccaccgccggaagatgttcggcatcgacgatgcgatctacgaccttgagcgggcgcagaagaactacccgggcatgatcgaggccggcaaggccaaggccgcggcgatccagagcgcgatcgataccgtccggcgcgatgctgcgagccgcacggtcgaggtcgagggcaagagctattcgaccaggctggacgccaacaatgccgtcgaagccgccattgaggcggcgaaggcaggcgacgagaacgcccgctacgccatcagcatcaacggccagcgcgtcacgaaccgcgagatggcgcaggccctgctcaatgaagccatcggcgatccggtaccgatcgaggccgttatcgacggcgacgtggtccgctcgcgcaccagcttcggccagatcgtcgcgcgcaaggcgaccgagcttctgcaccagaccagccgcgacaccaagaagccggtccggatcggcaagatgctcggctacaacctcgagctgggcgtctatccggacgcgcaccggatctcgctcgcgctgaccgacaacggcgcaaccatcgtcgatgttgagcaagcgtattcccacgacgccaagggtttcgtgccgcagtccggccgcgcgctgatcgacaagctggaaggcgaaatcgactacgaggcgtcgttcaccggcaagcggctgcaggacaagctcaacgaggccgagacccgcctgccttcgctgcgcgaggagcgcggcaagccgttccccaaggccgaggagttgaagggcctgcgcgaccgcctggaagaggtcatcaagacgctcgaccagcgcaccaaggacgccgagagcggccgcggcctgccggaggaagtagcctccgtcgcgcgcgtcaccagcgaggtcggccgcactgcccgcctctctccggagcgtcgggccaatctcgaacaagccctcacggacgtcgttcgcaagatcaccgggccgtccgtggcggtgcgctttgtcgctgagcaccccatcaacatgccggcaggctggggctccttcggccaggacaaggtcacggcggccggctcctacatcccggcgcgcgcgctcatcacggtcgcgctggccgatcccgcctatccgctggaacaggtgctcgacaccacgttccacgaggcattccacgcccttgaggacaagatcctcaccgagcaggagatggacgtcctgaagcgcgaggacgcgcgcctgcgggagatcgtgaagcgggcctatggtttcacggacgagcagatcggcgagatcgcaggcttcgagatccgcgccatggcgttcgagtattacgcctcccgccgggccaagggcctggaaccgcagggcctccacatcggcatccgccgcgccttcgaacgcctgctggacctcttccggcgcgtcaggaatgccctcaacgggctcggctaccgcaatgccagcgacatcttcgaggcggcctatgaaggcgcctacgctgaccgtcgcgcggccgttacggacaacgtgacggtgcaggccaacgtccgcccgcaaggcaacctgaaccggttcgagagctacgagccgctgccggagcgctggcaggactggtggaagcgtccggacctgaactggcgcgaccgtgcttggggcatgctcgatgcagccttcctgcgcgccaaccgggcgctcggcgaccgctacgtcgacatgcgccggctgcaggccgccgtcgagctgactggccgacaggtcaacgagggtgtcaacatggcgctcgcggccaccctgttcgagggccggaccgagaagcggctgaaggactattggatcaagctctggaagccggcgctcgacttcgcctacagccagggcattacccgcgaggatctgcaccgctacctctatgcccgccacgcgccggagcgaaacgcccacatcgccgacatcaacccgatgatgccggagggcggctcgggcatgaccgatgccgaggcgcaggagatcatggacgccttcgctgcggccgggaagctcgaagccctcgaacaggtcgcccagcggatcgacggcatcgtccgcaagatccgcagcatgatggtcgacgatcagctcgagcacgaggagacgatcggccagtgggagcaggcttaccagcattacgtcccgctgcgcggcttcgagtccggcgacgaggacatggcgcaggatctgcaggtgtcccgcaccggcaagggcttcgacgttcgcgggcctgagaccaagcaggcgctcggccgctcctccaaggctgacgacatcctgacgaacctgttcctgatgggcgagcggacgatcatccgcggcgagcagaaccgggtgggccgcaccgcgatgcggttcatgcagtcgaacccgcagccgtccctgtacgaggtctcgcgctccgagcgcgtgctgaccgacggcaggatcgaaacaacgaccgagaacgagctcgaccttctggaaggcgagcggccggtgacggtgcggcggatcaaccgcgacaccggcctggtcgagaccgtgacgcgggttgcctccggatgggcgaacgacagcttcgcggtgaaggtcggcgggcatacctactacatccggatcaagcatcagggcctgctgaccgctctgaagaacgttggcatccagcgcctgccttggctgatccaagcccatagctggctgacgcggcagttctcggcgttccggaccgcgcgcaacccggacttctttgtcccgaacctgttccgtgacgtgcaggacgccgcctacacgctcggcgccgagcagcgcacttcgctggtgaagaacttcgcgctcaacatcggcaccttgcggacctatgtggcggccttcatgggcgagctgatggagaaggacggcgcgctcggcgatctcgcccggcgcaagttcgccgacaagcgcggcgcgcagctttacgaggactggaagaagcacggcggtcagatcgccttcatgggcatcaacgacctcgacagcgcgcggcgcgagatcgaggcggcgttccacgagaccgaggagggttatgccgccaccgtcgccaaggcgccctatcgcctggcgcgctcgatcctgaaggcgatcgagttcttcaacggcgcgatcgaggccggtacccgcctcgccgtctacgatgccggcctcaaggccggcatgaccaagaacaaggcggccgagctatcgaaggagtcgaccaccaacttcaaccgcaagggcatctacagccccttcatcaacgccttctatgcgttcttcaatgcgcgcgtgcagggcggcgcgaagatcatccgcctgctgcgcaactcgaagatggcacggcgcgcggcgatctggctcgtggtcggcggcttcgcgacgacgctctggaacctcgcgatctctccggacgacgaggacaagaagcccgaatacatgcgccgcaaatattgggagcgggagcggtatttcatcttctacttcccgggcgcgaaggacccgatccggatcccgatgggctacggactgcaggtgttctggatgctcggcgaaaacctcgccatggcgtcgcaaggcaggatcacgccggcgcaggccgcggcgaactatctgtccaccatcgtctccgcgttctcgccggtccaggcggaaggctcggccaccgacccgggcacgtggctgcgctacatcatgccgtcgatggaaatgccgctgctcgagctgggcaccaacgaggattggcggcgcaagccgatacacccgaagttcggcaagaagggcgagccgcacagcgagcaatatttctcgaccacctcgccctacgcgatcgacgtggcgcagttcctcaacaaggtctccggcggcaacgctttcaagcctggcgcggtcgacatgtatccaggcgacctgcaatacatctggaacttcgctgccggcggtctcggccagaccaccaaccggaccacgacgctgttcaagaactggctggaaggcgttccgacgccgcccaatcaggtcccgatcctccgccacttcgtcggcgccaatgtcgagcaggcgactggcgaagcctactatgaggcccgggacgaggtgcagaggggcatggcgcaggtccgcaaggccatgaaggcaccggctgcgagcgatgacgccgcagccaccatcgaggaaggcggcaaccgctacggcctccgccagggcaagcgccgcggtaccgtcggctccgacgccgagaccatcttccggaacgccgacaagcagctcaagggccttcgggcgctcgaacaggccacccgccaggacaagacgatggacagcaaggctcgcgccgaagccatcgccggcctgcgccaagagatgcgcgaggtgcaggagcaagcgcgcaaagcctatcgcgagatcaagaagcgtgagccaagtttctag

SEQ ID NO: 2809 - DNA, 345 bp, BradyrhizobiumColbertium
atggcgcggcggagtcagccgatgagcgttccagaactgaaagcgctggccaggaagcactggacggagttcctgccgaagaaggtagcggagctgcgagcgcaggggacgttggacgaggaactgcagggagcagcgaccttggcgcaggcggagatcgagcagctgaagagccgcgggtatcaggagagcgaggcgcgggaagtggcgctgccgaagttcatcctgctgacgccggagccggtcgaggacgagcaggcgcgcgagctggcggcaaaagaggccgagtatcagaagcatccgccggtgccgaccgatccggaggagaacctgccggtccggtaa

SEQ ID NO: 2810 - DNA, 4047 bp, BradyrhizobiumColbertium
atggcatttgaagacctgatcgtcggcggcgatggcgccgacgagccgaccgctattgtctcgccggacctcatcgccacccgcaacgagcgcaagggactgactgacgtcagcgcccgcgcccgccagccggtcgatttcgggacggacgatgaagtgatcggtcccgcaccccgcgcgaaagccagcaagcagaccgactttggtgccgacgacgaggtgatcggctccgcgccgatcaagaacccgccgatgccgcgtgcgcgcccggctgaggcgcccggcctgatccagccaacccagccgatgccggacgtgcagccgctcgacaacgcgccattccgcgcgccgagcagcggcatggacacgaatatgctgaccggcgaagaggcatacgccgagcggcaagcctccatcgcgggcgccgaggccggcgttgccgaggcgcaggcgcgcctagacgccgccaaggcccgctcggccagcattgccgacggatcgacccgcgcgctccggcgcggcaccacgggcgacctgcagcggcagcagatccaggccgagatcgatgctgcgaccgagaacctcgcgcaagcccagcaggctctatccgcggccgagcgcgccgctccccccacccagaccaagcttcgcgatgccgcctcccgctttgccggagccgtgggcaccgccatccccgacgtcgtcggcggcatcgcccgcccgatcgacgccggcctcgacgccgttgggctcgatggcggtaccggcatcgccgagaagatgcgcgagatttcgcgcaaggtcgggcgcgagaaccagcccgatcctgtgcgcgaggaggagttgagcgctgcgctcggccagggcggcggctccgccatcggcttcatcgtgaccggtgcaatcggcaaggccatgaagatcccggctgccttcgcttccggcggcgccggcgctgcgcagaacgccgagcagtattaccgcgaagccgacgacatgggcgcgcccgcctacaagaaggcgctggcctacgccgtcggcgccggcatcggcggaaccgaggctatcggtctcggccggattgcggacgagctcgacaagaaaaccggcggcggcctgaagcgctacttcggcctcgtgatgaaggagatgggcgaggaaggcttgcaggaggcaggccagcagctgctcgacaacctcgccaagttcggcctgtacggcaaggacccgggcgacatcaccgcaggcgtggcgcagggcgcgcttgtgggcatgatcctgggcggcggcatggccggtacccttggtctcggcaacctcacggcgggccgcgatcgcgccgcgcgcgagggcgtgcccaccccggagcaggcgcccatcacgcccgaggagatcatccggcagatccttggcgaatccccggtaccgccgccgaccgcggcgccggctgtcaacgccaaaacgcaggaagaaattgcaggttcgttgcagccggaccagcccgcgagtgtgactgcgccgtcacagacggcgcagtcgccggctgaggaaatcaaccctcagccaagcaatgtcagtgccttacaggctgaaacggcgccagaggaaatcacccctcctgcgacggtcgccccggcgaaaaccgcctccgacgaggacgccgccctgctccgcggctacggctacgattcacagcagatcgcggatatgagcccggcccagatcgcggccgaggtcgcggccgcgaaggaagccggtaccgagcccgtgttcggcgaaggcgatgccgtcgtgggatcgcgcgccgagccagtcaaggtcgagacccctgacgatctcgagcgcgcagcgggccatgtcaacaccagccccacggaggcgcagaaggaggctggcacctacgccaaggggcacgtgaagtggaatggtctcgacatcacaatcgagacgccgaaaggcgcggagcgcagcggcaagggagcagacggccagccttggtctgtcacgatgccggggcactacggctatgtccgccggaccgttggcaaggatggcgatcaggtcgacgtcaccttcgggaatgacccgaagtccacgcgcgcattcgtcatcgatcagttcaacccggcaacgggaaggttcgatgagcataagctgtttgtcggttatcccgatcttgaaagcgcgacggccgcctacgatctatcgttctccgatggcagcggaccgcagcggcgcaaggctgtttcagagttgtccgtcgatcaactcaaagactggttgcgaaatggcgaaaagaagaaagcctattccgaagacgtttcacggtcaggccagaacgccgatgtacaagctttggctcaacgtgaaggatcggtgtctcaaccccaagaacccgtactatcacaactacgggggacgggggatcacgctccatccggagtgggcgaacagcttcccggcgtttctggaagcggtagggccgcggccgagcccgcagcatacgctggatcggaaggagaacgacaagggctacgagccgggcaacgtccgctgggcgaccaggctggagcaggcgcagaacatgcgcaagactcggcggctgacgtttcagggcaagacgcagtcggctcgcgcatgggcgcgcgagatcgggttgcatcccaagacagtgatgcgaaggctggatcaaggactgagcgtggaagaagcgctgtcgacaagaaggcgccctcacggtcggccacctcgcagcctgcaagcctcctccaattcatcgcttccaaaggtgggctccgccccgaccccgaactgaccgcgatcggcctgtccggctcgcaccgcgtcaacgtccccggccggaacggtcgtttccccgtggtgcgtgccatgggcgaaagcctcgacctgatgcgcgaggcggcggaggaggccggctatttccgcggcaccggcgaggccaccagcaccccgcgcgagttcctcgatgccatcgacaacgagctgcgcggccagcgccgcctgcccgagggccaggaggccgagccgtccaagcgcgagaccgagcgcctcgaggaggaaaacgccaaccgtgacgccctgctcacccagaaccgggccgagatcgaggcgatgctggaagcctatggcgtgcctgccggcatgaccaatgaggccgacctgcgccttgcggccgagatcatggccgacgagggcctggacccggacgccgcgcttgagcgggcagcaatccgcaacctcgaaaatgatcccgacatcccacaggaaaccgtctatgatgccttcgacttcggagccttcgatgctgttcaacccgagccaacaccggaagatgagcgcggcgctgaagcagaaagcgcagcaggagtccgacccggagaagaaggccgagctgatgagccggtcgaacacgtttctggcgctcgcgaagatcgcgaaggacccggccaaggtgaagcgcgtgaagaagccgagcgagccgcgcaacccggcgaagaagttccggaacgtgtagcgccggtcaccgagcgcaccgaggccggcgagcagaccgtcctgccgggcgccgagaaggagagccagggcaagcaggcgcagcgcaaggccgatcagccgctcaagccgaaggcggcgcagaaacccgccgacgagggcctgttcggcgacgatagcaggcagaccgatctcctcgacctcaagcccacccaacaggcccgcgaaagcgggccttctgcttctgacgacctcgacctcgacagcatcatcgatcaggcgatcgacaagtatgcgccggaggagaagcctgccccgaagaagcgcacggccagcaaggccgcgaagtccgcggccaagaacaccgccatgggcctcgccgaggtggcgaaggggctcgatgcgctgttcagcccgaagggcaagctcggcgcaggcccctccttcgacgaggagacctatgcgaggccaagcccttcttcatggcgggcgtggcgcatttcgcggaggccggtcgcgacatcaaggcaatga

SEQ ID NO: 2811 - DNA, 1050 bp, BradyrhizobiumColbertium
atggacctgacagacctgatctcacccaacaactacgtcgggcagaatttcccgctcggcatggagtcggccgacggcggcgacgatccgctcgccaagctgcgggagcttctcggcggtatgagcgacaatggcgctctgcccgtgaacgagcagcccacgaggggcatgcttcctccggatgaggccccgaccgacatcagcgctcgcacgcgacagccgctctctgtcccgctgccgacgccgcgcccagccgatgccccgcagggcatgctcgcctcgccggcggacatcacggcattcgcgccaaccgacatccagcgcgcgcagatgggccgtccgccgatcccgcagactaccgccgatctcgtatcggcgatcaccggccgcacgcagcagggaccgacggtcaacaaacttctcgcctcgctcggcggcggtctctcgaccgtgaccggcaatacagccggtggagccttcgctcgcgcgatgggcggcggcctgaaagctggtaacgaggccgacaagaccaactcggacgacgcggtcaaacacctcaaggcggctatcgaggcacagcagctcggcgacaagcaagcctacaccaaggccctgaccagctattatcaggtgctcacgaagcagaagaacgagcaggagaacgtcgccgccgcaggccccaagccgccgcgcgcgatcgacggccgcctgatcttcgacaaggccgagcgcgcgatccagaactccaaccgagccattgacggcgatttccgcctcaagccggaggagcgcgcgcagaagaaggcccaggaggccgcgcgcatctacaagggcttcgggctcaaccctgatggcacgatgccggccggctcgtccgctcccgcacccagcgctccggcctcgaagaaggccggcaatccgggcgagatcgcattcaacggagacggcacgcaagccgcgccctacgagccccggaccaaggacgattacgaccagatcgagtccggctcctactacatcgtcaacggtcaacttcgcaggaagaagtaa

SEQ ID NO: 2812 - DNA, 1143 bp, BradyrhizobiumColbertium
atgggttgcttcggcgacatggaagccaccaagcagcagacgacgtcgctgcctggttatctgcagaccgccgcacagacgaacgtgagcaatgcgaccaacgtcgcgagccgccccttccaggcttacaccggggagatgacggcccctctgacccagaaccagcaggatgcgtttggcctgatcaagtcgatcgcagggacctcgaacccgtacctgtccgacatcgagaacctctacaagacgttttccagcaccacgggtgtcacgcctgcgagcattctcggcggcgacaagaacgtcggcaacaccaccattcaggactacatgtcgccctatatcgcggcggcgcttcagcccgcgctcgatgacctcgcgcgcaccggcactgcgcagcgcaagtcgctcgatgcctccgcgacaatggacggcgcattcggcgatgcgcgcagtggtgtcgcgctggcgaaccagctccgcgacgaagccaagacgcggaccggcgtcgtcggccaaggctatcagagcgcatttgaccgcgccgcgagcctgcggcagagcgacatcgcggccgacaccgacgcgcaaaagacgaaccttaatctgatgctgcaacgggcgatttccggaggaaaggccctctccgatctcgatgccgccaccgtcgaccgcgggctcaagactgcgggtgctttggccgacgccggcaaggtcgagcagcagaccaaccaggcggccgacacggcgaagatggccgagttcctgcgaggccaaggctgggatcagcagcagatttcgtggctgacgtccgtgctcgccggcacgccgcgcgagaccactacgaccgtctcggagccgaacaactccggctggggcgcgctcggctcgatcggaagcactctgctctcggcgatcatctccgatcgcaggctcaagaccgacatttccgtgatcggcgcgacgctggatggcctgccgatctatcggttcaagtatatcggcagcgacgaatggcaaatcggcctgatggcgcaggacgttgaggaggtgaatcctgcggccgtgatcgaggtgaatggtgtcaaggcgatcgatttgcgccttgccacgcaggccgcggcggacatgggagctgacgtctga

SEQ ID NO: 2813 - DNA, 438 bp, BradyrhizobiumColbertium
atgtctgatcaggacgcgatcgagatccacaagctcctgatgatgatgggccaagaggtcgccgttgcgccagtcgatccgatcgtcgtgatggaagacatctatgccctcatcaacaccgagggcaaaggcgcgttcctgatggcggtaaagggtaccgagctcgttggcgtcatgggccttgagaatacgcggtaccgctactcgcgcgaatactgcatccgcgaagtctatcttttcgtgcatccggaccatcgcaacggcgatgtgctcggcgcgctcctcaacgaggcccgcgcgatcgccgacatggtcgacaaggaactgtacgtcaccatcgcaaacccgaaccggcgcagaggcaagacggagaaagtggcagccctcctgcgctaccagcctgttggctcaatctacgcaatgcatccgaggaactga

SEQ ID NO: 2814 - DNA, 126 bp, BradyrhizobiumColbertium
gtggggcctctgccggcatctctgcaaatcacggtggtttttacggcgctggaggcggcgcggcaggcacgttcaacggtggcgccgcagcgtcagcgaccagcggtgcaggacgtcaaggtctga

SEQ ID NO: 2815 - DNA, 153 bp, BradyrhizobiumColbertium
gtgcgggtagcgacgcctgccgtcactgccgaaacagccgcgcctccagcaccaatcgaatatgagatcgaagcgccaggcgttaccgtgatatttgtctgtcggctccagcctccgccgccgccgccgctggtgttgaagaagccgacttga

SEQ ID NO: 2816 - DNA, 720 bp, BradyrhizobiumColbertium
atgagagttcttgcgctcggccagccactcaacgactctccggaggagttcaaacgctgggtgcaggaggccctgcgggagatcgagcgagcctccaacgagcacggcggtgaaggagacgaggcggtctccaactcggctgggaccgcagtgccgcttgtcgatagcggctctggcgccgtcggcaccagcgcacggtgggcgcatgaggatcacgttcacccggtcgacaccgatacggcggccgagggtgcggcggcggccatcgctgcggcgctcggtacggctgatcctttgatggatgggaccgcctcccccggcgccagcaccaccaagctctcccgcgaggaccacgttcatccgagcgacacgtcgcggcttgcaaccgctggcgggcagaacgtcacaggcggctttacgctgacgccctacgacgccggcaacatgggctccggcacgttcacattcaatccagtgaacggcaactaccaatacgccgggaacaacggcgcagtgcagatacaggtgccggcgagcgactgcgccatggacatcctgatcaccaatggagcgtcggctggcgcgatcaccttcgcagcaggcttcacggtgaactccaacatcggcgagccgttcacgacaacgaatggacacaagttcattctctcgatccgccgcatcaacggcgtctcgacctatgtcaataaggcgctgcaatag

SEQ ID NO: 2817 - DNA, 1785 bp, BradyrhizobiumColbertium
gtgcttcccatggctgatggagagttcgaaccggtaccgctgacgccgccgcccggcatcgttaagacagagtccgatcgcgtcgaggaaggccgctgggtcgatacgcagtggatgcgcttcgtgaagggtcgtccgcagaagatgggcggttggctgaaacagaccacggcgatcgcatcagggacgctgcgcaccatgcacgcctggcgcgatctctcctcgattgagtatgtggccggcgggacatatcgcaagctctatgtttacgagcgcgactggacccagcacgacatcacgccgctcgacgcttcgggcacgttgacggacccattcagcaccactgacggcagcagcatcgtcaccgtgacgcatgccgcccatggccgaaacaccagcgacgtcgtcaacttttccggcgcaagcgcggtcggtggagtgaccatcgacggccagtacgaggttatcaccgctgtatctggttcctacaccatcaacgctggcaccaacgcctcttcgaccgccggacccggcggtgggtccgtagactacgactatgagatcccgatcggtgttgaactcggcatctacggccttggctacggcgccggcccctatggaactggaacctatgggaccgagcgcgctttctcgactatcttcatcgagccgcgcatctggtcgatggaccacttcggccgcatcctgctcgccgcctacaacggtggaagcctctacaaattcgatccagccgacgttccggcgttcggccgcgcgaccgtcgtggctgatgccccgaccgacatccgctatatgttcgtcaccgaggagcggttcgtcttcgcgttgtgcgatggcatgcgggtcgattgggccagccagaacgactacacactctggacgcccgccaacgacaacacggccaacacccgcaccctcgcggaggggacaaaactgatcgcgggcgcatcgctcggcaatcatgtctcgtgcgtctggtcggacttcgcgctctacatcttccagtacaccggcaccaacgcgatcttctcctcgcggctcgctggtcgcaattgcggcctcgtctcgccgtcggccaaggtcacggtgaacggaatcgcctactggatgggacaaaccaacttctatctctacaacggcgcagtggcgttcatcccgaacgtcgaggacatccgagcctatgtgttcgaccggctcaatgcggagcaagcctatctgtgctgggctcagtacgtcgccaaatacaacgaggtgatctggttctatatcgccctcggcgacacgcagccgagctattacgctctgctctgcctcaacgactattcctgggccgccggcgcgatggtccggacatccggtaccgcgttcagccatggcgacacccggccctatatggccggcgacgacggccacatctatctgcacgaggaaggcgtcgacggtgacggcgaagccgtgctggcttcgatccgcctcgccccgtcgagcctgatgaagggggcacagatattcaacatcgacggcatggtggcggatttcgaggatcaatcaggcgacatcaccgtgaccttcgagggttgggatcgcttgcgaaagccgaccgtagacagccagacaatcacgatcacagaggatgatgacctcgtcgatctgcgccttgaaggccgctacatctcgcttgagatgacgacggacgcggtcggcggatatttccgcttcggcaagcctgacgtcctgatctcctccaacggaacacgccgatga

SEQ ID NO: 2818 - DNA, 135 bp, BradyrhizobiumColbertium
gtgcgcatttttttcggaatcaccggagtagggctgttgatctggcttggcgcggtgtatttgctgccggagccgaagatggaatgcctgaactggctcgaaggaaagtgcatcaagatgcggtcagcgaagtga

SEQ ID NO: 2819 - DNA, 996 bp, BradyrhizobiumColbertium
atgccgtttgataccaattcggctctgctcggcctgctgatgcaggccacgggcagtaacaacaacacctggggcgataacctcaataatttcgtcttcgcctacctcgagcaagcgattgccggctatgtgaccaagacggtcactggcggtgcggcgacgctgacggctgcccagcaccgcgccggcatgatcgagttcaccggcaccctgacctcaaattcaaccgttacggtcgacaacatctcgaagcggtggcgcatcttcaacaacacggacggcgcctatgtgctgttaatgaaaacggcctccggcaccgcgatagagatacctcagggcacccacaaggacgttgtctgcgacggcaacgacatcctctaccgcgaggatgagaacgaggtcggaaacttcgttctgcacggcgggaccaccgcacctccgggaacgctggcctgctccggcggcaccttcgttcgggctgaccaccctaacctctacgacaagatcggcaccacatggggcgccggcaatggcgtgacgacggccggcctgccgaacctgaccgacaccaaccgcttccttcgcgccgcgggcggcagcttggcagtcggtacatatcaggccagtctcgtcggcgcgcacacacatacggcgtcggcaaccaccacacttggcggatcgaccgccagcgatggcagccacacgcataccgcaacatcgaccgacgcgggccacagtcacaccaacggtgcggcttcgctggcgggaagcaacaataataatggcggaggtggcggtgcgttcggtgccgtcgtcggaacggtgtccgtaaccggaactggattcgcgagcatcacgacgacggtaacttcaggcggtgctcatacacacagccttgccggtggcaccgcgacaacgaccgttacggtagatgcaaacgttggggcagagactcggcccgagagcgcagcggttcttgtttgcatcaagatttga

SEQ ID NO: 2820 - DNA, 627 bp, BradyrhizobiumColbertium
atgaattacaccacgctggtagcggacaagacgacacctgggtcaatcaaaaggttcgtcaattactcgcagcttgatgccgagcagatcctcgaagaggctcaggcgttgatcttccagaccttgcgcgtgcgcgaaatgcgggtcgagttcgacaacattgcgatgtcccctggggatttctacgcgcctctgcctgacggattcctcgatccgatcgccctcaaggacgtcaccaacaatctcgacctcaagctacgtcccgagtccaacattgtcagcgcccgcacttatgacgcaggatcgctgatcgagagcattccccagcgttatgcgatctatgacgagaagctgcaattcgagtgtgcatacgaaagcgcagcgacgctcaatttggtcgggttcgagaagccggcccttctatctggatcgaacaccacgaactttctgaccaatcgcctacctcacctgcttcgggttgcctgcctcgcgcaggcttacgacttcatgtcgaaccagacgaagtaccagaacaacctgacgatgttgagcgccttgatcgacaagacgaacgcggagagcgacctgtcgtaccgcgacgtcacgttcgaggtggagatcggatag

SEQ ID NO: 2821 - DNA, 360 bp, BradyrhizobiumColbertium
gtgcgcatcggaattgatggcacgaagtactacgcgcaccgcctcgcctggctctatatgactggcgaatggccagacgagcagattgatcaccgagacaccaatcgcgccaacaataggtggggcaatctacgcctcgccacgaaccaacagaacgcgatcaacatgaagcgcccgaaggacaacacctccggtgcaaagggcgtcctctggtccaagcagagcgggaagtgggtcgcgaggctggtggtgaacggccgccaactgcacggcggtttcttcgatacggtcgaggaggcttccgccgcctatgtgcgattggccaagatgcacttcgaagagttcgcgagggcagcatga

SEQ ID NO: 2822 - DNA, 465 bp, BradyrhizobiumColbertium
ttgactggaccgaaactcaaactcgacaggtcgcgagccttcgcgacctgtcacggcgaaggcttgacccatgccttcgaacaggacggtttgccgttcgaccaccagggcgagctcgctatgtccatggtgaaaacccctgcgcagaaggcgctggtggagaagaagttgcgccggctgaccaagttggaagccggtgcaccgagcagcgatcctgaccttcaggagcccccgacgcccccggaagcggatgacgacgagggcggcgacgacaccgcgatgaacttcgaggcgtggctgaaggacgaggtgcaatacccgcagcacgaggtcttcaaagaggcccgccgccgcttcaacaaggtgttcaccaactacaaggcactggccgagttcctcgtctacgacgaacaggttctcggcccggacgaagtgccgaccaagcttggcccgcggagcgcctga

SEQ ID NO: 2823 - DNA, 180 bp, BradyrhizobiumColbertium
atgaagaacgaaagcaactccaccatcgagcggtcgaaggtggcgcgcggcacgatcgttaccggccacggccgggacgactcgagcatgagcgtccccaaggccaaggaagcgaagggcggcgtgaacaacctcgcgcactccctttccggcgcgtccgccgttcaggacgtcaagtag

SEQ ID NO: 2824 - DNA, 186 bp, BradyrhizobiumColbertium
atgtacggcaacaagtacccgacgcagctcaagccgctgcgtcccgtcgaccgcgtcaatgacgacatgaccggcaatgccggcgttgacggctttacgcggctttccaccgccgatcgcgagaccggctatcgcccacccgttggggagcaggcaaccgcctggccccgctacgtcgaggactga

SEQ ID NO: 2825 - DNA, 483 bp, BradyrhizobiumColbertium
atgatcacctacgacaaccccaagaaggaaacctacgtgtttccgtcctccgcgttcggtgccaccaccgagtcgcgcaccttcaaaggtccgaagggcaagaaggggttggtgcgggacatccgcacctacctgacggccgacgccgtgggcaccacctcggtgccggagatcaacgtcggctcggcggcctcgaccgctggcggcacgctctataccgagtatgcccgccatcgtctcgggacctccgccactgccggtaacacggcatccggcagcccgtaccgcgctcgcgcgctgtgcgaggccggggccaacaaccgtggcggggccgccctgacgctgtccgacttcaccaaccacatcaagttggagacggacttcatcccggccgatacggcgttcgtcatcacccgcgtcgcgggcgttggcggcgtgccggccggcaccggcatcaccgaagtcgagatcgactggttctaa

SEQ ID NO: 2826 - DNA, 993 bp, BradyrhizobiumColbertium
atggctggtcagctttggagcgttgctgctgaaggtggctatctgtactccgacgaattgtcggacacgatccgccagcagcttcagccgctctgcaaattccgccaactgtgcgacgcacaggacgcggtcgacaagggactgcatcgcggttcccggttctattgggacgtgttctccaacgtctccactcagggccgccgcctctccgaaaccggtccgatcccgcagaccggattcaccgtctcgcagaagagcctcacggtcacggaagctggcaacagcgtcccgtacaccggcctcctgcaggcgatggccaagcacgacgtcgtgtcgatcatcgacaagacgctgaaggacgatgcgaagaagtatttcgacatcgaggcgttcttgcagttcaagaacaccatgctccgcgccggcccgcagagcggcaactccaccaccgccatcacgctggacaccaacggcacctgctcgacgaccaacaacgtcgcgctcggcaccggccacgtgaaggcgatcgtggacaccatgaaggagcgcaacatccccaccgctcggggcgatgactacgggtgcatcacccacgtcaccacgctgcgcaccttcaagaactcgctggagtcgatcaaccagtacaccgagactggcttgagccacatctactccggcgaggtcgggcgctatgaaggcacccgcttcatcgagcagaacttcatcccgaagggtggtgctgccgactcgacgaccttcgatccgtggagcagcaccgctgatgcatggaacaacggcctgtcgagctgggcgttcttcttcggcgccgatcgcgtcgcagaagcgcagtgcatccccgaggaaatccgagcgagcatcccgagcgacttcggtcgttcgaaggcgatcgcctggtactaccttggcggcttcgggatcgtgcatgacgacgcgaccaactcgcgcatcgtcatgtgggactcggcggcttaa

SEQ ID NO: 2827 - DNA, 1200 bp, BradyrhizobiumColbertium
atgacgactgacacgaaccagcccccgaagcccgaagatcatatcgaggtcatcaatcaggacatcgacacgacgggcgcggatcattcgctcaacccggcgcccgtcgacgacaacccccgtccgcccgaaccgccgaagcccgaaatcctcgatcaggatccgcgcgcggcgatcgcggcgcggttcaagaagctgcgcgaggacaaggagccgccggtcgagaccacgggcgacttcgtcgacccatcgcaggtctacggccaggccggcaaggtcgaggagccgccgccggcgccggctcccgagccgcctcctgcccagcctgccaagcgcaggctgaaggtgaacggcgaggagcgcgaatacaccgacgaagaagtcaccgcgctggcgcagaaggctgccgccgccgacgactatctcgagcaggcgaaggaacgcctcgcggagagcaaacgagttttggagacgacgcgggtccacgtctcccggcaaaaccccgccgaagaacccgcacccactgccactgagactgacgacggcaatgacggacagcaaaaccccgctgatccgctcaaggaagccatcgagcagattcagtatggcgaccccgacaaggccaaggaagttctcggcaaaaccatagccgaggtagccacggctgcagtcaaacaggtgagctgggaggatcgcgtccgtcaggacgtcgagaccgacttggccgcccacaacgactttgtgaagaagaacgaggatcttgcccaagaccctcgtgcagcgaagctcatccgagccgagctcctcgacggctacgccgaggaccttcgcaagatcggagtgcctgacgacaagatccccacggactccactcagctcgccaaccttcaccgggggcacaagctgcgcggggcacaggttcgctcggtcgcgaagttgctggaagatgccggcaacagcgtgcgcgagttcgccaagatcggggctcctcgccaggagaccgcaccccaaaggcccaccaatccgaacccggagcgcgttcaggtcaacctgaaccgtgacgatcggcggcgggcaatccctcaacaaccccagcgcgccaacgtgcagcctgctcagaccaactccgctccggcgtcccagatggacagccggaaggcggcggtcgagcgtgccaaagcggcacgcgggcaagtgtga

SEQ ID NO: 2828 - DNA, 381 bp, BradyrhizobiumColbertium
atggatcagtccgccctctacaagctggccctgcggcgcgacgtcgagctctccgcgaaggtcgaggtcgagctgacgtccaggctgcgcagcgagccgcttctggtggtgctgaacgccgccaaggagagcgcagcggaagcgctcgcggctctcgtctgggtggacgctgccgatcaggcggaggtccgccggctgcagaacgaggtccgccgcttcgacgatctcgtgaagtggctctacgaattgctgatcgccggccccgaggccgagcggcagttgaatgacctgcagatgcaggaagcccgcggactcgtgatcgacgaggaaaccgcggcccaacttggactcccaaccaacggtgcaaccgatgacgactga

SEQ ID NO: 2829 - DNA, 327 bp, BradyrhizobiumColbertium
atgtatcgcctgcttctggcggcggcgctgctctgcgcctccgtttcgaccgcctatgccgagacctgcatcgcctcgtggtacggccgcgagagcgggccgcgcaccgcctccggagagcgcttcaacccggacggcatgacctgcgcgcacaagacccgccccttcggatcggtggtgacggtcacgcatctcggtaccggccgctcgatccagtgccggatcaacgaccgcggcccgttcgtccgcggacgctgcatcgatctcgcccagggcgcggcccgcgcgctgggcatgggcggtaccgcccgcgtcgaggtccgctga

SEQ ID NO: 2830 - DNA, 324 bp, BradyrhizobiumColbertium
gtgaccatcgaatttgccgcaatcagtgccgttgccggtgtcgccggcttcggtctcgccttcgcaacattctggctcactttcggcagcaggatcgccaccgccgagaccaaggcggccaatgccgaactcattgccaaggacgcgaccgacaaggtcgctattctgcaatccgcgttctcgctgtaccgcgagcagatcgcccgcgaatacatccaccgcgaggcgatgcgcgaggtcgaggaccgtctgactgcagcgatcgatcgcctcaccgagcggctcgatcgcgtgctcgagccgcgcgcagccgcggcgaagtag

SEQ ID NO: 2831 - DNA, 165 bp, BradyrhizobiumColbertium
gtggctgatccgctcgacgatggcaggatcacgcagcagaccgacccgaagcttgccgtcggcgagtatcgcgtcgcgctcggtaccgccaacgacaatctcgcggcaacccgaacctgccagcagggtcagcgcgctcgcgtcgcgaagggatcggcgaagtga

SEQ ID NO: 2832 - DNA, 453 bp, BradyrhizobiumColbertium
gtgacagacctcttctgggacatcgccacgtcgggcccggcgctcggcgtgatcgcgtggattgtcgtctcagcgttcgtggtctcgcggccgttgaagttcatcgagcgcatctggccccaggcttacgcctatgccaaggctgccgcgctgattcatacgatcgccgctgccctgctcttcttcctgatcggcttccgcgtcgccgatgagcgcgccgagcgcgaggcgatgaagaacgagctcgcctggaagaacagccagatcgaaaccgccgaggccaccgcagagcacgcgcagcggctcaaggccgaggcagagcaaaaggcagcagaggcgaagggaaagcttgatggtttccgcagcaagtatggcgacaatccggcggctatctgcgcctttactcctgacgatcttgagtggctgcgggcacttcgcagcccctcccgctaa

SEQ ID NO: 2833 - DNA, 852 bp, BradyrhizobiumColbertium
atggctcgatggccgcacgatgatccggcttccctcgccgcgttctacggtgatccggcgaacgatgaacccggcaagcagctcgttcccgtcgtcccgcccttccagatgtattacgatggcaagcccatcaaggcgatccggtttcatcgaaaggccgcggacgccctcaaggctgctctcgacgagatctgggaagcctgtggtcgcgaccaggccaccgtcgaccgcctgcgcatctcgcactattcgggcgcctacaacccgcgctacgtccgcggctatgagccgggcaacccgcagggccgtccgccgcgctggtcgaaccacgcttacggcgcggccatcgacctcgacgccgcccacaatggtttcggcgccggcaaaggcacgatgcctcagtttgtggtcgacgccttcaagcgccagggcgcgctctggggtggcgactacaagggccgcaccgatccgatgcatttcgagttctgctcacgcgacggcgccgcgcagccggtgccgccgcccgtgaagcccaagccgcagccgccaaaggccgagccgatcgaaccgccgcacgccggcggcgagcaggagccgcctccagcggaggagccggtctcgccgcccgcgaccgccccggcgagccccggcttctttcgtcgcgtgcgcaattgggtgacgggcgcggcttccacgtttgggcttggcggtctcggcatgctgacagattggcagttcgccgccctgttgctcggcttcgccctgctctgcgttggcgtcgccttctgtgtggcgctgtggctgttcggcaagcagaacgtcgccgattgggtcgcgaggaatatcgcgtga

SEQ ID NO: 2834 - DNA, 2304 bp, BradyrhizobiumColbertium
atgaccactgtcatcgagacaccgccaggcgaagacggcttcgagaagcccgacaacctgttcgcgcgcgcggagaaggcggcactgtcaccggctggcggcgcgcccgccgctcaggaggagcagaagaaagacgtcgactggctcaatctcgtctcgcaggccgagacgcagggcggccagttcatgctcaaccagatcaaggatgcgtgggaccgctcctacaaggcgttccacaaccagcacttcagcggctcgaaatacctctcggccagctacaagggccgttcgaagctgttccgacccaagacgcgcggtgccgtccgtaaggcaaacgcagccgccgcggccgcgctgttctcgaccgtcaacacgatcaactgctcggcgggcaacgagaacgatccggtgcagaaggccaacgcggacctgatgcagcatctgatcaactaccggaccgaccgcacgtccggcaaggcggcgatcccgtggttccggatcgcgatcggcgcccatcaggacacgctcatcatgtcggcgtgcctgtccaagcagtattggaagctcgagctgaaggagaaggtgacgcagcagccgctgcgcgacgaggcgaccggcgagcccatgctcggcgaggacggccagccgctcatgcagacggtccgcaccttcagcccgtcagtcgaccggcccgacgtcaagctgatcgcgctcgaaaacgtcatcatcgacccggcggcggactggaccgatccggtgcagagcgcggcctatttcatcgtgaagtacccgatgcggatcgacgagatccgcaagatgcagcaggacccgcgcaatccttggaacgaggtgcccgaggctaccctcctcagcgccgtcaccgaccagaagcttcaggcatcgggcacgcgagcctcgcgcgaaggcggccaggatcgcatggatcaggccgcgaccggcggcggcgatttcagggtgatctgggtctacgaagtcttcatgcggtaccaggggcaggacatctgcttctactccgcaggctctcgcgcgtacctgaccgaccccaagccggtcgaggaagtgtatcccgagcaggacggcgagcgcccctatgtgctcggtaccggcgcgctggaatcccatcgcatcttcccgatgtcgcatgtggaggcttggcagcccctgcagcaggagatcaacgacctcgccaacttgcgcctcgatcaggtcaagcagaacgtctcgccgatcacgttcgtcaagcgcggccggcaggtcgatctgagcgcattgcagcggcgcgggcccaacagcgtcatcctgcgcaccgacgccgacgacatcgagttcgctcagaccccggaggtgccctcttccgcttatgcggagatggagcggctgaacgtcgacttcgacgaccaggcggggcagttcaattcgggcaccgtgcagaccaaccgcagcctgaacgaaaccgtcggcggcatgaacctgatctccgcatcggccaattcggtgcaggagttcgacctgcggacctgggtggagacgtgggttgaacccgtcatgggccagctcgttcggctcgaacagtattacgagtccgacaagaccattctgggcctgtgcgccgacaaggcgcagctcttccagaagtacggcgtcagcgagatcaccgacgaactcctgatggagcaagtcacgctgcgcatcgacgccggcatgggcgcctcgaacccgcagaccaagctcggcaacttcgcgaccgccctcaaggtcattgccccggtgtggcagaaccaccctgacgtggtcgcgggccgcaaggtgccgaacctcgaggagctcaccaacgaggcgttcagcctctccggctaccgcgacggcggcaagcgcttcatcaaggatggcaccccgcagcagcccaatccggcggtcgcagccgaggccgacaagctcaagtcggaagcggagaagaaccgttccacggctgtggtcaaccaggcgaaggcgcaggagatcgacgcgcgcatgaagatggacttcgccgaactggtgcacggccagcgcatggaccgcgcccaactcgtcaatcaggtccgcaccgagcgcgagaacatgcagcgcgaccgcgtcaacgacgatcggcaacagcgcaataccgaggcagaccgcgagatgcgccagcgcgaagccgagctcaagaacaagccagccgagcagccgtccggcgatctcatctctgaattgactgcgctgcttcagcgctacggagcgaacaatggctcgatggccgcacgatga

SEQ ID NO: 2835 - DNA, 426 bp, BradyrhizobiumColbertium
atggacaccgacaacatcctcctccgccgtgagctcgccgatcgcactcacggacagcacaatgtcgagctgcaggcgcgctacgagcgcaagggcctgctcccggaggaagaggacacccacgcgcagtgggatctgatggtggccaaggcgatcacgcgcgtcctgctctcgcagtatcggggccacttctgggtggtcgagtgcgacagcgcccagggcatcgcttggatctcgatcccggtgctgctcggacaatggaagtacgtcttccacctttcagaggacatcacgccggccatgatcatccgcgccggcggcgagatccttgagcggttcaacctcccccgctccaacctcgacgtcgcctccttcatcgcagcgcggaagatggcggtaaagaatgggggcacgcctccggcatga

SEQ ID NO: 2836 - DNA, 276 bp, BradyrhizobiumColbertium
atgccacctcgtcaaggcgcttcactgcaaggcgatacgaccggcatccgctcggcagaagaggtcgacatctcgtccactgacgcgacgttcacgaacgtcacccgcggcctctatgtcggcgttactggcgacgttgtagtgcagttcgccaacgatgccgacaacgccacggtgacgctgaaaggtctcgttgccggagtctggcacccggtgcaggtgcagaaggtcgtcaggaccggcaccaccgcgacagacattcttgccgggtattga

SEQ ID NO: 2837 - DNA, 591 bp, BradyrhizobiumColbertium
atggcgcagacgacccttgttgctcctgacagccacaccaagctgccgaccacccgcgacgagaacgcggaggctggcaacagctacaagcgcaccgtcgaggcgatcgatgccatgttcacggagctctatggcaacgagaccacccgtgccgcggcggaggctgcagagaccaccatcaagttcgtggacgtcacgatcacgtcggcggaactgctcgcgctgaacgccacgccgaagacgatcctcgccgcgccgggcgccggcctcgccaacgtgctggtcgacgtcgtcgcctacaaggcggctggtaccgcctatgccggcatcgccgcgggcgaggatctgtccatcaagtacacggactcgtccggtctcgaagtggcgcagatcgagaccaccggctttctcgaccaggcgaccgcccagacgcgctacgcgaaagcgttcaatgccgcgtcgggcatttcctcgatcacgccggtcgcgaacgccgtcctcgtcatgatgctgctcacgagcgagatcaccaccggcaattcagacctgaaactgcgggtctattaccgcacgatcccgaccacgctgtaa

SEQ ID NO: 2838 - DNA, 345 bp, BradyrhizobiumColbertium
atgaccgccgggacgccccgatccggacggccttacccctatcagcggcccgcgagcaccgcggccggacagaagctcgaccgctttctcacggaagcgatcgacgatcttggagcgaagaagatgcccgaaggcaaacccaccagcctcgccgacgcgatgcaggccatcaaggcggctgccgacaccgtgcgcagccaggcgctcgccaaggccgagcagatgcgcgccgacatcgagaccaacggcgccctcgcgctccgcaagatggacgcaatccatcaggaggcgatgaacgaattgaacgccgtgctcggcaacgagcgcgcgggcgatcagggctaa

SEQ ID NO: 2839 - DNA, 171 bp, BradyrhizobiumColbertium
atgacccgctactctccgccgaccaacatcaacgtgccctggaaggtcgcggtcctgaagcgcgatcccgactatgagcgcgaggcgcgcgatcaggtcgagttccggttttcgaacggccgcgagtttcgccacaacccggcgaaccgcggcccttacgccgaggactga

SEQ ID NO: 2840 - DNA, 1776 bp, BradyrhizobiumColbertium
atgcggcgtgagctgcgcggcacgaggtatctcacagccgccaatgacgcgcttgcccgggcgatcctcgaggacctgccctatttcgactacgacgagacggtccgctggtattcgacgatcgtcccgaaactcgatctcaaggggcgagcgcttctcggcgtcaacgaccgctatttccttctgacggggctttgccggcgcgtcgacgcgctgcacccgtggctgttcgagcgatgccgtgaggtcgaagcggctccggacggctatatcgatctgtgggcccgcttccactacaagtccacgatcatcacgttcgcgggcggaattcaggagatcctgaccgacccgaacatcaagattgcgatcttctcgcactccaaaccgatcgcgcgggccttcctgacgcagatcatgcaggagttcgagcgcaacgactacctgaagcaggtctatccggacgtgctttgggacgatccgcgcaaggaagccccgatctggggtctcgaccgcggcatcgtcgtcaagcgcaggtcgaacccgaaggagtcgacggtcgaggcccacggcctggtcgacggccagccgacgtcgcggcactacgacctgcacatctacgacgacatggtgacgcgcgagagcgtgactaacccggagatgatccgcaagaccaccgaagcgtgggagctggcggacaatctcggcagccatgaaggcgtccggaaatggatgccaggcacccgctattcgttcgccgacacctatggcgtcgtgctcgagcgccgcgtgctcaaggcccggaagcatccggccacgatcgatggcacgctgaaggggcagccggtgttcctctcgcaggcccgctgggaggagatcaagaacacccagcgctcgactgtttcggcgcagatgcttcagaacccggtcgcgggcaacgaggcgatgttcaaatccgaaatgttccggccctacaccgtgcggccgaccatcatgaacatctacatcatggtggacccctcgaaggggcggaccaagacatcggaccgcaccgccatggcggtgatcggcgtggacgtcgccggcaacaagtatctgctcgacggcgtgcggcaccgcatgaacctgtccgagcgctgggcgacgctgaagaagctctacacgaaatggcgcgacgccattggcacccaggtcatcatcgtcggctatgagcgctacggcgcccagaccgaggacgaggtcatcaaggactggcaggagcgcgacggcgtcgcgttcgagctcgtcgagctgaactggccccgcgaaggcggccactccaagcgcgatcgcgtcgagcggcttgagcccgatatgcgcgtcggccgcttctatctgcccgggatcgtctaccacccggagatcggcggcatcgacggcaaggccctctggtccgtgtggaccgaggaggacgccaagaaggccgaggccaagggcgaaacgcccggctacaacatcggccagatcgtctatcggcccctgctcggcgcgctccgcgagcaccgcgccatggaagcgacgggccagaactaccgcatcgtgcagcccatcaagctgatcgatgaggaccgcaacatctacgacctgacgcgcgccttcatggaagaggcgatgttcttcccgttctcgccgaaggacgacctgatcgacgcggcgtcgcgcatctacgacctctcgcccaagcctgcgatccaatacgagaccgcttcgcttgagccggtggcttacccggacgcttga

SEQ ID NO: 2841 - DNA, 732 bp, BradyrhizobiumColbertium
gtgagcgagaagaagatcgctaccccggacatcgcgagagcgacctgggaagaaatgatcgacccttccgttcgcagggtcgaggcgaagctgaaggcggcaggctatgccacgcccagctatcgcaccatcaacaagtggcagcaggaggcggaagccgccggcaggccgtggaagacgacgaaggccgctgcgtccgccaaggacaagatgaagaaggtccgtaaggccctcgacgacgccacgccggccctgaccggcgatccgcggtcgaaggccgaggacgtcgtcaacgccgcgttcaaggccctgccgccgcctgacgaggaggcgccgcgcgcggaggccgagaagccggatcctgaaatggacggcgctcgggagcgcctgaaggccatccgcgacgcgatcgcgggcgatccgacggacgagcagttgctgtccatggcagccaagcagacgctcaagaccgcgatcatcatcgaggcggtcctgggcgaaatggcgccttcgctgatcgcgacccagcccgaagccgtcggcaaactgcagctcgcagtcgccgagagccttgcagccgctggcgagccgtacgatcgcatcggccgcgcgcgcgaactcgccatgaagacgatctcatcgggcggcggccaggccgaggtgatcccgccgcagggcagcgccgatccgctggccgacgcgctggcagcgttcaagagaaatgcggcgtga

SEQ ID NO: 2842 - DNA, 303 bp, BradyrhizobiumColbertium
gtgaacagacccgccaacgccgacgcgagcatcaacgcgcgtctgagcgatagtctgcctgagctgatcgagcagatcagcaacgagctgacaaccctcgacaagcatctcgatcaggccatcggcattgccgaccacctgcacggttcgcctccgccagcgcccgagaacgcgctcggtctgaccgccgtgccgagcgatccggacggactgctcggcaagctgcgcatgcgcttggagcggttgagagacctcaacagcggcttcagtcgcgaactcggccgcatcagcaccgccctttag

SEQ ID NO: 2843 - DNA, 240 bp, BradyrhizobiumColbertium
gtgattcgcaagccgttccccttcccggtcggcgggacgctgatccgcgcctggacgccggagcgcatcgctcgcgagatcgcggtcgccaacgtcggcatcaaggctgcgctgcgcgccggcgacatggacgaggcaaacaccctcatctcgcgcaaggttggcctgcgggtttgcgccggtgagatcaaggtctctctgaggccgcccccgccgcaggtgctaggagccttgaagtga

SEQ ID NO: 2844 - DNA, 309 bp, BradyrhizobiumColbertium
atgatcgagccgaccaacggccgcatcgtctggtacacgccgtacaagaacgagcttctgagcccctatgggatggtggttcagcgcgacaaggatggcaacgtcatcccgctcgccgcgcagatttgcgccgtgtggggccctcgcatggtcaacctgctcgtgaccgacgcgaacggcaagcagttcgccgccacctcgcgcacgctgctgcaggacgacgatgtcggcaacgagtacggcggcttcgcgcagtggatgccctatcagaagggccaggccgcgaaagccgaagctgcaaagtcgtga

SEQ ID NO: 2845 - DNA, 74 bp, BradyrhizobiumColbertium
gccgaggtagctcaggctggtagagcagccgcattgtaggcggcagtgcgtgggttcgaatcccacccgaggca

SEQ ID NO: 2846 - DNA, 117 bp, BradyrhizobiumColbertium
atgccgagcatcgaggagatcatcggcgtcgcctgcatcctgacgggcttcggcctgttcctgctcgccttctcccgcgctggcggtcgagagggtgagccgttcgagttcgagtaa

SEQ ID NO: 2847 - DNA, 231 bp, BradyrhizobiumColbertium
atgaagccgacccacaactacaccggccacgtcaccttcgatctgaccgaaggcaagatccaccgggtcacgggcgaggacggcaagacgcgcatcatcgcgctgttcccaaagacgtgggagcgcggcgctacgcaggcgatgtctgccgtcaacggccaagaagtgaagatgcggccctaccgcgtgaccgagtgggaagagatcgagcttcgcccggtgaacgagtag

SEQ ID NO: 2848 - DNA, 195 bp, BradyrhizobiumColbertium
atgaccctgcgctacggcccctgccacggcggcccctacgacaagcggaacatcgcccaccatggcgatgtccgccgcatcgccttctaccgcaacagcgggcgcccgctccctgccctcgtcgacagcgacgatccggaggtcgagttcggcgagtaccgctggtccggcaaggcatggctctgggtgggatag

SEQ ID NO: 2849 - DNA, 228 bp, BradyrhizobiumColbertium
atgacgaggaacgccatgaccctgccgacctgcagaacctgccgcttcatgctcccgatggaaggcgacgcctcgagcggcttttgccaccgcgtccctccggtcgatagatcggagggcgacacgctgcgctcgatgtacccgatcgtcgggctcgataagcccggttgcggcgagcaccagcgcaagccgttcttcagcgtgccgaaggggtggctgcgggcatga

SEQ ID NO: 2850 - DNA, 840 bp, BradyrhizobiumColbertium
atgttggcaatcgtcaagaaaccgcgcggggcgaaggctcccgctgatcgttacccgtcgggcgacaaaaagcccggcatggcaccgactgtgttcttccgcatcagggagtacggcggccggctcggcatcgacccgcgactgagcaccgtgctcggccgcatgggctgcttcagggagttgtccgaggccgaggttgatgcaggcttccgcatcgccgaggtctacggccgctacgagcacctgaaggggattccgcggcggaccgcggcctcgccgtcctacgagcgcggcttcggcgccaaggacctgatgctcgaccgtctctcaccggacgagctcaagcggcacaagaaggccgtgcgccgcgccgagaaggcgttcgatcaggtccagaactggatcggcaaccagtatgcgctcatcgagcgcgtgtgcgtgctcaacgaggagcccggcccggtcaacaagggcatgctcgcggccgtgctgcacgaggtcgcgatccagatgggcctcatcagcgagaccaaggccacgccgaagccaaaggcaccgaccaaggacgacggcgcgctgctcgccgaggccgccgtcgacgcgctggtgcaatggttcttcaacaccgcggccagcaagcccacgcatttcagcctggtctcgaacccggactggaaggcatcgcgcggcatcaccggctcggacggccgctatcaccacaccatcccggtcccgctgcgcggcctcaccgccgagcagatggacgccaagctccgcctcgcctgcgccgtggccggaatgctcgagattgctgacgcagagacaggagaagtcgcatga

SEQ ID NO: 2851 - DNA, 378 bp, BradyrhizobiumColbertium
atgcgagacgaggcggccgccgcagcgcgcgcaatggcgccgtcgcggcccacgaagccgaaggaggtcgaccctccgccgcccaccgaggcggagcgcgagcgcgtgaagctttcggtgcagacgttcaaggacgccgtgaaccccatcaacgcggcccaggaggccgcgcgcaaggcgaggcagaacgagatcgacgtggagcgcgcgcagcgcgaggagcacacgcgccgcatggaatacatcgtccagggcttcgagcctccgaccaagaacggcaagactatgtcgatcgcgctggcgcgggcgatcggcatgcagctgaccaagcgtgcgcccgcgccgccgccgaagtgcgagttttcaccagaggagtaa

SEQ ID NO: 2852 - DNA, 873 bp, BradyrhizobiumColbertium
atgtctcgaccttggtttcccttctatgtcggcgactacatcaaggacaccgcgcgcctgaccactgaggcgcacggcgcgtacctgttgctgatgctcgactactggacgacgggcgctccgccggacgacgacgaggttctggcgacgatcgcgcgcatgcctgtgaagcgctgggcgagcaaaatccgccccgcgctcgtgtgctttttcgagatcgaaaacggcgtgtggcgtcacaagcggattgaggaggagattgcgcactcggccgaagtcggaaagtctagcagtaacaaggctaaggccgctgcggaggctcgttggggcaagaagcggagcaagcgcgaggcatcctccgacgatgctccaagcattcccgatgatatgccccggaatgcacagtcacagtcacaatcacaagagactctccctgcgggagagtctgacgcgcgcccggcagcgcgtgaagggattgcgaggatggtccccatcgactggcagccgagccaggccaacctgcaggcagctcgcgacgccggcctgagcgatgaggaggcggaggcgcaggccgcccgcttccggaaatacaatcgggcccgcggcaccaagttcaccgatctcgacgaggcgtgggctgcgtgggtgctgctcgccaagcccgcggagaagcccgcgagcgtcgacagccagacgccggcagtgccgccggattgggacaacatcgcctcgttctgggtgcgcaccggccgctggcagcgcggccacggtcctgagcccggcatgggcggttgccgctgcccgcccgagatcctcgagaagcacggcatcgatccagccaccggcatggtcaagcgaaagggagcagcatga

SEQ ID NO: 2853 - DNA, 135 bp, BradyrhizobiumColbertium
atgcggacgtggcagatcgaagtccgctgcatcgacttgttgcagcagacgattgggcgggtggccgctcgcggtgatcccggtcactacggcgagctcgatggaacgatcggcgcggcgcaggttgtcggctag

SEQ ID NO: 2854 - DNA, 138 bp, BradyrhizobiumColbertium
gtgttccgctcggcgcttgagctcggcgtcacacggtctgtgcaagccgttcaggcggcagcgctgccggtcgccgtcgacgatgtctggcatagcatcgaccgatgccgatcattgcctcgcccgcggctcggttag

SEQ ID NO: 2855 - DNA, 1155 bp, BradyrhizobiumColbertium
atgggtatggttccgcaaatggccgatgtttgggagcaacggcgcgatgatcatgggtacaactacgcccgcgtcgctgacgtggccggaggcttaggggcgatcacgaaggtcgtccgcttaggccttcagtcgagcgtgctggccacaggagctttgctggtcattcagggcgaagcaacaggcggtatcatgatcgcaagttcaatcctgctggctcgcgcactcgcgcctgtcgagcttgcaatcgccaattggaagggctttgtggcggcccgccaaagctggagccgtttgcgtatcttcctgctccggtcgccgcagaagcgtccgtccattaggctgcccccgccacttcgcgaaatcagcgtcgactttgtcagcttggcggctccgggaggagaacgtttgttgctgcgcgatatcaacttctccctatcggcagggcaggtcttggccgtggtcggcccgtccggggccggaaagtcgtcacttgcgcgcgcgctcgtcggagtgtggcaggcgatgaggggcaggatcagacttgatggcgccccgctggatcaatggtcgcccgatcagctcggccgccacataggttacctgccccaggacgttgagctgttcgaaggcaccgtcgcccagaatatctcgcgcttttcagctagtgcgaactcggaagcgatcatttcggctgccacggctgccggggttcacaatctcatatgctctctgcccgatgggtatgataccaatatcggtccgcggggtacgtcgctctcggccggccaacgccagcgcgttgcgcttgcgcgcgctcttttcggcgacccgttcctggtcgtgctggatgaaccaaattccagtttggacgccgacggcgaggcggcgctgctggagggcatccggcgcgggcgcgagaagggaatggcgttcgttatcatggcgcatcgccagagcatcctagccgctgtggatcgcatccttgttctgggagcaggccaaatgcgggcgtttggcgcaagggacgaggtgctgaaggcgttgcgacaaggagtggagccggccgatagagcagagcaactgccccaaaacgcgcgaacgcttgcaccgcaatcgggtgcatcgttacgaatcacgcgggtgggcacatga

SEQ ID NO: 2856 - DNA, 1002 bp, BradyrhizobiumColbertium
atggaattatatgcgcgacaagctcgattgactgccgagcgcgacgctttgggcacagtcgaacaaccgtcctctctgcgtggcttctcggacgccgcgcgagccgccgaggtgctcgcaggcgagcgaagactgttcgagctgcgccaaacggcacgggcggggcaaaaagcccagcttcgcgagaagatcggccaaatcacagagcagatccagggcctgaccgagcaaattgcgggcaaaaagcaggagaccgagttgatcagccgggagcttgtcggcgtgcgcgagctttgggccaaaaatctcattccgatccagcgcgtaaccgcattagagcgggatgcagcacgcatcaagggagagcacggccagcttgtggcgtcgacggcggaagccaagggaaagatgtctgaaattggattgcagatcatccaggtcgatcaggatcttcgaagcgaggttgcaaaggagcttcgcgaaacggagggaaaagttggcgaattggttgagaagcgcgtctcggctcaggatcagctcaaccgaatagatatccgggcgccgcaaagcggcatggttcatcagctctcggtccacacggtcggaggagtgatcagcccaggcgagcagttgatgctgatcgttccccaggccgacgtcctcgtggtcgaggccaagattgcgccgaaagacattgatgaaatcaggctgcagcagtcagcagtcctccgtttcactgcctttaatcagcgcacgacgcccgaagttcacggaacggtgacgctggtgggagccgacgagatcacggatgacaagagtggcaagtcgtatttcaagattcaaattacaccatcttcggaggagttggttcgcctgaaacaggagaagctcgtacccgggatgcccgttgaagcgtttgtccaaaccacctccaggacagcgctgtcctatttcgcaaaacccataaccgatcaggtcactcgcgctttccgcgagcaataa

SEQ ID NO: 2857 - DNA, 147 bp, BradyrhizobiumColbertium
atgatggcggggccctatgcccatgccaagcggccgttgcgcatcctgcgcaggcggctgggccgtaagcgacgtccacgtcccattcgcaaagatttggagggacggattgcaacgcgttggcgccacggactgcaaatccgttga

SEQ ID NO: 2858 - DNA, 321 bp, BradyrhizobiumColbertium
atgggcaaggcgatagcctatctgctgaaccattgggatggcctcactttgtttctcgacgatggccgcgttgagatggacactaaccccgtcgaaaatcaaatcagaccgctgattctgacgcgcaaaaatagtttatttgcaggtcacgacgaaggtggccgttcatgggcccgcatagcttcgctcatcgccacctgcaagatcaacagcgtggagccctacgcctggatgaaagcgaccctcgaagcgatcgcaaccagtcacccgcagtcgcggatcgacgaactcttgccctggtcgttcgcccgcacctcctaa

SEQ ID NO: 2859 - DNA, 771 bp, BradyrhizobiumColbertium
gtggcaagcgccgaggatgacaacgaggaggataggtctcccaagttgaggctcgtcagcaccaacccgaatgctcgcgccgatcgacagattgaactggccaaaagcgaagtccagaacgcactggctcaattcgccgccgcgttgcttcgtacgattgcgggcaacgacacggaagcggtctatctcatccgccgtctggctctcgtcgtggaggcgatcaacaaattcgagaaacaggcggatcgggggatgtccgccgcggagttgcaggaggcactgtgcttgccgcaagccgagatggattatgcggcggacgatgattggcgctctcgtcgctggcgccgcgaggacggcttcgacgatatcgtgaagggcgcgctccgcctggcggcacataagctccttggcgaggatccggccttcggtgggatgcattccgagagagtaatcgagcggggcataaagacgctcgaggagctaaggcgccctccgcccccagcccgaccacgatcgaggcagacaaagaacctggcaggcagctgggatgatcttcatctggatgcaagcgcagcgaaacccaagcgcaggtttggggaacggctggggtcagcgcccaaggcctccgtccaaaggtcgacgcgccgacgggcagagttcgacgaagacgatctgaaggaacttcgaaaggcgatcaaggcgaaggacaacaagcgcatagccgaactaacggcaaagatcggcaggcctccatcgaaaggcctaaaatag

SEQ ID NO: 2860 - DNA, 456 bp, BradyrhizobiumColbertium
gtgaccagcctcaatcgcgagcgtcaggccgggaagagtttcgctctactcaagccgctcgaggtgatgtcattccgctatgagaaaaagagccagcaggacgtcgatgacgagaaagagacgttcgacgcgatacgcgctcaaagcgatctgttctcgaagcaggtcgttcgcagctacattccctgcccatatctattcaaataccgatatcgaacggatgacggccttcgcgagggcacctgccaggactgggagattgaagccacattccataagtggtcgcggctctatggcgaaagcaaagctctaagtgaaatgcagcgagtattcggtgaagagttgccgaagaagggaatgctgctcgcgatgggcactcactcgctgcatccagatacatggctgatcaatggagtggtacggcaggacgacatccggcagcaatcaatgttttaa

SEQ ID NO: 2861 - DNA, 1194 bp, BradyrhizobiumColbertium
atgacgatgaatgccacgatcgagagcacgcccggcccggatacgctgtcccagcgcctgaccgtcgtgctcgctgcggcttgcggcatggtcgccgccaacatctactatgcccagccgctgatcgccccgatcagcgccgcgctcggcctgtcgcatgcggcggcggggctgatcgtcaccatgacgcagatcggctacggcaccgggctgctgctcatcgtgccgctcggcgatctcgtcgagaaccgtgccctgatctgcgcggtgatcatgctcggcgctgcggcgttgctcgctgccgccttcgcgacccatgcgctgccgttcctgcttgccgcattgttcatcggggtcggctcggtcgccgtgcagattatcattccctatgccgcgcatctggcacccgaagccatccgcggccgcgtcgtcggcaacgtctcgaccgggctgatgctcggcatcatgctggcgcgtccggtgtcgagcttcatcactgcagcgctgtcctggcacgcggtgttcttctgctcggccgcgctgatgatcgtactcgccgccgtgctctggatgacgttgccgaagcgcaggccgctcgcgcggatgcactatggcgaattgttgctgtcgatgccgcagctggtgcgggccacgccgctgctgcggcgccgcgcgctctatcaggcgagcctgttcggcgccttcactttgttctggacggtggctccgctccagttggccggcgaattcggtttcacccagcgcggcatcgcgctgttcgcgctcgccggcgttgccggcgtattcgccgcaccgatcgccggacggctcgccgacagcggccacagccgcatcgcgacactggtcgcgatgctgctcgcggcggccggcttcctcgcgacctatatcggcgtccccggctcgatgctgaacctcgcctgtctggtcgtggctgcgattgccatcgacatcggcgtccagggcaacgtcgtgctcggcttccgcgccatcttcgcgcttgggcacgagcaccgcagccgcctcaacggcctctacatggcgacgttcttcgcggccggtgcggcgggctctggggtcggagccttcgccttcgcgcagggcggctggatgcttgcatcggccattggcctcgcgctgcccgtcgccggcctgctctatgcggcgactgaatga

SEQ ID NO: 2862 - DNA, 126 bp, BradyrhizobiumColbertium
atggttgccggactgttgcgcgggcgcaacgtgcgcgagaaggtctattgcggattcgttaccgcgctctcggccgaaggcttcagtccgccgcttctgacgccgagcgcgacgcaaatgccctga

SEQ ID NO: 2863 - DNA, 198 bp, BradyrhizobiumColbertium
atgaacggtcacgccatcctggagaacgtgcgccgctaccgtggcatcgcatcgctctatcgccagactgctgcattccgcccgggccagagctggtcgctgctggagcaggccagggattgggaagcgcgggcgttgtcggagctcgaagcctatttcgcgacgcgcagcgactgcgccgcctcgctcgcggcctga

SEQ ID NO: 2864 - DNA, 144 bp, BradyrhizobiumColbertium
gtgctagcaacgcgcggatcgacatcttcttcacgtcggccggggcacgcgatgaccaccttcaaccgcatctttacgaccgagcgtctgctccagatcatcgtggtgctgatggcgaccttggccatgaagctgatgagctga

SEQ ID NO: 2865 - DNA, 978 bp, BradyrhizobiumColbertium
atgagcctcaaagaattttcttataatggtcccggccatgcggccgctcagctccggcatctgacgatccggcagttgcgctcgcttgcggcgctctcgctcaagggcagcgtcacggccgcgtccagccatctcgggctgacccagccggccgtgacccagcagcttcggcagcttcaggacctcgccggcctgccgctggtgcagcggaccggtgacggcatgctgctgacggacgcaggcaaggaggtgctggcgctggccgagcgcgtcgaagctgccatcgcggactgccaaggtgcgctcgacctgcttgcggggcggaccggcggcaccgtgcatctcggcgcggtctcgaccgcgaaatacttcgtgccgcacgcgatcgcggcgttctccaagcgatacccgaagatcgagatcaagctcaccatcggcaatcgcgaagagatccgcgaggccatgcacggctacgacctcgatttcgcggtcatgggtcggccaccggccgacgtcaccgtcgacgtccgccagctcgggcgcaatccgcacatcatcgtcgcgcgcaaggggcactggctggagaaggattccggtctcagcctgaccgacctcgtgcacgagaccttcctcacccgcgagcccggctcgggcacgcggacgctgatggaaggcatgttccagaagtcggatctcgagccggtcatcggcatggagatgagcagcaacgagaccatcaagcaggcggtgatcgccggactcggcatcgccttcatctcggcccacaccgtggcgcatgagctcgccgagggccggctcgtcgtgctcgatgttgcgggcctgccgatcgtccggcaatggtacgtgatccgccgcagcgacaaggtgctgctgccgcccgcacaggcgatgttcgacttcctgggctcggaaggctcgaactatctgcccgacgtacccgagctcggcgggcgatag

SEQ ID NO: 2866 - DNA, 1038 bp, BradyrhizobiumColbertium
atgattgggcaactcaggctggacgaccaccttcaacggtattcggagaccgtgccgcacgcgctagcggtggcgggcgccgtcgacgccatcgcagccgccgctatcgaaatcgcggatctcatcgcctcgggcgatctagcggatgcttcgggcctgaccaccggccgcaacagcgacggcgatctccagcgcgatctcgacgtgcaggcggatgcgatcctgcgccgccgcctcggcaggctgccgatcgcggcgctggcgtcggaggagatgcgtgaggctcagatcgtcgatcgtcagggccgcatctgcatcgcgatcgatccgctcgatggctcctccaacatcgacatcaacatgaccgtcggcaccatcttctcgatcctgccggcacccgatgatctctcgctcgccttccaccagcgcggttcggcgcagctcgccgctggcttcgtcacctacggcccccagacctcgctggtgctgacgctcggcgagggcgtcgacatcttcacgctcgaccgcaaggcgggctgcttccgcctcgcgcgcagcggcgtgcagatctccgaggcctgtgacgagttcgcgatcaacgcgtccaatcgccggcactgggatccgccggtgcgcgccttcatcgacgaatgcctcgccggtgtcgaaggccccgccaaccacgatttcaacatgcgctggatcggctcgttggtcgccgaggcctatcgcatcctcacccgcggcggcgtgtttctctatcccgcggacgcgcgcgccggctacggcgacggccgcctgcgcctgacttacgaggcgcatccgatggcgatgatcatcgagcaggccggcggctccgcaaccaccggacgcgagcgcatcctggagctgtcggcacagagtctgcaccagcgcgtcccgctgatcatgggctcgagcaacggggtgcggcgcgtcgaggaattgcattgcgatccgctgctggtcgcgagcgtctcggcgccgctattcgcgcggcgcggattcttccggctctga

SEQ ID NO: 2867 - DNA, 876 bp, BradyrhizobiumColbertium
atgtccaggaagcatccgatcatctccatcacgggctcctccggcgccggcaccacctcggtcaagaaaaccttcgagcagatattcttccgtgagaaggtcaacgctgcctacattgagggcgacgcctttcatcgctacgaccgcgccgagatgcgcgcgcagatggccaaggaggccgagcgcggcaacaagcatttcagccatttcagccccgaaaccaatctgttcgaagagctcgagcgtgccttccgggattacggcgagaccgggactgcggtgacgcggcactacgtccacgacgccgaggagtccgcgctgcacggcgccgcgcccggcaccttcaccgagtggaagcggctgccggagaactccgacctgctgttctatgagggcctgcacggcgcggtggtcacggacaaggtcaatgtcgcgcgctacgccgacctcaagatcggcgtcgtgcctgtcatcaatctcgaatggatccagaagctgcaccgcgaccgcagcgcgcgcggctattcgaccgaggccgtcacggacaccatcctgcggcggatgccggattacattcactacatctgcccgcagttcaccgagaccgacatcaacttccagcgcgtgccgacggtggacacctccaatcccttcgtggcgcgctggatcccgacgccggacgaatcgatggtcgtgatccgcttcaagaacccgcgcggcatcgatttcccctatctgctctcgatgctgccgcaaagctggatgtcccgcgccaactcgatcgtgtgccccggcgccaagctcgatctcgcgatgcagctgatcctgacgccgctgatcatgcaactcatcgagcgcaagcgaagcctgaaatga

SEQ ID NO: 2868 - DNA, 2019 bp, BradyrhizobiumColbertium
atgaacatctcggtacatgccgaagccgacctctatgccgtcgcacataacgacctcgcaaacgccgtccgcttcctcgcgatcgacgccatcgagacctcgcagtcggggcatcccggcctgccgatgggcatggccgacgtcgcgaccgtgctgttctcgcgcttcctgaaattcgactcggcgcatccgaactggccggaccgcgaccgctttgtgctgtcggcaggtcacggctcgatgctgctctatgcgctgctgcatctgaccggcggcgatgtcagcctggacgacatcaaggccttccggcagtggggctccaaaacgccgggccatcccgaatacggccacacggccggcgtcgagaccacgaccggcccgttggggcaagggatcgccaccgcggtcggcatggcgctcgccgagcgtatggccaatgcgcgccatggcgacggcctcgtcgatcactttacgtatgtcatcgccggcgacggctgcctgatggaaggcatcagccaggaggcgatctcgcttgccggtcatctccaactcggccggttgatcgtgctgttcgacgataacggcatctccatcgacgggccgacctcgctggcgacctccgacgaccagctggcacgctttgcagcctccggctggtcggtgcgtcgaatcgacggccacgatcccgaagccattgcgcaggcaatcgccgaagagcgcgaaaccgagaagccgtcgttgatcgcctgccgcaccatcatcggctatggtgcgcctgatcggcagggcaccgagaaggcgcacggcgcgccgcttggtaccgagcagaccgcagcagcgcgccgggcgctgggctgggactatcagcccttcgtcgtgccgatcccgatcctcaaagcctggcggatgatcgggcaacgcgggcaggtcgatcgcctcgcctggcttgatcgctatgaatgcgcaacgcccgagcagcgcgacctgttcgtcgagggcagagccgttgccttgcccgccgcctatgcactggccgcggcgaagttgcgcgagcgctttgcatccgagcgtccgaagctcgcgacgcggcaggcctcgcaacaggtgcttgatggcatcgccgggacgattcccggccttgtcggcggctccgcggacctgacacattcgaatctgacgcacgccagggcgcaggcgccggtcaatagcggtgcgttcgcgggcgactacattcattacggcattcgcgagcatggcatggccgctgcgatgaacggcctcgcgctgcatgggggcttcatcccctacggcggcacgttcctcgcgttttccgactacagccggccggcgatccggctcgcggccctgatgcggctgcgcgtcatccacgtgatgacgcacgattcgatcggcctcggcgaggacggcccgacgcaccagccggtcgagcatctcgcggcgctgcgcgtgattcccaacctgctcgtgttccggccggctgatgcggtggagacgctcgaggcctgggattgcgcattgagcgcggagcatcgtccatccgtgttgtgcctgtcgcggcaggcattgccgactttccgcagcgatgcgcgcggcaaaaatcgcgtcgcgcgcggtgcctacctcgtcgtctccccggacggcggccgcgacgtgacgttgatggcaaccggctcggaggtctcgatcgcgctggatgctgcccgcctgctagcgaccgagcacatccgtgcggccgtcgtctcggcgccgtgcttcgcgctgttcgaggaacagccggaagattaccgcgccacggtgctcggcacagcgccgcgcgtcggtatcgaggcggccgtgcagggcgattggtcacgctggatcgggatggagggcgaattcgtcggcatgcgtggcttcggcgcctcggcgcccgcagccgtgctgtaccgcgaattcggcatcacgccgcaaagcattgcggaagccgcccgccgggcgattgcgcgcaagagccaatga

SEQ ID NO: 2869 - DNA, 1086 bp, BradyrhizobiumColbertium
gtggcccgtatcacacttcggcaactgctcgatcatgccgccagccacggttatgccgtgccggcgttcaacatcaacaacatggagcagggcatcgcgatcatgcaggcggcggccgaggtcgatgcgcccgtgatcatgcaggcctcgcgcggcgcgcgcagctatgccggcgacctcatgctttcgcatatgatcgacgcgctggagcgaacctatccggacatcccgctctgcatgcaccaggaccacggcaatgatgaggcgacgtgcgcctcggccatcgcccatggcttcacctcggtgatgatggacggctcgctcaaggccgatgccaaaacggcggcggactacgattacaacgttgcgatcacccgccgcgtcgtcgatctcgcgcactgggtcggcgcgtcagtcgaaggcgagctcggcgtgcttggctcgctcgagcagggcggcggggagcaggaggatgggcacggcgtcgagggcacagtcggtcacgaccagctactgaccgatccggatcaagccgtcgatttcgtgcgcgcgacgaaggtcgatgcactcgcgatcgcgatgggcacctcgcacggtgcctataagttcagccgcaaaccggacggggacatcctcgcgatgcgcgtggtcgaggagatccatcggcgactgccgaatacgcatctggtcatgcacggctcctcctccgtgccgcagccgctccaggacatgttcaaccagttcggcggcgagatgccccagacctggggggtgcctgtcgaggagatcgtccggggcatcaggagcggcgtgcgcaaggtcaatatcgacacggactgccgcctcgcgatgaccgcggtgttccgtaaggtcgcgtccgaggcgcgctccgagttcgatccgcgcaagtttctcaagccggcaatggatgcgatgcgcgagctttgccgcgagcgcttcgagcaattcggcaccgcgggccatgcgagcaggatcaaggtggtcccgatgagcgagatggcgcgtcgatatcgcgccggcgaactcgatccgcgcggcgacgcccgcgagtccgtggcggcctag

SEQ ID NO: 2870 - DNA, 1461 bp, BradyrhizobiumColbertium
atgaacgcacatgcaggcacagtccgcggcaaagagcgctatcgatccggcgtgatggaatacaagcgcatgggttattgggagcccgactacacgccaaaggatacggacgtgatcgcgctgtttcgcgtcacgccacaggagggcgtcgatccgatcgaggcatcggctgcggtagccggcgaatcctcgaccgcgacctggacggtggtgtggaccgatcgcctgaccgccgcggagaaatatcgcgccaaatgctatcgcgtcgatccggtcccgggctcgcccggctcgtacttcgcctacatcgcctatgatctcgacctgttcgagccgggctcgatcgccaacctctcggcgtccatcatcggcaacgtgttcgggttcaagccgctcaaggcgttgcggctggaagatatgcgcttccccgtcgcctatgtgaagacgttccaggggcccgcgaccggcatcgtggtcgagcgcgagcgcctcgacaagttcggtcggccgttgctgggggccaccgtgaagccgaagctcggactttccggccgcaactacggccgcgtggtctacgaggcgctgaagggcgggctcgatttcaccaaggacgacgagaacatcaactcgcagcccttcatgcactggcgcgaccgtttcctttactgcatggaggcggtgaaccgcgcgcaggcggcctcaggcgaggtgaaaggcacctacctgaacgtcaccgcgggcacgatggaggacatgtacgagcgcgcggagttcgcgaaagagctcggctcggtcatcgtcatgatcgatctcgtgatcggctacaccgcgatccagtcgatggccagatgggcgcggcgcaatgatatgatcctgcatctgcatcgcgctggccactcgacctatacgcggcagaagagccacggagtgtcatttcgcgtcatcgcgaaatggatgcggcttgcgggcgtcgaccacatccacgccggcacggtggtcggcaagctcgaaggcgatccgaacaccacgcgcggctactacgacgtctgccgcgaggacttcaacccgaccaagctggaacatggcctgttcttcgaccagtcatgggccagcctcaacaagatgatgccggttgcctccggcggcatccatgccgggcagatgcaccagctgctcgatctgctgggtgaggacgtggtgctgcagttcggcggcggcaccatcggtcatcccatgggcattgcggccggggcgaccgccaatcgcgtcgcgctggaagcgatgatcctcgcccgcaatgagggacgcgactatgtccacgaagggccagagatcctcgccaaggcggctcagacctgcacgccgctgaaggccgcgctcgaggtctggaaggacgtcaccttcaactatcaatccaccgacacgccggacttcgtgccgaccgcgctggaaaccgtctga

SEQ ID NO: 2871 - DNA, 408 bp, BradyrhizobiumColbertium
atgaagatgacccagggctgcttctcgttcctgcccgatctgaccgaccagcagataacaagccaggtgcagtattgcctcgccaacggctgggcggtgaacatcgagttcaccgacgatccgcatccccgcaacacctattgggagatgtgggggctgccgatgttcgatctccaggatgccgcaggtgtgatgatggagctggccgagtgccgaaaggtgtacagcgaccgctacatccgcatcagcggcttcgattccagccatggctgggaatcggtgcggatctccttcctcgtcaaccggccgaagcaggaggccgaattcgaactggtgcgccaggaagtcggtggccgcgccgttcgctacaccacggtgcgcaagccggccgcgcaggccgcaacctga

SEQ ID NO: 2872 - DNA, 933 bp, BradyrhizobiumColbertium
atgctcgacgtgcccgatgcaacgacgaccgaacccggcgagacccatttcgatctccgcaaggaggccgaagcggccgggatcacggatacgctgcaacagctcgatcaggaactgatcgggctcaagccggtgaagagccgcgtgcgccagatcgcctcactgctgctgatcgaacgtgtccggcagcgggcgggcctcgcttccgcgccgccgacgctgcacatgtcgttcaccggcaatcccggcaccggcaagaccaccgtggcgctgcgcatggcgaagatcctgcacggacttgggttcgtgcggcgcggccaggtgatctcggtgacacgcgacgatctcgtcggccagtatatcggccacaccgcgccgaagacgaaggagatattgaagaaggcgatgggcggcgtgctgttcattgacgaggcctattacctgcatcgccccgacaatgagcgtgactatgggcaggaggcgatcgagatcctgctccaggtgatggagaaccagcgcgaggacctcgtcgtgattctcgccggctatggcgagcggatgaccagttttttcgcctcgaatcccggcttccgctcgcgcatcgcccaccacatcgaattcccagactatgccggggccgagctgctcgtcatcgccgagctgatgctgaaagagcgcggctatcgcttctcggcagcagcgcgggaagccttcgagaaatacatcgcgctacgccgcacccagccgttcttctccaatgcgcgctcgatccgtaacgcggtcgaccgcattcgcctgcggcaggccgatcgtctggtgtcggatctcgaccgcatgctcgatgtcgccgatctcgaaaccatcgatgccatggacgtgttggcgagccgggtcttcagcggcggcgccgatgcgcggagtgcagagccatga

SEQ ID NO: 2873 - DNA, 747 bp, BradyrhizobiumColbertium
atgaccggagagatcatcattgctccctcgatcctggctgcggatttctcgcggctcggcgaggagatttcggcaatcgacgcggccggcgccgattggatccattgcgatgtcatggacggacatttcgtaccgaacatcagcttcggtgccaacgtcatcaaggcgatccggccgcatacggagaagatcttcgacgtgcatttgatgatcgcgccgactgatccctatctcgaagcgttcgcgcaagctggagcggatatcatcacggtgcacgccgaggccggcccgcatctggaccgctcgctccaggcgatccgcgcgatcggcaagaaggccggtgtcagcctctgtcccgccacgcccgagagtgcgatcgcctatgcgctcgatcgcgtcgatctggtgctggtgatgacggtcaatccgggattcggcggccagtccttcctcgagccccagcttgaaaagatcgaacggatcaagaccatgattggcgatcggccgatccggctcgaggtcgacggcggtatcacgcccgacaatgccgctgtcgtggcggcggcgggagctgatgtgctggtcgcgggttccgccgtgtttcgcggcaagggcgttgccgagtatggtgcaaacatccaggccattcgcctcgccgctgagaggggccggatcccgaagcggcaagacaatgctgcgcagcggatgcgcgtcagcgatgggggccgatccggtagacccgcgtga

SEQ ID NO: 2874 - DNA, 213 bp, BradyrhizobiumColbertium
atggagaacgtacgtcgctaccgggcgctggcatccctctgtcgacagcaggcggcctaccggccgctgcagaactgggaactcctcggccaagccgaacatttcgaacatctcgccgacatcgagctcaaggcatatttcgacgcctgcaatgtgtctcaggacgaggacacccccgcagccgcgacatgggaagctcccgtcgcggcgtga

SEQ ID NO: 2875 - DNA, 837 bp, BradyrhizobiumColbertium
atgtacaaagatattctcgtccacattcccaccgaacgtcccatgcgacccgcaatcgagggctcgatctcgctcgcggcgcacctcaacgcccatctcgacgcggtcgcggtgggctatgtcacaaccagtgtagcctacgtgatggaggggggcgcggccgtggcggccgtgttcgagctggaacgcgagcgcgccgtggaacgggccgaggcagcgctggccgtgttcaagaccgaagcggcgaacgccggcatctcctacgcctgccacccgctcggcgcgatcccggcggacgcagccgaatcgctcggcgagatggcccggctgcacgacctcagcatcgtgctccagcctgatccggcgcaaggctcgttcgacaacgacgtgccaagcgagatcctgttccaggcgggcggcccggtgctcttcctgccttacaccttccgtggagccttcaaggcaaaccggatcggcatctgctgggacggcagccgtctcgccgcccgagcagtgcgcgacgcagcgccgttcctggcgcgcgccacagaaatcgtggtcatcaccatcaacgaacccgacgccggctccggcgaagcttcagcaagcggtctggcaagacatctcggccggcgcggtctgtcgacccgcatcgtcggcctgtcggcgacgcgcgccgacattcagccgaccatcctgtcgctcgcggccgatgagagcctcgacctccttgtgatgggtggctacggccattcccggttgcaggagcgcattctcgggggcgtcacgcgtgccatgctggaggccatgacggtcccgacactgatgacccactga

SEQ ID NO: 2876 - DNA, 1548 bp, BradyrhizobiumColbertium
atgaacgatcgcgtcaattccgacaccaccacgtctcgcaagatcttgcggccgcgccgcctcgcgctgctcggcaccgtggccgcgctgggcgtagccgccctgtcaattgcgccgggcacttcgccgttcggcatgaattccttcattgcgccggctcaggctgcggaggccgcggcgacgccaccgagcttcggcgatctggtcagcaaggtcaaacccgcggttatctccgtgcgggtcaggatcgaccgggacaacgacaagagcgcaatgctgcagcagaaccgtatggactcggacgaggacacgccgttcgaccagttctcgcggcaattcggtttccgctttccgggcggcatgaacggcatgccgcgccagcgtcaccagatgatcaccggtgaagggtccggcttcttcatctccgccgacggctatgcagtgaccaacaaccatgtcgtcgatcacgccgaatccgttcaggtcaccatggacgacggcacgacctacaaggcgaaggtcgtcggcaccgacccgaagaccgatctggcgctgatcaaggtcgatggcaggagggattttccgttcgtcaaattctccgaccagaagccgcgcatcggcgactgggtggtcgcggtcggcaatccctttggtcttggcggcaccgtgaccgccggcatcgtctcggccagcggtcgtgacatcgggaatggtccctatgacgacttcatccagatcgatgcgcccatcaacaagggcaattcaggcggcccggccttcgatatgaacggcaacgtgatcggcgtgaacacggcgatcttctcgccctcgggcggctccgtcggcatcggctttgatattccggcctcgaccgccaagctcgtcgtcgcgcaattgaaggacaagggggcggtcacccgcggttggctcggcgtgcaggtgcaacccgtgacatcggatattgcggacagcctcggcctcaaggaggcgcgcggcgcaatcgtcgacaatccgcaagatggcagcccggcggcgaaggccggcatcgaggccggtgacgtcatcaccgccgtcaacggcaccgcgatcaaggactcccgcgatcttgcccgcaccattgccaccctggcaccgggtacgtcggtgaagctcgaggtgttccgcaagggcgacagcaaaacggtgactttggcgctcggcgagctgccgaacgagcggcaagccaaagaaaatcgcaattccgacgagcgtagggggcagccgaatgccggcacgccgcgcctgggtctcagcctggcaccggctggcgacgtccagggtgcaggtcagagcggtgtcgtcgtcaccgaggtcgatccgcaggggccggcagctcagcggggcattcagaccggcgacgtcatcctcaatgtcggcggcaaggccgttgccagtgtcggcgacgtccgttcggagctggcgcaggccaagtcgtccggcaagcgcagcgtgctgttgcaggtcagaagcgcggaggcgacaagattcgtcgcggttccgctcgcctaa

SEQ ID NO: 2877 - DNA, 363 bp, BradyrhizobiumColbertium
atggatcgattgaagttctcgctgtggagcacgctgctcgtggcgccattggttctttcaggcggaaacgcgttcgggcgcgacgatggccgttacgcgaattctcccctgaagccctggttcgacagcctgcgcagtcgcctcggtccatgctgctcggacgcggatggtttcgccgttgccgatcccgactgggaatcgcacaacggacgttaccgtgtgcgtctcgacgggcagtggatcgaggtgccggacgacgccgtgatcaccgagccgaaccgggccggccgcaccatggtgtggccggtgaagacggcgttcggggtttcgatccgctgcttcatgccaggcagcatgatgtga

SEQ ID NO: 2878 - DNA, 315 bp, BradyrhizobiumColbertium
atggcacgcaaggcaaagaaacgctactcacgcagctcgggcagcgatgtcgcgagcgagatgcggcgctacaagaaggggaccgcgaagagcggccgtggaggacgcggcggccgcgtcaagagccgcaaacaggcgatcgcgatcggactgtcgaaggcgcgcaagaaaggcaagaaggtcccgaagaaggcatcgaagcgaacgagcgccaagaagacctccaagaatacgtccaggaaaacatccaagaagtcgtccaggaagtcctcgaggaaatcatcgaagcgtaaatcctccacacggtcgcgctga

SEQ ID NO: 2879 - DNA, 195 bp, BradyrhizobiumColbertium
atgccggtgcaaggtaaatacgacgcgcgggttttcctgagcgagcagatgacgcgagcgcaggggctcaagctgaaacggctgagcgaggaagcttatcagcctgctcagtattcgcgtgatctctccttcagcgaggccgcacagcgcatccgagcgttggaagcggagatcgagctggcgaattccttctag

SEQ ID NO: 2880 - DNA, 180 bp, BradyrhizobiumColbertium
atggccgacgtcgaggtgtcggtgcgcgacctcgtcgagcgcgatcgcgactgcactgaaaaggccctggcgcagatggatttgcgccggaggatcaacctcctgatcggggaatggaaggcggctggtggcaccgacgttctgcccgacattcgggaccgggtgcgcggtcgcgcatga

SEQ ID NO: 2881 - DNA, 252 bp, BradyrhizobiumColbertium
atgcgcagaaggcatcagctgatctcagccaccggcctcatcaagctgttgacgcatacaatgatgggcgcagccctcggcctcaccttcaccctcacgcttgtcctgtccaacccggccgtggccaacttgctaaacaacggcggaagccaggcgatcgtggtcgtcgctctcaccttggtgatgacgttcgcgatcggcgccacccttacgggcgtcgtgttcatccttacagaggacaaggaaccatga

SEQ ID NO: 2882 - DNA, 222 bp, BradyrhizobiumColbertium
atgggtaaggtagtctttctctaccgctcgctggcctatcgcaacgcggccgcggacatcctgcgcaaggcgcgcaagctcccgaacggggcggagcgaagcgcggcacgccgctacgccagggcattgcgcgatctcgcgcgaacggaagcctggctggaagggcgggtcgcacgcgaaccgcggacggtccggcgcatgacgagcgctgcgtccggttaa

SEQ ID NO: 2883 - DNA, 1491 bp, BradyrhizobiumColbertium
atggaccaggacaaggtcaatatccttctcgtcgacgatcagcccgccaagctgcttgcctatgaggtgatcctgaaggatctcggcgagaacctcgtgatcgcctcgtcgggacgcgaggcgctcgaggtgctgctcaagactgagatcgcggtgatcttggtcgacgtctgcatgcccgaactcgacggcttcgagctcgccgccatgatccgcgagcatccgcggttccagaagaccgcgatgatcttcatctcagccatccaggtcagcgacatggaccgattgcgcggctacgagatgggcgcggtcgattatgtgccggttccggtcgtgccggaggtgctgcgcgccaagataaaggtgtttgccgagctttaccgcaagacccgcgaactcgaacggctgaaccacgatctcgaagaccgcgtccgcgctcgcaccgcggaactggagcgttccaccgcgaagctgcgcgaaagcgagcagcggcgcagcatggcgatcgctgccggcaagatggggtcctgggactgggactgggtcagcggcgattggatgtgggatgaggggcagtaccgcatctttggcgtcgacgcggagagcttcgaggtcaacccggcgaatgttcaggcgctgttgcatcccgatgacgtcgatcagttgcgcagggcgatcgccgaattcagcaaaggcacgcgtgcctatgagacagagttccgcatcgtgcggcccgacggcgaggttcgctggtgcgtcggcacggcggctgcaacggtcgacgagagcgggcgcgtggtgcgcgtcagcggcgtcaccgtcgacatcaccgaacgcaagcgcgccgaggagcggcagaatctgctggcgcgggaagttgatcatcgcgctaagaatgcgctggcgctggcgcagtcgatcgtgcgtctcacccgggccgacgaggtcaaggcctatgtcaacgccgtcgagggacgcatcaatgcgctggcgcgcgtgcacaccatcctgtcgctgtcgagctggcagggtgccgaactctctaagctgatcgacgaggagcttgcgccctactcgctcggcggccagatcagattggccgggcccgaagtccagctgctgccgacaacggcgcagacacttgcgctcgcgctgcacgagctcttcaccaactcggcgaagtatggcgcgctctccacgcgatcggggcggctttcgatcgcctggcagattgaggacgaactcctcaccctgagctgggaggaatccggcggtccgttggtcatgacaccgaaatcccgcggcttcggcacgcggagcctgcttgcgagcgtcgagtcgcagcttggcggacaggcgcagttcgattggcgcgccgagggcctgttgtgccgcctggaggtcccgttgacgcgcaaggcctcggcgacgacagcacccggcaagttcgacgccgccggcgccgccgaattgcaacgcgcgtccggttaa

SEQ ID NO: 2884 - DNA, 4059 bp, BradyrhizobiumColbertium
gtgcccggcgtcgccggcacctggaaggacctcaccgacaacgtcaacttcatggcttcgaatctgacggcccaggtccgcaacatcgccgaggtcgcaaccgccattgccggcggcgacctttcgaagaagatcacggtcgacgtgcgcggcgagatccttctcttgaaggacaccctgaacaccatggtcgagcagctccgctccttcgccgccgaagtgacgcgcgtcgcgcgcgaggtcggcaccgaaggacgcctcggcggccaggccaacgtgcccggcgttgccggcacctggaaggatctcaccgactccgtgaactcgatggcgggcaacctcacggcccaggtccgcaacatcgcggaagtcgcgactgcgatcgctggcggcgacctctcccgcaagatcaccgtggatgtgcgcggcgagatccttcagctcaaggatacgctgaacacgatggtcgaccagctcaaccggttcgccggcgaggtgacgcgcgtcgcgcgcgaggtcggcaccgaaggccggctcggcggtcaggccgtcgtgcccggcgtcggtggcacgtggaaggatctcaccgacaacgtcaacctcctggccgcgaacctgacgacgcaggtccgcaacatcgccgaagtcaccacggcggttgcgcgcggcgacctctcccgcaagatcaccgtcgacgtgaaaggcgaaatcctcgagctcaagaacaccatcaacaccatggtggaccagctcaacggctttgccggcgaagtcacgcgcgtggcgcgcgaggtaggcaccgagggcaagctcggtggccaggcccaggtgcccggggttgccggcacatggaaggacctcaccgacacggtgaacctcatggccgcgaacctgaccgagcaggtgcgcggcatcgtcaaggtggtgaccgcggtcgccaacggcgatctcaagcagaacttgacgatgaaatcgcgcggcgaggtcgccgctctcgccgacaccatcaacaacatgaccgagacgctggcgaccttcgccgaccaggtaacgtcggtggcgcgcgaggtcggcgtcgaaggtcggctcggcggccaggccaacgtgccgggcgctgccggcacctggaaggacctcaccggcaacgtgaatcttctggctgccaacctcacctcgcaggtgcgcgcgatcgccgaggtcgcgaccgcggtgacaaagggcgacctgacgcgatcgatccaggtcgacgcccgcggcgaagtcgcggagctgaaggacaacatcaacacgatgatcacgaacctccgtctgacgacggatgtgaacaccgagcaggactggctgaagaccaacctcgccaagttcaccaacatgctccagggacagcgcgatctcaccacggtcggccggatgctgctcaccgaattgtcgccgctggtgaacgcccataccggcgtgatctaccaggtagagaacgagaacgacccgcagctgctgttgctcgcctcttatgccagcgacggcgtctatccctatcaacccgtgctgcagttcggcgaaggcctgatcggccaatgcgcgctcgacaagcggccgcgcgtcgtctccgacattccggccgacgtggtgccgatcaactcggcgctgttccgcgtcgcgccgaagaacctcgtggtgctgccggtcctgttcgaaggccaggtcaaggccgtgatcgaactcgcctcgctggtctccttcacgacctcgcagatgacgttcctggagcagctcaccgactccatcggaatcgtgctcaattcgatcgaggcgacgatgcagaccgaaggcctgctcaaacagtcgcaacagctcgccggcgagctgcagacccaacagcgcgagctgcagcagaccaacgaccagctcgagcagaaggcgcagcagctggccgagcgtaacgtcgaggtcgagcgcaagaatcaggaaatcgagcaggctcgccgcgcgcttgaggaaaaggccaccgagctcgctctgacctcgaagtacaagtccgaattcctcgccaatatgagccacgagctccgtacgccgctgaattcgatcctgatcctgggtcagcagctcacagacaacccggacggcaacctctcggccaagcaggtcgaattcgcccgcaccatccacggcgcgggcaccgacctgctcaatcttatcagcgacattctcgatctctccaagatcgagtccggcacggtgacggtcgacgccgaggaaattctcaccgcgaacctgctggagaccgtgggccggccgttccggcacgaggcggacaaccgcaacctgtcgttcaagatcgacgtcgatccgaacctgccacgcagcatcgtcaccgactccaagcgcctgcagcaggtcctgaagaacctgctctcgaacgccttcaagttcaccgccgaaggcgaggtgcgcctcaaggtcgccggcgcgatcggcggctggggaacggatcatccggtgctgaactccgcgccggccgtgatcgcattcgaagtgtccgataccggcatcggaatcccgttggagaagcagaaactgatcttcgaggccttccagcaggcggatgcaggcacgagccgaaagtacggcggcaccggacttgggctcgcgatcagccgcgagctcgcgagcctgctcggcggcgagatccatctgcgcagcacgcctggcaagggctcgtccttcacgctatatctgccgctgaaatattccggcccgacccttgcgccgcggtccgcgccggcgccgcagcaatacagccagactccggctctgcaaccgcccgcgcccgagcagcgcgtgatcgagcagcttcccgacgaccggttgaacctcgagcctggcgacagcatcctcctgatcgtcgaggatgacccgcattacgcccgggtgctggtggatctggcccgcgacaaaggcttccgggtcctggtcgcggcccgcggcggggaagcgctggagctcgccaagcagtaccagccgaccgccgtctccctcgacgtgttcctgcctgatatgctcggctggaccgtgctgagccagctcaagcacaatccgctcacccgccacatcccggtgcagatcatcacgctcgacgaggaccgccagcatgcgctggcgcgcggcgcattctcgttcgtcaacaagccgacgacgcccgaaggcatctctgccgcgctgacgcagatcaaggagtatgcgcggccgcggcgcaagcggctgctgatcgtcgaggacaacgaggccgagcagctttcgatccgcgagctgctgcatcatgacgatatcgagatcgtgacgacggacaccggcgctggcgcgctttcgacgctccgcatgcacccctgcgactgcgtggtgctcgacctcaggctgccggacatgagtggtttcgaggtgctggatcagatccgcaacgacgagacactgtcgaacatcccggtcgtggtgttcaccggacgcgagctttccgcagaggaggacgccgaactgcacaccatggcgcgcagcatcgtggtcaagggggtggaatcgcccgagcgcctgctcgacgagaccgcgctgttcctgcaccgcgtgatcacggaattgccggtcgagaagcagcgtatgctggagaagctgaatagttccgacgaggacctgatcggcaagaccgccctgctcgtcgacgacgacgcccgcaacatcttcgccctctcgagtgtgctcgaacgccgtggcatgaaagtgctgacggcgacgaccggcagcgaggcggtgacactggtcgaatccaatccggagatcgcgatcgtgctgatggacatcatgatgccgcagatggatggctatcagaccatcggcgtgatccgcgagaacccggccttcgcccgtcttccgatcatcgccttgaccgccaaggcgatgaagggcgaccgtgagaagtgcctcgaagccggcgcgtccgattacctcgccaagccggtcaacaccgaccaattgctgcttgcgatccgcatgtggctgcatcgctga

SEQ ID NO: 2885 - DNA, 261 bp, BradyrhizobiumColbertium
atgatggtgttcgccgccggttcggccttggcacagggcggcggccccagcggccgtggggccgtgaccggcgaccccgccgcgagctccgccaatccccgggcggataccccaaccaccggcacggcgacccgatcaaacccgagcggcagcgggacctcgtcttcaggtggtaaggacgacaatggcgatgccggcagggacaagatgttggagggcgaccgcaccgcgcaaccgcagcgacatccgaacgacaagtag

SEQ ID NO: 2886 - DNA, 513 bp, BradyrhizobiumColbertium
atgcgagtccttgccgcgattatcctggcattcatccacactgcgactcttgccgagagcaccggcgagcgaaagcctggcgatcggccaccaaccgcgatcgaagtcatcagcgggctctacagcttcagccgatttcaacagggtcttcttgagaacaccgacctcaagggcaatgcggaggtcaagaacctggccgccctgcgcgccgaggaagcggtcaagcgcgacaagagactgaaaggcgtccaggaggcgattggcgcagaactgcacgtcggcaaggtagagtcgccgactgctagtctcgtcgaacccgaaatgtcggatggtccgacttacgtcagaagcttctatgccgcgcagattcccgaatacgagtcgatcatcattctgctcgagcgttatctgaaggcgcccgaccatgcagcgctcgcggcgtttgcgcgcgagcagctcccgattttgcgcgtgcaggccagggacgccgagcgtaccatggcggacaggtag

SEQ ID NO: 2887 - DNA, 198 bp, BradyrhizobiumColbertium
atgaaacagtctgacatcttcagagacaacgccgacaattgtcttcagcttgccgagcgagcggacggacaacctgcccataagcgctactcgcgcatggccgatgcctgggcggcgctcgccaacgagcaggattggctcgatggcgaaatcccgcccgttccggcccacgctcctgctccgaaccgggatatgtag

SEQ ID NO: 2888 - DNA, 135 bp, BradyrhizobiumColbertium
atggctccacgtctggtgcttctttccctcatgctcgcctttggcgtctcagtcgcgttcgccactgtaacgacggtgcggcaggtgcatctcgaaaacgcatctggcgaggaggtgcatccggtgcgaagttag

SEQ ID NO: 2889 - DNA, 204 bp, BradyrhizobiumColbertium
atggcccattccgatcaaggtatcgtcaaggacaagcgcggggaggaacagccgcgcgacaaggagcgtgcacaatctgtgcacaagacggatccgaaaggttcgccctcgcgcgaagcgacgcgcgatcccaagctaagcgacgacagcaagacgccgggctccggcgcaatgccggacggctcgagcgatgcgacaggctag

SEQ ID NO: 2890 - DNA, 255 bp, BradyrhizobiumColbertium
gtgatcaccatgaacgacgtacgggccgagcgccttcaggtcatgctctcgccggaagaattggccgctattgatgatttccggttcaggcaccgcatgccgacgcgggcggccgccgtccgcgaactgctcaacctcggacttgcggctgtgggcgtcgatgccagcgccggcgtgaagtcaagcaacttcggcgtgctgggccgcggaccagacggacatacccacagagatccggaagacgcagcggactga

SEQ ID NO: 2891 - DNA, 891 bp, BradyrhizobiumColbertium
atgtccgagcaggccttgatcgatccggtaagccgctttccaaagccgccgttcaagaagcagacgcagccctggccgggtctcgccggcaagatggagccgcggccggatcatggcgagaccacctacaagggctccggccggctcgccggccgcaaggccttgatcaccggcggcgattccggcatgggccgcgctgccgcgatcgcctatgcgcgcgaaggtgccgatgtcgccatcaactatctgtccgcagaagaaccggatgcgcaggaggtgatcgcactgatcaaaaaggaacggcgcaccgggctcgccatccccggcgacctgacagacgaagccttctgcaagcaattggtcgaccaggccgtgcagggcctcggcgggatcgacatcgtcgtgtgcaacgccgcgcgacaacaagcgcgcgcttccatcctcgacgtctcgtcagaggatttcgatgcaaccatgaagacgaatatctacgcgccgttctggatcatcaaagcggcactgccgcacctcaagcctggctcctgcatcatcggcacgacgtcggagcaggcttatgatccctcaccggacctctacgattatgcgcagaccaaggcggcgacgatgaactacgtgaagtcgctggcgaagcagctcgcctccaagggcatccgcgtcaatggcgttgcgccggggccgatctggacgccgctccaggtctccggcggcgctaccatggagaagctcgagaaattcggcggcatgaccccgctgggccgtcccggccaaccggtcgagctggcctcgatctacgtgcagcttgccgcggcggacgccagctatgcgacgggtcaggtgtacggctccgctggcggatccgggcaaccctag

SEQ ID NO: 2892 - DNA, 201 bp, BradyrhizobiumColbertium
gtgtttcctttcgctgtcgatgccagcgaagccgccgcgagcgttgcgctcgcggcgtggacgacatgccggcgggacaaggaagttttgctggagttcgacatcatgctctccgcgaggatcgagactcaatgcgcggagacggtcgtcgttgctagagtggggacgccgggtgtaccggcgtccttcagcaatgcgtga

SEQ ID NO: 2893 - DNA, 552 bp, BradyrhizobiumColbertium
atgaaacgcactatcatcgcccttgcctgcatgattcttgcggggccagcacttgcccaatcgctgggtgagaagaccggcgtaaactccgcgctgggcgtcgcgccaagcacccccgatttcgtcaagcaggtggccatcagcgacatgttcgagatcgagtcgagcaagctcgccgagcagaagggcaacgcgcaggagaagagcttcgcgaagcagatggtgactgatcacaccaagaccagcaccgaactcaagggcctcgtcagcgatggcaaggtacaggcaaccctgccgaccacgctcgacagcgcgcaccagagcaagctcgacaagctcaagaacgcgacgggcaaggacttcagctcggactacgattcctaccaggtcagcgcccatgaggacgccgtctccctgttcgagcgctacgccaacggtggcgacaatgccgcgctgaagggctgggcgggcaagaccctgcctgcgctcaagcaccatctcgagatggccaaggagctcggcaaggcgccgagcgtcggtcagtccaaatag

SEQ ID NO: 2894 - DNA, 228 bp, BradyrhizobiumColbertium
atgagtgatttccgcgatatccagcacggcgtgaacgatccggtcgggggcttggacgtcaagcgccaggttaacgacaatcgcactccacatgagcgggcgcagcatcatgccgacgtccgcgccgacgcgacccccacaccgaccgagccattccttcccgaacgactccggcgaaaggcaactgatccgatcaacccccgaagcggcaggaagccgaccgactga

SEQ ID NO: 2895 - DNA, 1788 bp, BradyrhizobiumColbertium
atgtctcagaccgtctcggacttcatcgttcaacgcctgcatcagtggggcgtgcgacacatctttggctatcccggaaacggcatcaacggcgtgttcggcgcgatgaaccgggcggacggcaagctcaattttgtgcaggcgcgtcacgaggagatggcggcattcatggcgaccgcttacgccaaattctcgggggagatcggtgtctgcatcgcgacatccggtcccggcgcctcgcatctcgtcaccgggctgtatgacgcgctgctcgatcaccagccggtgctcgcaatagtcggccagcaatcgcgcaacgccctcggcggacactatcagcaggagatcgatcttctctcgatgttcaaggacgtcgccggcgcctatgtcatgcaggcatcctcacctgcacaagtgcgacacctgatcgatcgtgcggtgcggattgcgctggcgcggcgggccccgaccgtgatcattctgcccaacgaccttcaggaagagccttacgaggatccgccccgtgcacacggaacgctgcattccggtatcggctacagcgcgcctagcgtcatgccccgcgaggccgatctcgaccgcgcggcggatatcctcaacggcggcaagaaagttgcgatgctcgtgggtgcaggcgcgcttggcgccaccgacgaagtcatcgcggtggccgatcggctgtcggccggctgcgccaaggcgctgctcggcaaggccgcgctgcccgacgatctgccatgggtcaccggctcgatcggcctgctgggtaccgagcccagctacgacatgatgatggagtgcgacacgctgctggtggtgggctcggcctttccctacgccgagttcctgccaaaggaaggcagcgcgcggggcgtgcagatcgacatcgacgccagcatgatgtcgatccgctttcccatggaggtcggcctggtcggggacgccgccgaaacgctgcgcgcattgttgccgcggctcgagcccaagagcgacggggcctggcgccaacggatcgagaacgacgtcgcgaaatggtggacgaccctcgacgaccgcgcgcatcagcctgcgacgcccgtcaatccgcagctcgtcacctgggaactgtccccgcgcctacccgaccgcgccatcatcaccagcgattccggctcctgcgccaactggttcgcgcgcgatctaaagatgcggcgcggcatgacggcatcgctctccggtgggctcgcttcgatgggcgccgcagtgccttacgcactcgcggccaaatacgcccacccggaacggccggtgatcgcgctggtcggcgacggtgccatgcagatgaacaacatggccgagctgatcacggctgcgaagtactggcgctcgtggcgggacccgcgcttcatcgtttgcgtcttcaacaacgaagacttgaaccaggtcacctgggagcagcgcatcatcaacggagatccgaaattcgaggcctcgcagcgcatcccggatgtctcctactcccgcttcgcggagctggtcggcctgcgcggcatcttcgttgacgacccgcagcagatcggctcggcctgggaccaggctctggcgagcgacatgcccgtcgtgctggaagtgaagaccgatcctgaggttccgccgctgccgccgcacatcaccctgcagcaggcgaagaatttttcgctcgccgtgctgaagggcgatccgaacgaaagcgcgatgatcaagggcgcggcgcggcaggtcctcgagtcgatcctgcccggaaagcaatga

SEQ ID NO: 2896 - DNA, 375 bp, BradyrhizobiumColbertium
atgttgaaccaagacgagctagatcgcagcgagacaggacgtttgatcggcagcgacaaggtcgaaggaacgtcggtctacggcgccgatcgcaaccggatcggttcgatcgaacgcgtgatgatcgacaagatcaccggcaaggtgtcttatgccgtgctgagcttcggggggttcctgggaatgggcaacgatcactacccattgccctggcaatcgctcaaatacgatacagagcttggcggctatattaccgcgatcaccgccaaggatctggaaagcgccccaaaatatggcgagaaggccgaatggaactggggcgatgacgctgccgtgcgaggtatcaacacctactacggggtgcccttcgcgtag

SEQ ID NO: 2897 - DNA, 465 bp, BradyrhizobiumColbertium
gtgagatgggacacgctggaagaggaaacctgctcactcgcccgcaccgtcgccgtgatcggggaccgctggaccctgctgatcctgcgcgagtgcttcttgcgcgtgcggcgcttcgaagcgttccagtcctcgctccagatcacccggcacctgctctcggagcgactcaagaagcttgtccgcttcggcatcctgcgccgcgtaccctattccgacgcgccgaagcgctacgaatacatcctcacgcagaaagggctcgacctctacccgatcatcatggcgatggtgcattggggcgacgctcatatgggcgacgagcgtggccgtccgctgctgcacgagcacaagacctgcggcaagctgttcgatccggtgatggtgtgttcggaatgcggcgaggcgcttcacgcgaagcaggtgcatgtgcatgcggggccggcgcggagggaagcaggccgttga

SEQ ID NO: 2898 - DNA, 738 bp, BradyrhizobiumColbertium
ttgcccaagcgaaacgcgactgccgccgtgatcggggccggcgacttcatcggctccgagatcgccaagaaattcgccgccgagggcttctcgatctatgcggggcgtcgcaacggcgacaagctcgcgccgctggtcaaggcgatcgaagctgccggcggtgaaatccacgcgcgctcgcttgatgcgcgaaaggaggaggagatcaccgcgttccttaacgacgccgatcagcgcgcaccgctggacgtctgcatcttcaacgtcggcgccaacgtcaattttccaatcctcgacaccaccgagcgcgttttccggaaagtctgggagatggcctgctattccggcttcctggcaggacgcgaggcggcacggctgatgctgccgcgcggcggcggcaatatcttcttcaccggcgccaccgcctccttgcgcggcggcagcggctttgccgcctttgcgagcgccaagttcgggcttcgcgcggtggcgcaagcgatggcgcgcgaactcgggccgaaaaacattcacgtcgcccatctcatcatcgattctggggtcgacaccgaatgggtgcgccagcgccggctcgaagcgctcgggcccaatgcgctcgataatcccgacctgctaatgccgccctcgtccgttgcagacgcctattggcagctctaccagcagccgaagagtgcctggaccttcgagatggagattcgtccgttcggagagaaatggtga

SEQ ID NO: 2899 - DNA, 1002 bp, BradyrhizobiumColbertium
gtgaagaccgcgatcaccgaactgttcggcatcgagcacccgatcatccagggcggcatgcatttcgtcggctttgccgagttggccgccgccgtctccaatgccggcgggctcggcatcatcaccggtctaacccagaagacgccggaattgctcgcgaaggagatcgcacgctgccgcgacatgaccgacaagccgttcggcgtgaacctcaccttcctgccgaccttctcggcgccgccctatcccgaatacatcgcggccatcgtggaaggtggcatcaaggcggtcgaaaccgcaggccgcagtcctgaacaatacatgccggcgctaaaggcggccggcatcaaggtcatccacaagtgcacctcggtgcggcactcgctgaaggcggagcgcatcggctgcgacgccgtcagcgtcgatggcttcgagtgcggcggccatcccggcgaggacgacattcccaacatgatcctgctgccgcgcgcggcggaagagttgaagatcccgttcgtcgcctccggcggcatggccgacggacgcagcctggtcgcggccctgtcgctgggtgccgccgggatgaacatgggcacacgcttcatcgccaccaaggaagcgccggtgcatcagaacgtgaagaatgcgctcgtcgcggcgaccgagctcgacactcggctgatcatgcggagcttgcgcaataccgagcgcgtcatgaagaacgccaacgtcgaccgcctcatcgagatcgagcgcgagaagggcgacaagctcacgatcgacgacatccacgaccaggttgcgggtgtctatcccaagatcatgctggacgggcagatggacgccggcgcatggagctgcggcatggtcgccggcctgatccacgatatcccatcctgcaaggaactcatcgatcgaatcatgagcgaggcggaaaccatcatccgcagccgcctgatggggtttctggacgggacgggagcggcgcgaaaggtcgcctga

SEQ ID NO: 2900 - DNA, 420 bp, BradyrhizobiumColbertium
gtggtcctgaaaagcgttcttgctgcaattgcttttgccctcgtgatcacagggggcggcatcgcgcgcgctgacggctacaagcctgaggaatatctcggcctcgatctctccaaggccgtgctttcgccgaaacggctcgggccggagacccgcttcgcgccggtcgcgctagaagcgcgcgacggcaacgaagcacaggctcgcgctgagcccgtcggcgtgccgaagaaggttgcggccgagcgcgtccgtgtggccgagccgaaggccacccaagccaggggcggacaggcacgcggcgcggcccgggcgaagcttgcacggcgccacggcaatccgctcgacgcgcaggcaatggatacccggatccagacctggccctgccgctccggcggcatctgcaactggaagcgctag

SEQ ID NO: 2901 - DNA, 1566 bp, BradyrhizobiumColbertium
atggcatcacctcgcgcctcgcgcgcctggacccggcggcagttcctggtccgctccgccttcagcctccctatcgcctcgcttgcgacgccttcgatcagccgcgctgctgatcgcccgcagatcctgggcggcatccagtccggcgatgtctctgacggctccgctgtgatctgggggcgtgccggccggccggcgcggatgcaggtggaatggtcgaccgtcgagagcttcaagtcgatcatcgcgtcagcctccggtgatgcgctgcccgacgctgatttcacctcaaagctgctgctgacggatttgccaccgggccaggatatcttctaccgcctgcgcttcgacgacattgccacgggtctcggcggtgaaagccgcatcggacacttccgcaccgcgccggcagctagccagtcgatctcgttcctgtggtccggcgataccgcggggcagggctggggcatagatgcctcgcgcggcggctatcgcagctatcgcaccatgctcgacaatcgcccggatttcttcgtccactccggcgaccacatctacgcggactgcgcaattcttcccgaacaaaagctgccgaacggcgagatctggcgcaacatcgtcaccgaggagaaatcggaagtcgcgcaaacgctggcgcagtttcgtggcaactacaaatacaaccatctcgacgagcatttccgcgccttccatgcggaggtaccgatgttcgcacaatgggatgatcacgaggtcaccaacgactggtcgccgactggcagctacgacggcaccggctatgacgacgacggcaccccccggctggtcgcgcgagctcgccgcgccttcttcgacttcatgccgatccgcgacatcggctcgcggcagggccgggtctaccgcaagatcgcctacggcccgctgctggatgtgttcatcatcgacatgcgcagctatcgcgatgacacctggaacaagggagatgaccatcgcggctggatcctcggcgccgagcagctggcgtggctgaagcgggagctctcagcttcgggcgcgacctggagagtgatcgcagccgatctgccgatcgggctgatcagcttggacgcggtcgcgctcggcgacgggccgcccgaccggcgtgagcacgagatcgccgatctgctatcctccatcaaacgtgccggaatccgcaacatcgtctggcttaccgccgacatgcactacactgccgcgcactattacgatccgaacaaggcgcaatttcaggatttcgagccgttctgggagttcgtctccggtccgcttcatgccggcagttggagtcctggcgagctcgacgacacgtttggcccggtcccgatgtaccagcatggctgcagcgctgagcagggcgagaacctcgcgccgtgtttcggcctgcagtttttcggacgggtcgacatcgatggaacgaccggggtgatgacggtcacccttaaagacgtcgacaaccgcgacctctggtcggtcgaccttctgccgcaactgcagatgcgccccgctgtggtggcgaaacattcctga

SEQ ID NO: 2902 - DNA, 237 bp, BradyrhizobiumColbertium
atgaaaaagcttggttatgtggctgcagctctgggtatgctcgtcgttgcggggccaacgctggcaagcgcagagaccgtggtgatcaagcgcgggcatcatcaccatcacggcccctacggcgctcgcgccgaataccgcatgcatcaacatgatcgcagttggcaccgccaccatcgcggtgaccgagtggtcgtgatcaagcgcagccaccggcgccaccatcaccaccactga

SEQ ID NO: 2903 - DNA, 453 bp, BradyrhizobiumColbertium
atgatgcgcaatttgggccgcgggattgcggctgcggtgctgtgggctgcattcacctccatggccggcgccgagacgctggccgcgaccctcaagcaatggggcctgctcggctcgtgggccgtcgattgcggcgtccggccggatcgcgaaaagggcgcgctgctgacctacgagatcaggaaggatggccgggtgatgtaccggcgcaatttcggcgacgccaaggacgagaacgaggtggtgtcagccacggtcaacggcgagggtctgctcaaggtgatggtgttctttccctcgctgcgtcagacgcgcgagttcggactcctcttgctgaaagacggcagcctgcgcgcgatatacaatcgcaacgagcgcggcgaatacacaatcaaggacggcaaatacgttgcgagcggcgcgccgacaccggtgcagcaacgctgcgattga

SEQ ID NO: 2904 - DNA, 270 bp, BradyrhizobiumColbertium
atgctgaatcaagtcatggatttcgcgggcgaagtgctgccggggagctgcgccgtaccgccttattccgaggccgcgtttctgaccgagttgggcgatcgcttacggtcctcccgcatgcgctgcgacctgtcccgccgcgagttggcccgccgctccgggatttcggagcgctatatcgcccagatcgaggccggcaagggcaatgtctcgatcgtgctgttgttgcggctcgcttccgccatccacggcagtcaaccacaggcctga

SEQ ID NO: 2905 - DNA, 864 bp, BradyrhizobiumColbertium
gtgaccgccatggggcagctcgtactcgcggcaaaggtcacccacgttccatcactgatgctgtcggagacccccggcagcccgctccgagcggcccgtgagccggcagtctcctccttgcgcgaactcggccggcgggcaaaagagcgcggcgtgagctgcttcgtggtgttcgacacccattggctctccaatttcggctatcacatcaacgccaatgcgcggcatcgtggctcgttcacgagccacgaggcgccgcagatgatccaggatctgcgctacgatctgccgggtgatacgaatctggctgaagctatcgcgaacagggccggggatgcgggtctcaacgtgatcgcccaccaggtgcccagcctcggcctcgaatacggcaccatcgtgccgatgcactacatgaaccccgacggcttcgcgaaggtggtctcggtcgcctcgccgctgtttacctcgttcgaggaaagccggatactcggtgaagccacccgccgcgccatcgacgcatcggatgaacgggtcgccgttctcgccagcgggtcgctctcgcatcggctctggccgaacaagaaactgggccccgaagcgtggacgtcggtcaccagcgagttcaatcgccaagtggacctgcgcgtgctcgagctctggcagagcagccgctatcgcgaattcctcgatatgcttccggactatgccaccaagtgcaacggcgagggcggcatggccgacaccatcatgctgttcgcggcgctcggctggcatgactaccacggcaccgccgagcagctctgcgactattttccctcgtccggctccggtcaggtcaacgttgagtttcacgtcgaggcgtga

SEQ ID NO: 2906 - DNA, 1233 bp, BradyrhizobiumColbertium
atgacgtccagcttcgatttcgcgtccctgtttccggcggggctgccggccccttctgcgcggtggacgggcctggcgaaatacagctttgtcgggggaaacaacgactccgaacaggtgccgcttgatgacctgatcgaggcgacaaatgcggtgctacgacgcgaggggcggtcgctcgccacttacgggctggcgcatggcccgcagggctacctccccttgcgcgaattcctggtgacgaaactcaagcgcgatgccggcatcagctgtacggtcgatgacctcctgatcgtgtccggctcgctccaggcgcttgatctcgtcaatgccacgctgttgactcggggcgacacagtgattttcgagcaggagagctatcaaggctccctgacccgcctggcgcggctcggcgtcaatgtcgtcggcatccccctcgacaaggacggcatgcgcatggacgtgctggcgatgacgctggccgatctgaagagccgcggcatccgtccgaaatacatctacaccattccgacggttcagaacccgaccggcagcatcatgcccgagagtcgtcgcgccgagctggtacggctcgcaaccgaatatggcgtgccgattttcgaggacgattgctatgccgacctcgtgtggtcaggacagcggccgccggcgatctacgcgatgagcccgaatggcggcgtgatccatatcggctcgttctccaagtcgatcgcgccggcgctgcgcgtcggcttcgtcgtggcgccctgggaggtgatgtcacggatgctggctctgaagacggacgcgggctccggtgcgctggagcagatggtgctcgccgcctattgcaagccgcatttcgcgagccatgtgcccgccctgaccaaggcgctgcgcaccaagctcgacacgttgatggaagcgttgaacgagcagttcgggacggccgcggagttcgaggagcccaagggcggtatcttcctgtgggtcaagctgccagaccaggtcgacacgctgaaactgtatcaggccgcgctcgccgctggcgtctcgatcaatcctgggccggaatggtcgaccaacaagggccagtccagctcgcggctgcggctgtgctttgcaagtcccacgcatcagcagatccgcgaggggatcgctgtcctggccgaggtctgccgcaaggaattcggggtgccggcccgtagtgccaatgtggagaagcgggcctga

SEQ ID NO: 2907 - DNA, 528 bp, BradyrhizobiumColbertium
atgcggaaagggctcgttgcagccatgctgctgggtcccctcgcctttgccgtgcccgccgccgcgcaatccaaggtcaatatcgaacaaaactttgccgattcgctcaccgcgctgccgaaggaggacctcgccgtctccggcgggttctacgtgcccgcctattccagcgtcgcgatgagccagggcaagttgcgtgtcgacttctcggtgacgctaagcgtgcacaacgcctccgagacccagccactggtcgtcaaacgcatcgcctatttcgacaccgcaggcaagcaggtcgagaattatctgaaggcgccggtggccttgaggccgctggccacggtttcgatcttcattccgaccgacgacgtgcgcggcgggaccggagccaatttcctcgtcgactgggccgccacaggcgagatcgccgagccggtggtcgaagcattgatggttggcggcatcgccaatgcgcattacgctttcatcagccagggccgtccgacccggacggccggcaagaagtaa

SEQ ID NO: 2908 - DNA, 1731 bp, BradyrhizobiumColbertium
atgcacgagctcattcgagacatcactctctctattctgtttgcctggatgctgggactgcttgcccatttctcccggcaaccgctgatcctggcctaccttatcgccggcttctgcataggtccattcggcgcgggctgggtccactctcaggaatcgatcagcgtcatctcggaactcggcctgatcttcatgctgttcatgatcgggctcgagatcgacctgaagaagatcgtgcgggcagggcgggtgatcctgttcgcggcgggcagccagctgctcggaggctgtctgctcgggctgcttttcttcgtcggcatcggcctgtccctcggcagcgggcatttcgatgcggtctatctctgtgtcgcctgcgcgctgtcgagcaccgtgatcatcgtcaaggtgctctacgagaagcgcgagctcgacacgctgccgggccgcatcaccctcggcgtcctggtgctccaagacatcttcgccatcctgtttctggcggtgcagccgagcctcgccaacctccaggtcagcgtcatcctgctctcgataggccgcgtcgcggtgttggtcgctgccacactcctggtcagccgctatgtgctgccgcgcgtgttccaccagatcgcccgccggcccgaactgattctgctcggcgcgctggcctggtgctttctggtcgccgagaccgcgtaccggctgtcgctgtcgcgcgagatgggcgccttgattgcaggcgtctcgctctcgaccttcccctacgcgctcgacgtcaccgcgaaggtcaccacgctccgcgacttcttcatcacattgttcttcgtcgccctgggcatgaccattcccgtgcccggcctctcggtgatcagccttgccttgatgatcgcggcgttcacggtcgtgagccgcctcgtcaccaccttcactccgctctatctgatgaaacagggcttgcgcgccagtctgttgccggcgctgaacctcgcgcagatctccgagttctcgctggtggtcatccagaccggcgtcgccgaccaccacatcgcggccgagacggcgaacgccgcctcgtttgccttcgtcgtgctggcggtactctcgaccttcgtgatgacccgcagcgacgagatcacccgctgggcgattggccccttgaagcggatcggcctgcgcgatctcgatcacggtaacgggcatgccgaggaagggcacgagggcggtcacggggaggcccgccgcatcgtcatcctcggctttttccgtgcggcgagcgcgctgctggcggagatcgaacggcagacaccggtgctgctcgagcagatcaccgtcgtcgacttcaaccccaatgtgtatcagaccctgctctcgcgtggcctgcacgtgatctatggcgacatcagcaatgtcgatacgctgctccacgccggtattggcaagtccgagatgatcatcctcagcgtgccggattcgctgctgaagggtgccaccaacgaaaagctggtccggcacgtccgcgcgctcaatccgaccgccctgatcgttgcgaccgcggacctgttggccgacgttgccccgctctacgaggccggcgccagctatgtcaccgtgacccggctcagcgatgcccacgagctgtttaccgtgatcgaagccgcccaggcgggcctgcttgccgacaagcgcgccgagctcgatcaacgcctcggcgagcgccgggaggtgcttccctga

SEQ ID NO: 2909 - DNA, 1077 bp, BradyrhizobiumColbertium
atgcccgatagcgttcaggaagtcttgcaggcctttgccagggttgagctcgtggtcgtcaccgacgacgaggaccgcgagggcgagggcgatctgatcgtcgccgcctcgctctgcaccgccgagaagatggcgttcatcatccgccatacctccggcatcgtctgcgcgcccgtgacgaccgaggacgcgcgccgcctgcggctcgacccgatggtggcccacaacgattccgcgcacaccaccgccttcacggtctcgatcgactacaagcccgacggcggcaccggcatctccgccgaggagcgcgcctcgtgctgccgcgcgctcgccaatcccaatgtcggcgccaatgacttcgcccgccccgggcacatcttcccgctgatcgccaaggacggcggcgtgctcctgcgctccggccatacggaggcggccgtcgacctctgcaagctttccgggctgccgccggtcggtgtgatcagcgagctcatgaacgacgacggcagcgtgatgaagggcgagcaggttgcccgcttcgccgccgagcacaagctcaagcacgtcaccatcgcggacatgattgcctatcggcaggcgcgcgaaaagctgatcgagcgggtctcgaccttcgtcacggagagtccgatcggtcccttgcagggctatgcctaccgttcaccgttcgattccatcgctcacgtcgccttcgtctataacggcgtcggcgacggcaagaatgtgctgacgcgcttccacaagccgaacatcgtcaaggatacctttaccggacacaagcgcatggcggccgtgctcgagcatttcaagaaatcgggccgtggcgtgctggtttacttgcgcgacggtgcagccggtgtccccgtggcgccgctgccggacgagtcgtcgacggaggccgaccgcaaccgccagtggcgcgaagtcggcgtcggcgcgcagatcctgcgcgacctcggcgtgacctcgatccggcatctcacctcctcggtgcacgactacaagggtttgtcgggcttcggcatcgagatcgtcgccaacgagcagctcgagagctga

SEQ ID NO: 2910 - DNA, 1215 bp, BradyrhizobiumColbertium
atgagcgtgcgccctcaggccaaggacaagccggctgcggcttctttccagtgggacgatccgttcctgctcgatgagcagctgaccgaagacgagcgcatggtgcgcgacaccgctcgcgcttacgcccaggacaaactgctgccgcgcgtctccaaggcttatcttgaagagaagaccgaccgcgagatcttcaacgagatgggcgagctcgggctgatcggcatcacgctgccggaagagtatggctgcgccaatgcgagctacgtcgcctatggcctcgtggcgcgtgagatcgagcgtgtcgattccggctatcgatcgatgaattcggtgcagtcctcgctggtgatgtatcccatctacgcctatggcgacgagaaccagcgcaagaagtacttgcccaagctcgccagcggcgagtgggttggctgcttcggcctgaccgagcccgacgccggctccgatccggccgggatgaagacccgcgccgagaaggtgtcggacggctatcgcctcaccggcagcaagatgtggatctcgaacgcgccgatcgcggacgtgttcgtggtctgggccaagtcggccgcgcacgataaccagatccgcggcttcgtgctcgagaagggcatgaagggcctctccgcgccgaagatcgggggcaagctgtccctgcgtgcgtccattaccggcgaggtggtgatggacggcgtcgtggttccggaagacgccctgctgcccaacgtctccggcctgaagggcccgttcggctgcctcaaccgcgcccgttacggcatctcatggggtgcgttgggggccgccgaggactgcatgcatcgcgcccgccagtacacgctcgaccgcaagcagttcggcaagccgctcgccgccacgcagctcgtgcagaagaagctggccgacatggagaccgagatcgcgctgggcctgcaggcctcgttgcgcgtcggccgtctgatggacgagggcaagttcgcgcccgagatgatctctatcgtcaagcgcaacaattgcggcaaggctctcgatatcgcccggacagcgcgcgacatgcacggcggcaacggcatctcgatcgagtatcacgtcatgcgccacgtccataacctagaaactgtcaacacctacgagggcacccatgacgtccacgccctgatcctgggacgcgcgatcactggcattcaggcgtttttctga

SEQ ID NO: 2911 - DNA, 918 bp, BradyrhizobiumColbertium
atgtccgacaatgacgacgtcccgttcaaccgcgattttccgctgaagcctggcgttgtcgaggaggtccgccccggtgtgcggcgcgtgctctgcaacaatccgagcccgttcaccttcaccggcacggtcagctacatcgtcggcaagggcaatgttgcgatcatcgatcccggtccggacgatgaggggcatgcggctgcgctgctcgatgccgtgcgcggcgagacggtgagccacatcttcgtcacccacacccatcgcgatcattcgccaaacgcggtgcgcatcaagcaggcgacaggtgcgccggtctatgccgaaggcccgcatcgtgcatcgcgcccgcgtttcgagagcgagaagcacaatccggaatccggcgccgaccgggattttgccccggatgtcagcctcgcgcacggggacgtcgtcgagggtgacggctggcagctcgaggccgtggcgacgccggggcacaccgccaatcatctggcgttcgcctgggccgagcgaaagttcaacttcgtcggcgatcatgtgatgggctggtcgacctccatcgtggcgccgcccgacggctcgatgatcgactacatggactcgctcgaccggctcgcggcacgcgatgaggatctctatttctcgggtcacgggcccgagatctccgaaggtccacgcttcgcgcgcttcctgatccgacaccgcaaggcccgtgaggcctcgattcttcaccgcctcgccaaaggcgagaccgacattccgacgatggtccgcgcgatctatatcggcattgatcccaggctgacgacggccgccggctactccgtgctggcgcacctggaagacctggtcgcgcgcggcgtggtcgcgaccgagggcgatcccgtgattggcgggacatatcggatggcctag

SEQ ID NO: 2912 - DNA, 855 bp, BradyrhizobiumColbertium
atggcccgcaggttttccgctccctatcagtcggagcccgtgtcgagccttgcgatctgggcccgcaatctggccgtgttcgcggtcgtggcggtggtggtctcgatcatcatcgtccgcttcgacttcctggagccgaagccggcgcttgcgactttcctcggcgggctcgcgatcgccggcgtctcgatcctgttcggactggccggctttgccgcgatctggcagaacggctcgcgtggcatggcgcgcatcctgctcgccttcctgatcgacggggcgatcctcgcctaccctgcctatctaggcctgcaatatcgcaagctgccgccgatctacgatatcaccacggacccgatcgacccgccgcgcttcgacgcgctggcgcggctgcgcacgggcgacggcaccaatactgcagtctatgccggcctctactcggcagaacagcagcgccgcttctatcccgaagtcgagcccgttgagctcgagatttcggtcgaccgcgcctatgcgatcgcgctccagctcgtccataagcgcaaatggatcgtgatcgacgagcgcgcgccgcagccgccgcgccgcatcggccgcatcgaggcggtggcgcgtacgccgatcatgggcttccgcgaggacgtctcgatcagggtcgtggcagacggcgacgattctcgcgtcgatatccgctccgcctcgcgcaatttcgacagcgacctcggcagcaacgccgcgcgcgtcaagcagttcatcgacgatctcaacgccgctgccgacgccgacgcgctcaagcccgtgaagaagacgccgatcgcgccgcccaagacgccggcaaagactgtgaagaaatag

SEQ ID NO: 2913 - DNA, 1629 bp, BradyrhizobiumColbertium
atgcttggtttgatgcaagattggcccctgctctgccacaggatcatcgaacacgccgccaggattcatggcaagcaggaggtggtcacacgctcggtcgagggaccgatccatcgcaccaactacgccgagatccacaagcgcgcactgaaggtctcgcagatgctggaacgcggcggcatcaagctgggcgaccgtgtcgcgacgatcgcctggaacacctggcgccatctcgaagtctggtacggcatcatgggaatcggtgcgatctgccataccgtcaatccccgccttttccccgagcagatcgcctggatcatcaatcatgcgcaggatcgcatcgtgatgaccgacatcaccttcgttccgatcctggagaagatcgccgacaagctgccgagcgtggagcgctacatcgtgctcaccgacaaggcgcatatgcctgagaccacgctgaagaacgtggtcgcctacgaggactggattgccgaagccgacggaaaattcaaatggaaggagtttgacgagaacacggctgccgcgatgtgttacacctccggcacgaccggagatcccaagggtgtgctgtattcgcatcgatccaacgtgctgcacgcgctgatggccaacaatgtcgacgcgctcggcacgagtgcgtccgagacaatgctgccggtggttccgctgttccatgccaatagctggggcatcgcattttccgcaccctcgcaaggtaccaagctggtgatgcccggcgccaagctcgacggcgcctccgtctatgagctgctctcgaccgaaaaggtgacgcacaccgcgggcgtgccgacggtgtggctgatgctgctccaacacatggccgccaacaatctcaagcttcccgatctgaagatggtgatctgcggcggctcggcgatgccgcgctcgatgatcaaggcgttcctcgacatgggctccaacgtccgccacgcctggggcatgaccgagatgagcccgatcggcagcgtcgcggcgctgaagccgccgttccagaatgccaccggcgaggcgcggctcgacgtgctccagatgcagggttatgcgcccttcgcggtgcagatgaagatcaccgacgatgccggcaaggagctgccctgggacggcaagaccttcggccgcctgaaggtctccggccccgccgtcgccaaggcctattaccgcgtcgacaccaacatcctcgacgaggaaggcttcttcgacaccggcgacgtctcgaccatcgacgaggacggctacatgcggatcaccgaccgttccaaggacgtgatcaagtccggcggcgagtggatttcctcgatcgacctcgagaacctagcggtgggacatccggccgtggcggaagccgcagtgatcggcgtgttccacccgaaatgggacgagcggccgcttctgatcgtgcagctcaagcagggccagcaggccacgcgcgaggacatcctgaagttcatggaaggcaagatcgccaaatggtggatgcccgacgacgtcgccttcgtcgagggtattccgcacacggccaccggcaagatcctgaagacggcgctgcgcgaccagttcaaggattaccgcttcccgaacgcggcggcgtag

SEQ ID NO: 2914 - DNA, 123 bp, BradyrhizobiumColbertium
gtgttcgatgatcctgtggcagagcaggggccaatcttgcatcaaaccaagcattccgacgttcctccgagaagtcgctgggcgcgtgttcgctctcagcgttgggccaaagaattgtcatga

SEQ ID NO: 2915 - DNA, 831 bp, BradyrhizobiumColbertium
gtgcctccgcccgcggcagaggaaaagccgtctccggaccagccgggcgccgacaagcccgccgaggtggcatcgccaccccagaaacaggcctcgccctgccgcctcgcgctgaccgaggacatcgcgattgcgccttcaatccccgacatccgcggccccggcgcctgtggtggcgaggatctggttcggctggaggccgtcgtgcttccggacaagcgcaaggtgacggtcaagccggcggcgatccttcgctgcaccatggcgtccgcgatcgccgattggctgcgcaaggacgtggtgccgctggccagcagcctcggctcgcctgtcaacgagctcgacaatttcgattccttcgagtgccggggccgcaaccgggtcgcaggcgcgacgctgtcggagcacggcaaggcgaatgcgatcgacattcgtggcatcaagctcgccaatggccagtcgatcggcctcaccgctcgcaccctgtcgcgcgaggtgcgtgagcgcgtgctgcactcggtctgcgcgcgcttttccaccgtgctcggtccgggctcggactggtaccacgaggaccacatccatctggatctggcgcagcggcgcaacgactaccggatctgtcaatggaatgtgtgggatccgctgccgcaagtcgccccactgctgccggcggagcgtcccgaggaagcgccgccgcgagaggttgcggccagaccagaggcaaatgaagggaccgatgacgaggcggagaaatcccatgcgcctaaaaacaagtcggagcccgagaaggcccgagcgtccaagccggcaacgaaaaagcgccggtga

SEQ ID NO: 2916 - DNA, 687 bp, BradyrhizobiumColbertium
atgtcgtcgctgaaatttacatttgggattttggccgctggcctgctgttgtcgggctgtatgcaggccacgcgctatgaggcgaccgacaccaaggcattcaagccgaaggacaaggaactcctcgccaaggtcaaatacgagaataccccggtcgcggagccgttccgccgcgctatcgtcgagttccatcgcaaggaagcgcctggctcgatcgtggtcgattccgacaaccactatctctattacgtgctggagggcggcaaggcgatccgctacggcatcaccgtcggcgaagaggccatggcttggtcgggcatcgccaaggtgggcagcaagaccgagtggcctgcctggcaccccacccccagcgaaatttcgcgcctgggcgtgccgacctatgtcgcccccggcccggacaatccgatgggctcccgtgcgctgtacctctattcggggggcaaggacacgctgttccgcatccacggcaccaaccagccggaatacatcggcgcctcgatctcgtccggctgcatccgcctgaccaacgaggacgcgatcgatctctatgatcgcgtcaaggtcggtaccctcgtcgtggtgctcgagccgaagcacggcgactccccgcacaactcgcgactggcgctgggcagcagccaaaccggccaggcagcaagctactga

SEQ ID NO: 2917 - DNA, 978 bp, BradyrhizobiumColbertium
atgttttcggtgtttgttccctccgagtccgccctcaagaaggccgtgatcgaggaccttgcggcagtgccggagagcgccgtctggatcgacctcgtcaatccaagcgcggccgaggacaaagcggtggagcggctcgcgggcatcgccatcccgacccgggaagacatgcaggagatcgagatctctagccgcctttatatggagaacggcgcacgctacatgactgcgacgctgatgtgtcactccgataccgacatgcctcggaccacgccggtgaccttcatcctcggcgaccaccggctggtgacggtgcgctacgacctgccgaagccattcgccctggtcgaagccaagctcgcccgctcctgcacgccggcggttactggcgagatggtgctcatggagctgctggacgccgtgatcgaccgctgcgctgacattctggagcgttgcggcgccgacatcgatcaggtctcccatgacatctttgagcctgagagcgagcgtcacgggcaggcaaagagatattcccagatcctgatctcgatcggccgcaagggcgatctgacctcgaaggttcgcgagagcctggtgtcgatcggccgcgtcgtgacgttcctgtccgcggtggtcgagggcgtgaaatggtcgaaagacatgcgcgagcagctcaagaccatgcagcgcgacgtggcgtcactgaccgaccatgcctcctatctttccaacaagatcaccttcgtgctcgatgccatgcttggcgtcgtcaatctcgagcagaacaacatcatcaagctgttctcggtgatggccgtcgtcctgatgccgccgacgctgatcgcctcggtctacggcatgaacttcagggtgatgccggaactcgaatgggtgcacggctatccgatggcgctggtgatgatgctgatcgcggcgatcgtcccgtactggatcttcaagtggaagaagtggctgtag

SEQ ID NO: 2918 - DNA, 120 bp, BradyrhizobiumColbertium
gtgctgaatgcggtcgagcagtcgtcgtcattctcaccatcgagcagcggagcaccacagtgccggcacatgcgtgccgacatcgacggcgccttgccgctcgtcaggacctggcggtag

SEQ ID NO: 2919 - DNA, 753 bp, BradyrhizobiumColbertium
atgccgcattcgtccaatgcgccgcgtcgcactctgctcctgaccggagccagccgcggtatcggccacgccacggtgatccgtttctcttctgcaggctggcgggtgatcacctgctcgcggcatccattcccggaggactgcccgtgggacgccggccctgaagaccacatccaggtcgacctcggcaacccggcggacacaacgcgtgcgatctccgaaattcgcgaccggctcgagggcggcacgctgcacgcgctggtcaataatgccgcgatctcgccgaagggaccgggcggcacgcggctcggctcggtcgacaccgacctcgacacctggacgcacgtcttccacgtcaacttcttcgcgccgatcatgatggcccgcggactgatcgaggaattgaaggcggccaagggctcggtggtgaacgtcacctcgatcgcgggctcgcgcgtgcaccccttcgcaggcgccgcctacgcgacctcgaaggccgcccttgcctcgctgacgcgcgagatggcgtccgacttcggccgcgtcggcgtgcgcgtcaacgcgattgcacctggcgagatcgacacctcgatcctgtcgccgggcaccgagaagatcgtcgagcagcagatcccgatgcatcgcctcggcacgcccgacgaggtggccaagatcatctacgtgctgtgtacggaaaccagttcgtacgtcaacggcgccgaaatccacatcaacggcggccagcacgtgtag

SEQ ID NO: 2920 - DNA, 642 bp, BradyrhizobiumColbertium
atgaccgacacgacctcgatgaaacaccagacacccttaacatccggtgatttcaccgccgccgacgagccatttgcgctgttcgaggcctggctgaacgaggcgatcaagagcgagccgaacgatcccaacgccatggcgctcgcgacggtggactctgacgggctgcctgacgtgcgcatggtgctgatgaagggattcgataccgagggtttcgtcttctacagccacatcgccagccagaagggccgcgaactcgccgcaaaccctaaagcagcgttactttttcactggaagtcgctgcgccgtcaggtccgcatccgcggcaacgtgacgccggtgaccgacactgaagccgacgcctatttcgccacccgccccaagcaggcccagatcggcgcctgggcgagcaagcagtcgcaagaactggagagccgcttcgccttcgaacaagccatcgccaaggttgcggccaaatacgtcatcggggacgtgccgcggccgccaggctggagcggctggcgcatcacgccgttgcggatcgagttctggcacgaccgcccgttccggctgcacgaccgcatcgaatttcgccgtgacgcggccggccagaaatggtccaagacgcggatgtatccttga

SEQ ID NO: 2921 - DNA, 408 bp, BradyrhizobiumColbertium
atgaccgtcgttctcgtcggtctcggtgccggcggctgcagcttttcccgcaatgaacagagcgcctacgccaaggtcgacgacagcgacctcaccggctcgatcgcgcggccggcgaaggacgcgtccccgaccgagaccgatctcgccttcacccgcaacgccgcctccgatgtcctcagcaagggggacaaggattccagccagcactgggagaatccggaaacgggcgcgcgcggttcggtgacgccgatcgcgcagtcctatgcggccgaggacggacgcaagtgccgcgactttctggcaagctacgtcaacggcagtaccgaaagttggctgcagggcgccggctgccaaagcggccgtggccgttgggagattcatacgctaaagccgtggcgcagctag

SEQ ID NO: 2922 - DNA, 963 bp, BradyrhizobiumColbertium
atgcgcgacccctatgaggtcttgggggtgccgcggagcgccagcgctgccgcgatcaagagcgcctatcgcaagctggccaagaagcaccatccggacagcaacaagggcgatcccaaggcggccgagcgcttcgccgagatcaactcggccaacgagatcctcggcgacgaggataagcgcaaacagtttgaccgcggcgagatcgatgccgacggcaagccgcgcttccaaggctttccgggcggcggaggcccgcgcggccgtgcgggtccgggcgggttcgaaagctatacgttccggagcggcggcgcgggcggcccgggcggtggtgcgttcgaggatatcctcaacagcatgttcggcggcggcatgcgcggtgcccggccgggggccggcggcggcgcccagttcgacttcgataccggcggcattgggctcgatctcgacgtgaatgttgccatgtccgtctcgctggaggagtcggtcaagggtggcgagaagcgcgtccggctgccgacgggcaaggagctcaacgtcaagattccggctggtgtctccgagggccagcagattcggctccgagggcagggtgagagcgcacagggccatccgcccggcgatctcctgatcaccatcaacatcgcgccgcacccgttcttcaaggtcgaaggcgccgacctccggatcgacctgccggtcacgctctacgaggcggtgctcggcggcaaggtccgcgtgccgaccctcggcaacgccgtggagctctcggtcccgaaaaacacctctagcggccggaccttccggctgaagggcaagggcctgccaaaagctggcgggaccggggatctcttcgtcactgtcaggattatgctaccggacgggaacgacgccgagcttgaagcattgatggaaaagtggcgggaccaagacccctacaatccgcggagtgggctcggttag

SEQ ID NO: 2923 - DNA, 861 bp, BradyrhizobiumColbertium
ttgcgcaaggtgcgatcgcagcctgccgagggcgcgagcgaagttgaactacgaacgattttttgggccgcagagccagagacgagcaatatgaacgaccgcaggatcgcagtgaccgaggacgaactgcacgcctatgtcgacggcgagttgccggtcgagcgccgccccgacgtcgaggcttggcttgctgcccatcccgacgaggccgagcgcgtgcagtcctggcgcaccatggccgagatgctgcacgctcgctacgacggcatcgcccacgagccggtaccagcacggctggagctggagcggctggagcgccgcccgcggcaatggctttacggcgcggccgcggcggcgttggttgctttcgtggccggcggcacggctggttgggtcgcgcatggtgccgccaacgcaccctccacgttccagagtcttacggcggatgcgctcgacgcccaccgcctctatgtcgtcgaggtccgccaccccgtcgaagtcggcggcaacgagcgtgaccatctgcaggcctggctgacccgacgctgcggctggaccgtactcgcgccgaacctggaagccagcgggctgaagctcgtcgggggccggcttctgccgggaccgaacggtccggcgtcgttcctgatgtatgagggcacctcgggcgagcggtacacgatctacacggccaagaccgacaacggcgcgacgcagatgcgctacgccaaggcggacaaggacggggcgctgttctgggccgagcgcggcgtcggctatgtcgtcagcggcggcaatgatcgcgaccggctgaccaaggtcgcgcaggcggtctacgaccaggccgaaaagaacggcagctaa

SEQ ID NO: 2924 - DNA, 489 bp, BradyrhizobiumColbertium
atgaatgcgtttcgccagaatgtggaagccatgatcccggcgctgcgccgctatgcccgcgcgctgacgcgcgacgcggatacggccgacgatctggtccaggatacattggtccgcgcgttgcgttcggagcggctgtttctcggaggcgacgtcaggagctggctctatacgatcctgaccaacctcaacaagaaccggcggcgctcactggcgaggcggcctcaattcatgccgctgacggagaacaacccggacgccagcgggacggaggcagaaggacgcgacatcgagaaggcactggcgacgctggtcgaggagcaacgctctgtgctgctcctggtgatgctggaaggcatgagctatcgcgaggtcgccgatatccagggggtgccgatcggcaccgtgatgtcgcggctggcccgcgcaagggcccacgtcaaagcctcgctggagggcgagcgcccggtgctcaggcgagtgaaatga

SEQ ID NO: 2925 - DNA, 816 bp, BradyrhizobiumColbertium
atggcgcagaattcaggtctgatgcaaggcaagcgcggggtcatcctcggcgtcgccaacaaccgctcgatcgcctggggcattgccaaggcctgccacgccgccggcgccgaactcgctttcacctatcagggcgatgcgctgaagaagcgcgtcgagccgcttgccgccgagatcggcgggctcgtgctcggccattgcgacgtgacggatgccgcgaccatcgatgccgcctttgccgtgctgaaggagaagtggggcaagatcgacttcctggtgcacgcgatcgcctatggcgagcaactcgacggccgctacgtcgacaccacgcaggagaatttctcgaagtcgatgctgatctcctgctattcgttcacggcggtggcgcagcgcgccgagaagctgatgacggacgggggctcgctcatcacgctgagctattacggcgctgaaaagtggatgccgcattacaacgtgatgggtgtggcgaaagcggcgctggaagccagcgtgcgctatctcgccgccgatctcggcgagaagaacatccgcgtcaacgccatctcggcagggccgatcaagacgctcgccgcgtccggcatcggcgatttccgctatatcctgaagtggaacgaatacaacgcgccgatgcggcgcaacgtctcgaccgaagacgtcggcggcagcgcgctgtatctcctctccgacctctcacgcggcgttaccggcgaggtgcatcacgtcgattccggctatcacgtgctgggcatgaagcgcccggacgcgccggacatctcgctgggcgggaaggactag

SEQ ID NO: 2926 - DNA, 600 bp, BradyrhizobiumColbertium
atggccgtgcccacgatctacttcctgcgccatggcgagaccgagtggaacgcgctcgggcgattgcagggcaccaaggacgttccgctcaacgcgcgcggccgcagtcaggccgtgcacgctgccggtgttctggccgatttgttcaagcgcgatggcaaggacagtgccgcgctgccctatgtgtcgagcccgctcggacgtgcgcgtcagaccatggagctcgcgcgcggcaagcttgagctgccgcctgccgactattccctggacgatcgcctccgcgagatcggctacggcatttgggaaggtttgacgctggccgagagcgaggcctccgatccggacgtctatgcgaagcgtctcgccgacaaatggacggtcgcgcccgcgggtggcgagacctacgcggcggtgcagctgcgcatgctggactggtacgagtcgcttctggtcgataccgtcgcggtggctcatggcgggacctgccgggccctgatggtggccttggggctcgagccccccgccggtgccgccgagctcttcatcgagcagggcgccgtctacgtgttccgcgacgggcggctggagaagttcagctag

SEQ ID NO: 2927 - DNA, 1089 bp, BradyrhizobiumColbertium
atgtccttcaacaccttcggccacatgttccgcgtcaccaccttcggcgaaagccatggggtggcgattggctgcgtggtcgacggctgtccgcccatgatcccgctgaccgaggccgacatccagaaggacctcgaccggcgccggcccggacagtcgcgcttcaccactcagcgccaggagccggaccaggtgaaaatcctgtccggcgtgatggcgcatccggagaccggcgagcaggtgacgacaggcacgccgatcgggcttctgatcgagaacaccgatcagcgctccaaggactattccgaaatcaaggacaagtttcgtcccggtcatgccgacttcacctatgaggcgaagaacggcctgcgcgactatcgcggcggtggccgctcatccgcgcgcgagaccgcaacgcgcgtcgccgctggtgcgatcgcgcgaaaagtgctgcccgacgtcagggtgcgcggcgctctggtgcagatgggcccgtacaagatcgaccgcgccaagtgggactgggacgagatcgccaacaatccgttcttctgtcccgacaaggacaaggccgcgttcttcgagacctatctcgacggcatccgcaagaacggctcctcgatcggcgcggtgatcgaggtcgtcgcggaaggtgtaccggcaggtcttggcgcgccgatctacgccaagctcgattcggatctcgcagccgcgatgatgagcatcaacgcggtgaagggcgtcgagatcggcgccggcttcggcgcggccgagctcaccggggaggagaacgccgacgagatgcgcaccggcaatgacggcacgcgcttcctgtccaaccatgccggcggcgtgctgggcggcatctccaccggccagccggtcgtggtgcgcttcgcggtgaagccgacctcgtcgatcctgcagccgcgtctcaccgtcgatcggcagggcgctgataccgagatcttcaccaaggggcgccacgacccctgcgtcggcattcgtgccgttcccgtcggcgaggccatgatggcctgcgtgcttgccgatcacttcctgcgcgatcgcgggcaggtcggacgttga

SEQ ID NO: 2928 - DNA, 1215 bp, BradyrhizobiumColbertium
atgaacagctccgagcttcgccgcgtctgcgattggctgatcgacggcgcgtggtcggcggcggagccggccgagatgatcgccgacttctgcgaacgtctggtcgcggccggtctgccgctgtggcggttcggcatattcattcgcacgctgcatcccgaaatcttcggccgcaacttcatctggcggcgaggtcaggaagtcgagatcggcgctgttgatttcgagatcctggacacgcccgaattcgcccgcagcccgcttcgcgttgtgttcgagcagggcatcgaggtgaggggacgcccgagcgatcccgacagcaagcgctttccgttcctcgaggacatgcgggctgaaggcgcgaccgactatgtcgcggtgccgatgccctttctcgacggctccgtccacgcaacgagctggatcacgcagcagcccggcggcttcagcgatggcgacatcgcggcgatccgctcgatcatagcgccgctcgcgcgcgtcagcgagatcatcagcctgcgccgcactgccgagatgctgctcgacacctatgtcggcaaccgtgccggcgcgcgcattctcggcggccaaatccgccgcggtcacaacgacaccatgcaggcggcgatctggctatcggacctgcgcggcttcacagcgctatcggaccggctgccaccagagacagtggtcacgatcctcaaccactatttcgactgccaggtcgccgcaatccgcggccatggcggcgaggtgctcaaattcatgggcgacggcctgctcgcggtgtttccgatcgacgaatatgtcggcgatgccgctgatgtctgcgcgggcgtgcttgaggcggcgcgcgagtcccgcgccagcgtcgaagcgctcgccatcccggtcggcgatgccgtcgagcgcttccgcttcggcgtcgcgctccacgtcggcaacatcctctacggcaatatcggcggcggcaaccgcctcgacttcacctgcatcggccctgccgtcaatcttgcagcaaggctcgagaagatcacggggcgcctggggcggacggtcgtcgcctcggaaggctttgccaatgtttgtcggcacgattggctcgaactcggcgaatttccgatcgcgggattttccaaggcgcagcgcgtgtacgggctggcggatgaaacgtacgcgcaggcggctgagcctattcctccggctcggtcgtga

SEQ ID NO: 2929 - DNA, 306 bp, BradyrhizobiumColbertium
atgaacgacaccgtcagcaagccgaaaaccaagacaaagaccaaggtcgagcggccgcggctgcacaaggtcatcctgatcaacgatgactacacgcctcgcgaattcgtcaccatggtgctgaaggccgaattccgcatgaccgaggatcaggcctacaaggtgatgatcaccgcccacaagcttggcgcctgcgtcgtcgcggtattcaccaaggacgtggccgagaccaaggcgacgcgagccaccgacgccggccgcgccaagggctatccgctgctgttcacgaccgagccggaggaatag

SEQ ID NO: 2930 - DNA, 384 bp, BradyrhizobiumColbertium
ttgaacatccaattcattttggcggtggccgccggcggagcgctcggagccgtcatgcgctatctcgctgcaatcggttcaggccgtgctttcggcactgactttccctggggcacgctgatcatcaacgtgactggatcgttcctgatcggcatcttcgccgcgctgttcgcgacgagatggaacctgccgcagaccgtccggatatttttgacagtggggatttgcggcggctacacgacattctcgacgttctcgctggatacctggtatctgatcgagcgtggtcagaccttggcctcggctgcctacatgattgcatcggtggcgctgtccgtaggcgccctgatcgccgccatgcagcttgtccgcgcgcttccctag

SEQ ID NO: 2931 - DNA, 1203 bp, BradyrhizobiumColbertium
atgacgacaccgaatgctgcgcgcacctccctgcccaggggaatctgggtgctcggcttcgtctcgatgctgatggacatctcctccgagatgatccacgcgctgctgccgctctatctcgtcaccgtgctcggcacctccacgcttaccgtcggcttcatcgagggcattgcggaggcgaccgcctcgatcacaaaaatcttctccggcgcgctgtcggattggctcggtcgccgcaagctgctggccgcattcggctatggacttgccgccttcaccaagccgctgtttccgctcgcgcccagcgtcggatggctggtggcggcacgcttcatcgaccgcgtcggcaagggcattcgcggtgcgccgcgcgatgcgctgatcgccgatattgcgccgatcggcttgcgcggcgcgagcttcgggctgcggcaatcgctcgacaccatcggggccttcctcggaccgctggttgctatcgcgctgatgtggtggacggcggacaatttcacgatcgtgttctgggtggcggtgctgccggcctttctgtcgtttggactgatcaccttcggcgtgaatgagcctgacccggatccgagccgggtgcctgtgaagaatccgctcaatctcgccgccatgcggcagctcggtgcggtgtactggcgcgtcgtcgcggtcgggattgtcttcacgctcgcgcgcttcagtgaggccttcctgatcctgcgcgcacagagcatcggcctcgacgtgatgtgggtgccggcggtgctggtgctgatgaacgtcgcctatgcgctgtcagcctatccggccgggatcctctcggaccggatcaaccggaccggcctgctcgcgctcggtctagtcctcctcgccggcgctgatcttgcgctggccctgctcccgagccttgcgggtctcgcgctcggcgtcgtgctgtggggactgcacatggggctgacgcaaggactgctttcggccctcgtcgccgacgcggcgccaccaagcctgcgcggcaccgcattcggctatttcaacctcttcaccgggcttgccttgctggccgccagcgtgatcgcgggcgctctttgggatgcctttggtcctcaaggcacgttcctggcaggactcggctttgcgctggtttcgcttgtgggactgcttgcggtcggcaacggtctggcggcaagaaacagatga

SEQ ID NO: 2932 - DNA, 222 bp, BradyrhizobiumColbertium
atgaaaacttgcgagctcggcgcaaagctgccgtcgtcttgccgcggtcgcgccgcaggaaccccgcaggccacctcgcgcccttgggctcgaatgcgagcgaccggacacgacgagtcgcgggacagagcgcccggcccacttgtccggcacgatttccatgctagggttgctcacacagatggggatggagtcccccgacaaccgcccggcggtcgatga

SEQ ID NO: 2933 - DNA, 861 bp, BradyrhizobiumColbertium
atgcgtttgctgttctcgatcggggctgtgctggtggccggcatgtttgccggaggggacgtcgcgggcatcgcggcaccgggacccaagtttggagcgcccaggaatcatccgcagcgactcgcagccgacaaggacgtgcaggtcgacgtcgaactgatcctcgcggttgacgtgtcctactccatggacatggacgaactcgcgatgcagcgcgagggctatgcgcaggcaattcagtcgaaggagttcctgcaggcgctgaagttggggccgaacggccggatcgcggtgacctatttcgagtgggccgcctccagcgaccagaagatcatcattccctggcggctggtcgacggaccggagacggcggatgcagtggccgccgagatcatgaagacgccgatccggcgcgcttcgcgcacatcgatatcgggcgcgatcaacttcgcgatgccgctgtttgatgaggacccctatcggggcttgcgccgcgtcatcgacatttccggtgacggccccaacaacaatggcggtccggtcacggttgcgcgcgatgccgcgctggagaagggcatcgtcatcaacggtctgccgatcatggtcaaggagccgtcctattcgaccatggatatcgacaatctcgatttctactacgaggactgcgtcatcggagggcctggctccttcgtcatcacgatcaaggagcgcgacaaattcaaggaagcgatccgcaccaagctgctgatggaggtcgccggccgcacgccggagcggcccgtaatgcgggttgccgacaaggagccgcgcgtcaactgcctgatcggggagaagatctggtccgatcggtgggggcggtaa

SEQ ID NO: 2934 - DNA, 636 bp, BradyrhizobiumColbertium
gtgtccatcgtcacgtcgagcaccaaccagatctcgcccgccaacgagcggatgtatcgccagagtgctctggtcggcgactggaagggcaattgggtgggcaacaaccagcccgtcagcttcaaggtcgtgaacatccgtggagcccgggcgcaggtcgagtacacccacaacggccgcaccgagcgcggcttcggcgaggtcaagggtacgcttatcaccttcggcggcgtcaccgtcggcaccaaggacggtaagaacatggtgctgctgttctcggtgggcggcgttggcaagcagaccgcgaatctcgagaagcaggcgccgccggcgtccgacagccgtctcatgggaagctggggcggctattccagcgacaacggcaagagcgcgagcttcaaggtgctcgccgtcaacggcaaggaggcgcaggtcagcgtcaccacggacggcgtcacccgccagggcactggctacgtctacaagaacgtcatcatgttcgggcagacacagatcgcgaccgacgacggacagaacggcaaggtcatctatcaggtcggcaccaaatccttcatggtaccagtgaccaaatacccgccggcagattcgtcctcttcagtcgacaagacggcatag

SEQ ID NO: 2935 - DNA, 168 bp, BradyrhizobiumColbertium
gtgcgcggtaccgcacgtccgtccgctcgcgatcccacgtttgatcgagcgttccaatcaaatctggcaactcgtcgggacggcgatttcatgcaggcctgcaccatcctgcggcaggtcgatcaagaattgaaggcgctgacgcagccccgcaggacaccgccgtga

SEQ ID NO: 2936 - DNA, 603 bp, BradyrhizobiumColbertium
atgttcaacttcgccaatcaatgtggccttgccgctctgctggcattgctttgcctgaacgggtcatcggctgatgcacaggttgcgccgctgagatattggatcccaggcgggcctttcggcctcggcggaggcgccagccagagttccgatacctacgggaatttttcgagcttcaataccggcgaggcgggttggcgtaccaactatgccgacggtttcttcgtcggcagcgagcgcggcaatcttggcttgagcggcttcaatcaggccggttctgcgggaagcttcagtgcgctgtcctatgacagcacgcagttcggctacaacacgaagacggctggcggcatgcccgtcacattcttcgctggattcaacacactgaaattcggcaacggcattggcagctcactggcgccactcacctccagcgccgcgcccggctacggtggatttgcgggcgtcgagttcaacccgacctccaatctcagcctctcgttcggcgtcggctatacccagcagcaatcgggacgcatggacagcgacatcaactcctcgatgttgcccggcgagtctccggcgctgggcgggttgcggcgctag

SEQ ID NO: 2937 - DNA, 1074 bp, BradyrhizobiumColbertium
ttgcaccgacgacgattcatcaccgccgcgcttgggctctccgcggccggcaccggcacctctgcagccgctgcagcgagcacctatgacgaggcggcgaaaacgtcacgtgctccgctgcaatcgacgccgagggatcgcgaactggtgcgctttgccacgctcgcggccaacagccacaatacccagccgtggaccttctcgattcgcggcaacgtcatcgcgatcgcccccgacttcaagcgccgctgtccggccgtcgatccggacgatcatcacctcttcgtcagcctcggctgtgccgccgaaaacctcatcctcgctgcatcaacgcttggctggcacgccgatctcgccctcgacggcgaccgcatcgtgatcacgctcgaggaggcctcgccggcagcatcgacgctggccgccgcgattccgatcagacaatgcacgcgcgctgcattcgacggcaagccggccgcaccggagacattgcgccggctcgagggcgcttgtcgcgaatcgaacgtcacggcgatcctgatgaccgaccgcgccgcgatagccggggtcaccgattacgtgctccaaggcaattcggcgcagatgcgcgacaaggccttcatgcgcgagctcgtgcactggatccgcttcaacgaggcggaggcgctcgcgacgatggacgggctgtatgcgcccgcctcaggcaacccctccctgccttcatggctggcgcggccgctgctgaatctcttcttcaccgagagcggcgaaaacaagaagtaccgcgaacagctcgagagctctgcgggcgtcgtcgtgctcgctgcagacggaagcgacagatcgcattggatcgcggtcggccgtgcctgtcagcgcttcggtctgcaggcgaccgcgctgggactcaagtatgccttcatcaaccagccggtcgaggtcgcgtcgttgcggtcgcaatttgcggtttcactcggactcggcgaacggcgcccctatatcgtgatgcgcttcggaaccggcccggatctgccgaaatcgctgcggcgtccgccggagcgcgtgatgcaatcctag

SEQ ID NO: 2938 - DNA, 2538 bp, BradyrhizobiumColbertium
atggcgtcgaccacaggttctgcgatctctcgacttctcttgtcggctatcgctggcacctgcatggcgatcattgcctgcggcccggcaaaggcagcctgtacgcccgctgcgggaaacggcatctcggcgctctgtaccggcgtaacggctggcggttatggcggtttcggtttctccaacctcaacgtgaccgttgacgatggcgcatcgctgtcaggcggggtcgcattcaataccggcagcctgatcaatcgcggcaccgtgaccagtgggggctcagctgcggggctcaacgccggaacggtggtcaacgagggcacgctcgcgggcagcattggcatcgacgccggcacggcgaccgtgaccaaccgcggcagcattgcgggcactggcatcggaatcacgaccgccggcggcaatctgactctggacaatttcgggacagtcaccggcttcttcggaatcttcgccgacggcgccgcgatctcgaatgccggagtgatcaacggggtcggagatacgagcatcgacgtggcagttcgcttatcgctcgtcaatacggcgacaggggcgattaacgggcacacggccgccatcactgctccgctcgcggagatcagcaatgccggatccatcacctccgcgacggcgacagcgatcgacgtcgtgacgctgtccagtctcgtcaattcaggtctcgtcagcggcgttacggccgctatacacggcacgacggcgacgatcggcaattcaggcgccatcgtggcgagcgcaggtccggcgatcgatttggctggaagcctgacgctgaccagttccgggcttatccgcggcagttcggacggcatcaaagcatccaccgcaaccctcgccaattcggggacgatcaccggaagtgcaggccgcgcgatcaggctgaccggtgcaggggacatcaccaacagcggatcgatctctggcggcagctacggcatcgaatcgttcgggactgtcaggctatcgaacagcggcacgatcttcggcggcttcgcggcacttgcgatcagcaatgctgtgatcgagaacagtggttcgatcctgtcgaattcggtcgcaatcgactccggaaacacaaggatcaacaattccggcacgatcacgggagaggtgatcgccatcacgtcgaaccagctcgcgctattcaacggcggcacgatctcggtgaaggcctcgggcgcctcaacgatctacgccagctccgccgacatcaccaatgccggcgtgatcgcggccgccgacaccgcgagtcttgcgttgtcgctcggcgcctcgaccgacacgctgacctcgcggccgggatcccgcattatcggcctgatcgacctcgggggtggcgcggacagggtgaatttccggggcggcaacttccactacaccttcaattcgcttgcaggggcaaccgtgagctcggcggcaccctacgtcgtgagcggttcgcaggtcgtcacgttcgactccacgccgttcggggccacggaccgtaatctgctcgccttcatctcggcggtgtcctccgcgttgccggatgcggatgcttctcccaccagtgactcactcgtccatgccgcgccgtccgggccgaagcgcgatgttcgcgaggctttcgctgcgatcacgccgcaagggccgacggcggtctatgccgacggcacaagcgtttgggcacgcggatttgccggggaacgtgatcaaccggcgagtggggcgctgctgcacagtaccagccgcttccagggcgggctgatcggtggcgattggcaggccaattccaatctgcgtgtgggtgcgttcattggaggcggcgcgatgcagaccagcgaggacttcaacctcgcgaccacgaatgccgacatcgtgttcggcggagcgttcgcgcgcggtaccttcggtgcgacctttctcgacatgatgctgcagctcggccacgtcgaccagcgcggctcccgcctcatctccaacaacctcgttgccggcggcatcgagaccgcgacggcgagcaattccggaacctacgccatcccagaactcgcccttgggcatcgcatcggcctgggccggaccggagggacggtctggacgctgacgcctgtcggccgcgtgcgttatctcgccggccgtcttggcgggttcagcgagagcggagtaacggcgaatgccaccgtcggaggttatactctgtccggactggaggagcgcggcgagttgaagctctccgccaccacgcgcatcgaacgggcagcctggctgaacggcagtctgcgaactggcgtggtcggcctccagcggctgggagatccgaccgtcaacttgaccctgctcgggcagtctctgccgttcgtgcttcccggcgcgaacgacgtctggggtctgttcggcggcgctggcctcgatgtcacgttgggaccggccagcctgttcgtcgccggtgaatatctcaagctgtcggattcgagcgtcgcctattccggccgtggcggattgcggatcgcgttctga

SEQ ID NO: 2939 - DNA, 1248 bp, BradyrhizobiumColbertium
gtggttgagcgcgtcaggatcgatcacgtcgggcatcgcggcgacggcgtctgcctcgatgccggagaagcgatctatgtgccctacacgctcggcggcgagacagtcgaggtcgatcacgtcttgggccatcatcccgaccgccgcaagctgctcgcggtggatgtcgcaagccctgaacggatcgagccgttctgtccgcatttcggcgtctgtggcggctgcgccatccagcattgggcgactgagccgtatcgcgcctggaaacgcaaaatcgtggtggagacgctggcgcaggccggcattgattgcgaagtcgcgtcactgatcgatgctcatggtgccgggcgcaggcgtatcacgctgcacggccgcttcggcacgcatgacatcctcaaggtcgggttctccgccacgagctcgcacgaagtcatcccgattcatcgttgccccatcctcgatcccgccctcgacggcgcgctcgacgcggcctgggcgttggctgagccgctgacgtccaagatgcccgtgacgaagccgctcgacattcaggtcaccgccaccgccaacggcctcgacgtcgacgtgcgcggctccggcccgctgccgacgccgctggtcaccaccctctcgcgcgtcgccgagcaacaccggctggcgcgactgacgcggcacggcgagctggtgctgcaacgcctgccgccgacggtgacgatgggccgtgcggaagtgacgctcccgccgggctcgtttctgcaggcgacggtagcgggcgaagaggcgcttgcagcgctcgtggcggagcgcatcggcaaggccaaggaggttctcgatctcttctgcggcgtcggcccgtttgctctgcggctcgcggagaaggcgcgcgtaaccgcctatgacagcgacgctggcgccatcgcagcgctcgtgaaagccgcgcgcacacccgggttgaaaccgatcaaagcggagccgcgcgatctattccgccgccccttggtgccgcaggagctgtgcgacttcgacgccgtggtgttcgacccgccgcgccagggcgcccaagcgcaggcgctgaagctcgccgcgagcaaggtgcccgtcgtggtcgcggtgtcctgcaacgtcgcgaccttctcccgcgatgcgcggctgctgatcgacggtggctatcggctgaaatccgtggtgccggtcgatcagttccggcacacaccgcatgtggagctggtggcgaaattcgaacggtag

SEQ ID NO: 2940 - DNA, 735 bp, BradyrhizobiumColbertium
atgccccctgcccgcaagcgcgcggatatattgctggtcgagcgcggcctgttcgagagccgggcacgagcgcgcgcggcgatcgaggccggcctcgtcattgcggacgacaagcaggtttcgaaaccgtcggagacgatcgccgaggatgcggtgatccaggccgagccggcgcaccctttcgtctcccgcggtggcgtcaagctcgccggtgcgctggagcgctatccgatcgagatcgaggaccacgtctgcctcgacgtcggcgcctctaccggcggcttcaccgaggtgctgctggcgaacggcgccagcctggtattcgcgatcgacgtcggcaccagccaactgcatccctcgctgcgcgatcatcccaagatcgtgtcgatggaggagaccgacatccggtcctacgaaggcaaacgcctgccggcgcggcccgatgtcgtcgtcatcgacgtcagcttcatctcgctcaagacggtgctgccggtggccttgtcattggcggctgcgcccatgaacctgctggcgctgatcaagccgcaattcgaggccgaccggaaacacaacaagaagggcatcatccgcgacaccgccgttcaccgggagatctgcgacgacatcgcggcctttgccgcgtcgctcggctgcaccgacatcgaggtgttcccctcgccgatcacgggcggcgacggcaatatcgaattcttcctcggggcccgccgtggttga

SEQ ID NO: 2941 - DNA, 555 bp, BradyrhizobiumColbertium
atgaacatctatctggcaggccccgacgtgttcctgccggatgcgatcgagatcggccggcagaaggccgcgatctgcgctgcgcatggtctcaccggcctctatccgctcgacaatgcgatcgacctcaccgcgagcgatgcatcgcggcagatctttcgcggaaacgtcgccatgatggacgcggcagacgccatcatcgccaatctcacgccgtttcgtgggccgggcgccgatcccggcaccgtctacgagctcggctatatggcgggcacgggtaagttctgcctcgcctattccaacgaggacgcggcgtatgccgaccgggccggccgcttcacggacgtcaccgccgaggatggacggctggtagacgcgcaggggttgaccgtcgaggatttcggcctcgtggacaatctcatgatgatccatgcgctggaactgcatggctgcccgctggtgacgccgtccaagcggcccgtcgacatctggcacgatcttgccgccttcgaggcttgcgtccggatggcggccgcgcgattgatcgctacataa

SEQ ID NO: 2942 - DNA, 1929 bp, BradyrhizobiumColbertium
gtgaacgcatacagcaagacgccgcttctcgacaccatccggacgccggaagacctgcgcaagctcaaggtcgagcagattcgccaggtcgccgacgagctgcggcaggagaccatcgacgccgtctcggtgaccggcggtcacttcggcgccggtctcggcgtggtcgagctcaccaccgcgatccattacgtcttcgacacgccgcgcgaccggctgatctgggacgtcggccaccaggcctatccgcacaagatcctcaccggccggcgcgaccgcatccgcacgctgcgcaccggcggtggcctgtccggcttcaccaagcgcagcgagagcgactacgatccgttcggcgcggcacattcctcgacctcgatctccgccggcctcggcatggccgtagcgcgcgacctctccggcggcaagaacaacgttatcgccgtgatcggtgacggcgcgatgtcggcgggcatggcttacgaggccatgaacaacgccggtgcgatgaactcgcgcctgatcgtcatcctcaacgacaacgacatgtcgatcgcgccgccggtcggcgccatgagcgcctatctgtcgcgcctctactccggcaagacctatcgcacgctgcgcgatgcggccaagcagatcaacaagcgcctgcccaagatcatcgccaaccgcgccaaccgcgtcgaggaatattcccgcggcttcatgatggacggcggcacgctgttcgaggagctcggcttctattatgtgggcccgatcgacggtcacaatctcgaccatcttctgcccgtgctgaagaacgtccgcgacatggagaccggcccgatcctggtccacgtcgtgacgcagaagggcaagggctacggtccggccgaagcctccgccgacaagtaccacgctgtcgtcaagttcgacgtcgccaccggcacgcaagccaaggccaagccgaatgcgccggcgtaccagaacgtgttcggccaaagcctcgtcaaggaagcgcagaaggacgacaagatcgtcgccatcacggccgcgatgccgtcgggcaccggcgtcgacatcttcaacaaggccttccccgatcgcaccttcgacgtcggcatcgccgagcagcacgcagtgacgtttgccgccggtcttgctaccgaaggctacaagccgttctgcgccatctactcgaccttcctgcagcgcggctacgaccaaatcgtgcacgacgtcgcgatccagagtctgcccgtccgcttcgccatcgaccgcgccggcctcgtcggcgccgacggcgcgacccatgccggctcgttcgacaacgcctatctcggctgcctgccgaacatggtgatcatggcggcggccgacgaggccgagctcgtgcacatggtggcgacccaggttgcgatcgacgatcgcccgagctcgctgcgctatccgcgcggcgagggccgcggcgtcgagatgcccgacgtcggcgtgccgctcgagatcggcaaaggccgcatgatccgtcagggcagcaagatcgccctgctctccttcggcacgcgtctcgccgaatgcgagaaggcggccgacgagcttgccgcccacggcctgtccacctcgattgcggacgcgcgtttcatgaagccgctcgacaccgagctggtgctcaagctcgcccgggaccacgagatcctgatcacgatcgaggaaggctcgatcggcggcttcggctcgcatgtcgcgcagtacctgaccgatcagggtgtgctcgacaccggcatggtcaagttccgctcgatggtgctgcccgacgtgttccaggaccacgataccccggccgcgatgtacgcccgcgccggcctcgacgccaagggcatcgtcgccaaggtgttcgaagcgctcggcaaggacgtgaagaccgagacggtcaagctggcctga

SEQ ID NO: 2943 - DNA, 252 bp, BradyrhizobiumColbertium
atggccgaaaacacccaagttgacgtctccaggctgaccttcgagcgcgcgatcgaggaactcgagacgatcgtgaagcggctcgaggacggcaaggtgccgctggaggaatccgttacgatttacgagcgcggcgaggccctgaagcggcgctgcgaggaattgctgcggcaggccgaagcgcgtgtcgacaagatcaccacggacgccagcggccaggccaccggcacggcgccgctcgacgtccaatag

SEQ ID NO: 2944 - DNA, 930 bp, BradyrhizobiumColbertium
atgagcacgcttctcctttcccacaaggcctgcctcgaccatgtcacgccgccgggacaccctgagaggccggatcgcctgcgcgcggtggaggaagcactgtcgcatgagcgctttcagttcctggcgcgcgaggaggcgccggagggcgatctcgatctcgtcacgctctgccacaacgagcattacgttaccgagctgcgccatatcgcgccgaccagcgggcaggtctatatcgacggcgacacctcgatgtcagccggcacctgggaagcggtgatgcgcggcgtcggcggcgcggtggcggcaaccgaggccgtgatggcgggcgagcatcgcaacgccttcgttgcggtgcgcccgcccggccatcacgccgagatcagcaagccgatgggcttctgcttcttcgacaatgtcgccatcgccgcgcgccacgcccagcgcaaatacggcatcaagcgcgccgccatcgtcgatttcgacgtgcatcacggcaacggcacgcaggatatcttctggtccgacccgaccgtgatgtattgctcgacgcaccagatgccgctgtttccgggcaccggcgcgacgagcgagcgcggcgatcacgacaccatcgtcaatgcgcctctggcctccgaggatggcggcccggaattccgctcagcgttcgagaatctgatcttgccgcagctccagaaattcagcccggagcttctgatcatctccgctggcttcgatgcgcattaccgcgatcccctggcttcgctgaacctgcgcgcggaagactatgcgtgggtgactcgcaaactgatggatctcgccgacaagaccgccggcggccgcgttgtttcggtcctcgagggcggctatgacctgcaaggactgaaagaatctgttacggcgcatgtcggcgccctgatgggcgcttga

SEQ ID NO: 2945 - DNA, 1662 bp, BradyrhizobiumColbertium
atgcgatactcggtcctcctttccgcactcgcactgacgctcactttcgcccttcccgcgtcggcccagaccgccgagccggtcgagctgcgcgtgctcgcgatcaacgacttccacggcaatctgcgcccaccaccgggcggcattcgcatcgacgatcccgaggacagaaccaggaaggtgatggtggccgctggtggcgccgaatacctggcaacgctggtcaagcagctgcgcgaagggcacaggaacaccatattcgttgccgccggcgatctgatcggcgcgagcccgttcctgtcggcgatgttccacgacgagccctcgatcgagtcgctctcgatgatgggcctcgcgatcagctcggtcggcaatcacgaattcgatgagggcaagaccgagcttctgcgcatgcagaacggcggttgccatccggtcgacggctgccagggaccgcatccattcacaggcgccaagttccggtacctcgctgcctccaccatcgagacctctaccggcaagagtgtgctgcctccctacgagatccgggaattcgacggcatacccatcgccttcatcgggctgaccttgaaggaaacggcgggcatcgtctctccagccggcattgccgggctcgaattccgcgacgaggccgagacggtgaacgcgctggtaccgcagctgaaggcgcggggcgtcgaggcgatcgtggtgctgatccaccagggcggcgagcccgcaggcgactacaatgaatgtcctgcgattaccgggccgatcgtcgagatcgtgaagaggttcgatcgtgccgtcgacgtcgtcgtcagcggccacacccaccaagcctacgtctgcgacatcgacgggcggctcgtcaccagcggcgacaaatacggtaccctggtcaccgcgatcgacctgaagctcgatccggccacgcgcgacatcgtcgggacgaaggccgagaatgtcatcgtcgccaatgcctcgctggcccgggatcccgagcagaccgcattgatcgacgcctacgacaggctctccgcgccgatcgcgaaccggccggccggctcagtgacgcagacgctgtcacgcgtgccgaacgacgccggcgaaagcgcgcttggtggtatcattgccgacgcgcaattggcggcgacgcgcgatacgaaggatggcggcgctgtcatcgcgctcaccaatcccggcggcgtccgcaccgacatcgctccgaaggaaaatggcgcgataacgttcggcgatgtcttcgccagccagccgttccgcaatcgccttgtcaccatgacgctgacgggcagccagctcaaggacctgcttgagcagcaatggctcgatcccaagcggccgcggatcctccaggtgtcgaacggcttcagctatacctgggatgcatcgaagccattcgggcagcgcgtcatctcggagaagatgacgctcaacggcaggccgatcgaacctggaagcgactaccgcgtcacgctcaacgattacctcgcagtcggcggagacgggtttaccgtcgccaaacagggtacggcaccgcgatatggcggctacgacgcggacgcgctgttcgcgtttttccgggcgaacgggccgatcggtccgctgccgcccacccgcatcctgcgcgtgaattga

SEQ ID NO: 2946 - DNA, 750 bp, BradyrhizobiumColbertium
atgctgatgcggatgcgggcgcagaccgctgcggcgcgcacgatctgctatgcgaccgcggtcgcgatcgacgtctcgacccgcgccaaggacgcgaaggtgcgcgcagatgcggcagcacgcgcggcactgctcacgccgatggccaaggcctattccaccgacatcggcaacgaggtcgcctatctcggcgtgcaggtgcatggcggcatgggcttcatcgaggagaccggcgcggcccagcactatcgcgacgcccgcatcaccgcgatctacgagggcaccaacggcatccaggcgatcgacctcgtcacgcgcaagctggcggccaatggcggcgcgtctgtgtgggcgctgctcgacgagctctcggcaaccgtcagccaggtcgaggcctccaacgatcccggtttcggcacgacgggcgccaagctgcgcgaggcgatcgatgcgctcacacggaccagcaaatggctgctggagcgcgttgcctccgcaccgaacgaggcgctcgccggcgcgacgccctatttgcagcagttcggctcgacgctcggcggctgcctgctggcctccgaagcgcttgccgcaaaggccgacggcaacgcggacgctgcgcgccatgtcgcgctcgcgcgcttctttgccgagaacatcgcggtgcaagcgggagcgctcgagcgcaccgtgacggagagcgcggagtcggtcgcgtcggcggatgcggtgctactgggggtgagcggctga

SEQ ID NO: 2947 - DNA, 72 bp, BradyrhizobiumColbertium
tggggcgtagccaagcggtaaggcagcggattttgattccgccattcggaggttcgatccctcccgccccag

SEQ ID NO: 2948 - DNA, 6276 bp, BradyrhizobiumColbertium
gtgactgcgattgctgttgtcggcattggctgcagactaccgggacatatcggctcgccggccgccttctggagcgcgctcctggcgggcagcgatcttgttactgatatcccgcagcagcgctggaatgccgacgactactacgtgcccgtggcggggctgccgggcagctcggtctcacgctggggcgcgttcctggacgacccatcgggcttcgaccatcgcttcttcggcatcggcgaacctgaggctctcgccatggacccccagcaccggctgttgcttgaggtcacctgggaggccgccgaacattctggtcgcgatccgcggtgcctgtgcgggaccgacgcgggcgtgttcttcggcctttcgcatcaggactacatgcaggtcacgcgcgacgcgggcgcgctgggccaggcctacgctttcacgggcacgcccttcagcatggcgtcggggcgggtggcccatgcgatgggcctcacgggcccggcgatcaccatggacacggcctgctcgtccagcctcgtcgccgtgcatgcggctcggcggagcctgcttgcgcgcgagtgccacattgcgtttgccggcggggcaatgttgatgttctcgcccgcaacatacgcctcggcatcgggactcggcatgctgtcgccgacaggccggtgtcacgcgttcgacgagcgcgccgatggcttcgtgcgcgccgagggctgcggcgtcgtgatgctgaagctgctgatcgacgcgcttcgcgacaacgaccgcgtgcttgccgttatccgcggcagcgccgtcaaccaggacggacgcacgcacaacatactggcaccgtcccgcgcggcgcaggtcgcggtgatcgatcgtgccctttccgaagcgcaggttgacccctcgtccgtcggaatgatcgaggcgcatggcaccggtacgcctgtgggcgacaccgaggagttccacagcctctccacgcagtatggacgacaggcgccctgcgcactggggtcgctcaagagcaacctcggccatgcggaatcggcggcgggcgtcctgggcctgatcaaaacgacgctcgcgctcgcgcacggcgtcgtaccgcgatcacttcactttcatcggctgcccgcgcatctccagacgatcgagacgcggctcttcgtcccgacggataccgcgccctggccctcgaccggtgcggacggactccgccgtgcagccgtatcgtcttacggcatgtccggcacgaatgtgcatgtggtgctcgaacaggctcctcaggcagcggattcaccccttccgctggagagccgtagaacaggcgaacggccgtggctgtttccaatttcttccacctcgccagcggcgcttcgcgcgtcggccggccgtcttgcgtcctggctagacgcgaccgccggcagtcacggcccgagtgacgtcgcgcgaaccctggcgtgcagacgagggcacaggccggtccggcacgcgctcattgcgaaaacgctcgacgatctgactgggcaattgcatgggctcgcaggcgatgcctctatcgatgcggagtgggtcgatgacaacggccgcgggcccgtcttcgtgttctctggacacggctcgcaatgggacacgatgggagcggcgctgctcgatgtcgacgcggtcttcgccgatgtgattgccgccattgagcctctgattcaagccgtcagcggcttctccgtgaccgatactctacggcagcccggacaactctccggaatcgaacgagtccagcccgccattttcgccgtgcaggtcgcgatggccgcgtccctgaaggcccagggtgtggcgccgtccgcagtgatcggccattcgatgggcgaagtgtcggccgcagtcgtggctggcgcactctcgctcgaagatggcgtaaaggtgatctgtcatcgcgcaatgctgtgccagacgctcgctggctccggtgcaatggcagtcgtcgggctggcgcctgcagcggtccgcgaagatctggcgcgccggctggtcaatgacgtggaggtcgcggtactggcggctccggcatccaccgtcgtcgggggctctgtcgaagccgtgcaacgtctcgtcgctgcttggcaggccgaaggcctgttcgcccgtgaggtcgcggtcgatgtggcttctcataccttccacgtcgagccgatccttgcgcaattgtcggagcgcctcgcgggagtgactgcgaacaagccgcagacgccgatgtactccacggtcctgcttgatccgcgcgaatcccccgtctgcgatggcgcttactgggtcgacaaccttcggcattcagtgcgctttcgtcccgccgtgcacgcggtgctcgaagacggacaccgcgtattcgtcgagctatcgccgcatccgatcgtgacccgcgcggtgttggagaatgctgccgcgatggacttcgccgtccgcgcgcttccgtcgatgacgcgcgccgagcccatgcgcaacgggcttctcgatctggttggcgccatctacgtcgcgggcgcggcgatcgatttcggtgccatgtatccggatggcccactgctcgatctcccgctgccggcctggacgcattatcccctgttccttgcgccggctgtgccaaccgcaggtgcgcatcaccttctgtcaacgcatccgcttctgaatgtccaccgcacgctgcacgaggaaccggaacgccacatctggtcgtccgaggttgggctcaatgcccacccctggcttgcggaccaccgggtgaacgaagtgccgcttctcccgggcgctggcttctgcgagatggcgcttgccgccgcacgcatggcctttggtacatcgcttgtcgaagtgcaggcgatgacgtttgaccacgcgctccggttggagccgtcgatgccggtcgtctgtacagcagtgctggatcggcccggtgagttgaacttcaggctcgagagccgggcagacagcggagcgcaggtccatgcaagggctcggctctttgcaggtgcctctgcagactcggctccagcttacgacatcgccgcgctgcgcgccgctcacgccgggcctgttgccgccgatgaagtgtggcgatggttcgactcgcagcgcatccagttcggaccatcatttcgcgcattgggcaccagcctggcgctatctgccgacggcgcctcgctctttgcagatcttcggctcccggcgtcgctccgaacgggcgcgcgcggctacacagtacatcccgtgctgctcgacgcgtgcttccagtccgttggcgctttcgctcaggtcgtttcggggacaaacgggcgtccgctactgccgctctcggtgagaagtctgcggctccaccacccagacgctgacgccgcgcactgcatcactcgctttgtcgcgatggacgcgctgcacgtcgaggtggacattgatctgctcgatgcctccgggcgcgtgctgctcagtgtcgatgggttggcaatgggtagcggtgcggccggacagcacgctgacgccgtggcctgcaactcgcgcctgctcgacgtcgtctgggagccatgggatatcccccgtgccaaggtccagccgggcgatggcgcctggttgctgctcgacgccgatgattccggacaccagttgacgatgaggctggagggaagcctgcgcgagcaagggttcaagactctcatcctcagcagcgccggggccgggaagggaggcatgtggcgcgagcagatcgaagatgttctgcatcagcatcgccctgcggccgtggctgtggtattgccgcgcagccgcgagccagcgtctccggacgcgggtcgagccaacataagcagcctgctgcacgtgaccaaggcgttgatggagtgcgagcggcggcctcgcctcttcgtcatcacctgcatggcccaacgcgtactgccggacgacaccgtccaactcgcgcacgccggtgtgcgtgggtgtctgcgggccgtcggcgccgagtttcccgcactccatcccacccagatcgacgtggaccttcgagcggacctgtcactgattcagcgtcaattgctgagcggctcgaaggaagacgaaacggcgctgcgcggggcgagcgcatatgtcgcacggctgcagcgaagtccgcttggtcatgctgatcgccgcatggtggaccgggacgcggcgcgcgatggtcttcgcctggagatccgcgtgccgggtgacctccagacccttgagatggccgcgttcgagcggcgcgcgccggacgcgggcgaggtggaggtggccgtccatgccaccagtgtcaatttcgccgacgtgctcgttgcccttggtcgctatcccacggtcggtggtcgcgcgcaggatctcggcctggactttgccggcatcgtcaccgccgtcgggccgggcctttcgccgtttcgcgtcggcgaccgagtggccgggctctgctgcgggggagcttgggccacgtatgtcacttgcgatgcgcggctgctcgctgcgataccccgcacgctcaccgatgccgaagccgccgccattctcgccacaaccgcgacagcgtggtacggcctcaaggatctggcgcggatcggtcccggcgacaaggtgctcattcactcggcgaccggtggagtcgggcaggcggctgtggccattgcgcgcgcggccggtgcagagatattcgcgaccgcgggctccgaggcgcggcgagaactgctgcgcgccaacggcatcggccacgtgtacgactcccgaaccgtggcattcgccgagcagatccggcaagacacggcgggttacggcgtggacatcgtcctcaactcgctcactggcgcgtcgcagcgcgccggcctggagcttctcgccccgggcgggcgcttcatcgagatcggcaagaaggacatctatgggggcacgtgggtcgagctgtctccgtttaagcgcaacctgtcgttcttcgcggtcgacctggcgcagatgtgtatgactgctccggctcgcgtgcaggcattgctgtcgcgcgtcatgcgtcttgccggagaggagcggcggatcctgccagacatcgctgcctatcctctcgccgacgcggctcgcgccattcgcgttgtcagcggcgccggtcacatcggcaagctcgtgctctcggttccaaggaccggccattaccgcgtggcagaggtgccgaagcgcttcacgccgttcaagagcgatggcgcttacatcgtcaccggcggcctgggcgggctcggcctgctgatcgccgacgcgatgtccgctgccggggctggccgcgtgatcctcaatgcgcgttccaggccgacggacgcggctgcgagcgtgttggccgggatgagagcgcggggcaccgaggtcgaggtgataagtgcggatatcgcggctccatcgaccgcgcggcgccttgtcgaagctgccactgcgacaggcctctcgctgcgcggtgtcctgcacggcgcagccgtcgtcgcagacggtatccttccctccgtcaccgaggagaggctgtatcggaattgggcgccgaaggtggatggcgcctggcatttgcatcaggcaaccttgaagcgacagctcgactggttttgctgtttctcgtcgctcgcagcgctctttggttcgccggggcagtccgcctacgctgccgccaacagttggcttgacaccttcacgcagtggcggcgcgcgcagggcctgccgtcgtcggcaattgcctgggccgcgtgggcggacgtcggcgcgggtgcgcatctctcggcccgcggcgatgtgcgaatgattgacccacgcgatggcgcttatgcattcgagacgctgctgcggcacgaccgcggctatgccgcatatgtcgatcttggcggcgcgccgtggctgacgtcgctatcggcgcgaagcccgttcgctgtggccttgtcgcaagctccggcggtcgcggacgatccggcgcgccgcctgcgcgcggagctgagacgcgcaccgctcgatgagaggccggccctgttgcggcgtctgatcatcgagcatctcggtgtcatcttgcgccgcacggtgaatcccgaccgctcattctttgactacggcctcgattcgctggggacgctccaattgctggtggcactcgaatccgacaccggcgtccggctgcgcgccgtggaggtgacgaccgtgcgtgctctggccgacacgttgagcaaggcgatgcgagaattgcagccagccggagcagatgccggtgactga

SEQ ID NO: 2949 - DNA, 1179 bp, BradyrhizobiumColbertium
gtggtgaccgcgcatctgcgcaggcacgacacttatcacagctggttcgaggagcgcggcaaagcgatcgtaagacacgtactgaccgatcctgcggccattcagatggagtgttcgacgctcggcgaggtgagcgctaaggattggcagaagcacatcatcgcaaccccgacaccgttcgcatgggattgctttcgcttcggcattctccaacgcaccaatggcttcacttgcttcgcaagcattgaccatttgcacggcgacgcgaccgtcatcgcgttcctgatgacagagatccgcttggcgtatcgcgctgtgctcgacggggagacgccgcttcaactcggacggccgggcagctatctggattactgcaccagtcagcgccagcgggccgccgtgacaacgttgtcggatcccgaggtggagcagtggatcgcgttcctgcaccggaacagcgggcggatgccctctttcgcgttgccgctcggtgtgatggaggatcgctatcaggccgagtacgtgcacatcgacatcttcgatgatgatgccatggccgcgttcgagtccgcgtgccatgcttccggcgcgcgggcaatcggcggcctcttggcctgcgcggccctaaccgaacgggaaatgacagggcggtcgcgctacagcgtcgtcactccaacgacgacgcgaatatcgccacaggcgttcaggacgaccggctggtgcgttggcgtggtgcccatcgacttcgaggtgcaagagctgacgttttccgaacttgccctcattgcccaacgcaactttgacgaacggctttgccttgccaacgtgccgatcgagctcgtgctcgaactggccgccgggctgccggcggtacggtccgtcgccacgggtggcgtcatgctgtcgtatatggatgcgaacgttcctccgctcagtgcgcacattgcgcgcgaatggcatgaggcgaatgggcgcgtttatattaaccaaggcatggccgcgcaggttgcgctctggttgtttcgtacgcaacgcgggctctcgcttacggtggcttatccggccaacgcgaccgcccgagcctcgatgcaccgctatgtcaaagcctttgcgggtgcatgccgccgggcggccgacgcagtgatggcgacgcaagctcatgtcggcctttcgctatga

SEQ ID NO: 2950 - DNA, 1344 bp, BradyrhizobiumColbertium
atgtcgccgccgttcctgtcctttacggatcaggcaatttacctcgcgcatgtctcactcgggcaacatgcggtcattcaggtactgtggcgctatctgcggcctgtggacctggacgcgctgacacggttccgtgacaatctcgcgcacggacatctggcgcggctgatccggccggcgctgcttccgttcgcgcggcaccaatgggtcagcgcgccaccaccttcgtccgctctggctgtcgtcgaggcgccgcttgcccctgagcagctgcaggcgtgggccgacgcgcaggtggcgcttccactagatccggtgcgcggaccagcatggagattgacgatccaaacctttacagacaactccacggtggtctcgcttgtggtgtcgcactgcatcgcggacggactgaccatcgcagcagccgtgaacgaagccgtgcggggagagcgaaggcctgcggcctatcccgcaggggcagtcttgtcagcgctccgcgctgcgacaacactgggtgccgaactgcaacgtatcgtgcgggacgcgccggcaacgctccaggcgctcgccgagctggcccgtacagcatacacctcgcgcgccacgtcccgcaccgccgcgttgaatcaggctagcgcagatggccggccagtcgtatttccgtcagccttcatgcgcgtacccacgtccgtctgggacgccagggcgaagagcctcggtgcaaaccgtatcaccctcctggccgcgataaccgcggcttttgcccagacactcggtcgtgtccgcgacgaagaggtgaccttgttgattcccgtcaatcagcgagagggttcgtcgcacaccggcggaaacggcgttgcgcttgccacattgaagctgcgtgtcgacgaattgcgcggaggtctgcattcgttgcagcggcgtctgctagctacgctgctgcggacgagacgggaacccaatcgacttgccacgctgctgcccctggtgccgtttgtgccaagacgcgcagcttcggctgccaaccatgcggcacttggcgcgctcgccgacctgccggtcacctgttcgaatttgggcgacctgccgaaggacgtgctccagatcgacggcggcgcggccgatcgagtctgctttcgcggcatcgaccgccccatcccgcgctgcgcgatcgaggcgcgtcaaggtgttgcgactgtcttcgccggcgccgtacccggttttctgaacctgagcttcgtagcctatcagcctggcgtggtgacggaggctcagcatcttcgcgcgctcgtcgaacggctcttcgctgactgcgaactcgttggcgagtccttcgatgcttga

SEQ ID NO: 2951 - DNA, 1389 bp, BradyrhizobiumColbertium
atgcttgagacgagcacgcccggcgcccccgcctacacgcggcaccgcctcgcctggctggaccaactggcttacgaattgttcagggccacgggtcgaagccaattgatgcaatgcctgtggctctacgaccgtgacgtgaacctcgccgcgctactgcgaacacgggagcggttcgcggcgctgtcgttcaatcgcctcatcgagccgtcgcccctgccgtggggaaggcctcgttgggtgaagccggccgtgacagccattccgcttgagcagagtgcggacccgctgccacgatcgcggctgctgcactgggctaaccagcacgcgcgcgcgcccatcgaccctgtgatcggtccggccgtgcgaatggccatccagccgttcgacgacggcagcacggccgtgagcctggtcgggtcgcatctgctgctcgacgggctgggggccgtgcgcgccatcgcggcggccgtaaacggcatcggcctcccgagcccatacgcaattgcaggtgcccgggggcggctgtccgggtgcgtgtcggacgcgtggcaggtcctcgccgacgctccgcgcacggtcgccgcgctcgcccggatcgcccacgcgaactggtacaagtccgcagtccctgtgtcgaggtcggccgctgcagtcgccgaggcaggccacgagccatcgacgatcgtggagcttccggcggttgtggtcactgttgaatcggatgcctggctcgtctgccagcagcggcttggcggtagctcgaatacgctactgccaggcttcgtcgcgtccctcgcatcgcgcctgggccgccgccgtctctccgacggcgccatcagcctgcttgtcccaataaaccggaggcgtgggctcgatgacgaacgggcgctggcgattgatttccacacgatgaatgtcgcgcctgcaggcttggacacgagcctgcgccccgtcaatgcctcgctggaggcactggttcgcggcgcgaggaaaagtcagaccggtccactggcttcgttcctgcctgcgatcgcttggatgccgcgctccgccgcgaagacgctcgtggaccgtttgttcaattatgccggtgagctgccggcgagttgttccgacgttggtatgctgccggacgggctcgcgcgcatcgacggcgcgccgtgccgccaggtgttgacacgagctgtggatgtcaacgttacgcgccaagacctggagcgctcccagggccatctcgtggttgttgcctcccgctacggccagacgatttccctctgcatcgaggcctgccagctgggacccacacaaaccacgcctgacgaacttcgcctgctggtctcgcggacactcgcggacttcggactggacgcaatcatcgatgcgtga

SEQ ID NO: 2952 - DNA, 1374 bp, BradyrhizobiumColbertium
gtgagccattcgtctgccaacaagctctaccgacgctgctccggggcgaccgaccccggcgcagacgacgtgttgtgctatatggaccagggttcattcgtcggattgcgcgcgctcgggcgcgggcctgcgctgcacctgacctggttgtatccgcacgctctcgatgaagcggccgtgagggagttcaacgagcgcctcacgagaggattgctgggacgtctcctgcagcgttcgccattaccatgggggcggcaccgttgggtggccaatcctgtgtcggggccggtgacgtggtttcgtgacccgctcccggatgagcgtctgccccatttgcgacgtgagctgctcgatctgcctctcgatcccgagcacggaccaggctggcgactggcagtccagccgctggagggcggcggctgcgcgctgatgatgctggtctcgcacacgatcgctgacacccaagccacaagtcaggccattgctgacgcagtggcgggtcgatgtcttgaccatggattcccagccccatcctggcgatggtctccagtgatgctggcgtgcgacagcgtcgagagcttgcggactctgcccgacgtctcgcgtgctctggtagctctcctgcgaggggcgcacaaaaggagggcgggcgtgtcccgttcgagcgctcgaagcagtcgcaaccggcttgagccggcagtggatgtgccgcttgtgtgggtggtcatggacgcagcagcgtcgaaacggcgaacgtcggatctgggtgtggcgagcaacacgctgatcatggccttcacggcacggctcgctctccggatgggccgcgtggatgcttcggggcgcgtgaagctggtgttgccggtcagcgaccgccgttcgagcgaccgccgcggcaacgcgctgcggtcgatcaccgtgatggtggatcccgatgcctgccgcaacgatccgcgcgctttacagcgagatatgaaggctgccctggcctcgctgatccgccacggtgatgacttgtcgccggtgctgccgctgattccgtatgtgccgctgtggctggcgcgtcatctggagcgggcggcactcggggcggacctgcctgttggatgcagcctcgccggcgaattgccgctcgacgtgcaccgcccttgcggcgaggcgtcacttctgcagattgcccctctggagcgctatacagccgcagaactcgaacggctgggcggcctgctattcatcctgtgccaccgtgtcggcgaacggctgttcgccactgtgtccggctacgccaaagatcgcgtgacgacccgcgccgaattggcaccgatcgtgcgcgacgcactcgcggatatgggcctgtgcggggcgctcagttga

SEQ ID NO: 2953 - DNA, 1167 bp, BradyrhizobiumColbertium
atgccgttgctgctcgcctacagcctgcgtaacctctacgtccgcaaactcaccaatttgctcaccgcggcgggcatggccctcgtggtgttcgtctacgccgccgtgctcatgctcgactccggactcaagcagacactcgtggcaaccggcgaggaaacgaacgtcatcttcgtacgccgctctgcggaagtcgagatccagagcctgatcgaccgtcggcaggccaggatcatcgaaagccagcccgaggtcgtcatgggagccgagggcgcacctgttgtctccaaggaagcggctgtgctgatcgcccagccccggcgcaagaccaagcaggcaagcaacctcttgatccggggcgttggtccagccgctctggccgtccgcccgcggttgcggctggtcgagggacgcatgtttcgtctgggatcggacgagatcatcattggccgggcgctcgcggggcgtttcgaagacatcgagatcggatccagcctgaaatttgcgcaccgggagtggaagatcgtaggccggttcgacgcgggcggcagcgggttcgattcggagatctgggcggacagcgaacagctcatgcagtcgtttcggcgagacttcttctcttccgtcacggtacggctggctgatagctcaggcttcgacgcgctcaaggcgcggctcgaagcggaccctcgcctcaccatcgaggccaagcgcgagcgcgtcttctacgaggagcagtcgcgcctgctctccggattcattcagcttctcgggatcacgctctcggcgatgttctcgctcggcgcggtgattggcgcgacgataacgatgtacgctgcggtggctagccgcatgatggaggtgggggttctgcgcgcactcggatttcggcgctcgcggatcctcggtgctttcctcgtagaggcgctgctgctcgcgctcgtcggctgggtcgttgggcttttgttcgcatcgctcatgacgcaggtgaagatcacgacgctgaactggacctcgctctccgagctcgcattccagttcgtgctgacgcccggcatcgtgctgcggtcgctcgtcttcgcgctggtgatgggcctcctcgggggttttctgccggcggtacgagccgcccgcatgaacatcgtcgatgcgctgcgcgtcgcttga

SEQ ID NO: 2954 - DNA, 1161 bp, BradyrhizobiumColbertium
atgagccaatggctgacgctcgtggcgcgcaacgtcttgcgccaacggctccgcacgtctctgacgctggtcggcctcgttgtttcaatcctggcctttggtgtgctccagacggtggtcaaaacgtggtacgctggcgtggatggcgctgtgccttcgcggctgctcacccgcaacgccgtctctttcacgctgccgctaccgcaggcatattacaagcgcatcggcgctgtcgaaggcgtgcggcacgtcacctacatgacctggttcggcggcgtctacaaggatccgaagaatttctttccccagtttgcgatcgatgccgcgagctacttcgatatcttccccgagatcctcgtttcggacgaggtgcggcgcgccttcctccgcgaccgccgcggcgcaattgttggacgcagactcgccaagcgcttcggcttcaggccgggcgatgttgttcaactgcgcgggacgcttttccccggcaactgggaattcgtgatctgcggcgtcttcgacggccgagacgccaaaaccgacacctcgcagcttttcttccgttgggactatttgaacgagacgctacgggtgcgctccaaggcacaagccgaccaggtcggcttcttcgccgtggacgttggcagcatcaatcgggtcgcggaagtcagtcaggcgatcgacgaagtgttccgaaactcgcgcgccgagacactcaccgagactgagcgcgcgttccagatcggcttcgtgaagcagaccgaggcgatcctcatctccattcgcgtggtctcgttcgtggtcatcttcatcatcctggcggtcatggccaacaccatggcgatgacggcgcgcgagcgactccgcgagtatgccacgctgaaggccattggcttcagccccggctacgtcgcacgcctgatcctgggagaatccgtcgcgatcgcattggtcggcggtgccatcgccatcgggctgacgcccccggttgcctcgcgacttgccgaactctccgcgacgctcttcccgtcgctgatcgtgagcgtcaacactgtgttgcttcaggcactttcggcattggcggtcggggtcctcgcggcggtcttgccgatgcgccaggccgcccgtgtcagcatcgtcaacggtcttcgggcgttgggctga

SEQ ID NO: 2955 - DNA, 726 bp, BradyrhizobiumColbertium
gtgcttcgcgtctccgacgtgccgaccggcgaagacgtgctcatcgcgctgagcgacgtgagcaagagctatcggcgcggcgcgcagatcgttccggtcctttccaaactcacattcgacatccgtcgcaaggagttcctcgcgctgatgggcccgtccgggtcgggcaagtccaccctgctcaacctgattgccggcatcgacagtccggatcatggctcgatcacggtggctggcgaggacatcacgctcctcccggaagccgacctcgctgactggcgcgcggcgaatgtgggcttcatcttccagttctataacctgatgcctgtgctcacggcgctggagaacgtggaattgcctctcacgctcacgggcctcaagcgccgcgaacgccgagaccgcgcgcaactcgcgctcagtctcgtaggcttgagcgatcgcgtcaaacatctgccttcggagctctcgggcgggcagcagcagcgcgtggcgatcgcgcgggcgatcgtcaccgacccgacgatgctggtggccgatgagccgacgggcgacctcgaccggcagtccgcggaggaggtgctcgagatcatgcagcggttgaaccgcgacatgggcaagacgatcgtgatggtgacccatgatcgccgcgcggcggcgcgtgcgaagcgcatcatgcatctggagaagggcgatctttcgtatctggtggagcagcgccttgagtga

SEQ ID NO: 2956 - DNA, 1326 bp, BradyrhizobiumColbertium
gtgcctggcttaccgcttccgaaacgagatattttcttcaagtttgcgctgcattgcccggaaattcatgacgagactatgaatctgcacacccccccaagcgatggcctccccgccgcgtccgatctatcggcgcttgcgatcgaccgtagcgccgactctcgccgtcgcagacaactgcgccgcatcctggtccgggtccttgtggtcgccatgcttgtcggcatcggagtcgcaacgtggatgtggcgccggcacacgcagatcgcggtcgagacggcggccgtctactccgtctatccctcacaggcgctgacactgttgaacgcgactggctacgtcgttgcgcaacgcaaggcgtccgtcgcctcgaaggcgacaggccgcctggaatggttgggtgtactcgaaggcagcaaggtgcacgagggcgaagtgatcgcccggctcgagagcagcgatacccaggcgatgcgcgaccaggccgccgccaacgtgcaggttgcctatgccaacctcgcccaggggcaggcggagctcacgcaagcggagatcgcgttcaagcgctccgcggccctcggcgagaagaacatcataagcgattcgatgcgcgaaagcgctgaggcacgcctcgccaaggcgcgagcagcgtttgccgggtacgaggccgccatcgccgctgcacaggccaatctccgcgcgtccgaagttgccgtcggccagaccctgatccgggcgcctttcgacggcgtcgtgctcacgcggcacgccaacgtcggtgatacgatcacaccgttctcgcaggcggtcgacaccaagggcgcggtggtcaccatcgccgacatggactcgcttgaagtggaagccgacgtcgcggagtcgtcgtacctgagcatccacgtggggcaagcggtggagatccagctggacgcgatccccggcgagcgtttcgagggtgtggttaaccggatggtaccgacggtggatcgcgccaaggcgtctaccctcgtgaaaatccggttcgtgcaccgcgacgcgcggatgcttccggacatgagcgccaaggtggccttcctcgagcgtgaagtagccgaatcagagcgcaagccggttcttgcagtgccgatggcggccgtcttcgaggtgggcggacaacagcacctttatgtcatcgagaatggcaaggctcgcctgcggcgcgtggatctcggcgcgaaggtgggcgaccagatcgaggtacgcgatctcaaagccggcacgcgcgtggtggtccgacctctggaagatcttgttgacgggcacgcagtcaagcaggccacgaagtga

SEQ ID NO: 2957 - DNA, 135 bp, BradyrhizobiumColbertium
atgcgaccgttccgggcctctgcgctggtcggcatcaaagctgccgtggcaatgacggcaacggtcgccagcgcgctcaattttcgtaaagttcgcatgattgacttccttccgatcgtgaatgccggacgatag

SEQ ID NO: 2958 - DNA, 687 bp, BradyrhizobiumColbertium
atgcaagcacaggacgtgatgatcgcgccggtggtgactgtgggcgcaaatgcaacggttcgccaagtcgccaggatcctgctcgagcgccgcatcagcgcggtgccggtcgtcgattccgacaacaacatcctcggaatcgtctccgaaggcgatctgctgcaccgaaccgaatccggcaccgagcgctcctatggctggtggcttcagattttgaccggcgacgccgagatggcggctgactacgtcaaatcgcattcggccaaggtcacggacatcatgacacgcgatgtcgtgactgcggctcccgaaacgccgctgagcgacatcgccatgctgctcgaaagacgtcagatcaaacgcgtgccgatcgtcaacaagcaaggccagctcgtcgggatcgtcagccggaccaacctgctgcaggccgtcgcgagcgccaagccgaagctggaaatttcgcttcccgacgccaccatcagaaagagattcctggaggagatcaagaagcaaccttgggcacacacattcaacctgaacgcgaccgtccagaacggcatcatcgacatctggggcagcgcgccatcggccgcggaacgcaaggccatccgggtcgcggcagaggccatcccaggcgtcgtgctggtgaatgatcacctgatcgagaccccggccttcgtctactga

SEQ ID NO: 2959 - DNA, 822 bp, BradyrhizobiumColbertium
atgtctctagccagcgtcatggtctacgtcgatcccgagcagcaggatgaaggccagatcgccgtcgccgaggccgtcgcaaacggcttcggggccgccttgcttggcgtctcggccatcgccacggatcccccgttcgtcgccgaaggcgtgatcatcgaacagacgacggccgacgatctcgagcgcatgcgcgcaacgctgtcggccaaggaggcgtggttcaggcgtatcgttcggctgccgagcgacaaggtggaatggcgctggacgatcgggtttccgaccgagttcctggtcgagcagtccagggcggcggacctcgtcgtggtacggcgcagccggccgaagaccaaatcctctcattatctcgatgcgcccggagccatgttgcggctgggccgtcccatcctttcggtgccggacggcgtcacccgattgtcaggcgaccggatcgtggtcggctggaaggattcccgggaggcgcgcttggccgtgcgggacgcactgccgttgctgacccgggcttcagaggtcacgatcaccgaagtctgcacctccagcgaacaagatgcggcgcgagaccggttgcgggacgtggccggatatctcgggcgtcacggcgtgagctgccggcacgaggtgcgcgtacatacggcggagccggacgcgggctacctcgttcggctcgctgccgacgtcggcgccgacctcatcgtgaccgggggatatggacacagccggttgggagagtgggttttcggcggcatgacgcaaagcctcctgcaggacgctccggtctgcctgttgatgtcgcactga

SEQ ID NO: 2960 - DNA, 2421 bp, BradyrhizobiumColbertium
atggacgcaccgagctacattcgctggttcagggacatccgtcttgccgacgtgccgctggtcggaggcaagaccgcatccctgggcgaattatattcggtactgacgccgcagggcgtcaaggtcccgaacggctttgcgctgacggccgcggcattccgagacgccctgaccgaagccggtgcgtgggacaagctgggccctctgctcgccggcatcgacaagcggcggatcgccgatcttgcccgacgcgccgcggccgcgcgcgcgatcgtctatgccgctaccgaccgggatgatctccgccagcaggtcgcacaggcgtaccggcagctggagcaggaatatggtcgcaacgttgcggtggcggtccgtagctcggccacggccgaagacctgccgaccgcgagctttgccggacagcacgacagcttcctcaacatccgcggcgcggacgggctgatggaggcctgccgccgctgcttcgcttcgctgtttacggatcgcgcgatctcctatcggatcgacaagggtttcgatcacttcaaggtcgcgctgtctgtcgcggtcatgaagatggttcgttcggaccttgcggcaagcggcgtcaccttcacactcgacaccgagaccgggtttcgcgacgtggtgttcgtgaccggcgtctacggactgggcgagaacatcgtgcagggcgctgtcgaccccgacgaattctacgttcacaagccgaccttcaatgccggcttccgctcggttctgtcgcgccgcctgggatccaaggccaagcggatggtctacggtcgcgggcgcaacgcaacccggaacgtggcaacggcggcgcgcgagcgccagcaattctgcatcaatgacaacgaggtcctgacgctggccgagtgcgcgctgctggtcgagaagcactactcgcaaaaggccggcaagccgaccccaatggacgtcgaatgggccaaggacggcaaggacggttcactgtacatcatccaggccaggcccgagacggtcgcctcccgccgaacgccggaggcgctcgagagctatgtcctgaaagcgcgcgggacagcactggcggaaggccgcgctgtcggagagaagatcgcggcaggacgcatccggctgatcagcaacgagcgggatctccgtaaattccggcccggcgaggtgctggtcgcgacggcgacgagcccggactgggagcccgtcatgaagcttgccgccgcgatcgtgaccgatcatggcggccggacctgccatgccgcgatcatcgcgcgcgagctcggcgtgcccgccgtggtcggaaccggcaatttcagcaagaaagcgaagacgggcacggcggtgacggtgtcctgcgcggaaggcgatatcggccacgtcttcgaaggtacactgccctacgaggtcgaacggaccgcgaccgaaagtgtgcggaagccgcgcaccgaaatcatggtgaacctcggcaatcccgagatcgcgttcaagagcgcatccctgccgagcgatggcgttggccttgcccgcatggaattcatcatcaaccagcatatcgggatccatccgatggcgctcgcctgccccggcaaggtgacctcagcgcgggaccgacggaagatcaagctgttgaccgcgcgccacaagaagccgtccgagttcttcgtcgagcggctgtcggaaggcgtcggcaccatcgccgcggcgttctatccccggccggtgatcgtgcgcctatccgatttcaagaccaatgaatatgcgaacctgctcggcggggccgatttcgagcctcgcgaggagaccccgatgctcggcttcaggggcgccgcccgctacgcccaccccgcctatgcgcaaggcttcgcgctggaatgcgccgccatgaagcgggtgcgcgaggcgatgggcctgaccaatctcaagatcatgattccgttctgccggcgtgtcgaagaagcgcgcaaggtcattgcggccatggcggatcacggcctgaaacgaggcgacggcggccttgaaatctacatgatgtgcgagatcccgaacaacgtcatcctgatcgaccagttcgcgcaattgttcgacggattctccatcggctccaacgatctcacccagctgacgctcggcgtcgacagggattccgagatcgtcgccttcgatttcgacgagcgcgatcccggcatgctgcaaatgctgtcgatggccgtgcttggcgccaagcgcaaccgccgccacgtcggcatctgtggcgaggcccccgcgaactacccggagatcgccaagtatctggctgagctcgggatcgactcgatcagcgtgaatccgtcgagcgtgttgcggaccatcgagaccgtcggcgccgcggagagcgacagcggcggacggcggcgggctgcgggctga

SEQ ID NO: 2961 - DNA, 1128 bp, BradyrhizobiumColbertium
atggaacccgaccagagcgcctcttcactggagaggtcacgattttggcagagcgcctccggcttctggcgtggagtaccggcatggcgcgtctgggcgctgtgcgcgctcctggtgagcgtcgtcgtcctccagctctatgtgcaatttcgtttcaactactggaatcgcgacttcttcgatgcgctggagagccgcgatcccgcacggctgagaggccaggcgctcctgctcgtcccattgtgcctcggcagcgtcgcgctcgccgtcacctcggtctggggccgtatgaccgtgcaaagaaagtggcgggaatggctgaccggcaaggtgatcgactattgggtcgaggatgaccgttatgcccgcctcgcggccgtgcagagcgagcagcagattcccgaataccggattgccgaggacgtcaggatcgcaacggatgcgccgatcgacttggcgctcgggctggtctccgcgctgctcagcgccgtcatcttcattcagattctctggaccgtgggtggcgacatcgcgctgcctgtgggaagtcattccgtccggattccgggctacctcgtcatcggtgtggcgctctattccggcatcgtgacgaccgcgatgacgctggtcggggcgcccctgacccggctggtccagatcaagaaccaggccgaggcggagttgatcacggcggcccacgagctgcgcgacatcggggagggggccgcgccgcgagaccgacggtcggaagtctgccgcgacgttcgcagtgcgctcagggccaccatcgatcagtggcgccgtctgtgctggcaactgatgcggacgacgatcgtgtcacatggaaacacgcttttggcgccgatcatcggcctggtgctttgcgcgccgaaatttctttccggagccatgacgctgggggagctcacgcaagccgccgcggctttcacgctggtgcaggcctcgttcaactgggttgtcgacaattacgcgcgtatcgccgattggaggtcgtcgctggaacgggtcggcggtcttctgctttcgctcgaccgcctcaaccgggaaacgccgccgcagcaggcagagtccccgatgcttccgactggatcggtcaaattgccgtag

SEQ ID NO: 2962 - DNA, 942 bp, BradyrhizobiumColbertium
atgaccgagatcctcacgatcacgcccaatccggccgtcgacgtgtcgacgtcggtggacaggatcatccccgtcgccaagctgcgcggcatcgggcagcgccgcgaccccggcggcggcggcatcaacgttgcgcgcgtggtcaagcgcctcggcggcaatgccaccgcgctctatccggtgggtggcctcacaggagacctgctgcgacaattgctcgacaaggagggcatcgaaagcctgacctttccgatcgcgggcgaaacccgacaagacttcttcgttcgcgagatcagcacgtcccagccctatcgcttcatcctgcctggaccgcctcttgccgagaatgaatggcagacctgcctcgccatgctgtcggcgcttcaaccgtttcccagcttcgtggttgccagcggaagcctgccggcgggggtgcccgacgatttctacgcgcgtgtcgcaaggatcgtgaaacggcgcgaggccaagatgatcctggatacctccggtccggcccttgttgccgcggtggccgagggcatcgagctggtcaagccgaacctgcgagagatgcgcgaactggtcggtcacgagccatccgacgccgccgaatgggaagctgctgcgaagacgttggtgcgcagcggcaaagcggcgatcgtcgccctgacaatgggacatctcggcgccgccctggtgacgagccggcaggtgctgcgcgcaaaacctcttgcgatcacgcccgtcggcgctgttggtgcaggtgacagttttctgggcgcgctggtctatgggctggcatctggagccggcctcgagcgctgctttcggcaggccgtcgccgccggcgccgcggccctgctcaatccaggcaccgaactctgccggcccgacgacgtcaagcgtctcgccgaacaagtcattctttctacggcaatttga

SEQ ID NO: 2963 - DNA, 1395 bp, BradyrhizobiumColbertium
atgccggcagcggattcgtttctgtggggcgtctcgacctcgagcttccagatcgagggcgcctctcacctggatggacgcggcgacagcatttgggacagctattgccggcaacagggtcgcatcaagaacggcgacaccggcgacgtcgcatgcgatcattatcaccgctaccctgaagacatcgcgctgatgcgcgatatcggcgtcggcgcttaccgcttctcgatctcatggccgcgcgttctgccccgcggccgcggggctgcgaaccaggcgggtctcgatttctacgacggcctggtcgatgctcttctggcggccggcatagaaccctgggcctgtctctatcactgggatctgccgcaggcgttgcaggatctcggcggctggcagaaccgggacatcgcgggatggttcgccgattatgctgcgttgttggcccgacgccttggcgaccgggtcaagcggttcgccaccttcaatgaaccatgcgtattcacgttgttcggatatggtctcggctggaacgcacccggcatcgccgacaggggcgctttgcaccaagccattcaccacgtcaacctgagccacggccgtgccatcgacgtgctccgccagtcggtggcgaacgcatcgctcggcgccattcacaaccgccagccctgttatcccgccaccacgcgggaggaggatgttgcggcgacgtggcgcttcgcgccgtactggaacgacgcatttccgtatccgcagcaccttgcccattaccccctggagcttgccgaggcgatcgagccctatatcaagccgggcgacatggctcagatcgcaaggccggtcgactggttcgggctcaaccactattcgccgcactacatcagggccgatgccaatttgatcggcgccggcttcggcgcaccgcccgtcgaggtgcggcgaaccgctatcggctggcccatcgtacccgacgcgttccgcgacacgctgctggacatccaccaccgcttccgtttgccgatctatgtgctggagaacggcacggccgcggacgacaagcttgacgaggccggccgcgttcaggaccctgcacgaattgcctatcttgatgcctatacaagggcgatgcaggaggcgatccgggccggagccgacgtcaaaggctatttcgtctggtccctgctcgacaacttcgagtggacatcgggttattcgcagcggttcggtctggttcatgtcgattttgccacgcagaagcggacactgaaggcgtcggcgcactggtatgccgatctcatccggacggcgcgaacatcgcggattgctgcagaccgtgcggagcgtgacaccatgaccgaacgagccggggcggcggccgccaccgcggtctccgattga

SEQ ID NO: 2964 - DNA, 702 bp, BradyrhizobiumColbertium
atgatggcgatctttgcggcggtcgcggcgctgggcgcaggagcgccggctgcaagggcagccgacgtctctgctgcgctctccgatctcatgacccgccttcaactgcaacatgccaagctctggtttgcaggcaagttcagcaactggagcctggcgagctacgaaatccaacatatcgaaggcaatctcgcagcctccggcaagctcttgcccgatccatcacgcctcggtcccgccaaggatcatctgcaagccgtaagcttggcgatccagcaaaaggacgtgcctgcattcaccaaagcctattcggacctgacgaacgaatgcaacagctgccatcgggccagcggctacgcctcgatcacaatccaagtcccggttcgtccgcctgtcaccaaccaattgttcgtcgatcaggtcgccgaaggccgggcgctggcccatgcgtcctgcggaacatgccatgtcgtggaggatgccgcgaaggaatcgccggcgttccgcccgccggccgcgagcttgctggcgatcgtcaatcgcccctcgttctccgccgaaggcatgaggctgttcctcatttccggtcaccgcaggctcggacctgaacaggccatgccaaacccccgcctcgcagattaccaaatcgacgagatcgtcgcgtacctggaagccttgagagccggcctgccgccgcgctag

SEQ ID NO: 2965 - DNA, 759 bp, BradyrhizobiumColbertium
atgcgcgcgcatcagatcatgtcccgccgggtgatagccattcggcccgaggcctcgatcgccgacgccatcaaggtcatgctcactcaccacatcagtggattgccggtcacggattcggcaggcaatctcgtcggcatcatttgcgagagcgacttcctcagacgggccgagctcgaaacggagcacactcgcaaccggctgctgacggttctgctcggagcagaccgggttgcgcgcgagttcgtcaaggagcatgggcgcaaagtcgagcaagtgatgacgcgtgatccggcgacggcaaaggaggacactccgctcgaggagattgccgatctgatggagcgccggaacctgaatcatgtcccggtcatgcgtgatgagcgcattgtcggcatcatcacccggtccgacttcctgtccgcaatcgccggcccgctgaccggcgcacccggctattcggaggacgacagccagattcggcgctcggtccttgcggccatggccgggatgccttggcagcccgtcggcctgaacgtgagcgtgagggatggcaaggtgacgctgcgcggcgtcgtcaagggcgacaacccccgccgggccgcaatcgtcgcatgtgagaacgtttcaggcgtccgcggcgtcgatgatcgcctgtgccttcagtcggacagcccggccccggaggacgattacggcggtggggacttcgtctcgctgcaggcagaaccgtccacggtcgatgacgaaccattgtga

SEQ ID NO: 2966 - DNA, 1557 bp, BradyrhizobiumColbertium
atgattcgattgcttgcgatctccacggcgttggtactggcaacgacctcgcttgctgccgcccaacaaccggcggctcaagctcctgcgcagcaagctcgtcccgcgcaaccgccgatcctagcgcggcccaacatcatcatgatcatggccgacgacgtcggcatcacgaatgtcggcgcctattcgcatggcatgatggttccgacacccaacatcgaccggatcgctaaggagggcgtgctcttcacggatcactatgccgagccaagttgcacgcctggccgtgccgcgttcatcacgggccagatgccgatccgcaccggcctgacgacggtcagttcgcccggctcaatgatcgggatcgacgagcgcgatccgacgctcgccgaagtgctcaaaccgctgggctatcgcacaggccagttcggaaagaaccatctcggcgatcgcaacgagcacctgccgaccgtccgcggcttcgaccagttctttggcaatctctatcacctcaacacggaggacgagcccgaggacctggattggccaaaggacaaggcattcaacgacaagtaccggccgcgcggtgtcctcgactgcgttgcgatgccgcaagacaatccggcgccagccgacccgcgcttcggctcatggggccggcaacgctgcaccgatacggggccgctgacccgcaaacgcatggagacggtcgacgacgagttcctttcgcggaccctggcattcatggatgaagcagtaaaagcgcgcgagccatttttcgtctggcatgcaccctcgcgcatgcacatctacacaaatttgcggcctgaaagtcggctgcttgcgcagcccttctcgtcaggtgacgacatctacggctccggcatgatcgagctcgaccagcaggtgggtgcgatccttaagaagctggacgatctcggccttcgcgaaaataccatcgtgatgttcaccagcgacaatggcgcaatggcggcctggtggccggacggcggcacgacgccattccgctccgagaaagcgaccacttgggaaggcggcgtgcgcgtgccgatgctgatccgctggccagccgccatcaaaccggcttcggtctcgaacggtattcagaatcacatggatctttttaccacgctttcacgtgcagctggcgtcgtagacgttcgcaaggacctcctcgaaagtcataaggtaaagatcgacggcatcgacaatcttgcccattggcgcggtgaggcgccttcgaaccgtcaggtccacatcatgtacaacgaaaaggagatgaccgctctgcgcttcgggccctggaaaacccatttcaagacgcgcaacggcttcttcgatcccttcgtcgaaagcgcgctggtcttcaacctgcgcatggacccgttcgagcagcgcgacgggcatcgctcgaacttgttggcgatgcgaaaggcgtaccttggcaacatgatccgcgacattctagctgagcactaccaatcaatggagcagttcccgcctcgccaggaagggggcaccctcagaccacggtag

SEQ ID NO: 2967 - DNA, 813 bp, BradyrhizobiumColbertium
atggggtcggacaaacacttccctgaagagagaccgcagcgggtcgtcagcgttgacggcttctggatcgaccgccacgaagtgaccaacgcacaattcgcggcatttgttgcggcgaccggctacattacggtcgccgagcgcccggtcgatcccgcgctttatccgagcgcgcccccacatctcctgttgcccggcggcatggtcttccatgcgccagccgcgctaggcagcgccgaggatttccggcagtggtggcgctacacgcctggcgcgaactggcagcaccctcaagggcctggctcgtcgatcgacgaccgcatgaatcacccggtggttcaggtcacccacgaagacgcagcagcatatgcgcgctgggcggggcgcgacctgccgacggaggcggagtgggaatttgccgcgcgcggcgggctggatggcgccgaatatgtctggggtgacgagaagaccccttcaggtgtctggcaggcgaatgtttggcaaggacgttttccggtatccaatcaactgctggacggattcgagggaacagctccggtcggctgtttcgaggtcaatggttacggcctcttcgacatggctggaaatgtgtgggagctaaccgctgacgactatcgcgacgcgcggggcttccagcgtggcatgaaggtcgtcaaaggcggctcgcacttgtgcgccgacaactactgtttccggtaccgcccgagcgcgcgtcagccagccgccctcgactccggaagttcgcacataggcttcagaacagttctgcgaaaagggggagaccacacatga

SEQ ID NO: 2968 - DNA, 1065 bp, BradyrhizobiumColbertium
gtgctggtcgagaaagcctatggcggcgtccgaacgcgcaatcccgccgatcagctgaacttcgagatttctgccggtcagcagccctacggaatcggcacgggaatgatcgtctggcaaggcgcgggaaacggcttcgagcgcggcgccgtgagcctgctgccgcgcctttcgtgggaaaatacagcgatcgcgcgcgttaccttgggcggctggaaggcagaggccttccatctcgatcctaacgaactgaagtcggccgacacggagacacgtctggtcggcggcgtgctcgaatatgcctggggcgctggctcccgcgtcggcggcgcctatgtcaaagtgcagaactcgacggccccttaccccatcccgacatttccattgatcatccccaacgggcgagacggcaccgagacgtggtacggctatggccggattgaggggacggccatcggcctgccggcggcctggatccgcggtgaacttgccttacagcgcaacgaccggatcgatatgcgcgccaacgcctggtacggcgaaatcggcaatcgttttgcaagcctgccgatgacaccggccttgtcctatggttatgcctcgttctccggcgataacccgtcgacgcggacgtatgagcggttcgacccgctgttctatgggaacggtctcgagaattggtggtttggcgcatcgagcgcctacacgtttctgaactcgaacgtcaactaccatcgcgttacgctgaacctcgttgcgacccagcaggacttcctgaaatttcagttcatccacactcgcgccaatgaattgaattcgccgcttcagttcgggcaaggcgcgcggctcaacgtggtcaacggaaacctcctgcttaccaccggcgtggcgcaccacgatctcgccgacgagatctatgccgagtggacacatgtttgcacgccacagatcgccacgacaatgtggggctcggtgggcgttcccggtcgcggcatcacgtctcttcccggcatcaactccgagacctggctttccgccggtttcattgtctcgttgaagtactga

SEQ ID NO: 2969 - DNA, 159 bp, BradyrhizobiumColbertium
atgaccaacgaagcaatcaaggcgctgatggtcttcgcaatgtacggcatcctcgaactcgcactgtacttttcggcgacgatcaagccttccaagcaagccgcccgtgcgacagccggccgtgctgcgaatcccgatttcaccgggtcagaagactag

SEQ ID NO: 2970 - DNA, 195 bp, BradyrhizobiumColbertium
atgaaccactcgatctacactgcggagaaggcaacgcatctgaaagtggtcgctgccggattgctggccggaatcgccatcgtcgcggccacgctgtcggtccgctttgccgaatccgaattgagcccgctgagcgcaagacatgttcatcaggctcacctcgtgcagacaccgaccgaaatggcccaacgttag

SEQ ID NO: 2971 - DNA, 189 bp, BradyrhizobiumColbertium
gtggccgccatgctcggatggttcgttcgtattctcttcgccatagcagcgccgattacggcgctgttcgcggcacgcgacgcgctcaacttcggcttgatccagaccatcgtgaccatgttgctcgtgactgccctggtcgggctgattgccgcctttaccgggcgggaccgacaggcaccgcgctag

SEQ ID NO: 2972 - DNA, 444 bp, BradyrhizobiumColbertium
atgacgaagcaggtcgtctcggtgcaggaagacaccgatctcgccgagctggtcgacctgatggaagagacagacatcaagcgcgtcccggtcctgcggggcaaggcgcccgtcgggatcgtcaccaggacgaatttgctgcaagccgtggcgagcctcctgcacgaaattcccgatccgaccgccgatgatgagcacgttcgcgagcgcatcacgcgcgcagtcaaggccacggactggcgtccgatcggctttgaggtgaatgtccgcaacggcgtcgtgcatctgcacggcctcgtcaccaccgacgaggcacgtcaggccgccatcgtcgccgccgagaataccgccggcgtcaaggaggttcacgaccatctctgcttcgtcgatacctacaccgggttgtatgtggaatcgcccgaagacatgaaggccgctggctga

SEQ ID NO: 2973 - DNA, 234 bp, BradyrhizobiumColbertium
atgcgcgcgcatcacatcatgaccaaggacctggttgccgtaacgccgcatacgacgatcgaagaggcggccaagatcatgctccgaatgcacatcagcggcctgcccgtcgtcgacgacgccggaaacctcgtcggcgtggtctcggagagcgacttcctccgccgcagcgagatcggcaccggccgcaggcacgccgcctggctgaagttcttcatgggaccgggacgctag

SEQ ID NO: 2974 - DNA, 522 bp, BradyrhizobiumColbertium
atggcaaccgagaccaagttacctgtcaccaagacgtccaccgcgccggcagcaaccggagaggcatggcagccgttccaggcgctgagaaatgaaatcgaccagattttcgacgatttcggcaacggcttctggaagcggccgttccgctcgctcgcccgactggaacgcgatctgtccaagaatttcaatgcgccggccgtcgacgtcgcggagagcgagaaggcctacgagatcacggctgagcttccgggcctcgacgagaagaacatcgaagtcaagctcgccaatggcggtctcaccatcaagggcgagaagaaggaagagaccgaagagaagaagaaggactattacgtctccgagcgccgttacggctccttcgagcgctatttcgcgcttccggacggcgtcaattccgacaagatcgaggcgacgttcaagaacggcgtgctcaaggtcgtccttcccaagaccgaagaagctcagaagccggccaagaccatcaacgtgaaggccgcctga

SEQ ID NO: 2975 - DNA, 219 bp, BradyrhizobiumColbertium
atgccctatcgctccaacaacgatctccccgcgggtgtgcggcaccacttgccgcctcatgctctcgatatctatcgcgaagcattcaaccacgcctttgcctcgcatgccggggatctccggcaagaggagattgcgcaccgcacggcttgggccgcggtgaagcgctcctacgtgaagctcggcgatgaatgggtaccaaggagaccaggctggtag

SEQ ID NO: 2976 - DNA, 1623 bp, BradyrhizobiumColbertium
atggcgcacaaacaggtcctgtttcactcggcagctcgtgagaaagtcttgcgcggcgcgtcacttctggccgacgccgtgcgcgtcacgctcgggccgaagtcgaaatccgtcctgatccagaagtcgtggggcgcaccgatcgtctgcaacgacggcgtcaccatcgccaaggaattcgatctcaaggacgccgaagaaaacctgggcgcgcaggtgctgcggcaggccgcagagaagaccggcgacgtcgtcggcgacggcaccagcacgtcgaccatcctggcccaggcgatcctttcggacggcgtccgcaacgtcgtcgcaggcgcaagcgcgatcgacctcaaacgcggcctcgatcgtggcacacaggctgccatcgccgccttgcacgcgatggcgaagccggtgcagaccagggcggagaaggttcaggtcgccacgatctcggcacacaacgacatcgcaatcggtgagctggtggcggatgcgatcgagaaagtcggcggcgacggcgtgatctcggtggaggaatccaagaccaccgagaccctgctggacgtggtcgaaggcatgaaattcgaccgcggcttcctgtcgccctatttcgtcacggatgccgaccgcatggaagccgtgttgcaggatccctacgtgctgctttgcgatcacaagatcggtgccctgcgcgatctcgttcccctgctcgagcaagtcgccaagagcggccgctcgcttctgatcatcgccgaggacatcgagggcgaagcgctggcgactctcatcgtcaatcagcttcgcggcgtgctcaaggcttgcgcggtcaaggcgcctggcttcggcgacaggcgcaaggccatgctggaggacatcgccatcctcaccggggcgcaggtgatctcggcggagatcggcctcaaactggaaagcgccaccttgcagcaactcggtcgcgccgcgcgcgtcgtcgccgacaaggagaataccaccctgatcgggagcggcggcgatcgcgcccgcatcgaggcgcggctcgcgcaaatccgtgtcgagatcgagaagacgacgagcgattacgaccgcgagaagctcgaagagcgcctcgccaagctgtcgggcggcgttgccgtgatccgggtgggagcaccgaccgaagccgagatgaaggccaagaaggaagcgctcgacgatgcgatcagctcgacgaaggctgcggtggccgagggcatcgtgccgggcggcggtctcgccctgctccgcacggtcgcagcggtagccaaggaagaggccgcctgcgaaggtgacgaacgaaccggcgtgcagatcctgaaacgggcacttgaggcgcccgcgcgccaaatcgccgaaaattccgcgaccgatggtggcgtcgtggttgcacggatgctcggcagcgagggaagtttcggcttcgacgccgcccggaaggtctatgtcgatctcgtggaagccggcatcgtcgacccggtgaaggtggtacggaccgcgctcgaaaacgccgtgtccgtcgcaagcgtgcttcttctgacggaagccacaatgacggagatcccggaaccgaaacgcgatcggttgcccgagcccgacatggcgatgtaa

SEQ ID NO: 2977 - DNA, 1275 bp, BradyrhizobiumColbertium
atggtcgagcagacactatctcttccgaagcaggagcataaggacaggccctgggtcgcatccgtgtggtcaggaatcctcgcgcgcaaatggcttgtgctcgcggttctcgttctgctcgctctcggcgcctggcagggcgtccgcgtcctgttcgggccttccgtcgtggtcgaccaggtcgtgcgcggtcgtttggtcgaaaccgtggtggcgagcgggcatgtcgagacgccgtaccgggtcgagatcggcagccagattaccggcactgtcgcggaggtgctggtgcaggagggcgagaaggtcaccaaggggcagtcgctgatctcgctggaagcacgcgaactgaaagcggccgtgatccaggcgcagggggcggtagcccaggccgaagcccggatcaggcagctcgaagagctgacgctgccgtccgcaaaggaggcgctgacgcaggcgcaagcgacgctcctcaacgcccagcagacctatgaccgcacggcgcagctcgaacgcaatggctacgcgaccaaggctgcgctggatgatgcgcagaagactctcgatgtcgctcgcgccgtgaagcgcgcggcggaattccaggtctataccgccagtcccggcggcagcgactatgtcatggcgcagacccagctcaaccaggcgcgtgccaacctggacacggcggaatcccgcctgggctatgcgaccatcgcggctcctcgggacggcgttctcatcacccgcagcgtcgagcgaggcaccgtggcgcagccgggcaaggcgctcttggttcttgcgccttcgggtgacctgcaactggtgctgcagatcgacgagcgcaatctcggaaagctcgcactcgggcagagcgcgctggcatccgcggatgcttatccggaccggcggttcgccgccaagctctcctacatccatccgggcatcgacatttcccgcgcgacggtccaggtgaagctgacggtggcggatccgccggaagaactgcgtcaggacatgaccgtctcggtcgatatcgaggttgccgcgaaggacgatgcgaaggtgcttcccgtccgctcggttcatgacatcctctccggacagccctgggttctgaccatcgagggtggccgggcggtcaagcgcccggtgaagcttggcttgcgcggcaacagcaacatcgagatcgctgcgggacttgaagccggtgacgttgccattccgcaaagctccggcatggtgcccggacagcgggtgcgggccgtcctgccatga

SEQ ID NO: 2978 - DNA, 1227 bp, BradyrhizobiumColbertium
atgaatcgctggctgccattcgaatggatcgccgcggtgcgcttcctgcgcgaagggagactgcagaccatcttcatcattggcggtatttcgatcggcgtcggtgtcatcgtcttcatgtcggcgatgctcgcgggcatggaggcaaatttcatcaggcgcgtgctgacgtcacagccgcagatccagctcctcacgccggatcaggtcgcgcgtcccctgcgcaacgccgccggcgtgatcgaggatgcggtagtgcagcggccgagccagcgggtgatctcgatcgaccagtggccgaaaatccgagcccagatgctcgccatgccggaaatcaccgcggtctcacccaccatcacgggatccgcgctggccatccgcggcgacgccagccgggcggtcacgttgaccggaatcgagccggacacgtatttcaacatcgtcaaggtgccggactacatagtcgccggcagcgcgcggctgaccagcgaggacatcatcatcggcaccgagctcgccaagaacctcggcgccaccgtgggcgacaagctgaatcttcaggcggcaagctctgccaaccgggtgctgacgatctccgggctggtcgatttcggcaacaagagcgcaaatcagcgggtcgccttcatcgcattgcggaccggacaatctctgctcggcatgatcgggggcgtcaccaccatcgacctgacgatcaaggacatctatgcggccgaaaccatcgctaggcggatccaggccgcgacggcagtagaggccgacagctggattgccaccaacgcgcagttcttcaccgccgtccaggcgcagatctacaccaacaccttgatccgtgtgtttgtcggcctgtccgtagccttcggcatcgcagccgtgctcatcgtgtcggtgatccagcgctccaaggagatcggcatcctcagggcgatgggaacctcgcgcggccagatcctgcgggtgttcctgctccagggcgggctgctcggctttgtcggctccctgttcggcgcggcgatgggcgctcttgcgctgatctattggcacgccgttgcccgccaggctgatggaagcgagttctttccgctcatcctggagcgacgtctcttcatctatacggcggtgctcgccacggtcaccgggctgttggctgcgacggcgccggcgctgcgcgccgcgaagctcgatccggtggtggcgatccgtggctga

SEQ ID NO: 2979 - DNA, 687 bp, BradyrhizobiumColbertium
gtggctgacgcgatcctgaagctcgagggcgtccggaaggcctataatgtgggcctgccaaccgagaccgaggtgttgcacggcatcgacctcgagctcgatcatggcgagttcctggctctgatcggcccgtccggctctggcaagagcacgctgctgaacatcgtcggcctgctcgatcggccgacgtccggccggctcctcatcaaagggcgggatacggcgttgctgggtgacgacgaactcacgcacctgcggggacataccatcggcttcgtgtttcagcatcatttgctgatctcggccttcaccgcccgagagaacatcatgatgccgatgcttgccgatcgcggatttcccagcgcggagatcgcagcccgggccgatcatctccttgccgaggtcgggctggagaaattcggagacaatctcgccaacaacatgtccggtggccagcagcagcgggtggccgtggcgagggccctagccatgaatccggatctcgtgctcgcggacgagccgaccggcaacctcgatacgaagtcggccgatgccgtcttcgagctgatgcggcgggtgaatcgggagagcggcacgagcttcctgctcgtcacccacaatctcgacctggcgcgccggtgcgaccgcatcatccaggtggtcgacggccggattgcgcagcattga

SEQ ID NO: 2980 - DNA, 153 bp, BradyrhizobiumColbertium
atgggcaacggcgccttctgcttgattcaggtcaacaccacgaccatcacgctatcgtgcaagcatccgcaattgcgcgaggagctgaggcgcatctcgacggttgcgccggccctcaatgctgcgcaatccggccgtcgaccacctggatga

SEQ ID NO: 2981 - DNA, 1845 bp, BradyrhizobiumColbertium
gtggagtccgatcaaggttcacgaaagcaagccatgttcatggccgctattctggcaggcggcatgctgctcgccatgctgcagttcggcctgtcgacgtacagctcggttgaaaccattccctacagccagttcgagcagctgctcgcccaggacaggatcgccgaagtcacggtcggctcggatacaattcaggggaagctgaaggagccgcttccgagcggaaagtccgcattcgtgaccgcgcgggtcgacatggctttggccgacaagctcgcaatcaaaggcgtgagcgtgaccggcattcccggcgccggcgcgctgcagaccttgctgtcctggatctttcccgtcatcgccttctttctgatctggttctggatcggccgccgcatgggcggcggccagggcctgggcgggctgatggcgatcggcaagtcccgcgcaaaggtttatgtcgagaaggacgtcaaggtcaccttcgcggacgtcgccggagtggatgaggcgaagttcgagctccaggaggttgtttcgttcctcaaggaccccacgagctacggtcgattgggagcgcatgtgcccaagggaatattgctggtcggaccgccgggcacgggaaagaccctgctggcccgcgccgtggccggagaggcgggcgttccgttcttctcgatctcgggctcggagttcgtcgagatgttcgtcggcgtcggcgcagcgcgcgtgcgcgatctgttcgagcaggcccgcaaggcggcaccgtgcatcatcttcgtcgacgagctcgacgcgctcggccgcagtcgggggccgctgtcattcggaggttacgacgagaaggagcagacgctcaatcagctgctgtccgagcttgacggcttcgaccccagcgccggcgtcatcctgctggcggccaccaaccgcccggagatcctggatcccgcactgctgagggcgggcaggttcgaccggcaggttctggttgaccggccggacaagaacggtcgcgttgccattctcaaggttcacgtccgcaagattcagatgggcaaggacgtcgacctcgacaaggtggcgggactcacgaccggattcaccggcgccgacctcgcaaacctcatcaacgaagccgcgattgcggcgaccagacggagcggagaggaggtcacgttcgacgatttcgtcactgccatcgagcggatcgtggccggcatcgagaagaagagcagggtgctcagcaaggacgaacggcgcagggtcgcctatcacgagatgggccatgccctcgtcgcggctagtctgcccggcgtcgaccccgtgcagaaggtctcgatcattccccgcgggatcggtgcattgggttacaccatccagcgtccaaccgaggacaggttcctgctgacgatcgaagagctcaagaaccgcatcgcggtgctgatgggcggacgcgcatcggagcgcctgattttcgacggtgcaatctccaccggcgccgccgacgatcttcagcgcgcgaccgaggtcgcgatcgaaatggtgaccaaatacggcatggacgagacggtggggcagcgcacctatgcgcccaagccgcaggcgtttctcggcgcggcgcaggacaagatcgttggcgccgccgaggcgaccggccgcgagatcgatctcgccgtccgcaacctgatcgaggagggcgaccgccgcgcccgcgacatccttcagcggcggcgcgctgacctcgacgccggtgtggagctgttgatcacgaacgagacggtgacgtccgagcagttcgcgccgctgctcggcaagcgtagcgaggaaagcaagccggttgccgcgtga

SEQ ID NO: 2982 - DNA, 381 bp, BradyrhizobiumColbertium
atgacacgtatcttccaggagcgtctgaagattctcgaggttcagaagcagctcctctgcttgtcgccgttctggcgttccgaaagcgaaaccattgcgcagggtcgcgacgtgctccacgcgcttgcgtccggctgcggcccgatgttcgaagaactcgagctgctccagatcctgtcccagcccgtcctcttcggcgatgagcagcttggtgattgcgcttcggcggtcaggcacgaggtcggtgtcgttcaacagcgcgatgtagtggtcgatattcgctcgaacgatgtaccgatgcatggcgcacttcccccggcatttgccggcaaatattaccattatatgggcggtttgcgaagatggtccttatcgaggtag

SEQ ID NO: 2983 - DNA, 219 bp, BradyrhizobiumColbertium
atgctgacctactatttcgatatgaaggacggcgtgcccgtccgggacaggtcggggctggagcttgtgagtgatggcgccgccattgcccatagcaagagccttgccgaaaaggtgcggagagaaaagccgacgggtcatcccgagctccagatcgtcgtcatcgacgagagcggccgggaagttcaccgcgaacaaatttatccaagtgcggtctga

SEQ ID NO: 2984 - DNA, 2622 bp, BradyrhizobiumColbertium
ttgagccgcatcaacccaaggattgagcgccgtcttaccttcgcctggtccagctgtcagatcggcgccctccccatgaccgagcaatccattccggccaaggctttggccgccgaattctggcaaacgccgaaggacgagctctgccgcacgctgggctcgggtccggacggactgacacagaccgaagcgagccggcggctcgccgtcttcggagcaaaccgcgcggatgcctcgcaaagccggtcagccctgcgcaagctcggccaccgcctctggaatcccctgatcgcgatgctgctggcggcggcaatcgtgtccgggctgagcggcgatatcggcagctttgccatcatcgcagccgtactgtccctctccatcacgcttgatatcgtccaggagcatcgcgccgagcggacggcggaagcgttgcgggaatccgtcgcgattcaggccgacgtcatcagggacggcagggaagtgacgatgtcggtgacggctctcgtccccggcgacgtcgtgaaactccgcatcggcgatctgataccggccgatggcgtcgtcctcgatgcccaggaattgcaggtcaacgaagcattgatgacaggcgagccgtttcccgccttcaagacggccgcgccctgctcggcggcattgccggcggacgccaccaacgcgttgttcgcgggcaccagtaccgtcggcggaagcggcaagatgctggtcgtgaggaccggaggccggacacgctttggcgcgatcgcctcggcaatggccgccagcgcgccaccgaccgcgctcgaggagggcgttcaaaggctcggactgctgatccttcgactgacactcttcctcacgctgttcgtgctgatggctcatctcgtcgcgcaacgtcccgcaatggagtccttcctcttcgcggtcgcgctcgccgtcggcctgacacccgagctgctgccgatggtgatgacggtgacccttgctcgcggcgcgctgcgcatggcggagcggaaagtcatcgtcaagcggctgtccgcaattcacgatctgggcgcaatggacacgctttgcgtcgacaagaccggcacgctgacagaagcgagaatcacgctggaggcgcatatcgatccccaagaccggtccagcgatcgcgtcctggacttcgcccgcctcaacagcacattccagaccggcgtcagaagctctctcgacgacgcgatcttgtcggcgagccgcgacggcccggacggctgggtccggctttcggaagtcccgttcgacttcgagcggagatgcctgtccgttctcgtcacgcggcacgacgaacacatgctgatcgcaaagggagctccggaatccatcttggcccgctgcgttgccgtggagatcgacggcctcacccatccgctcgacgccgcatggcaacagaaaatggccgatatccaggctcggtatgcccgggatggttttcggctccttgccgtcgccgtcaggtcgattcccgccgggcagcagacgattgcggtcggagacgagaccggtttgaccatgatcggcttctgtgtcttcgccgatccgccgaagcaggatgcggcctcggcgatcgaggcactcacctcgctcggcgtgacgatcaagatcctctcgggcgatcatgacgccgtggtctcgcatgtcgcgcgaacggtcggccttccgtccggacgcgtgatgaccggagccgagatctccgagctcaccgatgccgcgctcgccgcgcgggtcgatgatgtcgatctgttcgcccggatcgaccccgatcagaagcgacggatcatcgccgcgctccggcaccgcaatcatgtcgtcggtttcatgggagacggcgtcaatgatgcccccgcgatacacgctgcgcatgtcggcatctccgtcacgggggcgaccgaggtcgcccgtgcagccgccgacttgatcctgttggctcccgatctctccgtccttgccgcaggcgtgcgcgaaggccgcaggacctttgcaaacatcctgaaatacgtccgaatgggaacgagctcgaatttcggcaacatgctctctatggccctggcgtcgatcgtgcttccattcctgccgctgctgcccctgcaaatcctgctgaacaatctgatctacgacctctccgaaatcggcattcccttcgacgaggtcgaccccgaagatgtcgcccggccggagacctgggacatgaggagcatcctccgtttctccatcgtcatgggtatcgcctcctcgctgttcgacgcgatcaccttcgtggtcctgcttggggtgttcgaggcggatgcgacactgtttcgaaccgggtggttcgtggaatcgatattcacacagatcctggtcattttcgtcatccggtctcggcgcctgccgtggcgcgcaaaccgaccgcacaatatcctgattgcgacctcggtcggcgcccttttcgccgggctcgcgcttgcgttcggtccgtggagggggctgttcggctttacagcgctttcaggaggaatagttgcggcgatagttgccatcgcagctgcctatctgatctcggcgaacgtcgccaaacggctggcaatctcggagcctgacgcctga

SEQ ID NO: 2985 - DNA, 486 bp, BradyrhizobiumColbertium
atgacgctgacaaaatggtacgtggttctcgcgatgtcggctggtgcggtcacctccgcgatcgcccagtccgactttccagcctccccgagcgccaaacaagaagcgccgcgtctcgtcgaggttatgggcatggcgcagattgagcatctcaagctctggtatgcgggcaaggcgaagaactgggacttggccgcatatgagttgcggcagctgaccaacagcctggcggaagcagccatattctatccggcggtgcccgtcagcaacgtgaccacgatgaaggagccgctgctcgcggtcgccgacgcgatcgcgacgggagacgagcgcaagttcgcagcttccatgcgcgtgctgaccgacggctgcaacgcctgccacacctcgatgggccgcggcttcattgccatcaccgttcccgcgggcgggcaaccgcctgccaaccagatattctcgccgccggcggccagccggaagaaatga

SEQ ID NO: 2986 - DNA, 234 bp, BradyrhizobiumColbertium
gtgcagatcgggcttttgaacagtgcgcgcagtctatcccgaggccagattcccgtgaaagtgacaaagccgatcgcctccatcatccgcgggaaatcccggacggacactccgccggctgacgaagacgatgatcgtcagctttcgccgtcagccgaaaggcgccaggtcgtcgaagagtacgccgacaatttgaggaagatcatccgaagacttcttggaaagctgaattga

SEQ ID NO: 2987 - DNA, 279 bp, BradyrhizobiumColbertium
atgcttgccgacattcacaccgacgatctcgccgccgccgtgcgctacgcactggaaacgacccgcgccacgactgtttgccccttccacgacgacgtcatcgtccgcatcggggacgacgcggccgagagccacgccttcgaacgcgccaagcgaatcgtcaagagcgacggcacgaaatgggacaaggaggctctcaggggcgagctcagccgtcagctcggagctgccgccgacggccgctgtcccaagtgcgatccgaaggcctcgcgcccctag

SEQ ID NO: 2988 - DNA, 681 bp, BradyrhizobiumColbertium
atgctgaccaccgccctcgacgtcaaccagccgcttcgtcccaagaccgcgcaggcgtcccgcgtggccgattcattcgcagccctggcaggattgatcgcgagcgagttctcctaccagaaggatgaagagattttcggggaggacgagccggccgaatacgtctaccaggtcgtgtcgggttcagtcagaacatacaagctgctgtcggacggccggcgtcagatcgggtcgttccatctgcccggcgacgtattcggcctggaatccggagccacccaccgcctcgcggcggaagcgatcgtcgatacgacggtgcgtctcgtcaagcgaactgcgctggaaaaggccgcgaccaccgacgtccaggttgcgcgcaaattgtggagcatgaccgccgcggagctcaatcacgccgagaaccacatgctgctgctgggccgcaagaacgccatggagaaggttgcggcgttccttctcgaaatggatcggcggctggccggcgccggcatgctggcgctcccgatgtgccgccgggatatcggcgactatctcgggctgacgctggagacgatttctcgcgcgttgtcgcagctgcatagcgaaggcattctcggcttttccggtgcgaggcagatcgtgctgcgcaatcgtcagcacctcagggacatgaatatctga

SEQ ID NO: 2989 - DNA, 312 bp, BradyrhizobiumColbertium
atgtcgaagatcatcggattgctgtcggcggtgtgctgcatcatcggatccaccgccccgagcctcggcgcggatcccctcagcggcaaagacatcgcaaagcggtggtgcgcaacttgccacctcatcgagagcggccaagcaagcgcctccgatcaggcaccgccgtttacctatctcgcgaagacacccgatttcgatcagaacaggctcgcgtttctgcttctcgtcccgcatccgaacatgccgaacatgtccctgaacagggcggaggtcgcggatctcgctgaatacatccggtcgctgaaatga

SEQ ID NO: 2990 - DNA, 252 bp, BradyrhizobiumColbertium
atggagcgcaacatcatattcaagtgcccccgcaccggcatgaacgtgcagcactggctacccggcacgatggcggacgccgcggcgacccacgtctcggtccgatgtcccgcctgcgcttcgttgcattttgtcaacatcgccaccggcgagatgttgagcgaaggcgtcggtcagcggcgtcatcgacgttcatccgacgatccccagtcgcgcgtgccgcgacaagcgctcgtttccaccgacggctga

SEQ ID NO: 2991 - DNA, 258 bp, BradyrhizobiumColbertium
atggtggggcacgggatgatggggcagggaatgaagggacgcggcaagatgggcggtgacaggatggagccgccggtcgtgttccgcatcgtcttcgcattgatggacgccgacggtgacggcagcgtctcctcgccggagtttcaggccgctcatgaacgaatattcaaggcgatggatagcagcaaggatgggaagctcaccctcgaagagatgatggtgttcatgcacagcaagagcaacgttcctcaacaatag

SEQ ID NO: 2992 - DNA, 2292 bp, BradyrhizobiumColbertium
gtgtcgtttgatcgggttctgcgatggtctctggtcgcgattgcaatcgcgggattgaccgcaggtaccctcgcgcgcgccgcgggccggcctgatctggccgacttcgcctgggcgctcggcacggtgccggtgatcgcaggactggcgatctccattgtcacggatcttctgcgcggccgcgtcggcgtggacgcgatcgcgctgctgtcgatgagcgcggcgctggcgctggggcagccgcttgccggcgccgtggtcgcgctgatgtattccggcggcaacgtgctggaggagatcgcggtcgcccgggcggagcgggacctccggtcgctggtcgatcgcgcaccgcggctggcacatcgcaagtccagcgaacggatcgaggatgttccgatcgaggacgtcgcggtcggcgaagagcttctggtgcgggccggcgagatcgttccggtcgacggaatcgtcggctcggcgttcgccaccatcgacgaatccgcggtgacgggcgaaccgatcccggttgagaagacacgcggcagtgccgttctttccggctcgctgaacgcgggagagaccttccaattgaccgtgaccgcggtggccggcgagagtacctacgccggcatcgtgcgcatggtgacggcggcgcagacggcgaaagcccccttcgtgcggctggccgaccgctatgcgctgatcttcctgccggtgacactcgtcatcgcctatgtggcatggcacatctccggagacttgacccgcagccttgccgtgctggtggcggcgacgccttgccccttgattctggccgcccccgtggccttcatcgccggtgtggcccaagccgcgcggcgtggcatcctggtcaagggcggaggcgccctggaggcactggcgcgcgcacacacggtgctgttcgacaagaccggcaccctgacgatcggcggagcgcggttgctgtccgtggaagtcgcgccaggagaggatccggatgaggttctcaggctcggggcctcgctcgagcaggcctcgcatcacgtggttgcgaaggcggtcgtcgctgcggccgtccagcatggcctcgagctggcgccgccggaacatgtcagggagaccatggggtctggcctgagcggtgtgatcgacggacgccaggtcacggcgggctcacgcgagatgtttcgctcgcatatcgagccgtcgtcgtgggagctgcgagcgattcggcgtgcctcatggcgctcggccctgatcgtcttcgtcgcggtcgacggtcgtatgaccggtgcgctgctgctggcggacgaactgcgggcggatacgccacgcgcgatccggctgctgcgagatgccgggatcgcacggatggtgatggtcacgggcgatcgcgccgcgacggcgcaggccatcggagcagcgctcgatctcgatgccgtgctggccgaccgtgttccttccgacaaggtggaggcggtgcgtagcgagcagcggctgcatccgaccatcatggtcggcgacggcatcaatgacgccccggcgctggcggtggccgacgtcggcgtcgcacttggcgcgcgcggtgcaagcgcctcgtccgaggcggcagatgtggtgattctcaccgaccggctcgatcgggtcggcgaagcgatcatgatctcgcagcgggcgcgacgcattgccatgcagagcatatttgccggcatgggattgtcgttggtcgcgatgatcgccgcaaccgtcggctggcttgaccccgtgcctgctgcgatcgtgcaggaggtgatcgacgttgccgtcatcctgaacgcgctgcgcgccctggccccgtccctcgccaggagcggccctcgcatcaccgcggagcaggggcggacattgcatcacgatcatcaggccctcttcaaggaccttgaccgcttgcggcagatcgtcgacgcgctggacgatgtgatgcctgaatccgccgctgcgatgatcggcgaagcccaccggctggttcagagcagcgtcgtggctcacgaacgcgaggatgaagacagcgtctatccgaagctcacgaaggtgctgcgcgatcgccacgggctctctgccatgagccgtgcacatcgcgaaatcctgcatctcgcgcggttactcgcgcggatcgcggaggatctgccgtcggagaagatcgaccgctatcttgtacgagacgctcagcgcgtgatcgaggcgatcgagacgctggtacgcatgcacactgctcaggaggaggacatctacgaagccgtggtgtctccggcttag

SEQ ID NO: 2993 - DNA, 1353 bp, BradyrhizobiumColbertium
atgcagaatctcaagcgagccttctggggcagtctggcggttctggtcctgctgtggctggttgcggaaccccagccgttggggcccggccccttcttcccgcttcgccagagaatggtgcagttgagcggcatcctggccatgggatgcatgagcatggcgatggttctcgcgctgcgaccgcgctggccggaggcctggctgggcggtctggacaagatgtaccgcctgcacaaatggttcggcatcgccgctctggcgaccgccatcgtccattggctctgggccagcggcccgaaatgggcagtcggcttggggttgctggcgcggccggagcgtgggccaaggccggcgatcgggaattcggtcgaggccttccttgccggcctgcgtggtccggcggaggggttgggcgagtgggccttctacggcactgtggtgctgatcgctctggcgctcatccaggcgttcccataccggctcttctacaagacccatcggctcctcgcgatcgcgtatcttgtgctggtctttcacgcggtggcgttgatgaagttcagttactggatgtcgccgcttggaggcatcgtgggggcactgctggtcggcggcacgtgggctgcggctgttgcgctcatgcggcgcattggcgccgggcgccaggtcaagggcaggatcacctcgctcaagtattatcccggcgtcagagcaatcgagaccgagatcgaagtgcctcatggctggccgggccatcgaccgggccagttcgctttcgccacgtcggacatttcggagggcgcccacccttacacgattgcctcctgctggagcgccgagtatcccaggatcaccttcatcaccaaggagctcggggaccacaccagccggctgcgcgagatgctccgtgtcggacaggaggtgaaggtagaaggcccctatggttgcttcactttcgacgatgactgctcgcgtcagatctggattggcgcgggcatcggcgtcacgcccttcgtcgcacgcatgaagcagatgacccttcggaaggatgcgccgaactgctctgtgacgcagcccgtcgatctgtttcacgccacggccgatgtcgacgaggaggctctcggcaagctcgcggcggatgcgcggtcagccaatgtccggctgcatgttctcgtcgacgcgcgcgacgggcgattgaccggcgaacgcattcgcgaggccgtgccggagtggcgtaaagccagcgtctggttctgtggtccaacggcgttcggtgaagcgctcaggcgagacttcagcgcgcacggctttcctgtcgagcagcggtttcatcaggagctgttcgcgatgcgatga

SEQ ID NO: 2994 - DNA, 315 bp, BradyrhizobiumColbertium
atgcatttccgcccgttgcacgaccgtgtgctcgtgcgccgcatcgatgccgaggagaagaccacagggggcatcatcattcccgacaccgccaaggaaaagccgcagcagggcgaggtcatcgccgtggggccgggcgggcgtaacgagcagggccagctcgtgccgctcgacatcaaggtcggcgaccgggtgctgttcggaaagtggtcgggcaccgaggtcaagatcgacggcgaggagctcttgatcatgaaggaaagcgatcttctcggcgtggccgaacaggccggcacgctgaagaaggcggcgtaa

SEQ ID NO: 2995 - DNA, 480 bp, BradyrhizobiumColbertium
gtgggcggcgcgaccgaagtcgaggtcaaggaacgcaaggaccgcgtcgatgatgctctgcatgcgacgcgggctgcggtcgaggagggcatcctgcccggcggcggcgtggcactgctgcgcgcactcaaggcgctcgacggtgtcaagaccgccaatgccgaccagaaggccggcgtcgacatcgtgcgccgcgccatccaggtgccggcgcggcagatcgtgcagaatgcgggcgaggacggctcggtcgtcgtcggcaagctgctcgaacacgagacctacacctggggcttcaatgcagcgacgggcgaataccaggacatggtccaggccggcgtgatcgatcccgccaaggtggtgcgcaccgcgttgcaggacgcagcctcggttgcttcgctgctcatcacgaccgaagcgctggtcgccgacaagccgaagaagaccgaagcggcaagcgcgcctgcgatggacttctag

SEQ ID NO: 2996 - DNA, 336 bp, BradyrhizobiumColbertium
atgatcaaggatcgtgctttctccgctcgcggggaaaccacccagaagacgttgcggcgcttcgccgccttggccgtcggggccggcctctctctcgtgccctttgcggcccttggggccgaaagccccggctctgccgccaggaccgcggatgctttcgaacggctcgccttgccgccgatcccgtacctggagacgatgccgtggtcgagctgggaacggggcggcccgaccatgaaggtggacacattgctctcgccgatcctcgggccatccggaatccggctcgatctcacgccgccggatcggagcggtccggagcccgcgatgagctga

SEQ ID NO: 2997 - DNA, 234 bp, BradyrhizobiumColbertium
atggacgattatcgtgatctcgtcagcgcggctcttgcgctgttttgtgccggcgtgatgttggtggccggccatctcttgctcgaatggcacgccggacatgccgctccgggcaccggcgtcgatgcgcccaggagcgaaggcgcgcccgcgccgctcatctcgaacggctcgtcaccagacaggaaggtgatcgaactccccgcagagatcaggcgcaagcgtgctgcctga

SEQ ID NO: 2998 - DNA, 1839 bp, BradyrhizobiumColbertium
atgaacaagaatgttcgtttcaatctcggatacgcgctcgccgcgatcttcgcggtcttcctgattcagtatctgatctcggcggcgaaccagatcgcggtgatcccctatagcgaataccagcaattgctacgccaggggaaagtcgacgccgtcggcatctccgaccgcaccttgcagggcacattgaaggagccgctgcctggcggccagaaacagttcgtcaccacgcgcgtcgaccaggacgttgcgcaggagctggagaagtacaacgtccgtttcaccgggcagatcgagagcacgtttctgcgcgacctgttatcgtgggtgatgcccgtgctgctgttcttcggcctgtggtggtacatcggccagcgcatggcgcaaggcgggatcggtggcgggctgatggcgatcggcaagagcaaggccaaggtctatgttgagtccaacaccggggtcaccttcgccgatgtcgccggtgtggatgaggccaaggacgagcttcgcgaggtcgtcgatttcctgaagaacccgaccgattacggccggctcggcggccgcatgccgaaaggcgtgctgctggtgggaccgccaggcaccggcaagaccttgctggcgaaagcggtcgccggcgaggccagagtgccgttcttctcgatctcgggttcggagttcgtggagatgttcgtgggcgtcggtgcggcgcgggtgcgggacctgttccagcaggcccaccagaaggcgccggcgatcatcttcattgacgagctcgacgcgctcggccgcgcccgcggcatcggccccttcgccggcggccacgatgagaaggagcagacgctcaaccagctgctcgtcgagctcgacggcttcgattcgcgctcggggctcgtcatccttgccgccaccaaccggcccgaaatcctcgatcctgccctgctccgcgccggacgcttcgaccggcaggtgctggtcgacaggcccgacaagaaaggccgcatcgagatcctcaaggtgcacatgaagaaggtgcgcgtggccgagggtgtggacgcagacgccgttgctgcgctcacgccagggttcaccggcgcggatctcgccaatctcgtcaatgaagcggcgctgctggcgacgcgccgcgccgccgatgcggtgagcatgagcgacttcaacaatgcggtcgagcgcatgatcgcgggcctcgagaagcgcaaccgcctgctcaatgccaaggagcgcgagatcgtggcctatcacgagatgggccacgccctggtcgcgctctcgctgcccgggaccgatcccgtgcacaaggtctcgatcatcccgcgcggcgtcggcgcgctcggctacaccattcagcggccgatcgaagatcgcttcctgatgaccaaggaggagctggagaacaagatggcggtgctgctcggcggccgcgccgcggagctgatcgtgttcgggcatctgtccaccggtgcggccgacgatctgcgccgcgtcaccgacatcgctcgcagcatggtgacgcgttacggcatgtccgagcggctgggcagcgtcgcgtatgagcgcgatcccggcaacttcctcgccagcgccgaccggccctatccgacgcgcgagcgcgactatgcggaagagacggcagccgcggtcgaccaggaggtcaaggccatcgtcgaccaggtcttccagcgcactcagggtatcctgagcacgcggcggccgatcctggaccgcgccgcgaagaagctgctggagaaggagacgctcgagcagggcgatatcgatgcgctgatccgggagatgccccaggaaggactgcgggccatctag

SEQ ID NO: 2999 - DNA, 285 bp, BradyrhizobiumColbertium
atgagaaagcttgctcttgcaatcgccgcggcagcaacgctcctcatcggaacggttgcgccggcttcggcccattggcggggccaccatcatcatcactggggaggcccgggcatcggtccggccgtcgcgctcggcctgttcaccggagcgctggccgccgcggctgcacctcccgtctattatgcgccggtctatggtccgccgcgctattattatggccccggatactaccggaccgtccgctattatccggcggcgtacccctactggtatccctggtag

SEQ ID NO: 3000 - DNA, 495 bp, BradyrhizobiumColbertium
atgacgggacattcgggtgaagcgcgaggcagggaagcgaccgggcgcaggacggcgcaggacggtcgcgcgctcgacctgcagcaatattttccgtaccggctggctcgcctggccgagcaggtatcgttggcggtggccgaggtctattccgagcgctttgcgctgacacggcaggaatggcgcgtgcttgccattctcggcgcacgtccggatattccgaccaaggagatcggtccgctgacgacgctcgacaagatgcaggtcagccgcgccgtccagggactggaggcgcgcggcatcgtcagccgcaagcaccacgcggacgatcggcgcgagctgatcgtctcgctgacgccggccggccgcgcgctctatcgcaagatcgtgccgttcgcactggcccgggaggcggagctgctggcggtgctgaccaccgaggaagcgaaggtgctcgatcgggtgatgcacaagctgtcggcagcgttgggatag

SEQ ID NO: 3001 - DNA, 543 bp, BradyrhizobiumColbertium
atgaaaatcgagaagatccatcacgtcgcctatcgctgtgtcgacgccaaggccacggtcgagttctacaagaaggtcatgaacatggatcttctcggcgccatcgccgaggaccgtgtgccctcgaccaaggcgccggatccctacatgcacatcttcctcgatgccgggaacggcaacatcctcgccttcttcgagctgccgaactcgccgccgatgggccgcgatcccaacacgccggactggacccagcacatcgccttccaggtcaaggacctcgccgagctcgaagaggccaaggcgcgcgcggaggctgccggcctcgacgtcgtcggcgtcaccgatcacaccatcttcaagtcgatctatttccgcgatcccagcggccatcgcctggagatcgcggcctggaccgccacgcccgagcagatcgaccgcatgaagtcggtcgcgcacgagatggtcgaggaatggtcgcgcaccaagcgtccaccgcgccacaccgcctggatgcacgagaaggagttcgcggacgcgcattga

SEQ ID NO: 3002 - DNA, 1635 bp, BradyrhizobiumColbertium
atgagctacatctatccgaagttcggctatcggcgctcccaggagcaggccgattgtgtcgtgaagcggcacccgatcgtggtgatcggcgcaggtcccatcggcctgaccgctgcgctcgattgcgcggcgcgcggccagcccgtcgtggtgctcgatgacaacgacaccgtctcgatcggctcgcgcgcggtctgctatgccaagcgtccgctcgagatatgggaccgcctcggttgcgcggcgcccatggtcgagcgcggtgtgagctggaacgtcggcaaggtgttcttccgggaccagctgtcctaccagttcgatctgttgcccgaggccgaccaccaatggccggccatgatcaacctgcagcaatatcatctggaagagatgttggtcgccagatgcagggccaatccgctgatcgagctgcgctggaagcaccgtctcatcagcctcaggcaggccgccgaccatgcgacgctggcggtggaaacgcccgacggcatcttctccatggaggcgcaatgggtgattgcctgtgacggagccaattccgacgtgcgcaagatggtgggcgccgagttcacgggccagttcttccaggatcgcttcctgatcgccgacgtcgccatgaaagccgattttccgaccgagcgctggttctggttcgatccgccgttccatcccggccagtccgtgctgctgcaccggcaggcggacaacatctggcgcatcgattttcaactcggctgggaggccaatcccgaggaggaaaagcggcccgagcgcgtgattccgcgcatccgcgccatgctcggggcggataccgagttcacgctcgaatggatctcggtctatcaattcgcctgccggcgcatcgacaatttccgccagggccgggtgctgttcgccggcgacgccgcgcatcaggtctcgcccttcggcgcgcgcggcgccaataccggcgtccaggacatcgacaatctggcctggaagctcgcgatggtgctgcgcggcgaagcctcggaagcgctgctcgacagctatcacgaggagcgtgcgtacgccgccgacgacaacatcctgaactcgacgcgggccaccgacttcatcacgccgaagacgaagccgagccgctatttccgtgacgcggtgctggagcttgcccggcatcacggctttgcgcggccgctggtcaacagcggccgtctctcgacgccgaccccttacgtgacgtcgagtctcaacacggaggaccacgacgctgtgacgggcggcatgcggcccggcacgaatgccgccgatgcgcccatcttgatggatggcaagccggcctggttcctgcactgtctcggtgatggcttcacggtcgtggcgttcggcgaggtgagcgacaggatcgagatcgcggcagggccgttcgcggcgaagctcgtcgtcgtcggccgcgacatcgaggatcccacaggtctgctcgcccagcgctacggcgcttcgccggggaccacctacctgttccgccccgatcaatatgtcgcggcgcgctggagcagcttcgacgaggcgaagatcgcccgggcgatgctgcgcgcctcgggccatgacaccgccgaccggacggagcttgcggcatga

SEQ ID NO: 3003 - DNA, 195 bp, BradyrhizobiumColbertium
atgatgctgaacctctcaccgaacatcgccgatcccgacgacttctacgcggagctgatcaacagccaacgcgacctcgacgaggagcaggcgttgcgcatgaacgcccggctgatcctgttgctcgccaatcacatcggggaccgccaggtgctcacggaggcgatcggctgcgcccgcaccggcggcgtctga

SEQ ID NO: 3004 - DNA, 1167 bp, BradyrhizobiumColbertium
gtgcgcgtgctcgatttcgggcgctatatcgccgggccctattgcgcgaccttgctggccgagttcggggccgaggtcattcgggtcgagaaacgcgacggcagcgaggatcgcttcgtggcgccggtcggcgagaacggcgaaggcgcgctgtttctccagatcaatcgcaacaagaagtgcatcacgctcgatccgatgaagccggaagggcaggacgtgatgcgccggctcattgcgaccgcggacgtcgtggtggccaatctgccgccgcagacgttgcgcgcgatgaagctcgattacgactcgctgaaggcgatcaagcccgacatcatcctgaccacggccaccgcgttcggcgggccgggaccctggtccgaccgtgtcggcttcgatggcatcggtcaggtgatgtcgggtgcggtctacatgaccggcgcgggcgatccgccgtatcgggccgcggtgaactgggtcgatttcggcaccgcgctgcattgcgccttcggcacgctcgcggcgctgatcgagcgcggcaaatccggacgcggacagatcgtcgagggcgcgctgctcgcaaccgccttgtccttcaccaatgccacgctgatcgagcaggccgtcatcaacgtcaaccgcgtgccgacaggcaatctcggccagacctcggcgcccgccgacatctaccgcaccagggacggctgggtgctgtgccaggtcacgggccatccgctgttcaagcgctggacgagactgatgggcgaggaggagctgtggctgaacgatccgcgcttcgccgacgacatcagccgcggcaacaatggccgcatcatcagcgagcggatggcgcgctggtgcgccgagcgcacgacgcaagaggccgtcgacgcgctgggcgaggcgatgatcccgaccggtcccgtgctctcgccgcagcaggcgctggatcatccgcatgtccgcgctgccggcttcatgcaggaggtcgactatccgggcctgccgaaacaggcaccggtcgcccgcgccgcggttcggctgtcggaaacgccgggcgagatcgcgagccgcccgccgaccctaggcgagcacaccgatctcgttctcgccgcgctcggctacgacaaggcggaagtcgcagcgctccggcaaggcggcatcatctag

SEQ ID NO: 3005 - DNA, 723 bp, BradyrhizobiumColbertium
atggcgcgcgttctgatcggaacctccggctggcattacgcctcctggcgaggcccgttctttccggagggcgtgacgctgaaggagcagctgcgctattacgccgggcagttcgacacgacggagctgaacggggtgttctaccgcacgccgacgccggaggccgtgaagggatggcgggagcagaccggtcgggatttcgtgttcgcctggaaggcatccaggttcatcacgcactggaaacgcctgtccgaccgctccgtcaacagcctcgagctgctggaggaccgcatctcgcacctcggcggcaaggccggcccgatcctgttccagctgccgccgcagttcgaagcgaacgcggaccggctcgcgtcgttcttcaagctgctgtcgcggaagcgccgctacagcttcgaattccggcatccgagctggtaccagccgcgcatcctgcggatgctggccgacgagaacatctcgctgtgcctgtccgaccatcacgatgcgccggcgccgtggaagcgcacggcggatttcgtctatgtgcgcggacacgggccgggcggacgctatcacgggcactacaccaaggccacgctggcgcaatgggccaagcgcatcaaatcctggaagcggcagggctgcgacgtctacgtctatttcgacaacgaccagaagagcgccgcgccggccgatgcaaaggcgttgaagcagttgctgtga

SEQ ID NO: 3006 - DNA, 246 bp, BradyrhizobiumColbertium
gtgagcttgatcaacgcaggaccggaaccgatgtacgcgctgttcgaaggcgacaagcagatcggcgatccctttcccaccgagaaggaagtgtgggaagccgccctcatcgaggggatcgtgaccgatgttcccgttgcggacgaggagggcggccgattgttgcccgacggctaccatgtcgagcgcctcgaggagacgttcgagccgcggccggattggaagctgccgcgcgagatctcctga

SEQ ID NO: 3007 - DNA, 1149 bp, BradyrhizobiumColbertium
ttgacccccgagctgcaccagaaactgacccagtggcgccggcatcttcatgcccaccctgagctatcgctccaggaaagaaacaccgccgccttcgtgcaggacaagcttacggaactcggcattcccttcgaggctggcatcggcgggcacgggatcgtcgcgacattgacgcgcgggcatgcgcagaggcgggtcggtctgcgcgccgacatggatgcgctgccgatcaccgaggacaccggcctgccctatgcctccgagacatcaggcgtgatgcatgcctgcggccatgacggccacaccgcctcgctgctcggcgccgcggcgctgctcgccgccgacacgagctggagcggcgcggttgatttcatcttccagccggcagaggaaggctttggcggctcgcgcgcgatggtcgcagccgggctgttcgaccgctttccgatggagcggatattcggctttcacaactggccgggccttgccgccggcaccgtcgccgtgcacgacggcgtcgtcatggcctccggcgggcgcatcaccatcaccatcgagggccatgccgggcacgccggcatgccgcatctgacgcgcgatcccgtggtggcggcggggcatctgatcgtggcgctgcaatcgatcgtctcgcgcggcgtcgatccgctcgacaccgccgtgctgtcgctgtgcacgatcgagggcggcaccgcaccgaaccagatcgccggacgcgtcaccatccgcggcacgctgcgctaccatcgcgaagaggtcaaggacgccatcctcgacggcatcgagcgcagctgcgccggcattgcgaccagcttcggcgtcaaggtcacgcccgagatcgtctggggcgtgggcgtggtgatcaacacgccagcggaagcggagctcgcgcgcattgccgcggagaaggtgcaggcgcccgtgcggcgcgacctcgcgcccagcatggccggcgaggattttgcccattacctgcagcagcggccgggcgcgttcgtctggatcggcaacgggccgttgcgcgacggcgcggagctgcacggcccgcgctacgatttcaacgatgcgatcctcccggtcgcctccggctggatggccgaggtcgccaaggcggcgctggcgtcgaactag

SEQ ID NO: 3008 - DNA, 1089 bp, BradyrhizobiumColbertium
atgccgcgcatcgcagacatcgagaccggattctaccggatcccccttcccgtcacgctctccgactccacccatggcgagatcaccgcgttcgaactgatcacctgccgcattcgcgatgccgacggcgccgaaggcgtcggctacacctacaccgtcggccgcaatggcggcgcgaccgcggacatcctcaggcgcgagatcccgccgctggtcgaggggcgcgaagcggaggacacggaagcgatctggcatcacgtctggtgggcgctgcattatggcggacgtggcggaccggcggtgctggcgctgtccgcgctcgacatcgcgctgtgggatttgaaggcgcggcgcgccaagctgccgctgtaccaattgctcggcggcttcgacgcgcgcgtgccgtgctatgccggcggcatcgacctcgatctctccgtcgatgcgctcttgaagcagaccgacggcaatctcgccaacggatttcgcgccatcaagatgaaggtcggccggcccgacctgaaaacggatgtcgcgaaggtcgccgcgatgcgacagcatctcggcgacggctttccgctgatggcggacgccaacatgaaatggacggtcgaggaagcgatccgcgccgcgcgtgcgctcgtgccttacgacctcacctggctcgaggagccgatcattcccgacgacgtcgccggccacgcgcgcgtcctgcaggccggcggcgtgccgatcgcggcgggagagaatctgcgatcgctatgggagttcaagaactatatcgccaatggcgcagtgtcctatcccgagccggacgtgaccaattgcggcggcgtcagcgccttcatgaagatcgcgcggctggcggaagcattcaacctgcccgtcaccagccacggcgcgcacgacatcaccgtgcacctgctcgcggcctgcccgaaccgctcctatctggaggcgcacggcttcgggctcgacaggtacatcgagcatccgctggtgctgcaggacgggcttgcgctggcgcctgaccggcacgggcacggcatcaacttcgactgggctggcctggcgaagctggcggggtag

SEQ ID NO: 3009 - DNA, 1206 bp, BradyrhizobiumColbertium
atgcctgtcgacaccaaagccgccaccgaccgcctcatgcgcttcctgtccgtggaaggcgtcaccggacaggaggcggcgatcgggcgcgagctcacggcggcgctcaaggaagcgggggtgccggcgaaggcgatccggctcgacgatgccaacacgcgcatcccggtgccgaccgagaccggcaacctcatcgtcgacctgcccggccgcggcgcgctgcacaaccagccgcgcatcatgttcatgacgcacatggacaccgtgccgctctgcgccggcgccaagccgaagaaatccggccgcaagatcgtcaacgaagccaggaccgcgctcggcggtgacaatcgctgcggctgcggcgtgctggtgacgctggcagcggagctcgccaagcagaagctcgatcatcccccgatcacgctgctgttctgcgtgcgcgaggagagcgggctctacggcgcgcgccacgtcaagctggacgagctcggctcgccggtgatggcgttcaactatgacggcggctcggcctccaacgtcgtcatcggcgcggtcggcgccgatcgctggagcgtcgagatattcggccgcgcctcgcatgccggcgtcgcgccggagcgcggcatctccgcgaccatgatcatggcgctggcgctggccgacgtgaaggccggcggctggttcggcaaggtggtgaaaggcaagggcgcgagcgcgaagatgggcaccagcaatgtcggccccgtcaccggcggcgaaggccgcccggcgggcgatgccaccaacgtcgtcaccgactacgtgcatgtgcgcggcgaaagccgcagtcacgacggcaagttcttcaaggagatcaccaaggcctacaaggccgcgttcgagaaggcggccaagaaggtgacgaacgcgcaaggcaagtccggcaaggtcaagttcaaggccgagaccgactattatccgttccgcatgaaggacagccagcccgtgatcaagcgcgcggtggaggccgtgtccgcggtcggcggcacgccgaatgtgcgcacggccaatggcggcctcgacgccaactggatggtccgccacggcattccgaccgtgaccttcggtgccggccagaacgaggcgcacaccgtcgacgaatggatcaatctcgacgaatatgaccgcgcctgcgcgctggcactgcaactcgcgaccatgcggtga

SEQ ID NO: 3010 - DNA, 1245 bp, BradyrhizobiumColbertium
atgaccaaagccgcccacgacgcggggcacgccactcgcgcgctgatcttcgcgctcgtcgccctcgcctgcgggcatatgctctccaccttgctgcgcaccattcccgcggtgagcctggatctgatggcggcggatttcgacattgagccgcaggcccttgccagcctcacgtcgatctatcctttcgccttcgccgcggcgcagattccggtcggagctgcgatggaccgcttcggcgtgcgaccggtgtcgctcagcctgcttgcgggaaccgtgttcggcgcgatggcgtcggggtttgcgaccgggccttcgagctttgccgtcgggcagctgctgctgggcattgcgacctccggcatgctgatgtgcccgatgacgctggcggccaagcaattgtcggcggcccgcttcgggttgtggtcgggcgcgatcctctcgatcggcaatatcggcatgctgctgtcgtcgagcccgctcgccttcgttgtggacgcctacggctggcgcgccggattctggatcgcggcgatcggcggcgtcgcagtggccgccgcggtgttcgcgctggtcccacaccagccggccgagcacaaggacgagtcctcgccgctcgcgcagatgatggaggtgctcaggctcggactctcacgtcccttgcgcggcctgatcgcgctggcgctggtgtcgctcgcgacctcgctggtgctgcgcggcttgtggggcggtccgtggctgatggacgtcaagggattgtcgcgggtcgaggctggcaaccagctcggcgcgttcacgctggcaatgatcgtcggcccgcttttcatcggcatgatcgatcgcaggctcggccgccgccgcgctctggtggccggttcgcatctggcaggcgccttgctgctggctctgatggcgctgggcgcgccgcactacgcggtctccgtgctgttcggcgtgcccgtgatgccgccgcaatacgacctcgtgctgttcgtgctgatcggccttgcgacctccgcccagccgctgctgttcggcatgtccaggcagctggtcgacgcgcaaaccgcgggcaaggcgctcgcggcggtcaaccttgccttcttcctcggcgcggccttgatgcaatcggtcaccggcgcggtggccgcgctcgccgggctgccggcggtgctgctgttcatggctgccatgctggcgctcggcgtggtgatcttcttggcttacaccgcgccaaccccatag

SEQ ID NO: 3011 - DNA, 132 bp, BradyrhizobiumColbertium
atgcgctacgaactcacagacaatgaatggtttgccattgtgccgatgctgccgaataagccgcgcggcatgccacgattgaatgaacgtcgtccggccgaaaagcactcgcagcgatccgatctgctttag

SEQ ID NO: 3012 - DNA, 1806 bp, BradyrhizobiumColbertium
atgcgcaaggtgctactggcgacctgtcttggttcggcggcggctctcgccgccggcggcgcttcagccaatgacgagctgatcaagatgtcgcagaacccgaaggactgggtgatgccggcgggcgactacgccaacacccgctattcgaagctgaaccagatcaccgcacaaaacgtgggcaagctccaggtcgcctggaccttctcgaccggcgtgttgcgcggccatgaagggggaccgctgatcatcggcaacatgatgtacgtccacacgccgttcccgaacaaggtctacgcaatggacctttcgcaggagaacaagatcgtatggaagtacgagccgaagcaggatcccaatgtcattccggtgatgtgctgcgacaccgtcaatcgcggcctggcctacggtgacggcaagatcatcctgcatcaggccgacaccaatctcgtcgcgctcgatgccaagacgggtcaggttgcgtggtccgccaccaacggcaatccggcaaagggcgagactggcacttcgtccgccctggtcgtcaaggacaaggtcatggtcggcatttccggcggcgagttcggcgtgcagtgccatctgaccgcatacgacctcaagtctggcaaacaagtctggcgtgcctattccgagggcccggacgaccagatcaaggtcgatcccgccaagacgatgtcgctcggcaagccggtcggccccgactcgtccctcaagacctggcagggcgatcagtggaagatcggcggcggctgcacctggggctggatttcctacgatcccgctctgaacctcgtctattacggatcgggcaatccctcgacctggaacccgaagcagcgacccggcgacaacaaatggtcgatgacgatcttcgcgcgcgatgccgacaccggcatggcgaagtgggtgtaccagatgacgccgcacgacgagtgggactatgacggcgtcaacgaaatgatcctcaccgatcagcagattaacggccagaaccgcaagctgctgacgcacttcgaccgcaacggccttgcctacacgatggaccgtgagacgggcgaattgctggtcgccgagaagtacgacccgaaggtgaactggaccagcggcgtcgacatggacaagaactcgccgacctacggccggccgaaagtcgttgctcaatattcgaccgagcacggcggagaggacaagaacacgaagggcatctgcccggccgcgctcggcaccaaggaccagcagccggcggcctactcgccggacacgcagctgttctacgtcccgaccaaccacgtctgcatggactacgagccgttcaaggtgagctacaccgcgggccagccctatgtgggtgcgacgctctcgatgtacccgcccccgggtgagagccacatgggcaacttcatcgcctgggacaacaagacgggcaagatcgtctggtcgaacaaggagcagttctcggtctggtctggtgcgctcgcaacggcaggtggcgtggtgttctacggcacactcgaaggctacctgaaggcggtcgacgccaagtcgggcaaggagctctacaagttcaagactccgtccggcatcatcggcaacgtcaccacctatgagaacaacggcaagcagtacattgccgtgctctccggcgtaggtggttgggccggcatcggtctggcggcaggcttgaccgatccgaccgcaggtctcggtgcagtcggcggctatgcggctctgagcaactacacggcactcggcggtacgctgaccgtgttctcgctgccgaactag

SEQ ID NO: 3013 - DNA, 969 bp, BradyrhizobiumColbertium
atgtccgacaccattcacacgctctcgacgaccggaatgacgccgaagcggcagatccagagctggatcgacggactgacgagcctgtgtgggcatttcgaggtcgatccgctggaggcgtcctcgctcgagggccgcatcgactacacgagcgtctcgcgcctgaagctctgccaaatcgaggtgagccagcatcgcatcgcgcacacgttggcgcgtgccaaggccaatgagcacccctacatcaagatccacttccaaacctacggggtgtcttatttcgaacaagaaggccgtcacatcgaaatcaaccctggcgacatcatcgcctacgatgtctcgtgtccgcattcgatcatcagcccggccttcacgcgtcacgacgtggtgatcgtgccgaaggcactgctgcgcgaccgcggattcccgtcgcagcggatgcccgcctgcaagctgtcgtcgaagacagggacagggcggatcgcccatgacttcgtgcacgctactttcgacgaggcggcaaagctgtcggcgaacagcgcggtcggcgtcgccgactcgctgatcgacctgttgttgctgccgctgcgcgaggccgacacgatgttcgatcgtgtcgggcccgaagcgatgtatgtgcgcgcgcagttcttcatccgcgagcacttgcgcgatccggatctgtgcatcgaccagatctcggccgagctcggctgctccaagcgctatctgcacatgttgttctcggagcgcggcaccacggtgagtgactacatctggcaggcgcggttgcagaactgtcgccaggagctcgaggcccacgccggcaagaccatcaccgacgtcgcgttctcgtggggcttctccagctcgtcgcatttcagccgggtgttccggaagtattttggcgtggtgccgtcctcgatccacaaggcgcagcagggcaccgcgaactcgggcgggcattag

SEQ ID NO: 3014 - DNA, 216 bp, BradyrhizobiumColbertium
gtgatcggcatcatcgggatggcgcctctcctcctcggcatgatcgtggccctggcgacctggggaggacgccggttcatgagacgggtagacaaccagctcagcgcgagagacgccggggatgccaatgccgcacgacggttgcgccggctgcactggagcgtgatgccaggctacgccgtgctgctggtcgctttggtggcaacgccggcgtga

SEQ ID NO: 3015 - DNA, 1002 bp, BradyrhizobiumColbertium
atgtcgaccaagctcgatcgccgtcacttcatcgccgccggtactactgcacttgccatgccattcgctgcgcgcaacgcatgggcgcaaggcacgtcgcaaggcgcttggccggcgcggcagatccggatgatttgcagctatcccgcaggtggacagaccgacctactcgcgcgcgcatatggcgagttcatctccaagcaggtcggcaagaccgtcgtcatcgagaacaagcccggcgcttccggcgcgatcggcacggccgaggtcgcccgcgccgagccggacggccataccatcctgtgctcgatctcgaccacctacatcatgaaccgggtggtgatgaagaaccccggctacgacatggacaaggacctgaccctcgtcagcgtcattccgggcgccggcctgctgctggtggcaaacccgaaaaccggggtcaagacactggaggatttcgtcgccttcgcgcgcaagagcggcaaggtgaacttcggcacctacagcgcgggatcggccccgcacatgacagtcaacgagctcaacaagcagtacggcctcaacatcgagccggtgcactatcgcggcgaagcgccgatgtggacgggaatgctggaaggcaccctcgatgccgcgatgggcagctacacggccgcacagtctgtcctgcaaagcgaccgcggcaccgtgttcgccgtgcactcgaagaaggtcgacgcaatcccggccatcaagacgcttcccgagcagggcgcgacgtcaaaattctttacggtgagcggattcaccggctgggccgtgccgaaggcgacgccgcagccggtcgttgatcgcatcgccgagctctgcgtggccgccaacaacgatccgaaagtgaaagaggttctctcgaccttcgtgctcgaacccgcaatcggcttcaaggaaaccaatgcgctgtatcagcgcgagctgccgatctggatcgagagcgcaaagtcgctcggcctcgagccggcctga

SEQ ID NO: 3016 - DNA, 930 bp, BradyrhizobiumColbertium
atgagacgctggcttgtcgcctggagcatcgccgcggtcctagcagcggcgccgcgtgccgcatacgcggccgaggatccgctgaagatctgtctcgacgaagaccggccgccgctgtcggtgcatcaaaagggcaagccggatgccggcttcgacgtgctgctggcgcaagccgtcgccgagcgcctgcgccggccgctgacgatcctgtggttcgagagcaagctcgatgaggatgccagcccgcagctcgaggccaatgcgctgctctccgacgggcgctgcgcattggtcggcggctacgcgctgacgacggattccctggtcaagccgggcatgaagacggcgcgcctgccgggtttcgccggcgccacgcgcgaggaccggcgacgccgcgtcgagctcggcgcgctcgcgccgagccaaccatacgtctattcgcccatgacggtggcgctcgggcccaaggcgaagggccgcaagatcggcggcatcggcgatcttgccggccttcgtctcgccatcgaaagcggctcgctcggcgatgccatcctgatgaccttcgacaaaggacgcctgatcgacagcatcacccatctcgttcctggccgcgacgacctcctcggcgcggtgcagcgcggtgattacgatgcgacactgatcgaccttgcgcgcttggatgcccatcgcgccgcccatccagacacgagcgtgactgcgtccggctattactacccgatcggcgccaatcgcggctatgtcgggctcgccagcgatccagccctgatcgatgcggtcaacaaggcactgacggagctcgccgctgagggcaagatcgccgagttcggcaagcaggccggcctcacctatctgccgccgcgagagccagcgattctgggcgacgtctggacgaagatcattcagcggtga

SEQ ID NO: 3017 - DNA, 354 bp, BradyrhizobiumColbertium
atgctgaaagtgatgtctcacaagacggcggcggtgatcgccgccgtcgcggtgctgtcggtcgcgcttgcggcgaccgttcgcgccgacgacgctgccgccaattccatgcaggcgcagatcgatcatggcaagtcgacctatgcctcgaaatgctcgcattgtcatggccccaatctgatgaactccggcaccatcacgccggacctgcgcgccatacccgacgacaagacgcgtttcatcaccacggtgaagaacggcaagaacaacaagatgccgccctggggcgacatcctcaccgacgacgagatcgggaacctgtgggccttcgtctccagccggaggaagccatga

SEQ ID NO: 3018 - DNA, 1665 bp, BradyrhizobiumColbertium
atgaaacgctttgcgatggccgcaggcctcgtcatgcttgcgtcaacctgtgcaaatgcacaaacgaccgagcagctggtcaagggcgcgaccgacacatcgaatgttctcaattatggaatgggctatcatctgcagcgtttttcgacgctgaaccagatcaacaaggatacggtcaagaacctcgtcccgatctggaattacagcttcaatgacgatcgcagtgaggaatcgcagcccattgtctatcagggcgtgatctacgtgaccacgcacaatgccaccatggcagtcgatgccaaaaccggcaagcagatctggaagagcaaaatcgaatatccggccgagacgcctcggatcgtctgctgcggcatcatcaaccgcggcgtcgcgatccatgaaggcaagctgttccgcaccacgctcgatgcccacttgattgcgatcgacgccaagaacggcaaggagctgtggcggcagaaggcggccgacatcaaggaaggctattcgatgaccgtggctccgctggtggccgaaggcgtcgtcatcacaggcgtctcaggcgcggaattcggcacgcgtggcttcatcgacggatgggacccggcgaccggcaagcatctctggcgcacccattcgattccttcgccggatgagcccggcggcgacacctggaaaggcgacacctggaaactcggcggcggctcgacgtggattacgggctcgtacgatcccgagttgaagacggtctattggggcaccggcaatcccggcccgttcaacgcagcggtacggcccggcgacaatctttatacctgctccgtcctcgcgatggatcccaagacaggcaagatcaagtggcactaccagttctcgccgaacaatccgttcgactacgacgcagtcgcagagatggtcctcgccgacatgaacgtcgggggcaagccgacaaaggtgctgatgaacgccaaccgaaacggcttcttctacgtgattgaccgcaccgacggcaagctgcttgcggccaatccttacgtgaaggtgaactgggcgaccggcgtcgacatgaagaccggccgtccgatcgagacggacgttgcgaaggacgcgagggaaggcaagaaggtgacggtctatccgtccattctcggcggcaagaattgggagccgatgtcgttcaatcctcagaccggcctcgcctatgccaacacgctcaacttcggcggcaagtacaaggccgagcctgtcaccttcaagcagggtgaatggtatctcggcatggacctgaccgatccctgggagttcggggacgggccgcgcggacacctcaaggccattgaccccatgaccggcaagtcgaagtgggaagcgccgagcgacattccgcgcttctcgggcgtgctgtcgacggccggaggcgtggtgttctcgggcgccctgaccggcgagttcgaggccttcgatgccgacaccggtaagaagctctggcagttccagaccgggtccggcatcgaggggcaacccgtcacctggcagcaggacggcgtgcaatacgttgccgtgacgagcggctatggcggcgtctactcgctgttctcgggcgacgagcggctggccaaggtgccgcccggcggttcgctgtgggtctttgcagtgaagcagtaa

SEQ ID NO: 3019 - DNA, 393 bp, BradyrhizobiumColbertium
atgacgtcgattcgcccgttttcgcttgcgctcacgattgcattgctgtccggcccggcccacgcggcatccggcagcgcggtcaagatgttcgatacagacaatgatggcacgctcgatatggctgaggtgagaaaggctgccagcgcgctgttcaccaagctcgaccccgatcgggacggcacgctcgatgcgcgtgagttgcgcggacggttgtcggcgaaagagctcgcagcagccgatccagatcgcgacgggaccctgacgctcgatgaatatctatcggttgtggagcagcgcttcaatgcggccaatccggacaaggacgggacgctggatgcaaaggagctgaacgcgcggcccggccgcgcgcttctgcggctcatgcgttga

SEQ ID NO: 3020 - DNA, 123 bp, BradyrhizobiumColbertium
ttgcgccgcgcgatgtcgcgctcattacttggggagacccgcatggcttggaaagctccgaagattgtggaagtgccggtcggcatggaaatcaacatgtacgcctgcgcttcgcgcaagtaa

SEQ ID NO: 3021 - DNA, 870 bp, BradyrhizobiumColbertium
atgggcggcagagcctgcaagttctggacggtggtggggtgcgtgatcgcactgacaccggcacgcaccagcgccgaagagggctttgataccgagcacattttcggcttcatgatcggcagcgatgtcggcaatgtcggcgagcgcgaattccagacccagacgacgggccggctcggcaaaggcgggggaacctatcgcgccctcgagcacgaagtcgagatcgaggtggtgccgctgccgaactttcgcatcgaggttggcggcaccgcgagcttgcacgacatcaccggcgttcctgatctcgatgaccgtcgccagttcaactttcagggcgcctcgctcgacttgcgttatcgcctgctcaatcgcgagcgcgcgccgttcggtctcactatcgctgccgagctccacggcggccgcatcgaggagacaagcggcgcgaaggggcggatgtacggcaccgaattcgcactggcctttgaccgcgatctgattccgaacttcgccatcgctgcgctcaacctgatctatcaggcggagtgggcccacttcgaggtggcaggagcatccgacaggggctcgacgatcggcgcggcgattgccggcctggtgcgcgtgcggccgaatgtgctgctcggcggggagatgcgttactttcggcaatatgagggcgtcggtctcggtgagttctctgggcaggccctgttcgtcggccccacagcctatttccagctttccgagcgttcgcggctcacgatgagttggagcatgcaagcatgggggcgtccggccggatcagggaccaatctcgatctcgccaatttcgagcgacatcaggcacgactggtatttgggatcaatttctag

SEQ ID NO: 3022 - DNA, 174 bp, BradyrhizobiumColbertium
gtgctctcgcctgcgacctgcgaggagaagcatctgatattccagtattccgggtcgccgcggcaatgcgcaatggctgcgccgccctacatcgcgcaatgggtcggcgagcatcccaagtggcaggcggtgcgctggcgctgcgaatatccgcgcccaaacgacagggcgtaa

SEQ ID NO: 3023 - DNA, 354 bp, BradyrhizobiumColbertium
atgcgtcgtaggctgatcgcgatcggcatcctcgtggtcgcgatgccgggcgcggtacttgcgcaggccaagggcaagggcatccggctctggaatctgacgacggagacgatctccggcttccagctctcgcccgcgggcaagaccgactggggtccgaaccagtgcctgaacgacaaggacaaggaggtcgaccacgacgagcggctgcgcattgtgggcgtcgagccgggccgctatgacgccaaggtcagctatcccagctcacgccaatgcatcgtccgcgacatcgagatcagggcagatgcggtgttctcgatcgcggacaaggatctgaaggattgcaccaaatag

SEQ ID NO: 3024 - DNA, 711 bp, BradyrhizobiumColbertium
gtgcggcttgaggtcgacatcaaaggcaagaccttcaggagtgccgcgggcgggatccaggaggtgctggcgccggtgaagttcgcgcttcaatcgggcgaggtcggcgtcctgatcggcccgtccggttgcggcaagagcaccatgctgcgcatcatcctgggattggaccccgagttttcaggcggcgtcgcgcggccgccgcaggcgcggatcggcatggtgttccaggagccgcggctgttaccgtggcgctcggtcgagcagaatgtgcggctggctgcccctggcgtggccgacgcgaagctcgccgagctgttcaggatcctggagctggaggcgcatcgcgatcacttccccggcgagttgtcgctcggcctcgcccggcgcgggccagcgccacgcgccttcgcggtggagcccgatctgctcgtgctggacgagcctctcgcctcgctcgacgacgccctcgccagccgtttgcgcgacgagatcgcaacgctggtggcgagccgccccgtaatgacgctgctcgtcacgcacagtctcgacgatgcgatcaggcttggcgaccgtctgttctttttgtcgccgcgccccgcgcgcatcatgcgggaggtgccgatcaccattccacgcgcggagcgcagcgaagccgatctcggcaggatcaagggcgagcttgcgaggctacagcttgaatcgaaatga

SEQ ID NO: 3025 - DNA, 738 bp, BradyrhizobiumColbertium
gtgctgcgtcttctctcgttcgccctgctcctggggacgtggtggaccgccgcgctgttcgtcggcggtgcaaagctgcccgccccgccggccgtacttcacgtcatgatcgcggaagcctcctccggcgccctcttcctgcatctcggcgcgacgctggcgcgcgtcgcgctcgccttcacattggcgatgtcgatcggcagcgccatcggctacctgatgggccgggtgaagctcgccgaccggctcggcgatccctggttgattctcctgctcaacctgcccgcgctggtcgtgatcgtgctcgcctatatatgggccgggctcaccgaagccgccgcgatcgcggcgatcgccatcaacaagctgccgaccgccatcgtcaccttgcgcgagggggcgcgtgcactcgatcgctcgctcgacgagatggcgcgcgtattcgcgatgccgcgctggcgcgcgttccgccacgtcgtgctcccgcagctcgcgccgtatatcgccgcctccgcccgttccggattgtcgctggtttggaagatcgtgctggtcgcagaactgttgggacgtcccaacggcgtcggtttcgagatcggcgtcgccttccagttgttcgatacgccgcggctgctggcctattcgctgaccttcgccgccgtcgtgctcgtcatcgaaaccttgctggtacagccgttcgaaacccgcgcaaaccggtggcggccccgtgcggcttga

SEQ ID NO: 3026 - DNA, 1032 bp, BradyrhizobiumColbertium
atgcgtattgtcctgaaaagcactctgtcagaggaaacggctcacaaggtgatgagagcttctggtcgaacattcgcgctcgcggtgacgctggcgttgacgctagccgcgcccggccgcgccgccgacgccatccgccttgcagtgcagaagaccggaacattctcctgggagctggccgcgatccgcgcggccggcctggacaaggaggccgatctgtcgctcgaggtcaccgagctcgcgagcaccgaggccggcaagatcgcgatgcgcgcgggcagcgccgacatcatcctgtcggattggctgtgggtgtcgcgcgagcgcgcgctcggcgccaagctcaccttctatccctattccagcgcgctcggcgcggtgatggtgccgcccaactcgcccatcaagacgctcgcggacctgaaggggcgcaagctcgccgtggccggcggagcgatcgacaagagctggctgctgctccaggcacgcatgaagcaggatggcgtcgatctgaaatccgcggcgaccatcgtctatggcgccccgcccctgatcgcggccaaggcgctcgacggcgagatggacgcgagcctcaatttctggaatttctgcgcgcagctcgaggcaaagggatttcaccgccttgccggcatcgaggacatcctgccgaagctcggcgccgagggtgccgtctccgcggtcggctatgtcttcgacgaaggctgggcggccaagcatcgcgaggcggtggcgcgcttcatcgcgatgacccgcaaggccaaggagctgctggcgacctcagatgccgcctgggacaaggtcgcgccgctcaccggcaccacagatccgaccctgctcaaggcctatcgcgaccgctatcgcgacggcatcccgcgccggagcattgccgacgaggaaaaggacgcacgcgtgctctaccgcgtgctcgccgagatcggcggccgcgatctcgtcggaccggcggccgagctcgatcccggcacgttctatcacgcagtccccggagactga

SEQ ID NO: 3027 - DNA, 360 bp, BradyrhizobiumColbertium
atgaatctggcgggacagctacgaccgattgtcgccgcattgatagtgctggccgcgagcgcgtccatggcacgggccagcgaggccaatgattatcccacctcggcgcgcgccgagtacgtctatggctgcatgaaggccaacggcgagacacgagctgcgatcgagcaatgttcctgctcgatcgacgtggtggcctcgatcgtcccctatgagcgctacgtcatggcggagactgcgctcagcatgtcgcaagtgcgcggcaatctcggcgtccagttccgtacctcggagcaggcgaactcggccgtgaatgacctgaggcgtgcgcaggcggaagccgaggtgaggtgtttttga

SEQ ID NO: 3028 - DNA, 780 bp, BradyrhizobiumColbertium
atgctcggcatctccttcgctgcgccggtgcgggccgaggaggcccccgatccctggccgggcctcgtgcaggacatcttcagcaatcgtccaatgaacgacggcagcgccgtcatcggcatcgagatgccgtatcgcgccgaggatgcagccatcgtgccggtgaccctgcgcagcaagctgtcgcctggcgatgcacggcgtatccgttcgatcacgctcgtcatcgaccgcaatcccgcgccgatggcggcgaagttcgagctcgggcccgacgccaatgtcagcgagatctcgacacgcgtgcgcgtcaacaactacaccgatgtgcacgcggtcgccgagctcagcgatggtcagctctacgtgtccaagacgtacgtgaaggcatcgggcggctgctcggcaccggcagtcaagaacgtcgaggaagcccgcaaccggcttggccagatgcgctataggcagttcgcacgcgaggatgcgccggcgagccgcgtgcgcgaggcgcagatcatgatcggccatcccaacaattccggactgcagatggatcaggtcacgcaactctacattccggcgttcttcatcaaccagttgaagctgacgcagggcgacagtcccgtgctgtcgatggaaggcgggatctcgatctcggaagatcccaatctgcgtttcacgtacgtctccaatggcgccaagcgctttcgcgcggaggcgaaggatacgggcgggcacgtgttccgtaacgagtgggatatcgacaagccggggacgtga

SEQ ID NO: 3029 - DNA, 843 bp, BradyrhizobiumColbertium
gtgagcgaagtcgcgccgggaatctttgtacactccgggatcatcgccctgatgagccgcgagaacgagggtgacatcgccaatgtcggcttcatcgtgggcgaggaggccgtggccgtgatcgacaccggcggcagccttcgtgaaggcgaagcgcttctggccgccgtgcgtgcgaagacgcccaagccgatccgctacgtcgtcaacactcacggccatcccgatcatgtcttcggcaacgcggctttcgcggccggaagcaccactttcgtcggccatcacaagctgccgcaggcgctcgcgacgcgcgggcctttctatctcgaaaatttccgtcgcatcatgggcagcgagttgatcgatcccgtaaagatcatcacgccgaccttgctcgtcagcaacacgatgacgctcgatctggggtcgcgccgactgtctctgcgcgcctggccgacagggcacagcgacgccgatctgaccgtgttcgacgagacgacgagaacattgtttgcgggcgacctcgtctttctccggcacgttccggtgatggatggcagcatccgcggctggctcgacgcattgaagagcctagaggcgatcccggcgctaagggttgttcccggtcacggtcccgtgagcggctggcccgcggcgctgcgcgatgaaggacgctatctgtcaacgctgctgtccgatgtccgcaggttgaacaagaatggcgaaccgatccgcgccgccgcagacaaggcggccgcttcggaacggccgcattggctgctgttcgacgattacaacgcccgcaacgcaaccgcagcattctcggaaattgaatgggaatag

SEQ ID NO: 3030 - DNA, 126 bp, BradyrhizobiumColbertium
ttgcctcagttcagggagcctgtcgcgctgcgctgcaacaaggaagccaacgccaagttgagcaacgatggcgcgtcaagcgtcgcatggataacattcaacgacaatgaggaggaagcgcgatga

SEQ ID NO: 3031 - DNA, 885 bp, BradyrhizobiumColbertium
atgacgcgagctggacgacatcgtcgctggttgttttcactttggatcgtgatcgcgtcctgcgcccttggcgatggcgctatcgcgcagaccagtgacacgggcgatctctcgttcgagctcgtggatcccaaggtgctgcgcgtctgcgccgacccgcgcaatctgccgttctccaacgagaagggggagggtttcgagaacaagctcgcggagtgtcttgcggagaagctgcagaagaagctcgactacgtcttcttcccgcaggcgacgggcttcgtgcgcatgacgctgggtgcgcatcgctgcgacgtcatcatgggctttccgcaaggcgacgacctcgtgcagggcaccaatccctactaccgcacagcctatgcgctggtcgcgaaggcgggcagcgggcttgagaacgtcgatgtactcgaggatccgaagctgaagggcaagcgtatcggcatcgtcgccggcacaccgcccgcaaccaacatggcgctggcgggcttgatgggtagtgcaaagccctatcagttgatgatcgacacgcgcttcgacaattcggcgaaagcgatgattgatgatcttgccgccggcaagatcgacgctggcgtgctgtggggcccgatggcaggctactacgcgaagatggccggctcctcgctccatgtcacgccactggtgaaggaaaccaccgggccgaagctggtctatcgcatcggcatgggcgtgcgtcccgcagaccagaactggaaacggcagctgaacaagctcatccaggacaaccagggcgagatcaacaagatcctgctcgatttcggcgtcccgctgctcgacgagagcaaccggccgctcggtgcggagccgctcaagaagacaccatga

SEQ ID NO: 3032 - DNA, 558 bp, BradyrhizobiumColbertium
atgaggcagcatctcgccgtcgcgctgctcgctaccgctctcgcagggcaggcattcgggcagcagccggagcccttcgagccggagggatatcgtgccgacaattatcgcgccccggtaccggcgacgctcgccggtgcacgcgtgctgacgacggcggaagccgaggcgatctggcgcgcaaggaggggcactttcatcgatgtgatgccgcgcccgccgaagccgaagaacctgcccaaaggcaccgtgtggcgcgatgcgccgcgcaagaacattccgggcagcatttggctgcccgacaccggctacggcgcgctgccgccagccatggacgattatctccagcgcgggctcgctcgtgcctcgcgcggggacaaggccgcactgctggtgatctattgcatggccgactgctggatgtcctggaatgctgcaaagcgcgcactcgcttacggctattccaatgttgcctggtaccccgacggcaccgatggctgggagcgcgcgatgcttccgacagaggaggcgcagccggaaccgcgccccgatcagtag

SEQ ID NO: 3033 - DNA, 303 bp, BradyrhizobiumColbertium
atgggaaccacgaaattcatcttcgcgggcgctgcggccctcagcatgctcgcatccagcgcttttgctgaagacatgaccggcatgatcatgcggatcgatcggctcaatggcacgatttcgatccagcagacgcagaagggcaccgtcggtgccggtgcgggcagcgctggggcgctgcaggagtacaaggcgaaggacgctgcgatgctggaggcggtccatgccggcgaccgcgtgagctataccgccaccgagacgaacggcacgggcacgctgacgaagctgcagaagcagaagtag

SEQ ID NO: 3034 - DNA, 609 bp, BradyrhizobiumColbertium
atgaaggtttgggtcctggctgccatcacaatgatgctgtccgccacagccgcgctcgcggccgatccgcgctatccggactggccctgcacccaggccaaggttccggagatctcgctggccgccgtgtgggccggtccgccgctcgatgacgtccagaacaagtggaaggacgacgccgaggtcagcgcgctggttgcaaagctgtcggcacgcaagacgccgctggacgaggccgagaaatcggtgaaggagcttctagccgcctccggctccgacaaggccgcgaaagcgaagctcctgtttgccggcctgttcgacacgctgaatgcccagcgttcccaagtcatgaacggtctcgaacgggtcagccgcaagcagcgcgaggctgccgacaagattcgcgaagatgcgcttcagctccaggccctgcagggcgcaacgccgcgcgatgaggccaaggtcgaagcgctgagcaacgagctgatctggaagacccgtattttcgaagaccgccataaagtggtgcgcttcgtctgcgaggttcctaccacgatcgaccagcgtctgttcgcgctcgggcgtttgatccagcaggaaatggaatag

SEQ ID NO: 3035 - DNA, 849 bp, BradyrhizobiumColbertium
atgagcagcatcaccgcgcgcgatacgccgcgtggcttctcagtccaggagtacctgacctgcctcaccggcatcgtctggcgcgaggggctgcgcttcctgcatcagcgcgaacgttttgtctccgcattggtacggcccctggtgtggctgttcatctttgccgccggcttccgccaggtgctcggcatctccatcatcccgccatatgagacctacatcctctacgaggtgtatatcgcacctgggctgattgcgatgattcagctcttcaacggcatgcagtcttcgctctcgatggtctatgaccgcgagatgggcaatatgcgcaccctgctggtgagcccgctgccacgcgggttcctcttgttctgcaagctgctcgcgggcactgcggtgtcgctgctccaggtctatgcgttcctgctgatcgcctggctttgggacattaccccgccggccgcgggctaccttaccgtgctgccggcgctgatcctctcggggctgatgctgggttctctcggaatgctgatctcctccggcatcaaacagctggaaaatttcgccggcgtgatgaacttcgtcatcttcccgatgttcttcgcctcctccgcgctctacccgctctggcgggtgcaggagggcagcccttatctttactatctttgcgaggtcaatccgttcacccatgcggtcgagctgatccgcttcgcgctgtacgggcagatcaactggatctcgctggcggtggtcgctgcttgcacaatcgtcttcatgatcggtgcgatcttggcctatgatccctcgcgcgggctggcgcgacgcggccctgccggaggcgaaggatga

SEQ ID NO: 3036 - DNA, 771 bp, BradyrhizobiumColbertium
atgccgaggcctgatgcggccgcgttgccggcgttgtcgatcgagggcgtcagccattcctacggaccacggcgcgcgctcacggacgtgtcattcgacgtgcagccggcgagcttcacggcactgctgggactcaacggcgccggaaagagcacgctgttctcgctcgtcacccgcctgttcggcatccagtccggccgtgtctccatcttcggccatgacatcagcaagactcccggcgaggcgctgcggctgttaggtgtcgtattccagccgcgcacgctcgacctcgacctgtcgctgacgcagaacctgctctatcacgccgccctccacggcatcagccgccgcgaggccgccgcccgcagcgccgagctgctcggccgcatcgggctcgaagagcgcgccggcagcaaggtgcgcgatctctcgggcggacagatgcggcggctggagattgcacgagcgttgctgcaccgtccccggctgctgttgctggacgagccgaccgtcggcctggacgtcaaggcacgggccgacatcatcagccatgttcgccagctcgtggccgagcagagcattggcgtgctctgggccacgcacctgttcgacgagatcatgcccggtgacgatctcgtcgtgctgcaccaaggtaaagtgctggcgcggggtccgatgagccgcgtcgtcgcggaagccggcgcgcaggacgtcaacaccgccttcatgcgcctgaccggcgcgcaaacgatgccgggaggcggcacatga

SEQ ID NO: 3037 - DNA, 969 bp, BradyrhizobiumColbertium
atgttgcgcatgtggcgtgttgggctactctccgcaatggcgctcgtcgcagcgcctgcgcatgcgttcatcgcctatgtttcgaacgagaagagtaacacggtgtcggtcatcgacaccgagacctggacggtgaccaagaccatcaaagtcggtcagcgcccgcgcgggatcgatctcacacgtgatggaaagttcgtgatggtcgcagtgggcgacgacgacaccatccaggtgatcgatgccaagacgcagaccgtcgtcgacagcctgccctccggccccgatccggaattgttcgcccaggatgccgccggaaagactctctacgtcgccaacgagaacgacaacacggtgaccgtgatcgacctcgagaagcgcgcgcgcctgggtgatatccaggtcggcgtcgagcccgagggcatgaccatcagccccgacggcaacacactgatcaacacgtccgagaccaccaacatggcgcatttcatcgacaccgccacgcgccagatcgtcgccaacgtgctggtcgacgcgcgcccgcgttttgccgagtacaagcatgacagctccgaagtctgggtgtcctcggagatcggcggcacggtctcgatcatcgatcccaagaagcacgaagtgatcggcaaagtcacgttcgaaatcccgggcttgcgaaaagaagccatccagccggtcggcatcggcatgaccagagatgacaagaccgcctttgtcgcgctcgggcccgccaaccgcatcgcggtcgtcgacgtcgccacgcgcaaagtgacgaaatatctgctggtcgggcagcgcgtctggcatgtcgcgttcacgcccgacgaaaaatacctgctcaccaccaatggcgtgtcgaacgacgtctcggtcatcgacgtcgccgcgcagaaagtcatcaagaccattcaggtgggcgaactgccttggggcgtcgcgattgcgccatga

SEQ ID NO: 3038 - DNA, 1182 bp, BradyrhizobiumColbertium
atgatccgatggttggtcggcctgatcggtctgggtgttgccgccacgagtgcgctcgccgcggacccggttacgatcggcgtcggctatctcggaattgccggcacccgatcgacgctatcgctggccgagcaacctgcggagaatgacggcctcgccggcgcccgcctcgccatcgaggacaacaacaccaccggaaagtttctcaaccagcgcttcacgctggaggagcgccgcgtcaaggaaggcgaggatccggtccaggctgcaaccgccctcgctgacaagaacgggttcgtcatcgccgacctgccggccgatgcgctgctgaaagtctccgacgccctgcgtgagcgcggcacgctgctgttcaacgtcggcgcaatcgacgaacggttgcgcgaggccgattgccgcgccaatgtcatccacaccgctccgacacgcgcgatgctggccgatgcgctcggccagtatctcgtttggaaaaagtggtcgcgctggcttctcgtggtcggctcccataacgaagacaggctgttcgccgatgcgctccggcgcaccgcgacgcggttcggcgccaagatcgtccaggaacggaccttcgaagacaaaggcggcgcgcgacgtaccgacagcggcgtgacgctgatccagcgccagattccggtgtttacgcagcaggcgcccgcatacgacgtgctgatcgccgccgatgagagcgaggtcttcggcgcgtacctgccctatcgcacctgggatccgcgccccgtcgcgggctccgccggcctcgtgccgcggagctgggacgcggcgcaggaccagtggggcgcgatccagatccagaaccgcttcttcaagctgaattcgcggcgcatgaccgcgctcgacatgcaggcctggaccgcggtccgcatgatcggcgaaggcacctcgcgcaccaattccggcgacatcaagaaggtgaccgacttcatcaagggcccggatttctcggtcgccgccttcaaaggcacgcggctgaccttgcgtgactggaacttgcagcttcgccagccgatcctgctggtcgacggccgcatggtggtgtcggtatcgccgcaggaaggtttcctgcatcaggtctccgagctcgacacgctcggctacgatcgcccggagagcaaatgcaagttgaagtga

SEQ ID NO: 3039 - DNA, 573 bp, BradyrhizobiumColbertium
atgaccaatttgtcagggcatgcaaccccgcatttcgtcctcgcgcgcgcgaggacgggaatcacgatcgtgcgagcattgataggctttgcggctttgttgttgacgggttcggtcgcgctcgccgatccgccaaagcttgcggtcttcgatttcgagctgatcgacaccagtctgcccggtgagttctacggcgcgaagccggagcaggcgcggctggagcgtatcagcgagcagctgcgcaaggaactggcagaatcgggccggttccagctccttgatatagctccggtcagggatgccgcccgtcgcgcgaacctgcaagcctgcggcggctgcgacctcaagctcgcccgtcagctcggggccgatctggagatcaccgggctcgtgcagaaggtctcgaacctgatcatcagtcttaacgtctatctccgagacgtgaagaccggcaacatgatcacggtcgccagcgccgacatgcgcggcaacaccgacgaagcctggacgcgcaccatgagctacctgatccggaaccgtttgctggcgccgaattacgggcggccggagtag

SEQ ID NO: 3040 - DNA, 852 bp, BradyrhizobiumColbertium
ttgggcatgacgattcagactgtctcgaccaataaatcccatggcggcgtgcagggcgtctatcgccatgccagccaggccaccggaaccgacatggtgttctcggtctacgttccgccgcatgcggccggcgccaagctgcccgtggtctggtatctttccggactcacctgcacccacgccaacgtcaccgagaagggcgaattccgcaaagcctgcgccgagctcggcctgatcttcgtcgcaccagacacctcgccgcgcgggccggacgtgccgggtgacgccaacaatgcctatgatttcggcctgggcgccggcttctatgtcgatgcgacccaagagccattcgcgcgaaactaccgcatgtggagctacgtcaccgacgagttgcccaagctggtcgccgagaactttccggtcgacgccaaacggcaatcggtgatgggccactccatgggcggccacggtgcgctgacggtgacgctgcgcaacccgcaccgctatcgcgccgcgagcgcgttcgccccgatcgtggcgccttcgcaggtgccctggggcatcaaggccctgaccggctatctcgggccgaacaaggacgcctggcgcaaccacgacacggtggcgctgatcgaggatggcgcgagattctccggcttcctggtcgattacggcgatgccgacaacttcttgaaggagcagctcaagcccgagctgctgcaagaggcatgcaccaagactaacatcccgctcacgctgcggcggcaggcgggctacgaccacagctactatttcatctccaccttcatgagcgatcacctgcactggcacgcagcaaggttgacggcgtag

SEQ ID NO: 3041 - DNA, 621 bp, BradyrhizobiumColbertium
atgcgcattctgatcgtcgacgatcatcccattgtcgcctccggctgccgtgccgtgctggccgacgagggcgagatcgagattctggaggctgccgacgccgaagacggcgagtgcgtcttcatcgtcgaacgccccgacctctgcatcatcgacatcaacctgccgaccgtgtccggcttcgagctcgcacgtcgcatcctcgagcgcgcgccggaggcccggatcatcatgttcagcatgaacgacgatcctgctttcgccgcgcgcgctatcgagtgcggcgccaaggggtatgtctcaaagaccggcgatcccgacgacctcgtcgaggcgatccgcgccgtcagcggcggcggcacctatctgcccactgccatcgcgcgcagcatcgcctttgcaggaccgacgctggcccaaagcccgctatcgaagctgaacgcacgcgagatggagatcctgcggctgctgagcgccggcaagagcctgtccgagatcgcctggctggtgcaatcgtcctacaagacggtggccaatacctcgtccatcatgcgccagaagctcggcgtgaaaacctcggtcgagctggtgcggctggcgatcgacagtggcgtcgcctga

SEQ ID NO: 3042 - DNA, 1359 bp, BradyrhizobiumColbertium
atgtggcaaaatttatccttgcgcgggcgcatcaatctcttgctggcgctgctgctggcactcgggctcgccgtcaatatcggccggcaggtcgcggaggccgggccgcgcgtgcaggccgaggaccagagcgtaatccggctcgcgcgcgaattcatcgagatgatcgtggcggacctgaacgaggcgccggagccggacgcccggctgaaccagatcgcgcgcgatctcagccgcctgcgccatgtcagcatcacgcttcgggacgccgggggtcattccctgacgccgccccggcttgacgccgacgccgacacgcgcgcgccgccggcttggttcgtcggcctggttcatcccgagcagaccgcggtcagcgtccccgtctcgatccagggcaagccgggctcgctcgtgatcacctcgcaccccgatgacgagatcgccgagatctgggacggcatcgtgacccagctcgaggtgggctcggtgatcgcgctcgcgctgtttttcctgatgatgaatgtggtcggtcgggcgctggcacccctccagtcgctggccgaggccatggggaagctcgaacgcggacattacgaggcccgtgtcacgccgggcggcgcgccggaactcgccgcgatctgcaccaagctcaaccaccttgccgcgacgcttggcgaggcggtcgaggacaagcgtcgacttgccgagcgtgcggtgtcgcttcaggacatcgagcgcaaggagatcgcgcgcgagctccatgacgagttcgggccgtatctgttctcgctgcgcgcgcatgcgagcgcactggccaagctggcggatggacgggacccgagtgcggacgccgtgcgcaaacatggcagcgccatgctggagcagatcaacgcgctccagcagttcaatcgccgcgtgctggagcgccttcggcctgtcggccttgccgagctcggtttgcgcaaggcactcgaatccctgtcgcggctttggcggcagtcgcatcccgaggtcgcgatcgagaccatgatctcgccggcgctcgggccgaccggcgagaccgccgatctcaccatctaccgtatcgtgcaggaggcactcaccaacgtattccgccacgccggtgcgacctcggtcaacgtcgtcatcgagccggcggagcagatggctaacgacggccgcggctgcgcccgggtgcgggtcagcgacaacgggcgcggcatggagccggaccagaagctcggcttcgggctcgtcgggatgcgcgagcggataatggcactgggcggcacgctcaacgtcgtgtccggcgatggcggcttgactgtagaggccctgattccgactgcctcgtcatga

SEQ ID NO: 3043 - DNA, 399 bp, BradyrhizobiumColbertium
atgccgatgtttggccgatggatggcgtcgattctggccgccgcgatggtgtcaggatctgcgctggcggcttctcgcggtgatcccgtcaagaagttcgacaccgacaacgacggaacgctcgaccatatcgaggtcaggaaggcggccatggcgcttttcgccaggctcgacccggatctcgacggcacactggacatgcgggagttgcgggggagattgaccggcaaagagattgcggcagcagatcccgaccacgatggaacgctgtcggtgaacgagtatctcgccgtggtctcgcagcggtccgacgcagccgatccggatcatgacggcacgctggatagaaccgagctgaaggcgccggctggacgcgcgctgcttcagctgctgcaatga

SEQ ID NO: 3044 - DNA, 639 bp, BradyrhizobiumColbertium
ttgagcccgatactcgtcgtcgacgaccatccaatcattgcagaagcttgccgcgtggtgctgggggacgtcgaagacgtcgtcgcggcgcgcgatgtcccgagtggctatcaagcattcctggagcaccggcccggagtcgtcatcctcgatttgagctttcccggggaagcgctgggcggcgtcgacttgctgcaccgcatgtcctcggatgcgccgctcgcgcgcgtgctggtcttcagcatgcatgcggacgcaagtatcgttgcgtccgcgatcaaggcaggagccatcggatatttgctgaaggactctccgcccgacgaactgccaaaggcagtgcgtcaggtcaggctcggacatcgctatgtcgacgagcggatcaatcttcgcggcgttcccctccccgatcacgttgattccggcaaggccgccatgctgacccgcagggaaagagagacactcagccttcttggccaagggaattcctattctgcgatcgccgaagagctggatatcacgcctcgtgccgtcgctcggctcgtcaagcaggccaggaccaagctcggtctccgtcgcacgagcgacctgctccgccgtgcgcacgagcttgcgggcaacgcggatagctcgaactga

SEQ ID NO: 3045 - DNA, 1767 bp, BradyrhizobiumColbertium
gtgcatgccatcgacgcgcgcaccggcaagcgcatctggacgttcgatcccgaagtcaaccgcgagctcggctacagaggctgctgcgacgtcgtcaaccgcggcgtcgcactctacaaggggaaagtgttcgtggccgcatatgacggccgactgatcgcgctcgacgcggcgaccggcaagaaggtctgggaaagggacacgctgatcgatcacgagcattcctacacgatcaccggtgcgccgcgcgtcttcaacggaaaggtcgtgatcggacaaggcggcgccgaatatggcgcgcgcggctacgtcaccgcgtacgattccgatagcggcaatcagctctggcgctggttcaccgtgcccggcgatccgtccaagccattcgaagacgagtcgatggagaaggcggccaagacgtgggatcccgccggcaagtactggctcaatggcggtggaggcacgccgtgggacaccatcaccttcgaccccgatctcaatctcgtctatatcggcaccggcaacggctcgccctggaacaggaacgttcgtagtcccgctggcggcgacaatctctatctcgcctcgatcgtggcgctgaacgccgataccggcaagtacgtctggcactatcaggagacgcccggcgaccactgggactacacctcgacgcagccgatgatcctcgccgacatcagcatcgatggcgcgccgcgcaaggtcatcctgcacgcgcccaagaacggcttcttcttcgtgatcgaccgcaccaatgggaaattcatctccgcgaagaacttcgtcgacgtgaactgggccaccggttacgacgccaacggccgcccgatcgaggtgccggccgcgcgtggcgaggcggcgtacgactcgatccccggaccctacggcgcccacaattggcatccgatgtcgttcaacccgcagaccgggctggtctatctgccggcccagaacgtgccgctgaacctcattccggaaaagaacttcaagcagaatgccgcaacgccgggcaagttcggcggcgccaccggctggaatgtcggcttcgtgctcaacggagagccgccgaagagtcttccgttcggacgcctgatcgcgtgggatccggtcaagcaaaaggaagcctggcgggtggaatacccctccccatggaatggcggcactctgaccacggccggaaacctggtattccagggcaccgcggatggacgcttcgttgcctatgatgccaagaccggcaagacgctgtgggaaacaccgaccggcaccggcgtcgtcgccgcggcctcgacctacatgctcgatggcgtgcagtacgtctcgatcgccgtcggctggggcggcgtctacggcatggcgcagcgcgcgaccgagcggcaaagccccggaacagtctacacgttcgcgctcaacggcaaggcgccattgccggaattcgtgaagtaccagaccgaaggcctgctccagggcgtgaaatacgatcccaaggacgtgccggaaggcacagcactctacgtcgccgcctgcgccacctgccatggcgtacccggcgtcgacaagggcggcaacgtccgcaatctcggctacgtgccggcggaggagatcgccaacctcaagagcatcgtcttcaaaggaccgttccgcgacaaaggcatgccggacttcacgggcaagctcacggaagccgatgtcgtgaagatccaggccttcatccagggcaccgccgacgcgatacggcccaagaagtga

SEQ ID NO: 3046 - DNA, 2445 bp, BradyrhizobiumColbertium
atgggcgttcgtagtctggtcatcatttcaatttctacgggaatggttgttgcgaccgaggctgttgccgctccagacgagcagaccaacgtccagaacctgccgccggtcgaagtgactgcgccagcgccggcagcgccgcgggtggtcccgtcgcggccggttgcgcgcataggcgcgccggcatccgccgccccgaggactcggctctatgtcttcccgacctcgcctggcatcggccggggtctcgatgtcgacaaggtcccttccgcaatcaacgccgtcgatgcgagccagatcaagcgaaccaactcgctgaacgtgactgatgcgttgcgcgacaacattcccggcgtcaacatcagcgaggtcaccggcaatcccttcgcgcctgacgtcgagtttcgcggcttcgttgcctctccggtggtcggcacgccccaaggcctcgccgtgtaccagaacggcgtgcgcatcaacgaagcgttctcggacgccgtgaactgggacctgatccccaccgccgcgatcagatccgtgacgctggtgaccaacaaccccgccttcggcctcaatgcgctgggcggcgcaatcaacctgcaaatgaagaacggctttacttatcatggcgcggaactcgacgtcatgggcggttcgttcggccgcatccagggctcggcgcagtggggcaagcaggtcgatcagaactacgccgtctacggcgcgctcgaaggcctgcgcgacaacggcttccgtaatttttcccaatcgactgttcggcgcttctatggcgatatcggctacagggcgggtgacagcgaattccacgtcaacatggggctggccaagaacaacttcggcgccagcgctaccgtaccggcggagctgctcgacaaatactggggcgcgacctacaccacaccgcagactatcacgaaccgcgtcggttatctcaacctgaccggaaaggtcgacgcgacgccgacctggacgttcgagggcaccgcctatgcgcgccggttcgagcagaacatcgttgacggcaatccgaccgacgtagaggagtgcgccgcagatgcgggattgctctgcttcggcgacgacacttcagccgcctatggcgggggcggcgtgcaactcgccaacccctttgcgccaggcacgatcctcggtgccatcgaccggggctcgatccgttcgtccacgttcggcgtgtcggggcaggccaccaataccgaccagctgttcggccatgacaatcgtttcgtggtcggctcaacctatgatgccggcatctcgcgctacaatgccagctccgagatcggctcaatgggagagaactacgttgtcagcggcagcggcgttttcctcgggccgacccccgcggcagatcccgttgccggtcccgtctcgctgcggacagtcaatcagtacaacggcctctatgcgatggacacgttcaacgtcacgaacgctttcgcgatcacgggcggcggccgcttcaacgcggcgcggatctcgctggaggatcagctcgggaccgcgctcaacggctatcacacctttacccgcttcaatcccatcatcggcggcacctataggatcacgccggaattgaccgcctatgccggctattccgaggccaaccgcgtgccgacgccgctcgagctcggctgcgcggatcccaccaggccctgtctcatcgcagccttcctggttgcggatccgccattgaagcaggtcgtctccaagaccgtggaggcgggcttccgcggcaccaaggagctgaacatcggcacgctcggctggaaggtcggtggtttccgtgccaccaatcacgacgacatcatggcggtgccggtcgtcgggcggaccggcttcggctacttctccaatgtcggccggacccgccggcaggggctggaggccgaggtcaacatcaagtcgcccacgctccagttccaggcgagctattccttcgtcgacgcgcgttttcttgatccgctcgagctcggctcggaaagcccgtttgccgacgacaccaccgaaaccatccaggtgaggcccggcaaccagatcccggcggtcccacgccaccgcgtcaaggtcggcgtcgactacgccgtgaccgatgtctggaaggtcggcggcaacgcgctgttcgtctccagccagcatctcgtcggcgacgagtccaaccagttcgagaagctgccgtcctatacggtgttcaatctccacacctcctatcaggttgcgaagaacgtccagctctacggccgcgtcgacaacgtgttcgacaagcgctacgtcacctacggccagttcttcgaccgcgatgccttgcccaacttcaccaacggcggcagcgacttcctcgacccgcgctccctgagcccggcacggccgagggcgttctacgcaggaatgcgggtgacgttctga

SEQ ID NO: 3047 - DNA, 279 bp, BradyrhizobiumColbertium
atgatcagcgctaagaaagcgttaatcgcacggcccgagccgatccggcccgtctttccgcagctcggcttcgagctcctcgatgatgctgtgaagcagacacgccgcgagcggatcggtcacttcccgctccaaatgcctatagcgcgcgatccggaattgctgctctctcaactggtgctctgtcatcggacgggccctccgacgaaccgacgcgcaggccgccaagtcgtttcgttaaagttttcagatcattcgtcatggtttctgattggttaa

SEQ ID NO: 3048 - DNA, 408 bp, BradyrhizobiumColbertium
atgctgaaggacggcacctatgcggcgtggtacaacacgccgctcgatcaggggaccggaatcgtccatgtcgcggacggccagatctgggggcgcgacagcctgatgacctatcgtggctcctgcacggtcgatggcgaccgcttcactgcgatcgtatcggcgaagcgtcataccgaggggcgagcaacggtcttcggtgttgaagatgaactcacgttggacatcgagggacgctgccccggcaagatcgcgagctacaccgcgacggcacaccaggtaccgggagtgatccttcatggcacgctcattctgacggaacagcagccgccggcaggcgagcgaaccgagcgcgtggcggcgttagatctcggcaggctgccaagattgccgaggcgtttgcgctga

SEQ ID NO: 3049 - DNA, 1464 bp, BradyrhizobiumColbertium
atgacggacaaggtctcgcgtcgccgatttgcgaagatcgcggggctgtccgcagccgggatgactggtgcgatcgacgcagccaaagccaagccggcccggccgccgcgcgggggaggcggctttccgccgggtttcatctggggcacggcgacctcgtcataccaggtggagggcgccgtcaacgaggatgggcgtggggcttcgatctgggacaagttcgcgcgcattcccggcaagatcgaggacggcaccaccggcgaccgcgccaatgagcactatcaccgctacaaggaggacatcgcgctcatcaaggcgctcggctgcagggcttatcgtttctccgtggcctggccgcggctgtttccggaaggcgacggcaagcccaacccgaagggaatcgatttctacaatcgcctcgttgacgagctcctgaagaacggcatcgagccgtggctgacgctctatcattgggatctgccgcaatcgcttcaggaccgttttggcggctggcgttcaacagatacctgcaagatctttggcgactatgcggcatacgtcgccaagcacctcaccgaccgcgtcaagaacgtgttcacgctgaacgagagcggccgtttcgtctatttcggttacggcatcggcatcgacgcgccgggcctgaagttgccgcaggccgaggtcaaccagatcaggcacaacagcgcgctggcgcatgggatcgcggtacaggccgtgcgcgcccatggccggcgcggcaccagggtggggccggccgagaacatcgatgcctgcgtgccggcgatcgacacgccggagaacgtccgcgccgcggagattgcgctgcgcgagatgaatgccggctatctcaacgtcatcgtgacgggccgctataccgacgccttcctgaaatttgccggacccgacgcgccgaaattcaccgatgcggagctcaagatcatctcctcgccggtcgattttctcggcctcaacatctacgcgcctcagaactatgtggtggcctccgaccagggcgcgggcttcatgccgctgccgatcccgaaatcgttcccgcacatgaattcggactggctgcgcgtcgggcccgagacgatctactgggtgccgaagctcgcagccaagatatggaaaacagacgcgatctacatcagcgagaacggcacctccggcgacgacgtcgtcacgcccgacggcaagatctacgacaccgaccgcatcatgtatttgcgcaactatctcgcccagctccagcgcgccactgccgaaggcgtgccggtgcgcggctatttcctctggagcctgatggacaatttcgaatgggtctacgggctgaacaagcgtttcggcctctaccacgtcaatttcgacacccaggtccgtacgccgaaactcagcgccagcttctatcgcaacgtgatcgcgaacaattcggcgggggcgtga

SEQ ID NO: 3050 - DNA, 1233 bp, BradyrhizobiumColbertium
atggctgacgcgctgatcatcgatgcctgcaggaccccccgaggcatcggaaagacgggcaagggagcgctttcgggcattcatccgcagcagctcggagcaaccgtgctgcgcgcgcttgccgatcgcaccggcatcaatacggcagacgtcgacgacatcgtctggggctgcagcgcgcaggtcgcgacgcaaagcggcgatctcggccgcatgtccgcgctcgatgccggctatgacgtgcgcgccagcgcggtgacgctcgatcgcttttgcggaagcggcatcaccagcgtcaacatggccgcaagctcgatcatggccggcgccgaggatctcgtcatcgccggcggctgcgagatgatgtcgatggaggggcggcgcggcagtggtccgatgatgatggacaacggcaatctgcgcctgcgtgcactgcatccccagtcgcatcagggcgtctgcgccgacgcgattgcgaccatggagggcatcagccgacgggacgtcgatgcgctcgggctcgagagccagaagcgtgccgcgcatgccatggcgaacgggtacttcaaaaagagcctggtgccagtctatcgcgaggacggcagcctcgcgctcgaccacgaggaatatccacggccgcaaaccacgatggaaggcctgagcagcctgaagccggcgttccctgcgatcgccgactacgctctcgacgacaagggcacgacctatcgtggcctgatcctgcaagaataccctgagctgaagatcgacttcgtgcatcacgccggcaactcctccggcgtggtcgacggcgccgccgcgatccttctcgcatcgcccgcttacgccaaggcgcacggcttgaagccgcgcgcccgcgtggtggcgatggccaacatgggggactcgccgaccctgatgctgaacgcgccggtgccggcgacgcgcaaggtgctggcaaaggccggtcttaccaccgacgacatcgacctgttcgagatcaacgaggcctttgcggtggtggcggaaaaatatatccgcgacctcaagctcgaccgcgcgaaggtcaacgtcaatggcggctcgattgcgctcggccatcccatcggcgccaccggctcgatcctgatcggcaccgtgctagacgagctcgagcggcgcgatctcaagcgtggtctcgtcaccatgtgcgccgcgggcggcatggcgccggccatcatcatcgagcgcgtctag

SEQ ID NO: 3051 - DNA, 303 bp, BradyrhizobiumColbertium
atgccaacccagatgtccaaatcgcagttgatcgaaaagattgcgaccgccaccgagctttccaagcgtgacgtcaagaacgtcatggagacgctgaccgacgtcggccacaaggagctcaagaagaacggcctgttcctggtgccgggcttcgccaagttcgtggttatcaagaagcccgcaaccaaggcgcgcaagggcaccaacccgttcacgggtgaggagatgatgttcaaggccaagccggcccggaagatcgtccgtgctcgcccggtcaaggctgccaaggacgccgtgggctaa

SEQ ID NO: 3052 - DNA, 165 bp, BradyrhizobiumColbertium
gtgaaggcgatgccgaaactgctggacagagcaaagaaatcgcagacaacgcagcgggtgcgcgaactgctcgaccgagccgtcgaccggctgcgcgatgcgcttgcaggagcccagccgcggcttcagccggtcccggtccgggtgaagcgccgcaagggctga

SEQ ID NO: 3053 - DNA, 2388 bp, BradyrhizobiumColbertium
atggccaccgaacagatgaacacgaacgaacagactaataacgacgtgaagatccccgacgacgcgctgatcatcgtccccgtgcgcgagatggtgctgtttcccggcgctatcgcgccgatcacgatcggccgggcgaagtccatcgcagctgcgcaacaggcgctgcgcgagcagcggccggtcggcatcgtcctccaacgcagccccgaaaccaatgatcccgggccggacgacctctaccgggtcgcaaccatcgccaacatcgtgcgctacatcacggcgcccgacggcacgcatcacatcgtctgccagggcgtgcagcgcgcgcgcattctcgatttcctgccggggacgccgttcctggccgcacgcttccagcagatccccgagccgaccacgatctcacccgagatcgaggcgcgcgcgctgaacctgcagcgccaggccatcgaggcgatcgagttgctgccgcaggcgccgccggagctggcagcgatgttccagggtaccagcgcgcccggcgcgctggcggatctggcgacctcgttcatggacatcaagccgcaggacaagcaggaggtgctggagaccatcgacctcgctctccgcgtggagaaggtgtcgaagcacctcgccgagcggctggaggtgctgcgcatcagcaacgagatcggccagaagaccaaggcctctttcgacgagcggcagcgcgaggcgatcctgcgcgagcagatggcaaccatccagcgccagctcggcgaaggcgacggcaagcaggccgaggtcaccgagctgacggccgccatcgccaaggccaacatgccaccggaggcggaggcgcatgccaagaaggagctgcgccgctacgaacgcatgccggaggccgccggcgaggccggcatggtccggacctatctcgactggctgatcgagctgccctgggcgctgcccgaggagaagccgatcgatatcaaggaggcgcgagccatcctggatgcggaccatttcggcctggagaagatcaagagccgcatcatcgaatatctggcggtccgcaagctcgctccgcagggcaaggcgccgatcctgtgcttcgtcggcccgcccggcgtcggcaagacgtcgctgggacaatccatcgcgcgcgcgatgaatcgtcccttcgtgcgcgtcagcctgggcggcgtgcatgacgaggccgagatccgcggccaccggcgcacctatatcggcgcgctgcccggcaacatcatccagggcatcaagaaggcgggcgcacgcaactgcgtcatgatgctggacgagatcgacaagatgggccgtggcgtgcagggcgatccctccgccgcgatgctggaggtgctcgatcccgagcagaacgggacattccgggacaactacctgggcgtgcccttcgacctctcgcgcgtggtgttcattgcgaccgccaacatgctggaccagatccccggtccgctgctggaccgcatggagctgatcagcctcgccggctacaccgaggacgagaagctggagatcgcgcagcggtacctggtgcggcggcagctggaggccaacggcctctcggccgagcaggccgagatcgagccggaggcgctgaagctgatcgtcaagggatacacccgcgaggccggcgtgcgtaacctcgagcgcgagatcggcaaggtgttccgccacgccgcggtgcaggtcgcggaaggcacggccgcgaaggtcgtggtgacggcgaaggacatcgcgaccgtgctcggccagccgcgcttcgaaggcgagatcgcattgcgcaccagcgttccgggcgtcgccaccgggcttgcctggacgccggtcggcggcgacatcctgttcatcgaggcaacgcgcgtgcccggcaaaggcgggctgatcctgaccggccagctcggcgacgtcatgcgcgagagtgtgcaggctgcgatgacgctggtgaagagccgggcctcccagctcggcatcgatccccagctgttcgagaagagcgacatccacgttcacgtccccgcgggcgcgaccccgaaggacggtccgagcgcgggtgttgcgatgttcacggcgctgacctccctgctcaccaatcgcacggtgcgcagcgacaccgcgatgaccggcgagatctcgctgcgcgggctggtgctgccggtcggcggcatcaaggagaaggtggtggccgcggctgctgccggcttgaagcgggtgatgctgccggcgcgcaacaagcgggactacgacgatatcccgaagagcgcgcgcgacaacctcgaattcatctggctggagcgcgtcgatgaggccattgccgccgcgctcgagccgggcgaggcccaagtggatgaagcggcggagtga

SEQ ID NO: 3054 - DNA, 384 bp, BradyrhizobiumColbertium
atgcaacccaagaatcccctcgactggatgctgtccgaagccctggattcgctgacccgcgccgatcggctgcgccagcagttcggccgccaggaagcctgttgggagccgcccatcgacgtgctcgaaaccgagcgtgagctcctgatcctggtggcgcttcccggggtcaatccggacaatgtcgagacggtcatccacgacggcgttctcgtcatctccggtcagcgcaccctcccgccggagcttcgcaacgcccgcatccaccggctggagctgccgcaggggcgttttgagcgccgtattgcattgccccttggccgctacgccatcagccgcttcgtgatggacggctgcgtcgcactgcgcctcgccaaatcctga

SEQ ID NO: 3055 - DNA, 582 bp, BradyrhizobiumColbertium
atggctaaacgagcgaagaaacgcaccaccaagaagtccgcggccaagaagaccgcggcacgccgcccgcgtcaggcgccgaagatgctcagcgatctgtttctggagacgctgaaggacatctatttcgccgagaacaagatcatcaagaccttgcccaaaatggcgaaggcagcacagtcgaaggagctggccgccgccttcaacaagcacttgcgcgagacccagggccaggtcaagcggctggaccagatcttcaagatgctgggcaagcccgcacgcggaaagccctgcgaggcgatcaacggcatcaccgacgagggcgccgagatcatgaaggagttcaagggtgcgccggcactcgatgcgggcctgctcgcggccgcacaggcggtcgagcattacgagatctcgcgctacggcacgctgcgcacctgggccgaggagctcggcatgcaggacgcggcaaggctgctccaggagacgctggacgaggaagaggcgaccgatcacgccctgacggagctcgccacctccgtgatcaacctcgaggccgaagaagagtaccgcgcggcggcctga

SEQ ID NO: 3056 - DNA, 207 bp, BradyrhizobiumColbertium
atgagcgacagcggagtgagcatgctcctgggccacgcctcggcccagatgctttggctctggttcatcggcgcgttcgtgctcggcggggtccttgtttacggggtgatgaaggccggccatctacgccgcagcgaacgggcacgcctggatcgtgcgacggaagagcgacagcgccaggaagacccctacaagcgtccgacctga

SEQ ID NO: 3057 - DNA, 1188 bp, BradyrhizobiumColbertium
atgcaccgttaccgcttcggcatcgaagaggaatactttctggtcagccgccagtccgcggcaccacgatcggagctgcccaagccctacatggcggcagcccagaagcgcctcggcgagcggctgactaccgagatcctgcaatcgcagatcgaggtggcgaccccgccgctgacgtcctcgggcgatgctcgggccgagctcgcgcgctatcgctcggttcttaccgaggtcggcaaggagcacggcgtcggaatcatcgcggcgggcacgcatccgctggcgcagccgcagcagcagcgcatgacgcgcaagcgccgctacagcaaggtcatcagcgacctcggaatggtcggcctcggcaatccgatcagcggactgcacgttcatgtcgaggtgcccgagcccgacctgcgcgtcgagatcatgcaccgcctcgtgccgttcctgccgctgctgctggcgctctcgacctcgtcgccgttctggtgcggctatccaacgggattgctgggctaccgcaatgccgccaacgacgccctgccccgcaccggctttccggagatgttccggaacctggccgaatacgagacgtatgtgaagacattggtcgatgcaggcatcgtgcccaacgccacctatgtctggtgggcgctgcggccctcgcttcagcatccgaccctggagctgcgcatcaccgattgctgcaccgctaccgcggactccgtggcgatcgcagcgctgtttcgcgcgctggtccgccatgccgtccaccatcccgacctgaacgccacgcattcggccgtgcaccgcgcgttggtcgaggagaatcgctggcgcgcccagcgctacggaaccgacggcacctatatcgacctggtgtcgttcgaaccgatttcatttcgaagctggcttgattccgtgattgccatgctggcacctcatatcgcgcatctgggcatcgaagacgatatccagcatctcaagtcgatacccaagcgcggcacttcggcgcatcttcagctcgaatatttccgcagcttgaggaagttcggccggtcgccgcgggaagccatcggggacgtgacgaaatggctgcggacgtcgaccgaagccggtgacttcaccgcccggggcggcgagccgaagacgcctccggcgcggcaaccgctcgcggatctggtctga

SEQ ID NO: 3058 - DNA, 894 bp, BradyrhizobiumColbertium
atggcgcttcgattggggacaaacgtcagagagctcaaggctgccattcatcaattcggcagcgcggccgatgcggtcgcctatggccttcagcaatggagacatagcgcctcgcgccgccagtggcaggctcgcagcggttcaccgcaggtcggcattctctccgattccatggtcgcgcgtggcgagcagctcgcctcggtcgcgctgatctgcgtcaaggccgtgggcctcgtggccggcgccgtgccgcgcatcctgcccgtcgcgccagaagccgacgtcgatgcctatctcgacgggctcgacggccttttcgtcggcggcgggcagaccaacgttcatccgtcgcgctatgggcgaattgcggacgaggcacgcgacgggccgttcgacgaattccgcgacgaggtcgcactccggctgatcccacgggcgctggcgcgaggcatccccgcgcttttcatctgccggggaattcaggagctcaacgtcgcctttggcggcacgctggcgaaggagccggacgatttgccggaggacaagcgccatggcacgcccgaggcggacaacgaggacgcccgctaccggctgcggcagaaggtgacgctgcgaaagggtggcgtcctgcaggatatctgtggcgcagactcgatcaccgtgaactcgctgcacagctttctcatcgccgatctcgctccgggtctggtcgcggaggccgtggctgaggacggttcgatcgaggcagtcagcgtcgagggcgcgagcgatttcgccgtcggcacgctctttcacccagactattgggcgagctccgaccatgcgtcggcgcgtatcctgacagccttcggggacgcggttcgccgccatgccaaggcgcaaggggcagcatag

SEQ ID NO: 3059 - DNA, 627 bp, BradyrhizobiumColbertium
atgattgatttctctctgtccgccttcgtgacgctgctgttggtgatcgatcctgtcggtctcgtgcccgcctttctcgctgccacagccggcctgcccgacaaggccaagcgaacgatcgcgctgcgcgcgccgttgatcgccgcctcgatcctggtggtgatcgcgctggtcggaaactggctgctgcgcgagctcgggatcggcatccccgccttccagatcgccggcggcctgctgctgttcggcgtctcctatcagatgatcttcggcgatcgtccgcaccgcgaggcacgcgaggccgacaaggcgaccgcggagcatgtctcggacgtcgcagtgtttcccctggcgatccccatgatggccggccccggcgcgattgcgaccacgctgctcctttcgggcgacgccggctacggaccgcggctcgccatcatcatcgccgtcgtgctctgcgtctgcctgatctgcatgctgtgttttctctccgcgagcctgatcgcgcgcacgctcgggcgtaccggcaatgccgtgctctcgcgcgtcctcggcatgctgctcgcggcttattccgtgcagttcgtgatcaacgggattgcggccgtccggaccagcctgccatag

SEQ ID NO: 3060 - DNA, 654 bp, BradyrhizobiumColbertium
atgtcgatgacagcggacgagctcgccaagaaacaggccatcatcgacgcctgccgtcgcatgaacgcgctcggcatcaaccagggcacatcaggcaatatcagtgtccggcatgtggacggacttctggtcacgccgaccagcgtgccctatgacgcgatgaccccggaccagatcgtcttcatggcgatggacggtacgcacgcgccgcaccagaagccatcgagcgaatggcgcttccatcgcgacatcctgaagtcgcggcccgacgtcaatgccgtcgtgcatgcgcatccgacctattgcaccattctggcgatcatgggcatggagatcccgccggtgcactatatgatcgcggcagccggcggcgagagcatccgctgcgcgtcttatgcgacgttcggaacggcggagctatcggaccatgcggtgcgggcgctggagggccggctggcctgcctgctcgaccaccacggcatgatcgcgatgggcaagacgctggacaaggcgatgtggctggccgtcgaggtcgagacgctggcgcggcaatatcacggctgcctccagagcggacgaccgccgctgctccccagcgacgagatcgaacgcgtccgccggcgcatggccggctacggcctgtcggaagggtag

SEQ ID NO: 3061 - DNA, 1788 bp, BradyrhizobiumColbertium
gtgttcgtgcggatcagacatctcgtcgatggcaaggggacgagccgcaccatggttcggctgcgtgccctcttgcgcagcaatgagttctacctgatcccgctcgcgctcgtgatcggcacgctcgccggcgcggtcgtgacgctgatggccgggatcgcgcagatcgcgcacgtggtgatctacggaatcccgattgatgtccacctgtcggctcacgcgagcgtcagtccgtgggcggcactgatcgcgcccgcagtcggcgggctgtcgctcggaatcatggaatggttgcggcggcgcatgaagatatcgaatgctgtcgatccgatcgaggcgaacgcgttgcgcggcggcaatctgtcgatgcgagacagcgtggtggtggcgggccagactttgatctcgaatggctgcggtgcctccgtcggcctcgaggcgggctacacgcagatcggttcgggcatcgcctcggtgatcggcaagttcttcaatctgcgccgcaacgatctgcgcctgatggtcggctgcggcgctgctgctgcgatcgcggcggcgttcggtgcgccgatcaccggagccttctatgcctgcgagctcatcgtcggcgtctatgcggtcggcagcgccgctcctatcctcgccgcctcgcttgcgggcgccttgaccgcgcaatggctgggcggcgcgccgtattcactggagataccgaaggtcagcgccgtcggcgtcgagcaatatctggctctcatcgggcttgcgctcatcaccagcggcgtcggcatcgccgtgatgcgttcctcgccgatgttcgagcgactgttcgcctggttgccggtctggttccgcccggtcatcggcggcctcatcgtcggcgggttcgccatcgtcacgccgcaggtgctggcggccggccatggcgccatggtgctcgatctcttccaggagatgacgatcggtctgatcgcgctgatcatcgccttgaaggtgacggcctgcctgatttcgctcgcctcgggtttccgcggtggcctgttcttcgcctcgctgttcgttggaagtctgatcggaaagttctttgccgcggtgctgcttttgatcagcccgaacttcgccatcgatccgctggtcgcgatgctgaccgggatggcgacgctcggcgtcgcgatcgtcggcggcccgctcaccatgtcgttcctcgtgctggagatgacccgcaacgtcgacgtcaccgccgtggtgctggccggctgcatcgtcacctcgatctgcgtccgcttcatgttcggtcactccttctcgacctggcggctgcatctgcgcggcgagaccatccgcagcgccaacgacgtgggctggctgcgcaatctcacggtcgagcgcctgatgcgctcggacgtcggcaaggtgccgtcgaccacgacgattgcggccacgcgccgcgaatttgcgctgggctcgcggccgggcatcgtgatcgtgaacaatgcggacgaatatgtcggcctcgtcaccttgcctgacctgttctccagtgatctcgacaccatcgccgacgagatccaggtgatcgagctcgcgcgcctgaccgacatcgtgctgatcccggaaatgaacgtgaagtcggcgatggcggtgttcgacgaggccgaggccgagatgcgggcggtggtcgattccaccgacagccgcaaggtggtcggcttcctcaccgagagcttcgcccgccgccgttatgtcgaggagatcgacaaggcgacgcggggcgtgcttggggcgctgtcttag

SEQ ID NO: 3062 - DNA, 252 bp, BradyrhizobiumColbertium
atgattgcggttcgtaaactgccggcgcgctatgcgccgatcgtgatgccgttcgtgctgtccatcctcatgacggccgtggtgtcggtcatatcgacgctgcggagcctcggcgcgacgccggcattcctggcgacctggccgggcgcctgggcgctgtcctggctcgtcgcctttcccacgctgctcgtggttctgccgctggtccgccggatcgtggcctgcctcgttgcggccccgcccagccgatag

SEQ ID NO: 3063 - DNA, 387 bp, BradyrhizobiumColbertium
atgatttccgcagccggccgcaacactgtcgtggctgcgtttgcaagcctcgccctgattgcggcctccgcatccccttccgcggctgcctcgtccgggacaccggccaaggcggctgctgcaagccagcccacgtccgatgtcaccgatttcggcgcagcccggcgtcgccactatcataggcgcgggccgaacgccgcaggactcgccttcatgggcatggcggcaggtataatcggaggcgcgatcgccgagagccgccgccgcgagtactacgagaaccgctatcactacggctatggcccgcgtccgtattatggtggcccgggctattatggcggcggcccctactactacgatccgggctatcgttacgcgccatattga

SEQ ID NO: 3064 - DNA, 414 bp, BradyrhizobiumColbertium
ttgaacggcgaccagctcaagctggtgttcgacgagactgcaaagtcgagcctcagcatcaccggcgtgacctacaactccaagggtctgggcctcgctgcgctgaccagcggtgtcgacttcatcgacaacgctgccaccaacaaggtcagcaccaacctgaacaccgcgtcgagcacgctgcgttcggaagcttcggctctgggttcgaacctcacgatcgtgcaggtgcgtcaggacttcaacaagaacctgatcaacgtgctccagaccggttcgtccaacctgaccctggccgacacaaacgtcgaggcggccaatagccaggcgctgtcgacccgccagtcgatcgcggtctccgcgctgtcgctggccaaccagtcgcagcagagcgtgctgcagctgctccgctaa

SEQ ID NO: 3065 - DNA, 378 bp, BradyrhizobiumColbertium
gtggtctgcagcgcctggttggcgatcgacttcgcgctgtcgatcagcttctgcagcgaggtcaggccggtgttggcggcctgcagcacctgcacgccgttggcgatgccatcgagcaggttgttgatgtcgctggcacggttgtcgagcgactgtgcggtgaagaagttggtgggattgtccagggccgagttgacgctcttgccggtcgacagacggttctgcgtggtggcgaggaggtcggcggtggactggagagagagcaggttctggcgaaccgacgcagagagaacaataccggacataactcttacccttctggtttacgcgtcttcgttcgatcgcttcggatcgagtgacaggaccagcgtgccgtga

SEQ ID NO: 3066 - DNA, 348 bp, BradyrhizobiumColbertium
gtgacctacaactccaagggtctcggcctcgcctcgctgacggttggcgtcgacttcatcgacaacgccgccgccaaccgggtgctgaccaacctcaacgccgcctcgagcacgctgcgctcgcaggcctcgagcctcggctcgaacctctcggtggtgcaggtccgtcaggacttcaacaagagcctgatcaacgtgctccagaccggttcgtccaacctgactttggccgacaccaacgtcgaggcggccaacagccaggcactgtcgacccgccagtcgatcgcggtctccgccctgtcgctggccaacacgtcgcagcagagcgtgctccagctgcttcgctaa

SEQ ID NO: 3067 - DNA, 732 bp, BradyrhizobiumColbertium
gtggggcctggatgccaccggccacatcgccaccgacggcaacggcaattcgatcatctacatggggacgggggctgcgcccaccggcaccgtcaacgacctgctgagcgcgatcgacctggcgagcggcgtcaagagcgcgacgatcagcgccggcgctgcgaccatcgccgtcagcggtgcggctggtcccgtcggcacgcttcaggtggcatcgtccatcacgggcggccaggtgacgctgaagagctcgaccggcgccgatctgagcgtgaccggaaaggccgacttcctcaaggcgctcggtctgacggctgcaacgggcgctggcaatgccaacgtcaccgcggcccggtcgaccaccgcaggttcgctcggtacccttgtcaaggacggctcgacgctgaacatcgacggccacaccatcaccttcaagaacgcgcaaacgccgcaatcggcgacgagcgtgacgtccggcggcgtcagcggcaacatcgtgaccgacggcaacggcaactcgacggtctacattcagagcgcgacgctgaccgatctgctcaacgccatcgacctcgcgaccggcgtcaagaccgcaagcatcttcaacggcgcggcgacgctgtcgaccacttcgggccagatcccgtcgtcggtcaacagcagcggtcagctcgcgctgtccaccggcgtcaatgccgatctctcgatcaccggcaccggcaatgcgcttag

SEQ ID NO: 3068 - DNA, 369 bp, BradyrhizobiumColbertium
atgtcgaattccgctgcctcggcctatgcgcgtgttgcaacgaccaccgcatctcctcgggacatcgaggcgcagaccctgcttaaggccgccaacaagcttcaggatgcgatcaacagtgccgatccgttcagcgagcagaccacgcaggccctgatgttcaaccgcaagctctggactatcttcctgagcgaagcgatgcgtgacaccaatccgcagccgatcgacgtccggcagaagatcgccaacatcagcgtgttcgtgctgagccagaccgctgcgctccagatgagcccgcagttcgatcacttccgcccgctgatcgaaatcaaccgcaatatcgctgcaggtctgtcgggacggccgtga

SEQ ID NO: 3069 - DNA, 357 bp, BradyrhizobiumColbertium
atgagtacagatttcagcatccggccggtggggatcccggcccccgcgcagatcgtaacgacgtccaacgcggcggcgaacgaggccgtgcaaactgatctgccggtcagcaagaccgtcgccgcggccgatacgagcgcgcccgtgcgcaatgatctgccccatgagaacgtctcacgccaggtcgtgttcgaccaggcagctgcatcattcgtctttcaggttgtcaacgagaagaccgacgcggtcgtcaatcagtttcccgacgaagcaatgctgcgccggcgggcctatttccatgccttggataggcagtccgagcccgcgcgcccgctcagcacggacgtcagcgcctga

SEQ ID NO: 3070 - DNA, 498 bp, BradyrhizobiumColbertium
atgaaccatttcaacgcctcacgccagccgatgcaagcgcaacgcccgactgccgcggccggcagcacggaagcacgcaaggtcgccgaaaacctgatggatgcgatgagcgccctgctcggactgatcgagcgcgagaccgagctcgttcgcgccggcaaggttcgcgaggcgatgacgctcgagagcaagaagcaggagctgtcgcgaaactacgtcggagcggtcggccagttgaaagccaaccaggcccagctcgcgaaatccgcgcccgagctgctgtcgacgctgcaccgccatcacgatgcgttccgagcgatgctccaggtcaatctcaccgtgctcgcaacggcgcacgcggtctccgagagcgtcgtgcgcggcgtcaatgccgagatccagaagcgcaacgtgccgaacacctatacggccgccgggcgcagcgccactccgggcccgcgtcacatcaccccgcttgcagtcagccgctccctctga

SEQ ID NO: 3071 - DNA, 369 bp, BradyrhizobiumColbertium
atgcaagcctccgccatcaataccccgcgcctccccaacgcttcggccttctcggtggagagccgcaacgggcggcctgatttcgaactcgccgccgccctccagaaggtctcgccgcagcaacaggcaaaggcgcagaagatcgccaccgacttcgaggcgatgttcctcaacagcatgttctcgcagatgacctcgggccttaagggcgaaggcccgttcggcgacacacccggcaccggcgtatggcgctcgatgctgaccgagcaatattccaagaacttcgcccaggccggcggcgtcggcgtcgcgaccgacgtctaccggaccctcatcctgcagcaggcgaaaacgatccgcacggcataa

SEQ ID NO: 3072 - DNA, 1092 bp, BradyrhizobiumColbertium
gtggcctgcgccgcgctgtcagcgctgacgctctccgtcacgccagcggctgcgacctcgcgtatcaaggatctcgccaacatagagggtgtgcggcaaaaccagctcatcggctatggcctcgtcgtcggtctcaacggcaccggcgacacgctcaacaacatccccttcaccaagcaatcgctgcaagcgatgctcgagcgcatgggcgtcaacatccgcggcgccacgatccgaaccggcaacgtcgccgctgtgatggtcacaggcaacctgccggcctttgccacgcagggcacgcgcatggacgtcaccgtctccgcgctcggcgatgccaagaatctccagggcggcaccctgctcgtcacccctctcctcggcgccgacggcaacgtctatgcagtggcgcagggctcgctcgcgatctccggcttccaggccgagggcgaggcggccaagatcgtgcgcggcgtgccgacggttgggcggatcgccaacggcgccatcatcgagcgcgagatcgagttcgcgctcaatcggctgccgaacgtgcgccttgcgctgcgcaatgccgacttcaccaccgccaagcgcattgcggctgcggtcaatgattatctcggcgtcaaggccgccgagccgatcgacccgtcgacggtgcagctgtcggtcccgcccgagttcaagggcaacgtcgtcgcctttctcaccgaaatcgagcagctccaggtcgaacccgatctcgccgccaagatcatcatcgacgagcgcagcggcatcatcgtgatgggccgcgacgttcgcgtcgccaccgttgcggtggcccagggcaacctcaccgtcaccatctccgagagcccgcaggtcagccaacccaacccgctctcgcgcggccgcaccgtggtcgcaccgcgcagcagtgtcaccgtcaccgaggacggcaagaagctggcgctggtcaaggacggcgtctcgctgcagcagctcgtcgacggcctcaacggcctcggtatcggtccccgcgacatgatcagcatcctgcaggcgatcaaggccgccggcgccatcgaagccgacatcgaggtgatgtga

SEQ ID NO: 3073 - DNA, 414 bp, BradyrhizobiumColbertium
atgcgcatctacggaccgaacggcaccacgcttggaacgccggccagccagaccaggcggatcggctccggcaccttcgcgctgcccgacacctcgtcggcacaggagacgcgaagcgctgccgcgccgaaggccaccgccaacatcgacgcattgctggcattgcagggcgtcgatgaggatccgatcgagcgccgcaagcgctcggtggcccgcggcaggaccgcgctcgacgtgctcgacgatctcaagattgggctgctgtccggcaatctcgatggatcgaccgtgatgcgcctgcgggatgctgcggctaacctgaaatcgtcctcgggcgatcctggtctcgatgcggttctcgccgagatcgagctgcgcgtcgaggtcgaactggcgaaggctgggcaggcttaa

SEQ ID NO: 3074 - DNA, 375 bp, BradyrhizobiumColbertium
atgatgaaaccggacgtctacgcagcgaattgccccacccgccagatcctcgatcgcgtcggagacaaatgggcggtgctgatcctcttgctgctgcgcgaggaaccaatgcgcttcaatcagttgcgccgcacgatcgaaggcatctcgcaaaagatgctcagccaggttctcaagtcgctcgagcgcgacggcctgatcaagcgccatgccatcgcgacggtgccggtcacggtggaatattcgatcacgcagcttggattgacgctggcagctgcggtcgatccgctgcgcgattgggccgagcagaacctgaaagatgtgctcgccgcccagcgccgctacgacgcgcagcagaaggaggaagctgcgtaa

SEQ ID NO: 3075 - DNA, 612 bp, BradyrhizobiumColbertium
atgaatatcgcaatcgcgggcgcctcggggcgagccgggtcggagatcaccaaggagctgtcccgccgcggccacgccgtcacagccatcgcccgcaaccccgagaagatcgcggccctgcccaacgtcacgccgatcaagggagatgtgcttgaccaggacggccttgccaagctgtgggccgggcatgacgtcgctgtgagttccatccacttcctcgccagcgacgccctgaagctgatcggtgccgcgaaggactccaaggtcggtcgctacctcgtggtcggcggcgccggcagtctcgaggttgccccgggcgtgaagctggttgcgacccccaattttcccgctcagtacaaggccgaagcggaggcgggctcgaccttcctcgacctgctgcgccaggaaaaggacctgaactggaccttcatttcgccgtcggcgctgttcgtcgagggggaacgcacgggcaagttccggctcgggaccgaccagcttctcgcagatgcgaacggcaagagctggatcaccttcgccgactacgccatcgccctcgccgacgagatcgaacggccagcccatccgaagcagcgcttcacggtcggttattga

SEQ ID NO: 3076 - DNA, 366 bp, BradyrhizobiumColbertium
atgaacgaccggcagaaggagtacttccgcctgaagctccttgcctggaaggatgagatcctcaaagagtccaagctcaccctgcaggctttgcaggaggagaacgtgaaccaccccgatctcgccgatcgggcatcgtccgaaaccgatcgcgccatcgagctccgcgcccgcgaccgccagcgcaagttgatcgccaagatcgacgccgcgctccagcgcatcgaggacaacacctacggctattgcgaggaaaccggggagccgatctcgttgaagcggctcgaggcccgcccgatcgcgacgctctcggtggaagcgcaggagcgccacgagaaacgcgagaaagtttatcgcgacgaatag

SEQ ID NO: 3077 - DNA, 780 bp, BradyrhizobiumColbertium
atggacaggattctcgaagccgcaaaggccatcgcgctggcgcgccgcaatcatgcaccgctcgcggcgctggagcaccctcctgccgacgaggccgagggttatcaggtccagcgcgcgctgcacgatctcctgctgccgcatgtcggcccgctcgttggctacaagatcggctgcaccagccaggtcatgcaggagtatatcggcatcccgcacccctgcggcggcggcgtgttccagaagggcgtgcatgacagcggcgccaagctcgcggcgtccagctatgtccgggtcggcgtcgaatgcgagattgcagtgcggctcaagcgcgaccttgccgccggcgaggcgccgttcacagccgaatgggtcggcgaagcggtcgaggcctatcagcccgcgatcgagatcgtcgacgatcgctacgtaaaatgggagacgatgggcgcgccgaccttgatcgccgacgatttcttcgccgccggttgcgtgctcggcccatcggtgccgcgctcgtccgtgccggatctgaaggcggtcaagggacgcgccatcgtcaacggcgaagaggtgagccacggcaccggggccgacgtgctcggccatccccacaatgcactcgcctggcttgccaaccatctcgccgccgaaggcaagggcctgcacgcgggtcaactcgtgctgaccggcagcctggtcaagacgctgtggctgaaagcgggcgacaaggtgcggatggaacttgaggggctcggaaccgtcgaggccgagtttacgtga

SEQ ID NO: 3078 - DNA, 714 bp, BradyrhizobiumColbertium
ttgctgcttgcaacttgcgccctggcgagcggctgctcctcgatcgaccgcctgtcgcagatcggcgaacagccgaagctgtcggcgatcgacaacccgacgacgcagcccggctacaagccggtgcagatgccgatgccgaagccggaagtcgcctcctacaatccgaactcgctctggcgcaacggcagccgcgccttcttcaaggaccagcgcgcccgccaggtcggcgacctcctgaccgtgaccgtgaacatcaccgacaaggccaatctgtccaacgagacccagcgcagccgcaccagcaaggaggactccggggtcacggacttcatcggcagccagacggtcacgcaaccgctcaaggttctccccggacgtctccttacaaccgactcgacgtcctcggctgacggcaagggctcagtcaaccgccaggaagcgctgcagaccaacgtcgccgccgtcgtgacccaggtgctgccgaacggcaacctggtggtcgaaggcaagcaggagatccgcgtcaacttcgagatccgcgagctcgtcgtcgccggcatcgtccgccccgaggacatccagagcgacaacaccatcgattccagcaagatcgcccaggcgcgcatcgcctatggcggccgcggccagatcatggacgtgcagcagccgcgctacggtcagcaggtcatggacgtgctgctgcccttctaa

SEQ ID NO: 3079 - DNA, 1131 bp, BradyrhizobiumColbertium
atgatccgcgccaccctcgccacgatctccgcccttctcgcgctgacatcgccggcggcagcggcagacgacttcatcgccgcgccgaccttgcgcgcaagcgtcaccgtcacctcggacgtggtgcgcatcggcgatctcatcgagaacgccggatcggccgcgtcgatcccggtctaccgctcgcccgatctcggcaccaccggcaccctgacggccacccaagtgctgtccgtgctgcgcgccaagcaggtgatcggcgtcatgaccggcgacgtcaaggaggtccaagtcacccgcctcgcccgcacgctcgccagcaaggacgtcgagaacgcggtcgccgcagcgctcgagcgccgcttcggcctcggagacgccgccaacatcaccgtcacgttcgatcgcagcgtcgccgagatgcggctcgacgcctccaacaccggggcactcctgccggccgcaacccgctacgatgcacgcagcggccgtttcgacatcgccttcgagattgccaatgacagcaatcccgctccgaccaagctgcgtttcaccggcaccgcgatcgagacggtggaggtagccgtgctgacccgcgacgtcgaccgcgccgagcttctgaaatcctccgacctttcgctggagcgccggccgaaggccgaggtcaccggcgaacccgcgtcccgcgaccgcagcgtcggcatggaattgcgccgagcgatgcgggctggcacgccgatccgcgccgcagacgtcgtcaggcccaacttcgtggtgcgcgaccaagccgtcaccatcatctaccagatgcccggcctctatctcaccacgcgtggcaaggcgacagagagcggcgccgagggcgacaccgtcagcgtgctcaatctgcagtccaagcgcacgctgaccggcgtcgtcaccgcccgtggccaggtcacggtccagggtgccagccagtccgcgccgatggcccctgcggtcgagcagagctcctcgctgaagcgcgacgagatgcccgccgccgcagccctcgcgcagagcgttgtgcaggcgccggcaaatccggcccaggtcgcccaagcccagattccgcaagctcgcctctcgcaagctccagcaaagtcagagtaa

SEQ ID NO: 3080 - DNA, 789 bp, BradyrhizobiumColbertium
atgcaggcgcttcacaccgcagcgaccggaatggcggcacaggaactcaacgttcaggtgatctccaacaacatcgcgaacctgcgcaccaccggcttcaagaagcagaccgcggcgttccaggacctgatctacgagcacgtccgccgcgtcggcgcccagtcgtccgaccagggcaccatccttccggtgggcgtcgacatcggcggcggcgtcaagaccgtcggcacgccgcgcagcatgacgcagggaacgctgtcgcagaccggcaacgacctcgatctcgcgatctcgggcgatggcttcttcaagatcctgatgccggacgggacctaccagtacacccgcgacggcacgttccagatggacaaccagggccgtgtcgtgactgcgcagggcaacccggtgcagccgaccatcaccattccgaacaacgcctcgggcatctccgtgagcgagcagggccaggtctcggtgacgctgcccggttcatcgacatcgtcgatcatcggccagatcggcgtcacgcgcttcatcaacaaggcgggccttcagcccgtcggcaataaccagttcatcgagaccccctcctccggcccgccgcaggacggcaccgccaactcggagggttacggcaagatcacgcagggcagcctggagcaggccaatatcgacgtggtctcggaaatgagcgacctgatcgccgcgcagcgcgcctatgaaatgaacgccaaggtgatcagcgccgccgaccagatgatgcaatcgaccacggcgctgttccgctga

SEQ ID NO: 3081 - DNA, 762 bp, BradyrhizobiumColbertium
atgcagaacgcgcttctgatcggcttgtcacggcagatgacgttggagcggcagatggccgtcatcgccaacaacgtcgccaattccaacaccagcggcttcaaggccgaccattcgctgttcgaggagcacctcaactcgaacgcgcgtgaggaccgtttcatcggccgcgaccggctggtctcctatgtccaggaccgcggcaccttccgcgatatcagccaggggccgctggagccgagcaacaatccgctcgacctggcaatcgacggcaacgcctatttcgtcgtgcaggccaacggcgccgagcgcttcacccgcgacggcaaattctcgctcaacagcaccggccagctcgtcacctccgacggcaatctcgtgctcggcaccgccggcccgatcacgttccagccgaccgatcacgacatcaacgttgcgcccgacggcaccgtcacggtgctcgagggcacggcacgaaccgactcgatccgcggcaagatccgcatggcctcgttcgacgatccggccaagctgaccaagcttggcgccaatctctacgatgtgggctccgccgttccgcaggccgatgccaagtccaacgtccgccagggctacgtcgagaagtcgaacgtgaacgcggtcggcgagatgggccgcatggtcgaagtcatgcgcagctacgccgccatcgccaacctgcttcagcagcagagcgacctccacaaatcggcgatcgacaagctcgccgacgttccggcctga

SEQ ID NO: 3082 - DNA, 498 bp, BradyrhizobiumColbertium
atggcagagaatgaagaaggcggcgcagccgccgagggcgcggaagccgctccgccgaagaacaagctcaagctgatcatcatggccgtcggcctgctcgccgtgctcggcggcggcgcggcgacctggttcttcttcttccgtcacggcgaggccgagcaccatgccgaggccgcgccgcctccgaagccgccggccttcgtcgacgtccccgacttgatggtcaacctcgccggctcgccaggcgagcgcgtgcaatatctgcggctgaagatcgtgctggagctcaaggaagaaaagcagatcgaggcgatcaagccgacgatgccgcgcgtcaccgacatcttccagacctatgtgcgcgaactgcgtccctccgacctcaacggttccgccggcatcttccgcctcaaggaggaactgaccaagcgcgtcaacgcggcggtcgccccgatccaggtcagcgcggtgctgttcaaggaagtcgtggtccagtga

SEQ ID NO: 3083 - DNA, 1203 bp, BradyrhizobiumColbertium
atggcgggcaacgaccaagtcgaccaggatgcaattgccgcccagtgggaggcctcgctcgattccgaggatcccgcagaggccgcaaaggctgccgccgagaacgagctatcggaaaccatggccctgcaatgggcggccatggtcgaggacggcagccgcgatctcggcaccggcaagaactccggcgagcgggtgctgtcgcaggaggagatcgacaatctcctcggcttcacggtcggcgacgtcacgctcgacgaccattcgggcattcgcgcgatcatcgattcggcgatggtctcctacgagcgtctgccgatgctcgaaatcgtcttcgaccgcctggtgcggctgatgacgacatcgttgcgcaacttcacctcggacaacgtcgaagtctcgctcgaccgcatcacctcggtgcgtttcggcgattacatgaactcgatcccgctgcccgccgtcctcaccgtgttcaaggccgaggagtgggaaaacttcggcatggcgacggtcgattccaacctgatctattcgatgatcgacgtgctgctgggcggccgccgcggcaccagccagctccggatcgagggccggccctacaccacgatcgagaccgagctggtcaagcggctggtcgaggtggtgctgtccgacgccgagcaggcgttccggccgctgtctccggtgacgttcacgatcgaccgcctcgagaccaacccgcgtttcgccgcgatcagccgtcccgccaacgccgcgatcctggtccgcctgcgcatcgacatggaagaccgcggcggcaatatcgagctgctgctgccttacgcgaccatcgagccgatccggggcgtcctgctccagatgttcatgggcgaaaagttcggccgcgacccggtctgggagggccatttcgccaccgagatcgtgcaggccgagatcgccgtcgatgccgtgctctatgaagccgacattcccctcaagcagctgatgcggctcaaggtcggcgacacgctgccgctggacatgcgcgccgacgccaacgtcaccgtgcgttgcggcgacgtcacgctgacggaggggcggatgggacgggtcggcgaccgagtcgcgatccgcgtgacgaaacccttgcgcaagccaagcacgacacttgcgatgttcgagaaggtggacgagcagaacaagatgatggaggccccatga

SEQ ID NO: 3084 - DNA, 429 bp, BradyrhizobiumColbertium
atggcgatcgagacgctggtggctatcctgctcatgctgacgatcgtctactgcgtcatgctcaacaagcggctgacgcggctgaaggcggacgagcattcgctgaaggcggtgatcggcgaactgatcaccgcgaccgagatcgccgaacgcgcgatcggcgggctgaagctcgccgtgcgcgacgtcaacgagaacctgggcagccagctcgccgccgccacgcagatgtcggaccagctctacaagcagctcggcgaagccgacaacgtggtgcgccgcttgtcgaagatcgcgagcgccgcgcgtccggtgaccaaccccgaaacggttgctgcgcctgcggccaagccctcgtcggcaaaagcggtcgcggcggcggccgaagccttttccgagcgcagacgatccaacggccttgccgcataa

SEQ ID NO: 3085 - DNA, 765 bp, BradyrhizobiumColbertium
atgaagtcctttcgtaacatccgagtcataccggtcgtcctggtcgccatcgcaggactcgccacgctgaaggtggcgggtctcgcgatcaacggcggctacgtcttcgagtacaagccgagccagggcaagaaatcctgggcggaggagaacctgaattttccgaccgggcgcgaggacccggatatcaccggctcgacccatggcgcgccgaaggaagcacccaagccggccgcgcccgagacaaagatggagggtggcaccgtcgtcaagatcgacgagggccagccgcaggtctcggcctcggaacgtgcggtcctggaacggttgcaggcgcggcggcaggaaatcgaggcgcgccagcgcgagatcgacattcgcgagagcctgctcaagtcggccgagaagcgcatcgagaacaaggtcgaggagatgaaggcggtagagacccgcatctccgcgacccaggccgagcagaaggccgccgaagcccagcgcatgaagggcctcgtgaccatgtatgagggcatgaagcccaaggacgccgcccgggtgttcgaccggctcgagatgggcgtgctgatcgagatcgcctcggcgatcgcgccacgcaagatgtcggacatcctgggcctgatgtcatcggaagccgccgagcggctgaccgtcgagatggcccgccgtgccaatggtggtggcgaacagtcggcctcggccggcgagctgcccaagatcgatggcaggccgacgcaaaagccgaattga

SEQ ID NO: 3086 - DNA, 3738 bp, BradyrhizobiumColbertium
atgaccgccgaaccggaagaaatgccgccaatggcgcgagaggctgccgctggatttgtatcgcgagcccgcgctgtcgcgcggggcttgtcgcgtcatttccgccgggcgacggtgctgacgacctgtgtcctgatcggtcttgcgcagccggcccgggcggccgatccgatcaggggcgaggcgacgttttcggccagcggcggctttgcccgtctggtcatcaagctcggggaggatgttccttccgaggtgacgacggccggctccattctcgtcattcgtttcgaccgacccgtcgatgttcccgtcgatcgtgttccggaaggcgctcccgattacgtcaactccgctcgccgcgatccggacgggggcgccatccgcctgtcgctggcgcggcgcgtcaccgtcaataccatgaatgccggcgagcgcaccttcgtcgacctgctgcctgagggctggaagggcccgccgccgagcctgcccttggacgtggtcaaggagctcgccgagcgcgcacgcgttgccgagcgcgcgctgggcccgcagcgcgccgccgccgaggccaagaagcgtccgcagatccgtgtgcgcgcctccgtgcagccgactttcgtgcgattcgtgttcgaaatgcccgacggcgtcggcgtctcctccgtgctcaacgagcagaagctcacgctggtcttcaatgccaacctgaattttgacctggcggacgcggtcgtcgcggcgccgccgaacgtcgcctcgatcaagcagaaggccgacatcgaccagaccaatgtcgagatcgcgctgatcggtgattcagacgtgcattccttccgtgacgagaagaattacgtcgtcgatgtctccttccagcccgacaagggcaagatggcggcgactcccgaggcggcgatcgcgcagatgaagccgggcggtcgcacggccgttcctgcggccccgcccgagaagaaggagacagagcgtgagattgcgccgccgacatccgagacgatcgcgcgcgaggccaagatcgatgtgaagcctggcgtgaagccggaattgcctgccgcgatgccgccggctgaagcgccgaagccggctcccgcgacgcaggctgcgcaagctgtagagggcccgaaggaagcaccaaagcctgcgcagcccgttccggaggccgcaccggccaggcccgtcatgaccgaagcgcccagagaggcagtgaaggacgccgccagggagccagtcagggagactgctaaagcagccgccgaaatcgctcccgcaccgcagcccgcgattgccgccgtcgatgcgcgccgcgacagcgacggcctgcgcgtgacgttcccgattcaggtggcgacgcccgcggcggcgttccgccgcggcgacaccgtctggctcgtgttcgactcgccaaagccgatcgacgtcgaagcgatccgcaccaagggcggcgcgatgatcggcgaggccggccgcatcccgctcgaaaaggggcaggcggtccgcatccgcctcacccgcccgctggtctattcgctgacgagcgaggaggtcggcaaggagaccaactggctgttgacgctcgccgacaagatccaggcgacgccgctgccgctgatgatgtcgcgcaacatcaccgacccggcgctcgccaatatcgcgattcccttcgccaatcctggcatgctgcacaagctcacggatcccgatgcaggcgatatgctctacgtcgtcaccgcgcagcggccggtgcgcggcttcatcaagcggcaggatctcgtcgacctctcgctgctggaatccgcgcacggtatcgcaatccggccgaactccgacgagatcggcgtcgaggtcggcgccgacaaggtgatcctcggcaagaagggcgggctgacgctgtcgccggtcgacatctccgccgagcgggccccgacggcggtgcggccggtcttcagccccgaaggctggcgcaagggccagtcggagaatttctgggaccgtcagaacgaattgatgatggcgatctcggccgtcgaaccggcactgcgttccctgccgcggctcgatcttgcgcaattctacatgtcgcgcgcgatgtatcacgaggcgaaggccgttaccgaattgatgctggccgatcccctcaacaaggaggagagcggtgcgctgatcatgcatgcgattgccagcatcctgatcggccggccggcgcagggcctgaaggatctcgccaatcccgtgatcggcaacagccacgattcgcagctctggaaggcgctcgcctatgcgcgccagggcaaatgggcggatgcgcgcgagaagttcaagaacgtcgaattcgccatcgcctcgctgccgctcgacatccagcgcatcgtgacgatggacgcgatgcgcgcatcgctcgaggtgaaagattatgccggcgcttccaagcgccgcagcgagctcgaggtggtgggtgtcccgcccgaggcagggcccggcttcgcggtgctgcgcgggcggctcgccgaggcgctcggacacgacaaggatgcgcttgacgattaccaactcgcggtcgcctcgagcgaccgtcctgctgcggccgaggccaagcagctcgagatcgcgctgcgtcagaagcgcgacgagatcggcaaggacgaggcgctgcgcgagctcgagacgctgtcgatgacgtggcgcggcgacgcgatcgaggtcaggacgctgcagatgctgtcgcagatgtatgccgagagcgggcgttatcgggatgcgctcaccgccgcgcgcaccgcgacgaggctccagcccaacgcggaagcctcgcgccaggcgcaggacctcgcatcgaatctgttcacgcagctattcctagggccgaagggcgacgaattgccgcccgtcgaggcgctcgggatgttctacgaattccgggagctgacgccgatcggccgccgcggcgacgagctgatccgtcgtctcgccgaccgtctcgcctcgatcgatctgctcgatcaggcggccgagctgctgcaataccaggtcgatcaccgcctggagggggcggcgcgcgcccaagtcgccgcgcggctcgccatgatctatctcgccaaccgcaagcccgacatggcgatcaccgcgctgcgcgcgagccgcatcagcgatctctccggcgagctcaggcagcagcgcctgctcctggaggcgcgcgcgcagagcgacgtcggccgtcacgatctcgcgctcgacatcgtctccaacgtctccgggcgcgaagtgctgcgcctccgctccgacatcttctgggcggcgcggcgctggcgtgaggccgccgagcagatcgagctctattacggcgagcgcttccgcgacttcaagccgctcaacgcggtcgagaagagcgacatcatccgcgccgccgtcggttacgcgctcgccgacgactcgatcggcctgtcccgcttccgagagaaatacgcgccgctgatgagcgagagcgccgaccgtctcgccttcgacatcgccagcaagccggccgcggcttccagcgccgaattcgccgagatcgcgaagctggccgccagcgtggatacgcttgacggattcctgcgcgagatgaagcagcgcttccccgacgccacggcgcgagcgcctggctcgccgcaggtcaaggacgagtccgaccacaccggctcgctgcccacaattccggtcgtgcgtcagatcaagatgacgcgttag

SEQ ID NO: 3087 - DNA, 759 bp, BradyrhizobiumColbertium
gtgaggctgccgaccctcccgcgtagagttctttttctttctgtcctgttcggtgcggcatcgctcgcaggctttgcgcacgcgcaggacatcagcatcaatctcggcggcggtgctggcggcggcgtcaccgagcgcgcgatccagctcatcgcgctgctcacggtcctatcgatcgcgccgtcaatcctgatcatgatgacgtcgttcacgcgcatcgtggtcgtgctatcgctgctgcgcaccgcgatgggcaccgcaaccgctccgccgaactcggtgatcattgcgctcgcgatgttcctcaccttcttcgtgatgggtccggtgctgcagaagtcctatgacgagggcatccgtccgctcgtcgccaaccagatcggcgtcgaggacgcgctccagcgcgcttccgtgcccttgcgcggcttcatgcaaaagaacgtgcgcgagaaagacctcaagctgttcctggacctttcgggtgaacctgcgccagccacccccgacgacctcgcgctgcgcatcctcgtccccgccttcatgatctccgagctgaagcgcgccttcgagatcggtttcctgctctttctgcccttcctgatcatcgacctcgtcgtcgcatcggtgctgatgtcgatgggcatgatgatgctgcccccggccacgatctcgctgccgttcaagctgatcttcttcgtcctggtcgacggctggtcgctggtggccggaagcctggtgcagagttacgggggaggatga

SEQ ID NO: 3088 - DNA, 960 bp, BradyrhizobiumColbertium
atgcaaggcagccctatcaccttcatcgtcgcgttcatcgtcgttctggcgttgatcggcgtcgctgcttggctggttcgccgattcgccggcagccggatcggcgccaatacccagcgtggccggatgccccgcctcgccgtgatcgacgctgccgcggtcgacggccggcgccgactggtgctggtccggcgcgacaatgtcgagcatttgctcatgatcggcggcccgacggacatcgtggtcgagcccaacatcgttcgtgccgcgcccagccgcgaccagcttccgcaacgtccaaacgccgccgagccgccgcgccttgctcccatgcccgatgccggtggttgggccgacgaggcgccgcgccccgagctgctcgatcatcccgagccgcaaatgcccgagccgccgccgcgaccggcgcgcccatcctttgccgacgaggtccgccggcctgcgcctacgctggctgaacgccgcagcgagccgtcgctgggaagctttgcgcccgagccgattgcgccgcgtcccgagcgcgaaccgcgaccggagccgctgccgccgcgcgtcagccgcagcgaaccgccggtgatgccgcgtccgccgcgcgggagtgagccgatgaagatgccgcccgtgcgcgccgagcgcgcggctgcgccgccaccgcccgtgccccaagcgccgcccgtgccgccgcctggcactccatccagcgccgagcagaacctggccgaaatggcccagcggctggaggctgccctgcgccgcccggccggcgaaacggtcgcgcctccggttgcgccggagcctccggctgctcctccgcggacggcacgcagcgagccggcggcaccacccgccccgcctccgaagccggccgcggaaaagaccagctttgaaaatctcgaagacgagatggcctcgctgctcggccgtccgaagccgtcttcgtga

SEQ ID NO: 3089 - DNA, 312 bp, BradyrhizobiumColbertium
ttgcatacttgtccccgacaaatggcgcttttttcgtgcccatggtcagatacccaaccaccggccaacgatgccccaaactgcgatctcttaacgtcccacggcaagttttgccgtccccaactcttaataacccatgaatcgctcgatccaaaacgacttcttggcctgtgcacgcaccgccaaacggatgggttaataccggtttgggagcgaaaaatcacgggcgggcgcatgcgtgtgccgttcggggacacgggcccgggatatcttaaccagctgttaaccatacacgcggcaaattctgcctag

SEQ ID NO: 3090 - DNA, 405 bp, BradyrhizobiumColbertium
atgtccatcaacgatattccggaactgtcggcgcttcgcaccaagatgcagtggcaccaggaacgccagcgcgtcctgtccgagaacgtctccaattccgacacgcccaaattccggccgcgcgacctggtcgagccgaagttcgacaagagcggcacagtcgcaggctcgatgggaccactggcgctcacgcgcaccagcagctcccacatggcgccatcgggggccgcctccgcattcgaccagaacaggaacgcgggctttgagacccgtccagcgggcaatgccgtcaatctcgaggaagagatgatgaaagccgccagcaaccagatggattacgcggcggcgacctcgctctattcgaagagcctgcgcctgctgaagacggcgatcggcaaaggctag

SEQ ID NO: 3091 - DNA, 426 bp, BradyrhizobiumColbertium
atggccaatgacagcagcgactttgcccgctcgatggcaatcgcgacctccggtctgcgggcgcaagccggccgcatgcgggtgatttcggaaaacatcgcgaacgcggattcgaccgctcagaccgccggcggcgatccctaccggcgcaaggttccgaccttttcctccgcgctcgaccgcacgctcgatgcgcaagtggtcacactgggccggatcaagcccgaccagtccagctttcgcgtcaaatacgagccgaacaatccggctgcggatgcgagcggcaacgtcaagtatcccaacgtgaactcggtggtcgagatgaccgacatgcgcgatgcgcaaaggtcctacgaggccaacctcaacatcatcactgcgacgcgccggatgatccagcgcacgctcgacatcctcaagagctga

SEQ ID NO: 3092 - DNA, 309 bp, BradyrhizobiumColbertium
atggcatcaccgacagtcgccgccaatgcgtacgccagtctcgcccgtgtgctggaaaacagcggcgcaggcaagggcagcgaaccgagcgggcaatcctttgcctcgctgctgaaggacgccgtcggcagcgtcatggagtccggccgcaagtccgatgcgcagacggtggcgatggccgccggcaaggccaacgtcatggacgtggtgacggccgtcgcggacaccgacgtcgcagtgtccacgctggtctcggtgcgggaccgcgtcatcgcggcctacgaagacatcatgaagatgccgatctga

SEQ ID NO: 3093 - DNA, 285 bp, BradyrhizobiumColbertium
atgaacaaaggaatctgccaaatgaccggacccgaaaccctcgacgtcgcgcgcgatgcgatctggaccatcgtgatcgtctcttcgccgctgatggtggtcggtctggtggttggcgtcatcgtgtcgctgttccaggcgctgacgcagatccaggagcagacgctgatctacgtgccgaagattctggccatctttgccacgatgctgctggcgctgccgttcatggcggattcgatgcacgcccacatgatgcggatctcgtcgcgaatcatcggcggctga

SEQ ID NO: 3094 - DNA, 777 bp, BradyrhizobiumColbertium
atgcgcatcgacgtctcgctgctgccggcgctcgccgcttccttcatgctcgccttcgcccgggtcggcgcgatggtgatgctgctgccgggcctcggcgagaccaacattccgactcggataaagctgtcgattgcgctcttgctcacgctgatcatcctgccgctgcatcgcaacgcctatcaggtcgacatgggctcgctcgcgccgctgctcgtgctgatgctgcacgagatcgcgatcggcatcgtgctgggtgcgaccgcgcgcgtgacgctgtcggcacttcaggtcgccgggtccgtgatcgcgcagcagatggggctcggcttcgtcacctcggtcgatccgacccagggacagcagggcgtgctggtcggcaacttcctgaccatgctcggtataacgctgctgttcgccaccgacagccatcatctcgtgatcgcagcgctgaacgatagctatacgatcttctcgccgggcgagacggtgtcgagcggcgatgtcgcttcgctggcaacgcgtgccttcgcagccgcgttccgtctgggcctgcaactctccggaccgttcctggtgttcggcctcgtgttcaacatcgggctcggggtgctggcgcggctgatgccgcagatgcaggtctatttcgtcggggtgccgctctcgatcttcgccggcttcctggtgctcgccgtcgtgctctcggcgatgatgggcacttatctcgattacttcatcggcgtgatgcaccagatgatgcctctgaggccacggtag

SEQ ID NO: 3095 - DNA, 1080 bp, BradyrhizobiumColbertium
atgtcagacgacaaggacccggagagtcaaacagaagacccgacgcaaaagcgcctcgatgatgcgctggagcgcggcgacgtcgccaagagccaggagatcaacacctggttcatgatggcgggcggtacgctcgtggtctcgaccttctcgggctcggtgggcagcgggctgctgacgccgatgcgcaaccttctcgccaatgcctggatgatcaagaccgacggcaaggcgctgctcgtcctgatgcagcagatcgagtacgccgtgctcgctgcgatcggcgtgcccctcttgatgctggtgctggcagccatagccggcaacatgctgcagcaccgcctggtgtggtcgagcgaatccctgacgccgaaactcagcaagatatcgcccggcgccggcttcaagcgcatcttcggcaagcaagcggccgcgaacttcctgaaaggaatcggcaagctgatcgccctcagcgtggtcatgaccatgatcctgtggccggaacggcatcgcttggaggccatggtgaggctcgacccggccgccatgctcggcgcctccaccagcatgacgatccatttgctcggttcggtggtcgcggcgctcgcgatcatcgccatcgccgattatttcttccagtaccgcacctggttccagcgccagaagatgtcgctccaggagatcaaggaagagttcaagcagtccgaaggcgacccgcacatcaaaggcaagatcaggcaactccggcagcagcgcgccaagaagcgcatgatggcggcggttccaaaagcctccgtcatcatcaccaacccgacccactactcggtggcgctgtcgtatgagcgcggcatgtcggcaccgatctgcgtcgccaagggcgtcgacaatctcgccttcaagatccgggagatcgcgcgcgagcacgacatcccgatcgtggagaacgtgccgctggcccgcgcgctctacgccaccgtcgagattgaccaggaaatcccgaccgagcactaccatgccgtcgccgaagtcatcggttacgtcatgcggctaaagcgcggattcagcgccgggcggggataa

SEQ ID NO: 3096 - DNA, 222 bp, BradyrhizobiumColbertium
gtggtcggtctcggcggtcattctcgagctggcgcagcctgtcggcagagaatcaacgcgctacggggcgcgtggggtcctccctgcctgaatcggaccctgaggtgcaagggcagcaggggcgaaacgtacgctgattcccagattacggccatttccggtgctttccgggtgttttatccccgcccggcgctgaatccgcgctttagccgcatgacgtaa

SEQ ID NO: 3097 - DNA, 2586 bp, BradyrhizobiumColbertium
atgaccgccgagaccgaccacgacctcacacgagagcccgttgcggcggccgagccgtcgccgcgctcgggcagcattgctctggtgctgctggtggcggccggcctcgtcgcggtcgccgtcgggctgatgacgctcgggcgcgcgcaggcgcagccctacatcctcggcatcctcgccgtgctggcgatggtgggtctgttcaacctgttcgccttcgctgccggcatcatccgctttgccgaccgcaatctcgatgatcccgtcattcgccgcatctccgatcacgccttcgacggcctcgcggtcaccgatgcgcgcggacacgtggtctattccaacgctgcctatctgacgctgacgggcgccactggtccgcaggacgtgcgtcccgtggagcgggtcttcatcggcaaccctgacgtctccgaagccgtgtttcgcctgctcaaggccgcccgcgaaggcaagcggcagcaggaggaggtgcgcatctccggcctcgatggcagccagggccgctggctgcgcatgcgggtgcgtccgctcggctccgcaaagcgcgaggcgaaatacgcggtttggtcgatcgccgacatcacccgcgaccgcgagcgccaggaggacgtgttccaggagctccagcacgcgatcgaatatctcgaccacgcgccgtgtggcttcttctcggtcaatcccgccggcgagctggcctatgtcaacgcgacgctggcgaactggctcgactacgacctcgccgagatcggctcgggcgggctcaagctgacggacatcgtctccggcgacggcgcctcgctgctgacctcgatcgtagcggtgcctggcgaggtgaagacggaagtcttcgacatcgacctgcgcatgcgcagcggcaagacgatgccggtgcggctctatcacaagctcgccttcggcgccgacggtgcgccggggccctcgcgcacgctcgtcatcagccgtgcccgcgacgagcgcagcgatccggatcgcgctgccgaagtgcgattcatgcgcttcttcgatcatacgccgatggcgatagcgacggtcgaccgggccggcaatgtcgtgcgcgccaatgcgcgctacgccaagctcggccaggcgctggggctcgataacgcctccaaatcgatcttccgcgccgtcaatgcgcgcgaccggcatctcttgattgcggccatcaaccaggccgccgagggccaagccgacatcgcgccggtcgaggtcgctctggaagggaccaaggagcgctggggccaattcttcgtcacgccggtcgattcggccgagaacgaggccgaagccgccatcgtgcacatgctcgagaccaccgagcggcgcgcgctggagaaccagatcaaccagtcgcagaagatggagaccgtcggccaactcgccggcggcatcgcccacgacttcaacaacgtgctgtccgccatcatgatggcgaacgacttcctgctgaacgcgcacaagccgaccgacccgtcgttccaggacatcatgcagatcaagcagaacgcgacgcgggctgcgaccctggtgcggcagctgctggcattctcgcggcggcagacgctgcgaccgcaggtgctcgatctcggcgatgcgctctccgacctcaccatgctgctgcgccggctgatcggcgagaaggtcaagctcgacctcgtccacggccgcgacctctggccggtgaaggtcgacgtctcccagttcgagcaggtgatcgtcaacctcgcggtcaacgcgcgcgacgccatgcccgacggcggcaagctgatcatccgcaccgccaacgtcaccaccgaggatgctgccaagctcgcctacaagggcatgcccgcggcggactacgtgcggatcgaggtcgccgataccggcaccggcattcccgccgacatccgcgacaagatcttcgagccgttcttctcgaccaaggaagtgggcaaaggcacgggtctcggcctctcgaccgtctacggcatcgtcaaacagaccggcggcttcatctacgtcgattccgagccggggcagggcacctcgttccacatcttcctgccgcgtcatcatgccgaggctgacctgcacgccgagcagccggcggctacggtcagcgcgagcatcggcgcggggaaggaagccgcgcccgctgcagtggaggccaagccgcgcaccgatctcacgggccagggcaccatcctgctcgtcgaggacgaggagggcctgcgcgcgctgaacgcacgcggcttgcgctcgcgcggctacaccgtggtcgaggccgagaacggagtcgaggccatggagatgctggaggagcagggcggggcgatcgatctcgtcgtgtccgacgtcgtcatgcccgagatggacggcccgacgcttctgaaggccatgcgggagaagaacccggatatcaagttcatcttcgtgtcgggctacgccgaggatgcgttcgagaagagcctgcccgagggtcagcaattcgacttcctgccgaaaccgttcacgctcagccagcttgtggcggcggtgaaggagacgatgacgaagcaggggtga

SEQ ID NO: 3098 - DNA, 1014 bp, BradyrhizobiumColbertium
atgactttctcgcttcgctcccgcaatctcttcaacgcgatcgccgtcgtgctggcgcttgcgctgccgaccgcactgacgatctcgtcagccgacgccagggccggtggtggcatgtcgtcgggttcgcgcggttcgcgctcctattcggccccgccctcaaccacaaccgcgccgggctcggcctcgcagttcaaccgcacctacacccagccgggcgcaggcatgaagtcggctgcaaacgcgcccgcgcgcggcggcctgttcggccgtgcaggcggcttcatgggcggccttgcggccggcttcctcggcgccggcctgctcggcatgctgttcggcggcggcctgttcggcggcctcggcggcctgtcctcgatcctcggcctgatgatccagatcgcgctcgtggtgctcgttgtgcggctggcgatgtcctggtggcagcgccgtcatgctccacgtgaggcttacgccaatgcggatgcaggcgccggtcccggaccgcagacgaaccagcgcagcggcctcggtggcgggctggccggtggtctagggggcggtcttggcggtggactcggtggctttggtttcggcgccaacaacgcgccgctggagatcaagccggacgactatgaggcgttcgagcgcctgctcggcgagatccagacggcctggtcgaacgaggacgtggccaagctgcatacgctcgcgacaccggagatggtctcctatttcgagcaggacctcgcccagaaccgcgcgcgcaacgtcgtcaacaaggtgaccgacgtcaagctgttgcagggtgacctcgcggaagcctggcgcgaaggcgagaccgactacgccaccgtggcgctgcgcttcgccctcaccgacaagacggtggatcgcaacaccggcgcagtcgttgccggcagcgaacagcccggcgaggcgaccgaagtctggaccttcgcccggcggccgggcagcggctgggaattgtcggcgatccagcagaccaactga

SEQ ID NO: 3099 - DNA, 708 bp, BradyrhizobiumColbertium
atgaaatacgagctctactactggcccgagatccagggccgcggcgaatatgtgcggctggcgctggaggaggcgggggtcgcttacgtcgatgtcgcgcgcggcccgcgcggcccgtccgcgatgatgaagatgatggatgcgcacaagggaacaccgccctttgcgccgccgttcctcaaagcaggcaagctcgtgatcggccagaccgccaacatcctgctctatctcggtgcccgccatgggctggcgccgaagacggaagccggccggctctgggtccatcagcttcagctcaccatcaccgacctcgtcgtcgagattcacgacacccatcatccgctcgggccctcgctctattatgaggaccagaaagcgccggcgaagaagcgtaccgccgagttctggagcgagcgcgtgccgaaatatctcggctatttcgagcagcttctcgccgacagcggcggtgcctatgtgaccggccgcagaccgacctatgtcgacctctcgctattccagatcgtcgcgggactgcgctatgccttccccaagcgcatgacggcgttcgagagggacatcccaggcctcgtcggcctgcatgaccgcatcgccgcgcggccgaacatcaaggcctatctccaaagcgatcgccgcattgccttcaacgagcagggcatcttccgccgctatcgggagctggacggttag

SEQ ID NO: 3100 - DNA, 174 bp, BradyrhizobiumColbertium
atgaaggtttcgacagttgcgcccccgccaatcgcgatcgtggtcccgaactacgacacgaccaagcagcaggacgaccaggccaaggccaaggacaccgacccggtctacaagccgcagccgcctgcgccgctgccgccgggccagggcacgcggatcgatcagctcgcctga

SEQ ID NO: 3101 - DNA, 474 bp, BradyrhizobiumColbertium
atgacattgaaactgaacgtccgcggcgcgatcctggtcgccgccgccatcaccggccttgtggctctcgcttcgcctgcccgcgccgaccgctgtgacgacagcgccaaggagctggcgaaccaggtcgatcgcctcaaggtgaatttccgcgccgccaatgtcgtctacatgacccacccggcggccaaggagctgtccgtgggctgccgcggcgacaagtactcgatcgagctctatgccaagggcgatcgcaagcccaagccggagttctacgcgctggtgggatcgatggccgcgatcgtcttcacggtgacgaaggacgacacgacgacgggcgcgacgcgctgcctgaagcggatgggcctgttgcgcggcgacaaggtcaccatgcgctaccggcgactgaacatggaatgcacacgcaccaagtcggacgcctccatcgcgatcacgcgcggcaaggacgagtag

SEQ ID NO: 3102 - DNA, 1656 bp, BradyrhizobiumColbertium
atgaacgctcccacagcttttcccgaccagtcaaagcccgttccgccgtacaagcacaccccgctcttcccgctgggcaaggacgagacgccctacaagaagatctcgtccgaaggagtccgggtcgagaaggttctgggcaaggacatgctggtggtgtcgcgggaggcgctgcgggcgctgtcggaggcggctttcggcgacatcaaccactatctgcggcccggccatctgaagcagctccgcgcgatcctggaggacggcgaggcaagcccgaacgacaagttcgttgcgctcgacttcctgaagaacgccaacatcgcggccggaggcgtgctgcctatgtgccaggacaccggcaccgcgatcatcatgggcaagaagggctgcaacgtcatcaccgacggcgacgatgaggcggcgctgtcggaaggcgcgcgcgatgcttacctgcgccgaaatctgcgctactcgcaggtcgcgccgctctcgatgtacgaggagaagaacactgccaacaacatgccggcgcagtgcgagatctacgccgagggtgatgatgcctacaagttcatgttcatggcgaagggcggcggctcggccaacaagagcttcttgttccaggcgacaccttctgtcctgaccaaggaccggctgcttgcgttcctgaaagagaagatcctgacgctgggcaccgcggcgtgcccaccctatcacctcgcgatcgtgatcggcggcacctcggccgaactgtgcatgaagacggtgaagctcgcttccgcacgctatctcgacgcgctgccgacccacggctcgcccgacggcaacgccttccgtgacgtcgagatggagaaggaaatccacaagatgacgcagtcgctcggcgtcggcgcgcagttcggcggcaaatatttctgccacgacgtgcgcgtgattcgcatgccgcgtcacggcgcctctctgccgatcgggctcggcgtgtcctgctcggccgaccgccaggtgctcggcaagatcaccaaggacggcgtctatctggaagagctcgagcacaacccggcgcagtacctgccgcaggtcgagcagacgctcggcggcgaggtcgtcaagatcgatctcaaccagccgatgaaggacatcctcgcgacgttctcgaaatatccgatcaagacacgagtctcgatgacgggcaccatgatcgtcgcgcgcgattccgcccatgccaagctgcgcgagcggctggagaagggcgagccgctgcccgactatttcaagaaccatccggtttactacgccggtccggccaagacgcccgaaggctacgcctccggcgcgttcggtccgaccaccgccggacgcatggattccttcgtcgaccagttccaggccgctggcggctcgatggtaatggtggccaagggcaaccgggcgccggcggtgcgcgaggcgtgcaagaagtatggaggcttctacctcggctcgatcggcggcgccgcggcgaaccttgccgaacactgcatcaagaaggtcgaggtgctcgaatatcccgagctcggcatggaagcgatctggcgcatcgaagtcgtcgacttccctgccttcatcatcatcgacgacaagggcaacgacttcttcaaggagttgaatttgggctag

SEQ ID NO: 3103 - DNA, 921 bp, BradyrhizobiumColbertium
atgcgcgtgctccgtcttatcgcggcggcgttgctgtgcgtcgcgacacaagcggcacgcgcggatgacagcgaaccggcgtggcgcgcaagcgcgctcgccatggtgccggcgggctatgtcgccggcctcgcctatcggaccgatggttcgactggctatctcgcggtctatcctgcgacggcgaacgatccgaagacaccggcaagcgtgttcgcagggcgccaggccctcgtcgtcacgctgacaccggatgcgacacgcgcagtgtcggccgatctgaagccgcgcgccgagcccgatccggacaatgacgaggccgatttcgccaagctccacgccgaacttgcggcgaagcgtgcatcgctccccgacggcaccgagccctgcagtctcggcgcctggtccatcgacaaggatccaaacggcctcaacgtgcgcgccgagccgtcaaccacggggcgcgtgctcggcacgttgccgccgccctaccgcctgaagcttggcggcgccgagaacacgcccgatggcggctggctcaccgaattcagcatcatcggcttcaagaacggctggtttctcatcgaaggcgcaaggccgccgggccaggactacgaggacgagaagcgatatccgcgcagcgcgccaaagccgtatgccggacgcggctgggtcgcctccaacaaggtcggcgcgaactacgccaatggcgccacccgcgcgggcggcctgtttcaggcgcccttcatcgacgccaaatggacgccggcccagcgcgagctcggcggtccgatcgacggcgacggcgggccgaaacggctgatggcctgcagcggcttctggggtctggtcgagagccatgacggcgtgcgcggctggtggcgcgcgctgtgctccaaccaggtcaccaactgcagttag

SEQ ID NO: 3104 - DNA, 297 bp, BradyrhizobiumColbertium
atggccgtagacggcaactggaatctgaccatgacgaccccgatgggcgaacgccaggcaacgctgagcctcaaggctgcgggcggcacgctcacgggcacgcagggcgcggaaggtaataccgccgagatattcgatggcaccgtcagcggcgacaacgtgtcctggaaggtctctatcgacaagccgatgccgctgacgcttgagttcaccggcaccgtctccggcgacagcatcagcggcgaaatgggcatcggcccaatgggcagcttcccgttcacgggcgcgcgcgcgtaa

SEQ ID NO: 3105 - DNA, 561 bp, BradyrhizobiumColbertium
atgacgatgaaggacgtattcgcccgcctcgcctccgatctcctctccgttatcatctttctggcggtctatctcgtcacagacaacgtgatcctcgcaacggcagtggcgattgccggcgcgttcgcgcaggtgatctatgcgcgtctcaagggacagccgctccattacatgacctatgcgagcctcgctctggtggtcgtgctgggcggtatcacgctgctcaccaatgatccgcgcttcatgctggcaaaaccctcgatcgcacatttcgcgatcggcgcgatcatgctcaagcgcggctggatgctgcgctacatgccgcccgctatcgtcgagaccgtcccggaatatgtcaccatcgcgggctatgcctgggcggcgctgatgttcgtgatcggtgtcggcatgttggcagtcgccgccaccggcgatctgaagctgtgggcgttctatctcatggtggtcgcaggcggcgccaagatcctggcctttgccgtgcagtatttcgttctgcggctgatcgtgaccaaccgccgacgcgccgctgcccgcgcctaa

SEQ ID NO: 3106 - DNA, 138 bp, BradyrhizobiumColbertium
gtgcggcgtcctgaccgtcgcgccctcttcctgatggcggttccgaagcctgcgctgctgggtctcggcccggcgttccggtgggtcttgcggcggctttcgccgcttgcagcatcgcggttgtcttcacaaaagtga

SEQ ID NO: 3107 - DNA, 264 bp, BradyrhizobiumColbertium
atgcacatgctctcgatcaccgcggacatcctcgctgttcttgccctggccggcgccgcgctcgcaatcctgacgatgcgactgcgccggcgaagcctcacgttcttcgaaggcggcgtcctgctggccacctgccttctagttgccgccgcactcccgataatgtcgcgcctgccctgggcagacctggtcgacgagatgaccgaccatctcgttgctgcacttcatatcctggagatcgcctacgtcgttctgacattgtag

SEQ ID NO: 3108 - DNA, 1398 bp, BradyrhizobiumColbertium
gtgcagcacgatgccatcgttgagcgccacgacaacgttgcgccgatcccgttcgaagcggacgcgccattcctgagggtcatcggcgaattgccgcgcgaattgaatgggaccctctgccgcaacggtccaaatccgcagttcgactcgccgggcgcgcactggttcgtcggcgacggcatgctgcatgctttccacctcgagaacggtcgtgcgagctatcgcaatcgctgggtccgcacgccgaaatggctcgccgagcacgacgccggccgcgcgctattcggcggcttcggccgcaagctgccggacgccccggctgatctcaccgatggcggcgtcgccaacaccaacatcatcttccatgccggcaagctgctggcgctggaagaagcgcatctgccgaccgagatcgagccggggacgctggcaacgcgcggctattacaattatcaggcgcgcgttgcgggcagtttcaccgcacatccgaagatcgatcccatcaccggcgaactggtgtttttcggttataacgccgccgggccgctgacgcctgccctctcctacggatcgatcgacgcctccggcaaggccacacgcttcgaacggttcgaggcgccctatgccagcatggtgcacgacttcatcgtcaccgaaaaccacgtgctgttcccgatcctcccgatcaccggcagcatggctcgcgcgatgaaagggcagccgccctacgcctgggagccggacaagggcgcgtatgtcggcgtgatgaagcgcagcggcacgacgaaagacattgtctggttccgagccgaggcctgctacgtcttccatgtcatgaatgcgtgggaggacggccagcgcatcgtcgccgatgtcatgcaattcgaggaggcgccgctgtttccgcatcccgacggccggccgacggacccgcagaagtcgcgcgcccgccactgccgctggacgtttgatctctcggggaataccgaccgcttccagcaaacttatctcgacgatctcaccggcgaattcccgcggatcgacgaccgccgcgccgggctgaagagccgtcacggttggtacgcctgcgccaatccgaaactgccgatgttcggcgcgttgtcgggcatcgtgcatgtcgacggcaacggcaggaggctcggccattatctactgccggccggcgacaccatctccgaaccggtgttcgtcgagcggtcgaaagatgcggccgagggcgacggctggctgctcgcggttgtctggcgcgcgcgggagaaccgcagcgacctcgccgtgttcaacgccaccgatatcgaggcaggtccggccgcattggtgcaactcggccaccgcgtccccgacggctttcacggcaattgggtgggggcgcagtag

SEQ ID NO: 3109 - DNA, 729 bp, BradyrhizobiumColbertium
atgggcaagaccgacaccaagagcgaaccggcgcgaagctcgcgcacttccagaagcacgacgtctgctgcggcatcgcgaccgagacgccgcacgacgggcgcaaagaccgagaccccgtatcatcacggcgccttgcgcgaagcgctgctccaggccgccgagcgggtgctggagcgcgacgggctcgccggcctcacattgcgtgcggtcgcgcgcgaggccggggtctcgcatgccgcacccactcatcatttcggcgatctgacggggctgctcagcgagctcgcggccgtcggcttccgccagttcaacgcggcgatggccgcgtcgtgcgatgccgccaccacgccgctcgagcgtgcgctggcgcggccgaaagcctacgtcgcctatgcgcaagcccatcctggcatgtacggcatcatgttccgcaccgagcgcctggactattcccggccgtcgctgcatgaggcggctgaagcttctttcgccgggcttgcaaatgcgatcggcatgatgcggcaggagcagatcagcggcgacgcgttgacgctgaaccagggcgccgcgatcgcgcgtgcttggtcgatggtgcacggctttaccatgctgctgctcgacggccgtctcgaggacattctcgcgcggctgcccgaggggacgacggcggaacgcctgcttgaggcgatgctgacggcgcccgtgactccgaagcttcccgtgtag

SEQ ID NO: 3110 - DNA, 195 bp, BradyrhizobiumColbertium
atgctggtcgtgacccggctgccgccgggcccggtctgccacgtcgcctatgtcgatgcggtcgccaacccgaccgcgaacgagcttgcgcgcaaggctgccgacgatttcgcccgcagcttcacctgcggcaaggatgaagtgaaggtcatcggcacgagcgggcgcgccgtcgagctcgccacgatgcgctag

SEQ ID NO: 3111 - DNA, 318 bp, BradyrhizobiumColbertium
atgatccgcatcaccaccccattgctcgtcacgctgctcctatgcgccggcctcggctgcgccaacgcccaggcgatcggcagcagctactacacctcgacggcgccaaaggactgccgccaagtcggccagccaagcgacctcgacggcagcaccacgcgggtctgtccgggcaagggcgggctcgtggtgctgatcgccgaggatgatctgcgcgaggtcgtctcggtgggccgcaatcgcaagcaggcggccgaggaaccggcagccaatgtctggttcgcgccgttcaactcgtccgagagcaccatcgaatga

SEQ ID NO: 3112 - DNA, 606 bp, BradyrhizobiumColbertium
ttgggctcctccagcctcgttcgcgtctccgtactcctgatcatgccagccacaacctcgaacaaaccctatcgcgtcggccgctccaagaccggactcggcctcttcgccaccaagccaatcaagaagggcacccggatcatccgctatttcggaccgatcctggattcgcgaattcctgagcaggacgagatcgagaacaaatatctgttcgagctcaacggccgctggaccatcgacgggtcggtgcgcaagaacctcgcccgctacatcaaccattcttgccggcccaatgcagaatccgacgtccggccgcgcgagcgcaaagtctatattcgcgccatcaagaacatcgagccgggcgaggagatcaattacgactacggcaccgactatttcaaagcctatctgaagccgatcggctgcaggtgtgactcctgcgaaaggaagcgcaagaagctgcgcgccgaggcacgggccgaacgcgccaaggtgaaggcgcgggccgagcgcaaggccaagaaggcaggcccgaagagcgcgaccgcgaagaagaaggtgaacggcaagcacttcgccggcaaggccggtcgcgcaagatcgtaa

SEQ ID NO: 3113 - DNA, 399 bp, BradyrhizobiumColbertium
atgatcgaagcttccaccttcctgcgccgcgcgcttcttgccgatgccatcttcagcggcgtcgccgccctcggcttcaccttcggtgcaagcgcgttcgcaagactgttcaatctgccggacatgctgctgctcgaagccggcctgttcctgatcgcctacaccgggctggtcggctggctcgcgtcgcgcgcctccgtggcgagggcgctcgtgctgctggtcgtgatcggcaacgcggcatggacggtcggcagcatcgcgctgctcctttcgggcgcggtgtcgccgaacctcgcaggcgagctcatggtcgtggcgcaggctatcgcgaccggcgtgttcgccgagctgcaatatgtgggattgcggagaagtgccagcgcggcggcggcgtga

SEQ ID NO: 3114 - DNA, 231 bp, BradyrhizobiumColbertium
atgatcgcactgctgctctaccggaccgttgcagaccacgtcctgccctgggccttggcgttcggaacccggatgctggcgcgcagcctcaacatgcccgagccgctggtgcattcgaccggcgactatgtcgttgcccaggtcatcgccttcgagcacggcgtcggcaggagtctctgcccgctccgcctcgcccgcctgctgcgcgcctggtggcgcggtcggctctga

SEQ ID NO: 3115 - DNA, 819 bp, BradyrhizobiumColbertium
atgaacgcacacgcttccaccgcacgaaccgagcgcagccagccggtccacatcggcgaccatttgcgcgaatggcggcagcgccgccgcatgagccagctcgatcttgcgggcgaagcggagatctcggcacggcacctgagcttcgtcgagaccgggcgcgctgcgccgtcgcgcgagattgtgctcagactcgccgagcgcctcgacgtgcccctgcgcgaacggaacgtcctgctggtcgccgctggctatgcgcccgcgttcccgcagcgtacgctggaggatcctgcattgaagtcagcccgccaggcgatcgacctcgtcctcaaagcacatgagcccaaccccgcgcttgcggtggacaggcactggaacctggtgtccgccaatcggatggtggcgccgctgcttgatggcattccgcagcatctgctcggccagcccctcaatgtgctgcggctcgcctttcatccgcaggccctggcagcgcgcacggtcaatctcgcagaatggtgcgggcatctgctcgagcggctgcaccggcaatgcgaggcaaccgccgatcctgaattgatcaagctctacaatgacctcaggagctatcccattccggcccgatccgcgccgctgtcgagcgacaacgtcgcgattcccttcaagctgcgccatggcggagagatcctcagcttcttctccaccaccatggtgttcggcacgcccgtcgacatcacgctgtcggagctggcgctggagaccttcttcccggcggacgagcgcaccgcggagcgactgaagcagatggcggccatgacctag

SEQ ID NO: 3116 - DNA, 666 bp, BradyrhizobiumColbertium
atgagcacgctgaaaccgctccagatcgacgtcgtctccgatgtggtgtgcccctggtgctatatcggcaagcaccgcatcgagagcgcgctggcgctcgtgcccgacgtgccggtcaagctcagcttccggcccttcttcctcaatccctgggtgcctcgcgagggcatcagccgcgaggcctatctcacccagaagttcggctcggtcgaggcctataagggcattgccgggcgcgtcgtcgcggccgcaagcgaggagggcctcgtctacaagcccgagctggtggcgcgccagcccaacacgaccgattgccatcgcctgatcctgtgggcggaagccatcggcaaggcgcccgagatgaagcagcgcctcatggagctgtacttccgcgacggcggcgatctcaccgatgtgaacgtgctcgtgcgggcagccgccgatgtcggtctcgatgccgacgacgtgcgccagcgcctcgccactgacgcggacgtcgcgcgcgtttcggccgacgcgcaggaggccgccgagaaaggcatctccggcgtgccgacttatgtcttcgcgcagaaatatgccgtctccggcgcgcaggatcccaacctgctcgcgcgtgccatccggcaggtttcggcggagatcaacgcggaggcggcggagtag

SEQ ID NO: 3117 - DNA, 1170 bp, BradyrhizobiumColbertium
atggtcgacatcgcgcagcaggcggcgatccacccggcatcggcaagcaatgccggggccgcgcgcgcgcccgttccgctgacgacgatcgaccccggccagtggcgtgcgctggcgcagcgcgcgatcgaaccgaacgcatattacctgcccgcctgggagttcgccgtcagcgcatctgcccgcggccgcgccgaggcctcggcactgagcgcgttcgacgcatcttcaacgcggctgatcgggctgatgccggtgatctcgctctggcgggcccggaagatccccctgccggcactggtgagcgcgcatccctacggcacgctctgcagcccgctgatcgaccgcgacctgccaatcgaagcggccgcgtctctcctgcaacaggcgcgcgaggccggagcgcatgcgctcgtgctgaccgacgtcgctctcgacggcgcggcgatgaacgcgctcaggcagattctaagccgcaccggcctcaagccgcgcatcctctcctgttacgtccgcgccagcctcgatgcggcgcaggaaggcgagacgctgctacgggaggcgctcggctccaggaagctcaaggagctgcgccgccagcgccaccgcctggaggagcatgggccggtcatgttcgaagtcgcgcgcaagcccgacgagatcaggccggcgctcgaagcattcttgcagctcgaggccagcggctggaagggcaggcgcggcaccgcgctggtccagcatgccggcgatgcgaccttcatccgccgcgcggttccggcgctggcagagaccgcgcaatgcgaggtcgtcacgcttcgcgccggcacgacgccggttgccgccggcatcgtgttgcgtcatcaggatcgcgcctttttcttcaagctcggcatcgacgagcgctttgcaagacattcgccgggcgtgcagctcacgctcgacctcacccgccacctctgcgccgatcccgccatctccagcgcggactcgacggcgaacgccgatcaccccatgatcaacccgatctggcgggggcgcttcgcgatcggcgatgtgctgatcccgctgcgacggcacgatcccatggtggcactcattcatggggcgctctcggcgcacggcgccgtctatgcgacagcgcgccgaatggttcgcctgctccgcaaatag

SEQ ID NO: 3118 - DNA, 1440 bp, BradyrhizobiumColbertium
atgaccgatgacaccttcatcgaaggacctctctacgagaagcgaaggaaggtctatccgcaatcggtgcatggccctttccgccgcatcaaatgggcaatcctctgcatcacgctcgggacctattatctcctgccgttcgtgcgctgggatcgtggacccggcctgcctgaccaggccgtgctgatcgacttcccgcaccggcgcttctacttcttcttcatcgagctctggccacaggaggtctactatttcaccggcctcctgatcctcgcggccatgacgctcttcctgatgaatgcggtcgcggggcggctgtggtgcggctacatgtgtccgcagaccgtctggaccgacctgttttatgcggtcgagcgttgggtcgaaggcgaccggcgcgagcgcatgcaaggcgacaagcactattggaccttcacccacctccgcaaggtcgcgctcaagcacttcctctggatcatgatcgcttggtggaccggtggcgcctgggtgctctatttcgccgacgcgccgacgctggtgaaggagctcgcgaccttccaggccccgttcctcgcttacctctggatcggcatcctgaccgccacgacctatgtcttcgccggtcatgcccgcgaacagatgtgcatctatatgtgcccgtggccgcggattcaggcggcgttgaccgatgaatgggcgctcaacgtcacctatcgccgcgaccgcggcgagccgcgcatgtcggtgaagaaggcggatgccgcccgcgcccacggcgcacccgccggcgattgcgtcgactgccatcagtgcatcaatgtctgcccgaccggcgtggacatccgcaacggtatccagctcggctgcatccagtgcggcctgtgcatcgacgcctgcgacaacgtgatgcgcgagatcggccgccctcaaggcctgatcggctacgacaccgacatcaacatgcagcgtcgccgcgatggcaagccgccgatttaccgcatcatcaggccgcgcacggtgatctacgcggccgtgatcgccatcgtcggcagcatcatgctctacacgctcgcgacccgcgccacgatggatgtcaacgtgctgcacgaccgcaatcccctcttcgtccagctcgcggatggcggggtgcgcaacgattacaccgtgcgcattctcaacaagggcgcgcagcgatcgttcacgctcgaggtctcgggactgcccggtgcaaccattcgcgtcgccgggatcgaggctgcccccggcggcaagccggtcatcgaggtcggacaggatcagacccgtgaggtccgaatgtcgctgcacgtcggccctgccgacttgccgaagacctcgcgcgacatcgagatcgcgatcgccgagaccgccggtggcggacgtgcaagcgcccgcgaccatttcgtgccgggcgatcaataa

SEQ ID NO: 3119 - DNA, 204 bp, BradyrhizobiumColbertium
atgaatgtcgacaaagccgttctcgccttcgcgggatgcgtcgtcctgctcggtctcgcactgggcacctatgtgaatgcgtactggtacctgctgacggcctttgccgggctcaacatgctgcaggctgcgttcaccggcttctgccccgccgcgatcatcttcaagaagctgggcctgggtagcggctgcgcgttctcctga

SEQ ID NO: 3120 - DNA, 444 bp, BradyrhizobiumColbertium
atgagcacgacacgccagatcgtctgcggcagttgcgggcgcatcaaccgtctgcccgccgaacgcgcgccgcaaggtgcgcgttgcggcgcctgtcaccagccgatgttcaccggccatccggtcgaggtggacgaggaagccttcagccgacacgtcgccaacaacgacattcccgtgctggtcgatgtctgggcaccatggtgcggcccgtgccgcgccatggcgccgatgttcgaacgggccgcgcagcagctggagccgaaagtccggctgttgaagcttaactccgacaacgccccctcattgtcctcgcgcctcaacatcagcggcatccccaccctgctgctgatgcgcggcggccgcgagatcgcccgccattccggcgcgatggatgcccgcagcatcgtcgcctggaccgaagccggtctcacccgttcttaa

SEQ ID NO: 3121 - DNA, 1287 bp, BradyrhizobiumColbertium
atggcggaagttgtcgtaatcggagccggtctgagcggaacgctgatggcctatgaattgctgccacagttgaggaaggaagatcgccttagcgtcatcgcgcaagggtccgtctatcatttcgtcccatcgaacccctgggtcgcagtcggctggcgcaagcgtgaggagatcgagatcgacctcgcggacatcatgaaacgcaagggcgtgcgactgctgacgcagggcgcaaggcgcgtccacccgaccgagaacagtgtcgagctcggcgacggcacgtcgatcaactatgactatctggtcgtcgcaaccggtcccgaattggctttcgacgagattccgggtctggggccgcaaggccatactcagtcgatctgccacgtcgatcatgccgcacatgcccgtgaagccttcgagaagcttgcggcgaatcccggaccggtcgtgatcggcgccgtgcagggcgcctcctgtttcgggccagcctacgaattcctcttcattctggaaactgagctgcgccggcgaaaattgcgcgaccgggttccgatgacgttcgtcacttcggagccgtatatcggacatctcggcctcgacggcgtcggagacaccaaagggcttctggaaagcgagatgcgcgagaagcacatcaagtggatcaccaacgcccgcgtcgacaacgtcgcgcccggcttgatgtcggtggaagagttcgccgacgacggcacgtctcgcaaggcccacgagctgcctttcgcttattcgatgatgctgcccgcctttcgcggcgtcgaagcagtgcgcggtatcgaaaaactgaccaacccgcgcggcttcgtcatcgtcgacaagcatcagcagaatcccacctaccccaacgtcttcgcggtcggtgtctgcgtcgcgatcgcaccagtcggcgcgacaccggtgccggtcggcgtcccaaagaccggcttcatgatcgaatccatggtgacggcgactgcgatgaacatcggtgccctgcttcgcggcaaggcgccgacagcccagccgacctggaacgcgatctgcctcgccgacttcggcgactccggtgtcgcgttcctggcgcagccgcagatcccgccgcgaaacgtcaactggtcgtccaagggcgaatgggtgcacctcgccaaggtcgctttcgagaaatacttcctgcgcaagatgcggcgcggcgagagcgagccgttctacgagcgcttcgttctcgacaagctgaacatcgccaagctcaaggaggtccgaaccggcacatga

SEQ ID NO: 3122 - DNA, 321 bp, BradyrhizobiumColbertium
atgaagatgaatgctgaaatcatggagcgggctgcggatcaggcgagcgagttgctgaaggcgctcgccaaccggcatcgcctgctcctcatctgccagttgatcgatggcgaacgctcggtcggcgagctcgccgagttcctgaacttgcgggactccacagtctcccaacatcttgcgctccttcgcaaggatggcctggtgtccgcccggcgtgaggcccagacgatcttctattcgatcgcgagcgagccggcgcgcaaggtgctgaagacgctctttcaggcattttgcgcgccgaagtccgcaaggaccagatga

SEQ ID NO: 3123 - DNA, 978 bp, BradyrhizobiumColbertium
ttgctggcagccttcgcggccatcgggctgcctgcaacactggcgagtgcggccgaaacgctcgtggtcacgcagcaatcgatcgccgacgaaaaggccgtattcgccacggtcgaaagcgtcagcgtggtgccagcgcgcggacgcatcggcggcacggttgtccagctcaaggtcagggagggcgatcgcgttgccgctggtcaggcgatcgccacgatcggcgacgacaagctcgtgctgcaaatgaaatcgctcgacgcccagatcgaggcgctgcaggcacaggcgaaccaggcgcagctcgacttcagccggaccgaaggtttggtcgagcgtggtattctgccgcggatcaagctcgacgagcagcgaactgcgctgaacgtcgccgagaacggcctccgggccaagaccgctgaacgtgcggtgatcaacgagcagctcaaccagggccaggtgcttgcgccggcggatggtcgcgtgctgaagcggctgatcacggtgggatccgtcgtgctcgcgggtgatcccatcgtcaccgtcgcccagcagaatttcaagctgcggctccgcgtgcccgaacggcatgcgcgcttcctcaaggcgggggatcggatccgcgtcgacggcgcggagttcgtcggagaggtcgccaagtccggagtcattgatctcgtttatcctcagatcgaggaggggcgcgtcattgcggatgcgactgtcgagggcctcggtgaatatttcgtcggtgaccgcttgcgggtctggatctccggcggcacgcgagcagcgttcgtcattccctccagctatgtgacgacgcgattcggcatcgattatgttcggcttcagaaggataaaggaacgatagacgtgccggtgcagcgtggtcgcgaattgccgacgccggcgcttcccgacggactcgagatcctgtccggcatttctgccggcgaccagttggtgctgccatga

SEQ ID NO: 3124 - DNA, 3222 bp, BradyrhizobiumColbertium
atgaatctcggactgtcaggacggttgaccagagcgacgatcgcatccccgctgacgccgctgtttctgctcgcgtcgctcgtcgtggggctgatcgcggtggtgatcattccccgtgaggaggagccgcagatcagcgttcccatggtggacatccgtgtcaatgccgacggcctgcgcggaccggacgccgtggagcttgtgagcaagccattggaatcgatcgtcaagggcattgacggcgtcgagcacgtgtatagccagaccgaggacgaccgcgtcatggtgaccgcgcgcttcctggtcggcaccaagttcgaagatgccatcctgcgggtgcacgagaagatccgcgccaatatggatcgcattcccgtcggcatcccggagccgctgatcgtaggacgaggtatcaatgacgtcgcggtgacggtgttgacgctgtcgccgaagccggaggcggccagccgctggaccgacaaggatctctacgagctcgccgacaaactgcgctcggagttgatgaaggtcgacgacatcggcctgacctacatatcgggcggggcggcgcagcagatccgggtcgagcccgatccggagaagctgtcgctgttcggcatcacgcttcagcaactcgtcgccaaggtcaaggatgccaaccgctcgttcctggcgggacaggtccacgatgccggcaccgtgcggagcgtcgcggcgggccagacgctctccggcattcccgacatcggactattgctcatcacgagccgcgacggccggccggtctacgtcaaggacgtcgcctccgtcgtcgttggcccgagcacgattgagcatcgcgtctggacggaatcgcgcgataccgccggacagtgggcgcggacgcccgccgtcagcctggcgctggccaagcgggccggcgccaatgccgtcgtcgtatccgagaatatcgcccaccggctgcaggaattgaaggcccgcctcattcccgaggatgtccaggtgaccgtgacgcgcgactatggcgagacggccaacgagaaggcaaacgagctgttgttccaccttgcccttgcgacgatctcgatcgtcgtcctgatcgcgatcgcgatcggctggcgcgaggcgctggtgaccttcgtcgtgattcccacgacgatcctgctcacgatgttcgccgccaatttgatgggctacaccatcaaccgcgtaagcctgttcgcgctgatcttctcgatcggcattctcgtcgacgacgccatcgtcgtcgtcgagaacatcgcgcgccactgggccatgcgtgacggccgaccgcgcttgcaggcgaccatcgaggcggtggccgaggtcggcaaccccaccatcgttgcgacgttgaccgtagtcgcggcgctgttgcccatgctgttcgtgtcggggctgatggggccctatatggctccgatcccggccaacgcgtcggccgccatgctgttctcgttcttcgtcgcgatggtggtcgcgccctggctgatgctcaagctcgcgccgaaaggcgatacggctccggcgcatgcggagcacgatgagggccggctcggccggctgtaccggcgcttcgccgcaccgatcgtgcggagcaagcggtcggcctggctgttcctgctcggtgtcggcatcgcgacgctgttgtcgatgacgctttttgcgaccaagtcggtgacggtcaagctgctgccgttcgacaacaagtccgagattgcggtggtcgtcgacctgccggaaagggcaagtctggaggcgaccgagcgtacgctgttcggcgctgcagagatcgcgcggcaactgcctgaggtgacctcggtgcaatcctatgccggcaccccggctcccttcaatttcaacggcctggtgcggcactattacttgcgggagaggcccgagctcggcgaggtgcaggtcaatttggcgccgcgcggcgagcgcaagcgtgcgagccacgaaatcgcgctcgagctgcgcgagaagctgaaggcgctcggtccgcccccgggcaccagcatcaaggtggtcgaagtgccccccgggccgccggttctttcgacgctgctcgccgaggtctacggtccggatgcgaccacgcgccgggcagtcacggccgagctcaagaagattttcgccgaagtgccgttcatcgtcgatatcgatgattccatcggcgagaagcggccgcgactgcggctctcgatcgaccaggacaggctcgagttcttcggcgtcgagcagcgcgatgtctacgacacgatccagacgctcttcggcggcacctcgatcggctactcgcatcgaggcgaggaccgcaacccgatcgagatcgccgtgcgcctcgggaagcgcgatctggtctgggacgaggctctcgcctcaacgccggtgccagccaatacgttgcccggcagcaagacggtggtcgaactcggtcaggtcgtgaaggcgaccgtggaggagggctcgcccacgatcttccgccgcgacggccgcttcgccgacatggtgatggccgagctcgccggacgcttcgaggctccgctttacggcatgctcgcggttgccgatcgcgtcgaggcgcatgattggggcaagctgccgaagcccgcgatcagcctgcacggccagccgtctgacgagtcgcgtccgacgctgctatgggacggcgaatgggaaatcacctgggtgactttccgcgacatgggcgcggccttcggtgcagcgatcctcggcatctatgtgctggtcgtggcccagttcaggagcttccgcctgccgctcgtgatcctgacgccgattccgctgacgctgatcggcatcctgatcgggcactggctcctgggggcgccgttcaccgccacctcgatgatcggcttcatagcgctggccggcatcatcgtccgcaattcgattctgctggtggacttcatccggcatagcggcgccgggggcaaatcgctccgcgatgtcgtgctggaggcgggagcagtccgcttcaagccgatcctgctgactgcgcttgcggccatgatcggggcggcaaccatcctgctcgatccgatttttcagggattggcgatctcgctcctgttcgggcttgcgtcgtcaacgctgctcaccgtgctggtgattcccgcgatctacatcgccttgcgtgcgccgcgcgaggctccgaccacagccaaatccagctaa

SEQ ID NO: 3125 - DNA, 357 bp, BradyrhizobiumColbertium
atggacaagaactacgtcgacatcacccggaacatctcggccaatctgaagaagctgcggagcgacattcccgacaccatgaaaggatttgccgcgctggcccaggccgccacgcgtgacggcgcgctcgacaagaagaccaaggagctcatcgccttggcgctcggtgtcgccgcacactgcgacggctgcatcggctttcacaccgaggcgctcgtcaagctgggcgcaacgcgcgaagagatcgaggagacgctcggcatgaccgtctacatgggtggcgggccgtctttgatgtacgctgcggatgccattgcggcctacgagcagttccagcagcaatcagccgctctataa

SEQ ID NO: 3126 - DNA, 330 bp, BradyrhizobiumColbertium
atgaggacgtttacgattgcgctgttggctggcgtcggtgctttggcagccgcgtcgagtgcgaaggcttccgatatctatacaaccagcgagtacaccaatccggatcttgtccagcaagtgcggatggtctgtgatgacgacggtcgctgctatcgcaagcgcagcggttcgcgcgtgatcgtgcgcgactcctataactacatgccgcgcgaccgctattatgagcggcggacgtatcatcgccaccggcatgacgggccgcgcgccggcgtgggcattcgcgcccctggcgtcagcgtcggtgtgggcgtcggcgaccgctggtaa

SEQ ID NO: 3127 - DNA, 405 bp, BradyrhizobiumColbertium
atgttacggattattgctcatgcggcgctgttcgccggagcgctcgcgctcggggcctgcggctttgccgacagccgcgcaccggtgcctgagttcatgcgcatgaaggagcccgagcagccgccgcccgaaacgccacccgacgtcaagcgcgtggtgcgcgagcagatcgacgtcgtctttctcccaacgtcctatccgcgcgaggtgcacgtcgccccaccccatcgtgagctgcgaggactcggctggacggcatgcgtccgcgcacagctcacctccgcgacgggcgcgccgctcggcgcccagacctacctggtgtccatcaatggcggaaaggtcgtggaccgccggcgggcggaagccgacgacatctgcggcacggagacttacgagccgatctag

SEQ ID NO: 3128 - DNA, 225 bp, BradyrhizobiumColbertium
atgaggattttggtcatagcggcagcggcgctggcgctggcggctggatcggcggaggcgcaaggccggcgccagcccaatgacggagccaagcccgccgaccatgcacccaaggtcgacgaaaaggcttacaaggccgcgctcgaacgcatccccgagcccaaggataaatacgatccgtggggcggcgcccggccaagcgaccccgccaagaaatcgagatag

SEQ ID NO: 3129 - DNA, 2031 bp, BradyrhizobiumColbertium
ttgcgagcgcgtcagcttttcgcggctccattcgctgcgttcgtattgtttgcagcctcgccatgcttcgcctggcagagctggggcggcgacgtcggcggctcgcgcttctcgtcgttgcgacagatcacgccggacaatgtcggtcagctcgtccgcgctttcgaatatcgcaccggcgatctcaccgcgcgcccgcccgaggtggtgcggcgaaccaaattccaggcgacgccgctgttcgtcgaggacagcctcatcttctgctcgcccttcaacgaggtgatcgcgctcgatcccggaacaggggtacagaaatggcgcttcgatccgaagatcgcggtcaaccagcgtccggccaatcgccatgtctgccgcggcgtcacttattgggtcgatgacacggcgcccccggaggccgcctgccgctcgcgcatcttcatgggcaccaacgacgttcgcctgatcgcgctcgacgcgaagactggaattccctgtgccgatttcggcaacggcggtgaggtcaaactcgagatcggcatgccgctggattggcctggtgaattccaggtcacttcgccgccagcggttggccgcggtgtggtcgtggtcggctccgcgatcggcgacaatcgccgcgtcgatgcgccgagcggcatggtgcgtgcgttcgacgcgcgcaatggccagccacgctggaccttcgacccgctcaagcgcgacggcatcgaagccggtcacgccaacgtctgggcgccgatgtcagtcgatgacgcgcgcggactcgtcttcctgccgacctcgtcgccatcgccggacttctggggcggcaagcggcctggcagcaacgagcacgccaattcggtggtcgcattgcgcatcgcgaccggcgaactcgtatgggccttccagacggtgcatcacgatgtttgggactatgatctggccgcgcagccgacgctcacgcgcatcgataccggcgaagggcagcgcgatgtcgtgatccaaccgaccaagcagggctttgtcttcgtgctcgatcgtgacaccggaaagccggtgtggccggtcgaggaacgcccggtgccgcagggcggcgctgaaggagaggcgctgtccccgacgcagccattcccgacacatgtgccggcactgacatcgcagacgatctcgcccgatgatgcgctatctctgatgcccggcatcggccgttcgtcttgcgaacgtcagttcgcggaagcacgcaatgagggcctgttcacgccgccctcgaggcaaggcactctggtgtttccgttcaccggtggcggggtgaactggggcagcgcggccttcgacccggtcaaccagatcctttatgccaacaccagtcgcgccgttcacctcatcaagctgatcccgcgcgccgaggcggccggattcaatccgccgcccggtcacgatttcggccagcagcgtggcgcgccgttcgcgatgtcgcgtgcgttggtgacgtcgccgcttgggctgctctgcaacaagccgccatggggtgagatggtcgcggtcgatgttcgggcaggaaaaatcctctggcgggcgacggtcggcaccaccgaggatctggccccgctcggcgtgccgttgccctggggcgcgccgctcgtcaacgggcttgctgtcaccgccggcggtctcgtcttcaccggagcgatggacgcttatttacgtgccttcgacgggcgcagcggcaaggagctgtggcagggtcggctgccggtgcccggtgttgccaatcccatgacctatttctggaagggcgagcaatatgttgcgatcggcgccggcggccactccgaggcaggtacctcgatcggcgacagcttggtggcgttccgcctggcgcggccaggcgaggggccgacattatggtcgcgtaccatcgatcgtcctggtggacgcttccttgcggcatcctcggtgatcgggatcgggatcgtcgtgctcgcgatcgcaagcctgcgctggcgtcgccgcggcaagcaatcgtga

SEQ ID NO: 3130 - DNA, 282 bp, BradyrhizobiumColbertium
atgcactacttcacactcatcaacatggatcgacgcgggatgatcgagaagcgttcagcacaacgtcaccgtgttttcaagggtggaacgatcaccttcgaaaacagcggcatctcttgcacggtgcgaaacatgtcggcggacggcgcggcgatcgacctcgacgcctccgtcatgctgccgccatcgttcacgcttgcgatcgtgcgcgacggtttcgtacggcattgccgcacggtttggcgcaacgacaggcgcatcggcctcgcctttgtgcaatag

SEQ ID NO: 3131 - DNA, 294 bp, BradyrhizobiumColbertium
atgaaaattttgctttcgatcttgttcgctgcagcgttctcgctgtcatcgatgcccgcccacgcggtcaagtgggacctcgcgaccatgagctgcaagcagttcctcgaaagcggtgaagacaacatccaggtcgtgctgacctggatggacggctggtacaagggcgacgaggacaacgcgatcatcgacaccgacgagttcatcgacaacgccaagaagttcggcgcctattgcgcaaagaatccgaacgccagcatcgtcaccgcggccgacgagatcctcggcaagtaa

SEQ ID NO: 3132 - DNA, 465 bp, BradyrhizobiumColbertium
atgcaaatgcagccacaggccgagttcggcatcgcagacgcccgacgcatcctcggcgaggtttttgcgccctgggtccaggacctcaacctcgccgtcgagcgcatcgagcatgcgcagccggcggacctcccggactggcagccgggcgcgctgctgcgcatgccgttctcggagcggctgtgccggcacggcggcgtggtctgcggtcaggccctgatggcgcttgccgacaccgccatggtgatcgcgatcctcgctgccaatcgcggctaccgcccgatgaccacggtcgaccagaccacgcatttcatgcgcgcggtctcctcgtccgatgtgcttgcggatgcgcgcgtggtgcggctcgggcgcatcatgagcttcggccgcgtgacgctgctctcggctgccgacagcaagccggtcgcgatggtgtcgagcgcgttcgcgatgctgccggggtga

SEQ ID NO: 3133 - DNA, 312 bp, BradyrhizobiumColbertium
atgatcaaggagtggatgatgaagcttttccgtttggccgcggtgctggccgtgttggcgggaccggcctacgcgcaaatgcccaatctcaatttgctgcaggatgccccgagcaagaccccggaggaaaaggccgccgaagccgagcgtgacagggcctacaaggaaacgctgaagaagatcccggattccaagggatcgaacgatccctggggcggcatgcgctccgatccgccgaagcagccggcgccgaaggcctcggccgcaaccagcgcgccgaagaagacaaagagcggcacggctgccaactga

SEQ ID NO: 3134 - DNA, 255 bp, BradyrhizobiumColbertium
atggccgatcggccgcgggatctcgccgagcggatggcgcgccggcgcaagctggtgggcaagccgggccagatggccggcgacggctatctgcgcgagaccttcacgctgccgcgcgcagcggcgcgggaaagggcgcaggccttcttcgcccgctaccccaaggccggctatatgagcgccgtcgagacttggcgcgagctgcccggcggcgacatcgagttcaccatgcggcggctgcccagcgcggattga

SEQ ID NO: 3135 - DNA, 258 bp, BradyrhizobiumColbertium
atgctcggcattccccgccgttattcacatttcgtctttggcatcatccagtccggattgacctcgctgatcgcggcggggatcgccagctttcccgcggccagcccgatgagcttcgttcggcactggatggtgtcgtggctgatcgcatgggcgacgatgctgccgatcgtgctgctggcggcacccgcgattcgcgccttctcactgcgcctgacgcagggggagcgggatccgcgggtcggccgggaggcatga

SEQ ID NO: 3136 - DNA, 117 bp, BradyrhizobiumColbertium
gtggcgcgccgagaacggggtggcgtcatggataacgtagagcggtcattcgccgccgcgacggcggttggcttcgtggtgctggtgatcggcctggtgctgctggcggtgctgtag

SEQ ID NO: 3137 - DNA, 588 bp, BradyrhizobiumColbertium
gtgctccttatggcgaggattcgcgtgagggacaaacgattgcgaggcagctcggcgataaaggcaatgtaccctatctgttctatgttcgcaatatgttcttttgcggatttgggcggtcggcctcgctccacgtttgatgcgcctcaacggcgcgcggacgagatgccgtcagaattccgatccgacggcaccgaaccttttcgcggtctccggccttctctggtcatggaccgcaactctggggaccatgaccatgacggaaaccacgcacggcgctgccatgtggcgccatcagctgctcgaggcggcgcacgaggagatggcgaagttcgagcgacaggagaacgagttccgcaggaaggatcgccaggagcgtgccgccgagctccaccttcccctgaacgaggtcaggattcactgagaagcaaggacccggcttcggaactggccatcgccgggcttgaggggcgcaacgaaggcttgaggtatctgaacaccatgttcaagccattggcggaccaagcaaattgccgggcagcctactgtgcatggggttgttttgcagttttgacagacaggatgtga

SEQ ID NO: 3138 - DNA, 1089 bp, BradyrhizobiumColbertium
atgtccgcaactgccctgcgtatcgtcgaaggatcttccatggacaagagtaaagctctggccgccgcgctctctcagatcgagcggcagttcggcaagggctcggtgatgaagctgggcaagaacgaccggtccatggacatcgaggcggtgtcctccggctccctcgggcttgatatcgcgctcggcatcggcggcctgcccaaggggcgtgtcgtcgagatctacgggccggaatcgtcgggcaagacgacgctggcgctgcatacggtggcggaggcgcagaagaagggcggcatttgcgccttcatcgacgccgagcacgcgctcgacccggtctatgcccgcaagctgggcgtcaacatcgacgagctgctgatctcgcagcccgacaccggcgagcaggcgctggagatctgcgacaccttggtgcgctccggtgccgtcgacgttctcgtggtcgattcggtcgcggcgctggtgccgaaggccgagctcgagggcgagatgggcgatgcgctgccgggcctgcaggcccgcttgatgagccaggcgctgcgcaagctcacggcctccatcaacaagtccaacacgatggtgatcttcatcaaccagatccgcatgaagatcggcgtgatgtacggctcgcctgaaacgaccaccggcggcaatgcgctgaaattctacgcctcagtccgcctcgacatccgccgcatcggcgcgatcaaggagcgtgacgaggtggtcggcaacaccacgcgcgtcaaggtggtgaagaacaagctggcgccgcccttcaagcagatcgagttcgacatcatgtacggcgagggcgtctccaagatgggggagatcctcgatctcggcgtcaaggccggcatcgtcgagaagtccggcgcctggttctcctatgacagccagcgcctcggtcagggccgcgagaacgccaaggcgttcttgaagggcaatcccgacatcaccgccaagatcgagaccgcgatccgccagaactccggcctgatcgccgagcagatcctggccggcacgcccgagcgtgacgccgatggcgaggagccggcggaagagtag

SEQ ID NO: 3139 - DNA, 798 bp, BradyrhizobiumColbertium
ttgggtccgctggccacggggcgccaagggtcgcaaattatcgctggcgagttttgcgagccgtacgacgagatcgaattctggttcggagcgaatccccgcgaccagctgcaattggtctggttgctcgatcacctcggcagttttcctgtgctggcacagaagttcggggtgcgattgctggactccgacctcatattcggtcccgattatgatttcgctgagggcgaacgccatattcccatcgggaacttcggtgcgaaggagttcgagatcgcccggttggcgtggttgtcctaccgggcgccgacgcccgaggcctgtatcgatctgcttcaccgcgatctgggtgccttgctggtgctgcggccagcgttgcttcagcttctggcagagctcccgtctcccttgacagggctaggcgcaaccgagatgcgatttctggagatgctcgactggtttgcaaacacgaatccgttgtttcacctacgctcgctacggggcacttacgtctggggtgaggtcgagccgggatatttgctcgaaggcctcgccctcggccccaagccagctgtggccgggctgggcgaagaattacgcgccatcgaccttggcaatctcggagcccggcacaaggtttacctccgcagccggtcgtcgctgaccgaattcggtaaggctgtcctggcccatcaggaagacttcagccgtcataatccgatcgaccgctggtggggcggcacgcatctgaccaacgatcggctgtggcgctacggtcctgtcctgacgaagcgctga

SEQ ID NO: 3140 - DNA, 288 bp, BradyrhizobiumColbertium
gtggcgggccttgccgacctcgtgattgcgatcgagcgcctgcttgtctggggatcgctgccatccactgcggagctcaatgcattccttgcgccgcatacgatgcacccatcgggtcttcattggctggacgatacgccctcctggcgcctcgaaagttcgggccttagggggcgcggactgatcgagctgttgtcagaatatgactcggtcgaacggtggatggagccagaagccagatgcgcaattgatcttgctctggctgctcgaccgttgcggcagcgatag

SEQ ID NO: 3141 - DNA, 651 bp, BradyrhizobiumColbertium
atgtccaaactcgtgatgcgttcgctggacatcgccgtgagcggcctcagtcccgcaggccttgcgaagctgaacccgccgatggtcaagctcacgcaagatcacgttgaactggccggccgcgcgtggcgagcttatcgtgcgccgacgccgcaggcttggttcggcctactcgaaacggatttgcgcttgcttccgcagctggagcgttgcgtcgtcgcgctgctcgaagagcttccaaacgtgagcagcggccttggggccacagaaacgcggatactggaattgattgctccgggtggggtgcagccctttgacgtgttcccgggacatcagaagcctaacgagcgtcgcgtcttcgattactgggaagttggcgcgctgctcgatggactagcgcgctgcccggtgccggccgtctccgggctggaggaggggcaattcacgctcgacatgcatgaggatgctcttcttctcgtgcgatacaagcaatcccgcttgtcgctcatggatctggggagggcggtgctggcaggcgaggatttccgccatcataatcccatccgccgctggtggggcgggacgcttctcgtcagcgatcggctctggcggtgggatcgcaaaggccggctgttgattgcgcctggctaa

SEQ ID NO: 3142 - DNA, 975 bp, BradyrhizobiumColbertium
ttgtcacatctgatcctagcgaccaacgatcgtgcggaagacgtgcttcgccagtccggcctggcgaacgtcgcgcttgggttctgtccgcgttttgtctggaggaaattgccttcggacgagcagcttctgatggggctggagcgccgatcggaaaagcaccgcaattccggcgatcactggctcgatgacgtttgtagcggtgcgctcgacggtttcagcacgcgcgatatcggtttcttcgagctgtgcgcgaagttcgactcgattgacatatgggttgatccccagcccaatgatcagctggtgctcgtctggctgctggacttgcttcgtccatataaggagatcacgaccaagctgagccttgtgcatgcggacgacaccatttcgaactatgatccggagtctgtcgcaaaatggaggctgccggccttcaaggtgaccgagaaccacttggcgacggcaagccgcgcctggcgagcctatcgggctgacacgccacaaacctgcttcgatctgctgatgacggacctgatgatcttgccgagacttcgatcggcgctcatcgcggtgctggaagagcttccggacagcgtgacgggactcggtgccactgaaatggatctgctggattctgtgaacggcgggcaaaccgatccaaggcttgtcgaagatgcgcgatggcttcgcgatgtattcgacgaaaacgacgcctatgacgctttgctcgaactaggggcgtattcggcgccgccgctcttgttaggcgatccggcgttcgacaatgaggatcgctatttcggcaggagcgaatggaaactcacgctgactgaactcgggcgatcactgctcgcccgagaagacgacatgtggcggcacaaccgaatctatcggtggtggggcgggacggagctcaccaacgaaaagctctggcgatgggatcgcaaaagccggctgttggtggcgccctag

SEQ ID NO: 3143 - DNA, 2868 bp, BradyrhizobiumColbertium
atgaccgcgcaccgcaagaccaacggcgacaccgccgccagtttcgttcgccgccacatcggcccatcggcgcgcgatgtcaccgccatgcttgagacagtcagtgccaagagcgtcgatgcgctgatggcggaaacgctgccggcctcgatccggcaggccgccccgctcgatctcggcaagccgctcagcgagaccgaggcgatcgcgcacatgaccgagcttgcgcgccggaaccaggtcttcacctcgctgatcggccagggctattccggcaccatcctgcccgcggtgatccagcgcaacatcctggagaacccggcctggtacaccgcctacacgccctaccagcccgagatcagccagggccggctggaagcgctgctcaacttccagaccatgatctgcgaccttaccgggctcgacgtcgccaacgcctcgctgctcgacgaagccactgcagcggccgaagccatggcgctggcggagcggcactcgcccgtgaaggcgaaggcgttcttcgtcgacaaggacgtgcatccgcagacgctggccgtgatgcgcacccgcgccgagccgctgggctggcagttgatcgtcggcgatcccctcactgacctcgacaaggccgacgtgctcggcgcactgctgcaatatccgggctcttccggcgcattgcgcgatctcaggccggcgatcgccacgctgaaggccaagggcgcgctggcgatcgttgccgccgacctgctggcgctgacgctgctggcttcgcccggcgagctcggtgccgacatcgcgatcggctcggcgcagcgttttggcgtgccgatgggctatggcggaccgcacgcggcctatatggccgtgcgcgatgcactgaagcggtcgctgcccggccgcatcgtcggcctctccgtcgattcccgcggcgcgccggcgtaccggctggcgctgcagacccgcgagcagcacatccgccgcgagaaggcgacctccaacatctgcaccgcgcaggtgctgctcgccgtgatcgcttcgatgtatgcggtctatcacggcccggagggcctcatccagatcgcacgcaccgtgcaccgccgcaccgccgtgctcgcgagcggcctgcgcaagctcggctttgcgccgcagtccgacaacttcttcgacacgctcagcgtcgacgccggcgccaagcgcgccgagatcgtcgcgcgcgcggcgagcgaaaggatcaatctcggcgtcagtgacagcgccctgcggatcgcgctcgacgagaccaccacgccggcgacggtggaagcggtctggcgcgccttcggcggcaccctcgcctatgccgagatcgacgccgagacgcgcgaggcgctgccggacgatttgaagcgcaccaccgctttcctcacccatcccgtgttccacgcgcatcgctcggagaccgagatgctgcgctacatgcgcaagctcagcgaccgcgacctcgcgctcgaccgcgccatgatcccgctgggatcctgcacgatgaagctgaacgcgaccaccgagatgatgccgctgacctggcccgaattcgcctcgctgcacccgttcgtgccgcgcgaacaggccgccggctatcacgcgctgttcgcccggctggagaaatggctgtgcgacatcaccggctacgacgcgatctcgctgcagccgaactcgggcgcgcaaggcgaatatgccgggcttttggcgatccgtggctaccatgccgcgcgcggacagggccaccgcaggatctgcctgatcccctcctccgcccacggcacgaatccggcctccgccgcgatggtcggcatggacgtggtggtggtgtcttgcgagaagaacggcgacgtcgatgtcaatgatctccgcgccaaggcggagaagcattccaacgatctcgcggcggtcatgatcacctatccctcgacccatggcgtgttcgaggagcatatccgcgagatctgcgacatcgtgcacgcccatggcggccaggtctatctggacggtgccaacctcaacgcacaggtcggcctgagcaggcccggcgattacggcgccgacgtcagccatctcaacctgcacaagacgttctgcattccgcatggcggcggcggccccggcatgggcccgatcggcgtcaaggcgcacctggcgccgttcctgccgggtcatccggtgacgaatgctgaagcgccagtcgggccggtctcggccgcgccgttcggctcggcctcgatcctgaccatctcctacatctacatcctgatgatgggcggcgaaggcttgaagcgcgccaccgagatcgcgatcctcaacgccaattacatcgcggcccgcctcgatccgcacttcccggtgctctacaagaacgccaagggccgtgtcgcgcacgagtgcatcgtcgatccgcgtccgctgaagacgacatcaggcgttaccgtcgacgacatcgcaaagcgcctgatcgactacggcttccacgcgccgaccatgagcttcccggtgccgggcacgctgatgatcgagccgaccgagtcggaatccaaggcggagctggaccgcttctgcgacgccatgatcgcgatccggaaggagatcgccgaggtcgaggccggccgcttcaagatcgaagcctcgccgctgcgccacgctccccacaccgtgcacgacatcgcggatgatgattggaatcgcgcctacacccgcagcgaaggctgcttcccagcgggcacgtcacggaccgacaagtactggagccccgtgggccgcgtcgacaacgtctacggcgatcgtaacctcgtgtgctcctgccctccggtcagcgattacgcagaagccgcggagtag

SEQ ID NO: 3144 - DNA, 369 bp, BradyrhizobiumColbertium
atgaccacgacgctgtacacctccgaccacgaatggctcgcgatcgacggcgatatcgccaccgtcggcatcaccgactatgcgcagcagcagctcggcgacgtcgtgttcgtcgaattgcccaaggtcggccgcgcgctgaagaaggccgaagccgccgccgtcgtggagtcggtcaaggccgcgtccgacgtctacgcgcccgtaacgggtgaggtgctggaggccaacgaggcgctcgccgccgagccggcgctggtgaactcggacgcgcagggcaaggcctggttcttcaagatcaggatcgccgacaagggcgagctcggcggcctcatggacgaagccgcctacaaggcgcacacggcgtaa

SEQ ID NO: 3145 - DNA, 1092 bp, BradyrhizobiumColbertium
gtgtccctgggcggcaagatggtgccgttcgccggctatgacatgccggtgcagtaccccgcgggcgtgctgaaggagcacctccatacccgcagcaaagccggcctgttcgacgtctcccacatgggccagatcgcgctccggccgaagtcgggcaaggtggaggatgccgcccgcgccctggagcggctggtgccgcaggacatcgtggcgatcccgcccggacgccagcgctacgcccagttcaccaatgcggatggcggcattctggacgatctcatggtcgccaatttcggcgatcacctgttcctggtcgtcaacgccgcctgcaaggagccggacgaggcgcatctgcgcgcgcatctctccggtgactgcgtcatcgattcgcttgccgaccgcgcgctgatcgcgctgcaggggccaaaggcggagtcagcgctggcgaaattgtgtgcagcggctcctgccatgacgttcatggacgcaggcccgcacgaggtcgccggcatcaagtgtttcgtctcgcggtccggctacaccggcgaagacgggttcgagatttcggtccccgctgcggacgccgagcggctcgctcgaacgctgctcgacgatcccgacgtgctgcccatcggcctcggggctcgcgacagcctgcggctggaggccgggctctgcctctacggccacgacatcgacaccgcgaccacgccggtcgaagccgcgctggaatggtcggtgcagaagagccgccgctccggcggcgcgcgggccggcggctttccgggtgcggaaagaatcctcgcccatttcgatcagggcgcgtcccgacgccgcgtcggcctccgtgccgaaggccgcgcgccggtgcgcgaaggcgcgctgctgtttgcgaatgacgccggcggcgagccgatcggcaaggtcacttcgggcggcttcggcccgagcctgaatgcgccggtcgcaatgggctacgttcccgtgggcctcgccgcgcttggcacgaaactgttcgccgaggtgcgcggccagcgccttcccgtgcaggtcgcggccatgcccttcgtgaaaaacacctacaaacgctga

SEQ ID NO: 3146 - DNA, 2685 bp, BradyrhizobiumColbertium
atgaacatgagcggcgtcaacgagatcaggtcgacctttctgaacttcttcgccgagaacggccacgagatcgtgccgtcctcgccactcgtgccgcgcaacgaccccaccttgatgttcaccaatgcgggcatggtgcagttcaagaacgtcttcaccggcgtcgagaagcggccctatcagcgcgccaccacctcgcagaagtgcgtgcgcgccggcggcaagcacaacgacctcgacaatgtcggctacaccgcgcgccacctcaccttcttcgagatgctcggcaatttctcgttcggcgattatttcaaggagcgcgcgatcgagctggcctggaagctgatcacgaccgagttcgggctgaagaaggacaagctgctggtcacggtctatcacaccgacgacgaggcggcgggcctgtggaagaagatcgcaggcttctccgaggaccgcatcatccggattccgacctcggacaatttctgggcgatgggcgacaccggcccgtgcggcccgtgctcggagatcttcatcgaccgcggcgagcacatctggggcgggcctccgggctcgccggaagaggacggcgaccgcttcctcgaattctggaacctcgtgttcatgcaatacgagcaggtgacgaaggaggagcgcgtgggcttgccacgtccctcgatcgacaccggcatgggcctggagcgcatggcctgcatcctccagggcgtcgagagcgtgttcgagaccgacctgttccgcaacctgattgatgcgacgtcgtccgcgctcggcaccgggccgaacgagcagaccgtggcctcgttccgcgtcatcgccgaccatctgcgctcctcggccttccttgtctcggatggcgtgctgccatcgaacgaaggccgcggctatgtgctgcgccggatcatgcgccgcgcgatgcgccatgcgcagctgctgggcgccaaggagcccttgatgcaccggctggtctgggcgctggtgcgcgagatgggccaggcctatcccgagctgatgcgcgcggagaagctgatcgaggaaacgctgcggctggaggagacccgcttccgcaggacgctgacgcgcggcctcgccatcctcgacgagaagagcgccggcctgaagaagggcgacatgttcgacggcgacgtcgccttcacgctctacgacacctacggctttccgctggacctgacgcaggacgcgctgaaatcgcgcggcatcggtgtcgatcaggcggcgttcaccgacgcgatggagcggcagaaggccaaggcgcgcgaatcgtggaagggttctggggaagctgcgtccgaggcgatctggttcccgctgcgcgagaagctgggtgcgacagagttcctgggctacgagaccgagagcgccgaaggcgtggtctccgcgctggtcaaggacggcgctgaggtcgcgagcctcaaggccggcgagaccggtgcaatcgtgctgaaccagacacctttctatgcggagtccggcggccaggtcggcgacaccggcgtgctctcgggcgagggcggcatcaagatccgcgtcaccgacacgcagaagaagctgggcgatctcatcgttcacatcggcacggtcgagagcggcgaagtgaagctcggcactgcgctgcagctcgaggtggatcacgcacggcgctcgacgatccgggcgcatcactccgcaacccacatcatccacgaagcgctgcgccaggtgctcggcgaccacatcgcccagcgcggctcgatggtcgcgccggaccggctgcgcttcgacttcgtgcatcccaagccgatcacggccgaggagctgtcccgtgtcgaggacatcgccaacgacgtggtgctggaaaacgacgaggtcaccacgcgcatcatgggcgtggacgaggcccgcgaggccggcgcgcgcgccctgttcggcgagaaatacggcgacgaggttcgcgtcgtctcgatgggcaggaccgcgcgcgagcgcggcgccaatgcgctcggctggtcggtcgagctctgcggcggcactcacgtgaagcgcaccggcgacatcggcctgatcacgctgacgggcgagagcgcggtcgcttccggcgtgcgccgcatcgaggcgctgaccgggaattacgcgcgcaggcacgccaacgacaccatatctctggcgaagaccgcggcgaacgagctgcgcacctcgctcgacgacgttccatcacggatcgccgcgctgatggaggagcgcaagaagctcgagcgcgagctctccgacgcccgcaagaagctggcgatgggcggcggcgcctccgccggcaacggcgcagcatcgggcgtgcgcgaggtcggcgacgtcaagctgatggcgcgcgcggtcgagggcatcgagatgaaggatctcaagagcctcgccgacgacggcaagaagcagatcggctccggcgtcgtcgccatcgtcggcgtcaccgaggacggcaaggccggcgtcgtggtcggcgtcacccaggacctcaccgcgcgcttcaacgccgtgaacctcgtgcgcatcgcctccgaagcgctcggcggcaagggcggcggcggccggcccgacatggcccaggccggcggccccgacggcgccaaggcatccgaggccttgagcgccatcgaaaaagcgatggcgagcgcgtaa

SEQ ID NO: 3147 - DNA, 1161 bp, BradyrhizobiumColbertium
ttggagcacgatcccctggcctattcggccggggcgcgcttcatccaaatcatcatcggcatcatcgtgctcaacgtggccgcgatggtcctcgcctcggtgccggagctcgatgaccggttcggcaagctgttcgcaggcatcaccatcctgtccgtggtcgtgttcgcgctggaatatgccgcgcggctatggaccgtcgctggccacacgcagcgcgacggctccgcgctgtccgaccgcgtcggctatgccttgtcggcgctcggcatcatcgatctcatggcgttcctgcccgccgcgatcgtgctcgccaccggcgagcatgcgacgctggcagccctcggcgtgctgccgttcttcaagctgatccgctattcgccggcgatgcgctcgctgctggccgccgtgcacgccgagcggcgcgcgctgatcggctgcatcgtcatcctggtcggcgcggtgctgaccttcgcctcgctgctctatgccatcgagcgcgacgtgcagccggacaagctcggcaccatcccgcaggcgatgtggtgggcgatcgtcacgctcggcaccgtaggctatggcgacgtcgtgccggtgacgccgctcggcaagttcgtctcgaccttcgccatcatcgcgggtcttgccatgatcgcgctgccggtcgcgatcatctcgaccgcgttcgccgaagaagtgaagcggcgcgatttcgtggtgacctggggcatgctggcgcgggtgcccctgttctcgcacttgtcggcggcggagatcgccgacatcatgcggctgttgcgggcgcgcaccatcgagcagggcgaggtcctggtgcggcgcggagacgtcgccttgtcgatgtatttcatcaccgccggcgaggtcgagatcgcgctgccgagccagcaggtgcgccttgccgacggcaccttcttcggcgagatcgcgctgctgcacaagacgaagcgcagcggcacggtgacggcgacgcgcaagacgcggctgctcgtgctcgacgcccaggattttcacgcgttgatcgcgcgcatgccgacgctcgccgatcatgtccacaccaccgccaaggcgaggctcgccgataccggcgatctggcgctcgccgagctcgcacaggcggagaatgaaggtaccggccgctga

SEQ ID NO: 3148 - DNA, 1257 bp, BradyrhizobiumColbertium
gtggcgcgccacgagcgccgttcccaagaggctttcccgatcatggcaaaaatcaaggtatccaatcccgtcgtcgagctcgatggcgacgagatgacccggatcatctggcagtacatcaaggacaagctgatcaacccgttcctggatgtcgagctgctctatttcgacctgggcatggaataccgcgaccacaccaacgatcaggtcacgatcgacgctgccgaggcgatcaagaaggtcggcgtcggcgtgaagtgcgccaccatcaccccggatgaggcccgggtgaaggagttcaacctcaagcagatgtggaagtcgccgaacggcaccatccgcaacatcctcggcggcgtgatcttccgcgagccgatcatctgcaagaacgtgccgcgcctggttcccgggtggaccaagccgatcatcatcggccgccatgcctacggcgaccagtaccgcgccaccgacatcaagttcccgggcaagggcacgctctcgctgaagttcgtcggcgaggacggcaccgtgatcgagaaggaagtgttcaaggctcccggcgccggcgtcgccatggagatgtacaatctcgacgattccatcatcgacttcgcccgcgcctcgttcaattacggcctgctccgcaattacccggtgtacctgtcgaccaagaacacgatcctcaaggtctatgacggccgcttcaaggacatcttccaggagatcttcgacaaggagttcaagaaggatttcgacgccaaggggctgacctacgagcaccgcctgatcgacgacatggtggcctcggcgctgaaatggtccggcggctacgtctgggcctgcaagaactacgacggcgacgtgcagtccgacaccgtcgcgcagggctacggctcgctcggcctgatgacctcggtcctcctcacccccgacggcaagaccgtggaagcggaagctgcccatgggacggtgacccgccactaccgcgagcaccagaagggcaaggagacctcgaccaactcgatcgcctcgatcttcgcctggacgcgcggcctcgcccaccgcgccaagctcgacaacaatgccgagctggcgaaattcgcgaacacgctcgagaaggtctgcgtcgacaccgtcgagtccggctacatgaccaaggacctcgcgctcctggtcggcgccgaccagcgctggctctcgaccaccggcttcctcgacaaggtcgccgagaacctgaccaaggaactggcggcttaa

SEQ ID NO: 3149 - DNA, 255 bp, BradyrhizobiumColbertium
ttgggaacggcgctcgtggcgcgccacgggaatatccgccgcctcttagcatcgccgcgcggcgggcgaaagccaagggatcatgcacttttagctcatccagcttccgcaggcggggagcggccagccgcccacagccgggctgggctcgcgttcccggcgagattcaaaagtcgaatccaagtcgttatttcccttgagaatttcgtcaggacaggcaaacgacaggcggggcatggcgaagggccgccctga

SEQ ID NO: 3150 - DNA, 1209 bp, BradyrhizobiumColbertium
atgtcggggactgacaagagcaaggcgggcctttccctcgacggtcccatcgtcatcctggtcgagccgcagctgggcgagaacatcggcatggccgcgcgcgccatgggcaattttgcgcttggcgccttgcgcatcgtcaatcccagggacggctggcccaacatcgcggcccagcgcgccgcggccggcgccgaccacattctggaaaaggtcgaactgttcgacacggtggagcaggcggtcgccgacctcgacctcctgttcgccaccaccgcgcgcccccacgaccaggccaagcccgtggtggggccggaagccgcagccagcgagatcgcggggcacgtcgccggcggcggcaaggccggcatcctgttcggcagggagcgctgggggctgaccaacgaggaggtcgggctctccaaccggatcatcaccttcccggtcaatccgggctttgcctcgctcaatctcgcccaggccgtgctgctggtcggctatgaatggttcaagcgggccacctcgggcgcgctgccgcacgccatgccggagcgctccgagcgcgcctcgcagcaccagatgcaggccttcttcgacaacctcgtgcgcgaactcgacaaggtcgaattcctgcggcccgccgagaagcgcgacaccatgctggtcaacctgcgcaacatcttcacccgcatggagccgaccaagcaggacatgcacacgttgcacggcgtggtgatggcgatcgcggaagggcgcaaggggccggccaagggcggcgtgctcgacggcgagcaggcgacccgcctgcgcgcgctgctggccgagcacgggcagggcggcggcatgcccgacagcggctcgaccgtgcgcggtctcgcccgcctgcttcgccgcaacccgaccgatgccgaacgcctgctctggcaggcgctgacccgcgaccgccgctttgccggccagttcaagcgccagaccccggtcggccgccacattcctgatttcgtgtccttcccgcaccggatcgcgatcgagcttgtgaacccgggcgagagcgaagccatcgccgcagaccgcgcgtcgcggcgcgcttggctggaagcgcgggattatcgcgtgctcgacattcgcgccgcggatgtggagcgggatctcgaggcggagctcgtgcggctgcaggagatgatggcgggacactctgacattccgtag

SEQ ID NO: 3151 - DNA, 1440 bp, BradyrhizobiumColbertium
atgtcaatcagccgtcgccaagcacttgccgccttcggcgccgccgtgtcggcgcttgcgatttcccgagcagcacgcgccgagtttgacggcccagtcgtcagggctttggagggcggcgaagatttctggctcgcccaggacgcctatatctacggatacccgctcgtgacgatggaaatgacccgccgggtcatgacaaacgttgcggcggtggaaggtacccgcggaccgatggggcagttcgtcaagctccgcaaataccccgatgcgagcttcaaggacgtcacggcacccaatgccgataccctctacacgaccgcctggatcgacgtgggagacgagccctgggtcctgagcatgccggacatgaaggaccgctacttcctttttccgatgctcgacggctggacgaatgtattccaggtgccgggcaagcgcaccactggcaccagggcgcagacatacgcgatcacgggcccgggctggaaaggagtgcttcccgccggcgtgaaggaatacagatcacctacaagcatggtgtggattctgggccgcatctactgcaccggcacgcaggaggattatgcggccgtgcacgcgctacaggatcagttcaagctcgtaccgctcagcgcatacggcaagtcctatacgcctccggcaggcaaggtcgatgcgtcgatcgacatgaagacggcggtccgagagcaggtcaaccgcctggacgcagttgcctatttcaaccttctcgcgcaattgatgaagcgcaatccgccggctgccgcggatgcggccgaggtcgcccggttcgcgaagatcggccttgtccccggcaaggattttgacgcgggcaagttcgacgctgccttcgccaagcgggtcccgcaggtggcgttcgatcgcatcatgctccagttcaaggtcaacaaggcgatcaggaatatcaacggctgggccttcgacgccgaagccggcgtctacggcaccaactatctcaaccgtgcccttgtcacggccatcgggcttggcgccaatcggattcaggatgcatgctatccgacatcccagaaggacgccgacggcaaagagtatgtcggcagcaacaaatacgtcatgcggttcgcgagggggcagcttcctccggtcggcggcttctggtcgctgacgatgtatgacgagaactacttcttcgtggccaatccgatcaaccgccagtccatcagtgcccgcgagaagctgaaagccaatccagacggctcggtcgatctctacattcagaaggacaatcccggtcctgacaaggagagcaactggcttcccgctccagcgggcaagttcgtgctgatgttgcgcatgtactggcccaacgagaagtcgccatcgatcatcaacgggacctggaagccgccgccggtccgtcgggtgacgagcagctag

SEQ ID NO: 3152 - DNA, 651 bp, BradyrhizobiumColbertium
atggcaaagacgtcatcgaagaagaattcgaattcgccccacgctgttgcaagcgacgacgaatccgcgcgcgggcgcctgctcagcgccgcatcgcatctgttctgcaagaatggaatcaacgccaccggcatcgacgcgatcatcgaggaagccggcactgcgaagaccacgctctacaagctgttcggctccaagaccaatctcgtcaacgcggtgctggaaagcgaaggcaagcagtggcgcgaatggttcatcggcgccatggagcaaggcggcggcgatgcgcaggcgaaactggcgcgcatctttcctgcactgaaaagctggttcgcggaagaacgcttctacggctgtcccttcatcaacgccgtcggcgagcacgacaaggatgcgaaacaatttcgcaacatcgcgctaaagcacaagaagatcgtgctcggccatatcgagaagctcgccggcgagttcggatcgacggagcctgcggtgctggctcaccagctcggtctcatcatcgacggtgccatcgtcgccgcgatgatctcgcgcgatccgggcgtcgccgataccgccgcgctcacggcaggccctctgctcggccagtccaagccgaagaagaagcgcgccgagcagctcgaggcagtgtag

SEQ ID NO: 3153 - DNA, 543 bp, BradyrhizobiumColbertium
atgactgccgtcgttcagaagacagtgctgacgggttgcctcgcgcccatcgacaagaatggcctcgagcaactgatcgccaatggcaaggcgaatccgaaggtcatcaagaccttgaagtgcaagacggtcgcggagggcaagttccgccacgccaactacatccgcaacctgccgccctacatcgtcgacgagccgccgggactcctgggcgacgataccgcgcccaatccgtcggaagcctcgctcgcggcgctcggctcctgccttgcggtcggcctgcacgccaacgctgtgcaccgcggctggatcgtgaacaagctcgagctcgagctcgaaggcgatctcaacatcaccgcggtctgggggaccggcgacacctcggacaagccggtcggcttcaccgacgtgcgcgtcaaggtcgacatggaatgcgagggcatctcgccggacgagatcaacgcgctggtcgcccatgtgaagaagtggtcgccggtcgccaacaccttcacccgcccggtcaatctcgaggtcggcatctag

SEQ ID NO: 3154 - DNA, 1113 bp, BradyrhizobiumColbertium
atgggttcactggctttatcgcgggccgacgttttggatcagcccgcaccgtccattccagacgaggtggcgcggatcgcgcgcgagcagctcgcgccgctcgccgccggcatcgacgacggatcggtctatccggcagaggtgctgcgcaaattcggtgcggttggcgccttcggcaaccacgtgccgcacgaaggttccgccgacctgcgctgcgccatccaggcgatggcggccgtcggcgaggtctgtggcagcacggcattcatgaagtggtgtcaggacacgctggtttggtacgccgccaattcgaccaatgcgaagctggccaagcgtttcggcgatgccttctcgaccggtcgcgtgctcggcggcaccggcctctccaatccgatgaagagcttcttcgggatcgagaagctcaaattgaaggggcgcaaggtcgagggcggctacatcgtccgcggcgtgctcccctgggtctccaatctcggtcccgaccactatttcggcaccattttcgagcgcgaggacgagccgggactggtcatgtttctggccgactgctcggaccccgcgatcacgctgacgccctgcaagccgttcctcgcgatggacgggaccggcacttacggcgtgcagttccgcgacgtgttcgtgccggatgatctgatcctggccgatcccgcaggtcccttcgtcaagaagatccgcgccggcttcatcctgctccaggcgggcatggcactcggcctgatcaaggactgcatcagcatcatggatgaggtcgacattccgctcggtcacatcaaccgctatctgccgcagcagccggtgcacttccgcgatctcgctgccgagctcgaggccgagaccatggcgctggcgcgcgatccctacaacgaggaggacgcttactggcgcaaggtgatcgcgctgcggcttcgcgccggcgacgccagcgtcgcggcggcgcatgcggcgatgctgcattgtggcgcgcgcggctacctgaaaagccaccgcgcgcagcggcgcctgcgcgaggcctatttcgtcgcgatcgtcacgcctgccaccaagcagctgcgcaagatgctcgccgaatcctga

SEQ ID NO: 3155 - DNA, 879 bp, BradyrhizobiumColbertium
atgacggacgttctgatctctgccagcgaacttgccgatctcttgaagctagagccgtgcgtcgtgatcgacacccgcaatcccgacgcctatgccgcgggacatctgcccaatgccgtgaacgtgcacgacatcttcacctatcttgcaacctcgacgcccgaaggcatcagcgagctgaagaccaagttcgccgacgctttcggcgccgccggtctgtccggcaaggaaacggcggtggggtatgagcagtcgatgaattccggcttcggccagtcctgccgcgggtactatctgctcaccatgctcggctatcccaaggtgaaggtgctgcatggcggcttcgacgcctgggcggccgcgggcttgccggtgaccaaggacgttccgaccccggtgaaggcctcgttcccgatcgtgccggaagcgggcgagatcctgatcgatgccaagaccatgctcgccgcggtcggcaagcccggggtcgcgatcctcgacgtgcgcgatgtcgacgagtggatcggcgacagctcttctccttacggaaaggatttctgcccgcgcaagggccgcattcccggcgccgtgtggctggaatggtaccgcatgatgaagccgaccgccgaaggcccgcgcttcaaatccaaggacgagatcctggcggaatgcgccaccgtcggcatcacgccgagcacgccggtgtacctgtattgcttcaagggcgcgcgcgcctcgaacacgttcctggcgctcaagaacgccggcgtgaaggacgtgcggatgtacttcggctcctggaacgaatggtcgcgcgacccgtcgctgccgatcgagcagggattgccggtggctgcccaggtaacaggcaaggcggcatag

SEQ ID NO: 3156 - DNA, 1404 bp, BradyrhizobiumColbertium
gtgacaaaggggcgcaacagcatgtccacgttcgacgatccgtttgattccgaccgcaatctccaggcgggctgcgtttgcggccagcaccgctcggccctcgagcacgagcaggccgcgtcggccctgcgctgcgagcccatcgaaagcgaggacaagcgctacgagggtgtcgtcgcgtccgcggtgatgcgcgcgatgtttccgcaggacgtggcacgccgcgccttcctgaaatcggccggtgcgtcgaccgcgcttgcggcgctgtcgcaattcttcccgctcaagacggcgacggaggtcttcgccgcgaccggcacgccggagaagaaggacctcaaggtcggcttcattccgatcacatgcgccacgccgatcatcatggcggcgccgctcggcttctatgcgaagcacggcctcaacgtcgaagtggtcaagaccgccggctgggccgtagtccgcgacaagaccatcaacaaggaatacgacgctgcgcacatgctggcgccgatgccgatcgcgatatcgctcggcctcggctcgaacgccattccctttgccgtccccgcgatcgaaaacatcaacgggcagggcgtcacgcttgccatgaagcacaaggacaagcgcgacccgaaagactggaagggaatgaagttcgcgatccccttcgactattccatgcacaattacctgctgcgctattatctcgccgagcacgggatcgatcctgataccgacgtgcagctgcgctcggtgccgccgccggagatggtcgcgaacttgcgcgccgacaacatcgacggcttcctcgcgccggacaacatctgccagcgcgcgatctatgacggcgtcggcttcatgcacatcctgtcgaaggagatctgggacggccatccctgttgcagcttcgccgccagccgcgaattcatcaccaccgcgccgaacagctttgcggcgctgacgcgcgccatcgtcgatgcgaccgcctacgcgtcgaaggcggagaaccgcaagcagatcgcggaagcgatcgcgccggccaactacatcaatgcgccggtgacggtgctggagcaggtcctgaccggcacctatgccgacggcctcggcggagtgaagaccgacgccaagcgggtcgatttcgatccgttcccctggcagtccttcgcggtctggatgctgacgcagatgaagcgctggggccagatcaagggggaggtcgactacaagaccatcgccgagcaggtgtatctcgccaccgataccaagaagctgatgaccgagatggggctgtcgccgcctgcaagcgcctacaaatcctttgcggtgatgggcaagacgttcgatccggccaagccggaggagtatgtggcgagcttcaagatcaggaagggggcgtga

SEQ ID NO: 3157 - DNA, 840 bp, BradyrhizobiumColbertium
atgacatcctccctccgtctccgcgcgggtctcgtctccatcgtgctgctcgccgcgttcctcggcatctggcatatcgcaacgcgctcgacgggggcgacgacgacgatgagcccggaatacgccaagctgatggggctgacggccacacaaggcaaatcggcgatgcccgggccgctcgacgtcggggcaaagctctgggagcacctcaagcggccgttctacgataacgggccaaacgacaaggggctcggcatccagctcgcctattccatcgcgcgggtcggcaccggctatctgctggcagtgctcgtcgccatcccgctcggcttcctgatcggcatgtcgccgctgttgagcaaggcgctcgatcccttcatccaggtgctgaagccgatctcgcctttggcctggatgccgctcgcgctctacaccatcaaggattcctcggtctccgcgatcttcgtcatcttcatctgctcgatctggccgatgctgctcaacaccgtgttcggcgttgccagcgtgcgcaaggaatggatcaatgtcgcgcgcacgctcgaggtaggcacgatcaggcgcgccttcaccgtgatcctgcccgccgcggcgccgacgatcctgaccggcatgcgcatctcgatcggcatcgcctggctcgtcatcgtcgccgccgagatgctcgtcggtggcaccggcatcggctacttcgtctggaacgagtggaataatctgtcgatcaccaacgtcatcatcgcgatcctgctgatcggggtcatcggcatgctgctcgaccagatcctggcgcgcttcacgcgcatggtcacgtttccggagtag

SEQ ID NO: 3158 - DNA, 924 bp, BradyrhizobiumColbertium
gtgtccgacaaattcatctccatcgaaggcatcgcgaagcgctatcctggtgcgggcggcgccacgaccaccatcttcgagaacctgtggctgtcgatgacgcgcggcgagtttgcctgcgtgatcggccattccggctgcggcaagaccacggtgctcaacatcctcgctcggcgcatcgaggccggcgagggcgccgtcatcgtcgacggtcaggcgatctcgggcaccagcctcgatcgcgccgtgatcttccaaagccatgcgctgctgccctggcgcaccgtgctcggcaacgtcgcctatgccgtcagctcgaaatggcggaactgggaccgcgccaaagtgagggcgcatgcgcagaccttcatcgatctcgtcggtctctccggctccgagcacaagcgtccgtccgaactgtcgggcggcatgaagcagcgcgtcggcatcgcgcgggcgctgtcgatcacgccgaagatgatgctgatggacgagccgttctcggcgctcgacgcgctgacgcgcggcacgctgcaggacgaggtccgccgcatttgcctggagaccggacagaccgcgtttatgattacgcatgacgttgacgaggcgatctacctcgccgacaagatcttcctgatgaccaacggccccggcgccgtgctggccgaggtggtcgagaacccgctgccgagggaccgcggccgcaccgatctgcaccgccatccgctctactacgccctgcgcaaccacatcatcgatttcctggtgacgcgcagcaagaccttcgtcgccgagacgcccggccacgatccgcgcaacgtaccggtggtgcagatcggcaagcccggactgtcgatcgcggccggcagcgacgaaccgcggcagacctggatgtccgggaccagccccggattgagtgcctaa

SEQ ID NO: 3159 - DNA, 489 bp, BradyrhizobiumColbertium
atgaagcgcgaagacctcaccgagaagctgctcgacatcaaacgcgagaagggctggagctggaagcacatctgcgagaagatcggcggctattcggaggtgctgatcgtcggcgcgatcctcggccagatgaagctgaccaagccgcaggccgcgaacgccggcgagctgttcggcctgtcgaaggcggaagttgcgatgctcaacgaggtgccgatgcgcggcaccgggacgccgatgccgcccaccgatccgttgatctaccgcttctacgagatggtaatggtgaacggcccggcctggaaagcgctgatcgaggaggagttcggcgacggcatcatgtcggcgatcgacttcgacatggcactggagcgcgtcgccaacccgaagggtgatcgcgtcaagatcacgatgagcggcaagttcctgccgtacaagtactacggcgccagcggcaatgtgccggaatacggcttcaaggaggggtga

SEQ ID NO: 3160 - DNA, 153 bp, BradyrhizobiumColbertium
atgttggtcatgactgcttccgccatggcacagtcacttggccagcgtgccatggtcgagcagggcggcggtgcattgcggcaggaaggatcggtccgcgtgcaaacgtcgatcaacttctttgtcgctgtccccgctggggccagcgagtag

SEQ ID NO: 3161 - DNA, 156 bp, BradyrhizobiumColbertium
atggcggcgcgcgaatgcgatctgttgcgcgaggtgatcgcccgcgattgccggctggagtcggttaacaccagcatcaaccggcaactcggaccgcagcaagcggagggcttcaatatcaacggctcgatggcttttcagatcacgctcaaatag

SEQ ID NO: 3162 - DNA, 324 bp, BradyrhizobiumColbertium
atgagcgagttcgacaagcgccaggaaggtttcgagaagaagttcgccctcgacgaggagcagaaattcaaggcggaggcgcgccgaaaccggcttctcggcctgtgggcagccgaaaagctcggcatcaccggtgacgccgccacggcctatgccaaggaggtggtcgcggccgatttcgaggaggccggcgatgccgacgtcctgcgcaagatcacggccgatttcgccgccaagaacgttgccgtcaccgagcaggccattcgcgccaagatgagcgagctgcttgcggtggccgcggccgaggtgaaggcggggaaatga

SEQ ID NO: 3163 - DNA, 798 bp, BradyrhizobiumColbertium
atggatttcaacaaaacacggtacatccccatgagccgtcggcgtcgcatttatgaaggcaaggcaaaggttctctacgagggcccggaacctggtaccctgatccagcacttcaaggacgacgccaccgcgttcaacgcgaagaagcatcaggtgatcgagggcaagggtgtcctcaacaaccggatttcggagtacctgtttcagcacctcaacgacatcggggtgccgacccacttcatccgccgtctcaacatgcgcgagcagctgattcgcgaggtcgagatcgtgccgctcgaggtggtggtgcggaacgtcgccgccgggtcgctctcgcagcgtctcggcatcgaggagggcacccagctgccccgttcgatcatcgaattctactacaagaacgaccagctcaacgaccccatggtgtcggaagagcacatcaccgccttcggctgggccacgccgcaggagatcgacgacatcatggcactcgccatccgcgtcaacgatttcctcaccggcctcttcctcggcatcggcatccgcctcgtcgacttcaagatggagtgcggccgcctgttcgagaacgagatgatgcggatcatcgtcgccgacgagatctcgccggacagctgccggctgtgggacatcaagtcgaacgagaagctcgacaaggaccgtttccgcagggatctcggcggcctgctcgaggcctataccgaggtcgcaaagcgtctcggcatcctgatggagaacgagcgtccgcagggctcaggccccgtgctggtgaagagctga

SEQ ID NO: 3164 - DNA, 240 bp, BradyrhizobiumColbertium
gtgaaggcacgtgtcaccgttaccttgaagacgggcatcctcgatccgcaaggcaaggcgatcgagggtgcgctgaagtcgctgggcgtcgacggcgtcgccagcgtccggcagggcaaggtgttcgacatcgagctcgccggcgccgacaaggccaaggcggaagctgcgctcaagcaagccgccgacaagctgctggcgaacaccgtgatcgagaactatcgggtcgaactgctctaa

SEQ ID NO: 3165 - DNA, 702 bp, BradyrhizobiumColbertium
atgaaagccgccatcctcgtcttccccggaatcaatcgcgagcgcgatatggcgcgcgcactgaagctcatctcgggccgcgagccggcgatggtctggcacgccgagacggcgctgcctgcgggcacggatctcgtggtggtgccgggcggcttctcctacggcgattatttgcgctgtggcgccatcgcggcgcgggcgccggtgatggacgcggtgcgcgactacgctgccaagggcggcctcgtgctcggcgtctgcaacggtttccagatcctgtgcgagtccggcctgctgccgggcgtcctcatgcgcaatgcggggctgaagttcatctgccgcgatgtgcatctgcgcgtcgagcgttccgactcgccgttcacccgcggctacaacgccgggcaggtgatccgcgtgccggtcgcccacggcgagggcaattacgaggcggacgaggagacgatcaaccggctcgagggcgagggacgggtgctctatcgctattgctcggccgccggcgaggtcgacgatttcaacaacatcaacggcgccgcgcactccatcgccggaatcgtcaacgacaggggcaacgtgctaggcatgatgccgcatccagaaaaccacgtcgaagacatcatgggctgcaccgacggccgcggcctgttcgccggcctcgtccagcatctggaaaaggctgcgtga

SEQ ID NO: 3166 - DNA, 960 bp, BradyrhizobiumColbertium
gtgccgcagagcacatcggaggcgggtcgcgcgacggggtccgcatcaacgccgttgccgtccgtgcctggcgtgcgcagctggcgcgactacgcgctgctgctggctctggcttgctgctggagttccacctatccgctgaccaagctggcgctggacacgatcccgcccatcacattcatctcggcgcgctcgctgatcgcggccgcgttcctgttcgcgatcctgtggatgcgcggggtcaggataccgatcgacgcgaaggcctggaagctgttcgcgacccagcaattgatcaactcgaccttcccgttcctgatcatcacctggtcgcagcaatatgtgccggcctcgaacacggtggtgctggcctcgacgacgccgatcttcgccttcctgatcacctcgctgatcacgcggcacgagccggcgacgctgctcaagctcgccggcgcggtcctcggccttgccggcacgaccctcatcgtcggcctcgatgcgctgcacgggctcggcagcgagatcatcgcggagatcgcaatcctgctcgccacgatctcctttgcctgcgcaaccatcttcggcctcaggttgtccgactacgacccgatggtggtggcggcaggctcgctattgttcggcggcatgatcctgctgccgccctcgctcctcatcgaccagccctggacgctgcagccgactccgacggcaattgttgccaccatcgtcatgggcatcgtctcaagcgcgctgggactgctgctgttctacatctgcctcggccggctcggcacgctgacgacgaacgcgcaaggctatctgcgcatcccgataggcgtcggcctctccgtgctgctgctcggcgagagcgtgccgtcgaacctggcgctgggattgctgctggtgatggcaggcgttgccgcgatgacggtgccggcggaaaggtggaagcgtcgctga

SEQ ID NO: 3167 - DNA, 480 bp, BradyrhizobiumColbertium
ttgcacgaattgaccaaatcatctccgctccgccgccccgacctccacgtcgccaccgagggcgaatttgagggttggcggacctggattcgcgacagttttgaatcccatgtcggccccttctggcaccgaatcgaggcggacggcagcgtccgctgcgccttccgggtcgagaaaaagcacctcaacggctccggcaacgtccatggcggctgcttcatggctttcgccgattattgtctttttgcaattgccacccacgagctggatgggccggccgtgacgaccaatttcgcctgcgatttcctcgacgcggcccgcgagggcgaactggtcgagtgcgtcggcgaagtgtcccgcgccggcggctcgctgatcttcctgcgcggcaggctgacctccggcggacggcccctgttcaccttctccggcacgatcaagcgggtgaagcggaaaccggcaccgcagccaaacgcatag

SEQ ID NO: 3168 - DNA, 603 bp, BradyrhizobiumColbertium
atgaagaacgaacccaagatcacccccgaactggttgccgcccacgggctcaagcccgacgaatatgagcgcatcctgaagctgatcgggcgggagccgaccttcaccgagctcggcatcttctcggcgatgtggaacgagcattgctcgtacaagtcgtcgcgcatccatcttcgcggcctgccgaccaaggcgtcctgggtgatccagggccccggcgagaatgccggcgtgatcgacatcggcgatggccaggccgtggtgttcaagatggagagccacaaccacccgagctatatcgagccctatcagggcgcgacgaccggcgtcggcggtatcttgcgcgacgtgttcaccatgggcgcgcgccccatcgcctgcctcaatgcgctcagcttcggcgcgcccgagcacccgaagacgcggcatctcgtctccggcgtcgtggcgggcgtcggcggctacggcaattccttcggcgtgccgaccgtgggcgggcaggtgcgctccacacccgctacgacggcaacatcctcgtcaatgcgatggcggtcggtctcgccgataccgacaagatcttctatgcggctgcctccggcgtga

SEQ ID NO: 3169 - DNA, 1611 bp, BradyrhizobiumColbertium
gtgaacatgccgatcgtctatctgggctccaagaccggccgcgacggcatccatggcgcctcgatggcctcggccgagttcgatgacaattcggaggagaagcgccccaccgtgcaggtcggcgatccctttgcggagaagctgctgcttgaggcctgcctcgagatcatggagaagggctgcgtcatcgcgatccaggacatgggcgccgcgggcctgacctgctcggcggtcgagatgggcgccaagggcgacctcggcgtcgatctcgatctcgacgcggtgccgacccgcgagaccggcatgagtgcctatgagatgatgctctcggaaagccaggagcgcatgctcatggtgctcaagcccgagaaggaaaaggaagccgaggcgatcttcaagaagtggggcctcgacttcgccgtcgtcggctacaccacgccgagcaagcgcttcgtggtcaagcatggcggcgacgtcatggccgatcttccgatcaaggagctcggcgacgaggcgccggtctatgaccgcccgcaagtcccctccgcggcgctgccggtggtgcatgcccgcgaggtgccggcgccgatgggcctcgggcctgcgctggagaagctgatcggcacgccggacatgtgcagcaagcgctgggtgtgggagcagtacgatcacgtcattctcggcaacacgatgcagcgcccaggcggcgatgctgccgtggtgcgcgtgcaggacgggccgaagggtctggcgctgaccgtcgacgtaacaccacgctattgcgaggccgatccgttcgaaggcggcaagcaggcggtggcggaagcctggcgcaacatcaccgcggtcggcggcaggccgcttgcgatcaccgacaatctaaatttcggcaaccccgaaagacctgagatcatgggccagtttgtcggctgcctgaagggtatctcggaagcctgccgcacgctggatttcccggtcgtctcgggcaacgtctcgctctacaacgagaccaacggccgtgcgatcctgccgacgccatcgatcggcggggtcggcctgctcgatgatttcaccaaatccgcctcgctcgccttcaaggccgaaggcgaggcgatcctcttgatcggtgaaacccatggctggctcggccagtccgtctacctgcgtgacatctgcggccgcgaggagggcgcgcccccgccggtggatctcgccgccgagaagcgcaacggcgattgcgtgcgcggcatgatccatgcgggcaccgcgaccgcggtgcatgacctctcggacggcggcctcctgatcgcgctcgccgagatggcgatggcgagcggcatcggtgcgaaactgctcgccgcgccgagcgcactggtgccgcaggcctattggttcggagaggaccaggcgcgctatctcgttaccgtgccggaaaccgaagccggccgcgtgctcgccaagatgcgcggctgcgaggtgccttgcgtgcggatcggcaccaccggaggcgatgcgatcgcaatcgcaggagaagcgcctgtgtcgatcgagagcctgcggacatcccacgagcgctggctgccggagtatatgggcgggaaggcagcgtaa

SEQ ID NO: 3170 - DNA, 1191 bp, BradyrhizobiumColbertium
atgatcacggtgtcacattctgcgacgatgaccgcggaggctcacgccgcgccgagcatcaaggcgcgcaacttgtcgctcgaccgcgcccgcaccttcctgacgctggttgtgctgctgcatcacgccgtcattccctacacctatttcggccacaccgatccgaagttcttcttcggcttcgacatgattgtgctcgccaccgacagcttcttcatggcgatgttctttttcctctcgggcttgtttgcgtggtcaagcatcgcccgtaagggagcgcggagctatttggcagatcgcctgctgcggcttgggctgccgtttgtgatctgcgcgctcacgatcattccgctcgcctactacgccatttcgctccggcacaatcccgagatcggcttctcgcagtactggtgggatatggtcacgaagggcccgtggccgagcgggccgatctggttcctctgggtcctgctcggcttcgatgcggttgcctgcatcctgcatcgcctctcgcccaacctgctagatccgatcaaccgcctttcgctgcacggccgccgacgacccgccgcgttctttgcggtcatgctcgccgtcaccgcagcgttctacgtacccgggctgatgtattttgggccaagcaactggttcgagttggggccgttctcggtgcagcacgggcgcgtgatgctttacgcgagctacttcttcttcggtgccggcatcggcgtcgcgaatatggatcgcgggctgctcgcggcagacggccggatggcgaaggtgagctgggactggatggtcttggcgatagtcccgtattgcctgctctgggtgctgatcttcatcaagcgcgaaatactgggaaacccgtggccgctgccgaactggtatgagggactctatgccgtctgcttcgctatcttcagcgtggccatcatgtttctgatcctggccttcttccagaggttcaggcaatcgggctcggccaagctactcgatccgatgcaggcggacgcttatggcatgtttctggtacactacccgatcgcgctttggctgcaatactggctattcgactatgacctgccggcgatcgtgaaggcgacgatcggattcgtgctgaccgtcgcgttcagttgggggctcacgcgcgccttgcgccagatccccggggcaacgaaggtgctgtag

SEQ ID NO: 3171 - DNA, 174 bp, BradyrhizobiumColbertium
atgacgatcctgaaatgggcgttgatcttcctactcgtctcgatcgtggccggcgtgctcggtttcaccggcatttcagccgcctctgccgacatcgcccgcttcctgttctacgtctttgtcgcgatctttctggtgctgctggtactgggactcacgattttcagggcttag

SEQ ID NO: 3172 - DNA, 300 bp, BradyrhizobiumColbertium
gtgaccgcaggcgacatcgtgatcgcggagaccagcaaggccctgaccttgagggaggccaagtacccggcggtgcaatatgtgccacgggaggacaccaacatggccctgctggagcgcaccgaccgtatcacccactgcccgtacaagggggacgcgagctattacagcgtcacggccggcgacaagacgctggacaacgccatctggacctatgagacgcccttccccgccatggccgagattaccggccatctggccttctatccggacaaggtgaagatcgaagaagtgggctag

SEQ ID NO: 3173 - DNA, 135 bp, BradyrhizobiumColbertium
gtgatggtgatggggtggtcgggccctggaagcttcatgatttcacgccttttcgatcaatctgccgcgcgcggcactttgtcgtgcctttatcctgatgggatcacggatatagtgccggaaggcgtgacctag

SEQ ID NO: 3174 - DNA, 255 bp, BradyrhizobiumColbertium
atgcccatggacgcccacgatatcgaggcgatgatcaaggcagcgatccccgatgccgaggtgaccatccgtgacctcgccggcgacggcgaccactatgccgcgaccgtgatctcggaatccttccgcggcaagtcgcgcgtccaacagcaccagatcgtctaccaatccctgcgtggccagatgggcggggtgttgcatgccctggcactgcaaaccggggtgcctggcgggcctggagtgtcgggcacgtga

SEQ ID NO: 3175 - DNA, 1194 bp, BradyrhizobiumColbertium
atggctgcggacaatccacgcggcgcaatgttccgcgttatcgtgccgagccagcacagccgcgtggcctttgtcgagctgttcttcgatctcgtcttcgtctttgccgtcacgcagatctcgcacactctgctgcaccatttcacaccgctcggtgcggcgcatgtggtggtgctgttccttgcggtctggtgggtgtgggtcttcaccgcctgggtcacgaactggctcaatcccgagctgacgccggtccgcctcctgctcttcctgatgatgcttggcggcctcgtgctgtcgacgacgatcccgaccgccttcgaggggcgaggcctgtggtttgcgatcgcttatgcggcaatgcaagtcggccgcaccgctttctggctgttcgcaacaccgcggcatcgaacagccgtacggcacaacgcgatccgcatcctgacctggctctccatctccgcggtcctgtggatcgcaggcggtctgtcggagggagagacgcggctatggctgtggatcgcggcggtgagctgggaatacatcgcgccggctgcccgcttctgggtaccgaagctcgggttttcctcggtcgaggcgtgggctgtcgaaggcggccacatggccgagcgctgcggtctcttcgtcatcatcgcgctcggcgaggccatcgtcgtcaacggcgccactttttccgagctgacgtggaatgcggacaacatcctcgccttcgtctccgcgctcgtcggtgccatcgcgatgtggtggatctatttccacaagggcgccgaggccggttccgagcggatatcgaagtccgccgaatccgggcggctggcgcggctcgcctacacctatctgcacacgccgatcgtcgccggcatcatcctgaccgcggtctcggacgaactggtgctgaagcacccgaccgggcactccgacattcgcacgatcgcgagcacgatcggcgggcctttggtgtttctggtcggcaccatcctgttcaagctggccatccgcggcttcctccagctctcacacggcgtcggcatcatcctgctgctggctctgagctggttcgccgccgacctctcgccgctctggctgtcggtcgcgacgaccatgatcctgatcgcggtcgcagtgtgggaatcgatctcgctggggtcggcgatggaggaagcggaagggagttga

SEQ ID NO: 3176 - DNA, 972 bp, BradyrhizobiumColbertium
atgaatgtgcacgccagcgctttggccgaagcccatcttcccgacgagcagaccaccgcatttgcccgcgaagccatcgcggacctctcgcagcagccgaagaggctctctccgaaattcttctatgatgcgaccgggtcggagttgttcgaggcgatcacgcgcctgcctgaatattatccgacgcgcacagagcttgcgatcctgagagagcgcggaggcgatatcgcaaagatcattccggagcacgcggcgctcgtcgagttcggcgcaggtgccacgacgaaggtccgcctgctgctggatcactgcaagttcgcggcctatgtcccggtcgacatttcaggtgacttcctgaaggcgcaggcgagcgggctgaagcgggattttccggcgctcggcatctatccggtcgcagccgacttcacgacgcccttcgagctgccaacgcaggtcgcatccatgccgaaggtcggcttttttcccggctcgaccatcggcaattttgagccggatgaagcgcagagcttcttgaagagtgcgcgcaagatcctcggcaagggcgcgcagatgatcatcggcgccgatctggaaaaggacgaacggatcctctttgacgcctataacgatgccgccggcgtgaccgcacgcttcaacctcaatgtgctggtgcgcatcaatcgcgagctcggcggcaatttcgatctgtcggccttcacccatcgcgcgatctacaatcgcgagcggcaccgcatcgagatgcacctgatcagcaagaagagccagaccgtacggctgctcggcaccagcttctcgttccgaccgggcgagagcattcacaccgagaatagctacaaatacagtatcgaccgcttcgccgcgctggcgcaaggggccggctggcgcgttcgcgaaagctggacggatgcggccaagatgttttcggtgcatgcgctggaggcggcggactaa

SEQ ID NO: 3177 - DNA, 150 bp, BradyrhizobiumColbertium
gtgcacattcatgatactctcctgaacgcgctgtccggcgcgcatttgtcgtcggatgaatctgagccgcgaagacgcagcgattcagatttgttgtttgagcatgatcttttcggaacccgcttctccggcatcatgctctattcgtaa

SEQ ID NO: 3178 - DNA, 1248 bp, BradyrhizobiumColbertium
gtgacgaaacaagcctcagctacggccgctacccagctttcgtcaccgtcctcgcgcccggacgacctcgcgaagcggctggaagaggcctttctcgcggtccgcaacgagaccgaacgccgggccgggccgctgtcgccagaggaccagcagatccagtccatgccggacgccagcccgacgaaatggcaccgcgcgcataccacctggttctgggagcaattcctgctcgggaagcacgctgcggggtaccggcccttccatccggatttcgccttcctgttcaactcctactacgtcagcgccggtccgcggcacgcccgcaaccgtcgcggcgacatcacccggccgagcgccgaggagatcggcgcctatcgcaaatacgtcgatgcggccgtcgtcgaattcttccgcgaggccggtgaggacaagctcggcatgatcgccccactcgtcgaggtcgggctcaaccacgagcagcagcatcaagagttgatgcttaccgacatcctgcacgccttcgcgcagaacccggtctacccggcctatgagccggactggtgcttcccgggcgccccccgcggcggcgatgactggctgcagctcaatgaaggcatccacaccgttggccatgtcgacgacagcttccatttcgataatgagaagcccgcacatcgcgccctcgtcggtcccgtcaagatcgcccgccatctcgtgtccaacgccgaatggctcaacttcatgcaggacggcggctaccgaaccgcaacgctgtggctgatggacggtttcgccgcggccagcaaggaagactggcaagccccgggctattggcgcgaggtcgacggccaatggcaggtgatgacgctggccggcctcaagccggtcgacccaaacgcgcctgtctgtcacatcagctattacgaggcggatgccttcgcgcgctggtccggaaaacacctgccgaccgagatggagtgggaagtcgcggcccgcaccaagcaactcgacgacgccttcggcctcgtctggcaatggacccgcagctcttactcaccctaccccggttaccgcgccgtcgaaggcgcgctcggcgagtacaatggcaagttcatggtcaaccagcttgtgctgcgcggatcctcgcttgcaactccgcaaggccacagccgtgtcagctatcgcaacttcttctatccgcaccatcgctggcagttcaccgggctgcggctcgccgattacgaatag

SEQ ID NO: 3179 - DNA, 333 bp, BradyrhizobiumColbertium
atggacatgagcatcgcggaattcatcgccaacgaagtgaagtcgaacgacgtggttctgtttatgaaggggacgccgcaatttccgcagtgcggtttctccggccaggtcgtccagatcctggaccatatcggcgtcggctataagggcctcaacgtcctcgaatccgccgagctgcgcaacggcatcaaggaatactcgaactggccgacgatcccgcagctctacgtcaagggcgagttcatcggcggctgcgacatcgtccgtgagatgtttcaggctggcgagttgcagcagctcctcaccgaaaaaggcgtggtcgtcgcggcttga

SEQ ID NO: 3180 - DNA, 546 bp, BradyrhizobiumColbertium
atgacccggctggcgcgccggattgccggcgccgagctcgaggtcatcgtttccgacatcacgacactcagcattgacgcgatcgtcaacgccgccaacacgtcgctccttggcgggggcggcgtcgatggcgcgatccatcgggcagccgggcccgagctcgtcgccgaatgccgcatgctccacggctgcaggacgggcgacgccaagatcacgaggggttatcggctcaaggccgcgcatgtgatccacaccgtcggcccggtgtggaatggcggcacgctcggcgaggatgatctgctcgcctcctgctatcgccgatcgatggagctgtgcgggaagcaccagctgacctcggtggcattccctgcgatctcgaccggcatcttccgcttccctgccgaccgggcggccgaaatcgcggtgcgcacgacggtcgaagcgctggctgctgcgccatccgtcgctcgcgtggtgttctgctgcttcgccgagcccggcgcgaaactccatgccgaggcggttgcgcgacacagccgcccttga

SEQ ID NO: 3181 - DNA, 1068 bp, BradyrhizobiumColbertium
atgctctacacccctccccccatcgacccaaaggccccgccggtgcggatcaatctgctgtcggatacgcaaaccaaaccgacggctgggatgcgcgaggcgatggcgcgggcggaagtcggggacgaacaggttggcgatgatccgaccgtgaacgcgctatgcgagcgcgttgcggatctgctcggcaaggaagctgcggtctacatgccctccggcacgatgtgcaacgtcaccgcgacgctggtgcattgccgacccggcgacgagatcctcgcgcatgagaccgcgcacatcattgcgcgcgaaggcggggcgcatgcggcgatcggcggcttccaggtcacgcagctgaagggccctgatggtcaattcaccccggagactcttcgcaaagctctgcacccgcgcacgcgttaccagccgccgcagaccgtcgtcagcgtcgagcagaccgccaatatcggcggcggcacgatctggaagaaggcggcgctcgatgaaatcgtcgcgatcgcaaagcagcacggcctcgtcacccacatggacggcgcgcgcctgctcaacgccaccgtggcaagcggcatctctccgcgcgatatgaccgcgggctgggattcggcctggatcgacttctccaagggcctcggtgcgccgatcggcggcgtgctggcgggctcgcgcgccttcatcgatgcggtctggcagtggaagcagcgcctcggcggctcgatgcggcaggccgggatctgcgcggcggcctgcatctacgcgctcgatcatcacgtcgagcgcctggccgacgaccatgccaatgcgcgcgcactcgcgcgcggcctgtcgcagatctcagggatcgaggtgcaggagcccgaaaccaatctcgtgttcttcaagcccgacggcgccggcattcccggcgacaagatggtcgccgcactgcgccagcgcggcgtcacgctcgcgatgatggacggccgcatccgcgcctgcacgcatctggatgtcaacgcgagccagatcgaagaaacgatcgggtatgtccgcgagatcgtgcgcggggcttga

SEQ ID NO: 3182 - DNA, 228 bp, BradyrhizobiumColbertium
atgaagcgccttctggaagagggcttcagcaagatttcgggcctgccggaatcagaacaagacgacctcgcacgaacactgcttgagcttgccgggatcgatcagccaccaattcaactgacggcggcggaagaagcagatctttgtgaggccgaagccgagatcgcccgcggcgaactggccagcgccgacgaagtccgcgcgatctgggccaatcacgggctgtga

SEQ ID NO: 3183 - DNA, 618 bp, BradyrhizobiumColbertium
atgactaagcgcagtgaggcgaagtacaagatcgatcgccgtatgggccagaacatctggggccgccccaagagccccgtgaaccgccgcgaatacggccccggccagcacggccagcgccgcaagggcaagctctccgacttcggcgtgcagctccgcgccaagcagaagctgaagggctactacgccaacatcagcgagcgccagttccacggcatctacgtcgaggcaagccgcctcaagggcgacaccggcgagaacctgatcggcctgctggagcgtcgtctcgacgcggtcgtgtaccgcgccaagttcgtctccaccatcttcgctgcgcgccagttcatcaatcacggccacatcaaggtgaacggccgcaaggtcaacatctcgagctaccagctcaaggtcggtgacgtggtcgaggtcaaggaaagctccaagcagctcgcccacgtgctcgaagccagccagcttcccgagcgtgacgtgcccgactatctcgaagtcgaccacggcaagatgaccgcgaagtacacgcgcgtgcccaacctctccgacgtgccgttcccggtccagatggagccgcatctggtcgtcgaattctattcgcgctga

SEQ ID NO: 3184 - DNA, 768 bp, BradyrhizobiumColbertium
atgcgcgggacgcccaaatccatatcgctgcggcgtcgcctgatctgcgacctcatgcatgcctcgatgggcgtgcccttcgtttcactctctcgctcgctcaatatccgccccctgctggaggctcgcgcatgcgcaacggcgcccgcgggctgggccgcgatgttcgtcaaggctttcgccctggttgcgagggacgagccgatcctgcgcaccgtctacgtcaaatggccttggccggccctgtacgagctgccgaagagcgtggcgacggtcgcgatcgcgcgggtggacgagggcgaggaatgcgtgctgcctcagcgaatcgccgctcctgaggccctttcgctggcagcaatcgacgccgaaatccggcttggcaagacggctccggtcggggacgtcccaatgttccgcaagatcatgcgggcgacccgcctgccgctgccgttgcggcgcttgtcctgggccattggtctgaatttcggccgccagcgcggcaattggttcggcagcttcggggtcagctcggttgccgcctatggcggcggtgagcttcatccgatcacgcccggccccttcgtcgtgagttatggtctcgtcgaacccgaccagaccatccgcgtcgtgatccgatgggaccacagggtcacggacgccgccccgattgcaagggtcctgacccggctggaacaggtcctgaacactgaaatcgctgcggaattgggcgcggccgtccccaagcccgtccgggcggtgagaggctga

SEQ ID NO: 3185 - DNA, 774 bp, BradyrhizobiumColbertium
atgtccgtccccgcaaagccactcaatcgtctccgccagttgtggagcgagggccgccccgccttcggcgcgatcgcgaccatcccgagcgtgcagctggtgcagatcatggcgcgttcgctcgactggatcatcgtcgatctcgagcacggcccgatcggattgaccgaagcccatgcgatgatcgccgcgacgaccgggacgccatgtacgccgctggtgcggatcgccgcgaacgagccgtggctcgcgaaagccccgatggacatcggcgccttcggcatcaacttcccgatgatcaccacgcccgcggaagccgagaaggcggtgcgtagcgttcgttacccgcccggcggcgaccggctctggggccccttccacgccccgttccgctggggccaatccatgcccgattacatggccagcgccgatgacgagatgatctgcatgatcaccatcgagcatgtcgatgccgtcaaccgcatcgacgagatcatggcgacgccgggcatcgacgtcgccgtgatcggccccggcgatctcgccacctccatcaacaaacgcggccggatggacgatccggagctgctggagctggtcgcgcgtgcagaggccggcatcctcagaagcggagtgccgatcggcggcgtggcgcgcagcgccgaccaggccaacgccctgatcgaccgcggctaccgcgccatcgcgcttggcttcgactggtcgctgttccagcgcggcatcatggcggcattcgacgggatcaagcgctga

SEQ ID NO: 3186 - DNA, 798 bp, BradyrhizobiumColbertium
gtgaccaattctccgaccatcctggtgttcgattccggccttggcgggctcacggtgctccgtgaggtcgtaaccgcgcgccctgatgcgcgtttcgtctacgtcgccgacgacgctttttttccctatggccaccacagcgaggacgagatcatcggccgcgtcgtgccgctgatgggggagttgatcggcacccatgatcccgacctcgtcgtcatcgcctgcaacacggcgtccaccttggtcctctctcatttgcgcgcggcctattccgtgcctttcgtcggcaccgtgccggcgatcaagccggcctgcgctcagtccaggacgcgtcgcgtctcggtgctcggcaccaagggcaccgtgaaacgcgaatacaccaaggcgctgatccgcgatttcgcgcaaggttgcgaggtgacgctggtcggctcgcccgagctcgcctcgctcgccgaggccgcgcttggcggcaagccggtcagcgacggcgacatcctcgccgagctcgcgccctgcttcgtcggcgacgctgcggacgcgagcgcgcgcaccgacacggtggtgctcgcctgcacccattatccgctgctgctcgatcggctgaagcggctggcaccctggccagtcgactggatcgatccggcgccggcgatcgcccgacgcgtctcggatctgctcggcccgcccagcggcggcgcagcacagtcgggggccgagatgatcttcacctcgaaccgcgtccatggcctttcggccacgctgacgccgttcttcggcgggcgcgcggtggcctga

SEQ ID NO: 3187 - DNA, 807 bp, BradyrhizobiumColbertium
atgccgtccggcagcgcagacgtttcatcgatcctcgatcgcatcctcgatgcggcaaccgacaatctcaggattgccaagatcctggtccagatgggcctcgaccccaacgacgtcacttacgacgcgatcttcaatcgcctgctggagatctttgtccagaacatcacgctggccaatctgttcgccgcggtcggcgccggcttcttcgtcgccaccctcttgatgcggaccatggtgccgctgcgcgtcgccaacatgatcggctgcgcgttcttcaccgtgttcggcgcgctctccgccaacgtcgccacgttcctgctgtatctgctgttgcttccgatcaacgccttgcgcctgcggcagatgctgaagctggtcaagaaggcgcgccatgcgaccgagggcgacatgtcgatcgagtggctcaagccgttcatgaccgagcgcaaatatcgccgcggcgacatcctcttcaagctgcgcgatccggcgaaggagatgttcctcaccgtcaccggcaagttcctggtcaaggagatcaacgtcgagatcctgccgggatcgctgatgggcgagctcggcttcctcacgccggacaaccggcgcaccggaacggtcgaatgcatcgaggacggccaggtgctgacgatcacctacgaccggctgctcgagatctatttccaggatccgcagttcggctactacttcctggtgctgaccagccagcgcctcctgcaaaacatcgatcgcctgcagaagcagctggcggcggagcgggcggcgagcacgaacaggatcgcgtaa

SEQ ID NO: 3188 - DNA, 1083 bp, BradyrhizobiumColbertium
atgacgacgcccccgcggaatcgcatcacacggctgatcgccgcgttcgcggcggtattcgcaatcgcactgccctctgccactctcggcgcggacgcccagttcgacaagatgcgtgccaagatcgcggccttcgtcgccgagaagatggagaagctgggcgggtcccgcatcatctacaaggtggacaccgacggcttgcgggaggcgatcgttacggatctgcgcgacgacgtctacaggaccctccgcgagggccggatcgccttcccgggccttgcgatccgcaacggcggcgtcgaggtgaagatcgcagatcccagaggtcgcgaacagctcacgcgcaagctcgcctcggcggcggagggactgcccgcctatgcgctcaccgtcaccgatggcggagacggcctggtcaggctcgcaccgacccctgccgcatccgccgcgcggctgcgcgagttcgtcgaggattccgtcgccatgatcgagcagcgcctcaaggacgccggcgtcaagctggccaatgtcgagcccgacggaacggaccgcatccgcatcttcttgccgggggtgatggagcccgatcgcgtcaccgcgatcttcgccaagaaggtcaaggtcggcttccgtctgatcgacctctcgatgtctgccgagcaggcacagtcgggaacgccgccggcgggcacggaagtcctgctcggcttcaaggacaagcttccctatctcgtcgccaaggacagcacgctcgaaggcgaggacatcagctatgccggcccgggattcaccagcgacacgaaggagccgatcgcctcgttccgcttcaacggccgcggcacgcggcgcttcgcccacatgactgcagagaacctcggcaaacccttcgccatcgtgctcgacgacaaggtgatctccgctcccgtgatccgcgagcccatcaccggcggctccggccagatcgccggcaacttcaccctcgacgaggccaacagcatcgccatgctgctgcgcgccggctcgctgccaggacgccttggccttgtcgagcagcaggtcgtgcaacccgccgccaagccgtag

SEQ ID NO: 3189 - DNA, 1905 bp, BradyrhizobiumColbertium
atgggtatccacgcgctcgatcggctcatcggcaacgactatccggacctttcgacggacgcggaggtccgggcgttcgagcaggtcccctatgccgaccgcgtcgcggccgagagcacctacgatgcgatcaggctcggtgctgcgcgcaacccggacggcgcggcgatccagttcctgcaaaatgccgatcccgcagacacgccgctggtcgtgacgtatggcgatttcatcgcgcgcgtcacgcaagccgccaacatgttccacgcgctcggcgccgagaaagacgacgtcatcagcttcatgctgccgctggtgccggatgccttcgtcactctgttcggcgcggaggccgccggcattgccaaccccgtgaatccgctgctcgagccgcaccagatcgcggagatcctggaggccgccaataccaagatcctggtcgcgctcgggccgatgcccggcaccgacatctggcagaaggtcgagcagatccgccctcaactgaagcatctcaaggccatcgtgcaggtgttcggcggcggagatccggcgaagggtatctttgcctttggcgacctgatcaagcagcagccggcggaccgcctcgtcagcgggcgccagattcgcggcagcgacatcgccgcttattttcataccggcggcaccaccggcacgccaaagctggtgcggcacacgcatgccaaccaagtctatcaggcctgggcgctcaatctgctgctgaaggcgaggccgggcgcaaacctgctgttcggcatgccgctgttccatgtcgggggctcgctgacgcaggtactgctgacgctgtcgagcggcggctcgctcgtcgtgctgtcgccgagcggctggcgcaatccgaatgcggtgaagaacatctggcagctcgtcgcgcgctacaggcccgaagcgctgtctagcgtgccgacggtgctcgccgcgaccctcgcagtgccgcctggtgacgctgttatctccagcctgaagtatgcggcaggtggtggctcggcgattccggtcgcggtcggttcggcgatccaggagaaactgaagctacccgtgatcgaggtctacggcatgaccgagacatcgagcgtgcacacgctggcctatccgtcgcggccgatccggctcggctcggtcggccttcccatgccttacgcgcgcgtgcgcatcgtgcagctcgatgccgagggacgcctgatccgcgactgcaaaccggacgagatcggcgtcgtgatcatggccggccccggtgtgttcagcggctatctcaacgacgagcacaacaagggcgcgttcgtcgacggcgtgtgggtcaactccggcgatctcggccgcttggatgccgacggctacctctggatcaccggtcgcgccaaggatctggtgatccgcggcgggcacaacatcgatccggcgccgatcgaggagatcatgttccgccatcctgccgtcggcttcgccgcggtggtcggccagcccgatgcctatgccggcgagttgccggtgggctatgtacaattgaagccgggcgccaaggtcgaaccgggcgagctggaatcgtgggtgcgcgagcgcacgccggagcgtgctgcggttccggtgcaggtcattccgatcgatccgatgccggtgaccggtgtcggcaaggtgttcaagccgcagctgcgctgggacgcggcggagcgcgtgttcaccaaggtgctcgcgccgctggtcgagcgcggcatcgactgcaaggtcaaggtcggcgcccacggcagccacggatcaatcgcgacggtgacgctaacgggcctgccgcccgaccagcaggaggcagttgcgggcgaagtacacgcactgctcgcgccgttcgtgatgcggcacgaggtagtgcaggcatag

SEQ ID NO: 3190 - DNA, 2187 bp, BradyrhizobiumColbertium
ttggcgggcctcgtgttgctgctttctgcggcgatcggcctgcagatcggtacggggggcctggccgcctatgtcgcgctgctgtgcgctggcctggtctggctcgtggcatcggcggaccggcccacgtcgacaacggtcctgaatcgcgccatcgagagcgtgcccgccggcctttgtgtgttcgcgccggacctgcgggtcatcgccagtaaccagcgatacgcgagcatatatggcttgacgcgcgctgacatcaaacctggaacgcgactgcgccagatcatcgaagcaaggaaggccaagcgcggcatttcggagcgcgtcatcgatgctttcgatgggttcgacgggatggcgacgtcggttcacgagctccgcgacggccggttcatctcggtctcacggcatccgatgaccggcggcggcctgatcgaggtgcatcgggatgtcaccagcgagcggcttgccgagatgcgggccaatgaaacgatgcaggaactgatcgagaagcagtatgccatcgatcaggctgtgatcgtcgcgatcacggacgtgaagggcatcatcaactacgttaacgacaatttctgcacgatcagcggctattcgcgcgaggagctgattgggcaaaatcatcggattctcaaatcgggcgtccattccaagcagctctttcgcgacatgtatcgctctctggcgggtggccatgtctggcgcggcgagctttgcaatcgggccaaatccggcaagctgtactgggtggataccgtgatcacgccgcaactcggtcccgacggcaagccagtcgcctatatggccattcgggtcgatatcacggcgcggaaagaagccgaagccaagctctcgtttgcggccgcgcacgattccctgaccggcctgttgaaccggtgtgcgctgttcgatcaggcaggaattggctcggagcctgacgtgcagccggaccgcttgagcgttcatctgatcgatctcgatgggttcaaacgtatcaacgatacgttcgggcacgacgtcggtgaccgtctgctcgaggcggtcgcctcgcgcctgcggtcgcttgccaccgaccgggatctcgtcgcgcgactgggcggtgacgagttcgccatgatccggcgtgtgggcgacggcgcagctggggccgcagtggatctcggtcgccgcatcgttgacgccatggcggcgccgttcgacatcgagggccatcagatcgacatcagtgcaagcgtcgggatcgtgctctgtccggagcatggctcgaacagcgccgatctcctgaagaaggcggatctcgcgctttatgacgtcaaggccgcgggtcgtcgcggccatcgtctctatcagccggcgatgctcgaggcgatcaagggagaaaaagtcctggaggcggagctgcgtcgcgcgatctccgcgcaggagttcgagctgcactaccagcccattctggacgtcgaaagccgcacggtccatacggccgaagcgctggtgcggtggcgccatcccgttgatggcctcgttgcacccgatcggttcattgcgctcgccgaacgcaccggtctcattcagccgctcagcgaatggatcattcaacgggcgtgcctggatgcggcgtcctggccgccccatgttcagctcgcggtcaacgtatccgctacccagttcaagcgcggcaatctgttcgatgtcgtgctgcaggcactgcttcgttcgggattgaacccgcgacggctgcagatcgaggtcacggaaaccgtcctgcttgagcagcagtccgagcaactgcagacgttccgacgcctgaagtccatcggtgcaacgctcgtgctcgatgatttcggcacagggttttcgtcggcgagctatctgacgaattttccgttcgacaagatcaagatagacaagtccttcatacagggcctgcccagacgggactgtgccgcggtgatcgcgtcggccgtcgtgctggcgaaggggctgggcatcagcgttaccgccgagggaatagaaaccgagccgcagctcgatcacgttcgttccatgggaattgatttcgcgcagggatatttgttcggtcggccggtaccctatcgccagctcaagtgcgcgaccgtgttcccggacggtccgggccgtgttctgcaaacggcgacggctggcgcaaattga

SEQ ID NO: 3191 - DNA, 570 bp, BradyrhizobiumColbertium
ttgctgacggcgaaccaggcctctcccgacatctatgttttttgcgccgggtggggatttcgttttctccagatgccgaacggacggcggcaaatactcggcttcctgctgccgggagatgtcctcgccggctcgctccttcacgagcgcctgcacttttcggtcaaggctctgacagcgatccaggtcagcacaatgaagcggacggaggtccatgcacgcattgcgacgaacgtgcgcatcctctgggccgctgccgaatgttgcgcaaacgaggccaaggcggccgacgataccattgccgcgctgggccagttctccgcagaggaacgcatcgctcatctgttcctgcagttgatgaagcggattgcgagccgcaacgtgatccgcgacgagcgctatcgcataccgctccgccagcagcatgtcgccgatgccgtgggactaacgccggtccatgtcagccgcgtgctcaccgccttcagggaacgccgcgtcgcagatttgtcgaatggcgtgctcgaagtattcaatctgcgcgagcttcagcgactgggggcgctgaactga

SEQ ID NO: 3192 - DNA, 1356 bp, BradyrhizobiumColbertium
atgacactcgcgcagaccccaaatgacgagaaccaggatcgtgacggccgcatgcgctttatgcgcgtcggcaccgagacaggcgaactcctgtgcgaattctggtcggtggccgagcccgcgctgccggctatcctcgacgaattctaccggcatgtattgagcgagccgcagcttgccgccttgatcggcgacgacatgcggaggctgaaaacggcgcagagttcgcattgggcgcggctgttcaacggccgcttcgatcacgactacatgcgtggcgtgcgcatgatcgggctgatgcacaacaagatcgggttggagccgcgctggtatatcggcgggtataatttcgtgctctgccggctgctggccctggccgttagaaaatatcgatggatgccgacgcggctggccagcgtgctcaccgccctcaacaccgcggtgatgttggacatagacattgccatctccgcatatcaggaggcgatgttcgcggagaagcagaagcagcaggaggcgattgctgcggccattctggatttcgacggccggatgaaggtcgtactggaaagactgggaagctcggcgaccggtctacagggcgttgccgatgtgctcagcgcaagcgcggagcgctcgacccggcaatcgagcgtggtggctgccggctcggaagaggcgtccaccaatgtgcaggccgtggcggcctcgaccgaggaactcgcgtcgtcgatcaaggagatcggccgccaggtttcggagtcgaccaggatgaccggcgaggctgtcgatcaggcagcgcgctccggtgccgcgatcgagagcctggccagggcagcgcagagaatcggcgacgtcgtcgagctgatcaacacgatcgcggctcagaccaatctgctcgcactgaatgcgacgatcgaggctgcgcgcgcgggtgaggccggccgtggctttgcagtggtcgcgtccgaagtcaaggcgctggccgagcagacggcgagggcaaccggcgagatcggccagcaggtcctctcgattcaggaggcaacgacagagtctgtcggcatcattcgccagatcggcgaaacaatcgccgccgtcgacgaggttgcgacggcgattgcggctgcggtcgagcaacagggcgtagccaccgccgagatcgcgggcaacgtacaggaggccgcgcagggcacacatgacgtatcgagcaacatcgggggggtaagccaagctgccagggagaccggcatcacggcctccgaactcctggcggcttccaaggagctatcgggccagacggatgtgctccgctccgaggtcgaagggttctttgcggcaattcgtgcggcctga

SEQ ID NO: 3193 - DNA, 1173 bp, BradyrhizobiumColbertium
atgcccatcgtcaatcgcgttgccgccctctcggacgaaatggctgcctggcgccatgacttccacgagaaccccgagttgctctacgaagtccaccgcaccgcggggatcgtcgcggacaagctgcgcgagttcggctgcgatgaggtggtgacgggggtcggccgcaccggcgtggtcggcgtgatccgcggccgcaagtccgcctctggcaagaccatcggcctgcgcgccgatatggacgcgctgccgatcatggagacttcgggcgtgccttacgcgtccaaggtccccggaaaaatgcatgcctgcggccatgatggccacaccgccatgctgctcggcgctgcaaaatacctgaccgagacgcgcaatttcgacggcacggcgatcatgattttccagccggccgaggagggcggcggtggcggcaaggccatggtcgaggacgggctgatgacgcgctggaatatccaggaggtctacggcatgcacaacatgccgggcctgccggaaggccatttcgccaccacgcccggcgcgatgctggcctcctccgacaacatccagatcacggtccacggcaagggcggccatgccggcgcgggtccgcacaaatccgtcgacagcgtgctgatcggctcgcagatcgtgaacgcgctgcaatcgatcgtggcccgcaacgtcgatccgctgaagtccgccgtcatatcgatcacgcaattccactcaggcacggccttcaacatcattccggagatcgccgagctcggcggcaccgtgcgcacgctcgatcccgaggtacgcgatctcgtcgagcgtcgcataggcgaggtcgccgacagcgtcgcgcgggcctatggcggctcggccgagacgaaatacacgcggatgtatccggtgaccatgaaccatgcgcgcgaggccggccttgccgccgatgtcgcccgcgacatcgtcggcgccgatcgcgtcaacgacaagttcatcccgatgatgggcgccgaggacttctccttcatgctggaagcacgccccggcgccatggtgctggtcggcatgggcgacggcaacgagtgccaccacccgggctacgtgttcaacgacaacattttgggccacggcgcctcgttctgggcgcgtcttgtcgaaacgcggatgccagccggctag

SEQ ID NO: 3194 - DNA, 1308 bp, BradyrhizobiumColbertium
atgatcccccgctatacccgcccggaaatggcctcgatctgggagccgcagacccggttcaagatctggttcgagatcgaggcgcatgcggcggatgccctggccgagctcgggaccatcccgaaggaggccgccaggacggtctgggccaaggccaaggacgccgtgttcgacgtcgcccgcatcgacgagatcgagcgcgaaaccaagcacgatgtcatcgccttcctcacccacctcgccgagatcgtcggccccgaggcgcggttcgtgcaccagggcatgacctcctccgacgtgctcgacacctgcctcaacgtccagctcacccgcgccgccgacctgttgctcgccgacctcgacaaggtgctggccgcgctgaagaagcgcgcattcgagcacaagatgacgccgaccatcggccgcagccacggcatccatgccgagcccgtgaccttcggcctcaagctcgcttatgcctatgccgagttcacgcgcgccaaggaacgtctgatcgccgcgcgcaaggaagttgcaacctgcgccatctcgggtgccgtcggcacctttgcgcagatcgatccgcgcgtcgaagagcatgtcgcgaaagcgatgggcctcgtccccgaaccgatctcgacccaggtcatcccgcgcgaccgccacgccatgtatttctcgaccctcggcgtgatcgcctcctcgatcgaacgtatcgcggtggagatccgccacatgcagcgcaccgaagtgctggaggccgaggaattcttctcggaggggcagaagggctcgtccgccatgccgcacaagcgcaatccggtgctgtcggagaacctcaccggcctctcccgcatggtgcgcgcctatgtgacgccggcgctggagaacgtcgtgctctggcacgagcgcgacatctcgcactcctcggccgagcgcatgatgggtcccgacgccacagtgacgctcgacttcgcgctggtgcgcctggccggcctgatcgacaagcttctcgtctatcccgccaacatgcagaagaatctcgaccggctcggcggcctcgtgcattcgcagcgcgttcggcgggccctgacgcagaagggcgcgagccgcgaggacgcctacaagctcgtgcagcgcaacgccatgccggtctggcgcggcgaaggcgatttccttcagctgctgaagaaggacactgaagtaaggaaatatctctcggatgccgaaatcgaggagcagttcgacctcggctatcacctcaagcacgtcgatacgatcttcaggcgcgtgttcggcgagagctga

SEQ ID NO: 3195 - DNA, 126 bp, BradyrhizobiumColbertium
gtggacgaatggagacttaagacaatgacgaccgaaatcctcaatctcaccggcgtgattgggcagtggctcaatctgctggtggcgcgccagatcgcggcgcaggctgcaaaactgcctcattag

SEQ ID NO: 3196 - DNA, 588 bp, BradyrhizobiumColbertium
atgaatgaagccgttgttttgacgccggagcggatcctcgaggtcaccgaggatgtgctcaggcggtacggacttgccaaggccacggtggtcgacgttgcccgtgcgctcgatgtgagccacggcagcgtctatcgccatttcccgagcaaggcctcgctgcgcgaggctgttgccaagcgctggctggatcgcatcgatgctccgctgcgcgagatcgccggggagcagggtccggccccggcccggctcgagcgctggctgcgtacgctgttcgccgccaagcgttcgcgcgtcctcgatgaccccgagatgttcgacacctatctgacactggcgcgcgaggcttgcgctgccgtcaaatgccacaaggacaccatgatcgaccagatcgcggcgatcctgatcgacggcgagaagcagggcgaattcgctgtgggcgacgtgaaggagacggcgcgtgcgatcttcgatgcgaccgtgcgtttccaccatccggctcatgccgacgagtggaaggatgccgatctctcggcgcgcgtcgatgcgacgctgacgttgttgctgcgcggtttgaaggctgggtag

SEQ ID NO: 3197 - DNA, 192 bp, BradyrhizobiumColbertium
atgctcgatcaggagctgacattccatcgcctgcgaaagcggtcaaaggacgcggtcgaaatcgcggtcaatgcatatccggaaagtccgccggtcgtgccatccgccgagccagctttccggacacgtagaggctcgaccatctcgccgccggctcacaacggcggcgttcttcacaaggcaaggggttga

SEQ ID NO: 3198 - DNA, 657 bp, BradyrhizobiumColbertium
atgagcgaggttgctgcaacaggcatctccgtgctgctggtcgacgaccatccgatcgtccggcaaggctatcggcgcgtgctggaaagccagggcgatctgcatgtcgtcgcggaagccgacaacgccgcggacgcctacggcgcgttcaaggcgcatgatcccgacgtcgtcgtgctcgatatttcgatgcccggcgcgagcgggctggaggcgatccgcaacattcgcgcgcgcagcccccgggcgcggatcctcgtttttaccatgcacaacgaggccgtgctggtaaaggccgccttcaacgccggcgccagcggcttcgtcaccaagagcagcgagccctccgccgtcgtgaccgcaatccgcaacgtcgcccgcggcgagcgcgccatgagcgacgacatcgcgcatatcctggccgaggacagcttgtcggctggctcagcgctggatcaactgggcgaacgcgagatcgagatcctgcgccagttcgccggcggcgccaccaccgagcagatcgcggcgcatctcaatctcagcatcaagacggtgcagaactatcactacctcatcaagaccaagaccggcgcgcgcacggacgcgcaactggtgcggctcgcggcggcgtgcgggttgacgagaatctggcggtag

SEQ ID NO: 3199 - DNA, 1371 bp, BradyrhizobiumColbertium
atgcgcctcgtgcttcagcttgtcgcccgtctgctgcttatcgtcgtgctctgcctcggagccgcgaccgtgtgggcgacgttcgacgcctatcgcagcgtcgatcgggcgactgcggcctcggcgcagcgggtcgcgcaggcgctgcaggcgctgtattggcgagagctcttgttgcgcagcagcagggcgcgcgagcatcttctgcctgttccagactggcgcaccctcgagacgatgaaactgatctcgcccggcgtctgtgtcgagttccagccagccgcggcattcgagaagccgctctgcggtcagagcgaggggcttgggaaggcgccaccgcactggttcgtcgccgttgttcccacctatcttggcagccacgccgaggtgatacggcccatcagtccccgcgcggcggctgcgggcacggtggtcgcgacgccggatgccacggccgccgtctcgctcgcctgggagtacatccacaacgtgatcgacgtcgcgctcctgatggcggcggcgatcgcgctgctggcttcgatcgcgatcgcgcgcgcgctggctccagcgcgcgccatcgtcaccgcgctccaacgtatggcgcggggtcagtaccggacgaaattgccgcgcttccgctccatggagcttgcgatgatcggcagcgccgtcggcgagctcggcggccggctggaggaggccaccgaacagcgcgccgcgctgacgcggcgcctgatcgaaatccgcgacgacgagcgtcgcgcgctcgctcgcgagctgcacgacgaattcgggcagaacctttccgccattcttgccttcgccaacacgatcgaaaccgcaagcacgaaagacaagaacggcaccgcgattgcgcaggacgcgcgcatgatctcgcaagccacccatcacctgatggcctcgctgcgcgatgcgctcgggcggctgcgcaatcccctgcccgaggaactcgggctcgaggcaagcctcgtcaacctcgtcgacagctggcgctcgcacagcgcggcgcggccgacgatccagctcgaccttcgcggtgacctcaccgacatcagtgggccggccgccaccacggcctatcgcgtggcacaggagtgtctgaccaacgcgctgcgtcacggtgcggcgcgcgagatcagcttgcgcatcgagcgccgcgccggccagcatgatgcgctgctgatccgggtcgaggacgacggcggcggcgacgcgacccgtgtggcgcagtcggccggtttcggcctgaccggcatccgcgagcgcgtcacggccgcgggcggatcgctgtcgatcctgccggcgcgccgcggcctcagcgtcgccgccaccatcccgctcgccgcgtga

SEQ ID NO: 3200 - DNA, 771 bp, BradyrhizobiumColbertium
atgagttcgatgacgattggatcgatcgcggggaccacaaccgacccgtccgagcgtagcgcgctcctgttctggatgatcttcaccgggctctcgatcttcgcggtcgtgctgctgtggcggttcgggctgatccacctgatgttgacctcggatcgcacctacatttccgccgtgatcgcggcgctctacgtcatcacgtgtggccactgcttcctgcggacgcgggcgatcgcgcgggagggagcggcggcgcggcgctgccgcgcagtgctggcggcaccggacggcagcaaggcgcttgatgccagcgcggcggtgctgccgcgcggactggtgcgcgaccatatccagagcctggtgacgaaagccgcggcgcaggactaccggccggtcgaccagacgctgctgttgcgaaatctcgccgatcgcttgcgcggctccaacggcttcggcgccttcgtctccgatacgttgatgaagctcggtctgctcggcaccatcatcggattcatcatcatgctggcgccgatcgcggggctggatgccgcagacaaggtcgcgatgcgctcctcgatgggggggatgagcgacggcatggcggtcgccatgtacacgacgctggccggcctcgtcggctcgatcctgatccgcatccagtactacatgctggacgccgcgacgcagcgggtattctcggacgcggtggtgctgaccgagacctatgtgacgccggtgctggagcgcaaaggttccggtgcgccgtcatga

SEQ ID NO: 3201 - DNA, 672 bp, BradyrhizobiumColbertium
atgatggatgatttcggtctctatccgcgcgaggagccgttcgacccccttggcgtgatgctgttcaaggcgctccaggtgatcgcgttcctgtttttcctcgcgctgctcgcggtctcgccggatgcgaaggaaggcaagatcgactccaaggcggagttcatcatcacgatggactggccggacaatcatcctgacgatctcgacctgttcgtgcaggatcccgcgggcaacatcgcctggtatcgccaccgcgaggccggcttcctcacgctcgatcgcgacgaccgcggcggggccaatgatttcatcatcgtcaacggcaagaagatcgcctcgcccatccgggaggagatcgtcaccgtgcgcggcatcgtcgccggcgaatacaccgtcaacatctcgcatttccaggcaacgaccggcgagcccgttacagcgagcgtgaaggtgcagaaactcaacccgactgcgcaagtgatcttcgacaacaagctcgctctcagccacaccggcgacgagaagacagcggtgcggttccggctcgatgccgagggcaaggtcatcaatgtcgaccagcggccgaaatccctgctggagacgttccgcaacgtgcgcgccaacggcgccgatatcgatcccaaaaccggcgtgaggatgcgccgtgagtaa

SEQ ID NO: 3202 - DNA, 606 bp, BradyrhizobiumColbertium
gtgagtaatctgcaaacggtcgttctcagcctctcggtcgcctacgccgtgatcggagcgctgctgcttgtcgtgctggtctatgcgcggttgcactggtcgctgaaggcggtcgcggttgtcgtgaccagtgccttctatgtcgtcagcttcactgaaatgcgtgggctgctcggctgggccagctccgaccggatgcccaccgccttcaagctgctgcaggcccgcatcgtcgagccgcattcgctggaaggtgatcccggttcgatctatttgtgggtcgaggcgctggacgacgacaaccgcccgagcggcatcccccgcgccttccgggtgccgtatgacgacaggctggccgaaaagacccatgccgcgcagaacgagatcgcagccggccatcctcagggcggacgcgccgcggatttcggcggtggcgacggtagcctcatcgacatggtccgcgaatacgtgacgcccaagaccattctggagaccagcggcggggactcctcgaccggcgagttcaatgcgccgccggccggcgcacaaggcgccgtgttcaccccgctgccgccgccccggatgccgcccaaggacgagcggtag

SEQ ID NO: 3203 - DNA, 741 bp, BradyrhizobiumColbertium
gtgcttctcgctgtcttctcggatatccacgccaatcggcaggcgtttgaggcctgcctgaaggcggcccgtgcgaagggcgcggagcagttggttctgctcggcgatttcgtcgggtatggcgccgatccggaatgggtcgtcgataccacaatcgagctcgttgcggagggcgccgtcgccgtgcgcggcaaccatgaccaggcggtcaattcgacggctgagaccatgaatgccgaggcgcagatcgcaatcgaatggacccgaggccggctcgacacggcgcagcggcggtttctggccgaattgccgatgatggtggaggatgagggcctcctgttcgtgcattcggaagcctctcaccctcagcgctggcactatgtccgctcgacgacggatgccgccaagagcctgatcgcaacgtcggcgcatgtgaccttctgcggccacatccaccgccccgcgctctattccatgtcggtcacggcgaagatgacgagcttcgtgccgaagaccgatgtccccgtgcagctgctgcgcggacggcaatggctcgccgtgctcggctctgtcggccagccccgcgacggcgatccatcggcggccttcgcgttgttcgacacggtctcttgccagatcacctattgccgcgcgccctatgacgtcgcggcggcggcaggcaggatccgcgacaacggattgccctcctggctcgccgaccggctgtcgcagggacgctga

SEQ ID NO: 3204 - DNA, 1440 bp, BradyrhizobiumColbertium
atgccgaaacctctggtcagatccggcgctgaaatcgatggttacactatcggtgaatgcgtgcatgccggcggcatggcgacgttgtggaccgtcacccatcccggcatcgacgtgcccctgctgatgaagatcccacgggtatcggagggcgaggacccggccgcgatcgtctctttcgagatggagatgatgatcctgccgcggctcgcgggcccgcatgtgccggcctgcttcggcaccggggactttgcccgccaggcctatgtcgtgatcgagcgcatcccgggcgccacgctctacaagcggctgcccgacctgccgttgccctatgacgaggcgcggcagctcgtcgccaggatcgcaaccgcgcttgctgatttacaccggcagaacgtgatccatcacgacatcaagccgagcagcatcatgttccgcgagtccggcgaggcggtgctgatcgactacggcctgtcgcatcacaaccacctgccggacctcctgcaggaagaatttcggctgccctacggcactgcgccctatatggcgcccgagcggctgcttggggtgcgcgacgatccgcgcagcgacctgttctcgctcggcgtgctgctctacttcttcaccacgggtgtgcgccccttcggcgagggagagacgctgcgcgcgatgcggcgccggctgtggcgcgacccgcatccgccgcgcaaggtccgcccggactatccgccctggcttcaggaagtggtgttgcggtgcctggagatcgagccggtctggcgttatccgacggcgtcgcagctcgccttcgatctcgcccaccccgaccaggtcaagctcaccgcgcgctccgagcgtgtgaaacgcgacccgctcagcgtcgtctggcggcgtcgcttcaaccagggcgccatggcgccgcgcgcgaaatccgatgtcgccgctcagatcgcatccagcccgatcctggcagttgccctcgacgccatggagggcgcgccggaactcaacgaggcgctgcgcgtgaccactgagcgtatcctcgcgaccttgccgtcagcgcggctggcctgcgtcaacgtgctgaagctgagccggatcgcgatcgaccgcagcctggacgaggaggggtcgaacaagcatatcgaccgtctggttgcgctccggcattgggcaacgccgctgaagctggacgagagtcggctgtcggcgcatgtgcttgaagcggtcgatcccgccgccgcgatcctggagttcgccaaggccaaccaggtcgaccacgtcatcatcggcgcgcggcagcactcattcaggcgcatgctgctcggcagcgtgtcggccaaggtggctgcggaggcgacctgcaccgtcacggtggtgcggccgccgcggctggccggggacgtcggcgggacagatgccaacgaggcgaccggatag

SEQ ID NO: 3205 - DNA, 600 bp, BradyrhizobiumColbertium
atggatgaactccgcgccactctgttttctgccgggctgcgtcgtcttctcgccgaggccctgcaggatggagagcaagtggtctggcaggggcagcccgacggcatcgcccgcgcggccatgtggcgatttctctggtggatcggatgtccctggttgctgctgaccgtcatcgccgtcgggaacggttggatcgaccaagcgacccagcctctcgcaatgattggagtcgggatggttgcagctccgttcgtgatgctgctgcaagacctgcagacgctttatgtgatcaccgaccgccgcgcgctgatcgtgcgcacggcctggagcagacgcaccgtgacccctacttcgttcgacgccatggatgcagtgttcgaaatcctcgacatcggcagcggcgtcggccacctcaactttgcgtcagggcgctcgacccgttcgcccgataccgactacaccgggcactatggctttcgctttgtccgagacgcaccacggatccgggatatcctcgacgatgcgcgcaccggcaaaatacgtcggccgcacttggaaagaactgcgggttctacgggtgttgcaacgcgcaaagcttga

SEQ ID NO: 3206 - DNA, 702 bp, BradyrhizobiumColbertium
atgacccaagccttcgctccccgccccctggccattgcgccctcgatcctggcctcggacttctcaagattgggcgaggaggtccgcgccgtggacgccgcaggcgccgactggatccacctcgacgtaatggatgggcacttcgttcccaatatttcctacggccctgatgtcatcaaggcgatgcgtccgcacacgaagaagatcttcgacgcgcatctgatgatctcgccctgcgatccctatctcgaggcctttgccaaggccggctgcgaccacatcaccgtgcatgcagaggccggtccacacctgcaccgctcgctccaggcgatccgcgcgctcggcaagaaggccggcgtctcgctcaatccggcaacgccgatcagcgcgctggaatacgttctcgacctcgtcgacctcgttctggtgatgtcggtcaatcccggcttcggcggccaggctttcatcccctccgcgatcggcaagatccgcgacatccgcgcgatgacggcgggccgtccgatcgacatcgaggtcgacggcggcgtcggccccgacgtggccggcgcgctcgcggcggccggcgccaacgccttcgtcgccggcacctcagtgttcaggggtgggacgcaggacgcttacaaagccaatatcgccgcgatccgtcacgcggcacttggggcacgcggcgaggcgatctga

SEQ ID NO: 3207 - DNA, 126 bp, BradyrhizobiumColbertium
atgggcctccgcggccggcaatgcaggggagccgcgcttcctgtgggcggaaatttctgccgcgaccggcaccaattgccgatgttcccgaaactgcaaagcgtggtggattgcggatttcattga

SEQ ID NO: 3208 - DNA, 789 bp, BradyrhizobiumColbertium
atgttgtttgcccttggcgccgtctccattgcgctcaatgcgatccagtcgctgacgaactcgaaatcgtcgtcggcggcggacaaggcgggatcggcgcaaggtgcgaccaatccgttcgcgatcgacggcgccagcagcacgtccggcggtgcgagctcgccggtcaattcgggcagacatccgcagatctcgccggagacgatgaacgcgctgttcgcggcgcagagccaatcggccgacggctcggcttcgtcgaactcgacgtccccgacgtcgaaaggtcgggaggctgcgctgaaggatctgttctcccagatcgatgcggatggcgacggcaagatcaccaagtccgaattcgaggacgcgctcggcgccgggggcaccaatctggcgcaggccgaccacgtgttcgcgaagatggatgcgaactcggacgacagcatcaatctcggtgaaatgaccaaggcgttgacgagcgggcgtcaaggccaccaggcgcaaggcgctgacggctcggctgacgcatcgggcggtgggtcggagtcctcgtcaaaggcgagccgcgggtcgacctcgacgacgacgacgaatgccgacggctcgaccaccaccaccgtcacctatgccgacggcttcaagatgtcgacgacggtgccgggcgcacatcgcggtccgatggcgaacggaggcggcaattcgccctatgactggtttgggcagatgatgcagcgccaggcgcagtccggttccgcgaccgcgtcttcttcgatgtcgataagcgtgtga

SEQ ID NO: 3209 - DNA, 225 bp, BradyrhizobiumColbertium
atgccgtcttccgtgatccgcttcttccgctatgccccggacacacgcgagctgcaggtgactttcgtcaccggacgggtctatgtctacgaggacgttccgcccgaggtcgcggccgcgttccgggaagcgcgatcaaagggcactttcttcaacctgcacatccgtgaccgctttgcctatcgcgagatcacgcatgactacgcggatcagaccgagtcctga

SEQ ID NO: 3210 - DNA, 1059 bp, BradyrhizobiumColbertium
ttgagcctgcgccatcgctgcgctatcgcagatcgcaaattgctctcagttcacgaggctgtcttgaaaaacctgctcaccgacatcgccggcgtccgggtcggtcatgccgaagatgcgaaagtcgcttccggcgcgaccgcggtcatcttcgattctcccgcgatcgccgcgatcgacgtccggggcggcggtcccggcacgcgcgaggatgcactgctcgatctggccaacaccgtcgaacgcgtcgatgcgatcgcactctccggcggctccgctttcggcctcgatgccggcgggggcgtgcaggcctggctcgccgaacaggggcgcggcttcaggatccgtgaggccgtgatccccgtcgtcccgggggcgatcgtgttcgacctcctcaacggcggcgacaaggcctggggccgcttctcgccatatcgcgatctcggctatgccgccgctgccgccgccggcaccgacttcgcgctcggcagcgtcggtgccgggctgggcgccaccaccgccaccttcaagggcggcatcggctcggcatcggccgtgaccacgaacggcctcaaggtcgccgcgatcatggtggtgaacgccgtcggcagcgtcaccatcggcaacggcccatggttctgggccgcgccgttcgaggaaaacggcgagttcggcggacgcggtctgccgtctgcgttcacgcccgacatgctggcgatgcgcatcaagggcgggccggctgccagcgagcgcgagaacaccacgatcggcgtcgtcgtcaccgacgcgattctgagcaaggcccaggccaagcggctcgcgatgatcgcacagaccggatttgcccgcgcgatctacccggtgcacgctccgctggacggcgacgtgctgttcgccgcggccacctgcgagaagccgatcgagccgctggtggagctcaccgagctcggcatggtcgctgccaacgttgtcgcacgcgcgatcgcaagcggcgtgtacaacgcgaccgcactgccatttccaggggcactaccggcgtggaaggacagatacgactag

SEQ ID NO: 3211 - DNA, 447 bp, BradyrhizobiumColbertium
gtgaagatctatctgccccgctcgaccggggtgcaggagaccgagttcgaggcgctccagaacgcacccatcgccgggggtgacgagaagatcctgatcgtcgaggacgacgcgctggtccggcagtatgtcgtgacgcaggtcaggagcctcggctataccgcgctcgaggccgccaatggcgccgaggccctcaagatcatcgacggcgacgcgaccatcgacctgctcttcaccgacatcatcatgcctggcaacatgaacggccgccagcttgctgacgaagcggccaggcgccgccccaacctgaagacgttgttcacctcgggctacacggagaacgccatcgtccatcatggccgtctcgattccggcgtgctgctgctggccaagccctaccgcaagtccgagctcgccaaaatgctcaggacggcgctcgccagttga

SEQ ID NO: 3212 - DNA, 384 bp, BradyrhizobiumColbertium
atgcctcgcgttctcatcatcgatgaccagaaggacgtgcgcgcgatgatcgcgatcgtgctccgggttaatcatttcgaggtggtggaggccgaaagcggtgcggcaggtctgaaagccttcgcggaaagcgcttgtgacgcagcgatcgtcgacatcttcctcggtgacgccagcggagccgacgtcattgccgccctgcgcgaacacgcgccggcgctccccgtcgttgcggtgtccggaatgacgacacttgatttcatcgatcaatcgcccagcctggccaacgtggtctgcctgcaaaagccgtttcggccgagcgatctcctgcaggcattgcggaatgcccaggccgcgaccagcgcgctgcccgccgccgtttga

SEQ ID NO: 3213 - DNA, 1119 bp, BradyrhizobiumColbertium
atgaaatcactgaagctcatcggtctggcattcggcgcatcgctcgccctgtcgagcgcggcattcgcgcaggatgtcaccgtcgcagtcgcaggcccgatgaccggcggcgagtccgccttcggacgccagatgaagaacggcgccgagatggccgtggccgatatcaacgccgccggcggcgtcaatggcaagaagctcgcgctttcggtcgaggacgacgcctgcgacccgaagcaggcccgctcgatcgcggagaagatcgccggcgccaagattcccttcgtggccgggcactattgctcgtcgtcgtcgatcccggcttcggaagcctatgccgacggcaacgtgctccagatcacgccggcctcgaccaacccgctgttcaccgagcgcaagctctggaacgtggctcgcgtctgcggccgcgacgatcagcagggcctgatcgccgcgcagtacatcgccaagaactacaagggcaagaacatcgcgattctcaacgacaagaccacctatggcaagggtcttgccgacgagaccaagaaggcgctcaacaaggccggcgtcaccgagaagatgtacgagtcctataacaagggcgacaaggacttcaacgcgatcgtctcgcgcctgaagcgcgacaacatcgacctcgtctatgtcggcggctatcatcaggagagcggcttgatcctgcgtcagatgcgcgatcagggcctcaagaccgtgctgatggccggcgacgcgctcgccgacaaggagtacgcctccatcaccggcccggccggcgaaggcacgctgttcaccttcggccccgacccgcgcaacaagccgaccgcgaagaagatcgtcgaggctttcaaggccaagaacatcgaccctgagggctacaccctctacacctatgcggcgatgcaggtgtggtcgcaggcggccaagaaggccggcaccaccgacgccaagaaagtgatggcggcgatgaaggccggcaaatgggacaccgtgatcggcccaatcgagtatgacgccaagggcgacatcaagcagatcgactacgtcgtctacaaatgggatgccaagggcggctacgccgagatcagcggcaacggcacctga

SEQ ID NO: 3214 - DNA, 738 bp, BradyrhizobiumColbertium
gtgacctcggtgccgctgctcgcgatccgcggtcttcgcgccgcctacggaaagatcgaggcgctgaagggcgttgacttcgagatcaatgccggggagatcgtggcgctgatcggcgccaacggcgccggcaagtcgacgctgatgatgacgatcttcggcaagccgcgcgctcgcgccggccagatcctctatgaaggccgcgacatcacccacgtgcccactcacgagatcgcccacctgcggatcgcgcaatcgccggaggggcgccgcatcttcccgcgcatgagcgtggcggaaaacctccagatgggggcggacgccaccgactgcaccgaggctgagcgcgagacgacactgcaacgcgtgttcacgctgtttccgcgtctgaaggaacgctacgcccagcgcggtggaaccctgtccggcggcgagcagcagatgctggccatcggccgcgcgctgatgagccgcccgcggctgctcctgctcgacgagccctcgctcgggctcgcaccgctgatagcgcgacagatcttcgacgcaatccgcaccctgaaccggcaggacgggttgaccgtcctgatcgtcgagcagaacgccaaccatgcactcaagctcgctcatcggggttatgtcatggtcaatggcctgatcacactggcggggaccggcaccgaactgctgcagcgccccgagattcgcgccgcctatctggaaggcggtcgccacggctga

SEQ ID NO: 3215 - DNA, 834 bp, BradyrhizobiumColbertium
atgagcggcgacaagattctcagcgtcgagcggctgaccatgcgcttcggcggcatcgtcgccgtgcaggacttgtcattgtcggcagagcgcaagaagatcaccgcgctgatcgggccgaacggcgccggaaagaccaccgtcttcaactgcatcaccggcttctacaagccaagcgctggtgccattcgcctcacccatgacgacggcagagtgatcgcgctggagcggctgaacgattttcgcatcgccaagcaagccaaggtcgcgcgcaccttccagaacatccgcctgtttcccggcatgaccgcgctggagaacctgatggtggcccagcacaacgccttgatgcgcgcctcgggttacacgctcctcggtctcctcggcgtccccgcataccgcgacgccgaaaagcgcgcaatcgacctcgccaccgactggctgaagcgggtcaatctgctcgaccgcgccgacgatgccgccggcaatttcgcctatggcgaccagcgccggctcgagatcgcgcgcgcaatgtgcaccgagcccgccctgctgtgcctggacgaacccgccgccggcctcaacgcgcgcgaaagcgcggccttgagcgagctcctgctttcgatccgggacgaactcggcacctcgatcctgctgatcgagcacgacatgtcggtggtgatggagatctccgaccacgtcgtggtgatggaccatggcgtcaagatcgcggaaggcacgccgcgcgacgtccgcaacgacccgaaggtgatcgccgcctatctcggcgcagacgaggacgaggccgtagccgtgatggagagcccgtcgtga

SEQ ID NO: 3216 - DNA, 1320 bp, BradyrhizobiumColbertium
gtgacaatcccttcgaccaatacggccaaacctgcaacgggcatcccggccctcctcaagacagccttcatcaacgccctcgtcgcgctggtgctgttctcgctgatggtcggcatccgcaccgaggcgggcccggacggccagctcacctactggacgcgattcggagaggttgccgccctcgtcgccgtcgtgttcgggggctcgatcgtgatggagctcttgcggcaatggatcggttcgaccggcgccgagaagctggtgccgccggcggtgcagagcggcatatccttcatcggccgctatctcgcgccggcgcttttgatcttcaccctgctggtgcctgtgatcttctatgaccagcgctacattctggaccttgcgatcctcgttctcacctacgtcatgctgggctggggattgaacgtcgtggtcgggctcgccggccttctcgacctcggctatgtcgctttctatgcggtcggcgcctattcctacggactgctcgccaccaatttcggctggtcgttctggatctgcctgccgctcgccggcattctcgccgccttctggggcgttctgctcggcttccccgtgctccgcctacgcggcgactatctcgccatcgtgactctcgcattcggcgagatcatccggctcgtcatcatcaattggcaggatctgacgggcggcccgaacggcgtctccggcattccccgtccctccttcttcggcatcccgctggacaacagcgatgaagggctcgccgcaaggcttggcatcgagtattcggcgacccaccgcatcgtcttcctgttctacctgatcctggcgctggcgctggtcaccaactgggtgacgatccgcctgcgccggctccccgtcgggcgggcctgggaagccctgcgcgaggacgaggtcgcctgccgcgcgctcggcatcaacaccacgaccaccaagctcacggcgttcgcaaccggcgccatgttcggcggcttcgccggtgcgttctttgccacccgccagggcttcatcagcccggaatccttcaccttccaggaatcggcgctggtcctcgccatcgtcgtgctcggcggcatgggctcgcagctcggcgtggcgctcgcagctctcgccatgatcggcggattcgagctgttccgcggcctcgagagctaccgcatgctggtgttcggcatggccatggtgctgatcatgatctggcggccgcgcggcctggtcggccatcgcgcacccaccgtgtatctgaccaaggcgcaagcgatctcctccgacctcgtcaaggaagggcacggatga

SEQ ID NO: 3217 - DNA, 918 bp, BradyrhizobiumColbertium
atggattatttcgcccagcagctcatcaacggcctcgtgctcggctccatctacggcctgatcgcgatcggctacacgatggtctacggcatcgtcggcatgatcaacttcgcccatggcgacgtcttcatgatcggcggcttcattgcgctgatcaccttcctgatcctgatctcgctcggcctcaccgcgatccccctgatcctgctggtggtgctcctggtctcgatggcaatcacggcgctttatggctggaccatcgagcgcatcgcctaccggccgctgcgtcattccttccgtcttgccccgatgctgtccgcgatcggcatgtccttcgtgctgactaactattcgcaggtggcgcaaggcgcgcgcgtcaagccgatcccgcccttcatcaccggcggctacacgctgcatgagagccaggacggctttgtcatccagctctccaacatccagatcatggtggtcatcaccaccatcgtgttgctggcgatcttcacctggctggtctcgcgcacccggctcgggcgcgacatgcgggcctgcgagcaggaccagaccatggcggcgctgctcggcgtcgacgtcgaccgcaccatctcgatgaccttcgtgatcggcgccgcgctcgccgcggtcgccggcctgatgtacctgctctattacggcctcgtcgatttcttcatgggcttcgtcgcgggcatcaaggcattcaccgccgccgtgctcggaggcatcggctcgctgccgggcgccatgctcggcgggcttgcgatcggtctgatcgagacgttctggtcggcctatttctcggtcgaatacaaggacgtcgcggcgttctcgatcctgatcgtcgtgctgatcttcatgccgaccggcctgctcggccgccccgaagtcgaaaaagtctga

SEQ ID NO: 3218 - DNA, 525 bp, BradyrhizobiumColbertium
atgttcaggaattggcggatcggctcggtcaacggcgcgctgctggcggcctatttcattcccgtatggagcctcgtcgccttcaacatcattgtcgctcccgtgcacggcctttacgagcggccgagcgttgccgttgcgttgtacctcagcgaccaccttcagatggcggggatggacacggtccgcgccgcctggctgctcgcgctggggcgggtgacggtggtggcgttcttcgcgatctacctcgtgctgctctgcattccccgaatccgcaggaacggcggcagcgacgaggcgctcggcatcgcgctggcgatcggcagcctaatctcgtttgccagcatggtgatggcctccaaggtcggcgagatggcagcgctccggctgcatgccaccgagctcctgctcttgctcggagccgcgatcgtggtcgtgatcgagaagccggcggcagcatcgaagaccgcggagattgccgccccgctaggtcttgagcaggccgagctcctgcacaatcgctga

SEQ ID NO: 3219 - DNA, 393 bp, BradyrhizobiumColbertium
atggacgaccagaagcgccgcgatgccggcatgaacgtgcgccgcaaggtgctgggcaatgcatgggtcgacaagtcgatcgcgaaccgcaatgcgttcaataccgactttcaggacctgatcacgcgctacgcctggggcgaaatctggacgcggccgcatttcgacgagcgcacccgtcgggtgctggtgatcggcaccatggtcgcgctcgggcaatgggacgaattccgcctgcatgtgcgcgcggcgctcgccgagggcggcttcacgcccgacgacatcaaggaaatcctgctgcagcaggcgatctattgcggcgtgccggcggcgaaccacgccgtgaaggaagcctcagcgattgtgcaggagctcggcctgctcaagacctag

SEQ ID NO: 3220 - DNA, 783 bp, BradyrhizobiumColbertium
atgcccatgatcgatgccgacggttgcctgctcaacgtctcggtcgaaggccgtgacggcgggccgaccttgatgctgtccaactccctcggctgcacattgcagatgtgggagccgcagatgaaggcgctgacgcaggtgttccgcgtcatccgttacgatcgccgcggccacggcaagtcgaatgtcccgcctggcccctacacgatggagcgcttcggtcgcgacgttctcgcgatcctcgacgatctcaacatcgagaaggtgcactggtgcgggctgtcgatgggcggcatggtcggacaatggctgggcgcgaacgcgccggagcgcatgggcaagctcgtccttgccaacacgtcctgctactatcccgatccaacaaactggcacaaccgcatcaaggcggttaaggagggcggcatcgccgccgtcgccgatgccgtgatcgcgggctggctgacccaggatttccgcgagcgcgagcctgagatcaccgcgaagatgaagtcgatgctgcttgcttccccggtcgagggctaccttgcctgctgcgaggcgctgtcgacactcgaccagcgcgcgctactgccgaagatcaagagccccacgctggtgatcgccggccgccacgatgcggcgacaccgatctcggcggccgaactgatccgctccaacattcccggcgccagcatgaccatcatcgacgccgcgcacatctcgaacgtcgagcagccgcacgcgttcacggatgcggtggtggggttcctgacgcagcgctaa

SEQ ID NO: 3221 - DNA, 1356 bp, BradyrhizobiumColbertium
atgagcacatccctctcccccctgctcgcgccgatgctgtcgagcgcggcgatgcgcgcggtctgcgacgaccggtctaccctgcagaacatgctcgatttcgaggcagcgttggcacgcgccgaggccgccacggctgtgatcccggcgtccgccgttggcccgatcgaggctgcgtgcaatgccgattgcttcgacatggccgcgctggccgacgccgcgacgcgatcgggcaatctcgcgattcccctggtcaagatgctgaccgccaatgtcggcaggaacgacgcggaggctgcgcgctacgtgcattggggcgcgaccagccaggatgtcatcgacaccgcgaccatgctcacgctccgcgccggcatcgccgcgctggatgccgatctcagccgcgccatcaagggattcgccgcgctgacgcgcagccaccgcaataccccgatggtggcgcggacctggctgcagcacgccttgccgatgccgttcgggctcaaggcggcggaatatgccgcaagcctcgcccgcgcccgttgccgcctgcggcggttctcccgcgagggcctggcgctgcaattcggcggcgcggccggcacgctcgctgcgctcggtgacaaggggctcgcggtggccgaacggctggcccaggagctcggtctgccgctgcccgaggcgccctggcacgcccatcgcgaccgcatcgccgaggctgcttcctgtctcgccattctcgccggcagctgcggcaagatcgcacgggacgtctcgctgctgatgcagaccgacgtcggcgaggcgttcgagcccgccggcgaaggccgcggcggctcctcgacgatgccgcacaagcgcaatccggtcgccgccgcgagtgcgttgggcgccgccaccatggccccgcagctcgccgcgaccatctttgccgcgcaggtccaggaccacgaacgcagcgccggcccctggcacgcggaatggccgaccctgccgcaactgatgctggtcacctccggcgcgctggccgccatcgtcgatatcgcggagggtctcgaggtcgatgcggcgcgcatgtgcagcaatctcgatgcgacgcaggggctgatcatggccgaggcggtcaccttcgcgctggccgagacgatcggcaagagcgatgcgcaccatctgatcgaggccgcgagcaagcgcgcagtcgccgagaagaagcatctgcgcgaggtgctgtcggccgattcgcagatcaccacgcacctttccccggaaaaaattgcttcattgttcgagccgatggcctatcaaggggcctcccaggcgctgatcgaccgcctgctggattccttggatctctcctga

SEQ ID NO: 3222 - DNA, 447 bp, BradyrhizobiumColbertium
atggccatgacgatgaacggcgaagtccagcttgcggcgccgcgcgaggccgtgtgggccaagctcaacgatccggaggtgctgaaggcctgcatccccggctgcgaggagctggagaagaccgacgacggcggctttcgcgcaacggcaaagatgaaggtcggcccggtgtcggcgcgcttcaagggcaaggtcacgctgtccgatctcgacccgccaaacggctacaagatctccggcgagggcgagggtggggtggccggcttcgccaagggcggcgcggtggtcaagctcgccgagaaggacggcggcacgctgctctcttacgacgtcgaggcgcagatcggcggcaagttggcgcagctcggccagcgcctcatcaacggcaccgccaagaagctcgccgacgaattttttgcgaactttgccaaggcggtacagggctga

SEQ ID NO: 3223 - DNA, 486 bp, BradyrhizobiumColbertium
atggcaaaaatctccctcatcgtgaacggcaatcctgtgacggccaatgtcgatccccgcacgcttctggtgcagttcctgcgcgagaatctgcggctgacgggcacgcatgtcggctgcgacacctcgcagtgcggcgcctgtgtcgtgcatctcgacggcaaggccgtgaagtcctgcaccacgcttgccgtgatggccgacggccacgaggtcaagacgatcgagggactggccgccgacggcgcgccgctgcatccgatgcaggaggccttccgcgagcatcatggcctgcagtgcggcttctgcacccccggcatgatcatgaccgcgatcgacatcgtccatcgcaaaggacacgaactcgacgatcacacgatccgcgaggagctggaaggcaatctctgccgctgcactggttaccagaacatcgtcgcctcgatctctgccggcgccaaggcgatggcgaaatccgatctcgcgtaa

SEQ ID NO: 3224 - DNA, 807 bp, BradyrhizobiumColbertium
atgtacgaattcaaatatcatcgccctgggaccgttcgccaggcggccaatctcctggtgaagaacgaagacgccaaggtgatcgccggcggccacacgctgattcccgtcatgaagcagcgcctcgcgagcccgccgcatctggtcgacctctcccatatcgagggtctcaacgcgatcgagatgaagggccgctcgctggtgatcggcgccaccgccaggcacgccgaggtcgcgaactccgcgatcgtcggtgaggcgatcccggcgctggcgaacctcgcgagtcagatcggcgatcccgccgtgcgtcacaagggtacgatcggcggatcgctcgccaacaacgatccgaccgccgactatccggccgcggtccttgcgctgggcgcgaccatcgtcaccaacaagcgtcgcctcaaggcggaagagttcttccagggcctgttcacgacggcgctcgaagccgacgagatcatcaccaaggtgatgttcccgctgccgaaaaaggcagcctacatcaagttccgcaaccaggcctcccgttacgcgctggtcggtgttttcgtggcgcgccgtccgtcggacgtgcgcgttgccgtcaccggtgccggctcagagggcgtatttcgcgtcaccgcgttcgaggaggctctcaagaagcgcttcgcctcgaaggcgctggaaggcatcgcggtgccggccgaaggcctcaacagcgacatccacggcagcgcagagtatcgtgcgcatctcatcggggtgctgactcggcgtgccgtcgacgccgccaatgccaaggaatga

SEQ ID NO: 3225 - DNA, 924 bp, BradyrhizobiumColbertium
atgacttcagcggccaattcttccggtgctttgccggcatcggtcgacgcgatgctcgaacttctgacgtcgcgcggttacctcgctgagcggtcgctggcgacggtgacctttctgtcgctgcgcatgggccggccgctgttcctggagggcgaggccggcgtcggcaagaccgagatcgccaaagtgctctcggcggcgctggggcggaggctgatccgcctgcagtgctacgagggtctcgacgtttcctcggcggtctacgagtggaacagcgccgcgcagatgattgcgatccggatggcggaggccgccggcgacaccgatcgcgaccagctctcgagcgacatcttcgccgaccgctacttgatcaagcggccgttgcttcaggcgatggagcccgacgttgccggtccgccggtgctgctgattgacgaactcgaccgcgccgacgaggcgttcgaggcgtacctgctcgaaatcctcagcgatttccaggtgaccattcccgaattcggcaccgtgaaggcgccgcaccccccgatcgtcatcatcacctcgaaccgcacccgcgagatccacgacgcgctgaagcggcgttgtctctatcactgggtcgattatcccgctgccgagcgcgagcttgcgatcgtcaagacgcgcgtgccaggcatctctgcgaagctgtcacagcaggtcgtgcgcttcgtccaggctttgcgcaaccaggacttctacaagtcgccgggcgtcgccgagaccatcgattgggccaccgcgctgtccgagctcgatgcgcgttcgctcaccccccaagtggtcggcgacacgctgggtgcgctgctcaagtatcaggacgacatcacccgaatgcagggcgatgccctgcagaaggtgctgaaggaagcgacgagcgagaattga

SEQ ID NO: 3226 - DNA, 1203 bp, BradyrhizobiumColbertium
atggccatcaaccaccttgcccccgagcaaaccgagcagttcgccgacaacatcgtcggcttcgcccgcgcgctgcgtgcagccggcctgccggtcgggcccggcgcggtgatcgatgcgatgagcgcattgcaggcaatcgacatcggcaaccgcagcgatgtcttcaccacgctggaggcgatcttcgtcaagcggcacgagcatgcgctgatcttcaagcaggccttcaacctgttcttccgcgcctctgaagagtggaagcacatgctggattcggtgccgctgccggacgaggccaagaagaagccgcaggccggctcgcgccgcgtgcaggaagcgatgtcgcagccgcgcatgaccgagacgccgcagcaccaggagcaggatctgcgcctgtcggtctccgacaaggagatcctccagaagaaggactttgcgcagatgagcgctgcggagattgccgaggcgctgcgtgccgtcgagcggatgcggctgccgcaggccgagcttctaacgcgccggcaccggcccgatcggcgcgggcttcgcctcgacctgcgccgtacgctgcgcgcatcgctccgcaccggtggcgatatcatcgacatccatcgcctcgggcggatcgagaagccggcgccgatcgtcgcgctgctcgacatctcgggctcgatgagcgagtacacccgcctgttcctgcacttcctccacgccatcacggacgcgcgcaagcgcgtctcggtgttcctgttcggcacccgcctcaccaatgtcagtcgcgcgctgcgccagcgcgatcccgacgaggcgctggcgagctgctcggcctcggtcgaggattgggccggcggcacccgcatctcggcctcgctgcacaacttcaataaattgtgggcgcggagggtgctgagccagggcgccatcgtgctcctgatctccgacgggctggaacgggaggccgattccaagctggccttcgagatggatcggctgcaccggtcctgccgaaggctgatctggctcaatccgctgttgcggttcgggggcttcgaggccaaggcgcagggcatcaaaatgatgctgccccacgttgacgaattccgccccgtgcataatttgagttcgatccaggagctgatcacgacgctctcccagccgctgccgccgcatcaccgcagcctgatccgctccgcagcttga

SEQ ID NO: 3227 - DNA, 324 bp, BradyrhizobiumColbertium
atgctcgatcgcgacgaggacattctgaaggcggcggaggattggcagaaggccggccgtggcgtcgcgctcgccaccgtcgtggagacctggggttcggcgccgcgcccggcgggctcgagcctcgtcatcaacgacgaaggcacattcctgggctcggtctccggcggctgcgtcgagggcgccgtggtcaccgaggcgatggacgtgatcgagagcggcaagcccaagatgctggagttcggcgttgccgacgagaccgcctggaacgtcggtctgtcctgcggcggcaccatccgcgtcttcgtcgagaaggtcggttag

SEQ ID NO: 3228 - DNA, 702 bp, BradyrhizobiumColbertium
gtgaagctcgagatcctgcacgaactcaatgccgagcgcgccgcgcgccggccggtgatcctggtgactgacaccgacagcggcgagcaacgcctggtgaaggccagggattttgcgaaagatcctctgcgcgccgagctcgaaaagcagcttcgcatgggcaagagcgccagtgtcgaggccgggggcaagaagctgtttctcaacgtctacgcgccgacggccaagctcgtcatcatcggtgcggtccacatcagccaggcgctggcgccgctcgcgcgctccctcggctatgacgtcactgtggttgatccgcgcacggcctttgccagccccgagcgttttcccgacatcccgctgatcgcggaatggcccgacacggcgctgccgccgctcaatgtcgatgcctacaccgcattcgtcgcggtgacgcacgatcccaagatcgacgatcccgcgctgttgcatgcctttgaacgcaactgcttctacatcggcgcgctcggctcgcgaaagacgcatgccaaacgcgccgaccggctgcgggcgcagggcgccaaggaaagcgacatcgcacgcatccacgcgcccatcgggcttgcgatcggggcagtctctccctccgagatcgcggtgtcgatcatggccgagatcacggcggtgcttcgtctgcctcccaaagaaaaagaagaagcggcatga

SEQ ID NO: 3229 - DNA, 1605 bp, BradyrhizobiumColbertium
atgaagttcggaccggcgagccccagggatgcgatcggaggggtgaccgtccacaccctgcgtcagggaccgctggttctgaagaaaggtacgacgatcggaccggcggaggccgaggcgctggagcgcgccagcatcaaggacattgtcgtggtgcggatggaggagggcgacgtctccgaggacattgcagccgccagcatcgcgctcgccattggcggcgagggcatccatgtcgaacgcgccttcaccggccgcgccaatctgtttgctgcgcgcccgggcgtgctggtgatcgaccgcgccgcggtcgatcgtatcaataacatcgacgaggccatcaccttcgcgacgctcaccccgttcaagccggtggtcgagggcgagatggtcggcaccgtcaagatcatccctttcggcgtcgagggacgtttgcgcgatgctgccgtgcaggccgccggcaaggacgtgctgaaggtcgcgccctacgtgatcaagcgcgtcggtgtggtctcgacgctgctgcccggcctctcctccaaggtgatcgacaagacgttgcgcgtcaccgccgagcgccttgctccagccggcgccggcatcatcgccgagcggcgggtcccgcacgaggagcaggcgctgtcggccgcgatcaaggaattgctcggccttggtgccgagctcgtcatcgtgttcggcgcctccgccattgccgatcgccgcgacgttatcccggcggccgtcaccggcatcggcggcgagatcgagcatttcggcatgccggtcgatcccggcaacctcttgctgatcgcccgtgctggcgaggtgcccgtgctgggcgcgccgggttgcgcgcgctcgccggtcgagaacgggtttgactgggtcttgatgcggctgctcgccggcatcaaggtgacgcggtccgagctgatgggcatgggcgtcggcggcctcctgatggagatcgtgacgcggccgcagccgcgcgccaagccggagaccgaaggcaatagccaggtcgcggccatcgtgcttgccgcggggcgctcgacccggatgggcgggccgaacaagctgctcgccgaactcgacggcaagaagctggtgcgcctcgcgaccgagcaggcgctggcctccaaggcctccgaggtgatcgtcgtcaccggtcatcaggccgagctggtcgagcaggcgctgcaaggcctgaaggtgaagttcgtccgcaatccggagttcgccggtggcatcgccagttcggtcaaggcgggcatggcggccgtgcccgaggcgtgcgacggcgctgtcgtgtgtctcggcgacatgccgttgatcgacgccgggctgatcgaccgtctcatcgacagctttgcccccgactgcggcaatctcatcgtcgtaccggtcagcgagggccgccgcggcaaccccgtgctgtggtcgcgccgcttcttcaaggagttgatgacgctcgacggcgacgtcggcgcgcgtcatctgatcgccaagcacaccgaggcggtcgccgaagtgcccgtcgacggcgaaagtgccttcctcgacatcgacacgccgcaggcgctggaggcggcaagacggggatga

SEQ ID NO: 3230 - DNA, 390 bp, BradyrhizobiumColbertium
atggcttcgaatgccgtcgcgcgccgtttcgcgatgttttgcgttgtcttgtctgttgccgttacgggcgcccgctacattactgaagcccacgccgccggcgcatttgcagtcggcaaatgcggcgcctatggccaagcgtatgattacgacgccgagcatgaggcgcgcgccgcggcgcagaagcagtgcaagggcgattgcacgaccgtaacgatgaagcgcgcctgcgccgcaatgtcggtcgatctcaccaatccctgcggcgcctatggctatgccgtcaagccgaagatttcggcctcgctcaatgccgccacgcgcgaatgctacaagtatggtggcaaggaatgcgtgatccgcgcctgggcctgcgacgccaagggttga

SEQ ID NO: 3231 - DNA, 411 bp, BradyrhizobiumColbertium
atgcagttcgacaccaagatcgccgtggtgatccgcaccgatcttcaagcctggcagaagctcaacgtcgcgtcctttctcaccagcggcattgccgcagcctttcccgaatgcattggcgaggcctatgaagacgcctcgggtaccaagtatcacgcactgatcggccagccgatcctgatctacggcgccgacggggccgcattgtcgcgcgcgctggaccgcgcgctcacccgcaatgtcaagccggcggtctacaccgaggacatgttcaggaccacgcacgatgccgccaatcgcgaggcggtcagggccgtcgcacgcgccgacctcaatctcgtcggcattgcgatgcgcgccgaacggaaggtgatcgacaagatcgtcgatggcctcaagttccatagctga

SEQ ID NO: 3232 - DNA, 1026 bp, BradyrhizobiumColbertium
atgccgaccatgaaagctgcagtcgtcagacaattcggcaagccgctggtgatcgaggatgtgccggtgccgcagcccggtcccggcgaggtcctggtgaaggtcaaggcctgcggcgtctgtcacaccgatctgcatgccgcctccggggactggccggtgaagccggttccacccttcattcccggccatgaggcggcgggcatcgtcgccgcgatcgggcccggtgtgaagaatctgaaggtcggcgatgccgtcggggtcgcctggctgcacgacgcctgcatgtcgtgcgagtattgcgagaccggctgggagacgctgtgcgagcaccagcacaacaccggctacagcgtgaacggcggtttcgccgaatatgtcatcgcttcggcggccttcgcggccaagctgccggcaaccgtcgattttgccgccatcgcgccgatcctgtgcgccggcgtcaccacctacaagggactgaaggagaccgaggcgaagcccggcgagtgggtggtgatctcgggcgtcggcgggctaggccatgtcgcggttcaatacgccaaggcgatgggtctcaaggttgcggccgtcgatatcgccgaggacaagctcgacctggcccgtgagaccggtgccgatcttgcggtgaacgcgctcgccgccgatgcggtggacaaggtgctggaagcgaccggaggcggggcgcatggtgtgctggtgactgcggtctccaccccggcgttcgcccaggcgctgaagatggtgcgccgcaaggggaccgtcagcctcgtcgggctgccgccgggcgaatttccgactccgattttcgacgtcgtgctcaagcgcatcactgtgcgcggctcgatcgtcggaaccaggcgcgacctcgacgaggccattgctttcgccgccgacggcaaggtcaaggccgaggtcgccaaggtgccgctcgcgcagatcaatgaggtcttcgaccggatgaaggccggcaagatcgacggccgcatggtgctcgacttcgcctag

SEQ ID NO: 3233 - DNA, 1281 bp, BradyrhizobiumColbertium
atggcccggacaacgaagatcgtctttctcggcgccagcagcgcatccttcgggatgagcatgttccgggacctgttttcgacccgcgatctcgccggttcgacactggtcctggtcggacgaaacgtcgaccggcttggccggtcgacgcggcttgccaaactgctcaacgagaaatccggcgccggctatgtcgtcgaggctacgacggactggcgcgcggcgttggacggcgccgagttcgtcgtgcattccaccgccatcgatcgcaatcggttgtggcggctcgatttcgagattccgcgcaggttcggcatccgtcatacgctgggtgagaacggagggcccggcggcttgttcttcacgctgcgcaccttgccggccgtcttcgacttcgtgcgcgagatggagctccgttgcccacgcgcgacgttcatcaatttctccaatccggaaagccgaatcatcctggcgctcggccggtacagcggaatccgcagcgtcggcctgtgccacggaatattccttgcccgcgacaacgtcgcgcgaattctggggatgccggagagtcgcgtggacgtgtggggtgcaggtctcaaccatttccagtgcctgaccgaaattcgtgaccgcgagacgggcgcggacctctatccactgctgcgcgaaaaggagcgggatttcgatcccgccttctcaccgctgacgcgcaaattgttgcacgcgttcggctactggctcggctgcggagacagtcacgtgggcgagtatctttcgttcggctgggaggccggcgagggcggctataatttcgactgggacgagagcgagcgcgcgaaactgacgcggctgatcgacgacgtgctcgcaggtcgggccgagatgccggactggtggtcgatgccctcgggcgagcgagcgatcggcatcatcgccgccattgtccataaccgcaagcaactcgtcgaatccgcggtcgttcacaatcgacaggtgatcccgaacctgccggccgatgccgccgtggaggtgccggtggaagtagatgctgccggcatccatcctgtctcgcttggggcgctgcccgacgccgtggccaagctgatgacgatccaggttcaggttcagcagatggcggtggaggcggccatgcacgcttcgaaggagatggcgctgcaggccttgctgctcgaccccgtcgtccattccgagaaggccgcgcgaggcctgctcgaggagttgtgggagatcaaccggccctacatccggccatgcatctga

SEQ ID NO: 3234 - DNA, 414 bp, BradyrhizobiumColbertium
atggaaaagtcctataccggcggctgcgcctgcggcgcgatccgctattcgatcctcggggagcccctgttcagcaatcactgccagtgccgggactgccagcgggaaagtggcagcgggcatggctcctacgcgaccttcgcgcgcgccggcgtcacggtgaccggtgaagcgacgcactgggacatggtcgcagacagcggaaatgtgaagacgcgcggcttctgcgcaaaatgcggcgtgcccgtctacatgacctttgcggcacagcccgatgtcttcacgatccgggcggcaagcctcgacgaacccgcccgctacaagccgcaggcggtcaccttcgccgcgcgcggtcacgactgggatcgccttggccctggcctggtgaaattcgaaggcatgccgccagcgtaa

SEQ ID NO: 3235 - DNA, 462 bp, BradyrhizobiumColbertium
gtgagtactgccgcgttgaaagccgaaacaaaggacatcgtcatcgacgatgtgttccctcacaccgccgagacgatctggagggcgttgaccagcgcccagctgatcgcgcgctggctgatgcagccgaccggctttgaagccgtcgaaggcaactccttcacattccagaccactccgggcggcaattgggacggcgtgatccattgccgcgttctcgaggtcgtgccgaaccgccgcctcgtctactcttggaagggcggcgacgaacgcaacaccggctatggcgcaccgctcgacaccgtcgtgacgtggtccctctccccggtcgaagccggcacgcggatccgcctggtccatgcaggcttcgtcctgcccaggaacgagtcggcctacacggtcatgagcggcggctggaagaaggtggtccgcaagctcgacgagatcagcggggaagagtga

SEQ ID NO: 3236 - DNA, 336 bp, BradyrhizobiumColbertium
atgattgaagccgcccaaaaccccgtcacaaccgtgatgcgcgctcttgccgatccgacgcgccgcgccgttttcgagcgggtgttcgcgagcaaggagatcagcgtcgcagagctgacacgtggcagcggcgtaacccagggtgcgatctcgcagcacctgaagtcgctcaagcaggccggtctcgtcaccgaacgggccgagggccgcaacgtctactaccgcgccgcgccgcaaggactcgagcctctggtcaactggatggaccattacggcgtgttctggcgcgagcgcttccagaacctgcgtgatttcttgaaggagatcgatccgtga

SEQ ID NO: 3237 - DNA, 549 bp, BradyrhizobiumColbertium
atggacgaattcatcgcgcgcgggtttgccgcgacgcggcttgacgacattgccaagcgcgccggcgtcgcaaagggcacgatttatctgcacttcaaggacaaggaatcgatgttcgaggagctggtgcgcaccgtgatcgtgccggtggtcacgcgcctcacgacgctgccgccgcccgccggaacggtgcgtgaagtcatcgagacgtttgccggcaatttcctgaaggaggtgatcgggacgcgtcggggcgatctggtgcgtctgatcgtggcggaggggccgcgctttccctccgtggccgacttctactatcgcgaggtcgtctcgcgcgggatcgccgccatgcgcgcactgatcgagctcggcattgcccgcggcgagatccgtcagaaggatctcgcgcgctatccgcagatcctggttgcgcccgcaatgatcgcggtgatctggcagagcctgtttgcgcggcatgcgccgctcgatgcgcaggagatgctgcgcgtccatctcgatttgatttttggcgaacggaggacgacatga

SEQ ID NO: 3238 - DNA, 804 bp, BradyrhizobiumColbertium
atgaggtcgtcgcaagcagttttgaggtttgcattgacgcttgtggtcgcaaccgctcttgcggcctgcaaggagaagcgcgatcccggcttccagggctgggtcgaggccgacatgattttcgtcagtccggacgaagcgggtcggatcaccaggctcaacgtccgcgagggtgacgaggtcaaggtcggcgatcccctctattccgtcgatgacgatctccagcgcgccgatctcaatcagaacaaggcgacgctggcgaacgcgcagcagacctatgaccgggcggcttcgctgagcaagaccggctcgggcacacaggccaacctcgattccgccgtgtccgccttgcgcatcgccgaagcgcgagtagcgacctcggagacgcggatggcgaggcgcaagggctttgcgccggttgccggcaccatccagcagatctattttcgcgagggcgagatggtggcggcgcagcggccggtgctgtcgatcatgccgcccggcaacatgaagctgcgcttcttcgtgccggagaccgaattgccgaagctggcgatcggcgacacggtgcgcatctcctgcgacaattgcgcggccgaccttaccgcaaagatctatttcatcgcgacctcggccgaatacaccccgcccgtcatctatagcctcgatgagcgcaacaagctggtctatctgatccaggcgcggccctcgcggccggatgccctgcgggtcggacagccgatcgatgtctatctcaatcccaagaattccgagctcaagacaccggtggcggacagacgatga

SEQ ID NO: 3239 - DNA, 933 bp, BradyrhizobiumColbertium
atgagcagcggcaacgacatcgcgatcgacgtcaagggcctgacgaagtcgttcggcggccgcgaggtcgtgcacgacctgtcgatgcaggtgaagcgcggctcgatctacggctttctcgggccgaacggctcgggcaagaccacgaccatccgcatcctgtgcgggctgctcacgcccgacagcggcgagggcacctgcctcgggtatgacatccgccgcgatgccgagaagatcaagcgccgcgtcggctacatgacccagcgcttcagcctctaccaggatctctcggtgcgcgagaacctcgagttcgtggcgcggctctatggcgtcacggacgcgcgcggcgctgcgcgcgacatgatcaagcggctcgggctcaccgggcgagaagagcagcttgcgggcgaactctcgggcgggtggaagcagcggctggcgctgggggcatgcacgctgcccaatccgcaacttttgctgctcgacgaaccgactgccggcgtcgatcccaaggcgcggcgtgatttctggaacgagatccacgcactcgcagccgaaggcctcaccgtgctggtctcgacccactacatggacgaggccgagcgctgtcacgagatcgcctacatcgcctacggctatctgctggcgcacggcacggtggaggaggtgatcgcgcaatctgcgctggcgacctacacggtcacgggcgaagcgctgaacgagcttgcggcggcgctcacgggcaagcccgggatcgacatggtggcgccgttcggcacctcgctgcacgtgtcggggcgcgacatcgcggcgctcgaagacagcatcgcgccttggcgcgagagggggggattgcgatggcagaagtcgcaaccgtcactcgaggacgtcttcatcgagctgatggggcgttccaaggacaacttccaatga

SEQ ID NO: 3240 - DNA, 1164 bp, BradyrhizobiumColbertium
atgagcggcgtcgatgcccctgattcagcccgcgcaatgcgcgagcgcttcggctttctgcggcgctcctacgcgatgttggtcaaggagttcatccagctcaagcgtgatcgcgtctccttcgcgatgatcgtgatgctgccggtgatgcagctcatgctgttcggctacgcgatcaacacgacgccgcgcaacttgccgagcgcggtgctgctccaggaggactccgatcttgcccgctcgatcctgaaggcgctggagaacaccgcctatttccgcttcctctatgaagtgcaccacgtcgatgatttcgacaatctcctgaaatccggcaaggtgctgttcggtgtcgagatcccgcgcggcttcgagcgggcggtacggcgcggcgacaagccggcactgctggtggcggctgacgccaccgatccggtcgcggcgagcgcggcgatcggctcgctgggtatggtggtgcagacggcgctcaagcatgatctctatatcggcgatcccccggagatgccgttcgagatccgcgcgcacgcccgctacaacccggccgcggcctccagcctgaacattgtgcccggcctcgtcggcaccattctcaccatgaccatgctgatcttcaccgcactgtcggtcacgcgcgaggtcgagcgcggcaccatggagagcctgttggctatgccgatcaagccggtcgaagtcatgttcggcaagatcgtgccttacgtgctggtcggtttccttcaagcgttcctcattatcggcatcggcgtcggtctgttcggggtgcccgtgctcggcagtctcttcctgctggcgctgctctcgacgttgttcatcaccaccaatctgtcgatcggctataccatctcgaccgtggtgcagaaccagctccaggccatgcagatgtccatgatgttcttcctgccgagcatcctgctctcaggcttcatgtttccgttcgccggcatgcccgcctgggcgcaatatctgggcgaatgcctgccactgacccactatctgcggatcgtccgcgccatcatgctcaagggtgcgagcatggagaatctgcgcttcgacacgctggcgctggcggccctgatgctgctggccatgaccatcgccgtgacgcgcttccgccgcacgctcgattga

SEQ ID NO: 3241 - DNA, 1311 bp, BradyrhizobiumColbertium
gtgatggtcaggtttgcaagcaggaaggcacgacagcatgccgccttgtcggcagatttcgaacgcgagctgacgcgggaggtgctgcgtaccgagctgctgcgggtaagggcactaatcctcacgggttgcgtcatgatgctattcctgaccgcgatctatctgatcgaccctgctgtggtgaaccgcgtctggcgcgggacggaaggactcgtccaggtctatggccttctcgtcggcttcattctgttcgaggtctgggtccacacgcagatcaggaagaacctgcggctcgatcgcgatctgccggtagtccggcgctatatcggtacgctgatcgagacgtcgctgccgacggtaatcctcatcctgcaaatccggaccataggcgtggcccaggcgctcggctttgccgtgccgctgatgtatttcatattcgtcatcctctcgacgctgcggctcgatttctggctgtccacgttcaccggattcgtggccggagccggacttctggccatcggcctgtattacaacgcggagagcgaggccggcgaaccgctcgtctacttccacgccgtgcgcagcactatcatcctgatctgcggcgtgctggccggcgccgtcggcgcgcagctccggcggcaattcgccgccagcatcgctgcggcgaccgcccgggaccgtgtgaccaatctgtttggccagcacgtctccccgcaggtggtggagcggctgatggcggcgggaacgagcgcaaccggtgatctccgccgcgtcgctgtgatgttcgtggattttcgcggcttcactgccggcgcgcggtcccgcacgccgcaggaggtggtcgaccggctcgacggcgccttcgccgtactggtcgacattctcgatcgccacggcggcatcgtgaacaagtttctcggtgacggcttcctcgcgctgttcggcgcgccgctggaagcgtccgacgccgcgcagcgcgcggtcgccgcgggccgcgagatgctgaccgcgatggatcgcatcaacgcccagagcagctggcggctgcgcatcggcatcggcatccatttcggcgaagtcgtcgcgggcaacatcggctccccccggcgcaaggaatacaccgtcatcggcgacaccgtgaacttcgcctcgcgcctggaggcgctgaacaaggagttcggttcgcagctcctgatctccgcctccgtgcgtgaggcgctgggcgatgatggcagcgatgccgtcgcgctcggcgaagtcgaggtgcgcggctatgagcggccggtggccgtgtttcagctgggatag

SEQ ID NO: 3242 - DNA, 165 bp, BradyrhizobiumColbertium
atgcaagtcgcggccgcaaccggccgcacgggcgacagtctacaagccggcgacgtcggccgtcatgccccaaaattcggagcaatcggagcaatcggagcaaccgcgcaagggagagtgagacgccgtcaaccggcgatatccaaagcgagctatcccagctga

SEQ ID NO: 3243 - DNA, 915 bp, BradyrhizobiumColbertium
atgctgcgccgctacgtcaccgtcgacgtgttcaccgaccgcgccttcggcggcaaccagctcgccgttgtgctcgatgctggcgggctcacgaccgggcagatgcaggcgatcgccaccgaattcaactattccgagaccaccttcgtactgccgccgcgcgacagggccaatgatgccgaggtgcgcatcttcaccccggtccgcgagctgcccttcgcgggccatcccaatgtcggcaccgccttcgtgctggcgacgatcgccagggagccgaagccgcgcctgctgttcgaggagagggccggtgtggtcccggtcgacatcgtgcgggagcagggcagggtcatcagcaccgagcttaccgcgccgcagccgctggcaaggctcgcgcagctgtctgcagccgacgtcgccgcctgcatttccctgacggcggatgacatcaaaaccgatcatcatgcgccgcaggtcgtcggcgtcggaacgccgttcgtggtcgcggaggtgcgatcgcgcgaagccgtgcgcagggccaagcccgatgccgcagcgtttggccggattttgccgagagacggcgcattctcggtctacttctacacgcgcgatgtaccggcagcggaggcgccctgcgagcggcaggcgcggatgttctttcccggcgcaagcggcctgatcgaagaccccgccaccggcagcgcgacggtcgcagccgccgcgctgttcgccgatctcgattcgacgcgcgacggcgaattcaagcttacgatcggccagggctttgacatgggccgtccgagcatcctcctcacccgcgtgcgcaagcaggacggcaagatcgtctccgctcatgtcggcggcagctgcgtgcagatgatggaggggacgttcaagctggcgggggaagggtag

SEQ ID NO: 3244 - DNA, 462 bp, BradyrhizobiumColbertium
atggcaaaggcaaagaagctgttcacgatcggctatgagcagacgccgccgaaggcggtgctggacgagctggaacatgccggcgtcaagctcgtggtcgacgtgcgcgcggtgacgtcgtcgcgccggccgggtttttcgaagaagcagctttcggcaggtctcgatgagcgcggcatcgcctacgtccatctcgccgcgctcggcacgccaaaagatgggcgcctcgcagcacgcagcggtcactacgacgtgctggagaagatctattcaaagcacctgaaaacgccgcaggcacgggaagagatggacgagctctcggccctggtgaagaaggccggccctgtgtgcctgctctgctacgagcgcgaccacacccattgtcaccgccagatgatcgcggagatgatcgaggagcgcgatggggtgacggtgaagaatctggtggggcggcagctgtag

SEQ ID NO: 3245 - DNA, 822 bp, BradyrhizobiumColbertium
gtggccaaagcaaaaaccgcgtcaaaaaaatccggcaacatcttcatcggtatcggcgggtggaccttcgagccctggcgcggcgtattctatccggagaagctcgcgcaggcgaaggagctgtcctacgccgcctcgaagctgacgtcgatcgagatcaacggcacctattatggctcgcagaagccggagagctttcgcaaatgggccagcgaagtccctgatggcttcgtgttctcggtgaagggcccgcgcttcgccaccaaccgccgcgtgctggccgaggccggcgattccatcaagcggttctacgattccggcgtgctggagctcggagatcatctcgggcccgtgctgtggcagttcgcgccgaccaagaagttcgacgccggcgatttcggcaagttcctggagctcttgccgcgcaagctcgacggacgcgccctgcgccatgtcgtggaagtgcgccacgacagtttctgcacacctgatttcgttgcgctgatccgcgagttcgagactccagtggtgttcgctgagcacggcaaatacccggcgatcgccgacgttgccggcgatttcgtctacgcaaggctccagaagggcagcgacgagatcaagacctgctacccgccgaagcagctggacgcctgggctgagcgccttcaggcctgggcgtcaggcggtgaaccggacgacctgccgaaagttgacaaggccaggccgaaaaaggagccgcgcgacgtgttcgcctacgtcatccacgagggaaaggtgcgcgcgccccacggggccatggagctgatcgcacgcgtgagctga

SEQ ID NO: 3246 - DNA, 375 bp, BradyrhizobiumColbertium
atgctgttggtgggagccgcgctcgtcatgatgacatctgctgccatgacccgttccgccttggcggatgacgacgatgccaagagtatgcagaagctcgcccagcagagccgcgacgactactggcattgtctggcgcgggaatattcgcgcgaatccaaccagggcctgtcggagcgggatttcggccgctcggttgcgggcgcctgtccctcggagcggcaatattaccgggtgacgctgctcgactatctcaccacgcaatatccgagcatcgatgccggcgcccatctcgccaccgcgaacagggcggtcgaggcagcgcagaaggacatcgtgacggcctatgtaaagcatcgggcaccagcgaaatag

SEQ ID NO: 3247 - DNA, 204 bp, BradyrhizobiumColbertium
atgtcgtctgagtcgctggggggcattctgggcgcgatcgtcgcggtgatcgtgcttgcggttgccgtcgtgttcgggccgattggccagtacggcaagccgcccaagccggcgaaggtcgagccggcccccgcggccgaaccggcggcccccgctgtgcccgcgccgcgcgggccgatcatccgggaagtgcctaaccaatag

SEQ ID NO: 3248 - DNA, 1134 bp, BradyrhizobiumColbertium
atgaacgaagcgatcagacccggcgccgacatcccgccgcaggctcaagagggcccggaactgtcggtcatcgtcccgaccttcaacgagcgcgacaacgtcacggtgctgtatcggcgactggaggcgacgctcgccaacattgcctgggaagtcgtgttcgtcgacgacaattcgcccgacggcacctgggacgtggtgcgcgcgctgtcgcagcgcgacagccgcgtgcgctgtgtccgccgcatcggccgccgcggcctgtccggggcctgcatcgagggcatcctcgcctcgagcgctccttacgtggccgtcatcgatgccgacctccagcacgacgagacgcagctgccgaagatgctgttgctgcttgcaagcgatcaggccgacctcgtggtcggcagccgctacatcgagggctacaagagcgagggcttcaacaagcagcgcgccggcgccagcgcgcttgcgaccgagttcgcaagaaagatgctgcgggtcgagatagccgatcccatgagcggtttcttcatgatgcgccgcgatcgcttcgagcagatcgcacccaagctgtcggtgcacggcttcaagatcctgctcgatgtcgtcgcgaccgcacacggcaccctgcgcacggtcgagattccctatacgttcggcgcccgccagcatggcgagagcaagctcgattccatggtcgcgctcgatttcctcggtctcgttctcgccaagctgaccaacgacatcgtctcgctgcgcttcatcctgttcgcgatggtgggcggtatcggcctcgtggttcacctgaccacgctgttcatcgcgctccgcctgttcaacgcgccgttcgcggaggcgcaagccgccggcgccatcgtcgccatgaccagcaacttcatcctcaacaacttcctcacctaccgcgaccagcgcctgaagggttttgcgctgctgcgcggcctcatcgccttctacatcgtgtgcagcgtcggcctgctcgccaatgtcggcgtcgccttctcggtgtacgaccaggagccgatctggtggctggccggcatggccggcgcgctgatgggcgtggtgtggaactacgcgatgtccggactgttcgtctggcgcaagaaatag

SEQ ID NO: 3249 - DNA, 1506 bp, BradyrhizobiumColbertium
gtgatgggcgaggctgacgcgcggatcgtccgcaacaccgcgctgctgattcttgccctcgtcgggttgcggctggttgcggctgcgttcacgcccatcaccttcgacgaagcctattactggatgtggtcgaagcatctggcgggcgtttattacgaccatccgccgatggtcgcctatgtgatccgcgccggcaccatgatcgcgggcgataccgagctcggcgttcgcctcgtctcgatcctcctcgcgctgccgatgagctatgcggtctatcgctccgcagcaatcctgttcggcggcgtgcgcgtggctgcgaccagcgccatcctgctcaatgtgacgctgctggcctcggtcggaacgctgatcgtcacgcccgatgcgccgctgctggtcgcttccagcttcgtgctgttcttcctcgcgaaggtgctggagaccggccggggtgcctggtggcttgccgtcggcgcggccgtcggcgcggcgctgctgtcgaaatacacggcgatgttctttgggccggcgatcctgatctggctcgcggtcgtaccgaagctcaggcgctggttcctttcgccgtggccttatctcggcggcctcgctgccctggcgctgttttcgccggtgctgctctggaacgcggaccatcaatgggtttcattcgcaaagcagctcggccgcgccaggatcgaggacttccgccccgtattcattgccgagttgatcccgacccagatcgcgttcgcaacgccgctggctttcattctcggcgccatgggcctgcacgcgctgacgtggcagcgcaccggcgcgctggcctcgcgcgtgctgatcgggacgatgttctggaccatcgtcgcctatttcgtctggcattcgctgcatgcccgcgtcgaggccaattggttcgcacccgtctatccgcccttcgtcatcgcggcggcggccgcagccaatctcgcgcaatggaagccgcgccagcggcgtctcgtcgccttctgccggcgctgggctgcacccgtgggcatcgtgatgtttgcagcgttgatcgttcaggccaatacaggctggctgtcgggctatcgccgcgatgccacggtgcgcagcgtcggtgtcggctggcgcgaactcgccgcagagatcgaagcagtgcgcgtgcgcagcggtgcgacctgcgtgctcgcgcaggactacggcactacaggctggctcgcgttctatctcccgcccggcacgtgcgtcgcgcagcagacccagcgcatccgctgggtcaacatgcccgagcccgaccccagcctgctggccggcaagctgctctatgtcgacgaactgcgcccggacgggcatcccgccttgaatgatctctttgcgcaggtcacgcggatcgcgcaattgcagcgcaagcgcgggccgctcgtggtcgagacctacggtatcgatctgctcgagggcgccaagggcgacgtgctggaccgctcgcccccgccggaagcgcggtag

SEQ ID NO: 3250 - DNA, 1905 bp, BradyrhizobiumColbertium
ttgcaagacgaccgcatgcgcaggcgacgcgttcagatcctggtggcactcgtcctcaccgcgctgtggggcgcgggcatctatgccgctcatgccaacggccgcctgcgctttctcgaccggctcgaggcgacgttgacggattggcggactcaggtccgcggcgtgcagcgtccgcccgacctcgtcaccatcgtcgccatcgacgacaccgtcgtgaagcgcggcggcagctatccgctgccgcgtgccgaccttgcccgcgtcgtcgacaccatcgtgcagttcaagccgaaggtgattggaatcgatctcctgctcgtcgaccgcagcgctgcgatcggcgatgccacgctggccaacacgctcgccaccggccccatggtgctcgccgccgcggcgatctttccctccgccagcgaaacagtggcgcccgacagcgaagggccccttgccgttctgccgcaggccgaacgcttcctgcagcccctgcccgccttcgccgatcacgccgaggtcggcatcgtcaacgtcgcgacgggacaatcggggtcgccgctgtcagtgccgatgctgttccggacccgcgacaaggtcgagttgtcgtttccattgcgcgttgccgcccgtgctctcgacgaaccgttgaccgtcgcgccggaccatctgcgaatcggtgagcgcgtggtgccgaccgacagcgatttcgcgctgccgatcacttattacggcccgcgccgcacgatccgcacggtcagtgcacaaagcatcttcgacggcacgctcgaccgcgcagcgatcgagaaccggatcgtcgtgatcggcgcctcggtggcgggcggcggcgacttctatccgacgccgttcgattcattgatgcccggcgtcgaggtggtctcgaccgcaatcacgcaactcgtcgctggcgacggcatcgtgcgcgaccgcagggtccgcatcgtcgacgcgctcactgcgattctgctgccggtgctattggtgggcctgctcgcctggcgacgcagtgcgctcgggatcatggcggcggcggcgatcatgatggcctgggccgggctcaacctgtttacgttcacgcacggcgtctggctgaacgccgcaaccacgctggccgcagcggtcccgccggttctcgtttttgccggcgtgcagctgtgggcgggaagccgccgcacgcaatatcttgctgccaagagcaggtcgcttgcgcaattccaagctccggcggtgcaggagtggctggcgcgagatccggactttctgtcgaagcccgtccggcaggacgcagcggtagtcttcctcgatctctccgggttcaccggcctgagcgagcggagtgatccggacgagctcaggaatcttctgaaggcgtttcacgccttgatcgacaggaccgcggccgattgcggcggcatgatcaccggatttctcggtgacggcgccatgatcctgttcgggctgccgcgcccgatgcccgacgacgcggcgcgcgcgctgaaatgcgcgatcgatctgcatcgcggcgtcgaacgctggatcgcctcgctgccaccgccgatcgcggggcagctcggcttcaaaatcggcgcgcattacggagagatcgtcgcctcccggctcggcgagagccatcagcacctgacggcaacaggcgacaccgtcaatgtcgcgagccggctgatggaggtagccgcccagaacgatgcgcgcctcgcgctgagcgatacgctgctggatgccgccgacttcgagggaacccccgacgggatcctgtcgggccccctgctcgcccgcatccgcggccgctcagccgtcgtgaccgtgtggttctggcgggatccggacgggccgggtcaggttgcgaccacggccgagacaatcgtctga

SEQ ID NO: 3251 - DNA, 525 bp, BradyrhizobiumColbertium
atgaaagggatcgcgcgcgcaggtcttgtcgccctggcgggttcgttcttgctgattggatctgcgactgcccagcccgcagccaatgcgggctgcacggcaacgctctcccttgccggaacgcagacctggcgctgtgacaacggcatcaccatcgttgcggaaaacggcgccaggtttgaacttaaggacgccaaccgcgacggacgtatagacgccgtcgaattgagcagcaaagccctgctggtcgacgtacccaggaagccacgcggcactcccttcaaggtgctgacgccacaggcgattgccgccgtgcgcggcacgagatgggcggtcgacgtggccgacatcaagaccgccgtgttcgtcgccgacggccgggtcggggtgacccgcaggactggcggacgcggcgtcgtgcttggacccggcgaaggcgtcgacgtcgaggcaaccggcccgctgacggtcaagacatggggccagccgcgcgtcgacgcgctcatggcaaggctcggacaataa

SEQ ID NO: 3252 - DNA, 390 bp, BradyrhizobiumColbertium
gtgcagcccgcattggctgcgggctgggcagtcgcagatccaatcagcaagaacgaacccgccagggcgacaagacctgcgcgcgcgatccctttcatgccggcctccgtttgcgtgttcggaacagctcaaaggtgggatgatactgcatcgtatcacacgaagaggccgccgaaagtgccgaggcagcagctattttcttgtgacggcggtgtccagaaccgatgcgatcaactttcggtcacgcgccggcttgccggaagccgtgcggcgcgtgatgcgcatgggccgcgatcggcggcagccgtaaggccggccgacgtggagccaccagcttcgcgcaacgctaccgaactagggtcgaggccggttcgacgatcacgaaaatga

SEQ ID NO: 3253 - DNA, 138 bp, BradyrhizobiumColbertium
ttgcgcagcgatactcgtactcattcgccttgcgtccaggacggtgtcactcagtcccccctcgaagtgccgctggtcacgatccgggaacagcatctcgcagagggtcggagcgtcattaaggcgacttttagttaa

SEQ ID NO: 3254 - DNA, 1077 bp, BradyrhizobiumColbertium
atgaccacgacgagttggcttggcgccgcggcgatcggctgcgtcgtgatgggcgccggctggaccatctacagcaacattctcggcgcgagcgtctatccgaccgtcggcagcatcggctacgacgagccggtggtcaggcgcgcgcccaaggtcgtgctgcgcgacgccggcgaggccatcaaggacgcctttgcgttgttgcccgaccgtttgcaggtcgcgacgccgatctcgcgcgagatgttcaacgagcgcttcgccgccgctgcgacccaaggcgtgccatcgaatgcggcgagcgccgcccccgcgacccaggttgccgcggccaaagatgccccgaagcagagcgtgatcgcgaaggttgcggacgcactgaagccggcagccaagggagctgacaaggctgcagacagggccaagcgcgcgccggaggcccagctgcagcttgcctcggccgacccggcccagatcgtgccggcgcccgaagccaaaccaaaatccttcgccgaccgggccaaggccgcggtgatgtcgatcaccgctccgcgccagtcgatggtggagaagctctggggcaagcgcgagccgtccggcgggctgctcgcctatgcctccgccgacgccagcattactgcgtccatcgcgccgaaggagcagaacccgatgctcggcggcgctccgccctacgagcgcgacaccgccgtttacgacatcacggccaagatggtgtatctgcccgacggcaccaggctcgaggctcattccggcctcggcgccaaccgcgacgatccgggctcccgccgcctgcgcatgcgcggcgtgacgccgccgcacatctacactctgaaaccgcgcgaggcattgttccacggcgtgccggcgttgcgactgacgccgatcggcggcgagagcgcgatctacggccgcgacggtttgctcgcccacacctacatgctggggccgaacggagattccaacggctgcgtgtcgttcaaggactattacgcattcctcgacgcctaccgcaacaagggcatccgcaagctcgcggtgctcgagcgggtggagtga

SEQ ID NO: 3255 - DNA, 594 bp, BradyrhizobiumColbertium
atgaccgctcccaagaccctgctcgaactcgccggcgccgatctcaatccgccgaaactccacgaggcctgcctcgtgctggtcgacattcagaacgaatattgcgccggtccgctggctttgcccgatgcgcagcccgcgatcgccgcggctgcgcgcctgctggcgcgggcacgggagagcggagccgcgatcttccacatcgcgcacaagggccgcgccggcggcctgttcgaccgcgagaccgcacgcggcgcaatcgttgaccggctggcgcccctcgcaagcgagcccgtgatcgagaaggcgctgccgaacgccttcgccggcaccgacctgcagacacggcttgccgcgaccggactcaagaacgtcgtgctggccggattcatgacgcatatgtgcgtctcttcgaccgcccgcgccgcgctcgacctaggcctgcgcacgacgatcgcagccgacgcctgcgccacgcgcgacctgccagacggccgaggcggaacgctggacgcccggacgatccaccaggtcgcgctcgccgagctgtcggatcgcttcgcgatcatcgcgcaagtcgacgcgctgacttga

SEQ ID NO: 3256 - DNA, 840 bp, BradyrhizobiumColbertium
atgaactgggacgatctgcgcatcatcgccgcggtcagggacgagggcacctatgccggcgccagcgcgcggctgcgcatcgacgagaccactgtcggccgccggctggcgcgcatccagcgggatctcggcgtgccgttgttcgaagccgtggatggcttgcgccggccgacgcgccattgcgaggcggtgctcgagcatgtcggcgcgatggcggcgcatgccgcggcgatcgaccggatcaaggagagccagcccggtccggtcggccggctccgcatcgcctcgaccaatgccattgccgaagagctgttggcgccgcatgcgagcgacttcctgcgcgaccatccagggttgacgctgcaattcctcaccgccagcggcaatgtcaaattctcgcgctggcaggccgatctcgccattcgcctgcgcaagccggagaagggcgacttcaccatctccaagcttggcgaggtcaggctgtatttcctcgagcccgcggaccgcagcgggatcgagccggttgcgtgcgtctatcccgacgaactcgacgcgatcccggagcagcaattcttacggtcgaaacgactgaagaacgcccgttgcatcaccgacaatgtccgcatcatccgcaccatgatccagtcgcatctggccatcggcgtgctgcccgagtacagctgcggcctgctgctcgccgaccgcagcctgcgcgccacgttgctgccgaggcgccgggacgtctggctcctggtgcagaaccacctcaagcgcgatccggcggcgcggctcaccatcgaatgggtgcggcagtgcttcagggatatttcccagggctga

SEQ ID NO: 3257 - DNA, 756 bp, BradyrhizobiumColbertium
atgactacgtgtcaggacacgatccggccgcccgcgcggcgagcggcacaatcccgggaatggagggcgatcgtcatcctgatcctgctgatcccggtgctatggtcgccgccgttcctgtttcgctacttcctgtatcagccgttcaacatcccctcgaactcgatggcgccggcgctgacggtgggcgactacgtcttcgccgcgaagcatgcctacggctacggccgctattccgtcccctttgcgccatcctggatctcgggccgagtcctcgccgccgatccggaatatggggacattgtcgtattccgctcctcgaaggataccgcgaccgacttcgtcaagcgcgtggtcgggctgcccggcgaccgcatccagatgcggcggggccggcttttcctcaacgatcgtcccgtgacgcgtgtcgcgcagaagaaggcacaggtcggcgacacgtgcggcgtggatgacgacgcgacggcgaagctctggcgcgagacgctgccgaacggcgcgtcctacgtgactctggactgcggcgacgacgacaacctggataataccagcgtcttcacggtgccggcgggccatatcttcgtgctcggcgataaccgtgacaattccaccgacagccgcatgccggggatcggattcgtcccgatggacaatctcgtcggcaaggtcacgcggatcttctggtcgctcgacgaggacggcgagccgcgcttcgagcggctgggcaaggtggagtga

SEQ ID NO: 3258 - DNA, 510 bp, BradyrhizobiumColbertium
gtgatccgcgtcggcggcgcgaccgaggtcgaggtgaaggagcgcaaggatcgcgttgatgacgcgatgcatgcgacccgcgcggcggtcgaggaaggcatcgtcccgggcggcggcgtcgccctgctccgtgcctccgagcagctcaagggcctgcgcaccaagaacgacgaccagaagaccggcgtcgagatcgtgcgcaaggcgctgtcggctccggctcgccagatcgcgatcaacgccggtgaagacggctcggtgatcgtcggcaagatcctggagaacaagacctacaattacggcttcgactcccagaccggcgaatatgccgacctcgtcaagaagggcatcatcgacccgaccaaggtggtccgcaccgcgatccagaacgctgcctcggtggccgcgctcctgatcaccacggaagccatggtcgccgagctgcccaagaagggcggcgccggtccggcgatgcctccgggcggcggcatgggcggcatggacttctga

SEQ ID NO: 3259 - DNA, 315 bp, BradyrhizobiumColbertium
atgaaattccgtccgcttcacgaccgcgtcgtggtcaagcgcatcgacgcagaagagaagaccgctggcggcatcatcattcccgacactgccaaggaaaagccctcccagggcgaagtcgtcgccgtcggcccgggtggccgcgacgagtccggcaagctgatcccgatcgacctcaaggtcggcgaccgcgtgctgttcggcaagtggtccggcaccgaggtcaagatcgacggccaggacctgctgatcatgaaggagagcgacgtgatgggcgttctcgaagtcagcgagtccaagaagaaggcggcttaa

SEQ ID NO: 3260 - DNA, 288 bp, BradyrhizobiumColbertium
atgggactgcgcgttgggggtgtttccgacgatttccggaagcagatgctgggatacggactgacgacggcacaaattctctatcggatgccggatcatccgtcgctgctccagacctatgtctggcagaactacgacatgtttccgaaatttccggcgctgaaggatttcctggcattctggcaggagaagctcgacggccctctccactcggtcacggtggcgcattccaagctgatcaagcccgccgagctgcgcgcggtggacggcgtattccggctgcattga

SEQ ID NO: 3261 - DNA, 1422 bp, BradyrhizobiumColbertium
ttgctccaagtcaagcaaattgcccgcgcctattccgattgcgcgacggccctggcgcttgcttccgattccgcgcaagctcacctggtgcagggcctatgtcttgccggacttggccgggtcgatgaagcgctcgcaagtttcgaccgagccctcgacatccagcctgaccttcagagcgccatctccagcaagatcttcacgctcgactttgcggcggacgcgactgtcgagcagcatcagcaagcgcggcaagtctggtgggagcgggtcggggcgaaaatcgcatcagaagcggcgggcccgtacgacaacagctgcgatccggatcgccgtctggtgctcggctacgtctcgtcggatttcaacgcgcattcagcggcattcattttcaagccggtcctgcaacaccacgaccgggcacggttcgagatcgtgtgctattcatgttcgtcgagggtcgacgccacgacgcgcgaattcgaaggaatggccgatcgctggcgcgacgccgcgcaatggaccgacgatcgcctcgccgctcagattcgcgccgatggcgtcgatatcctgatcgacctgtccggccacaccagaggcaaccgcctcggcgtgtttgcgcgcaagccggcgccgatccaggttcatggatggggccacggcaccggcaccggactgccgacgatcgaatatctcttctcggaccccgtcgcgattcctgtcgcggtccgccatctgtttgtggagaccgtcatcgatctgccgtgcttcgtgaccctggcgccgctgccggccgggatcgcgcgggcgggggcgccggctctctcgaacggcttcgtcacgttcggcgtgttcacccgcatcagcaagatttcggacgaggcggttgacgtctggtccaggattctcgagcgggtgccaggttcgcgcctgctgatcaaggattttgcgctggacgatcggctggtgcgcgacaacctgctggcgcggtttgcagcttgccgcctgccagccgaacgggtcgagctgctcggggccacttcgagggacgagcatctggcgtcgttcaatcgcatcgacatctgcctcgacacattcccgcagaacggcggcgtcagcacctgggaagccttgcagatgggcgtgccggtggtggcgaagctcggcaacagcctgcccggccgtgcggcgggctccatcctgaccgcgcttggcctgccggactgggtcgccgattgcgatcagacatatgccgacatcgcggcaatccgcgcatttgggatcggcgacgtttcgcagctgcgccgcgaattgccggaacggatcagagatgctgccgccggcgaccccgtctcctacgcgcgcgcggtggacgacgcctaccgcgcgatgtggaaacggtactgccgcgattgcgcctga

SEQ ID NO: 3262 - DNA, 567 bp, BradyrhizobiumColbertium
atgggcaacagcgtcggtcagcgtgcgtttcagaatgcccggcttcacaaacggcaaaagggcgtagttctgccattgctcgggcatgcgctcgagttgcacaagaagggacgcctccccgaggccagagctgcctatcgcgagctcctgcagatcgcgcctacccaattcatcgcgctgcacatgctcggcgctctcgagtctgacgcaaagaactttcagcaggctgaagccctgctgagccgggcggttgccgtggatccgcgctctgccgaagctcatatgagcttgggcatcgccctgaacgggctgaagcgtcacgatgaggcccgcgagagctatcgaaaggctctcgccttgcgacccaactacgccgcggcccttgccaatctcggcaacgcgagcgccgcgctcgatctgcaccaggacgcggtcgagagctacgacaaggcgcttgcaatcgacggaactcttgccgaagcccacaacggccgcggctctgcgctctgccgactgcgcaactatgacgaagctctcgcaagcctcgatcgcgcgctcgcgatctag

SEQ ID NO: 3263 - DNA, 528 bp, BradyrhizobiumColbertium
atggccaagcacaaggcatcgagacccgcaatgaagaccgcgttgaagaagcggagcggcgccaatgttgcggcgcgatcctcggcgcgcaaggcggtgaaggcgaagccgcgtaccgtcgctccaaagaagcccgtgcggccgaagcagcgcatcgccatcagccatcaccgcgaggaggacttcaaggccgacggcctgcgtgcctacgcgaagtaccgcgatctcggcatcgctgcggcaacgcacggcctcgcgcaggcgcatgtgatccggctgcagggcccgtgcaatcctgccgaggtgtcgaagctgcacttccacgacgtcgagttccagatggtctacgtgctgaagggctgggtgaagacctatatggacgggcagggcgagaccttgatgaaggaaggcagcgcctggacccagccgccgaagatcaagcacatgatcctggattactcggatgacgtcgaactgctggaagtgattctgccggctgagttcaagacggtggagttgaaggcgtag

SEQ ID NO: 3264 - DNA, 1251 bp, BradyrhizobiumColbertium
atgctgcggctgcaatctgcactcggcatcttcgcgttgctgctgatcgcctgggtgctgagcgaaaaccgccgggcggtatcggctcggcaggccgcgatcggcctcgtcgtgaccttcgtcgccgcaatcgtgttgttgaagctgccggtcgtggcgcatgcgtttggcgccatcaacgaggcggtcggcacgatctccgcggcctcccgcgccggctccgccttcgtgttcggctatgtcggcggcggcacccttccgttcgatctgaaggtgccgggcgcggatttcatcctggcgttccaggcgctgccgatcgtgctggtcatgagcgtgctgacgacgctcttgttctattggcgcgtccttccgccgatcgtgcgcggcatggcctggctgctcgagcggacgctgggcgtcggcggcgcggtgggactgtcaaccgccgcgaacattttcctcggcatggtcgaggcgccgctgttcgtgcggccgtatctggcacagatgacccgcagcgaattgtttctggtcatgaccggcggcatggcgggcatcgccggtaccgttctggtgctctatgcgacgctgctggcgcccctcatccccgacgccgccgcgcatttcgtcatcgcctcggtgctgggcgcgccggccgcgatcctcgtcagcctgatcatggtgcccgagacctccgacaagcgcaccggcggcgctctgcagaatcccgagatggacgtgtccggcacgatggatgcgatcgtaaagggcaccaccgccggcctcgatttgctgctcaacattgtcgccatgctgctggtgctggtggcgctggtctatctcgtcaacgccatgctcggcctgctgccgcatctcggcggtgccccgatctcgctgcagcgcctgctcggcctcgtcatggcgccggtatgctggttgatgggactgccgtgggatcaggcgattgccgcaggcagcctgatgggcactaagaccgtgctcaatgaattgatcgcctatgtcgacttctcgaagctgccgcccgaagcgctcgacccgcgctcgcgcctgatcatgctctatgcgatgtgcggcttcgccaatttcgccagcctcggcatcatgatcggcggcctgggggtgatggcgccggaacggcgcgaggagatcaacgcactgggcttgaagtcgatcgtgtcggggacgctgaccacgtgcttgatgggcgcggtggtgggagtgttggcgtag

SEQ ID NO: 3265 - DNA, 759 bp, BradyrhizobiumColbertium
atgagtgaagcgaagaagatcgcattggtgacgggcgccggcaccggtgtcggccgagcggcgtcgctggcgctgatgaacaccggcttcaccgtggtgctcgccggccgccggctcgacatgctcgaggagaccgcgaagctcggccccgcgggaaaaagcctttgcgtcaccgccgacatgaccaagccggattccatcgccgcgctgttcgacaaggtgaaggcaacctatggccgcctcgacctgctcttcaacaatgccggcaggggcgcgcccgccgtgaacttcgaggatctcagcctcgagcaatggcaggcggtcgtgaacaccaacctcaccggcccgttcctgtgcacccagcacgccttccgcatcatgaaggaccagaccccgcgcggcggccgcatcatcaacaacggctcgatctcggcgcatgcgccgcggccgttctctgccgcctatacctcgaccaagcacgccgtcacgggcctgaccaaggcctccaatctcgacggccgcatgtatgacatcgcggtcggccaggtcgacatcggcaacgccgcgacgccaatgaccgatcgcatggtcaacggccccggcgtgctgcagcccgacggtacgaccaagcacgagccgcgcatggacgccaaggcggtcggcgacgccgtggcctacatggccagcctgccgctcgatgccaacgtgctgaccatgacggtgatggcaaccaagatgccgttcgtcggacggggctga

SEQ ID NO: 3266 - DNA, 759 bp, BradyrhizobiumColbertium
atgacctattgctgcggaatcctggttcgggacggtctggtgatgatcgccgacacccgcaccaatgccggcctcgacaatgtctcgaccttccgcaagctgcacatcttctccaagccgggcgagcgcatcatggcgatcgccagtgccggcaacctcgccatcagccagtcggtgctctcgaccctgaccgagggcctggaggacccgaacacgggcgaggtcgagacgctgatgaacgcgccgaccatgttccaggccgctcagcgcatcgggcgggcgatccgggcggtgcatgcgaccgaagggccggcgctgaaatccgaagacgtctccttcgacgtctccttcctgttcggcggccagatcaagggggcacgcatgcgcctgttcatggtctacaccgccggcaatttcatcgagtgtaccaccgacacgccctacctgcagatcggcgagcacaaatacggcaagccggtgctcgatcgcgccatgcactacgatgtcgagctctacgaggcgctgaagaccggcctgatctcgatggattcgaccatgcggtcgaacctcggcgtgggccttccgatcgacgtgctggtggtgcgcaacgatgcctgcgaggccgatctcaaccaccgtatcgaggcgggcgagccttatttccacgatctgcgctcgcgctggtcggcagccctgcgcgcggcgcatcagaacattccgcgcccgccttacaagaacgacaaagaacccaagacctga

SEQ ID NO: 3267 - DNA, 408 bp, BradyrhizobiumColbertium
atggcgactgtgaaactgctttcggatgatgaactctcggccgaggcgcgcgccgttttcgacgacatccgcaaggtgcggaaatcagacttcgtcaacaatttctggcgcgcgctggcgcatgatccgaagacgctgcgacggacctgggaaagcatcaaggaggtgatggcgcctggtgcgctcgatcccaaggtcaaggagatgctctacgtcgcggtctcgatcgcgcatggctgcagctactgcatccattcgcacaccgccgcagcacgggccaagggcatgaccgaggccgaatacggcgagctgctcgccatcgtcggcatggccgccgagacgaaccggctggtcacggcgctcggcgtcccggtcgaccaggcgtttctggtcgatggcgcggattga

SEQ ID NO: 3268 - DNA, 849 bp, BradyrhizobiumColbertium
atgcgcctgcgtatccagcacaccacgacctatcgctacgagccgccggcgaccagcgtgatccagatcctgcgcatgacgccgggcagccacgacgggcaatacgtcgcggaatggcagatcgacgtctccacggacaccaagctcgacacgcacgaggacgcgttcggcaatgtcacccatgtgctgtcctgcgggcccgtcggcgacatccggatcaccgccgaaggactggtcgagacccacgacaccggcggcgtcctgcgcggcacggacgagcgtttcccggccggcatgttcctgcgctccactgacctcacctgcgtcaatccggcgatgacggcggtcgcgcgccagctgcggagcgaggccgagagcgacacgctcggcttcctgcacacgctcatgacgcagattgccgatcacatgacattcgacgaggacccgaccaacagcggcacgtccgccgcggacgcgttcgcgctcaagcgcggcgtctgccaggactacgcgcacatcttcattgcttgcgctcgcgccggcggcgtgccggcgcgcttcgtctccgggcatttcttgcgagcagacgacgcggtgcatcaggaagctggccatgcctgggcggaggcttacgtgcccgatctcggctgggtcggtttcgatcccgccaacagcatctgcgccaccgatgcccatgtccgcgtcgcgatcgggctcgactatctcggcgcggccccggtgcgcggcacgcgctatggcggcggcacggaaacgctggcggtgaccgtgaaggtcgagcaggccggccgcggcggccagtcgcaatcgcagtcgcagcgacagagctag

SEQ ID NO: 3269 - DNA, 945 bp, BradyrhizobiumColbertium
atgctgtcgcgtaccgccgaaaacctctattggctcgcccgctacgtcgaacgggccgaatatctggcgcgcaccatcgatgcgacgctgcgcgtcaccgcgcttcccgccgcctatatcggcaagaccaacgaatgggactcggcgctgctcaccgccggcgtcgccgccggcttctatcaagcctatgaggaagccaacgagcacaacgtcgtcgagtatctctcgttctcgccgaacaacccgtcctcgatcaggaactgcatcgaagcggcgcgactgaactcgcgctcggtgcgcaccgcactcaccagcgagatgtgggacaccatcaactcggcctggatcgagctccaggcagtgtggagcaagggcacctcgacccgcgaggatctcgccaagttcctccgcttcgtgcaggagacctcgctgcgattcgacggctcggcctaccggaccatgctgcgcaacgatgcctactggttctcgcggatgggcgtgcacctggagcgcgccgacaacaccgcccgcattctcgacgtgaagtatcacgtgctattgcccgaagaggagcacgtcggcggcccgctcgacttctatcaatggagctcgatcctgcgctcggtctcggcgctgacggcctatcactgggtctatcgcgagactctgaagccgtggctgatcgcggacctgctcatcctcaacgacacgctgccgcgctcgctggcgagctgctacggcaacctcgtgcgcaacctcgaccagatcggcgtcgcctatggccgccagggccccgcccagcgccacgcccgcggcatccgcaaccggctggaacacagcaacatgaacgacattttccagcacggcgtgcatgaattcattcaggaattcatcacggacaattcaaggctgggcgaaatcatcacgaagcagtatttgatctga

SEQ ID NO: 3270 - DNA, 1419 bp, BradyrhizobiumColbertium
atggcagccgcgtttgacgaaatgaatattcccggcggggaccttcgccccgcctatcaggagctggcgcgctggctcaaggagacgcctcccgaggcgctcgaatatcgccgccaggaggccgaactcctgttccgccgaatcggcattaccttcgcggtctacggcgattccgaatcgaccgagcgcctgatccccttcgacgtgatcccccggatcatgtccggcaaggaatgggcgctgctcgagaagggcctgaagcagcgcgtccgcgcgctcaacatgttcctgcgcgacatctatcacggccgcgagatcctccgcgccgagatcgtgcccgacgatctgatctttcagaacccggtgttccggcccgagatgaacggccagcaggtgccgcacgacgtctacgtgcacatcgccggcatcgacatcgtccgggtcgacgccgaagacttcatcgtgctggaggacaacgcccgcacgccttccggcgtctcctacatgctggaaaaccgcgagatcatgatgcggctgtttccggatctgttcgcccgccacaaggtggcgccggtcgagcgctatccggacgaattgctcgccgcgctgcgctcggtcgcgccgcaaggcgcatccggcgagccgaccgtcgccctgcttacgcccggcgtctacaactccgcctactacgagcactctttcctcgccgacaagctcggcatcgagctggtcgaggggcgcgatctcatcgtcaagaacaacgaagtattcatgcgcacgacggaggggctgaagcgggtcgacgtgatctatcggcgggtcgacgacgatttcctcgatcccctcaccttccgtcccgattccgtgctcggcgtccccgggctgatgtcggcttacgcggccggcaacatcacgctcgccaacgccgtcggtaccggcatcgccgacgacaaggcgatctactcctacatgcccgacatcgtgaagttctatctcggcgaggagccgatcctgaagaacgtgccgacctggcgctgccgcgagccgaaggatcttgcctatgtgctggacaatttaagcgagctcgtcgtcaaggaagtgcacggctccggcggctacggcatgctgatcggtcccgccgcgaccaaagcgacgatcgaagcgttccgcgacaagctcaagcgcgagcctgaaggcttcatcgcgcagccgacgctggcgctctcgacctgcccgacctgcaccgaatccggcctcgcgccgcgccatgtcgatcttcgccccttcgtgctcaccggcagcaagagcaccaccatcgtccccggcgggctcacacgcgtcgcgctcaaggaaggctccctggtggtgaactcgagccagggcggcggcaccaaagacacctggatcctggacgagtag

SEQ ID NO: 3271 - DNA, 738 bp, BradyrhizobiumColbertium
atgagcgacatcgtcacggcgggcattctggtcattggggacgaaatcctgtcgggccggaccaaggacaagaacattgggttcatcgccgaatacctaaccaatatcggcatcgatctgaaggaggtccgggtcgtctccgatgacgaggcagacatcattgccgcgctggacgcattgcggcatcgctacacctacgtcttcactaccggcggcatcggtccgacccatgacgacatcaccgccgacgcggtcgccaaagcgttcggggtccggatcgaccatcacccggaggtcgtcgcccgtttccgcgagcgctggagcgagcaggacctcaacgaagcccgcctgcgcatggcccgcatccccgacggggccgagctgatccagagcgcgacgattctcgctcccggcttcaagatcggcaatgtcatcgtcatggccggcgtgccctcgatcatgcaggcgatgatggacatcgtcgcgcccaagctgaagtcaggcgtgcggatgctctccgaatcggtccgcgccaatgcgcgggagggcgacatcggcgggcctctgcgggcgattgccgccgcccatcccgacaccatcatcggcagctaccccttcatggacgaggagcagaagccgaacaccaatctggtggtgcgctcgcgcgatccggagaggctggcagcggcaatgactgctgtgaaggaaatgctggcaggattgaacgtctcgcgctag

SEQ ID NO: 3272 - DNA, 528 bp, BradyrhizobiumColbertium
atggctggcgaagcaccggaaccgagcgcgcaggagcgggcgggcaggcccttcccggtctcgtgggaccagttccaccgcgattgccgcgcgctgacgtggcggctcaacgaggtcggccctttccatgcggtgatcgcgatcacccgtggcggcctggtgccggcggcgatcgtggcgcgcgagctcggcctgcgcgtgatcgatacggtctgcatcgccagctatgatcacgacaagcagggcgagctccaggtcctcaagggcatttccgacgcggtgatgaagctcggcgagggcaccggcaaggggcttctgatcgtcgacgacctcgtcgacaccggcaagaccggcagactggtgcgcgagatactgccggacgcgcacttcgccacggtctacgccaaaccgaaggggcgcccgctggtcgataccttcatcaccgaagtctcgcaggacacctggatcttcttcccctgggacaccgcgctgtcctaccacccgccgctgcgcgatggcgcggcctga

SEQ ID NO: 3273 - DNA, 663 bp, BradyrhizobiumColbertium
atggtgagtagtgaatccccaattcgcaattcgccattcgctacccgccccctgcaaaaccgcgtcacgcccaccggcgagatcatcgccacgccgcatcgcggcctgttcaccggcaatcgcggtatcatccatgatcccgcgacgaagacactgctgaacaagcgctggtcgtcgccggcgtggattacatgcctgtgtgaattccgcggctggcggcgcccggtgatggcgcggcggagctggaccgagctgttcttcctcgacgaggccaccgcctttgccgcgggacaccgtccgtgcttcttctgccgccgtgacgatgccaatcgcttccgcgcggcatgggagaggggcaatggcgcgagcaaggtgagcgcaaaggcgatggacgcgcagctgcacctggagcggctgcatcatggtcgcaagcgcctgcatgcgctgccggtgcagcttgcagaactgcccgatggcgcgatggtgcagcagggtgagcagagctttctgatgacgagaggccggccgctgctatggtcgccggccggctatgcccgcgtggagtacgagctggagggcccgatgctgctgacgccaccctccacactccgcgcgctcaatgctggatatcagccggcgctgcatccgaccgctctggactaa

SEQ ID NO: 3274 - DNA, 1023 bp, BradyrhizobiumColbertium
atgctgtttccaaccacgatcgccggctccctgccgaagccggaatggctggcggagccgaacatgctgtgggcgccctggaagtccgacggcgacgagctgctccgggccaagcgcgatgcgaccttgatctggctgaagatccaggaagacgccggcatcgacatcgtcaccgagggcgagcaggcccgacagcatttcgtccacggtttcctggagaggatcgagggcatcgatttcgcccacaaggtcgagatgggcatccgaaacgaccgctacaaggcaatggtgccgcaggtggtcgctccgctccggctcaagggacgcgtgcacgccttcgaggcgcgcgtggcgcgcacgcacaccaggaacaagctgaaattcaccctgcccggcccaatgacaatcatcgacacgattgccgatcgctattatggcgaccgcgtgaagatggccttcgccttcgccgagcttctcaacgaggaggccaaggcattgcaggccgacggcgtcgatctcgtgcagttcgacgagcccgccttcaacgtctacatggacgaggtcaacgactggggcatcaaggcgctggaacgcgccgcgcagggcctgacctgcgccaccgcggtgcacatctgctacggctacggcatcaaggccaacaccgactggaaggagacactcggcagccaatggcggcagtacgagcagatcttcccggcgatcgacgcgagcccgatccagcaggtcgcgatcgagtgccgcaattccaaggtgccgctggacctgctggcgctgctcaagaccaagatcgtgcaggccggcgtgatcgacgtcgccagcgacacggtggagaccgccgaggacgtcgtgaaggtgatcgacgcggtgtcgcaattcgtgcccaagagcaacatcatcgccaccaccaattgcggcatggcgccgatgcggcgggagatcgcagaagccaagctgatggcgctcggcgccggcgccgcgctggcacgcgagaagctggggtga

SEQ ID NO: 3275 - DNA, 759 bp, BradyrhizobiumColbertium
atgtacgcggatagcagctttaaggagaaagtagcgttcgtaacgggcgcggcctccggcatcggggctcaggtcgtaaggacccttggagagttgggcgcccgggtcgccatcaccgacaaagacggcgaagccgccgcccgcgttgcgacagaactcaacaaatcgggtctggatacgctcgcgattgagctggatgtcgcggacctgatagccgttgaagccgccgtccgttcgacggtcgatcgcttcggcgcgcttcatttcgccgtcaacaatgctggcatagccacaccgcgtggcgccctggccgaccagacaatcgataactgggaccattgcgtggcggtgaacttgactggggtgttctactgcatgcgctcggaaattccggctctcctcgccgcgggcggtggcgcgatcgtcaacgtcgcgtcggtctgcggcgtcatcgctgtgccgggcacatcagcctacacagcaacgaagcatgcggtcattggattgaccaggactgcagcactcgactatgccgagaagggcattcggataaacgcggtcgcgcccggatacgtagatacgccccttctggcgtcgcgcccgcctcaagagcgtgaggccatcatcaccagacatccgatggggcgtctcgcgacggcccaggaaatagctgatctgatcgtatttctattatcagagcgtgccggctttattactggctcgcttcatatggccgatggcggctacaccacgcgctaa

SEQ ID NO: 3276 - DNA, 123 bp, BradyrhizobiumColbertium
ttgaagcggcccgtgcagcgcacgttcttcctgtccctgcgacgcgtgcgcgacgagctcaaggcgggcacgacagactttcaggaaatgcggtcgaattcgaggagtacaaggccgtcgtag

SEQ ID NO: 3277 - DNA, 585 bp, BradyrhizobiumColbertium
atgatcgagcgtggcattgcgacccgcggctttccacgcgccacgtcgggcgtgtcgcctaacggccgccttgcggccagcatgatgaagaatgtggctgaagctcttgatgccccgggatgcctcggcagccatgagctcataacagcgctgctggacgtttatgcggtggcgatgagaagggccgacgatcagacaacgcgcggcatcaagagcggtctagcgcctttcattgaacaaagggtgttgaaccgtatcgacgatccagatctcgatctaacggctctggccaagctttgtggactttctccgcgcacgctcaatcgcgcatttgccccgcttggaacatctcccatgcggtggctctggagtcgacggctctcgctggcccgcgatctcctgcttagcaagcgcgtcgccaatgtcacggaagcaagtttgttgtgcggtttcaaggacgtctcgcatttcagccgggcctaccgttcggcctttggccacacgccgtcgtccgtgttgcgtgaagacgccggtcagagcgagcctgaccgcacctcgacatcgacgggtcccttcatacaatag

SEQ ID NO: 3278 - DNA, 498 bp, BradyrhizobiumColbertium
ttggcaatagcccaccatccggagaagatcgcaagccgcgagaatccgaacaggagagcttgcgacatacgcgacaaagccaagcttggctgcccgcttgaaggcgaggaggtggttgtcagccaggcacgcgctttccacctcgaaacctctgcgcttcttgaagctctgtcgcttgccgagagcccggggctgatcagggtcggaggagcgggcctgctgctcgtatccgacggccgcgttctcgtcgacacgcagaccttcccggaagcagccaaggcggaagcgcgcggtacgcagaagctgaaggatgcgagagcagacactcgtcaatccacctttatgtcatccttcgccctgttcgttccacgtgtgcggaccggtgcataccggaccggcaagggatcatctcgtctacacgcatatcgcagggtaaagcggttgcgcgtctcgacgaaatcgaagccctgcgtcatcgctgcgtccgctttacggtag

SEQ ID NO: 3279 - DNA, 459 bp, BradyrhizobiumColbertium
atggtcatgttctgcatcggaccaacccaattcgagaagtcgggcgaagaaaaggacacgctccggaatgtgcgcgcgacacgggagttcgtcgttcaactcgtcgacgatgcgaacaaagagcggatgaatctttgcctacccgaatatggggtggaagtcgatgaaatggagcgcgccggattcgcgaccgcgccatccatgcgcgtgcaagctccgcgcattgtcgattgtcccgttcaaatggagtgcctcgttacggacatccgtgcactcggacaaacaccctattggatggttgttggcgaagtcgtctacgttcactaccgatcaggaatcgccgatagcagcttccatgtagacatgctggcgctcaatccgattggacgtcttgccaaccccagcatgtatgcccgcatcaccgacaatttccatatgccgccgccagcgaaggaatga

SEQ ID NO: 3280 - DNA, 1737 bp, BradyrhizobiumColbertium
atgtccaaactcgagcagaaaggtcgggttaccgagagcactatctgcgatctgctcgtcgtcggctctggcgccgccggcatggcggcggccataactgcgcgcacacgcggcggtctgaaggtgatcgtagccgaaaaagagccggtatttggaggcacgacggccttgtcagggggatatctatgggttcccaacaaccctcttagtcaggaggcgggtgtcgaggacagtgtcgatgcggcacggacctatattcgtcacgaggccggcaatcattttgacgagaagcgcgtcgatgccttcctgcgcgcgggtcctcggatggtctcgttcatgcgcgccaattcagccgtcgagtttgaagcggcaccggccttctccgactatcatccggatgcaccaggcgcgctgccaggcggccgaacaatcctcacgaagccggtcagcgccacacttctcgggagcgatcttccgaaactgcggtgtccgagacctgagttgacgatcttcggcctcacggtcggctcgggcaaggaattgtggcacttttatcgcgcgacgcgtcgcgtcgaatccttcttttatgtcgccaagcggctcgtgaagcacggcatagacctggctgtctacggccgcagcatgctcctaaccaacggaaacgcactggcagcgcgcctatttcgtacagcacgcgacctcgatatttcaatctggctcgacagtccggcaaagcgtctgatccgagacgagagcggcagcgtaacaggcgcgatcgttcagacgccacacgggttgaggcaggttatggccagcaagggcgtcgtcctggcctgcggcgggttttcgcaggacattgcgaggcgccagcagatttacgcccataaggcgagcctcggcgaacaccattcggccgcaagcccgggaaacgtcggagacggcatcaggctcggcgaggccgtcggaggacgaatatccgagggctatccgaatgccggtgcgtgggcgccggttagccttgtccctcgcaaagacggatcattgggaccgtttcctcacttcatcgatcgcggcaaacccggcgtcattgccgtggttcgatccggccgacgttttgtcaacgaagcgaacagctatcatgactttgtgcaggcgatgataagcgcttgcccgaagcgcgaggccgccgaggcattcctggtcgcaggtcactggaccgttcgtcgttacggcttgggtcacgtcaagcctgcaccgctttctctgcggccatcgatcgagtcgggctatctgatcaggggcgagacaatcagcgaactggccaccaaggccggcatcgacgcccaagggcttcaggaaactatcctggcctggaatgcggatgtcgtcacgggcacagatcggcagtttgcgaaagggagtacggcctacaatcgctttcatggggaccctgaggttagacccaatccatgcctcgccgagatccagggcccgttctatgcggtccgggtcgtgccgggagatatcggtacattttccgggctcaagaccgacgaacacgcgcgtgttctcgatttcgatggcaagccgattagagggctctacgctgccggaaatgatgcggccagcatttttggcggcaactattccggtggcggcataacgctcggaccaggaatgacgtttggcttcattgcggccgagcacgccgcgggggcgggaaatgcggacacataa

SEQ ID NO: 3281 - DNA, 147 bp, BradyrhizobiumColbertium
atggaaaagaatccgaaatgcaaaggcgccacgcttcgcggcggcgtcaacatgctcgaaggcaaagggccgcatctcctggtcgtggttgccggaggctggttcaagaagatcgtaatgccaacctatccgagcggctggcggtag

SEQ ID NO: 3282 - DNA, 1149 bp, BradyrhizobiumColbertium
atgttgacacgtcgagttgttcttgctgcgagcgtggccatcctatcggccgcgtcagctaaggccgaagacaaggaaattcgcattggtgccttgatggccgcgagcggtccagtcgccttcatgggagcgtcggagaagaacgctttcgaaatgctggtcgagcagttcaatgccaagggcggaatcgcggggtacaagatcaagccgtttgtctacgacaccgaaggcaacggaacgctcgccgcccagcagttcaggagacttgtcgattccgacaaggtctctgtggttgtcggaccatcgagcaccggagagtcgctcgcagtccgctcgatcgcgaacgagatgaaagtcccgctcatctcgatggctggagccgacacggtcgtcgttccccccacgccctttgttttcaagaccccgccaggtgatcgggtcgtcgcggcgcatattcttaccttcatgaaggggagggggatcaattcgttcggcctgctttattcgggggacggctatggccaggcgggagccgcgacggtcaggttggtagcggagaagcttggtgtgaaaatcgcagcggccgaagaattcgggccgcgtgatacggacatgacacctcaggttctcaagatccggtcgagtggagcggactctctcctgatctggagtgtcaaccctggaccgacgatcattctgaagaacgcagcggccctcgggtacaacaagcctatatttaactcttacggtggagcgacgccggctctcatcgagcaagcgggggcagcagccaacaacacctacgtgtcctccatgcggctgctggtgcccgacagcttgccaaaggatgatcccatgcacgccgtcgtcacccagctcgccaacgactacaaagctcggttcaaggcgcacgtgacaacctttgtcggacacccgactgatgcgctgcttctcatcgaagcggctttgaagaaggcgcaaagcaccgatcggcaaaagcttgccgaagcaatggcgagcgacatctcctttcccggagccaatggaatgttccggttcacggcagaaaatcacaacggtttgaacgagaagtccaactccatggtgatgctccaagtgcagaacggtaaattcgttgttgtgaagtga

SEQ ID NO: 3283 - DNA, 381 bp, BradyrhizobiumColbertium
atggcggcgttgggctttacgatcgtctataacgcgacgcggatcattaacttcgctaacggcgagttcttgatgttgggtggcgtgttgctcgccggcgtcgccgcggttgcaaagcttccgatgccgctcggcattgcgacggctatcattggtagcggagtgatcggctggatcctgcagcggtgtgtgctcgacgtcccacgcagcagtaatccgaccgcgcaagtgatgctgaccatcggcgcggcgcttgcgctccgcggggccgtagccctggcgttcggacgtgatgtgacgtttgtgcctgagttcggcctgctgccgctcgtgttgctggggaacgtctacgtgccgagcagggactttggatcgtcctga

SEQ ID NO: 3284 - DNA, 315 bp, BradyrhizobiumColbertium
gtggcagctatcgcgatggtgctggcaggatgcatcggcgggctggcgggagcgatgcttgcgcccatatcctcggccttttatgagaacggtacgttccttgggctcaaaggcttcgcggcagctgtcgccggcggcatgggcaatccgatgggtgccgtcgttggcggcctcctgatcggcctagttgaaagcctcacagcaggctttgtttcatccggcttcaaggatgcggttggctttgtactgctgctgctagtacttacccttcggcccaatgggctgataggccgggccgcggtcaaaagggtctaa

SEQ ID NO: 3285 - DNA, 966 bp, BradyrhizobiumColbertium
atgcggatccagacaccaagctccaagctttcgcgcgactggcgggtactcaccggattcgccttgcttctgatggcggccgaactggggatatcgagccaattcctccgctccgtgatcatcctctccatgattcacgccattgccgcggttggcctcacattggtcgtcgggtatgccggtcaaatttcgcttgggcaaggcgccttcatgggactcggcgcttatacgttggcggtgtgcctgcaaagagagggtctgccgatccttatttccctgggcgcggcggtgatcctgccaggtcttctgggcttcatgatcgcgcggccgatcttgaggctctcagggcacaatctggcgcttggcacactggctttgggcgccgtcttctacgttgcagccgctcaatggcacagcatcaccggcggaatcgacccagggattgtcgatctgccaaacgcgggcttcgcggggctcaaccacgaacgcgtcatcttctggacttcgattctggggatttgcggtgccgtggcgatcggcaccagcgttgtcgacggccgtttcggccgcggcctgttggttttgcgctcctccgagctggtagctcaatgcatgggctttgatacggcccgcgccaaatcgatgatctttgcgatctcggcgtcgatgtccgggttgtccggcggactgctcgcactttacctccgctcgttcaatgcctcggcgttcggggtaaatatctcaattgagctcttgatgatggtgatcgtcggctccctttcgacggtgtggggcgccgtcttcggtgccttcgtcatcatagcgttgcccaatctgcttgagggtttcgatcaggcgaagcttttgatctacgggctgacgatgattgcgatcatgatgttcgctccgaacgggttgggcgagacgctggtccgcgccgtcacattaaggcggaaaccaccatga

SEQ ID NO: 3286 - DNA, 1473 bp, BradyrhizobiumColbertium
atggatatctcgggaatctgcattacacgccagtccaccctccgcgacgcgctcgatatgctggatcgcagcgggctgggcgttctccttctcgtcgagggcgatcgcaagttcgagcgtaccgtcacggatggcgacctgcgcaggcttttgcttgagggcgcgtcgcttgatcaaactctcgccatcatgccggggcgccgctcgattgtggtaccggaaaacgggacccggcgcgatgcgctcggcttgatgcagaaacacacgatcgatcaccttccagtggtcaatgtatccggccgggttgttgatttgatagagcgccggggcattgacgaacagatcctcctctcgactccgcacatgggagatgctgagcgagactttgtggaagaggccttccgaacgaactggatcgctcctctaggtccgaacgtggacgcgtttgaggcggaggttgcagagctaatcggagtggaaagcgctgttgcattaagctcaggcactgctgcgatccatctggcattggtgctcctcggcgtcagctcaggggattgtgtattttgttcatcgcttacctttgccgcgagcgtaaatccaatcgcgtatcagaacgccgtccccgttctgatcgattctgaaccgactagttggaacatgtcgcctatagcgctcgaacgagcgctggaggctgcgcgcaagaatggacgcctgccaaaggccgtaatcgtagtgaatctttacggtcagagcgctgatatggagccgttaggggcgctctgcgacagatatggggtgccgatggtggaggacgcggcggagtctcttggtgctaaatatcgaggaaggcattcgggcacatttggacgaatcggtatctattctttcaatggaaataagatcataacaacctctggcggagggatgctggttacgtccgaaatgggtttggctgatagggcccgcttcttggctacgcaagcacgtgatccggctccgcattaccaacacagcgtaattggctacaactaccgcatgagtaatattcttgctggagtcgggaggggtcagctaaaggtgctcgatcagcgtgttcaggcgcgtcgcgaaatattccggcgctattccgaggcattctcgaatgagagctggattcaacttatgccggagccggaatggagtttctccacgcattggatttcggcagcattcctagcgccagatgcgcggattgatggtcagctacttgtacggcacttagcagacgagtttattgaggctcgtccagtttggaagccgatgcatcgtcaaccaatctttgcgcacgccgagtattttttccatggaaattgctcagtatcagacgaactctttgagcgcggaatttgccttccgtcgggttctaatctcacgatggagcaggttgatagggttgccgatgcggtcttgaagatcggcaggcgtttggcctag

SEQ ID NO: 3287 - DNA, 909 bp, BradyrhizobiumColbertium
atggccagcaatattggacgtatgctgatcggggtcgtcgatgccttgaaggcgattaaacccgacatcgttctcgtgttgggggaccgcggcgaaatgctggccggcgcgctggccgcgatccacctcaacattccggtcgctcatatccatggaggggaacgctcgggcacggttgacgagccggtgcggcacgccatctcgaaacttgcccactttcacttcgttgcgacctgcgaaagcagggatcggctgatccgcatgggggaggcggcggaccgcgtgtttgttgtgggggcgcctggattagacgacctcgctcatatcgcactgaccggacgcaaagagctctgtcagggggttggtttcgatccgtcgcggcgggtcggcctcttcgtctatcacccggtgttgcaagagatcgaccgatcggcggaatacgcaacgcgtgttatcgatgcgatgctcgcaagaagacttcaggttattgcgctcaggcccaattccgacgctggaagcggcggcgtgagatcgatgctggaggcgcgcgccgctgcaggcgaggttcatctcgcgactcatttgccgagggaagagttcctgtcgtggctggccgcggcggatttgcttgcgggaaattcgagtgccggcattatcgaagccgcaagttttggcactccggtcgttaatgtcggttcacggcagaatttacgtcaacgaaatgcgaatgtcttcgattcctcaaccgatagcgacgatctcgagcgcgcgatcggaaccgcgctttcgtcatcacggttcgacggaacgaacgtctatggcgatggccgggctggcgcgcaaattgtagctctactctcgggaattgatcttacgggtgcatctctgatgaagagcaatgtctattga

SEQ ID NO: 3288 - DNA, 1032 bp, BradyrhizobiumColbertium
atgaagactttcattatcgccgaggcgggcgtcaaccataacggcgacgaggcaaaagctatcgctttggttgaggcagcggcgcggagcggagctgacgctgtgaagttccagactttttcagcggacaagctgacgtgcaaaggcgcggcgaaagctgactatcagcgacaggcaacaggcgatggcgaccaacacagcatgcttaagtcgcttgagatatcggagcgactccatcagcgactattctcgcattgcgagaagtgcggtcttgagttcatgtcgacagccttcgatgaggatgcgctcgacttcctcgttaagcttggcattaaacgcatcaaagtgccgtcgggtgagattaccaatctaccattcctccggcacatggcatcgaagaatttgccactgatcgtttcgacagggatggcggaacttagcgaggtggagcaggccatcgacgtgatccgggacgagcgcgcggcgcgacgatttggtgagcctcttgccgaggtggtcaccatcctgcattgcacgtccaactatccggctgagaataaagacgtaaacctgcgggccatgagcaccatggcccgtgctacggggctgccgatcggctattctgatcatactatcggttttgccgcttccagcggcgctgtcgcgcttggcgccatagtcatcgagaagcacttcactctcgaccgcagtttgcctgggccggaccataaggcttcccttgaaccagatcagcttgcggaattcgtgcggcagatccgcgatgtcgaggaagcgatgggttcagacattaaggcgccgaccccctcagaattgcccgtccgagacttggtgcgacgcagcgtcaccgcgattcgcgcgctcgatgctggagtccgaatcgcgcgaggagacctcaccctaatgcgcccgggaactgggatcgcgccggtcgacatcgaaaaggtagtcggcaggaagtcggcgcgtgcgatcgccgcgggcgagacgctgatctggtcagacctcgcatga

SEQ ID NO: 3289 - DNA, 123 bp, BradyrhizobiumColbertium
atgtcgagccagagcttcggcagcaatccagtccgcctcagtgtcgatatcgatcgcctcgcaaggtcgatcgcagagcacaccagcagtccggtgtggaaaaaacgttcgctctcgttctaa

SEQ ID NO: 3290 - DNA, 126 bp, BradyrhizobiumColbertium
gtgcgcaggcgcaacaccgacgactgcttcgcagtcgcccatttcaatgcgcgcgaaggcatcgtgccaacgcgagggctctcgcaccggcgacgttggttgcagcaaggcaacgagaccatatga

SEQ ID NO: 3291 - DNA, 630 bp, BradyrhizobiumColbertium
ttgctcgactacggcatgtgcaacatgctcaatgtcgcgcgcgctcttgaacatgtcggcgccgatgtagtcgttaccaaagatccgaaagtcgccatcgccgccgagcgtttggtagtgccaggcgtcggcgcgttttctgaatgcatgcgcgccgttaatgagctcggccttggcgatgcgatccgcacatttctaggttccgaacgtcccatgctcggcatctgtgtcgggatgcagattctgttcgaggctagcgaagagttcggcgagacggtcggtcttggcattctgccaggtcgcgtgcgtaagatctcaagtactaccagaactggtgagcctcagcgtgtcccacatatcggctggaatcaccttatcgagccggagacaggtaggtcttgggacaacacgctgctgcgtcccttcgcctcaagggcgccggccgtttatttcgtccattcgtttgccgcacagccggcccgcgatagcgaccgcctcgctgactgtgattatggcggtcatcgcatttccgcgatggtcaagcgtaataatgtgactgcgacacagttccatcccgagcggagcggtatcgtcgggcttggaatgttggaagaataccttttgcagtag

SEQ ID NO: 3292 - DNA, 765 bp, BradyrhizobiumColbertium
gtgaataacgttcgtattatccctcggctcgacatcaaggggaagaacctcatcaaaggtgtgcagctcgaagggcttcgcgtgatcggagacccgcaggaattcgcgttgaaatactatcacgacggcgctgacgaactggtctatatggacatcgttgctagcctctatggccgcaacaatttgagtgacatcatccggcgcgctgccgatcgggtctttattccgatcaccgtgggcggcggcatccgctcggttgacgacgcgcgtcatatccttcgatcgggagcggacaaggttgccatcaacacggccgctgttgcgcgtccggagcttattaccgagatagcgcgccatttcggctcacaggcgatggtgctatcgatcgaggccaagcaggtcgcgccgggtcagtgggaggcctacaccgataatggtcgagagcggacgggactaaatgtcatcgattgggcgcgtagaggggtagagatgggcgctggggaagtccttctgacttctgtcgatcgggaaggaacccgacgcggttacgacgtcgaattgattcggcgcgtcagcgagggcgtatcggtcccggtgatcgctagcggcggcatgggatcgatcaacgacttcttgcaggccgcgcagcaaggccgggctgacggtatttcgatggccgacgtgttacattataatcggctcaagatcagcgacattcgcgcgtcggcctacgaggccgggctttccgtaagacaaatacaatga

SEQ ID NO: 3293 - DNA, 1317 bp, BradyrhizobiumColbertium
atggataggattcccgccccgcatgacatcgataagtcaaagtttgcggcggacgcggtcaatctgacaacaaaattcggccttccgaaacaggtcgtgtattgcaggcgttgcgttatctcaaatcagcgcccgaattcggcggtcgagtatgagcacaccaaggagagcaagaaaaagaccatccatttcgatgccgaggggatctgcgatgcctgtcgctttgccgagaagaagaacggcagcatcgactgggaggagcgcgaacgaaagctgcgcactttgctagaccagcaccgcagccggaacggcaactatgattgtatcgtacccggatccggtggtaaggacagcttctacgcctcacatattctacgcaccaagtacggcatgcacccgctgaccgtcacttgggcgccgcacatctacaccgactggggctggaagaatttccagagctggatccacgccggccatgacaacctgctgatgaccccgaatggacgcgtgcatcgtctcctgacgcgtctcgcggtggatctcctgttccacccattccaggctttcatgtttggccagaagtcgctcgcgccgaaaatggcgctgctgcacaagatcccgctcgtgatctacggcgagaatgaggctgaatacggcaatccgatcggcgacaccgagactgccaagcgtgattggtcctatttcacgtctgccgaccaatcgaacatctatctgggcggcgtctcaatcgcggacctgaagagccaattcggggtggagcatcaggatttgctcccctatctaccggccgatcccaacgagatagaacgtcagaaagtcgaagtgcactacctgggatactacctcaagtggcatccgcagagctgttactattacgccgtcgagcacggcggcttccaggcttcaccagaacgcacggccgggacctacagcaagtacaacagtatcgacgaccgtatcgacgatttccactattataccaccggcgtgaagttcggcatcgggcgcgccagctacgatgcctcacaggagattcgttcgggcgacattgaccgggacgagggagttgcgctggttaagcgcttcgatcatgaatatccggcacgttttgccgaggagatcttccgctacttaagcattccggccaaggagtttccacaagccagcaagatgttcgaggaaccagtgatgacggagcagtatttccaccggcttgctgacaatttccgctcccctcatctgtggaagtggggtggcaatcgctggcatctgcgccatgccgtctatgatgagtag

SEQ ID NO: 3294 - DNA, 1230 bp, BradyrhizobiumColbertium
atgacgggcgctttcgccggcggttgccgcagcctctatgaggcggtgcaggcgcttcctgctggcgaggtccagccgttcttcgtcgcgccgcggggaaccgtccatgatttctttggcaagattggcgaggtgatcgagacgtggggagtgagccagttcgacaataccaggtacagctattaccgtggcctgcgctggctggtcgtgctgcgcgaactggtgttcttgccctcgacatttctcgcgttgcggcgcgcgcagcagcgttggaaacaggtagatcttattcatatcaacgagatcacgggcgtcgtgccgtggctgatcgcgcgccatctgttcaaggctcccgtcattgttcatgtgcgctcggtcgttcggaacgatgctgcctcgctgcgcacgcgcttgatggaatcgcttctccgcaaggcggatgcggtcatcgccatcgatgagaccgtgcgggcaagtctgccgccgccgcttcgcgtcgatgtcattcacaattcgttctcactccccgctcgaaaaaaagcggaggttggctttgccgatcgacttcgcctaaagccgggctcgttcaaggtcggctttgtcggcaacctgctgcgggtcaaaggcatcttcgaattgatcgaggcggcgcgcctaacgcgcgaacagggcgtcgatgccgaattcatcatagtcggttcggatgccgggcgctccggcacgttgtggtcacgcttccttaatcgcctgaagctcggtcaggacgtgggcagcgaggtgcgcgcaaaaatcgccgaagatgggctcgagagctgcgttcacatggcgggctttacgtctgacgttgcacaggcctacgcctgcatggatgtcctgtgcttcccgtcacattacgatgcgcccgggcgccccatttttgaagccgcatttctttgcatccccagcattgtcgcgatcgcgcgtccgtcgccggatactctggtggatggcgtgactgggcttgcggtgccgccccggaatccggttgcgttggccaaagcgatcgaatcgctcgctaccgacaaggagcgcgtctcgcggatgggggcggctgctcatcaactggcactgtctaacttcttgcccgagcgcaacagtagggaactgctagcagtctacaagcgggtgctagcgcaggtggctgcacgcaagagaacggaccaaactccggtttccagccctcggtcctga

SEQ ID NO: 3295 - DNA, 1107 bp, BradyrhizobiumColbertium
atggcaatctgtacccgctgcatcatggatacgaccgatccggaaatcgctttcgatgcggaaggagtctgtaatcattgccatcgctatgaggcggtagctcgacatcggttggttccgcctgttgaacgcaaagagcggcttgcccagcttgtggccgagctccagcgcgccggcaggggtaagcggtacgactgcgttattggagtgagcggcggcgtcgacagtacttacgtcgcgtggctaatgaaggatcttgggctgcggcctttggcggttcatctcgacaacggctggaattctgagcttgcggtcgcaaacattgagaagacgctcaagatactcggcatagacctgtatacccatgtgattgactgggaggaatttcgcgacttacaaacttcgtttcttcgggcctccaccccagacggggaggtgccaactgatcatgcaatatgggcgttgctctaccagatcactgctaagcacggactgaagcacattatcaccggcaccaatgtcgtctcggaagctatccttccggagaaatggggatacggctacttcgactggtcttatgtgagggatgtccatcgccgcttcgggaggaccagactatccacctatccccacttttcgctaatttggctattctactacatctttgtacggcgcattcgcatggtctccatcctaaattttatcgattacaacaaacagaaggccatggacgtcctgcaacagcaactcggatgggtttattatgggggtaagcactacgaatcgatctatactcggttctatcaagcttacttgctgcctcggaagttcgacatcgacaagcggaaggcgcattactcgaacctgatcctgtctgggcagatgagtagggcggaggcgctgaaagcgatgcaagcgccggtctaccctgcagacctactagaggaggatcgtcaatacgcgctgaagaagctggatctcagcgaggctgaattcgccgaaatcatggcatcaccacgcaagacctttttggagtatcgaaacaaccacagcctctttaaattggcgaagaagcttgtgaactcgtcccggcagttgatcggctag

SEQ ID NO: 3296 - DNA, 759 bp, BradyrhizobiumColbertium
atgcgccggacgcgcgtcatcccgacgctgctacttcgcggcgccggccttgtgaagacgaccacattccgaaatccggtctatgtcggcgatcccgttaacgcgatccgcatcttcaatgacaaggaagtcgatgaactcgtactattggacattacggcctcgcgcaccgggagggggcccgctttctcgacgatagagaatatcgctagtgagtgttttatgccggtcgcttatggcggcggagtcaactcggtcgagcacatcaggaagatcctcagctgtggcgtcgagaaagtagtgctcaatagcgtcgcattgcgtcgtcccgagctcgtgcgcgaagcggcatgcgagttcggtagccaggccatcaccgtttcgattgacgtcaaacgcaagctgttcggaggttatcagatttatggggagggcgggtcaagggcaaccggctacgatccggtggtatatgctaaaaggatgcaggagcttggcgccggcgaactcttggttacctccatcgaccgcgatggcacaatgaaaggctacgacgctgacctgatatcgcgggttgcttcgggcgtcagcatccccgtgattgccgcgggtggagccggaaaggtcagcgattttaccgctgcgaagcaggcgggtgccgctgcagttgcggcgggcgccatgtttgtgtttcacggtccctaccgggcagtgctgatcacgtatccatcgcaggcggagttgtctgccgcgctgaattag

SEQ ID NO: 3297 - DNA, 618 bp, BradyrhizobiumColbertium
gtgattaccatcgtcaactatggcacaagtaatctcggctcgatgcggaacatgttgaagaaggtcggcgcgggttgcaagatcgcgtccgtcccgcaggatttggccgatgcaaccaagatcattgtgccgggagtcggcgcgtttgatgccggtatgcgcaaactgcagcagtcgggaatggttgcggccttgaaccagaaagtgctggaggaacgggtcccgacgctcggggtgtgtctgggcatgcaattaatgacggagggaagtgaggagggcgagctacccggccttggttgggttcaggccgacgcgcggcgttttaaccaagcgtcacagcccgacatcaaggtcccgcatatgggctggaatgaagtcaccgaggtcaagccgtccgcgttgatggttgaatttccgccgcagccgcggttttatttcgcacattcctaccatgtagtctgtcacaagcctgaggacgtgctgctgacgttcgtctacggcgccaaaacattcaccgctgctttccaatgtgaaaatttgttgggcgcacaattccatcctgagaagagccaccgcttcggaatggcgctcctcagaaattttgtcgagcggttctga

SEQ ID NO: 3298 - DNA, 1239 bp, BradyrhizobiumColbertium
ttgagtcagctcgcgcttgcacctcgtgatctagagtttctcggtgccactatgacctcggcgctccgcaagttcgacgagcggggctggcacgacatctatttcgatccggtgattgatcagatctcaggtggcgctaagatgctctatgctgatgctcgggggttcaatcaaaacgaaaagcatgcctatcgaaagccggtgttcagcgacacttctgtggttgcggtcagcgcggcacttggtcggctgttccctgctagacccgaccggaatttccagcggctttccgagctcattgtcgcggatctcaaactcactcagttttcagccgaacgaatccgcctcaaattcagcgtcctgaggtggcgtgcccggctctaccgcctcgtgttgcaacggctacgaccgcgttgcttgctagttccaaactccggacagttcgcgctattcttggctgccaacagcctcggtatcccgttcattgagatgcagcacggcattttcagtaatgagcatccagacaacctttccagcgacgtacttacgtgcgacaggcagaccctcatgttgcctgacctacttactgtgtatggttcatactggatgaagatcctagagcattccgcactcggcaggcttggtcgcatccgtgcggttggctctcccatgatcgatgtcaatcgaggcttgcgtcaacgaagctttgtagctgatcccggcaagccggtattgacgttgacctcccaaggtatcgctgccgggcgacttgctgatttcgttgccgagtttcttcggctctgtccctcccaattcgaactcaatatccgtttgcatcctggatatgaggcggaagccacccactacgacgctaagttttccgaagatccccgggtggtactttggcggggcaattcgaaacctgacacctacgagatgatcgcaacatctgatctgcatctcagcatctcctcggcatgtcatttcgaggcgctcggcatcggtacgccgaccgcgatcgtagccctgcccagccacgaacttgtcctaggcctcgcagagcgcggcgatgccatcttaatccacagcccgcaggaattagccgacctagtcttgagccgcggctggggtgtggtgcctgcgcaaacgtcccactattactttcaacctgagcacgtcgcaaacttacgcgccgtgctcaacgaatgcacgtcgcttcggagggggcgcgtccagtga

SEQ ID NO: 3299 - DNA, 114 bp, BradyrhizobiumColbertium
atgcaggccaagatcctgaagtatgaacgagatctcgaagcgcagcatccgccacaacgaaatcccgtcagctgtcatcccgaacgcgtcattgcggcgctcgaaatctgctaa

SEQ ID NO: 3300 - DNA, 948 bp, BradyrhizobiumColbertium
atgtcagaaataaaggtcgccttcgttggggcgggctatatggccgaggagcacatgcgggcgttcgacggcttgccgggtgttgtcatcgccggcatctacagccgaacccgcgaaaaggctgaacgcctagcctcggcgtacggcacaaaagtgtttgattccatcgcagatctttaccggctgacccaagccgatcttgtggtggtcgcggttgtcgagctttccatggcggaggttgcaaaggcttgttttgcctatccctggactttgcttttggagaaacctgcgggctatgatcttgcagacgcaacgcgcatccgcgacgacgcacgtagctctggacgccgcgcttacgttgcactgaaccggcgcgcctactctagcacccgtcgcgcggctgagctgctagcaaacgattcgtcgttgcgcttcatcaaggtgatcgatcagcaggaccagcaggcagcagtcgagatcaacaagcacccggaactagtggcgcgcaactttatgtttgctaattcgatccacctgatcgattactttcgcgtgcttggtcgcggcgaaatcacccacgtcgaccctgtggtgccttggagtccacaggcgccacgagtagtgcttgccaagatcatttttgccagcggcgatattggcctttacgaaggcatttggaacggtccggggccctggatcgtcagcgtcaatactgccgttcagcgcatcgagatgcgaccgctcgagcaagtctcatttcagttgcggggaacgcgcaccgttaccccgctcgagatcgatgctgatgacacgaccttcaaacccggtttgcgatatcaggctgcacaggcggtggcggccgctcgtggtgagccaaaaaaccttgttaccatagacgactcttggtactcgatgcagctagtcgctagaatcttcggccttgtgtga

SEQ ID NO: 3301 - DNA, 696 bp, BradyrhizobiumColbertium
atgatcgcgacctgcgacgccgccggcgttaagttggctatcaatcaccagatgcgatttatggagcagtatacggacgtcaaaaatctaacgaactcgcctgagttcggcgggttgcggtcaatggttgtgacggccagtaactttggcttggccatgaatgcctcacactatttcgaagcgtttcgttacctgaccgcagaaccgcttgccgagatttcggcttggttcgatccggctaatgtgccaaatcctcgcggcgcacaatatatcgatcgatccggtcaagtgcgcggtgtgacggcttcgggagtacgcctactgattgagctcggcggtgatctcgggcacggcatcgaagtggtctacgcctgccgcaatggacagattttagttgacgagctcgctggctatgttcgtggcattcaccgccgagcagagtatcgcgagcttcccacaacgcgctacggtatgcccgccgacgaatttcagcgtcagatcgcgcaagcggacgtgattggcccgacggtggcgctctggcggtcgctgttggcgggtggctcctacccagacggtagtagcggaagacacgcggtcgcagcattggtggcggccaatctgtcgggcgagagcggtggtcgaccgatcgaactcgaaagaggattaccccgtgagcggatattcgcttgggcctga

SEQ ID NO: 3302 - DNA, 1338 bp, BradyrhizobiumColbertium
atggggcatcggcaagtcgaacaggctgcgttgttctatgagttctcactcgaaaggcacatccgcgccgaccacttgctccggtcgatcgatagatttgtcgaccttgaacagattaggcaggacctggtggtcttctacagccgtatcggtcgaccttcgatcgatcccgagctgatgatccggatgctcctgatcggctactgcttcggcatccggtcggagcggcgcctgtgcgatgaggttcacctcaatttggcctaccgatggttctgccggctcggtctggatggggcggtgccggatcattcgaccttctccaagaatgggcatggccgcttccggcagagcgatcccttccgtcgcgtgttcgaaagcgtgttgggccgctgcatcgaggagcgactggtcggcggcgaaggatttgccgttgacgcgagcctaatcaaggccgatgccaatcggcagaaggggatcgaaggcgacaggggacttccgccggaggctgccgggcgagcgatcctggctgtcctcgatgatgccgctttcggagctgcgaccgaggtcacgccgaagttcgtgtcgccctccgacccggcggcacgctggacgggggcgcatggtggccaagccttcttcgcctactcgacgaactacctgatcgacgtcgagagcgcgatcatcgtcgatgtcgaggcgacgacggcaatccggcaggcggaggtgttggccgccaaacgcatgattgagcgctcgctcaaacggttcgatctctatccggaccggctcctcggtgacagcggctacggctcggccgagatgcttgcctggctggtctatgagcacggcatcgagccgcacgttacagtcttcgacaagtccgcccgcacagacgggatcttctcgcgcgatgacgtcacctatgaccatgccggggacctctaccgttgtcccagcggtaaagttcttaccacgactggaacgctggtgaatgatggcgccaccatgctctacctcgccagcaagcatgattgtgatcgctgcgcattgaagtctcggtgttgccctaagcagccttcacggagggtgccgcgctcgatctacgcgggcgctcgcgacatggcgcgccagatcgcaagatcattggagggccgcacttcgcgccggctccgcaaaaagatcgagatgctcgcgcacctcaagcgcattctcaagctcgaccgtttacgtctacgaggcccaaacggcgcgcgcgacgagttcatcctcgcagccaccgttcagaaccttcgaaagatggccaagctgatcccgatacccaccccgaggctcgcatag

SEQ ID NO: 3303 - DNA, 606 bp, BradyrhizobiumColbertium
atgaccgtcggaatcgctcgcctcaagattacgctcgatgacgtcaagccggtggttctgcgccgggtcgatgtgccattcgacatcaagctcgaccgcctgcacctgaccatccgagcggccatgggttggaccaacagccatctctacgagctgcgcgccggcgacgtcgggtggagcacgccttacccggatgcagattggggcgtcggcgagttcctcgatgcccgcaaggctcggcttaccgatatcctcgaagatgtcggaacaaagaagctcacatacctctatgacttcggtgacggctgggagcactcgatcaaggtcgagcgcctcatcgatcccgagccaggcgtgctctatccgcgtctgatcgaagtcagcggccgctgtcctcccgaggattgtggcggtccctggggctatgccgaactcctcgaagccatcaaggaccccacccacgaacgccacgccgaactcaccgaatggatcggcgacgacttcgatcctgacatcgacgaggccgagtggctcaccacggaagttgaggccctcgccaaaaaatggtcacgcaaacccgaaggcaagcgcgccaaacgcagctaa

SEQ ID NO: 3304 - DNA, 795 bp, BradyrhizobiumColbertium
gtgcgcgacgatcggccgttcggcggacgggcgccgccgggtgcgctctattacgcctcgcgcgaccggcggcaggagcatcccacacggcatctccaaagcttctctggcatcctgcaggccgatgcctatagcggctacaatgagctatatgacgcctcgcgcgcgcagggaccgatcacgcctgcactctgttgggcccacgcccgccggcagttttttgagctggcggacatcgccgccaatgcgagggccggcaagaacgccgcggcgatctcgccgattgccctagaggcggtcaagcgcatcgatgcactgttcgatattgagcgcggcatcaacggccaaagcgccgaagagcggctgcgggtgcgcaaagaacaaagcgccccgcttttaacggcattggaagcttggctgcgcgagcagcgtgcccggctgtcgaactcgtccgcggtcgccaagccaatcgattacatgctgcgccgctgggaacggtttgctcgcttcaccgatgacgggcggatctgcctgacaaacaatgcggcggagcgcgcgctgcgcggctttgccttgggccgcaagtcctggctgttcgccggctcggaacgtggtgccgaccgcgccgctatcatggcgacgctgatcatgacggcaaagctcaacgacgtcgatccgcaagcctggctggcggacgtcttggcccgcatcaacgatcacgctgtccacaggctcgaggaactcctgccatggagctgggcctccgagatagagcgccgtaaactggcggtatga

SEQ ID NO: 3305 - DNA, 180 bp, BradyrhizobiumColbertium
atggtgacaatcgggcttgatatctcgaagagctggtttcaaatccactggattacggcggatggagaaattatccgcaagaagctcgcccgcgggaaggttctcgatttcttttcacggcttccaagttgtctcgttggtcttgaggctttgcggcagcgctcatcattgggctcgtga

SEQ ID NO: 3306 - DNA, 594 bp, BradyrhizobiumColbertium
atggcactcgtggacgttgacgagcgcatcccacagagcgcgcgtagcgctctttcaatccttgtcgatcagatcgaagaccttgagctacacattgaaagccacgagaaaatgatccttgcaactgccaaagacaatgaagtctgtcggcgtctcatgaaggtggcgggcatcggcccatttgacgccaccgccctggcggcgtctgtcgatcatccacaacagttcgcttcggcaaggcatttcgccgcctggcttggattagtaccgaagcagcattcgaccgggggaagggagcgtttgggcggtatcagcaagcgcggcgacggctacattcgtaagttgctaatacatggcgcccgagcggccgttcatcgcgtccgtatccatcaggtcaccaatacctggataacagagctgctcggcaggcgtcccttcaatgtcgtgacggtggcgctcgctcacaaaactgcacggatcgcttgggcgatcatggccaatggtgaagaataccgcgcaagtataaatcgagcgtggctccgtttgcgagggcaaagcagagtgatggcaaccagtcggaccggggtcggctaa

SEQ ID NO: 3307 - DNA, 663 bp, BradyrhizobiumColbertium
ttggagctcgaagaactcgtcaccaccgcgagcgaggatgagcttgccgcgcaggccgcggcggcgaagacgcagaacgtccgccccttcacgcgcaagcgaccagtgcgcaagccctggccggacgatatcgaacacgagcgcgtcgtcattgacgctccgacgagctgcgcctgctgcggcggatcgcgactggcgaagatcggcgaggatgtgaccgagacgctggaggagatcccgcgtcgcttcaaggtcatcgagacagtgcgcgagaagttcacctgccgcgattgcgagaagatcagccagccgccggcgccgttccatgccacgccgcgcggcttcatcggcccgcaattgctggcgacgatcctgttcgacaagttcggtatgcacatcccgctcaatcgccagagtgcgcgctttaaggccgagaggatcgacctgccgctgtcgacgctggcggatcaggtcggccacgggaccttcgccgtcatgccgctcttccacctgatcgagcgtcatgtgctcgctgccgagcgtctgcatggcgacgacaccaccatccgcatcctggccaagagcaagtgcacgaccgggcggatctggacctatctatggacggtccccgctttgcaaggccatttgctttgttttggctaa

SEQ ID NO: 3308 - DNA, 255 bp, BradyrhizobiumColbertium
gtgtttgagcttctcgatccgcagctcgagatgcgcgatcagcgccgcgttgtccgacagctccgcccgcgcactggcagccaccgcctcggctcgcagccgcgcctcacgctcggcctgcagcgccgccagggcactcgcaaggtccgatggaagatcgtccggcttcgctatcatgaagccattgaatcagatcaagcgccagattcaaacgcaaaacgctatccgacccgcgtcggacgttgggtttcttga

SEQ ID NO: 3309 - DNA, 261 bp, BradyrhizobiumColbertium
gtgcaggaggtgctgcgcaaggacccgctcagcggtcatctgttcgtcttccgcggtcgccgaagcgatcttgtgaaggtgatctggcacgatggccaaggagcatgcctgttcaccaaaagactcgagagaggaaagttcatctggccatcggttgcgggcgaagccgtaacgatctcaccggcgcagatgagctacctgttgtccggaatcgattggcgcaaccctcaagaaacccaacgtccgacgcgggtcggatag

SEQ ID NO: 3310 - DNA, 216 bp, BradyrhizobiumColbertium
ttggaatcgggatcatcgccgcctcagaagctcaaggacgcgctgcagcgcttcaccgtcgacgtcccggtcaacccgaacgcgacagcctccgccaagttcgatctcgatgattccagtcctcgcacgctgcgcaggcggcgaagacgccggttgcggcgcgctgatcgatatcggagccggcgccggagtgatttcgacaggaacgagaactga

SEQ ID NO: 3311 - DNA, 360 bp, BradyrhizobiumColbertium
ttgaagttcgctctggcccacgacaaggaccagagcatgaagcgcagccgcttttcggaagaacagatcatcgggattttgaaggagcatgaggccggcgtgtcggtcgccgatctgtgccgcaagcatggcgttagcgacgccagcatctacaaatggaaagccaagttcgctgggatggaggtctcggaggccaagcggctgaagacgctggaggacgagaacacgcggctgaaacggctgctggccgacgccatgctggacaacgcggccttgaagaacctcttgggaaagaatgtatggtccgccccgtccgtgcaagggttcgcgacatcgccgacgacgattccagttgcataa

SEQ ID NO: 3312 - DNA, 585 bp, BradyrhizobiumColbertium
ttgggccagccgggcggctaccgctgggacgggcaggcttggctcggcggcgacatcaaccggttcgttgtcaagagccagggcgatgggagccgtcgcgagggtctcgacagcgctgaagtccagttgctctattcgcgagccgtggctccctatacagacctccaggcaggtattcgctacgacttcaagccggatccgacgcgggcctatctcacgttcggcgtgcagcaactgtttccctattggttcgagttcgacggagctctctttgtttcgaacagaggagaactgctcggccggctcgaaggctcttacgatctgctcttaactcagcagttggtcctgcaaccccgcgccgaactgaatttcgctgctcagaattcgcaggacattggagttggagccggcctctccaactccgagttgggactgcgcctgcgatatgaattccgccgggaatttgctccctatattggcatttcgtacgatcagaaactagggaatacggctgagtacgcaaaggcttcgggcaaggacagcggctcaacgaagttcgttgtggggcttcgctcctggttttag

SEQ ID NO: 3313 - DNA, 1917 bp, BradyrhizobiumColbertium
ttgaacgagctcagccgccgccaattgctccgtctcgcctccctgtccggtgctgctggcttggcctcgtcagcactcccgagctgggcgcaaagcagccctttacatccaccaagccggctttcggaagtttccgggagtaacattgagctgacgctcgacagagcggtttggccggtcgatggaaaggcaggctcggcgataacaatcaacggcacggttccaggtccgatactgcacctgaaagagggacaaagggtacggatagctgtcacgaaccgtatggacgagaccgcctccatacattggcacggcatgctggtcccgtttcgcatggacggcgtgcccggcgtgacatttccggggatccctgcgcgcagcacgttcgtctacgagtttcctgtcattcaaaacggaacgtattggtaccacagccactctggctttcaggagcaggtcgggctgtacgggcccattatcatcgatccaaaaggcgctgatcctgttcgctatgatcgggagtatgtggtgatgctctcggacttcagtttcctgtctccggagctgatcatccaacgattgaagcaggaaggcggcgtgtttaactatcaacggcaaactgtcgccagtctgctcgccggccgcgaccaaacactggccgagaggctgcagtgggccaagatgctgatggacccgaccgatatttccgatgtcacaggtgcggtatatacattcctgatcaacgggcatggaccggaagataactggacgggtctgttcaagccaggcgagcgcatccgcttaagattcatcaacgcgggcgcgcagatggtgttcaacgtgcggatacccggtctgcatatgactgtcgttgccgcggacggacagatggtgcggccggtccaggtggatgaattccaaatcggcaacgccgaaacctatgatgtcatcgttcagcctcgggaagataaagcctatacgatcgtgtccgaagccgtcgaccgttccggcatggggcgagctacgctcgctccacggatgggaatgacggcgccggtgccgccactccgcgagcggccgctggcgacgatgaaagacatgggcatggacatgtccgccatgaagatgagcgacatgaagccatcggcagcatccaacaacggaatgtcgggtatgtcgagcatgcctggtggcgcccagatttccggtcgagctcgaaaagggatgcagcagtcagccggcatgcaaggaatgcccgggatgtccggcaagccgggcatgagttcgatgtcatcatccacgccgcccggaatggctcctcccaagccgcgcggttctgacgtgatgagcggaccggaaatggacatgcgtgatccaaaaaatgctccgggcgtaaagatgggaccgggtgtccagacgatcgcgcccatgccgcaggatcgaacaggcgatccggggatggggcttgaaagcgtagggcatcgagtgctgacatacagagatttgatcgccttggagcgcaatcccgacgctcgcacccccacccgtgcccttgacattcatctcacgggcaacatggaaaggttcatgtggggctttgatggagagaaattcagcgaaaccacaaagccctacacgttcagaaaacgcgagcgtgtgcgtgtgacgctgatcaacgactccatgatgctccatcccatccacctgcatggccattttttcgaggtggtgaatggagctcccgaaagccacaaaccacgtaagcatacggtcaacgtcttgcccggtggaaaggtgagcttcgacatcactgccgaacccggagactgggcctttcattgtcacatgctctaccacatgcacgccggcatgtttcaggtgttcagtgtgcggccactctcaggtgacaacgcatga

SEQ ID NO: 3314 - DNA, 1560 bp, BradyrhizobiumColbertium
atgttgcgcccgcatcgcttgatttacgccctcgccttcatggccggagcggggcttatcgctaatgcgaatgctgccgaatgggccgactacgccactgtcagcatgaccgatccggttacgccaaagctgacggcgaaccgactatgttacaccgacggccgcgacgtggcgtgcgacggcgcggcggggctgctttccagcagcggaagtctggtgatctccacagtggcggcgggcgggcttagcgtaacaggcaacaccagtttgaccaatgtgaatgccagcggcatcgctcgattcattggcgtgatttcagatacgaatcaaacaaacctgcggctcaccgcgccgggaacggcacaaatccaaaacgtcggcttgagcttttacccaacgttcgacggcagcggctccgacaacggcccgcgccgcgtggccgatattttggcaggcttcaacggcggcgcttggggacatcaatatctatcattcaacgtcggggacgtaaacaacgataccggcgcgctcacggccgaacggatgcgcatcaccgccaatggctctgtcggcatcggcacgtctacgccaagcacaacgctctacgttaatggcaatacaacgttggctggtgagcgtacttatctcgccgggtttgatgcctcacacatccattggttaggtatcaataacggtagcggtgaaccatccaacctttttatgggttttgtatcactagatggtttgactgccgaccgcatcaccatgaatcctggcggcagcgccagcagccttattgttgtcagcaccggcctagttggcattaacctctcgcgtgaccctgtgaggtcgcttgaagtgtccggcaccatcagtgccaccaacctcgtcgttggcggttgcaccggctgcggaggcaagggtgctgatcggcaggtgtttactgtcagcggcacctggaccaagccgagcggctacagcaccaacgcgatggcgtatgtgcagtgctggggtggcggcggcggcggtggcagggcaggctacagctcctggacgggtaatggcggcggcggcggcgcttaccgtgacgggtggttcctgctttccaccctgggtgccaccgagacggtgacgattggggccggcggcggagtaggaactgcgggctatggcgttggctatgcgggtggaaacagcagattcggtagtaaattgactgcgtatggcggcggcggcggcggatcgtccagctccagctggactgcggcaggccagggtggccagcttacggcagccggtacgaacggtggtgctaccggcaatccgattacgacagagagtgtgggaggcgatggcggccaaagcagtatcataggtgccgctggcggggcgtcgtactttgggggatcgaccacacctgccggcacgtcttccatgggtggcaacggcggcgggattggcgcgaacggcagtgcgccaggtggtggtggcggtggagcttatgccactaacggcgggtatggtgccgccgggcagtgcatcgtgagcgtgttcaactag

SEQ ID NO: 3315 - DNA, 120 bp, BradyrhizobiumColbertium
atgctaaagctcgccgctgagggtgttgcggcctgcaccaccatcgcggcggaactggagcgacccggcttcccggccgtcgtgacgggcgcatcacacgggagcgcctttatgagataa

SEQ ID NO: 3316 - DNA, 552 bp, BradyrhizobiumColbertium
gtgaacgccggcatcggtggcgataaaaccgattataacttcggcggcgttgccagtggcaatgtcacgtcgttcggcggctttggcggcggtcagatcggttacaactatcaattcgctggtaactgggttgccggtatcgaagccgacattcagggcggcagcctcaagagcgaaatcaatgcgagcattccaccggtcgggcttagtggcggaactgagatgaagtggttcggcaccgtgcgcggtcgcctgggctacgcatttgatcgcgttttggtgtacggcaccggcggctttgcttacggatcggaagacacctaccttaacgcagcgccgcttttgaccttctcgcgcagcgctgacctgacgggttggacagcaggcggcggcgtcgaatatgcagtgacgaataacgtctcagtaaagaccgaatatctctactttgagttcgaccgcaacaacatcgccgcgatcggtccgactactatcgacaacaaggtcaccgctcacactctgaaggtcggcttgaactacgctttcggaaaatga

SEQ ID NO: 3317 - DNA, 237 bp, BradyrhizobiumColbertium
atgatttccggctacgcccgcgtatccaccaacgaccaggacaccgccgcccaagtggagcagctcatggctgccggtgcggtcaaagtgttccgcgagaagatcagcggtgcgaccgccgagcggccgcagctcaagaaggccctcgcctctctcgaccaggcccagtcggcccgaagctgcgattttggccaactcaaagaacggatagcgaacgtgcagtcacgtagaagctga

SEQ ID NO: 3318 - DNA, 417 bp, BradyrhizobiumColbertium
atgcagtttctgcatgcgggcgacgagttggtggtgctgcggcttgatcggcttggccgctccacccgcgacgttctcaatcttgttcatgagcttgacgaaaagggcgcatccctgcgcgtccttgaacccgaagtgacgacggcgggcagcatgggccggatggtcatcaccatcctcggcatggtcgcggacatggaactcaagttcatcaaagacagacaacgtgcgggcatcgacgcagcaaaagttgacggcatctacaagggcaggaagaagaatgtcgatgacgccgagattcgcaggcggatcacggctggctcaacgaaagccgccgttgcccgtgatctgaacatttccaggatgactgtctaccgcgcgttggaaggtcaaggtccggagtcagcttctacgtga

SEQ ID NO: 3319 - DNA, 2841 bp, BradyrhizobiumColbertium
gtgaacggcaaaccggagctggcgcggctgggattggcggttcagcttaaattcttcgccgcgcacggcttctttgtgcaggatcatgcggcgatcccggccgatggtgttttgtatctggccgagcagctcggcctcgatgttgaagctgtgaaccactatgatttcgtcggccgcaccgcccgccggcattacgcggagattttgcagcaccttggctttcggcgtctgaagcgggtagatcgagagcaactgacgtcttggatctccagtgaactgtgcccgagcgggcagtcggtcagcgccatgctcgagcatgttttcctgtggtgccgggaccggcgtatttacggaccttcgcgcaaggaactggaacgcctggtgcggtcgcaacggcagcaccatctggatagctggttgagcggcgtgcacgaccggctttcggcaagcacggtcgcattgctggaggcttcaatcgccgatccggagggccagaccgggttcaatacgatgaaaggcgacgctggccaggcatcactcgacaacatcctcggcatgacggcgaaactcgccttcattcagaaactcgatctgccacgggatcttctcgcggcgaccggcaaggcctgggtggagcagattgttcgtcgcgttggcggcgaaaaggcctcggaaatgcggcgccatgcacctgcgcggcagatcgggctgtatgcggtttatctcctgtcccgtgaggcgcagctgacggatgcgatggtcgatcttctgatcgagacggtccacaagatcggaacgcgttcgaaacgcaaggtcgtgggcgatatcgcaaaggacatcgaacgggtctacggaaaggaacggctgctggtcgagatcgccagcgcttcgatcgaagaaccgtccgggcgcgtctgcgatgtgattttcccgatcgtcggcaaggacaagctggcggcgatcgtcaaggagagccaggcgaaaggggcgctcgatcggcgtatatataaggtgatgcgctcttcctgggccaatcattaccggcgcatgctgcccgacttgctttcggttctggaattccggtcgaacaacacggtgtggcgcccggtacttgcggcgctcgactggattcggagcaagatggatgacggctgccggttcgtgccggtgcaggacattccgattgatgaggttattcccgccaggtggcgcagttccgtcatcgatggcgatgggcgtgtgaaccggatcagctacgagctttgtgttctcacccagttgcgcgaccgcattcgctccaaggaaatctgggtcgttggcgcggaccgttaccggaaccctgacgacgatcttccaaaagacttcgaaatccggcgtgacgcctattattccggcctcgacctgacacccgacgcgaggacgtttacgtctgccatccgttcagagcttgagcaggaactgttgcttctcaacgccaatattccggacaatgacaaggtccggcttctgtggcgtggcgaaaaccgtatctcgatcacaccgttcaagcctgcacccgagccgaaaggcctcaatgcgatcaaaggcgagatcggcggacgctggccgatgaccgggctgctcgacgtgctgaaggaggctgcactcgataccggccttctggatgctttcgaaacgtcggcgtcgagggtttccctatcgaaagagacgctggatcgacggcttttgttgtgcctctatgcgctcggtacgaatgccgggatcaagcgggtcgcgggcgcaacacccgatgtgagctatgaggaattgctgcatgttcatcgtcgcttcatccatgcaccggcactgagagaggcgtgcgcgcgggttgcgaacgcgaccttggcgatccgcaacgcagccgtttggggtgacgcgggcacggcctgcgcgtccgattccacgaagttcggcgcgtgggaccgcaatctcatgacggaatggcatgcccgctatggtgggcgcggcgtcatgatctactggcacgttgagaaacgcgcgacctgcgtttactcgcagctcaagcggtgctcgtcttcggaagtcgcttccatgatcgaaggcgttcttcgccattgcaccgacatggaaatccagcgccagtatgtcgacagccatggtcagagcgcggtcggcttcgcgttttgccgtcttctcgggttcgaactcgccccgcgcctgaaagccattgcccgccagaagctggcgatcccggacacggcgatgcgtgcgcggctgccgaatctcctgccgatcctctccggcgcgatcaactgggaggagatcgagcagcaatatgatgagatggtcaaatacgccgccgccatgcagacgagaacggcggacccggaggcgatcctgcgccggtttgcacgggccgaggtaatgcacccgacctacaaggcgctgagcgaactcggtcgcgcggtcaagacaatcttcctgtgccggtatcttcgtcaggagacgttccgccgtgaaatccatgaggggctgaatgtcgtggagaactggaacagcgccaacgggttcgtgttcttcggcaagggcggagagatcgccaccaaccgggtcgatgagcaggagatctccgcctttgcactgcatttgctgcaggcgtcgctcgtctacgtgaacacccgcatgcttcagaccgtgctggtggaaccgaaatgggcgggccggatgacgccggaggattatcgcggcctcacgccgctgatttacagtcacgtcaacccgtatggtcgtttcgacctcgacctgaatagtaggatcgattttgggcggctggcggcatga

SEQ ID NO: 3320 - DNA, 432 bp, BradyrhizobiumColbertium
atgagcgatagggtcagcggacatcgtatccgtcagttcggccgcggttgccacaaggccttcaagctgaagccaaccacaggacgtttcggtcgcggtatgaagagaggcctcatcacccttggcttccagaagggcagcgcccagatttttgaaggagcaaagcgtatcgtgcagagcagattttgcatccgcgatgcgcgcatcgcacaacctcttcgcatcctgccaggtcttgcccactatccggtcatgggtctcgaccaccgcatcagcaatccccgcgtgccattccaccgcacagaccgccagaatggcgagacgccggtcgctggtgatgtctcgcaggccatcggcaaaataccgttcaccctggcggcgcagttgcgtaacccggtggggcggcagaccatccaaaatatcgggcgataa

SEQ ID NO: 3321 - DNA, 351 bp, BradyrhizobiumColbertium
ttgttgacgttcgccctcggcacggccgccggagacctcgccgctgaaggcctgaacctgggctatctgcaggccgggctggtgtacggcgcagtcatcgccgttattgcattcggctatttcgggctgaagatgaactccatcctcgcattctggctcgcttatattgtgacgcgcccgatgggcgcatccttcggcgatctcctgtcgcaaccgatcggaaatggcggcttgggacttggcaccgtgatcacgagcgcggtgttcctgaccgttattgccggcgtgatagtctatatgacgctcagccacgagggcgaggaggccgttccggtcgagcggcgcgtttga

SEQ ID NO: 3322 - DNA, 699 bp, BradyrhizobiumColbertium
atgcgatgggagatgcaggcgatgcgtgttcttgtaatcgaggacgacgccgagacggggtcctatctcaggcggggcttgcgggaacagggtcacgtggtggacatcgcgacaaatggtcgtgacgggttgttcatggcgaccagcgaggcctacgatatcctgatcgtcgaccggatgcttccccatctcgacggcctctcggtggtcaagacggcccgtgcgacgggactcaagaccccagtgctctttctgacaacgatgtctggcgtcggtgatcgcgtcgaaggcctcgaggccggcgcggacgactacctcatcaagccgttcgcgtttgccgagctgtcggctcggatcaatgccctggcccgacggccgccaatggcccaagtcgagaccgtgttgaaagtcgcggacctggagatggacctgatcagccgagaagtgcgccgcgccggtctggacatcgacttacaaccccgcgaattccgtctgttggagtatttgatgcgcaatgccggtcgggtcgtaacgcgcacgatgctcttggagagtgtctgggatttccatttcgatccgaaaacgaacatcgtagaaactcacattagccggctgcggtcaaaaatcgatcgcggtttcgacactgagctgatcgagacggttcgcggttcaggatacattctccgtgcccgcccctag

SEQ ID NO: 3323 - DNA, 1317 bp, BradyrhizobiumColbertium
gtgacgtccgctcttgagcatcaggcgcgggaccgcatggacgcggagtcttcgtcgctgctggccgaatatcggcgccacggcatggagggcttgcgctctacgatcgaggagcgatcttcggccgccaagcggcgtctgcattatgccattgtcaatgccgaaggccacgtcctgatcggtgaaagctatctggctgaatttgccgcaacgtcgaccgcacgaccgaagatcgtgcctcggtcccatggcgaagacgcaaccgaccagatcctggtggagtcgactgcattggcaaacggcttgacgctcgtcgttgccgacaatctcgaaagcgtcgaggacgtcgaagatgtggtcctgaatgggtttttcatcgcgctcggccttgcactcgtgctcggtctggcggctgggatcctcttcacccgctcgctgctcaagcgggttgaccacgtcagccggactgcggaagcaatcattgccggcgacttgtctcagcgcatcgccctgacgggctcgggcgacgacttcgatcggctttccgcgaccttgaacacgatgctcgatcgcatcgcggatttgcttgagagcctgcgacaggtctccagcgatattgcccacgatctccggacaccgctcactcacctgcgccagcgcctcgagtccgccaaagcgcgggcgtgctcgccagtcgattatcaacgtgccatcgatcaggccatcgagaacgcagaccagctcctcgagacattttcggcactcttgagaatcgcgcaaatcgaggccggggctcgacgcgcgtcgttccgtttggtcgatctggaggaggtcatgcggacggttgcggatgcttacgagccgacaatcgaggacggcggccgagctttggagttgcaacttgccgacgagcttccgatcaatggcgaccgcgagcttctgatccaactcttttccaacctgatggaaaacgcgctgcggcatacaccgacgaagacgcgcatcgtcttgcgcggatttcactcgcgcggcacagtcatcgcggaggtgagcgacgacggtcccggcatcccggaacccgagcgagatcgcgtgttccggcgattttaccgcctggagcggagccgcaccacggcgggaaacggccttggacttagtctggttgctgccgttaccgatctccatcaagccgtgattgaactgtccgacaacaaaccaggtctcaagatcacgctgcgatttccggatgcgagctctggaacgggtgccggacgcgagaacggcttggccgtatcttgcgtctctcacagtgaataa

SEQ ID NO: 3324 - DNA, 1062 bp, BradyrhizobiumColbertium
atgcctgacctgtctcaactgctccagcagagcagcgcaaacgcatggctgttcgtgcctagcgcgatcctcctcggcgcgctgcatggtctcgagcccggtcattccaaaaccattatggcggcgttcatcgtcgccgtcaggggcaccgtgcttcaggccgcgctccttggtctgtccgcgaccatctcccacacggcgatcgtttgggcgattgcgctcgcgggcctctacttcggccaagaactctccggcgaacgcagcgaggcctacctgcaactcgcgtcggccgtcatcatcatcggcatagccggctggatggtctggcgcacccggagcgagcagaacgaggagcacgaccaccaccatcacgacgagccgcactccgtctcgctggccggacagtcgctctcgctgcagatcaacgaagacgacgcgccgccgcgctggcgaatgcggaacgacaccggcgcgctcccgccagccggcggcatccgggtgacgacgatccgtgaggacggcgccgagcaatcgttcgggttcgtcgccaagtacggatacttagagagccttgatgaaattccggagccgcacgcgttcaaggcgcgcgtcgcactcgccggcgacaccgccgaggttctgttcgatgaacacgatcacgaccacatcgatctgggcgacgaggacgacgctcacgcgcgcgcccatgcggccgacatccggacgcgcttcgcgggccgcacggctacgaccgcgcagatccttctcttcggtcttaccggcgggctgattccctgtccggccgcgatcaccgttctgctgctctgcatccagttgaagcagttcactctcggcttcctcctggtgctatgcttcggcatcggcctggcaatcaccatggtatcggccggcgtccttgcggccctcagcctgcgacacgtcgagcggaactggcgcggcttcagccgcttcgcccacggggccccctatgtgtctgcagccttgatcgtcctcgtcgggctctacacggggtggatgggcgtgcacgaactcgtcttgtag

SEQ ID NO: 3325 - DNA, 162 bp, BradyrhizobiumColbertium
atgctcgtcgcatcggtccggggcgccgtcggcggtctgaccacggaactgctcgaggatcacatccgccatcacgtcgtcgatcccgcgcacgaaaaggatccggaaaaagccaagggcgcagctgacctgatcgaggtcgtccgaacgtacttgaagtga

SEQ ID NO: 3326 - DNA, 282 bp, BradyrhizobiumColbertium
atgacgaagcagcacgcccatgaaagccacgtccggatcgtcaagcgcctgaagcgcgcggagggtcaccttcgccgcgtcatcgagatgttcgacgacgggcgctcctgcctggacctggcccagcagcttcacgcagtcgagaaggcgatcacagaagcgaagcggacgctgatccacgatcacgtcgacaactgcctcgacgtcgcggccaacggcggctcctcgaagccgaccaagaccgtactcgccgagttcaaggcgatctcgcgctatctatga

SEQ ID NO: 3327 - DNA, 1218 bp, BradyrhizobiumColbertium
atgtcctctcgaaactccctatgggttctcggtctggccgccatcgtcgcggcgggcgcgttcgcggcctgggagccgggcgcgccggcgctacgcaagacggtgggcgtagccgcagccgggccgccgcagccaccccgcccgcaggcggaggagcgcaaacccatcatccggatggacgaagagcggattgccttggccaaaatcgaacagaccaaggccggaccggccacgattgcgacgaggctgtccgtcccggccgtcatcgcgccggacgccgaccgggtggcccacgtatcggtgaagctgtcgggaacggtcgccgaactccgcaagaacatcggcgacgagatcgcgaagggcgaggttctgggcgcgttggaaagccgggaggtcgccgacgccaagagcgagttcatggcggcccgcctgtccaacgatctgcagcaggatctgacagcccgcgacaagtccctttgggaaggccgggcggtgccagagcagcagtacatcaaatcgcgcaacgctgccgcgcagacggcgatgcgcctcgacatcgcacggcaaaagctgcttgcgctcggtatcgaggaaagcgagatcgcctcgatctctcacgcgcccgagggggcgctgcggctgcagaacatccgggcgccgatttccgggcaagtggtcgaacgcaaggtggagcgcggagccgccgtcggaagagacagcctcgagaccgagctctttgtcatcatcgacctcagcagggtctgggtcgagatgacggtcaactcgtccgacctccccgcggtccgagaagggcaggaggttgcggtctccgtccgaggtggaagcagcgtagggacgggcaaagtcatcttcgtcagcccgttgctggacaaggaaacgcgggcctcgcgcgtcgtcgccaccctggacaatccggatcggctctggcgtcccggatccttcgtgacggcggcgatcgccgtggaatcgcgccaggtccctgtggtggtgccggcgaccgccgtgcagaccgtggatggacggaaggtcgtgttcgtgcggatgtcggagggattcgagaagcgggacgtcgtgctcggcggccgcgacgatgggatggtcgaagtgacgtccggactcgccgccggcgaaacaatcgcgtcatcgaatacctttccactgaaggccgagctctccaagcctggcgacgaggactga

SEQ ID NO: 3328 - DNA, 3240 bp, BradyrhizobiumColbertium
atgatcgcgcgtatcgtcgaattctccgtccggcgccgctggctggttctgctggtagtgctggtcgctgcggcgaccggcctctggtcgctgacaaagctgccgatcgacgccgtgccggacgtgaccaacgtccaggtgcaggtgaacgcggtggcgccggcgctgacgccggtcgagatcgagaagcaggtcacggtcgcgctggagacggcgctggccggcattcctggcctggagtcgacgcgatcgttctcccggaacggctttgctcaggtaaccgtcgtcttcgtggacggcacgaacatctacttcgcgcggcagctcgtcgccgagcgcatcaacgacgccaaatcctcgttgcccccgggggtggaagtgaagatggggccggtctcgaccggcctcggcgagatctattggtgggcggtcgaatacgaaaagcctggcgccacggcgcccgtgcgtgatggcaagccgggctggcagagcgatggcagctatctcacgccggaaggcgagagattgactgacgactttcgacggacggtctacttgcggaccgtgcaggactggatcgtccggccgcagatgaagacggtaccgggcgtggccggcgccgacgcgattggcggattcgtgaagcagtatcaggtgcagccggatccagcgaagctgatcgcgtacggcctttcattcaagcaagtcatcgatgcaatcgaagccaacaatgccagcagaggcgccaactacatcgagcagaacggtgaagggtacgtggtccgcgccgccgggcgcgtcgcgaacgtcgaggacatcagacagatcgtggcctcgacccgcaatggggtgccggtgcggatcaaagacgtcgccgacgtcaccatcgggaaggagctgagaaccggaagcgccagcgtcaacggacgcgaggtggtcctcggaacagcgctgatgctgatcggcgggaacagccgcaccgttgctgccgcggcggactccaagattaaggatatcagtcgggcgctgccgccgggcatacacgcccggacagtgctcaatcgcactcagctcgtcgacgccacgatcctcacggtcgcgactaacctggcggaaggagcgctgctggtgatcgccgtgctgctcctgatgctcggcaatttccgggcggcccttatcactgcgtgcgtcattcccatcaccatgttgctgaccgcgacgggcatgctgcgggggcacatcagcgcgaacctgatgagccttggcgcgctcgacttcggtctgatcgttgacggcgcggtgatcatctgcgagaacagcctcaggcacctcgccgagcggcaggtcgccctgggacggactctgacgcgcgacgaacggctcaggacgatctccgattccgcggtcgagatgatccggccgaccgtctacggccagctcatcatcatcctcgtctacgtcccgctgctcgccttcaccggcgtggagggcaagacgttcgaaccgatggccctgacggtgatgatcgcactggcgatggccttcgtggtctccctgaccttcgtcccggcggcgacggcgatcaccctgacaaagtccgtaagggagaccgagaacttcctcgtccgccgactgaaggaggcttatgagccgatcctgtcgcgaagcatcgcaagtccgggcgtggtcgtcgcgtcggcggctgtgctctgcgccgcctcgctcgccttgttctcacgtctgggacaggaattcacgccgacgctcgacgaaaagaacatcgtcatggaggtgaagcgcgtgccgagcacggccttggcccagtcgcaggccatgcagctcgagatcgaaaaggtgatcagcaagttcccgcaggtcgccttcgtgttctcccgcaccggcacgccggatctggcggccgatccgatgccgccgagcgcgtccgacacctacatcatcgtcaagccgcaaagggaatggcccgacccctcgatgacgaaggacgatctcatccaggccatcgaggtggaggcgaccaagcttcccggcaacaaggtcggcttctcgcaaccgatcgagatgcgctttaacgaattgatcgcgggggtccgtgaggatctcggcgtcaaggtgttcggcgacgacttcgcggacatgcagcgtacggcagcccgcattgcggacgtcctgcggaagatcgatggcgccgaaaacgtgaaggtcgagcagaccaccggactgccgttccttgacatcaagatcgacaaggccgaaatcgcaaggcgcggcctcaatctcgcagacgtccaagacctggtcgagactgctatcggcgggcgcgcagcggggctagtgttcgagggggatcggcgcttccagatcgtggttcggctgaacgacgcgctgcgcggcgacatttccgcgcttgagaacctcccggtgccgttgccgcattcgaatccgatcgcaccggcggcgaccgtacccctgcgtgcggtcgcgtcgttcgagcagaccgaaggggccaaccagatcagccgagagaacggcaaacggcgcgtcgtcgccaccgcagaggtccgcgggcgggatatcggatcgctagtcaccgaagcgcaggaaaaggtcgcggaaggggtgaagctgtccccaggaagctacttggcctggggcggacagttcgagaacttctcggtcgcgcgccagcggctcgccatcgtcgtccccggatgcttcgcgatgatcttcctgctgctctttggggcgctcgggtcggcacgcgatgcgctactggttttcagcgccgtgccgctcgccctgaccggcggaattgccgctttgtggctgcgcggcatgccgttctccatatcggcagctgtcggcttcatcgcattgtccggtgtagccgtgctcaacggtctggtgatgttgacccagatccggtcgctgatcgagcgaggggtggcgcctgtccgggcgatccgcgacggagccctgacacgctttcgccccgtcgtcatgacagctctcgtggcctcgctcggcttcgtgccgatggcgctggcaacagggacgggcgcggaagtgcagaagccgcttgccacggtcgtcatcggcggattgctgacggcgacagtactcacgctcgtggtactaccagcactctacgcaaggttcacgaggcgacagcagatcagttctgttcttgaacgaagtggaatgcctcgggcggctgaatga

SEQ ID NO: 3329 - DNA, 216 bp, BradyrhizobiumColbertium
ttggtggcggccggcgaaccgcgcttcaagatcgacgatttagggcaaggaccactcctgccggccctcgccagagtgaaagtggcacaggcaagtcttgcgacgacaaagaacctgctcaaagctggcaaaggattgagcgtcgcaggctctatcagcaccatcgacgtggacaacagccggtatgacgggaggctttcaatgacccacatctag

SEQ ID NO: 3330 - DNA, 150 bp, BradyrhizobiumColbertium
gtgtccttcattctctatcagctctacagatttagccatacccattcggtctggctcttgctgatcacgctattggatgtagtcgtgatttggttgacatggcacgagtaccgccatttgcaaaagcatcatgcagcgatcggcccatag

SEQ ID NO: 3331 - DNA, 165 bp, BradyrhizobiumColbertium
atgagcattccatttcaggaaaagaaccttcgtctcgcatttcggattagcctcacgatcaagggcgtcttcgctctactggagatattcgctggcatcaccgcgcatttcgtcagccagcagttccttttgagcgccatccttgcaataaccgcgaagagctga

SEQ ID NO: 3332 - DNA, 723 bp, BradyrhizobiumColbertium
ttggcggcattcctcgcctcgcttgtcgaattcgtggaagcgctgaccatcgtgctggcggtcggaattgtgcgcggatggcgccctgcacttgttggcacggcagccggcaccgtgcttctcgccgcgatgattgccctgctcgggccattactgggacagatacgaatcgagcttcttcagttggtaatcggattcttgttgctgctattcgggatgcggtggctgcgcaaggcaatcctcagagcggcaggcattatcccgctccacgacgaaatcgccgctttctcctcggaagtcatccaactccgctccgccgggccgatggccaccatcatgctcgacccgattgcggtcgggacgactttcaaggccgtcgtgctcgaaggcaccgaagtggtcttcatcgtccttgcagtcggtgctcccggcaatgcgctgataccggcgagcgttggagccgccgctgcgggcgttctggtcatcgctctcggtatcgtcttgcatcggccgctatctcgtgtcccggagaacgccctcaaatttgccgttggcattttgatctccgggttcggaattttctgggtcggcgaaggactcggctttgaatggccgggtcgcgatcttgcgctgatcccgatgttcgcgttgctcctcacgacatcgctggtcggggcgcaactcgctcggcgggcgaccgtgccatccggagccaacaaatga

SEQ ID NO: 3333 - DNA, 162 bp, BradyrhizobiumColbertium
gtggcggctctttacgtcgccgaagtggaaggcaaatcggccgatgaagctgctcaacagctttcgctggtctacgggcattttccctatctcctgagcaagacaaatgcgatggacaagagcttttgggagtatgttgaagcgcatcgctcatcccggtag

SEQ ID NO: 3334 - DNA, 162 bp, BradyrhizobiumColbertium
gtgaatacgagatcggattccgtcacattgagtgacgggacgacctattcgttgcccgaaggcatcgagactgaatctgtgaaagttggagagaaggtcaggatcaaattttcttctagtcacaatcagaatcgagcctcttccttggtcaaggcgaagtaa

SEQ ID NO: 3335 - DNA, 531 bp, BradyrhizobiumColbertium
atgccgggattggcgcagggagcgacgcccctaccggcactcgagaacccgattaagtcggagaagaacccaccaggcgacattcctgacaatcaagtcttcatcgactatcagtcgccgcttgggttcacgatcaaggttccggaagggtgggcgcggcgtgaagcatccgatagcgttgttttcagcgacaaatacaacaccattgaactcaccgtcgcacagcgcgccggatcgatcgatttgaacaatgtgaagcagaaggaggtcgccgacctggagcgatccggcaaggcggttcgtgtctcaagagtcaagccgacctcactgccatcgagcagcgcgatcgtcgtttcctacgggtcgaattccgagccaaacgcggtgaccaacaaggcggtccgccttgagaacgagcgctacttcttgtggaaggacggcaagctagtcaccttgacgctgtcggctcctttcggagcggacaatgccgatcagtggctgctcatggccaagagcttcaggtggcgctag

SEQ ID NO: 3336 - DNA, 663 bp, BradyrhizobiumColbertium
atgactgttctcgaagccatcgacctctaccgcttcttccatacccgcgagtccgagaccctcgctctgcgcggtgtcagcctgtgggttgatgccggcgagatggtggcgctgatggggccgtcgggcagcggcaaatctaccctgctcgcttgcctcgcgggcctcgatgaacctgacggcggtcacgtcgagctgctcggtgagcgtctgacacggcttcccgaagcggagcgagcgaagcgacgagccgcaagtgttggcgtgttgatgcagtcgggtaacctgttcccaaccctgtccgttggcgacaacgtcaaattgccgatgctgctggcacgcaggaaagatcctgcgtgggcagaaaagctgttgcggagtgtcggcatcgcggagcgacggggggcgcgtcccgggcaattgtcggggggcgaattggcgcgagcgggccttgccgttgccctggcggcccgcccgcgtgtgctcctggcggacgaaccgacgggagaggtcgatgccgccaccgaaggattcattctcgattttctgaacgaacaacggcaggcgggaacaggcattctggtcgcaacgcacagccgaccgctcgccgaccgagccgatcgaattgtccaacttcgggatgggagggtcgtcgatgcctga

SEQ ID NO: 3337 - DNA, 393 bp, BradyrhizobiumColbertium
atggacgaccacgcggagacgctggcgacacttcagcgactgcgggagatcggggtccaaatctcgatggacgacttcggaaccggctactcgtcgctcagctatctgcagagctttccgttcaacaagatcaagatcgatcaatcgttcgttagaggccatcagagcgagacgagcaagatggccatcgtgcgcgccatcgccaccctgggcagcagcctggggatgtcgacaactgccgaaggcgtggagacggagcagcaactcgccaccatcctcgccaatggttgcagcgacgcccaaggctatctgatcagcaaaccgctgaaggccgatgcagtgaatgaatttctgaaccgacccaaagctctcacgtgcaaggcgcaatcatga

SEQ ID NO: 3338 - DNA, 144 bp, BradyrhizobiumColbertium
atgtcggcgatcgcgctgtatgcgctcgaacgtctgctcgacatccgccagtcggccctcgaggacctgcgcgaatatgcctttgttgaagatgagagcgccggagacgtcgacggcgccgttgttccgttgagaaacctttag

SEQ ID NO: 3339 - DNA, 114 bp, BradyrhizobiumColbertium
ttgttcggcccgatcagcgcaagcaccgggttcgaagcagcgaaactggaaggtgatcgcattctcaagatcatgcgagagattgcgatggacgaggaagaacgagcggcgtga

SEQ ID NO: 3340 - DNA, 225 bp, BradyrhizobiumColbertium
gtgctacacaacaacaggggcaagaagatcgccgatcctgtcgacgcccgacgcaaggtggccggccgctcgatcgtccatacaggcgtgatcgccgccggagatgctcttctcaaggatccggtcacgcgcgacaaatccggcatatcgtttgcggcaatggcgatccgatggaggcagccggattgcaggaagcagcggactcccggagcaccgacttcatag

SEQ ID NO: 3341 - DNA, 141 bp, BradyrhizobiumColbertium
gtgcttctatgggcacgaggcgacgagccggaagatatcgccaggagattcaaactggacttggccatcgttcaagaggccatcgaaatgcacgggcacaaattcaagcgccgcaagttgcgccgtcgccgcattctgtga

SEQ ID NO: 3342 - DNA, 1053 bp, BradyrhizobiumColbertium
atgtttctcgcggtgccattcgaatgtcgctatgaggtcgagttcattccctatcgcggtcggaaacctcgtaaacaatttttccgcgaaatgggcgcatcgcttatcctgaaccaagccgatccgtcggaggcgaaaccggcctttcgcgtcacggatacgacgttcatcggccggcaccggttttccgaggagatactggcctggaaagggcaattgtggtggcccctcaagtggtcctatggttcggaagaacatgtgaccgaaggcgatctgttaggtgagctggcacgtctggacgaagatgtgttcaggcagcacatacgccggcgcatcttggagccgccgcttccgaagaggaacgaagttcccattcaaagactgatctcggatgatttcgagaccacgctgcgagaatgccgccgaaaggcgctgtcgtatctcctgatctgcgatggattcgcatatgtggcgggtggtgagcccatttatgtcttgtcgaaatacggagttcacgtcgtcgccgccgcggggcccgatcgcgctgcgcgcccacgaaatcagtggattcattgccatctcaggaccttcgacgatccgcttgagccgattttctccgctgatcagttcgaggaggcgaaaaggtcgcttcctctgaaatatcgtcggcgtcgcgtccccagaatcgacgttctcgagccgcgagcaatccaggtttccttgagcaccatccgctgcgatgttcttttccgtcgcttggtccacgatgtgacctactcgaatcactatcatccgaacgacgctaggctgccggactcctatccgggagcggcggaatttcgggagcggctgtttcgggcggcggacgggcccttggtaggcgatgaactttcccgtcaacgcattgctctgcttcgcgagtgcctgcagttcgaaccggtgcggggaacgttgcgtgccgggatcgaggagttcctgataaacgccggtaccgcagcgagcttggaagagctcgatccgtcggactgggcggctctcgcgtcaatcgcctag

SEQ ID NO: 3343 - DNA, 1902 bp, BradyrhizobiumColbertium
gtgccgaagatcgtaaagtcgccattaaccgtcatcgtcgtgctgctcggcttcacgctggcgagcttctggtcgctcatcgcttggaaggccgggcaggaaagagcggccgccttcgcgaaggccggcgcggagacgcagggactgacgcactccctcgcgcagcatgcctcgaagagcttcaacgccgtcgccttggctctgttcggagcccgccagtacatccagcattccgacaggtctgcccgtgcgtccgccgagatcaacgatctgctcgctcaatacgccaggaacattccgcaggtccgcgagatcggcgtgctctcggaaaccggcgattggatgttctcgtccttcgagacgatacccccgatcaacaacgccgaccgggaatacttccggtaccatcaggcgcaccccgaagaagccgaggcgcggatcagcgatcctctgatctcgagggtggtcggacggccgacgctgctcatgacgcagcgactgtcggcgtcggatggttctttcgcgggcgtcgtcttcgcggcgatcgacctgtcgtattttcggtccttctacgccgggttcgaagcggagcgggatcgcacgatcacgctcatgaagacgaacgggaaggtcctggtccatcggcgcgacgatcaggtcggcaaggacgtcggcggcagctccctgttcgggacccggctgaaggattcggtgacgggcctctactcgatcgtctcgcccttcgatgggcgagcgaaacagtttgcctacgaggcgctgtcggacttccctgtcgtgatcagcgtggccgtcgcggaagaggccattctcgaagaatggtggaaggaccggaattttgatctgcttctcggcggcgcggtgtccacggttctcctgggttttgcggcgctgctcgcggctcagttccgcaagcgtgcgtcgatggccaggatgctgcgcgagagggagcgggggtaccgcctgctcgccgagaacgtcgaggacgtggtcacaaggattgatgcggaaggacggcggctctacatctcgccgtcggtcgagaagctgctcggctggtctgcggccgagatcataagcgaaggggcctattccaacatccatcccgcccatagtcgcctggtcgaggacctgatccgccggctaggccccgacaaccgcaccgcgacctgcgaatatctcacccgccgcagggacggcaattacgtctgggtggaggcccagctgaacttcgtcgaggagccggaagaacggcggcccgagatcgtcggcgtgatccgggacatatccaagcgcaaggctgcggaagagcagctgctcgaagcgaacgagcagctgaaggcgctctccgaaacggacaccctgacgggcatcgctaataggaggtgtttcgaccgcgctttggaggcggaattcaagcgatgtcagcggtccgggtcgcagctttcggtgctcttcatcgatatcgacaagttcaaggcgttcaacgactgctacggccattcggctggagacgagtgcatccgcaaggtcgcccgggctctcgccgccagcctgaagagaccggccgacctggtcgcccgatacggaggcgaggagttcgcgatactgctcccggagacgacgcccgccgaagcggaagccgtcgcggaaagcgtccgcctagccgtcgtggaccttgcgataccgcacgaaggaaatcgccacggctgcgttacgatcagtgtcggcatcgctggtctcgaagacgatgtgcggagctcgccggcgtcgatgctggccgccgccgacggggcactttacgtcgccaaggaacagggacgaaaccgcgtctgcgcagccgccgagaacccgagtctcaccttggcaagacaggtcggctaa

SEQ ID NO: 3344 - DNA, 1281 bp, BradyrhizobiumColbertium
atgctgctgcgcaaggcctaccgctacagggtctatcccgacgtcgcccagaaggagctcttccggcggacgctcggatgctgccggcttgtctacaatctctgccttgagcagaagaacgagtatctccgccgccgcaagagtctgtccaagttcgaccagatcaaggagctgaccgcgctcaaggaggcgttcgacttcctgtacgaggtcccccaccacccgctgcagcaggccgtctatgacgtccacgccgccttcgacaactacttcgggggactgaagcgtcagcgcgagcttgcgatgcgcggcatcaaggccaatccggaagactttcccaagtggccgacgttccacaagcgcggacggaaggagagcttccgctatccggaccccaagcagatcaagatcgagcccgaccgcatcttcctgcccaaggccggctgggtccggatcgcgatccatcggccgatcgccggcaggatcaagaacgtcaccgtatcgacgatcgccggcgaatggttcgtgtcggcgcaaacggagctggaagcggtcattccggccaactcggggcctcccgtgggcatcgacctcggaagcgcccagccgattgttctctccgacgagacggtgttcggcattccgcgcgcgacgccggccgagcgccggaggttggagaacgcccaccggacggttcaccgccgcaagaaggggtcgaagaaccgggagaaggccaaactcagactggccaggttgcaggccaaagctgcccgtcgcaggagggacgcggcgcacaaggcaaccacgaccatcgccaagaaccacggcgtggtcgtcatcgaggacctcaaggtcaagcggatgacgaagacgggccgcggcacgtcggaagctccgggaacgctcgtcaggaagcgggcgaacgagaaccgcgctctgctcgacatcgcgcctcggacgatccggacgatgctggagtacaagtgccagtggtacggatcgaccctcgtcgccgtcggccccgcccacacctcggagacctgcagcgcttgcggcgtcgtcgatgcggaagcccgcatcacccgcgctcgctacgtgtgcggcgcgtgcggcggagacttcgacgccgacgtcaacgcggcgaggaacatcctcgccagagcaatcagctcaaccggaggacttccggggatggcctgcggatcgagccagactatcggccggacgcaggaaaaagacgctcgcgagagcagaagctcggcccttcagggccgagagtag

SEQ ID NO: 3345 - DNA, 357 bp, BradyrhizobiumColbertium
gtgcgcattctcgtcgtggaggacgaccctctcatccgtgaattcgtggtcgacgcgttgcgggaggccggcttcttggtgatccacgctgccgacggcgaggaggcgctcgcctgctgcgcacggaaggcagcggacgtcctggtcacggacatcaggcttcccggcaaggtcgacggctggcagatcgccgaaaggtctcgagagcaaaatccaagactgtccgtcatctacgcgacgggcttctcgccggtgcctccccgccccgtcccagatagcgtacttctgcacaaacctttctatccccacgatatcgttcgggtcgtcagggagatgactgacgaacgagaggagtag

SEQ ID NO: 3346 - DNA, 120 bp, BradyrhizobiumColbertium
atgaagcctaaactgccgaaggtttgggcggttccgggtgccgcatgggcaatcggcaggctgacgtccgaggccgttttgtgtctgggtccagcagacggtcctagaatttcagcgtag

SEQ ID NO: 3347 - DNA, 183 bp, BradyrhizobiumColbertium
atgcaggacatggtcgcacagctggaaaagctcagaaccgattcggccgagtgcaagctcatcagcgacctcgccaccgaccctgccaagcgggagctgttcgcgcggatcgctgagcaccttgcggttctggccgacgaggtcgagcgcgtgatagccgagccaccaacaggtacagattag

SEQ ID NO: 3348 - DNA, 201 bp, BradyrhizobiumColbertium
atgtttgacgccgctacgaccgctcttttgcggtcgatcctggaggaggtctgccgaaacgtggccagcggcgagaccggcatgcgcacgcacgtcgcgagcaagatcctcgaggccgcgcggcagggcgaggttgccccggagaggctgcgtgaggtcgggcgcgacgcggtttcccgcgcccccaccatgtggctttga

SEQ ID NO: 3349 - DNA, 414 bp, BradyrhizobiumColbertium
gtgaatttccaggtgaccgtcctgaagatattggtgagctatccggaaggattcgccgtgatggaggacttgaagcgggacatggccatcctggcgaccagcggccgcgagtgggcggaccggaccaagcggcttgcggcgcgggtgccggacctcgacatcttctcgcaaggtcttgtggagcgcgaatccggaggctggaagatcactcccaaggggcgggccgtcctggagttcatggaggcgcgcccggttacggagccgccgcatccggcatccgtcgcgggggccgctgcggcggacgccgaacctgcgcttctgctagggcagccggtcgacagggcgaagcgccggcgcgagcgccgggaacgacgccgcgaggcccgggagagggcgcgcgccaaggcatcatga

SEQ ID NO: 3350 - DNA, 456 bp, BradyrhizobiumColbertium
atgaaagacaggcgaaagaaaaaggaaggcgcggccgcccatttctttggccagttcgccacccgcacctcgcaggccgcgggacgcgcgtcgaccttcgtgatcgccgccttggtagtcctggtctgggccgtgacgggaccgctattcggctattccgacacatggcagctggtcatcaacaccggcaccaccatcgtcaccttcctgatggtcttcctgattcagaattcgcagaaccgcgacagcgcggccatgcaggtcaagctcgacgaattgatcagggtcggggcggcacggaattcgctcgtcggcatcgagcatctcaccgacgaggagatcgaagacctgcggaagaaatgcgagtcgcgcgccaaggcggaaaaggcggcgaacgagcacgtggagacaaccggacgccgagcccggcgcgccgccgagcaggctgcgaattga

SEQ ID NO: 3351 - DNA, 3192 bp, BradyrhizobiumColbertium
atgttgtgggggccggacggcatcatgctctacaacgacgcttattcgctttttgcaggtggacgccatcccgggctgttgggatcgagggtgcgtgagggctggccggaggtcgccgacttcaatgacaacgtcatgcgcgtcggcctcgctggaggcactctgtcctataaggatcaggaactgacgctgtttcgaagcgggcaggccgaacaggtcttcatgaacttggactattctccggtcccgggcgacgacggtcttccggcggcagttcttgcgatcgtcgtcgaaaccaccgaacgcgtgcgcagcgagcgtcttcaggactttcgccgtggactcaaggaccggctgagagaactttctgagccgcgcgacatcctgggagccgtcgtcgattccctgggaacgtatctgggcgccaaccgggtcggttacagcgagaaacgagatagtgacgacgccgtcgtcatcctgtcctgctacgcacgaggggtcgagccgatcgaaggtttacacaaggtgggagacttcggatccgagagcaactcacggcagcgacgcggacttgtcgaggtttgcagcgacgtgctgacagaccctgcgcaggtgcactccacctgggcagctatcgacacgcgcgctttcgtctctgttccgctggtgcggaatggacagtttaaggcctcgctcttcgtcaacttccgggaaccacatttctggacggacgaggaggtggctctcgtcgaggacgtcgcgatccggacctgggaagccgtcgagcggacccgcgccgaggacgcggccgaacgcgcgcggttcgagcaggccggattggcctcgacgttgaacgcgctgatcgccaatgcgcccatcgggtttgcctttttcgatcgtcagcatcgctacacgcgtatcaacgatgtgctggccaacatcaatggtgttccggctgccgctcatctcggccgaaggatcgaggagcttttgccggtcaacgctcgcgtcgtcgcacccattcttgaacacgtctttgccaccggagagcccgtcgaaaatctcgaagtcgacggcgagacccctctgagcccaggcgaacttcggtcgtggcttaccgggttctttccagtgttcgaaaagggcgaggtcgcgcaggtcggtgcgaccgtcgtcgaaattaccgagcgcaagcgcgcggaggaaaatcttcgggcgagcgaggagcggttgcggctcgccaccgaacacgccgagatcggcttctgggacgtggacgaggtcaatcagaaacttcactggcccccgatagtgaaggcgatgttcggcatctcctccgatgtcccagtctccatgcaggacttttacgaggggttgcacccggacgaccgagacagaaccagcgtggcttacgcggccgccgccgacccggaccgacgcgccctctacgatgttcaataccggacggtgggcaaggagggtggggtcatccgttgggtcgccgcaaaaggcaggggcgttttcgacagcaacggacgctgccagcgcgttcttggcacggcgacggatatcacggcgaagaaggctgccgaagccgccttggcagccagcgaagcgaggcttcgcgagctcaaccaaacgctcgagctgcgggtcgccgaagctctggccgagcgcaagctcttggccgatatcgtcgatgggacggacattttcgttcaggtcgccgaccgcgacttcaattggctggcgatcaacaaggcggcctccaatgaattcgccaggatcttcggggtccgacggccccacgcgggagacaacatgctggccatgctggaggctcagcccgagcaccgagccgcggtgaagcaggtgtgggcccgggcgcttgcgggcgaggagttcgtcgaggtcgacgcgttcggcgaggcatcattggatcgccggtactacgaaatgcgattccggaccctgcgcgacgggggcggcaggcctatcggcgcctaccaattcgtctccgacgtaactgaacggttgcgcgagcaaagccggctgaaggaagctgaagcagccctctcccaggcccagaagatggaagccgtcggccaactcaccggcggcatcgcgcacgacttcaacaatctacttggtgcggtggtgggctcgttcgacctgatccgccgaagacccgacgacaccgaaaaggtgcgccgctatgcagaggccggcttgcaggccgccgagcgcggcgcaaagctcaccggtcagctcctcgccttctcgagggcgcgagggcggctcgagatcaagccggtccgggtttccgctctcgtcgcaggcatgcgggatcttttggttcgaacgctcgggcccatgatccacgtccaactcgacctgcaggaggacggtgccgtgttgtccgatcccactcagctcgaaatggcgctgctgaatcttgcgatcaacgcgcgcgacgccatggtgtccggaggacggcttctcatccgtacccgcacgctttccgtgtcggatcagatcgggctggagcccggcgagtacacggagcttgcagtcgaagatacgggggcgggtatgccgcccgaagtcgtcgggcgagctttcgatcccttcttcacgaccaaagaagtaggcaagggaacggggcttggattgagccaagtctacggcatcgcccggcaggcgggaggcaccgtccgcatcgacagccgggtcggagagggtacgatcgtcagtattcttctgcgcaaaaccgacgcgccagttgaggaatccagtggaggcgaggttgagaccgcccgttggccggaaaaatccgcgaaggttctgatcgtcgacgacgatccggacctcagacgcgtgctcgccgcctcgctcgaggccctcgggtatctcgtggtagaggccagggatgggccacaaggactggcattggtcgatgaagccgagccggacctgatcgttgtcgatttcgcgatgccggggatgaacggggcggaggtggctaggatcgtgcgggagacgcggccggggataccgatcgtcttcgcgagcggctatgcggacactgccgcgatcgagcgttttgcatcgaactcggccgtgctgcgcaagcccttccggatggacgaactgcaatccgtgctgacggaagtgctgcgccagaggtcctga

SEQ ID NO: 3352 - DNA, 186 bp, BradyrhizobiumColbertium
atgcccgatcgagctctccttctacggcagaagctgcggcgcattcgccatctcggacaaacttggtcgctgttccagcgggagggcgtgcagcgcgccagggacgcagcgcttgacgaatgcggcaaggctggcaaagcttgccgcattattggagcggtctgcgccgacggctccggccgctga

SEQ ID NO: 3353 - DNA, 141 bp, BradyrhizobiumColbertium
ttgtcggtctgcgacttgatctttgagtattttcgtgatggcgccggttcggcaccggttctgaacgcctacatatcctcggcagtggagtgcggcagcgatgcgccgcaagtcgacttggctccttatgtgaaggagtga

SEQ ID NO: 3354 - DNA, 120 bp, BradyrhizobiumColbertium
gtgcacgtcgacgctggccggacggccgacctattgcaggccgtctttgccatcgtcgccccgcaggtcggcctcgtttcgattagtgacgtgcaggtggtgcggccggagcgtttttga

SEQ ID NO: 3355 - DNA, 972 bp, BradyrhizobiumColbertium
gtgctcgcgctcgccgtccagaatctcgtctcgccctcggtgctgttcttcggcatgggtatcggcgcctcgctgggccgctcggacctgtccgtcccggaggcgattgcacgttttctctcgctgtatctgctgatctcgatcggcttccggggcggcgccgaagtcgcccatcagggactcactctagctctggttctgacgatcgcggccggcgtcgttctgtcggcgggcttgcccttcatcgcctacgctttgttgcgttacggcgcgcgcctcgaccacatcaacgccgcggcggtggccggtcactacggatcgatatcggccgtgacgttcgttgccgtcaccggcgcgctcacccagttctcaatgccctatgacggctacatgatcgcggttgcggccgcgatggagacgccagcgatctttacggcgctgctcatcgcgcgcagcgggcacggacgaaccaaggacgggttctccggaggcttccttcgcgagatcgccctgaacggctcgatcgtggcgttgctgggtgcgtttacggtcggctgcatcaccggcgagcgcggaatgacctcgctgaagcccttcctgctggacgcattccccggcttcctctgcatcttcctgctcgacatgggcctgatcgccggacgcggccttcgggacggctggagatcgttgacacccgcggtcgccggatttgcctgggggatgccgctcatcggcgcggcgtccgcggcgctcttcgcctggctcattgcactgtcggcaggcagcacggcaatcctgatgacgctcggcgcatccgcatcctacatcgccgtgccggctgccatgcggcttgccctccccgccgcgaatcccgcgatcgcgctcacgctctccctgggcttgacatttcccttcaacctgatcgtcggcatcccgctgtacatcgctgccgctcagatgatcgcagggtaa

SEQ ID NO: 3356 - DNA, 888 bp, BradyrhizobiumColbertium
ttgtctcaacgatcatcattaaaaaaggcaatgatgatgccgcgttcgcgcttgaacctcgacatcgacctcgtgcggtctttcgtgacgatcgtctcgctcggcaatttcacccgtgccgcgcgggcgctcggcctgcagcagtcgacgatatccctgcagatccgccggctcgagcaactcgtgggcggcaagctgctcgagcggtcgccgcagtcggtcgccctcaccgccgagggcgagctgttcgtcgacgacgcgcgacgcatgctcgatctcaacgacgagatggtcgcgcgcatgcgcgagccctcgattcgggggctggtcaggctcggtgcacccgaggatttcgcaacgcgccatcttcccgacgtgctcgcccgcttcgcccatgcctatccccaggtcgacctcgaagtcacctgcgacctgacgatgaatctgatcgagcgcttccgcaaaggtgctttcgatctggcgctgatcaagcgcgaacgctcgttcgagatctccggcacacgcgtgtggcgtgagccgctggtctgggtgacgggcggggtggacctcaggcaaggggtgctgcctctggcggtctcgccgaaaccctgcgtctaccgcaagcgggccaccgaggcgctcgatcgggccaagcgatcctggcgcgtcgcctatacttgcggatcgctggccggaacgctcgcagccgttcgcgcccggctcggggtcacggtgctgcccaaggacatggtcccgcccgacctccacgtcgtggatggaaggccgatgcccgatctgaaggacacggagattgcgatcttggagcgcgatcgtcttcccctgccggcgcagcggctcaaggatttcgtgatcaagaccttgagctga

SEQ ID NO: 3357 - DNA, 120 bp, BradyrhizobiumColbertium
gtgggagccggcagcggcagccgccgcagcgacgacggttgccgcttcacaccgtgggagcggcggaactggaccgaggctctgaccgtcgccggcttcgacactctcgacgccgcgtaa

SEQ ID NO: 3358 - DNA, 120 bp, BradyrhizobiumColbertium
atgaaggcgcggccctgcgaggtcgtctccaactgccgctcgcgacggcacgaaggcgctcgcgagctcggcgatctcgctcaaagcagccgtctcgccgcagcaccttcgtcgccgtag

SEQ ID NO: 3359 - DNA, 375 bp, BradyrhizobiumColbertium
ttggagacgacctcgcagggccgcgccttcatcgacatctcgcgcgccgcatgggatgccgacggattggatgccatggtcgcaccatgcagcgcgcctctggtctacccagtcgcggtcggtgtggttgccgcaatgcacgccgtgccgctggcgccgacgctgcacgccttcctgcatgctctggtctcgaactggatttccgcggccagccggctcattccgctcggccagaccgatagccagcgcgtgctggtgaagctggaagccgccgtctccgccaccgccaatcgcgcgctgaatgcaaccttggacgatctcggcagcgcgacgttccgcgctgatctcgccagcctgcggcacgaaacgcaataa

SEQ ID NO: 3360 - DNA, 441 bp, BradyrhizobiumColbertium
atgggctatctcgctgctgcctatccatgggctaaggccgctcacgtgctcttcgttatcttcctgatgtcgggactgttcatgatgccccgtttctttgtctatcaccaggagaccatgctcggatcggatgaagataagcgttggatcgagcgcgaaaggcggttgcgcaaagtcatcctaaatccatcaatagctttcgtttggttgttcggcatttttttgactgtacagagtggagcttggcgtttcggctggttccacctcaagatattagtggtgttaggtctaaccggatattatgggtggatcgtcagttatacaaagcgactggcgaccgggcggcgctccttgacaaatcgacaacttcgaatactgaacgaaattccaagcgtcgcgattgtgatgatcgtcattgcagtaatcgtaaggcctttttga

SEQ ID NO: 3361 - DNA, 174 bp, BradyrhizobiumColbertium
atggcaatcctcatcccaagtctgggcttcgcgcgcttcgacagccgcggagagttacgactcgcggagcggctcaaggattttctcgaagaggttgtcgtctggcacaaccttcctgttggtccgctcgaccggcatcccgacttcatcatgctccgcgtgtctctaccctga

SEQ ID NO: 3362 - DNA, 492 bp, BradyrhizobiumColbertium
atgctcgattggttcatgatcggggtgacggatttcacgattccggtcatggttctggcggtcgcggtgcggtggtggcaacgcgaggacagggcaaacgagaggatgctcgcggtcgacgccggactgacctttcttttcggtctcctcattaaccagtttatcctgttgtttgtaagtcgtctccgcccctacgagctaggtataacccatctcatcgtcgcacgcagctccgacccctcctttccttcagatcatgccacggccgcgatggcgatcgtcgccgcgacactgctgcagcatcgccggctccgcgcgctgatcttggcgattccggcggcgctgctgatggtctcgcgcatctacgtcggaacgcactacgtttcggacgtagtcggcggcatgggcacggcgctattggcggccatcgtgatgcgcgcgacggtcgccttgcgtcagccgatcaccgaggtgatcatccgttttccataa

SEQ ID NO: 3363 - DNA, 249 bp, BradyrhizobiumColbertium
atggagaagcggcaagcggacagacggcgcaccttcaagggtggcaagattgttttcaaccacgggcgctcaatcatcgactgcaccatcaagaacttgtcgcagggtggcgctgcgctgaatgtcgaaaacacctgcggaattccggacgagttcatccttcttgtcaacgccgacaaagcgcgaaaggcctgccgggccgcctggagaacgcaaacccagattggcgttgctttcctggaggcttag

SEQ ID NO: 3364 - DNA, 837 bp, BradyrhizobiumColbertium
atgcaagagagaaatgccggtcgccatgcagggcaggacttctcatcaccgtctgcttcaatcgaactgcaggattttgccacaaaagtaccggcggttactctctcgttctgggtgatcaagatcgccgccaccacgctgggcgagaccggcggcgataccgttagcatgacgttgcattgggggtacctcgccagcaccgcgctgtttctctcgatccttgcggtcttggttgtgctgcagaccgcagcgaagaggttccacccgttcctttactgggccaccatcatcgcatcgaccacggccggcacgaccatggctgattttgccgatcgctcgctcggtatcggctatgctggcggctcctcgatcctatttgcttgcgtcatctttaccctgggtttgtggtactggtcgcagggatcgatctccgtcgacaccgtgaacacgccaaaggtcgaggcattctattgggcggcgatcaccttctcgcaaaccctgggcaccgctctgggcgactggacggccgattcgaccgggcttgggtacgaaggaggggcgattgtctttgcggcaggacttgccgtcctcgcagcgctgtattatcggaccacagtttcacgtgttctgctgttctgggctgcgtttatcctgacacgaccattgggcgcgaccgtgggcgacttcttcgacaagcccgtcagccagggcggtctgcacctgagccgccctatcgcttcggccgtgattgccgtcttcatcgtcgcctgcctcttgattttccctcagcgggccggccgacatccggcagggcgcctcgccagcgatgcggtctaa

SEQ ID NO: 3365 - DNA, 516 bp, BradyrhizobiumColbertium
ttgcagtacggcaccaccgcgagagttcttcactggctcgtcgtcgtactgctgctcgcgcaatattcgattggatggctgatgccggacattcaccgcggcgagcagccgggcatcggcatgaccctccacgccagcttggggatcctgatcctggccgcaatgctgctgcggttcgcatggcggcttgcccatcctgtcgcgccagagagctcgctgtccacctggcagcgcttgagctcggaaatggtgcactggtcgctttacgcgctggtgctcgcgacgacgctcacgggatggctgttcgcctcttttcgtggctggtcggtctccttcttgttcttgaccccgctgccgatgctgggttctgtcgatgcgaccgccgctcgagccattgatggcctccaccaagccatggaatggaccctgctggcgttcatcgttatccatgtgtcggcagccctattgcacatcctgctgtaccgcgatggggtcgtgcagcggatgctacgatag

SEQ ID NO: 3366 - DNA, 519 bp, BradyrhizobiumColbertium
atggacgcccgccgtcttctcgacgagggcgccaccctcgtcgatatccgcgaagcagacgagcacgcgcgcgagaaaattccgggggcgcgaaacctaccattgtcgaaactcgacgaagccgatgtcgggggcatcacaagccgatcatctttcattgcaagagcggcgcccgtacccaagccaatgcgccgcggctcgccgcaaaactcgatgccgcttgcgagtccttcgtcgttgatggcgggctcgacgcttggcgcaaggctggtgccggtcgtgaccgaccgacggctgccgatcgagcttcagcggcaggtgcagatcggggccggaagtctcgtcttcgctggcacgctgctcggccttttggcctcgccttggttcttcgccgtgccggctttggtgggtgccggactgatgacggccgggctcacaggcttttgcggcatggcccgcatcctcatgcgggcgccttggaaccgcgaagtttacggcgcgccggcgcgagccgcatga

SEQ ID NO: 3367 - DNA, 333 bp, BradyrhizobiumColbertium
gtggcctcagcaacgttcgatccggaaactttcgaaaagcaggcggttgaggttgcctccatcctgcgcgctctcgccaatgagcgtcggctgatgatcctgtgcaggctctttgaatgcggggaggacagcgtgagttccctcgccgaggccgtcggcctttcgcaatcggcgttctcgcagcatctcgcgaagatgcgcgacgagggtctcgtcactttccggcgggaaagccagacgctctggtatcgcatcgccgatccgcgcatcgagcagctctatgccacgctgcacaagctgttttgcacgcccgtcaaagccaagagcagataa

SEQ ID NO: 3368 - DNA, 162 bp, BradyrhizobiumColbertium
atgcgggaggcgcgcgacaccaaactgtcggcgccgaggctgctgctgccttccattcaggtcaacattcgcgccggcaaattcccgtcggctgaagccaacggggtgcgctatctcacgatcccagtgaagctgaagggcggggcgcagacctgcgtatag

SEQ ID NO: 3369 - DNA, 1314 bp, BradyrhizobiumColbertium
atgaggtccttgagactgaggctgttcgcgatgctgctcgcagcgaccgggatcgtctggttggcggcagtcgtctggatctacgtcggaagccgcgacgaggtggagcacgttctcgacacgcgcctgcaggaggccgcgcgcatggtggcctctctcgcgtccggctttgacacccttccgggaagctcaaccccgtccccggtacagccgctcggcagctacgaacgtcaactgtcgtgtcagatctggtcgctcgacggtcgcatggtcgcgaaatcgagcggcgcgcccgaccagcagctctcgcccgccgcctccggcttctcggaccggatcatcgacggcgaaccctggcgcgtgttctcggtcgaggacgccgatcacaatctgcgtgtgatggtgggggaccgcgtcgggctgcgggagcgtctggtgaccgacctgatcaaggggctgatgtggcctgcgctgctgatcgcgccgctgctcggcgccgcgatctgggcgagcgtgggacagggcctgcgcccactgcggcggatggctcaggatctcggcgcgcgcgagccggacgacatgcggcacgtcgagaccgaacgtgctccgaccgaggtcaggccgctggcggtcgccttgaacgggcttctcagcagggtcgaagccgcgcgccggcatgaacgcgaagtgacagccttcgctgcacacgaactgcgcacaccgctggcgggcctgaagacgcaagcccaggtggctctggccgccgacgacccaaaggtcgtgcgcggggcgttggaacagatcgtcaccgctgtcgacaggagcgcgcgcctggtgcgccagctcctgacgatcgcaaggctggattccgacaccgccgacgcaccgttggcgccggtcgcagtcggcccgatcctggaggagatcgtcgccgcaacgccaaggcacgaacggacgacggtgacgatcgacgagtgcgtcaggacgatgacgctcaacacgaatgccgaatgtcttcaactcgcgcttaggaacctgcatgaaaacgcagtgcagcacacgcgcgggggacgggtcgcgtggacggcccggggcaacgcgctcgtcatcgaggacgaggggccggggatcccagccgacgaactcgaccaaatcggaaagcgcttcttccggggcagactgagaagtcctatcggaagcgggctgggccttgcgatcgttaagctcgcgcttgcgaaggtcggggcgaaactcaccatatcgaatcgcgaaggtcgcagcggcaccagatcggagctgacgttcgacgtatga

SEQ ID NO: 3370 - DNA, 180 bp, BradyrhizobiumColbertium
atggagcgtccggagcaggtccgttcgcgtgccgaactggaagagcgcctctacggatggcaggaggacgtcgagagcaacgcggtcgaggttcacatccacaatctccgcaacaagatcggcaaggacacgatccagacgctgcgcggcgtaggctaccggatggggacagcccgatga

SEQ ID NO: 3371 - DNA, 489 bp, BradyrhizobiumColbertium
atgggcctggcgagcatttcgcttctgatcggctcggtcctgatgatcggatcggcaggtgacgacagtctcaacgcgactcgcatcctcgatcggttcgtgacgcgcgagaccggatccgaagaccccgtccgaacgatccgatcggtcgccgccttggacgacgaactcgctacggcccgcgcggacgagaagcccgtcatgctcgacttctccgccgagtggtgcgtcgaatgcaggggcatggatgccgtcctgcgcaaacctgaagtccgtgcacgcctgcaagccttcagaatggtgcgtgccgacgtgaccgccgtcgacgacgcgagccgagccctgatgaagcgcttcgacatcgtcgggccgccgaccattctgctgttcggcacgctcggaagcgtcgatccgacggtcaaaatcgtcggcgcggtcgatgccgacgccctgctcggaaagctgtcggcggccacctcggccgactga

SEQ ID NO: 3372 - DNA, 408 bp, BradyrhizobiumColbertium
gtgaagaccgacggcaagattcgcctcgtctataaggattggccgattctgacgccggattccatcaagggtgcgcagtgggcgctggccgcgaagtatcagaaccgctacgacgccgcgcacttcgcgatgatgggaattcccgggccgaagattccggccgagcgtatgcgtgaagcgatcgcgaagtccgacgtcgacatggatcgtctcgatgccgatctgaaggcccacggcgacgacatcaccaagctcctgcgacgcaatcttgcccaggccgattcgctaggcctgatgggcacgcccgcctacatcgtcggccagtaccgcgtgacgcaggccttgaactatgtaggcttcaagcgcgtcgccgccgacgcgcgcgcccgcgcagcaaagaatgagtaa

SEQ ID NO: 3373 - DNA, 129 bp, BradyrhizobiumColbertium
atgctggagagcctccgcgcatccggcatcgacatggaggcgctgcaggtcgaccttcgccgccacgccgacgtcatcgatgcgctgctcgtccgcaagtccttgagcctcgccgagacgccatcgtaa

SEQ ID NO: 3374 - DNA, 672 bp, BradyrhizobiumColbertium
gtgtgtgccgcggcagtgcttctgccggcagcgctggcgggctgcgtctccgacgccgacatcgtgcccaaggccgcggccgcgagctacgcgccgatgtccgacccgcgatatggcgcggtctcggacggcgcctataccgttgcggcggttcctggcggcgacctgaagacccgttacatgcgtcaactcgtcgacgatccgaccgggcagcctgccgggaccgtcgtcgtggacccgaaaaaccgtttcctctatctggtgcaggaaggcggcaaggcgctccgctacggcgtaggcgtcggcaaggagggcatggcctggtcgggtaccgccaatgtagcgatgaaacgcgaatggccgcgttggacgccgacgacggagatgatcgcccgggagccggggaaatacgccaagtgggctcggggcatggagggcggcacgcaaaacccgctcggcgcccgcgctctctatctcttcaagaacggcaaggacacgctgtacaggattcacggcaccaacgagccatggtccatcgggcaggcgatgtcgtccggctgcatccgcatgatgaaccaggacgtgatcgacctctaccgacgcgtgccgtcgggagccaaggtcgtggtcctgccgacgggcggtgcagagaccgcggcgtccggcggatga

SEQ ID NO: 3375 - DNA, 384 bp, BradyrhizobiumColbertium
atgtcgtactatttctcgaaaacactcgaccttccgtttgcggaggccgtcgacaaaacgataacggcactcaaggcccggggattcggcgtgttgaccaggatcgacgtgcaatcgacgctcaaggagaagatcggcgccgactttcggccttacgtcatactgggtgcgtgcaacccgagaatggcgcatgaggcgctgatggccgaggacaagatcggaaccatgcttccgtgcaacgttgtggttcaggaattcgatgggaagaccgaagtggcagcggtggatccggtagcgtcaatgcaggccatacagaatgaatcactggcgacgatcgcggagaaggtccgcggcgaattgagggcggcggtcgaagccatctaa

SEQ ID NO: 3376 - DNA, 192 bp, BradyrhizobiumColbertium
gtgagcggccgccagaacgatgccagtgaatccggttacagctgcattagcttcgatggttctctcgatgtcccactcccggtcgagctcgcgcaacctgtcggcaatctggtcgcggtgttcggcgaaaaaggcgacgttcgcccgcatcgtgcgctcgctgcgacaattatcgctcccagacgaacgtag

SEQ ID NO: 3377 - DNA, 327 bp, BradyrhizobiumColbertium
atgccgcaattcgatcccgagctggtgtcgcgaatgaggagcgctcttgaagatgcgatgacgagggtgccctcagacgtcgccacggtttccacaaaggcgtttctcgccgaatgcattctcaaggccgcggcgcaaggtcacaccagctacgccgatctcgtcgcagccgccactgaccaaatccaagccctgatacgatattgtcgtgaactgccgaccaatcacatcacgaagcaggaagggacgcggccgccgcttcctacgatatttgacaaaggcgacgtgagaccgggactgagatatgagatcggcgcagatgcatga

SEQ ID NO: 3378 - DNA, 1584 bp, BradyrhizobiumColbertium
gtggcgttcgcctccgccaatgggaggccattcaagccctccaatttgctgcaggacgatgtcatgatgtctcgccgcgctctgctcaccggtgctgctctggctggcaccggcgtcgtcgtggccggttcactctggcacgatcgtgcagcccccgagccgcagctactgcggattcccgatctgatcgaccttcgggggatggggcaatcggcgtccctcaaggtgcagcgaggcaccacctcgttctttccaggtcgagagagcagaaccctcggatacaacggcagctatctcggccccacacttcgcgtccacaatggagacgacgtcgaggtggcggtcacgaatgcgcttggcgacgacacaaccgtgcactggcacgggctccttgtcccggcggaagtggacggcgggccacatcaactcatccgtcctggcaccacatggcgccccgtgctgccggtccgccagcccgcggcgacccttttctatcactcacacgtccatgatcggacggccgaacaggtctacactggtcttgccggtgtacttcttgtgaccgacgacgaagagaatttgctcgggctcccatcagaatatggtgtcgatgatctgccgctcgttctgcaagacaggcaattcgaggatggtcggctcgtcattcctaacgggatgataacgttgatggctggtaggaggggcgacacaatgctcgtgaacgggacagtgaatccaatagcgagggtgccgaggcagctggttagattgcgttttgtgaatggatcgaatgctcgcatttttgatctttcctttacggatggccggacgtttcactggattgcctcggaaggcggactgctggagcttcctgtcaagctgcagtcgctgagccttgcgcccggcgagagggcggaggtccttgtggatttttctgatggacgatcagtcgcgctgcagacggcacccgaccgtaacatgcccacgatgatgcgcatggtcggcggcccgcgaaacttcctgcgggatctcgtcgacctcgatcatgagcgcgtgctcgcgttcgaaccaacggaaacagcgggccatcgcaccaagacaaccgttcccgaccgactcgtcacacgcccgaatccagactcaagcagggccgtgaggcgccggcggtttgcgctgaacatgggtatgggcggcatgatggccatgatggctggcagaggcggaatgatggaaggtggcagaggcagtggcatggcgatggctggcataaatggccgcgcctttgacatggatcgtatcgacgagaaagtccggctaggtgattttgagatttgggaagcgtcgggcgagatgatggcccatccactacacatccacggcgtgcacttccaagtgctaagtcggggcggagccaaaccgtctgttcgcgatcagggtattcgggatactgtcctagtggaggagtctgtcgaattgctggtacaattcacacagcccgcttcgaaggcggcgcctttcatgtatcactgtcacatcctggagcatgaggataatggaatgatggggcagttcacggccgcctga

SEQ ID NO: 3379 - DNA, 246 bp, BradyrhizobiumColbertium
atgatctctctctttagaacgcctgagtttgcgccattctatttgggtttacttgcttcatttgtgggtggcgttggccggcaggtgtcgggtctttccagccgagcgtgtgcaacgaaaagcgggcgaaatcgactacacgaaacggcagcacatcggtgctttcgcgatgaggaggccgccgcccactgtcgacgagctgcggtttcgtcctatcagatgaccatatttggaatagggctatga

SEQ ID NO: 3380 - DNA, 1053 bp, BradyrhizobiumColbertium
atggtcacggtcggtttcattgaaggcatcgccgaagcgacagcatccatcacgaagatcttctccggcgccctctccgaccggcttggcaagcgcaagctgctcgccgtcgtcggatacggcctcgctgcagtgaccaagccggtgtttccgctcgcatctacggtcgaccggctggtggctgcgcgcttcacggaccgggtcggcaagggcatcaggggcgcgccgcgggacgcgctgatcgcggacatcgccccggtgcatctgcgaggggcgagtttcggcttacgtcagtcgctggatacggcgggaggcttcacggggccgacgctggcgatcgcactgatgtggtggacggccgacaacttcaaggccgtgttctggttcgcggtctttccgcccttctggcgctggcgctcatcatcttcgccgtccatgagccggcgcggacgaaggggatgcgcgaggtgcgcaatccgatcagcctggccgagatcaagcgtctcagcgcggtgtacttggtgggtcgtggcggtcgccaccgtattcacgctggcgcggttcagcgaggcattcctgatcctgcgcgcgcagaacgtcgggctgccgattgcactggtgccggcggtgctgatcgtgatgaacgtcttctatgccctggcggcctatccggcgggcatcctctcggaccgcatcgactggacgggactgcttgcgctcggcctcgcccttttgatcgcggcagatctggcattggctttccttcccacgaccagcggcatagccgtcgggaccgtgctttggggactgcacatgggattcacgcaggggctgctggcgaccctcattgcggatacgtcgcctccggaactgcgagggacggcatatgggtttttcaatctgctgggcggcttggcgatgctcgccgcgagcgtgatcgccggcgcactctgggatgccgccgggccgagcggaactttcgtcgcgggagccgggttcgcgctggcggggttgctggccgtgcggggcaagaatacacgggcgtgtctatga

SEQ ID NO: 3381 - DNA, 222 bp, BradyrhizobiumColbertium
atgctttccgacggggcggcgcgattcacaaaatcacaggcgggctacgaaatggctgaggcgagcaggcagaaatactcggtgagggacattccgaccggcgtctgggcgctcggcttcgttgcgctattgatggacgtctcgtcggagatgatccacgcggcttccggtatacctggtgaccgtgctcggcacttcgatggtcacggtcggtttcattga

SEQ ID NO: 3382 - DNA, 1344 bp, BradyrhizobiumColbertium
gtgtcggccgcgaccggcacgctctattgggcgatggcgaccaacctcaatcaagaggatcggcgcatcctcaccaacaacctggataatctccgactgctcctgaagccgcagcacggctcgggctttctcaccgagccagcagcacccgatgcctcgccggcggacacgcagatatacatccgcgttctggaccggaacggccgactgctggtcgagacccccggcatgacgcaggagattccgccgccgtcggcggagaccctggaaacgctcccgaccggaccgccggagacccgggacatcgcgacccgctccaagcggtcgttcaagatcctgaccacgcgcgcgcccgccgacgccaggagcccggacgcgcagtacgtgcaggtggcgatggaccgcggagccgaagaaaagacgttgcggcgctaccgagaacgcctttacctgattctggtgttggccgtggtcctcagctcgctggtcggatacgcgattgcccgcagcgccatgcgtccggtcggcggcatcagcaaaacggcggagcggatccgctcgaccacgctccatgagcggatcgataccgcagatctgcctacggaacttctgggactctcctccaccttcaaccacatgttggaccggctgcagggctcgttcgaccgcatctcgcaattcagcgacgacgtcgcgcacgaactccggacgccggtcaacaacttgaggggcgagattgaggtcgccctcacacgggcgagaagcaacgaggactaccgcgatatcctcggctccagcctggaggagtgcgcccgcatttcgcgtatcatcgaaagcctgctgttcctggctcgggccgacaacgcggtcggccaactcgacgtcgaggaggtaaacgtccgcgacgagatcgcgagcgtgaaagacttcttcgaaccctcggccgccgagaagggtatcgacttcgagctcggcgctcctccggcgctcacggcgcgcgttgatcgaacgttgttccgccaggctctaagcaatctggtctcgaacgccataacccacacggaccgcggcggacggcttcgcatcaaggcgcaggcttcaaaaggtgctctcgccgttgccgtctcggacaccggcagcgggattcccccggctgatctgccgcgcgtctttgaacggttctaccgggtcgacaaggcgcggacgggttcgcaacacaacgtcgggctgggcctcgcagtcgtcagatcgatcgtcgtccggcacggcgggcatgtcgagatcgacagtcatctcggggaaggcaccacggtgaccatggaatttccgaggagttgcgcatga

SEQ ID NO: 3383 - DNA, 675 bp, BradyrhizobiumColbertium
atgaagatcctcgtcatcgacgacgaagagaagtcggcggcgtatctcaagaagggccttgaggagaacggcttcgtcgtggacgtggcgcatgatggggaaagcgggttgttcctcgcgcgtacgggaccatacgacctgatcattctcgacgtcatgctgccggtcatcgacggctggtccgtcatgacggagatcaggcgcacgcaaagcgacgtgcgcgtcctcttcctcacggcccgcgatggtctgcaggaccgggtcaagggcctggatctcggggcggacgactatctcgtgaagcctttcgcgttttcggaactgctggcgcgcacccggtccattctgcggcggagcgcgaagcgcgagcagacgatacttcggctcgacgatctcgaaatcgatctcaatcgcgggcgtgccacccgcgccggcaagccgttggacctcacgccaaaggaatttctcctgctttcgctgttcttgcggcgtgccggcgacgtcctttcccggaccgtaatcgctgaacaggtatgggacatgaacttcgatagcgacaccaacgtggtcgatgtccacattcggcggcttcggtcaaaagtagacgatccgttcgacagaaagcttcttcataccgtacgcggaattggctatgtcctcgaaacgcgatcctga

SEQ ID NO: 3384 - DNA, 120 bp, BradyrhizobiumColbertium
atgtttgcctccgccggcgcgccgaacgtcggccggtcgcatgtccagagcgcattgatcgaatcggaggtgcacctgcaagatgacgatttcgtcatcttggcgtcggcaccggattga

SEQ ID NO: 3385 - DNA, 675 bp, BradyrhizobiumColbertium
ttgtcgccgcaatacacgatcgcctttgccgccctcgataaccgcggctcgttcaacgtcgaccgccctcgatactcgatcggcaattcgctctcggcaaagctctctgcgacgccattcgaggatagggaaagcggacagaaactaactttggggggcggcatcgatcatacgatggacatccacaacggaatgctgaggctgctgaccgccgtcggccaatctggcttgggcgccctcccggccgaaggcgacaagttgaccgtcgaagacgatgtgtcctattcgtttaaggccttcggacatcctatcaccttggaagccgagggcttgctttcgaacttcagcggcagcaagacgaaaattggtggcggctacgtcatggcccagctttcgctgttcgacaccgaaatctggggcgatctcgacctcttcgtccgccatgatgtggtgaatgcaagcgccgccggttttggcggaagtgctcggcatcaagcggtgagacttgggatcaattacaatcctcctccccacttcaagaagctcatcaacctgcacttggaatatgcgcacaatcgcatcgtcggcccggcaggcatggtgttcgggccgcgagactctgatgaactgatgcttgagatccgagcaagtctgcagctctatcagcgccattga

SEQ ID NO: 3386 - DNA, 1404 bp, BradyrhizobiumColbertium
atgtggaccgcatttgccgttcccttgacgatcgtcgtcgcaggctgcgcccagtatcggcccgagccgttttccgccgagcgccacgctgcggcgctcgaagaacgttcgctccacgatccgcgattgggcgagttcgtcgagcttggtttgcctcggcaacggaaggggggccgggcatgggagctctcgagcttgacgctggcggcgctatactatcatccggatctcgacgtctcgcgcgccaagcttgtctcggcacgggccgccgtgattaccgccgcgcaaattccgaatcctacgctgagtgcgagcgcgacctacaacgccacgatgaccgcgccgacgccgtggaccgtcggccagatcgtaggcttcctgatcgagacgatgggtaggcgcgagtataggattggccaggcggaaaacctggtcgaggccgcgcgcgaggacttggcgacggccacctggctggtgcgcgggcacgtccgcgccgccttcctgaacctgtgggcggcccagagaaggctagaactgaacggccggcgtgcggcccttcagcgccaactcgtcgacctgctccaacggcggttctcggaaggtcaggcctccgcattggacctcacgcgcgagcggataaacctcaatcaggtaagtcttgcggtgcgcgatgcagagcggcaacgcgccgaggcacgggcgcaacttgcgaccgccgtcggcgtgccgctccgagcgttggacgccatcagcctctcgttcggcgctttcgagcgggcacctccattccgcctggaggccggcgaattgcgccgcgaggccctcgtcggtcgcagcgacgtgcaggcgctcctcgccgaatatgcggcaatgcaaactgccctgcagttggagatcgcgaagcaattcccgaacgtcaatgtcgggcccggctacaccttcgatcagggcgccaacaagtacaatctcgatctgtccttcgaactgctgatcttcaaccagaaccaggggccgatcgccgaggcggatgcccgccgcaaggatgccgccgctcgcttcgacgccttgcaggcacagatcatcggggcgatcgacaccgccgtctcgagctatcgcgcgataaaccagacgatgacgacggcggatgcgctggttgccactggacgtcggcgtcaggatgaagtctcccgctcgttgcaggccggggacgtcgatcgctccaccctggtcacggccgagctcgaggtggcggcgatcgaaatctcgcgtttcgacgtcctggtgcagcagcgacaggcgctgggcgcgctggaggatgcgcttcagcacccgatattcgaaccgcgcgtccgcctcttcgtctcggagacgaatccacgcggaccatcagggtcaggcatatga

SEQ ID NO: 3387 - DNA, 1083 bp, BradyrhizobiumColbertium
atgatcgaatcgaagccatcgaagaagcgctggcggccgttgcgccgtttccttcttgtacttgtcctggccggcgtcggaggcgggattctctggggtttcgtggcgggacgaatggggggggggctcgaggccgagcgggaaagacccatcaaggctccgctccgcgtctccctggataacgacgagcaggtcgtgacgctggacgccgaagcccagaagcacaacgggatcgaaacgtccccggttgcggcggcgccatatcgggagcgcgtccgggcctacggcacggtcgtcgatctggcgcgcctgaccgacctgagcaacagctaccagaacgccaaatcctcgctgcaggccgcgaacgcccggctcgcggcatcgcgccctgcgtacgaacgtgcgcagacgttgaacaagaacgagcagatcgtctcgcaggcgacagtccaggcggcgcaggcgacctacggcgccgacgtggccactcaggcgtccgccgagtcgcagctccggacgctcgcggccaccgcgcaacaggagtgggggccggttctaggcaaggcgctgatcgagggatctccgacgatcacccgattgatcgagcggcaggactttctgttgcaggtcaccctgccgccgggggtgtcgataccgacgcctccgccgactgccgcgatcctcaccgccaacggactgcgcgcggacatcaggttcgtctcgcccgcgacgcggaccgatccgaagattcagggcgtgagctatttctatatcgccgcggccgacagcggcgtgttgcccggcatgaacgtgattgcgtatctgcccagcggcgcaactgtcgaaggcgcggccattccggagccggccatcgtatggtggcaggaccgggcctgggtttaccggcgcagcgcccccgacaagttcacccgcgtctcgatcgcgaccgactttccggcgcccggcggaggctacgtcgtcaagggctttccgaaggatgcccaaatcgtgacgcgcggcgcacaggcgctcctgtccgaggagttccgcgcgcagatccaggtcggcgaggacaagaaatga

SEQ ID NO: 3388 - DNA, 3207 bp, BradyrhizobiumColbertium
atgaccggcgcgcctccatcgggaccgcaggcggcggtcatcggctttgcgatccgctttcgcggcatcgtcatcgcgcttgcgtgcctgctgctggcgtacggggtctattcgttggggcgggtcaagtacgacgtgttcccggaatttgcgccgccccaggtcggcatacagaccgaggccgccggcctcacgcccgagcaggtggaaattctcgtcactcggccgatcgagaccgcgatcaacggagtgcccggcgtgcagacgttgcgctccacctctatacaggggctctcggtcgtcacggtgttcttcgatccctcgagcgacatctaccgcgaccgccaggtcgtggccgaacggctggccgcagccgcccagcagcttcccgtcggcgtccagccgccctcactgacgccgctcacgtcatcgaccagcaccgtgctcgtcgccggcctgacctcggattcgaaatcgttgatggaactccgctcgatcgcggaatggaccgtccgcttgcggctgctcgcggtgcccggcgtcgccaacgtcgcgatcttcggcggtgagacgcgggccattcagattcaggtccaccccgataagctcatcctgtacgaccttggcctgaacgatgttctgaccgcggcccgcaaggccacgggcgtgcgcggcgctggcttcatcgccaccaagaaccaacgcatcgtattccagaccgaaggccaatcgctccaggcggcgcagatcgcccgtaccgtgctgctgagccagaacggctcgagcgtcacgctcggcaatgtcgccgatgtgagggacgctccggagcccgcgatcagcggcgccgccatcggcggccggccgggtgtcattctcaacgtctccgagcagtacggcgcgaacaccgtggacgtgacgacctccgttgaagcggcgctcgaggatttgcggccggggttggcggccagcggcattagcgttcagtcggacctgttccggccggcgaacttcatccacaccgcgaccagcaacgtccgcgattccttgatcatcggcggcgtcctggtcatcgcaatcctgttcctgtttctcttcgacatgcgcaccgcggcgatttcctgtatcgccattccgctgtcactgctggccgggacgatcgttctccaggtggtgggggcgaccctcaacaccatgacccttggcggccttgcgatttcgatcggcgtcgtggtcgacgacgcggtgatcggggtagagaacatcgtccggcgcctgcgcgagaaccggcgcctgcccgaaccgctatccgaagccagggtgattctggacgcctgcatcgaggtccgcagcgccgtcgtctacgccaccttggccgtcattctcgtcgttctacccatcatggcgctttccggacttgccggtcggttgttcgcgccgctcggcttctcctacacgttggccgtgctggcgtcgctcctggtcgcgctcacggtgacgccggcgctctcgatggcgctgcttgccggccggaccgccgcagcccacgatcctccggtcgtccgttggacgcgcgccgcttacgaaaacctgctgcggggcattgcgcagcagccgcggaccgtaattgccgccgcggtagcgtttacgctagtcggctgcgcggccttgccttttttcggaggcgggttcattcccgagctcaaggaggggcacttcatcattcacatgtcggccgtgcccggcacgtccatcgacgagtcgctgcgcatcggagcgcgcgtcgccgacgcgctgcggactctgccttcggtccggtcggtcgcgcagcgggtgggccgggcggagaaggtcagcgacacctggggaccgcactacagcgaattcgaggtcgatctgaagccgctaagcggcgatgaggccgagggcgcgcaggctgagatccgcaagacactcgccggcttccttggcgtcaatttctcggtcaagacgttcctgaccgagcgggtcgaggagaccctttcgggctacaccgcctccgtcgccgtcaacatcttcggcaacgacctcgacgttctcgatcggacggcgcaggagatcgcacgcgtcctcggcgggattcccggcgccaccgaagttcaggtgcagtcgccgccggggctcccacagctcacgatccgcttgcggcagccagatctggagcgatggggattcgatgccgtcgaggtgctcgatctcatccgcaccgcctaccagggcgatgtcgttggccaaacctacgaaggtaaccaggtcttcaacgtcatcacgattctggatccggaaagccgcggcagcgtgaccaaggtcggcgaccttccgcttcgcgtcacaagttctccgggcacggcatcggccacggcccgtgcaagctcttccgggggcggcacctacgtgctgctgaagcagatcgccgatatctacgaagtcgccggacgctaccaggtcctgcaccagggcgggcagcgcctgcaaaccgtcactgccaacgtggcggggcgggacgtggcttccttcgttcaggaagcgcgtgcggcgatcggctcgaaggttcggcttccggcaggctcctacgtgaccttcgccggcgccgcggaagcgcagtcgcagtcgcagcgcgatctccttctgaactcgctgatcgccgccgttggcatcgtactgctactctcgatcgtgacgggcaactggcgaaacctgctcctggtgctggtcaacctgccgtttgcgctcgttggtggcgtgctggcggtgttcgcaaccggaggcctactgtcgctggggtcgctggtcggtttcgtgacggtgttcgggatcacgcttcgcaattcgatcctgatggttgcgcactacgaacatcttgtcgaagtcgaaggaatgagttgggggccggataccgcgatccgcggcgccgccgatcgggtgacgccgattctaatgacctcgctggtcaccgccctgggcgtgctgccgctggcgatcggcatgggtgatcccggccgcgagatcgaggggcctatggccgtcgtgattcttggcgggctgttaacgtccatggcgctcaacctgctcgtgctcccgacgctggcgctgcggttcgggcgtttcgaagcggaggccaatgaattcgcaactcgacaagcaagcccggggcccgctcccgcagagtag

SEQ ID NO: 3389 - DNA, 759 bp, BradyrhizobiumColbertium
atgggctacgaactcgccgattatgaatgggtcggcatcaagccgatgctaccaaacaagccgcgcggcgttcctcgggtgaacgaccgacgtgtcctcaatggcattttctgggtcttacgatcaggcgcaccctggcgtgatctgccggcggcattcggtccttacaccacttgctacaaccgctttgttcgctggcggcgggctggtgtctggggccgcattatggacgcacttgccgctgcccatgatgccgctgttcagatgatcgacacctccattgtccgcgtacatcagcatggagcctgcacaaggaaccagtgccagtcgatgggaagctcacgcggcggcttgacgagtaaaattcatgcggtggtcgacagcaacggtctgccggtacggctggcgttgagccccggcgaggcgcacgacgttcgactggccggaaaactgctatctcgtctgaaatccgggtcaatgctgctcgcggaccgtggctatgacgccgactggatcagagagcttgctatgaagaagggcacgtgggccaacattccgccgaaaagaaaccgcagcgatccgatctgcttcagcccgtatctctaccgcgctcgcaaccgggtcgagcgattcttcaacaagatcaaacaatgtcgtcgggtggcgacgcgctacgacaagcttgccgccaactaccttgccttcgttcaactcgcgtcaatcagattatggttgcgccttaatgagtccgcgtcctag

SEQ ID NO: 3390 - DNA, 150 bp, BradyrhizobiumColbertium
atgattctcaaggaatcgccgggcgtaggcagacatgcccaacttctcaagccagtcttcgatctgctgcattcgatgctcgacgttccgctgccggggatcaagccggattatggggaacagtgcaacataatcatctcagcgaagtga

SEQ ID NO: 3391 - DNA, 3225 bp, BradyrhizobiumColbertium
atgtctgcctacgcccggcgattccttgagaatcatgtcgacttctccgttctcggggatctgagcgatcaggacctcagggaactcggggtcgtccttggcgatcgcaagaaaatgcttcgcgcgatccgtgagctgcatcctccagggaagatcgcgcccactgccatcccggcagaatcgcctcccgatgcggccgagcggcgccagctgaccgtcatgttttgcgatctcgtcggctcgacggctctatccacgcagctcgatccggaggacttgcggaagatcatcggtgcataccaccggacctgcgctgcaatcgtcgaacgacatggcggtttcgtcgccaaatatatgggcgacggcgttctcgtgtatttcggctacccgcaagcccacgaacatgatgccgagcatgctgtggaggcgggacttgccctggttggcgccatcgcaaaactccatacagcggcgccggggcggttggaagtgcgtgtcgggatcgggacgggactcgtcgtcgttggcgaccttgtcgggtcgggagaggcgcaagaacgcggtgtcgtcggcgagacgccgaaccttgcggctcgactgcaggcggtcgcccaacctggaatagtcgttatcgccgacgccacccggcggttgctcggtgatctctttcaattgacgagcctcggtgcacaagacctcaagggcctcgccggccctgttcatgcctgggccgtggaaggtatgaacaccattgagggtcgcttcgaagcgttgcatggtcgcggactgggagcccttgttgcacgtgagaacgaatgcgcgtcgctgcagcggagctggtccaaggcgagaacaagccaaggccaagtcgtactcatttccggtgaagccggcatcggcaaatcacgtctggtaacggccgttatggaacaaaccgccgcggacgcgcccacgcagctacgctactattgttctccgcagcacaccaatactgcgctctatccgatcattaagcagatggagcggcgcgcaaacttcacgcgcaacgacgacaccaagacgaagctcgacaagctcgaagcaatgcttgaccattcatccgtgtccgtcgtgcacaaggccgtgcttgccgacctgcttgaactcgccgaagacgatcgctatcccgccgagagtttgacaccggcccagcgtcgtcagcgtacgctggaagcgatcgtgcaggacatccagagcttggcgcacttcggaccggtcctgctgatattcgaggatttgcactggatcgatccgaccacccttgagcttctcgaccagatcatcgatgcaatcgcggtgcttcccgcgatgcttgttgcgacctttcggaccgaatttgtaccgcgctggagctcaaccctccatgtaaccgtgatgtctatcgctcggcttgacccgcgggacacggaagcgctggttaatgacgtcatcggagcagcgtcgcttccggcgcacgtccggcaggaaatcatcgatcgtgcagacggcatacccctgtttgtccaggagatgaccaaggcggtgctggaagcgggcaccgaagcgcgaactgtcggagcggttccggcggccgcaagcccggtgccagccactctgcacgcatcgctaatggctcgattggaccggctcggtcccgccaaggagggggcccaattagcggctgcgatcggccgcgaattcagctatgcgctgttgtcctcgatcgcgccagttgccgaaccagaactcggccgctcgctcgatcgcctcgttgccgcgggcttgctgtttcggcagggtgagccacccgaggcaaattatctgttcaatcatgccctggtccaggaagccgcttatgggacgctgctgcgtgaaaagcgccgcgtactccacgctgcgctcgtccagtccatcgaactggatttcgcagacatagccgatagccagccggaagtgcttgcccgtcattgcaccgaagccggcctgttcgaaaaggctgcaagcgtgtggagcaaagcggggcggcgctccctttcacgctcggcgctggtcgaggcggctgagcagctttcgcgcgccctcgatctgatcgccgcgctgcccgagaccacggggctgcgacgcgagcgcatcacgctgcagatcgagcttgccaatgccttgattcatacaaggggccatgccgcgcccgagacacgagcagcattcgcacaggcacgcgcgttggtggagcaggcagagacgatggggaaggagacggacgatcctctcgcgccgttcgccgtgctctatggcttctgggttgcgagccgcatgtcgttccaagccgacgcgacccgggagctcgcggttcaattccaggggctcgccgagcagcgccaggccgaaacgcctgtggtgcttggacatctgctgatgggaatttcgctggtgctcgccggccacctcacggccggattcgcagaactcgatcgagtcgaggcgctttatgatcgcgccaggcatcgaccattcgcaacacggttcggccacgatattcttgtgtccgctttgtgttggcgagccttgtcgaactgggcgctcggtcgcgccgaagcggcagcggccgacgccgcgcacgctctaaaggaggcgcgtgagttcgggcatgccgccagcttgatgtatgcactttcccatgtgtcgcttacattgatccatctgggtcagctcgcgacagtggccgtgcttgccgatgagcttgtgcagttggcggaggaaaagctatcaaccttttggaaagcttacggcatgctgttgcgcggccgcggactttccctcgaaggtaagaaccatgccgcagccgatttgatggaagcgggcatttccgcaatgcgatcgaccggtgcaacagcctacgcaccctggtacttcagcgcattggcggcagcttatgctcagagcggacgggcagaagccggacagcggcttgccaaagacgcgatagctaggatcagcgaaagcggcgaaagctggcaagaggcggaggcatactgcattgccgcagaggtggagctggccctttcgccgccaaacatcgcgcaagcgaaagctcattttgaccgagcacttgttgttgcaagacaacagatggccaaacccttcgaactcagggtggccgaaggcttgagatcgctttctcaatccgaagcaaatactcggctttaa

SEQ ID NO: 3392 - DNA, 1194 bp, BradyrhizobiumColbertium
gtgccgcacgcctcggacatgcaaagctcgtcgatggatatcgtcgggaatgcccatccggcagcgcggcggcgcgatcttcgcctcgacctttttcgtggcttggcgaactgggcgatcttcctcgatcatattcccaacaatgcggtcgcgtggttgacgacaaagcactacggcttcagcgatgccgccgatcttttcgtcttcatctccggctatacggcggctctggtctacggtcggacgatgctcgagcgtggattcgttcccgccgcgattcggctgctctcgcgtgcttggcagctctacgtggctcacgtccttctgttcgtgacgtatgtcgcggcgattggatatatcgctcgcacctacgaacactcgcacctcctcgacgaattcaacgtcgcccaggtcatcaagaatccgcttgccacactggcgcatggcttgactctcggattcaagccgctgaatctcgatgtgctgcctctctacatcgtgctgatggccgccttcccgcccgtgctctgggtcatgacccgacggcccgaccggacccttgcggtctcgttggtgctttacttcgcgtcgagacatttcggatggaatctcccgtcctttccgtcgggcgtctggtacttcaatccgtttgcttggcagttgttgtttacgctgggcgcatgggccgcgctaggcggcgcggccaggtgccggagcctgatcgaatctaacgtggccctagtactcggattgacgtatctcgccttggcactggtccttaccatggccggtcgtttcgatcagttcgcccatctgctgcccgactggctggtgctggccgtgaatccgaacgacaagaccaatctggcgccctaccgcgttattcatcttgtggtgcttgccgttttggcggtgaggatcctgcctgcagactggagaggcttcgactctcctttcgccaagcctctgatggcctgcggtcagcggtcgctggaagtcttctgcaccggcatctttctgtcggtcgccggtcacatcctactcgaaatcgagccggactccttcgcctttcagatgttggtcagtgctgccggcattggggtgatgactggcgtcgcctattacagatcgtgggcgagaaatctgggcgggcaaagcagcgccggctccggaacgcggggccgggaagcatga

SEQ ID NO: 3393 - DNA, 114 bp, BradyrhizobiumColbertium
atgacaggcgaacgcaccgggtccgccacgccgctggtcgcagcagccgccctcgatcttcgccgagacttggccatggcgctgttgagcatcggcaaggaatcgccggtctga

SEQ ID NO: 3394 - DNA, 183 bp, BradyrhizobiumColbertium
ttgtttttcgaggaatgtgtcgatatcgaggtcgcggtatcggtgaaggaattgtctcctggcgtacggtccgctttcgatgcggtcaaccgtctggctctcggaggaatctggatacctctggccgccgccgcttgggcagtatcgaagttcgttcgccgcaaccacccgcgcgctgagtag

SEQ ID NO: 3395 - DNA, 420 bp, BradyrhizobiumColbertium
gtgctgaaggtgtttttcggacgcgctcggccgatgcagttttttgccaacggggtgtacggtttcgatttcttccacgtcgaagcagcctggctatcgttcccgtccggtcacgtggcgacggtggccgctctgacggccgcgttgttctttttgggatcgcgcgcgtggagggttgcggcgtcgctttccgccgcggtccttgttgggcgggtggtcgttggcgcccactatccgagcgacgtgctggcgggcgccgcgtgcggcgtgctgggagcatatctcgtctttcgggcattccgcgtgcggagaccgtggttccccttgcactcgaccgcaacagacgcaatggaaggggtcgtggagcaggctttggctgggaatccgcgcaacgcgcaatctggcaatcgccgcgattaa

SEQ ID NO: 3396 - DNA, 186 bp, BradyrhizobiumColbertium
atgggtaccggctcggaaggctggtcccagccgttaagcggcgcgccgttggcgggccggactctggaatccgagcttctttcgctccttctcgcacgcggcgagcagggccttcacctaaacagccatgccttcggccttgagatcgatcttttgcgagcggttatagtgctgctcggtgactga

SEQ ID NO: 3397 - DNA, 267 bp, BradyrhizobiumColbertium
atggatcgcccgcatgaaggcgtcgtactcccggttgactcggcgcaatcgcagagcggctcggcgacggcgatcctcgcgcacaagacatcgaacgggaagaccaaggatcgccagcgcctcgccccggtaaccgagcagcattacagccggtcgcagaggattgatctcaaggccgagggcatggctcttaaggccctgctcgccgcgtatgcgaaggaaagccggaaattccgcgacctgcgtgccgaccggattgcggcttga

SEQ ID NO: 3398 - DNA, 789 bp, BradyrhizobiumColbertium
atgaccatcaaggctgatccgaccgagttcgcgggaaagcgcgtgctcatcagcggcggcagcaagggtctgggccgcgccaccgtcgaccgcttcctggtcggcggcgctcgggtgatcaccgctgcccgcggcatcctggagcccgtcgacggcgtcgcgttcgtccaggcggacctgacgacggccgagggaggggaaatcctggccaaagccgcgcttgagcatatgggcggcgtcgacatcctggcccatgtgattggtggctcgtcctcgccgggcggcggctttgctgccctgacggacgatcactggctcgccgagttgaacctgaaccttctggccacagtccgccttgatcgtctccttgttccgcagatgatcgaacggggcaccggcacggtggtgcacgtcacctccattcagtcagtcctgcctcttcccgagtcgaccaccggctacgccgccgccaaggctgcgctcagaacctacagcaagtccctctctagagaactggggccgaagggcgtgcgggtcaacgccgtctcccccggctggatcatgaccgagtcgtccgtcgacatgctgaagcgtctgcaggccgccaatggcggctcgatcgaggaagcgcggcaagtcgtgctcgacggtctgggcgggatcccgatcgggcgtgcggccgagccctatgaagtcgccgacctcatcgcctacctggcctccgatcgcgccgcagcgatccacggcgccgagttcgtcatagacggcggcacggttcggaccgtctga

SEQ ID NO: 3399 - DNA, 330 bp, BradyrhizobiumColbertium
atgtcgatcgaactacccaagcccatagccgactatgttgaagccaacgcccagctcgatgtggacggcatgctgaagcctttcgccgccaatgcggtcgtcttggacaacgggcaccgtcatgagggccgcgccgaagtgcggaccttgctcgaagaggcggtggtcggcgcgaaggcgatatttgcgccggataccgtttgccacgagaagggtcaggtcgtggtcgaaggccttgcccatggcgacttcaaaggcagcccaatccgcttcacctatggtttcaccctcgaaaacaatgccatcacagccttggagatcacgacatga

SEQ ID NO: 3400 - DNA, 894 bp, BradyrhizobiumColbertium
atgccgaagcacggtctgatcgaattcgatgctgtcctcgccattgcgcggcgcggatcgttccgggcagcggcgctggaacttggcctgtcgaccaccgcactgagcaacgtcatcgggaagctggaacgccaactcggcgtccgactgttcaatcggacgacgcgcagtgtttccctgacagatgccggaaggaaattcgtcgatcatgtcgggcctgccgtaaagacgcttcacgatgcgatgggggccgcccgttcgcagcaggaaatcccgtccggaacgcttcggatcaatgcattcgcaacgggagcgcgggaggttcttggtccgctcctgctagagttcttgcgacgctatccccacgttcacatcgatctcgtcaccgagggccggatcgtcgacatcgttgccgaagggttcgatctcggcctgaggagcgccgacctggtgccgagcgacatgatcgccattcccgtcggtcctccccgtagctttgccgtggtcgcatcgcccgaatatttcaaggccaacggtaagccccgcgtgccgcccgacctgctgcgccattcatgcctgcgcatccggttgccgaatggcgcgctgcatcgctggcagttcgaaaaggaaggtcagcccgtccagatcgacgttcaagggcctatcacgctggacgaagccagcctctcgcgcatcacggtgctcgaccatgtcggcatcggctacttcatggagtccgatgtgcgcgaagacatcgaggcagggcgtctcgttcgggtcctggaggactggacgccgctacttgcacccctgtgtctctactatcccagcaggcgcaatccctcggccgcgttcaaggcgttgatcgacatggcgcgtggtgctgcgagctga

SEQ ID NO: 3401 - DNA, 930 bp, BradyrhizobiumColbertium
atgaccaccgacctgaacctcgttgccgtcttcatcgccgtcgcggaagccaggagtttccgtggggccgccgaccggctcggcgtgacgcgctccgccgtcagccaggccatccggcgcatggaggaccgcctgggcgtggcgctcgtgcagcgaacgacccgcagcgtcagtctcaccgaagcaggcctacgcctgcacgagcgcgtggcgccggcagtggccgaagtcgagcaggcgatcgatggcgcccgggatcgtgacgcgcagccgaccgggcagctgcgtcttgccgtgtcgtccatcgccgagcgattcattcgcggcccgttgctggccgaattcacgcacgccaatcccggcgtgcaggtcgacgtgaccgtgaccgatgaggaattcgacatcgtggccgagggctatgacgcaggcgttcggctcggcgaagtgatcgagcaggacatggtcgcagtgccggtctcaggcgatcagcgtcagctcgtggtggccgctccggcctatctggagcggttcggcgtcccctctcacccgcgcgagctttcgcagcattgctgcatcgggtggcgacccgcgccgcacgtcgcgccttaccgctgggaatttgcggaaggagggcgcgagttcaacgtcgcggtggagccgaggatcacgacgaacgacatgtgggtcatggtgcggaccgcctgcgcgggaggcggcctgacgttcggcatggaggagacgtttcggccctatatcgaacgaggtgagctggtgcccgtgctcgaggagtactgcccgttcttcccaggcttcttcctctacttcacggaccggcggaatcttccgccgaagctgcgcagcctcatcgatcacgtgcgatatcggccgggcggaaagaaccagaaatcgccgacgggccacgccagatga

SEQ ID NO: 3402 - DNA, 1062 bp, BradyrhizobiumColbertium
atgacgtcacttgaccaataccgcctgctgggccgctccggcttgcgcgtctctcccctcgcgcttggcacgatgaccttcgggaccgagtggggatggggcgccgacgccggcgaggcccgccggatattcgacctgtatgtcgagcgcggcggcaatttcatcgacacctcggtgaactacaccaatggtgcttccgagcgcttggtgggccagttcgcccgcgacaagcgcgaccgcctcgtgctcgcgaccaaattcaccatggcccgcgaccccggcaacccgaattccggcggcaaccaccggctcaacatggttcgttcggtggagcagagcctgcggcagctcgataccgatcgcatcgacctgctctacctccacgcctgggatgcgacgacacggccggatgaggtgatgcgcggcctggacgatctcgtgcgcaccgggaaggtccagtatgtcggcatttgcaacacgccggcctggcgcatttcacagttgcagacgatcgcagatctgcgcggctggtcgcccttcgttgccctgcagatcgaatacaatctggtcgagcgaacggtcgaacatgaactcattccgttggcggcggccctcggcctgggcgtgctgccctggtcgccgctcggcggcggcgtgctcaccggcaagtacagccgggccgatctcaaggattcccaggaacgggcggttggaacgacacgcgcctcggtgatcgcttcatccggccttctcaatgagcgatcgctggacgcggccgagacggtgcgagccatcgcctgggagctcggcgcgacatcctcgcaggtcgccatcgcatggacgctggccaatcctgcgatcaccgcgccggtgatcggggcccgcacgctggagcaggcggaagacaatttcggcgcggtcgggatcacgatgtcgcctgagcagatggcgcgcctcgaccatgcgactgcgcccgatcccatttttcccggccgcttcctgcgtcgcccgatggtcgagcagctcatctttggcggtgccgccgtcgcgcggcgcggatag

SEQ ID NO: 3403 - DNA, 516 bp, BradyrhizobiumColbertium
atggcaaccctgcttaatcgcgcgcttgcgtcgtgcgtctacgcgatcatcgtgacggcttccaccctgacgacggccgcaccctgcggccaggccaaatccgtgccggaggccaacaagctgatcgtcaccgatgcattcgatcgctgggcggcgggaggaaccaccttcttcaacgacctgctgcacgaggacgtggtctggcgcatcaagggatccggcccgagcgccggcgaattccgaggccgcgatgtattcctggatcgcgcggtccgcccgttcgcgagccggttgtcgacgccggtccgcccgacaattgtgcggatcttcgctgatggtgaccatgtcatcgcgcattgggagggcagcggcgtggcgcgcgacggcaggccctacgcgaactcctatgcctggatcctgctcatgcaggacggcaaggcggcggaggtcacggcctatctcgacctcgcaccctacgacgacgtcctgcggcgcattcctgcgccggcgcaatag

SEQ ID NO: 3404 - DNA, 1272 bp, BradyrhizobiumColbertium
atgttcgacaaaacctaccggcagcgcctcgacgccgatctggcgcgatgggaggccgacggcgtgatcgcgccggcggtggccgcctcgatccgcaacgcgctgccgccgcttccggccggcatcaacatcgcaatggtcgtcgccatcgtcggcggcctgttgatcgcggccgcattcctcgccttcgtggcggcgcactggaccgagatcgcgcggctgatgcggttcgcgatcctgctggccggcatggtcgtcaccggcgttctcggggcctggttcgccaccaccggccgcaacgttctcgccgatctctgcgccggcatcggggcgatcatcttcggtgcgggcatcgcgctggtcggccagatgtatcatctcggcgaggactttgccggcggcatgctgctgtggtccgtcggcgcgtttgccgccgcagtgctgaccggctcgcgcggggcgctcgcggtcggtctggtgtccgccggcatctggacctgcatgcggacctacgacgctcccgacgtcctgcatcttccgttcgtggcggtctggctgatcgccgccggcctcgccttcgcctggaattcgcgcgtcgcggctcacctcgtcgcgctcgcgctgctgccgtggtggatcgcgacgtcgctccgcttcgaattcgacggcgcccagccgtccttcctgctcgcgaacggcgcggccctgttgttcggcgccgggcttgcgatcgccgccgcgccgtcgccaagggcgcttcgcctcggcagcgtgctgtcgatctacggtgcgtttgcgctggccggcgttgccgccctcgaggtgacgacggtcgacgacatcgtccgtctccggaccgccacggcgccggcccagccgccgtgggcgatcctgtgcggggctgcgggtgtgatgcttgcccttgtgtccgccgcgctcaccaggcgcacgggcgaagtgctggcggcatgcgcgatcgccctcgtgctggtcgccgcgccgctgtggccggcagaagccgcgggcgagccctggttcgcttacgccgcgctgctctgcgccatgctgtgcctcgtcgtctccggcatgctcgacgaggtgcgtccgcgcctgattgccggctggctcgggatcgccgcaatcatcgccggcatcacctgggccgtgaagggctcgctgctgcgccgctcggccttccttgcggcggccggtgtcgtcgccgtcgtgttcgcgacagccctgggccgcgcgctgccgaggaccgaacgatga

SEQ ID NO: 3405 - DNA, 615 bp, BradyrhizobiumColbertium
atgaccgggctgctcgcgtccgtcacaaaattcgggcagcgcatgcccaaggccgtgctgttcggcgccgccgtcctgctgcaatctgcgctgctggtgctgatggtggccgaccgcatgcagatcctgcgcgaaggggtcgaggtgaccttgcagacgcagccggtggatccccgcgatctcctgcgcggcgactatgtcgtgctccgctacgacatctcgcaactgccggccggcagcctcaaaggcaaggtcgccgattcgcgccatcctgatgtcttcgtcaagctcgcccccaatgccgacggcatccatcaggcggtctcggtgcatgccgagcccgtcgcggtcaccgcgcccgaagtgctgatccgcggccgcgtcgccaattacggcggctcctgcggcgacgaccgccgaaggttctgcgacaagctgccgatcaaatatggcctggaaagctatttcgtgcccgaaggcgagggccgaaagctcgaggacgcccgcaaccagcagaagctgcgcatcgtcgccgccgtgctgccctcgggccgcgcggcgatcaagcggctgttgctcgacggcgagcccgtctacgaagagccgctgtactaa

SEQ ID NO: 3406 - DNA, 135 bp, BradyrhizobiumColbertium
ttgtatgtgcgcgccgtcgcggctgcgaaggagatcgttgcacgtcggcatggggaggcggaccagcagcccgaggcggagcaggacgccgcccagccagcttcagtcttcgatcttttcagcggcacgaagtag

SEQ ID NO: 3407 - DNA, 1608 bp, BradyrhizobiumColbertium
gtgtatttgcgaatacttgcaaccattttgataggggggatgatggttgaccctgtgcctttgaggccgcgcgtggttgaagagcaacaaaagctcgcaaccgaaatatctgatcggctttcgcaagaacttgtcatcgctttggtcggccctgttggctcaggcgtctccacttcggggcggctgctctcggagattttgactcagcatttcaaatacgacgtcgcgcccatcatcggaatgagtgatatcatccggaccgaggcccgccgcgtcgacgtaaccacgcctccacaaaatccgctcaacaattacatcgaggtgatgcaggcggctggaaataggctgcgcgagcggttcggcaacaattacttagctgagaaggcggttgaacggatcgcgaagtttcgcgaatcgcgcggcggatatcgtagcgaggacggcgcactcataccggggcgtcgtgcgtacatcatcgattcgctgaaaaatgccgaggagcttgcgcttctgcgtcagatctaccgcgatactctcatgttgttcggaatttttgcgcctgacgacattcggaaaaagcgtctggtagacaaaggcgcagaagaaaaagatgtacaagcagttttggaccgcgatcaaggtgaaccggctaccttcggccaaatgacacgcaagatatttgtgctgtccgatttcttcatttgcaacgacaagaaagaggaggagctaaaaaggcgcctccaccgctatttggaaattgtcttcgataccaatgtacataccccgaccaaatccgagtcggcgatgtacgaagcaacggccgcaatggctagctctgcgtgcatgtcgcgacaagtgggcgcctcaatcatatcagccaagggagaactcatctctgtgggctggaatgacgtgccgaagtttaagggcggtctttatgtggaggatgatcagagcatctgggatgaggcaaagagggccattgatgacaaagatcaccgctgcttcaaatggggcagcaagatttgtcacaacgaagtccgtcgaacgaagattggcgaccgaattgcgaagctaattcgagaatccggattgctaaaggcggggaccaaagtcgaagacgttcgcaaaattttggatggcactgaagttgacgatctaaccgagttttcgcgatcaatccacgccgaaatggagtccatcttagcggtagcgcgcgagggccggcattcgctcgtcggcgcgacgatgtttacgaccacatatccctgtcacaactgcgcgcggcacattgtggcagcagggatttcgaaggtcatttatatcgagccataccgcaagagcttagcaatcgccttgcataacgacgccattaccgaggacccggaagatagatcgaaggtcgtgtttcaacagtacgacggcataagcccgcacttgtacttacggctattcagacctagcacgccgcggaagcaggacggccactttgcccgacagcccgcggaagttgcattgccggtattccgggttccgttggactcgcctgttgaatacgaggcgaagatcattgcggacctgtcggcgaaggaagatactgatcattag

SEQ ID NO: 3408 - DNA, 360 bp, BradyrhizobiumColbertium
atggacaatgcatcattcattcgcaaaacgttttccgtgctgggcgggctgctcatctgggctgcgtattttggcttcgtatacgtgttcaacgcgctcgcctgcgcccgcagctttcatcgtctgcatctccttggattcagcgtagttcctctgacgattttatcgggtgcagcaatagccgcgactggcgttctcgttctgatgttcattgcgctccgagcacccgaccacgtcgaagacacccgggattcatccgccgactttcttcgacacctagcggtgggggtcgcgttgttgtcgctcctcgcgatcggctggattggattgccggcagttatcgtgccaccttgcggctag

SEQ ID NO: 3409 - DNA, 2580 bp, BradyrhizobiumColbertium
gtgacgacgactgcagaacacccagctatcgcgaattcgcgggagacaagatccatcgggactgacggctttccgaatgcggtcccgcgcccagagggcgagctcgacgagctggagcgaatctgggcaccaccgcgcggcttccatctgatctcggctgtgaacaacagctatgtcggcgtctggtacgtcggagcatcgatgttgttctttgttctggcggggattctggcgctgatgatgcgcacgcagctggcggtcccggaaagcaggcttatcggccacgcactttataatcagctgttcactatgcatggcacgctgatgatgttcttgttcgctgtgccggcagtcgaggccatgggcgtgtatctgcttccgaatttgcaggcggcacgcgatctcccgtttccacgattgtcggcatatgcattctgggcatatttcgtcggtggccttgccttcttttgcagtctcttcttcggactggctccagatggcggctggttcatgtatccgccactgacgagctatacgttctcttccgggatcaatgccgacttctggcttctcggcatcgggttcatcgaaatctcggccatcgcgggtgcgatcgagatcatcgtcggcgttctgaagacgcgcgcaccgggacaatcgctcgacaagcttcctgtgtactcctgggcaatgttgatcttcgcgctgatgatcgtctttgccttccccgcgatcataattgccacagtgcttctcgagctcgagcgcgcattccactggcctttcttcctcgctgagaagggcggcgacccgttgctgtggcagcacctcttctggtttttcggccatcccgaagtctatatcatcttcctgcccgccgcgggcatggtgtcgatgatcgtgccggcgatggcgcaggcgcccctcgtggcgtaccggcttgtggtgttggccgtcatcggcacaggtttcctgtcgttcgggctgtgggtgcaccacatgttcacgactggccttccggctctttcggtcagcttcttctctgccgcgagcatggccgtgtcgataccaagcggaatccaggtcttcgcatggatttcgactttcgcgttgggtacgttgcaatggaagactccatcctacttcattcttggctttctcttcatctttacacttggcggcctgaccggcgtgatggtggcaatggccccgttcgattggcaggcacacgacacttactttgtggtcgctcacttccactacgtcctgattggcgggatggtctttccgctgtttgccgccttctactattgggcgcccaccatatcgagtaagccgctctccgaacgactcggcaagaccgcgttctggctgatgttcgtcggcgtgaatgtcaccttcttcacgatgcacctcaccggcctgatgggcatgccgcgtcgcacctatacgtacatcgcggcgatgggctggggcccgctgaacatgatctcgacggtgggcgcattcatgatcgcgaccggagttctgacctttctgatcgaccttgcaaggaacttccgtccattcggagcaagtgccgggaatccatggaacgcaggaacgcttgaatggctacctaccggcaactaccaaacgcggtcgatccccatcgtcaccagccgcgagccgctttgggaccagcccaaccttgccgcagacgtgcaggaggggcggtactacctgccgggcgcgccgacgcggtcgcgcgagaccattgtgactagtcccatcgaggcgcggccacaatatgtgctgaggatgccaggtccgagttggccgcccgtgttggcggcgctgtttactgccgccttcttctttggactaactctcaaactctatattccggcgttcgcttgcggcgcactcgcgactgcttgcgttctttggtggctatgggacacggacccgggtccggatgtgccgacagtcgatatcggcgggggccttgtgcttccggcctacgtaacgggttccgtcagccacagctggtgggcgatgatagtactcatcttggtcgctgctaccgcatttgcttgcctgctgttctcgtacttctatctgtggaccgtgaacccgcaactttggccgcgcgaacctgccgatttgccggatctcgcctggccggttgcttcggctgtagtgtacctgctgagcggcgcaggagtgtttggcgcgagccggctgctcacgcgcgtgccgagcagaagctccgctcccgtcgttttcgctctcgtcgccgctacactgctcatccctttgcctgtcgccattgaggtgctcgctcatcgctcggttggcttgtcgccgtcggcgtcgagctacggcgccactgtgtacgcggttgtctcatggcagggattcttcgcagctgtgctcatggtcatgggagtctacacggccgctcgttcgctcacgggacgcctgtctgccgaacgtcgcgtgaccttcgacaacacccagctgctttggcagtacaccatcgtacaggggatcgtgtcgctcgtgatcgttcacctgtttccgcgcctgctcgggtaa

SEQ ID NO: 3410 - DNA, 1029 bp, BradyrhizobiumColbertium
atgaaagcgctctcgtcattcgcagttcttgctgctggcgccggcgtctcgggctgcacctggatgctgccggaagaaagccatggcagccggccgtcactaatgtggctgcagtcagcgctgatcacgtctggtccgaatgctgaagccatccgcaccctgagctgggtgatgtttgcaggtggtgcggcaatatttctgctagttctcaccttcacggcgcatgcagtgtttggcgggacgaggcgcggctggatgagcgggcatcgcttcgtcatcgttttcggtgtggccatgccgattgctgttctcacaattcttctggtctacgggctgatgcttacggatcattcggcggctcgcgagaatcccgtggcccgcatcgaagtcgtcggcgagcgctggtggtggagagtgaactatctcgatccgcagggcgagcggcagctcgcgtccgcaaacgaaatccgtgttccggtgggcgcgcctgtcgaattcattctgagatcaaacgacgtcatccactcattctgggtgccgagcctggccggcaaactcgacatgataccgggacgcgtcaacaggtatcagttttcggccgcgcggcccggggtctatcgcggccagtgcgcagagtattgcggcgctcagcatgccctgatggcgttctacgtggttgcggtggagcgcgagaattatccgacttggcttgcggatcagagaaggccggcagacgatcccgtgaccgagctgggcgtcaagggaaaggacctgttcatcgccaccgggtgcggcgcctgtcacaccgtacgcggtacggcggcttcgggccagatcggtcccgatctcacccactttggcagccgcagatcaatcgctgccggaagcttccccaacaacgccggcacggtggcgggttggattgcgtccgcacagcatctgaagcccggcaacttgatgccgtcattcgccaacctgcgcggggaggaacttcgcgcgatcgcggagtatcttgagggtctcaagtga

SEQ ID NO: 3411 - DNA, 144 bp, BradyrhizobiumColbertium
atgattccgaacgaacctactgtgcttgtcgcttggttgcgcgatgcgccgtcgctgtcacagcggacggccatgccgcgattgccgatcttgtatcaagaggcggtgcatatcgccgcctacctgtacactctaagaaaatga

SEQ ID NO: 3412 - DNA, 129 bp, BradyrhizobiumColbertium
gtggcaagtcccgcatccgaccgccgcaacgagctctcggccttttgccgcatctccattcacgagtcggcgctcatcaaagtagggtttctgctcagctgcttgctgaagatcggaacagccgcttag

SEQ ID NO: 3413 - DNA, 1092 bp, BradyrhizobiumColbertium
atgcggaagctattgtggggtgcgctgatctctatctgtgctgcggtgacggcagcattcctgttcgcttggtctggcgtctacaatatcgctgcttccagtggtcatcttgccgtcgttggcaaatttctccagttcggcatgcagaactcggtcgagacgtatgcggccggaatagaagtgccgtcactcggtcccgctcacgtagaacagggtatgctatacttccactccgggtgcgcgccttgtcacggggcgcccggcctgtcgcgcaatcgggtggcgttggggatgcttccgcagccaccggatctcacgcgtgcctccaatgactggtcgggcgcgcagctcttctggatcgtaaagcatggaataaagtacactggcatgccggcgtgggcagcgccaagccgcgacgacgaagtgtgggcacttgtcgcattccttagacgcatgccgcagattccagcaggagagtaccgggccgccacccgtctgcgcgacggcgaaagccagggtgctcggacaatagcaaacgaaggattgatcgtcgggccgtttgcctgtggcggttgtcatggagcgcgcggcgagggaagctcgctcggtggggttccaaggcttgcgggtcagaaaactgcgtatcttgagatggcgttggaagatttcgcagcggggacccgatcgagcgggatgatggagccaccggtcgccaacctggaccggcaacagcgaggcgaactcgcgcgctactattcgtccataaatctcgacgaggtagcagaacacaacatcggagaaagaatcgacgagccgcgccagcttggagccatacttgccgaacgaggcgcgccatcacgcggaattcctgcttgccaagcctgtcacggtagggatgggcgtgcaagcgacaacactccccaatatcctgcacttgcaggacagcataccatctatctgaccaatcagctgcggctctttcgggcaggcaagcgaggtggccgcttggcggaagtcatgtcggctgcggcgcgtggcttgactgatgaagacatcgagggagtcgcaatgtactacaacgcactcagataa

SEQ ID NO: 3414 - DNA, 546 bp, BradyrhizobiumColbertium
atgttttttggcagttggacggatttggtgcgcattctgagcgtcggagcgaccagctatctcgccctggtggttctgctccgcatctcgggcaagcgaacgctgaccaaactgaatgcatttgaccttgtcattacggtagcgctcggctcgactttagcgaccgttctgctcaacaaatccgtgaccttgtcggaaggcgtgctcgcgatggctctgctgatcttccttcaacttgctatcacgtggttgtcggtgcgttctgaaaaagtacaacgtctggtcaaagctgagccgaccttgatcataagagacggctcattcttggaaaatgctctgcgaagggaacgcgtgacacatgaggaggtgcttgccgcactccgatcgcacggggtcaccgacgtcaggagagttgcagccgcgattcttgagacggacggatcggtaagcgttctatctgaaggggttgccggcaaggcggccaacaacacgctccagggcgtggccattcaccattcgacgagcgagagtgccgcggccccatga

SEQ ID NO: 3415 - DNA, 996 bp, BradyrhizobiumColbertium
atggatcgtcgtcaatttctgggcacaacggcgggccttgcgctcggcaccttcgcggcctcggcacctgcgatcgcgcaggcaaagacaaaggtccgcgtcggctatcttcacactgtcgccgtcgatggccagatatggaccggcatggatcgcggctccttcgaaaagcagggcctcgatctcgagctgcggcagttcaacaccggcctggaaatctttcaggcactgatcggtggcagcctcgacgtgctgtcgaccggcgcggtcctctcgaacttcccggcgcgtggccagggcaaggtgtttcttatcaatgacatcgaggtggcaactgctcagctctgggtccgcggcgatcagggcatcaagtcgttcgaggatctgaagggcaagcgcattgcgaccgcgaccggcacaactgcgcatgtatttctggacaccgcgcttcgcgccaacaaggtcgatcccaaggagatcgagctggtcaatcagaccatgccggcggccgtaaccgccttcatttccggcgcggtacctgccgtcgccctctgggtgccgttcaacgtcacggttcgcgacaaggtcccgggcgcggtcaagctcgccgacgcttctgcttattatccaaaagccgcgatcatcggcggttgggcggcggcgaacgactattacgagcccaacaaggagaccttggcgaagttgatccgcggctgggccgatgccaatgactacatcgtcgcgaacagcactgaagcaatggagaaattgcaaaagggccactacagccagacgccccttgcggacatcaacgagtcgttcagagcccagaagatgttcacgtccaaggattggaaacgcatgtactcggacgggaccgtgaccaattggctgcagcagtcgacagacttcttcatggccaacgcgggcatcaaggacttcacgccggcgagcaaatacttcgatccgagcctctacctcaaaaccatcgcttag

SEQ ID NO: 3416 - DNA, 810 bp, BradyrhizobiumColbertium
atgaccaagcgcgcacagttcgacagggtttcactgtccttcgacacggcgaaaggccgcctcaacgtcgtcgaggacgtcacctacgacatcaacgacggcgacttcatcgcagtgatcgggccgtccggctgcggcaagacgacgatgatgagcatgctcgccggcttccagaagccgacgacgggcaacgtattgttcgatgggcgccctgtcgccggtcccggccccgaacgcggcgtcatcttccaggaatatggcgtattcccctggttgacggtgaagcagaacatcgccttcgggctgaccctcaacgccaaccatgtcgcgaccgccgagcgcgacgcgatctgcgatcattatcttggcctgatgggtctgtccgacttcgccaattcctacccgaagcatctgtccggcggcatgcggcaacgcctcgcgatcgcacgggcttatgctgtgaagccgcaattcctcctgatggacgagccgttcggggcgctcgacgcccagacccgttccaacatgcagaacctgctgctgaaggtgttggagaccgaaggcaagaccgtcatgctgatcacccattccgtagaggaggcgatctacctcgcctcccgcatcgtggtggtgacggcgcgaccggcgcggatcaaggagatcatcgacgttcccttcgcttacccgcgcgacgagtcgatccaggagcggccggaattcgccgagctgcgaggccatatcagacagctcgtgatggacgaatatcgcgcccagcaggcgcagatgcgtccggtctcattctcggaataa

SEQ ID NO: 3417 - DNA, 771 bp, BradyrhizobiumColbertium
atgaacggagccggcctgagacgcctcggtctcggattgatcccatggatcggtgcgatcctgctctggtacgccgtgcgctggagcggcttcgtcaacgtatcgctgatcccggcgccacaccaggtcgccgccaaattcttcgagcttctcaccagggaaggcctgctgatcgacatcttcgtctcgacccggcgcgtctttctcggcgttgcgctcggcatcctcgtggccgtgccagtcggattcctgctggggtggtatcgccccgcccgcaccttcgccgaccccatgatcaacttctttcgcgcgctgccgccgatcgcactgataccgctggtgatcgtctatttcggcgtcgatgagctcgcaaagctcgtcatcctgttctatgcctcgttcttctccggcgtgatcgtgatgtatgagggcgtgtcgcagatcacgccactctatatccgtgtggcgcagacactcggagcaaaccaggccgagatctttcgcaaggtcatcattcccctcaccgtcccgcacatcctcacggcgctgcgcgtggcgttgggcgtggcctgggcgacgctggtcgcatccgagctgatcgcggcgcagcgcggactcggcgccatgatccagaatgcctcgacctatttcctgctcgacgtaatctatgtcggcatcatctgcatcggcctgatcgcgctgatcatggatttgatcctgcgcaaggtaacggcccggttgctggtctggcaggatcgggccatcgcatga

SEQ ID NO: 3418 - DNA, 1128 bp, BradyrhizobiumColbertium
atgacaccgccgcctttcaccattcgaagcgtccaggcgtttggctatcgctatccgctgacgatgccggtcatcacgtccttcgggcggatgaacgatcggcctgctgtcttcgttcgcgtcgaagataccgatggatatgtcggctggggcgaggtctggtgcaattttcccgcaccaggtgccgaacatcgtgttcggctcgtcaacgaggtgcttgcgccggctctggttggatttcatgcgaccgagccgtccgctgcgttcgagcatttgacgcagggaacttctgtgctggcgctgcaatcaggcgaagccggcccgtttgcgcagtcgatcgccggcatcgatctcgccgtctgggatctccacgcgcgtcgccagaacctcgcgctgtggcggctgctcggcggggcgaagcagaagatcaaggtctacgccagcggcatcaatccgatcggttccgagcggacggccgaagcggccttgagccgcggctaccgcgcgttgaagctgaagatcggcttcgatccggcaggtgaccgcgccaacctcgctgcgctgcgccgccttgtgggcgaaggcctgcttgctgccgacgtcaaccagggctggatcattgcgcaggcgctggaacttgcgccgcacctcgagcgcttcggtctcgcatggctggaggagccgatccgtgcggatcgcccccgcgaggaatggaagcagttgcacgagatcgtccgctttccgctcgcagccggcgagaacatcgccagccgcgccggattcgctgaggtgctgcgcgagccggttcttggtgttgtccagcccgacatcgccaaatggggcgggctgtcggcgtgcgcgggcattgcacgcgacatcctggcatcgggaaagatgttctgcccgcactatctcggtgccggcatcggccttctggcatccgcgcatcttcttgccggtgtcggcggcgatgggctgctcgaagtcgactgcaacgaaaacccgctgcgcgaccgcttctgcggtcccgtgcttgatgcccgtgacggcgtgatcgagctcggcgacgaagcgggcctcggcatcacccccaatcttgcctccatcgaagaataccggacggtctga

SEQ ID NO: 3419 - DNA, 516 bp, BradyrhizobiumColbertium
atgcccaaaccggaaaacttcccgatcgagaacatcttcgttcccaccaagcagaagaaggccctcaatcccgccaccgtcgcggagatcgcggaaagcatgctggacatcggacagcagacccccatttccgttcggcgcgacggagaccgcctcgttctagtcgaggggctgcatcggctcgaggcctgcaaggcgctcggcgagacgaccattctcggggtcgtggtcacggcggagtttgctgacgccaagccgcttctagccgaacgacccgaagtcgaggccgagcgcctcaagatggcgcgattgaaacaactgcggctggagaaggaagccgcggaggcatcggcggcggcctcgaggggcgccggcgcaacgcaagcgtcgcgcacgcatccggcgaaaggcgctcgcgacaacccgaaggcatcaccgggccggactgtgaaatcgaagccgaaatcattgtcggactggatcacgcagcaaaagggcagcggcggccgctattga

SEQ ID NO: 3420 - DNA, 564 bp, BradyrhizobiumColbertium
atggaactgtccggaaaaaagatcgcgattctggccacccacggcttcgagcagtccgaactcgaaatgccgcgtgatgccctcaaggcggccggcgcaacagtggagatcatttcgccgcaagccggcgagatcaagggctgggacgagaaggactggggccgcccggtcaaggtcgacaagaccctcgaccaggccaagcctgccgactatgacgccctcgtgctgcccggcggccagatcaaccccgacctgctgcgtgtcgagcccaaggcgcttcaattcatcaagagcgtgttcgacgccaagaaggtggtggccgcggtctgccatgcgccctggctgctgatcgagacgggcatcgcgaagggccgcaggatgacgtcctacaaatcgatcaagaccgacgtcgccaatgccggggcgaagtgggaggattcggaggtggtcgtcgaccagggcctcatcacctcgcgcaatcccggtgacctcaaggccttcagcgcgaagatcatcgaagaggtgagggaaggacgtcacacgcagcgcagcaacgcggcgtag

SEQ ID NO: 3421 - DNA, 114 bp, BradyrhizobiumColbertium
gtgcgcttgcaggcagcccactcggacgagcgcggaagcctgctcgacctctacatgcgcgcgatggaaagcgtcgccggagcaggcgaaggcggcttgagacagccaggttga

SEQ ID NO: 3422 - DNA, 498 bp, BradyrhizobiumColbertium
atgttgaacttccagctcccatggcacgagatctttgctccgacgcattctctcatcgagatgatcgtacggggcaccatcatgtatttcggcatcttcacgttgatgcgcctcatcctgaagcgacaaaccggcggaatcagcatcccggacgtgctcctcgtcgtgcttctggccgatgccgcgcagaacggcatggcgggtgaataccggtcgatcacggaaggcctggtgctcgttgccaccatcatcttctggaaccttgccatcgattgggtcggctatcacgtccccttcgtcgagcggctcgttcagcccccgccgctacttctgatcaagaacggccaggtccttcgccgccatttgcgacaggagctggttacgatggacgagttgctgagcaagctccgggaagaaggcgtcgacagccctgcggacgtcatcgaggcctacatcgagggcgacggcaacatcagcgtgaaaaagaaggagaagtga

SEQ ID NO: 3423 - DNA, 267 bp, BradyrhizobiumColbertium
atgtccgacatcaccattcccggcggcaagatccgttccttcgtcgagcggatcgagaacctcgacagcgaaatgcaggagttgagcgaacagaagaaggaagtcttcgcggaagccaagggcgagggcttcgacgtgaagatcctcaaggagatcatcaagctgcgcaaggaagacaagaacgagcgcgacgagcgcgaaagcctgctcgacctctacatgcgcgcgatggagacggccacgccggagcaggcgaaggcggcgtaa

SEQ ID NO: 3424 - DNA, 282 bp, BradyrhizobiumColbertium
atgaagacaaagaccatcgcctatgcgctcggaaccgccctggtgctgggcggcctcgcaacatcggctgccgaagcaagaccgcggaaggcgcaagtggtacgcgcgccgcaggagcggctgatcatcacggcgcccgtgctgcggccgaccccatgggactacaacatcgtgccgcgctatcgctatcgtcccgaggacgacaaggtcgatccctacggcccgccgctggtgccgtcctatgtgcgctatcagggatggcgctggccgtattggtggtga

SEQ ID NO: 3425 - DNA, 294 bp, BradyrhizobiumColbertium
atgatcgtgcactcgcgccgcgcggcgccggttctggtgtgcgcaaagtacctcaagcgcagcgacgaaggccgcgacgtcaggcgcgcgctgaagtccgaactgaaggcgagcaagcgcgacggcatcaagccggccaagctggtcatgaccggatgcttcggcctgtgcccgaaaaagtcgatcgtactcgcgagcggcgccagcctggcgcggcaggaatatttgctggtcgcggatcgcgatcaggtgccggcggcgctggcgcggttgaacggcgggcggggcaagtaa

SEQ ID NO: 3426 - DNA, 663 bp, BradyrhizobiumColbertium
atggcaaagcaagcgaaaagcaagccgaaaagaaaactgaagacctaccagacctcgctcggcttctacgatcaggcgatcgcggcgccctcgatgaaggcggcgctcgaggcctggggcgccagctccaacctgttccatcagggcgttgccagggagaccgacgaccccgacatcgtcgcggcgaccatggcgaagccgggtgtcgtgctcaggcggcccgtcggctcggacggccgcttcacggagagcgcggagctgccgaccgatctcgtcgagagcgaggccaggcccggccgcaaggccagaaagccggcgaagaagccggccaagaagccagcgaagaccgcgaagaagacatcccgcgaggaggacgatgcggcggcgcgcaaggccgccgcggcgttcgagaaggaagagcggcggcgcgagtccgagcgccgcaaggaagaggccgcccgcgccagggcgcgcgcccgccgcgacaaagcggttgccgccgccgaggcggcgctcgacaaggcaaggcgcgagcacgacgccaaggcggaggcgatcgaagccgagcgcgccgcgctcgacgcgcgtgccgaagccgagcaggagcgctgggacaagcagaggctcaagctggagcaggccttgcgccgcgcgcaccaatag

SEQ ID NO: 3427 - DNA, 405 bp, BradyrhizobiumColbertium
atgagcttcctcctcaacatcgacgttcccgacgtcggcaaagccacgaccttctacaccgaggccttcggcctcaccgtcggacgacgcttcggcaccgatttcgtcgagctcaacggctggccggcgccggtctatctcctcaccaagcaggccggcacgccgggggctggcggcgaccgccgacgctacgagcggcactggacgccgatgcatatcgacgtcgtcgtcgacgatgtcgatgccgccgtcgcgcgtgcggtcggcgcgggtgcgatcctggaggcgccggcgcgcgatgcgccctatgggcggatcgcgatgctggccgatccgttcggccacggcttctgcctgctggcgttcagcgggaaggggtacgacgcgctgcttggaagctcgtag

SEQ ID NO: 3428 - DNA, 360 bp, BradyrhizobiumColbertium
atgtcgcacagtgttcgaatctccatcggcatcatcgtcctgatcgtgttgtcggtgctgttcctcttcagcgtggtccacaccgccgccggcgcgccgaggcccgcatcgcgcatggccgcggagggccatcgcctggcgcaggcgtggtgccagtcctgtcacgccatcgagccgcacatgaccgacttcttcgacgaggcgccgagcttccaggccatcgccgatcgccggggcaccaccgcgctgtcgctgaaggtgttctggcgcacgagccaccagaacatgccgaacatcgtgatctcgccggagcaggccgatgcgctgtcggcctacatcctgagcctgaggagccgttga

SEQ ID NO: 3429 - DNA, 138 bp, BradyrhizobiumColbertium
gtgaacgcgatcctggcgagcggcatgatcgatgcggcagcgcctgcgcgcgttgagctgcatcaacggcattgcgcgaccgcgctcttgacgcagatcaacctgaccgggcggtgccgacctacgctggcccgatga

SEQ ID NO: 3430 - DNA, 174 bp, BradyrhizobiumColbertium
atgaacgagaaccgctattacggcgtgcgggtcgagggcgcgaaatacggcgtggggttcggctcggcgctcgccatcgcgatctcctacaccaacaaccattcgatcctgtgggcgatcatccacggcatcctgggctggttctacgtgatcttcgtcgcgctgtttcggtga

SEQ ID NO: 3431 - DNA, 351 bp, BradyrhizobiumColbertium
atgcccgacacgatgaaatgccccgcctgcaactccgagcacgcctaccaggatcgcgatctctgggtctgcccggaatgcggtcatgaatggagcggcgcggcggacgcgcttgcagacacggcgcaggatgccggcgtgcgcgatgccaacggcaatgcgctcgcggacggcgacagcgtcatcgtgatcaaggatctcaagatcaagggctcgtcatccgtggtcaagggcggcaccaaggtgcgcaacatccgcctgcaggatgccagcgacggtcacaacatcgcgtgcaagatcgacggcatcggcgcgatgaacctgaaatcggagttcgtgaggaaggcgtaa

SEQ ID NO: 3432 - DNA, 921 bp, BradyrhizobiumColbertium
atggatcagcggacgagcggtgccgacgctctcactcagaagaacgatgcagcgccggcgctgctcggcgtggtctgcgggcttgcggcggcgctgttctgggcgttcggctttgccgccacgcggcacgggctcaaggtcggcttcacgccggtcgatctcctggtgcatcgctatgtctggtcggggatcgcgttcctgccgctcgtgttgcgcgccggcgtctccgatctctgcgggatcggctggagcaggggcctcgtgctgatggtgctcggcggtcccgtgatgtcgctgatctcctacgcgggcttcctgttcgtgccgctcggccacggcagcgtgatccagccctcctgcgcgacgctggggggcctgctgctggcggcgctcgtgctgaaggagcggatctccgcctcgcgtctggccggcgcgatcgtcatcgtcggcggcctcggcgtgatcggcgcggaatcgatcggccacatcggcgccgagggcgtgcagggcgatctgatcttcgtgctcgcaggcctcatgttcgccggcttcggcgcgatgttgcggcgctggcgcgtctcggccgtctcggctgcgctggtgatcaacgtgctgtcgctgctgctggtgccggtctacatcgcgaccgtcggcctcgcccatgttgcggccatcggtttcaccgagaacgccatccaggcgctggcgcagggcgtgcttgccggccccgccgcgctctatctctacgccgtctcggtccagcgtctcggcgttgcccgcgccgcggtgtttccggcctgcgtgccggcgctgacgctgctcaccggctggctgctgctcggcgagccgccgacgatgctgcagacggcgggcctcgtgacggtgctgtgcggattctacctggcgcagcggcaaagctag

SEQ ID NO: 3433 - DNA, 255 bp, BradyrhizobiumColbertium
atgaacaagaagactttgtcgatcgccgctgctgtcctcacgatcgcgggtggcaccgctgccgtcgctgccgagctgccgacctatgaggctggcggtttcccggtttccccgctgcaggtgcgcgttctcggtgcggcgcatgtcgagcagcaggttgaggcgcccgccacggtggcctcggtccaccaggcgaaggtgctcagcccccgcaaggtcaagaccgcggacgtcaccacgggcgcagcccgctaa

SEQ ID NO: 3434 - DNA, 204 bp, BradyrhizobiumColbertium
atgacgcatccctcgcttcgtcccatggacgccttcgatcccactgagcccgccatcctgcacgatcgtctttccgacacgatcattacttggaccgccgatcaggccgacgactaccgccgagccagccggcctggcgcagacggaaccgttgcctggaggaactacgtgttcgacggatggggcaacgtgcttggtggttga

SEQ ID NO: 3435 - DNA, 171 bp, BradyrhizobiumColbertium
gtgaaattgaaatgcatattggccgaattcgccgccgatgaatccggcgccaccgcgatcgagtatggacttgtcgcagccggaatcgcactcgcaatcatcgaggtcatccatgctctcggcatcaatctcgtggcaaagctgcaatcgctggcaactgcattgaaatga

SEQ ID NO: 3436 - DNA, 1293 bp, BradyrhizobiumColbertium
atgaacgatcgacggtctcttctggttgcggtgtcgtgtccctccgccgttctcgccggctggctggcgttgtctttttctgcctacgcgccggccctcatcgagaacagcggagcgaatgtggcggtcgtctcaccggcgaaggatatcagccgccttgacctcgccgacgtaccgcgcgctgcgaccatcgaggacggcgttgccttgaccgccgaaatcgccgccgccatcactgcgacccctgccccggcgacgacaccgcaggagacggccgaggcgcccgccgccgccgtcaagctcgcttcggccgacccgctgctgatcctgccgacagatgcggcgcccgtagcgcagatctcgcccgaagccatcgtctccgaagctgcacccgcgccagagcccgtcaagctcgcgtccgccgatcccaccgagatcgtgacgacggacgcattgtcgcctgcggcgatcgcgagcggccccgtcccgcccgcgagcaaggcatctccaccggccgacaccgtcgccgtgctcgacgaatgcttcatcatggaagcctgcgtcgaccgctatctctggacgctttatcagcgcaccgccaaggaggacacgatgaaggtccaggagcggcgcgccgtcaccatcaagcgcaagggcaagaccgtcacggtgatgcgcagcttcaccaagctggtcgatcaggacttcacctggaaggatccgaaggcagccgagcgcgccggcatgtcgatgatggactacgtcatcggcggcatggacaagagtttcaagctgaagctgtttcgcatgatgctcgcggccgaagccgccggcctgtcgccgggcatcaccagcgcattccgcgacgactatcgccagtccatcgcgagcggcctcaaggccgcctccgaccggtcctatcacggcggcagcgcgcgcggcggttatggtcacggcatggcggccgacatcgtcagcacccagggcaataaccgcgcgcagcgctgggtctcgaccgagatcctgtggaagtgggtcgatgccaacggcaaggcgtacggcatcggccggccttacctcggccgcgatccgccacatgtcggcccgatcgatggcaaggaatatatctcgcgtcgcggcacggcggaccgcaaggaagcagccaacgtcaagccgaagaagacgcacaccgcggcccgcgcaaagccccccaaggcccaggcggcgcgagagcagaagggtccggcaaagccgcagaagtcggctcaatcgggcgtcaagcccgcaacctga

SEQ ID NO: 3437 - DNA, 813 bp, BradyrhizobiumColbertium
atgctcgtcatctccattcagagccaggtggtccacggccatgtcggcaatagcgcggctgcctatgccatccaggcggaaggcgtgaacgttgccgcggtaccgacgacgctgctgtcgaaccatccgcgctatccgaccctgcgcgggcgggtgctggagaccgggctcctggccgacctcctgaagggcgtcgaggagcgcggcctggtcgaggaggccgcggtactcgtcaccggctatctgggctcgcccggcaatgccaacgtgattgccgatttcgtcgagcgcgcgctcatgcggaatgcgaagctggtctatctctgcgaccccgtgatcggcgacgacggccgcgtctatgtcgccgacggcattctggacgtggtccggcaccggctgctgccggtggcgaagctgacgatgccaaaccagttcgagctcgagctgcttgcgggccttgcgattgccgatgcgcaggacctgcgcgcggcctgtgcggcgatcgcgcgaagtggccccatcgatgtcgttgcgaccggctgcacgctcgcggatacggcggaagggcggttggagacgatcctctgtgccgatggcgatctgtcgcgctttgcgacgccgcgtctgccgatccggccctatggcaccggcgatctcctcagcggtctgatcgccgcgcaactggccaagggcgagacgacggaggtggcggtgcagctcgcagtggagacgatctttgcggtgctggtgcgcacgcaggaggccggcacagccgaaatgcgcctcgtgccgctgccgggccgcaagccgtaa

SEQ ID NO: 3438 - DNA, 345 bp, BradyrhizobiumColbertium
atgacctccgccttcaacgcctatgcggcactcgctctcgccatcgtgttcgaggtcaccgcgtcggcgttcctgcagcaatccgcgcagttcacccgtccctggccaacgctggcaatggtgctgttctacgtcgcctcgttctacgcgttgtcggtggcgattcgcgtcatcccgctgagcatcgcctatgcgatctggggcggggtcggcatcatcctgaccgccaccgtctccttcgtgctgttccgccagatgctggatgcagcggccttcgtcggcatcgcgctgatcgtttcgggggtcgtggtgatcaacctattctcggagacggcggtgcattga

SEQ ID NO: 3439 - DNA, 168 bp, BradyrhizobiumColbertium
atggtcgcagaacgcgacaacgagaagtacagtttcgaccgcgagagccggctgctcatcgtggcgaaggcgaaagtgtgggcgagcgaggggtggcgggtcgtcatcaccgatcaggacggcaaggcctacgcgccgcccgaattcgatcagctgtcggcggcgtga

SEQ ID NO: 3440 - DNA, 279 bp, BradyrhizobiumColbertium
atgagacagagccaggcggagacgcgccgccataatgtcgcgaagcggtcgatgaccaaggaggtcaggcagctgaccagcctgatcgcgggactgcgcaagtcgcttgaagggatccagaaggaacgaatgagcacgaagctttccagccccgagatgggttttctcgacgagcgccgcaacaatctgttgctcaccattgcagccctcgacgaccgcctctcggcggttcagggcctgatcaatctcggccgcccccacatcatccgcgtccactaa

SEQ ID NO: 3441 - DNA, 1914 bp, BradyrhizobiumColbertium
atgcaattccatctcaatggatttcagcccggcgaccctgagatcaccgatcccgccgaacgcgtgcgatcctcgggtgcagcgggcgctgtgcctgacgaggtcgatgttctcatcgtcggctgcgggcctgccggcctgacgctcgccgcccagcttgcgcaatttcccgatatcaagacctgcatcgtcgagcagaagccggaccgcttgctggtcggtcaggccgacggcatcgcctgccgcaccatggagatgttccacgcctatggcttcagcgagcgtgtgctgaaggaagcatattgggtcaacgaaacgacgttctggaagccggacgagcggacgccggagaagatcacccgcagcggccgggtgcaggacgtcgaggacgggctctcggagttcccgcatgtcattctcaaccaggcgcgcatccatgattgctttctcgacgtcatgcgcaagtctccggcaaagctcgagccgtattacagccggcgcgtgcttgacctccaggtcgatccggctgcccatcatgccgtgaccgtgcggctcgagcgcgtcgatcccgcgaacgagggcaaggtcgagacaatcagggcacgctacgtcgtcggctgcgacggcgcacgcagcacggtgcgcaaggcgatcgggcgcgagctgcatggggattccgccaaccacgcctggggcgtgatggacgtgctggcggtcacggacttcccggacatccgcttcaagtcgctgatccagtcggccaaggacggcagcctgctgatcattccacgtgaaggcggctacatggtccgcatctatgtcgagctcgcaaaactcgacgtcggcgagcgtgttgcgagccgcaacatctccgccgccgacgtgattgcaaaagcacagcggatcctgaagccgcatacgctggaggtgaaggagatcgcctggtggtcagtctatgagatcggccagcgcctcaccgacaagtttgacgacgtgccgcagagcgctgtcgatacgcgtctgccgcgcatcttcatcgccggtgatgcctgccacactcacagcccgaaggcggggcaggggatgaatgtgtcgatgcaggatgccttcaatctcggctggaagcttgccgcggtcctgcgcaagcagtgtgcgccgggtctgctgcattcctactctgccgagcgccaggcggttgcgaaggagctgatcgatttcgatcgcgaatgggcgggaatcctcgcctccgctgccagggccggcggcgccgacgcgaccaaaacgcagcactatttcgtcaggcacgggcgctacaccgcgggcacggcaacgcactacagcccatcgatcctgaccggtgcggcttcgcatcagcacctcgcgcagggcctgattgtcggcaagcgcttccattccgcgccggtgatccggctggcagacgccaaaccggtacatctcggccatgccgcgcaagccgacggccgcttccgcatctatgcgttctcgccggcggaagatcctgcagccgccggctcggccatccgcgcgctgtgcgacttcctcaccgaagcaggggaatcgccggtgaggcgatatacgccccttggcacggacatcgacagcgtcatcgacctgcgcgccgtcttccagcaagatcatcgcgagcttgccgtcgcggcgatgccgccgctgctgcttccgcgcaagggccgctacggtctgatcgactacgagaagatgttctgtccggatctcaagggcggtcacgatgtcttcgcaatgcgcggcattgaccggaaggtcggctgcatggtcgtggtgcggccagaccagtatgtcgcgaatgtgctcccgctcgatgattatgccgggcttgcgtcgtacttcgaccgcttcatgctgatggccaactga

SEQ ID NO: 3442 - DNA, 465 bp, BradyrhizobiumColbertium
gtgaaagacaacaacgacatgcccgggcatttggcgcgccgcttccagcagatcgcggtggcggtcttcctggccgaggtcgaggacgccggcttcgacctgacgccggtgcaatacgctgcgctcgcgaccatcaaggccaatccggggctcgaccaggtgacgctcgccggattgatcgcatacgatcgcaccaccatcaccggcgtgatcgatcgcctcgttcagaagggcctcgcggagcgccgcccctccagccgcgaccgccgcgcccgcgagcttgagatcaccggcgaaggacggcgcacgctgcgcaagatcacaccggcggtcgaatctgcccagcgcatcatgctgcgcggcctcagcgcgaaggaaggcgaggagctgatgcggttgctgcgtaaggccattgccgcgggcaatgaactcagccgcgccccgctgcgcgacgcgcaggtctga

SEQ ID NO: 3443 - DNA, 432 bp, BradyrhizobiumColbertium
atgttcaggttcctggttggggctgcagccatcgcgctctcgatcggtcaggcgttcgcaggtggccatggcggcggcgaccctcctccgccgaaagccgagccggcggttgcgccggcgaaggtcatcctgaccaagcagggcgccaagctcgtcgatctcaatggcatgacgctctactattacgagcgcgacacgaccggaaaatcatcgagctgcaacggcaagtgcacggaaagctgggtgccactggcggcgacggccgacgccaaggccgtcggcgatttcaccgtgatcaaccgcgacgacgggagcaagatgtgggcgtatcgttatcgtccgctctacacctcgcccgccgacaaggcgcccggtgacgccaacggcaatgccacgacgctgcaatggcgcattgcgcggccggagaactag

SEQ ID NO: 3444 - DNA, 642 bp, BradyrhizobiumColbertium
ttgttcgttttatttgcgattgccttgctgccgctcggcggttgcatgcagacgacgctttcgccatcgacggacgcaagcatgacgccgcgcgaccggcaattgctcgcgcacgcgccgtatgcgaaggtcaacgtgcctgagcaatatctgcgtcacatcgtggattaccaccgcaaggagcagccgggcacgatcctggtcgataccgacgcgcgctacctctatttcgtgctgcccgacggcaaggccatgcgctacggcgtcgcggtcggcgaggaagccatggcgttctcaggcgttgcgcgtgtcggccggctggcggaatggccggactgggttccgacagccgacatccaggcgcgcctcggcccgtatccgccgcgcgttcctggcggtcccgccaatccgttgggggcccggggcatctacctctatgtcggcaacaaggacacgctctaccgcatccacggcacgaaccagccggaatatatcgggcaggcgatctcgtctggctgcatccggatgcgcaacgaggacatcatcgatctctatgatcgggtgaagctcaactcgatggtcgtggtgctgccgccgggacagaacgcgcaagccgagaggggcacgcgctggcgcggctga

SEQ ID NO: 3445 - DNA, 1005 bp, BradyrhizobiumColbertium
atgctcgcgacgctgaacgccaagcaaatcgtcgatgagatcgtgaaggacacggtcaaggacaacgatccgcacgacgcggttcagatctctcccgaaatcgtgctggcctcacggccggtcaacgtatcgccggcgctggcgacggagatcgccccccgtccggagccgaagtttgctccggagccaaagttcgttccggagccgccgcgtgctcctgagcccaccatcaacgtggtgtacggaaaagccgctgcggcaccgccggtcgacacggccatccgcgtcacgaccagtgatggacttgtcacgcggaagcgatccgccgccggcaagtggctgcgcggtgcattcgtcgcatttttgttcgcgggcggcagcgtggctgcctcgatagcctgggagcaacacggcgacaccgcaaagcaaatactcgccgaatggaagccggtgcttgcgtcgttgatgccttcgacgtcgcagacgatgccggttgccgccgtgcaagccgacgatgggccggcacaagctgcagtggaacaatcggtcgttccatcagcctcgccgcttccaacgcaagctggcgttccaccggctgcagcgcagcccgacccggcgccactggtgcagtcgatgtcgaacgaccttgcggcgatggcgcagcagatcgatcagctcaaagccaacatcgccgagttgaaggccggacaggagcagatggcgcgcgagatggcgaagcctgccgcgcaagggccagcggctgctgaaacgaagccggtcgattcgcgcgcacgtgctgctgcgtcgcctccgcagccttcagcgcagcgggttcgcaagccgaagccgccggtgacccggacctattcgcccacgccgctcgcacctccaccgccgccgtcgcaagcttccgcggcgccgccgccggctgcggcggttgcaacgactcaagccgtagccgatgacgatggacctatcgtgcgtccaccgatgccgctgcgctaa

SEQ ID NO: 3446 - DNA, 231 bp, BradyrhizobiumColbertium
atgccctactactatttcgatcttgtggttggtggtgagttcaggaaccagggtggaatcatcctcgaagacatcgaggttgcctccgatcgcgccgaccaattggcttgcgagctgtcgcaagtgaagccggagctgcagcagaagggttgcgcggtgcgcgtcaccgatcgcgatcacaacgagctctatcgcacgccgctcgatcccgtgccagcctggcagcgctag

SEQ ID NO: 3447 - DNA, 786 bp, BradyrhizobiumColbertium
atgagcctgttcagcacgcctttcgaccccgaacgcgacaccgcgctcgtcaccggagcgggcaatggcatcggccgtgcgatcgcgcaggccctcgtcggcgagggcgtccgcaccgtgttcgccgatgtcagcgcggagcgcgtacgtgccgcgatcgccgcgtgcgagcgccccggtctggctgtgccctgggtcggcgatctcggcaggctcgaggcctgcgatgagctgctggttgccgcccacgcggcgctcggcgaggtcacgcatttggtccacagcgcctcaccgccacggcgcgaatccgatcacttgctcgcggtcgatcgcaagacatggcaggagatgcacgccgtcaatctcgatgccggctttcacctggcgcgcgaactcggaaaacggctgatcgcggcgaagcaaccgggctcgttcctgtttctcacctcgctgcatgcgggcacgccgcgcaacctggcgcactattcgacggcgaaggcggcaatggcgatgctggtgaaggagctcgcgaagacgctcgggcgctacaacatccgcgtcaacgcattggtgcctggcgcgatcgcagccggcggcttcgtggccgatcccgcgctggcgcggcacgttccgctggggcgtcttggtgcggccgatgacctcgcaccgatggcgctcaccgtgttgtcgaacaagctgtccggctacgtcaccggcgcagccttcgtcgtcgacggcggattgtcgctgacgaactggttcgagccgccggtgctcgatatctag

SEQ ID NO: 3448 - DNA, 393 bp, BradyrhizobiumColbertium
atgcgccccggttttctgattgcgggtctgttgctgctggctgcgccggccgtcgcgggcgacgcaccgccacgctcgacttatgtgaccatggtcttgcaggccttcgctgccaaggtcgagtgtcccaacacggatctcgtctaccaggacctcgtgcagagagcgcagcagatgcagctgcccgacggcaccaccgagcgggtgcgcaaggcgatcgcctggatgcacaccggcggcaagatgggcgagaagcaggacgacgatctcatggtcgaggtcgcggtcgcgacccaggccaccgatctggaccagcgccggctcggcatgtccggctggtgtgaggcccagaagaccaatctggccggcctgatccgcagcaagggcggctag

SEQ ID NO: 3449 - DNA, 249 bp, BradyrhizobiumColbertium
atgcggagtatccatttcgttttcgccggcgctattgcggctgctgcgctgctgactgcgcccgcactggcgaggaattccgacgcccagaggggcgaggaaaaatccacctcgtcgtcctgcagtgcctatcagcaggcgccggacggctcctgggagcagctcccttgcaaggaggcaggcgagcgcgggcagccgcagacccagcatcgttcgtcatcgcgaggtgccgatcgcggggagcgttga

SEQ ID NO: 3450 - DNA, 186 bp, BradyrhizobiumColbertium
atgatgtccgaggtccaggtccataccattgccaggcaaatgctcgaacagcacggctttgctgcgattgcgaaggcggccgagcaggcccaggcctgcgagggccgtggcgatgccgaggaggccagggagtggcgtcacattgcggacgccatgaagatcatgcgtggcccgcatcagggctga

SEQ ID NO: 3451 - DNA, 282 bp, BradyrhizobiumColbertium
atgagcatgggtttgctccggcttctccgcggcaacaaggccactgcaccggtcgcgcgcgaacgtttgcagatcctgcttgcccatgagcgcggaatgcgcggccagcccgatctgctcggtgtgctgcgtgaggaaattctcgccgtcgtgtccaagcacgtgacgctggacccgaccaaggtcatcgtgcggctcgagcgcggcgacgaggtctcgaccctggaggtcgatatcgaggtgcccaacgatttcgagcgcaagcgcgcggcggtcgcgtag

SEQ ID NO: 3452 - DNA, 819 bp, BradyrhizobiumColbertium
atggccaaggtactggtcgtgacatcaggcaagggtggggtcggcaagaccaccaccacggccgccgcgctgggagcggcgctcgcacagcgcggcgacaaggtcgtcgtcgtcgatttcgacgtcggtttgcgcaacctcgatctcgtcatgggcgccgagcgccgcgtcgtgttcgacctcatcaacgtggtacaaggcgttgccaagctcccgcaggcactgatcaaggacaagcggctggagaatctctggctgctgccggcctcgcaaacacgcgacaaggacgcgctgacggaagagggcgtcggcaaggtcattgccgacctgcgcagccgtttcgactgggtgatctgcgacagcccggccggcatcgagcgcggcgcttccatggcgatgcgcttcgccgacgaggccgtgatcgtcaccaatccggaagtctcctcggtgcgcgattctgaccgcatcatcggcatgctcgattccaagaccatgcgggccgagaagggcgagcgggtcgagaagcacatcctcatcacccgctacgatcccgcccgcgccgcgcgcggcgagatgctgaccatcgacgacatcctcgagatcctcgctacgcccctgctcggcatcatccccgagagccaggacgtgctgcgcgcctccaacgtcggcacgcccgtcacgctgtcgaatgcggacggcgcaccggctcgcgcctatatcgacgcggcgcggcggctgtgcggcgaaacgatcgccatgcaggtgccggccgagcgcaagggtttcatggaccgcctgctgcgacggagggctgcatga

SEQ ID NO: 3453 - DNA, 699 bp, BradyrhizobiumColbertium
atggaggctgcagtcaaacctcaacgccaaatggtgcgcctgcgcgggcgctcctatgtggcctttgttttcacgccgacggttccggtgcaggactggctgcatgagatcgacgccaccattgcgcgctcgccgggattcttcgccggacggcccgtggtgatcgatctgtcctcggtggagctaagccaggctggcatcggccatctgctcacaagtcttcaggaccgcaacatccgcgtgctcggcatcgagggcgtggaggagggaaggctgactcccatgatgccgccgctgctgtccggcggacgcagctgcgtggtggaaccgagcgcgccgaagaaggccgacgcgaaggtcgaggtcaagccgacttcattgctgctggaacaccccgtacgctctggccagaccgtgatcttcccggacggcgacgtcaccattctgggctcggtcgggtccggcgccgaggtcgtcgccggcggctccatccacgtttacggcgcgctgcgcggccgcgccatggcgggcgtgaacggtcacaccagcgcgcgcatctattgtcagaagatcgaagccgaactgcttgcaatcgatgggttttaccagacagccgacgacatcgacgaggccttgcgcggccggccggcccaggccttcctgcagggcaacaccatgcgaattactgcgctgaactga

SEQ ID NO: 3454 - DNA, 822 bp, BradyrhizobiumColbertium
atgtcaattcagtcgtccatcagacgcaagaccgcgccggacatccgcgcccgcaagcacggcgagccggtcgtcatgctgacctcctatcatgcgcacacggcagcgctggtggatcagcattgcgacgtcattctggtgggcgattcccttggtaacgtcatgcacggcttcgagacgaccgtgccggtcacgctcgacatgatgatccttcagggcgcggcggtgatgcgaggatcgaagcgagcgctggtcgtcgtcgatatgccgttcggatcctatgaagcctccaaggagcaggcattcaattccgcggtacggatcatgaaggaaacccaatgcggcgcggtgaagcttgaaggcggtgtccgcatggcggagaccattgcattcctgtccgggcgcggcattccggtgatgggtcatatcggcctgacgccgcaatccatcaacacgctgggttcgtttcgcgcccagggacgcagcgagatcgactgggggccgatcgaggacgatgcaaaggcggtcgccgatgcgggtgcgttctcagtcgtcgttgaggccgtggccgagccgttggcgcgcaagatcacggaagcgatcgcgatccccaccatcgggatcggcgcgagcgcagcctgcgacggccaggtactcgtgctggaggacatgctcgggctttcgccacgaacgcccaaattcgttcgccgctacggcgacctcggtccggccattgaagcggcgatcgaacgctatgccgccgacgtgcggtcgcgcgcctttcccggaccggagcacgtctacgacatgaagaagggctga

SEQ ID NO: 3455 - DNA, 1017 bp, BradyrhizobiumColbertium
atgaagcgtttgcaggcggcgggctcggccctggtgttggccttggggctcggcgtgtcggcggtgcccgcccaggcgggagaggccgtcaatctgatcctgaactggacgccgacggccgaccactcgccgtattattacgccaaggcgcagggctggtacgagaaggcgggcatcgatctcaccatcgagaccggcaagggctccggcgtctccgccgcgaaggtcggctccggcggctcgccgttcggcgtcgccgacctcgccaccatgctggtggccaagagcaagggcgccgacaccgtcgcggtgatgagcgtctatgccaataccggccagaccttctactggctgaagagctacggcgtgaatggcgtcaaggatttcgccggccacaagatcggcaatccgcccggcgatgcctcgcgcgtgatgtggccggccttcgccaaggccgccggccttgcgcccgactccgtcggcttcgtcaatgtcgggccgaccgcgaagatcgcggcgctgaagagccacaccgtcgacatcatcagcgacttctacaacgagcacgatctgaaggtgatcgagttcggccaggacctcggctacctcaactggaaggacatcgggctcaacccgtacggcaattcgctgatcgtcaacggcgcctacttgcagaagaaaccgaaggtcgtcgaggacttcgtgcgggtcacgcagaaggcgttcgcggcgtgcgtcgccgacgtcaacccatgcctgaaggcgctgttggaccaggtctcgggcctggacaaggcgaaccaggagcgccagtgggagcgcatcaagttcctgatgacggacgagttcacgacgaccaaggggctcggctggatcgacggtgagcggatgaagaaggactacgagctggtgcagacctatctcggcatggagaagccgttcgacgtgacgacggcgttcacgaccaagatgctggatccgagcatcaaaatggatgcgagcaaggtgaagaagtga

SEQ ID NO: 3456 - DNA, 648 bp, BradyrhizobiumColbertium
atgcccgcaaaacgatccggcgacaccgcgccgcagcgccgcgaccccgtcgccacccgcaagaagctcctgaccgcggcgcgccaggaattcgcccggcacggccttgcgggcgcccgcgtcgacgagatcgccgagcgcgccggcgtcaacaagcagctcgtctatcattacttcggagacaaggacgcgctctacctcgccgtgctcgaatgggtctacgaagatatccgcgagcaggagcgcaggctcaatctcgaaggcctgccgccggagaaggcgatccgcaagctgatcgaggcttcgttcgaccatctcgcggcgaaccccgatttcatcgtgcttctgaacgacgagaaccgcggcggcgcccgccatgtccgcggctcgacccgcctggaagcaatgcactcaccgctcgtcagaagcgtctggcacatcctcaacgagggggtgcgcgcgggcgtgttccgcaaggggatcgatccggtccagctctatatctccattgccggcctcagctatttcttcttctcgaacacaccgacgctgtcggcgatcttcggcaaggacctgtcgagccgcaccgcacgccgcgcccgccggcgccacgtcgccgatctggtgctgcactcgcttcggccataa

SEQ ID NO: 3457 - DNA, 771 bp, BradyrhizobiumColbertium
gtggcagccgaccgggcacgcgcggcacgcagctttgcgatcgtcctgatcgtgcaccttgccgtgctcgtgctctggcaggtcgcggtcgacgcgttccaggttccgaaattcatcctgccctcgccgctcgctaccgtgcagacgctgggaacctcgggctatgcctggggcgccaacacgctggtgacggcgatcgagatcctcggcggcttcgcgctgggcgccttcgtcggcgtgacgctcgcggtgatcttcagctgggcgccgctgctgagcctcgtgctgctgccgctgttcgtgacgctgaacatgatcccgaaggtcgcgctcggcccgctcttcatcgtctggttctcctacggcatcgtcccgaacatcctgatcgccttcagcatctgcttcttcccgatcctgctcaccaccgcacgaggattgcgcgaggtcgagcctgatctgctcgatctcgtcaaatcgctgcgcggctcgcgctggacgttgttccgcaagatccagttgccgggatcgctgccctacatcttctccggcatgaaggtcggcgccatcctcgcggtcgccggcgccatcgtcggcgagttcatcgcctccgagcgcgggctcggctacctcatgatccaggtgcaatcctccctcgatacgcccgcgatggtgatggcggtcgtgctgctgacgctgctcggggtcgccctttatggcctggtgctggccctcgaacgcatgttcgtggtcggcgacgccaggcagaactag

SEQ ID NO: 3458 - DNA, 1038 bp, BradyrhizobiumColbertium
atgctgctcacccgccagacgctgccgaagaccattcccgatatcgccgctctcgacgagctgctgtgccggccgacgcaggcgctcatcgacgacctcgagaaggtcgacggcgacatcatgatcctcggcgtcgccggcaagatggggccgacgctggcggggctggcgaaagccgccacgcccgaccgccgtgtgatcggcgtcgcccgcttcagcgaacccggtgtgaaggactggctgcacgcgcgcggcgtcgagaccatcaattgcgacctgatggacgagcgctcgatccatgccttgccgaaggcgccgaacatcatcttcatggccggccgcaagttcggcgccgagggcgatctgtcgctgacctgggcgatgaacgcgcatgtgccggcgctggtcgcgcaggccttcccctcctcgcgcatcgtggcgttctcgaccggctgcatctatccgttcgtgcctgtcgacggcaaaggctcgaccgaagacatggcgccgaacccgcccggcgaatacgcccagtcctgcgtcggccgcgagcgcatgttcgaatatttctcgcgcaagttcggaacgccggggcggctgttccgcctcaattacgcgatcgacatgcgctatggcgtgctgcacgacatcgcgacgaaagtgctcacgggtacgccgatcgacgtcagcctcggccatgtcaacttcatctggcagggcgatgcgtcctcgcaggcgttgcgctgcctcgcccattgcaccacgccgacttccccgatcaatgtcagcggccacgagatcctggcggtgcgcgatctcgcgcaaaaattcggcgcgaggttcggccgtgcgccggtactgacgggcaaggaagagccgaccgcctggctgaccgacacgtccagggcggtcgaattgtttggtctgcccgtcgtcgataccgagcagctgatcgcctggacggcggactgggtctcgcgcgccatgccgagcctcggcaagcccaccaaatacgaggtgcgcgatggacgctactga

SEQ ID NO: 3459 - DNA, 822 bp, BradyrhizobiumColbertium
atggacgctactgacggcccgccggtcatcaagctcggcgagcaggatgagatcgccgggctggcgctctcgacggaagcgcactggaaccagaccgaagaggactggcgcatcttcctgcgcgacggagtcgtattcggcatccgcgacggcgcccgactggtcgcgaccgcggcgctgctgccctattcaggcaacaacgcctggatcagcatggtgctggtatcgggcacccatcgccgccgcggcttggcaacacgtctcgtcgacgcttgcatggaaacggcgcgcaagagcggcctgacgagctggctcgatgcgacgcctgacggcgccaaggtctatggtccgctcgggttcacgccgaccctgcagttacgacgactgaagctggtcaaccccgcgccgtcatccgcgccggcgccatcggccgcaacgatcgaggcgctttgtgccctcgaccggcgcgccggcggtttcgaccgcaccgccctgctaaccgccttcgcacagcgcccggggtcacgcatcgtcgccgcaaacggatgcatcgcgctggtccgcgacggcagaaccgcgcgccatatcggcccgttattcgccgatcatgctgccgatgcgctggcccttgttggcgcgatcgcagcatcggagaccagcccgctcctaatcgacgccgtcgcatcgcaaagccagttcctggacggcctgacggcctctggctggaccatcgagcgaccgttccagcgcatgcggttcggccccgccacccatgccgcgaaggaaacgccattcgccgtcgccggccctgaattcggatag

SEQ ID NO: 3460 - DNA, 1056 bp, BradyrhizobiumColbertium
atgcaccacagccagatcaacagcgacatccgcaagctgatcgccgagggcaccgtgctgcctgcgcatcctctcgcgctcaccgccgagcgccagctcgacaagacgcatcagcgcgcgctgacgcgctattacgtcgacgccggggcgggcggcctcgccgtcggcgtgcacacgacgcaattcgcgatccgcgacgtcggcctctatcgccccgtgctggagcttgccgccgagactgccgcgaactggaccaagcgtccgctggcgctggttgcgggcctcgcgggtccgacgaagcaggcggtcaccgaagcccgtacggcacgggatatcggctatcacgccggcctgctcagcctcgccgcgatgaagaatgcgtccgaggacgagatcatcgcgcattgcacgtccgtcgccgccgagatcccgctggtcggcttctacctgcagcccgccgtcggcggcgtcatcctgtccagccggttctggcaacgcttcgcctcgatcgacaacgtcatcgcgatcaagatcgcgccgttcaaccgctacaggaccctcgacgtgctccgcggcgtcgcagccgccggtgcgctcgatcgcgtcgcgctctacaccggcaatgacgaccacatcctgctcgacctggtgctgccgttcgacctgcgcgataacggcgtcaccacccgcacctacttcaagggcggcctgctcggccactggtcggtgtggaccgcaagcgccatcaagcagttcgagcgctgcaaggcggcgcgtcacaaggacagcgtgcccgccgatctgctggcgctcgatgcccgcgtcaccgattgcaacagcgccttcttcgacgtcgccaacaatttccacggctgcatcgccggctgccatgaagtgctgcggcgccagggcctgatgaagggcctgtggtgcctcgatccgaacgagggcctcagccccggtcagaaggaagagatcgatcgcgtcacgcgcgagcacgccgacctcagcgacgatgccttcgtcgccgcaaacctggacagatggcgggcatga

SEQ ID NO: 3461 - DNA, 774 bp, BradyrhizobiumColbertium
atgagctcggcccctttcatcagcctgcagggcgtccgcaaggtctatcgcagcggcggcaccgactttctcgcggtgtccgacgtcaccatggacgtgcaggaaggtgagctggtctcgctggtcggcccctccggctgcggcaagaccaccgtgatgaagatcctggccgggctgcacggcgccgatggcggcaccgtgaaaatcggcaatgccagcagcccgttcgaccccacccgcgacatcggcatggtgttccagcaggcgctcctgctgaaatggcgaaccattctggacaacgtgctgctgccggccgaaatcgtcggccttcccgtgaaagccgcgcgcgaacgggcgcgtgacctgctcaatttggtcgggctcgccggttacgaacagaaatacccgcagcagctctccggcggcatgcagcagcgcacggcgatcgcgcgcgccttcattcacgatccaaagctgatcctgatggacgagccgttcggcgcgctggatgcgctgacgcgcgagcagatgaatctggagatgctgaagatctggcgccagagcggcaagaccatcatcttcgtcacgcattcgattcaggaagccgtcttcctgtcctcgcactgcgccgtgctcacggcgggcccggcgaagatggccgattacttcgcgatcgacctgcccttcccgcgcgacctgccgctcaagaccacggacgcgttcggtgcctatgcaaggcggatctacgcgaagctggggttgggaacggcgtag

SEQ ID NO: 3462 - DNA, 117 bp, BradyrhizobiumColbertium
ttgctgcccgatggattctcagatgcgcaattgcgcatcgtggttcgcgacttcgtcgcgccccggactgacagcggaacggcgctctacgccgttcccaaccccagcttcgcgtag

SEQ ID NO: 3463 - DNA, 1092 bp, BradyrhizobiumColbertium
atgaaacgccgtacattcctcaagggcggtgcagtcgccggtgcgacgacgctggttgctgcacctgcgatcgcgcagagcatgcccgagatcaaatggcgcctgacctcgagcttcccgaagtcgctcgacaccatctacggcacggcgcagacctttgcgaaatacgtggccgaggccacggacaacaaattccagatccagacctttgcggccggcgagatcgttccgggcctccaggcgctcgatgccgtcagcaccgcctcggtggagatggcgcagacgccgctctacttctacatcggcaaggagccggcgctggcctatgccaccggtgcgccgttcggcatgaaccatcgccatcaggaatcgtggtggcacttcggcggcggtgccgatctcaccaacgaagcgctcaagccgttcaaggcgcacgccatcctctgcggcaattcgggcactcagatgggcggctggttccgcaaggagatcaaaaccgtcgacgacctcaagggtctcaaattccgcatcgccggcatgggcggccatgtgctggcgcggctcggggtcgtcccgcagcagatcgccggaggcgatatctatccggcgctggagaagggcacgatcgacgcggtcgagttcgtcggcccctatgacgacgagaagctcggcttccagaaggtcgccaagtactactatttccccggctggtgggaaggcggcgccatgctgcacatgatcgtcaacgacgagaaatgggcgtcgctgcccaagcagtatcaggccatcgtcaaccaggcagggtcggcggccggtgcctggatgctggagaagtatgacagcgtgaatccggcagcgttgaagcggttgatcgccaatggcgcggagctgaaggcgttcccgcagccggtgctggaagcctgctacaatgcgacccaggaccacctgaacgaactcgccgccaagagcgccttgttcaagcggaccaaggagagccacgacgcctacatgaaggagctcctgttctacacgcagatcgccgagaacttctacgacaactatctgctgagcaagacgcgcaacaagacctga

SEQ ID NO: 3464 - DNA, 258 bp, BradyrhizobiumColbertium
atgagtgatccctcaagttccgaaacaccgctgcgcacgacgttcaagatcaagctgaacggcgacacgctggcgatcgcgaccgtcggtcaggcctatcaattcctcaccaacttcaagtcggtcgagtggatggaattccgctccctgcacgaggacgccgtcgcagccctggaaggtgctgccggtaacgccatgctggccgtgcaggcaaccaacgccgtgcgggcgctgttcgtgagtgccaagctgctttga

SEQ ID NO: 3465 - DNA, 1020 bp, BradyrhizobiumColbertium
atggtttccgacgcagcacatgccgagaggctgttgtcgcgccgccgtgtcgggcgggccgagacgattctgctgtctctggcggcagtcgcgctggcattgggtgctgccgcgtgggtcgcggatatcggcgattcgagtccgttggtctccgccgcgctgccgccggccaatgccccttcattcgaggaccgtttcgcgtcggcgtccggcagcccgacgccacgcgagctcggcctgcgggtattggagcgctccaccgtgaatgcggtccagttgaagctgcgggacgccaaggcgatgctcgcgcagaagctccagggagatgactggcgctcgatgctgaccgacgacgacgggagcgcggaggacgagcggaggtcctcgcaccgtgccgacgccatcccaatgccgcgctcgcgtccggtccaggcggacctggccgcccagatcgcctccagtcaggcctatgccgataccggttcccgggccgacaaccgcaatttcttcgaaagattcaccgacaagatcaagctggcctcactgacgcccggcgacggcctgttcggaaaggcgccggatctcgccgccctcggctacgattcgcggaccgcggtctatgacatctcggccaaggcggtctatctcccgagcggggtcacgctggaagcgcattccggcttgggcgcgctgatggatgatccgcagtatgtcgaccggcgcatggtcggcgcgacaccgcctgccacctacgacctgaagccgcgcgagaagccgttccacggcgtccgtgcgctgcgcatgactccggtcgaaggcaccagcgcgctcggccgtgtcggtctgctcacgcacagctacttgctcggaccgcgcggcgattccaacggctgcgtctcgatcaaggactatgatcgtttcctcaaggcctacgacaatggcgagttcaaccgcctggtcgtggtgccgagcctgcgcggcgcgacgaccgcttcgcagcgcgcgagcaccgattcctga

SEQ ID NO: 3466 - DNA, 339 bp, BradyrhizobiumColbertium
atgtggttcattttcccgcaggtcgccggcctcggcttcagcgccatgtcgcaacgctacgcgatcggctcccgcgcggaggcgaaggcctatctcgcccaccccgtccttggggcgcgcctcatcgagtgcacgaggctcgtactcgccgtcgaggggcggaccatcaacgcgatcctcggggctccggatgacgccaaattccgctcgtcgatgacgctgttcggtgcggtgtccgacgagccgatcttcgatcaggcgattgcccgatattttgcgggcgaacgcgaccgcgccacgctggagatcctgtccaagctcgaccgggcacccggctga

SEQ ID NO: 3467 - DNA, 2082 bp, BradyrhizobiumColbertium
atgaaaatcggtacgctcctgaccagcgccatcgtctcgctctcgaccgtgggcggtggcctcgccgtctacgtcgccgtgacgaaataccagaccatggagcggatcagcgaagccgagggccgcctggcgatcgtccgcgcggtcagcgacatcccgcgttacctcaaccccgagcgcggctttgcaaccaatatcctctacggaccggccaccgttgatccggcacagctctccggacatgacaagctgcgcaagcagaccgatggcgcccgcgacaagatgaatgctctgcgcaaggagctgccgggctcgctcgacgacggcaacgccatcggcaccgagattgacgccatcaactcgaagttcacggcactgcgcgaggccatcgacaaggcgatcgcaggacccgcggaggcacgcaaggatgccgccaggaaggtcgtagccgacaatgcggtgctcaacgccggcgtcaccgccttgctgaacgagcaggttcgccgcatggcgatcctcaacggcgatgccttccgccaggccaactacgccaacatcgccatgacgctgcgcgacatcggcggcctcaatgccagcgtccacaagaaccttgttggcggcaagaaggttgcaaccgacgccgagaaggcggacgttgcccgcatgcagggtcgaagcgaccagatcgtgatggccctgatggagctgcgcggccatccggcgaccccggccaatgtcggcgcagcattggaggccatgaattcgcgttatgtcgaggaattcggacgcgagctcaagatggtcaaggacggtgccatcagcggcaaatatgagcacgacgtcgagacctattacgcagcctcacaaaaaggtctcggctcgatcatcggcgttcgcgatgctctttacgacaatgccgagcatatcctcgccgacgcttcctccgccgcgcgcaccagcttcacgatcgcgctcgcgggcctcgtcgctgtgctgatcgcgagcgtcggcctcatcgtgatggttcgccgccgcgtctgcgctccgatcgtgaccctgacgacgcggatgtcgcggctcgccgacggcgaggttgccgacagcatccccggcgccgagcgctccgacgagatcggcgcaatggcggcggcggtgcaggtgttcaaggacaacatgatcagggctgaccggctcgcggccgagaagcaggcggagaacgacggcaagatgcgccgcgcgcaggcgctcgacgagctcacccgcgccttcgaggccaaggtcaccgagctggtcggcggcctgtcccgcgcctcggcgaccatggaaagcaccgcacagtcgatgacctcgaccgcggcgcaaaccaacagccaggccgcagtggtcgccgccgcgtccgagcagacctcgaccaacgtccagacggtcgccagcgccaccgaggagctgacctcctcgatcgccgagatcggccgccaggtcgcgcaatcgaccgagatcgcggcccgcgcggtcgacaacgcccgccgcaccggcgacaccgcgcgtacccttgccgagggcgcccagaagatcggcgacgtcgtcacgctgatccagagcattgccgagcagaccaacctgctcgccctgaacgcgaccatcgaggccgcccgtgccggtgatgccggccgcggcttcgccgtggtggcttccgaagtgaagtcgctggccggccagaccgccaaggccacgacagaaatctccgaacagatcaccgcgatccagaccgcgagcgacgagaccgtggccgcaatccgcaacgtcgccgaggtcatcagcgaaatcgaccagatcggcaccgcgattgccgcagcgatcgaggagcagggatcggccaccaaggagatcgcccgcagcgttcaggaagccgcccgcggcacccaggaggtcaacaccaacatctcgggcgtgcagcgcgccgccgacgacaccggctcggccgccagggaagtgctgggcgcagccgaacagctttccacgcagtcgcgcgacctcgccggacagttcgaccgcttcctcagcgaggtcagggccgcgtag

SEQ ID NO: 3468 - DNA, 591 bp, BradyrhizobiumColbertium
atgagcaaccgcatcctcgtcctctacgggtcataccgttccgaccgcatgggcatccgccttgcgaatttcgtcatcaatcggctgcgcgaccgcggcgacgacgtcgaattcatcgacgccaaggcgatcggcctgccgatgctcgaccgcatgtacaaggagtacccgaagggctcggcgcccgccgagatggagaagctggccgcgcagatccgcgatgccgacggattcatcttcgtcaccggcgagtataattggggcattcagccggggctgaagaacctcaccgaccatttcctcgaagagtggttctggcgcccggccgcgatcgtgagctattccgccggccgcctgtccggcgcgcgtgccgcgaccgcatggcacggcacgctgtccgagatgggcatggtggtggtgtcgagcaccattggcgtcggcccgatcgcgcagacgctgtcggcggagggggagccgatcggcgagggcggcaaggcgctggagcgctcgttcccgcgctttgccgacgatctcacctggtggatcgaggcggcgaaagcgcagcgggcgcgcaaggcgccgccctactga

SEQ ID NO: 3469 - DNA, 858 bp, BradyrhizobiumColbertium
ttgaatttcgaattcacacctttcgtacggaagatttcggccgagcagacgatcctgtccttacccggctgcgacgtgaatctgacgcacgcctttcctcgggtggtcgacgcacagctcgtggagaattgcacggcgattggcttcacgatggacgacctcaacgtgcccatccgcttcaacggctcgcaacgcgcgcgaccggtcgtggtcattggcagcagtggcgccggctacaccaccatcgaggaggtgcagcgtcaaatcgcctcggtggttttcaggccggaggtagggggacgtggttggccgcctacgccatccagcttcaagattttcgagatctccgcggacggcttgcagcggctgcgcagcgtggttcgcgaggtgctggccgaggccgccggctccgtggaggtgccggagctttcattgaagggcgcggcgatgagggagtccttgctcgcagccgttgatgaagccctccacagcgtcgtttcggcccgctggacgctggccccaaacgacggacggagtttcaggatcttccaggagatccgctcgctgctctccgacctgtcgcagccgatctacagcgacgagatcgcgcagaagctggggctgtccgttcgcaccatgcacgacgtggtccgccgctatcgcgggatgagcctgcaccgttacctgcgcctgcgccggttgtggctggtgcgccggcagcttctggccggggccgagagcgtcaaggcggtcgcgctggcgttcggcttctggcatctgagcgatttctcccgaagctaccgccaccagttcggagagacgccgtcgcaaacgctggagcgcggacgcggccgatag

SEQ ID NO: 3470 - DNA, 1146 bp, BradyrhizobiumColbertium
ttgatcgtcaagttcatttcaattcaggctgctgccatgaaggcaaactcgcctactgatattttggtcgaattggaagatgcggtagcagcgtgtccgctcgaccgctgcgcccgcatcctgtccggcattgtgcagttgctcaccggcagcggcgaccggtctcaggagctgctcgcgggagtcaccgatggtgtgctgctgcgactgacagaccgggtcgaggccgttgcgcttgttcaactgagccatgcgcttgccgagttgaaggcagctccgccgcagaccttacgacgtctcgcctcacacgacgatccggacgtggcctgtccagtcctgctcaaatcaccggccctgtccacctcggatctcgaggcaatcgcgacctcgcgcggcaggcggcaacagctcgcgatcgccgctcgcgatttgatcgagccgccactgacgggggcgctcgtcaaggcaggcgaccgggccgtccacctcgcgctgatcggcaatgcaggagcactgttctccgatgccggctacgctgcgctcctcgagaagtgcgccggggacgacgagctcacgaaggcgctggcgctcaggcctgacacgccagatctggtcgtgcggaaactgctgtcggccgcaccggatccgaacgcccgcaggcagccagaggcgctcccggtctcgcgtccagaagctgccgcgtcgatcgcccccaagctgccctgcgcggctgactacgcaaacgcgaggcccgagatcgtcgcactcaaccgcatcggcaagctcaacgattccacggtgaaccgcttcgccatccgcggcgagaccgccaatctgttcacggcgctgtcggtactctccggggctccgatcgagatcatcgagcgcgtcatgaccgatcaggattgcgagggcttggtcatggcctgccgggcttcgcggctgaactggcagacgacgcttgccatcctcggcaaccgcagcggcaccaggctctccttcgccgagcgcgaacgcgcgcagcacattttcgagaccctgcttctgtcgaccagccagtggacggtgcgatggggtgaaatcgccgcaaacgccaaagggagcagtcgggaaaatcgcggcgcaaaaatgggagttaggcgatga

SEQ ID NO: 3471 - DNA, 333 bp, BradyrhizobiumColbertium
atgaagttcgacggtcgcaaagcttcgcgcgtgcggatggaccacaggcatcccgtcaacctcatgggctccgacggcacatggcggcgcagctgcgttctgctcgacgtgtcgcagacgggcgcgaaagtcgaggtcgaggggacgctggacgtgctccaggcgaaggaattcttcatgctgctatcgtcgacgggactggcctatcggcgttgcgagctcgtctggatcgacgggaccacggcgggccttcacttcatcactgcagatggcaagaggaagccggcgagcggaccggcggccgcggcgcagaactccgatcatcccaaatag

SEQ ID NO: 3472 - DNA, 1119 bp, BradyrhizobiumColbertium
gtgcagaacgcgcgaaccatctcaaggcccgtcgaccgtaacggcatccgcgaaggtgaagcggcccgccccttcgtgcatgtgctggccgatacctccgacaagctggcgggcgtgtgctcgattctcgaggaacggttctccgtcgcaggcgaacggctggacgccgaggccaagctgtcacaggtgccgtccgccatcgtcatccgcgcggagcttcgcgacgtcgacaacatcgcggccatcaagaagcgggcgggcaagctggcgaaagcgaggaagcgaatcttcctcctggagcacgcgtctcacgtcggcgtttcacaggcctacgcgctgggagcgacgaccgtgttgcccggcacgatcaaccggatcaaattgctgtccgccctgtccgatccgccggctcggtcctccgcgtcagcaagcgaaactgcgcaatccgacgatgctgtcgagactgcggcaaccgcgatcgcctcgatgttcacggcggtcaccctgggccagccgctcgatatcgacggcaccagggaagccggccgccagattgccgaacgcatcaccgaacatggtttgtcggaatggctcacgacggtgcggcgccaccacgaaggaacctatcagcattgcctgctcgtgaccggggtcgccatcgacttcggcctgagcctcggcgtcagaagacccgatctggagcgcctctactcggcggccatgttccacgacatcggcaaggcgcaaatcccgctctccctcctcgacaagccgggccgcctcgatgcgcaggaacgcgccctgatcgagacccatccggccgcgggctacgagtttctgaaggggcacgacaagatctcgccggagatcctcgatgccgttcgtcatcatcacgaatatctcgacggcagcggctatcccgacgccctctgtgccgatagcatcggcgacatcgtgcggatgctcacgatctccgacatcttcgcagcgctgatcgagcatcggcagtacaagccgaccatgccccgcgcggaagcgtacgggatattatgcgggatgaccggaaagctcgagaaggcgctggtgaccgcgttcaagcaagtcgcactcacgaggtga

SEQ ID NO: 3473 - DNA, 945 bp, BradyrhizobiumColbertium
gtggaattcgaaaagctggtccaatcgcgccgcagcgtacgcggtttcaggaaggacccggtgccgcgcgcggtgatcgaggcgatcatcgagagcgccaagcgcgcgccatcgtcgatgaacacccagccctggcatgtccacgtgctcaccggcagtccgttggaagagctgcgccgccgcaacatggaggagatggtgggcggcgccaaggtcaagcgcgacatcgtcagccatggcgagtaccagggcgtgcaccgcacgcggcaggtggacatcgccaagaaactgttcggcgcgatgggaatcgcgcgagacgacaagccgatgcggcaggactgggtgttgcgcggtttccgccagttcgacgcgccggtttcgctggtcctgacctacgaccgcgtgctcgatccgggcgcagtctgccatttcgacctgggcgcgctttgctacggcatcgtgctcgcggcttgggaccgcggcctcggctccgtcatcaacgggcagggcatcatgcgctctgacatcgtgcgcgaggtcgcgaagattccggaggacgaggtcatcatgacctgcgtcgcgacgggctatcggacgacggctttgccgcgaatgccgtgcgctcggaccgcgagcacaacgacgagttcgtgcgttacgtgggttttgccgactagcacgagcaggaggagattattctccggccgaaattttcggtgcggcgctgcgagcggcctcttgcaatctcgaagatgcaggaggaacaatgtccggagtgagaggtttgttgctggcgcgagggatttgacatgcggcggctggctagcctggttcggcggttcttcggcccgcggatgcggcgtccgatcgatgatgatccgagtcttcctttcacacccgacgagttcggccgcctcattcgtagcggcaggcacgaggacatga

SEQ ID NO: 3474 - DNA, 963 bp, BradyrhizobiumColbertium
atggccgcgccgctcgatcccgtcatcgcccagatcatcccgctcatgccgatgcgcgatcccacggtcatgacgccacagagcgcccgcgattccttgcgcgcactggctgcctcgcgcgccgccatcccgcctccgcccgtcgacagcgtgcaggacatcaaggtgaagggcggtgccggtccgctcgacgcacgggtctatcgggtcggcgccacgccggcaccgaccgtggtgttcttccatggcggcggctgggttgcgggcgatctcgagacccacgaccggcaggcgcgcaaccttgcgatcgaaaccggcgcggtcgtgatctcggtcgactatcgtcgcccacccgagacgcgctttcccggcgcctttgaggatgccttcgccgctgtgaacgacgtctttggccgcgtcgcggaatttggtggcgatgcgcggcgcctcggcgtggccggcgacagcgccggcggcaatctggcggcgaccactgcgatcgcctgccgcgatgccggcattaggctcgccgcacaattgctggtctatcccgtgaccgatgtcctcggccgttacgctgatccgcaagagaacgcgcgctatccatcccgcgccgagaacgcggagggctactttctcacccgcgcaacgatggaatggttctgcggtcactatcttgccgatgccaaccacgccaccgattggcgggtgtcaccgctccgcgcaccctccctcgccggggtcgcgccggccatcgtgaccaccgcctggttcgatcccctgcgcgacgagggcgcagcctacgcccgggccctggaagccgccggcgtgcgcgtcaagcaccatgaaggccccggcctgatccacggctatttcggcatgggcgatgcctccgacgtcgcgcgcgccgaagcgcagcgggcgcgagccgacttcaaggcgctgctcatccggggcgtataa

SEQ ID NO: 3475 - DNA, 465 bp, BradyrhizobiumColbertium
atggacgccacgatcgcgaaaggccaacaatccgccgaccggcattctcatctggttcgcccccaagacatggaatggcaaaagacccgctttccggggtgcgaggccaagacattgctgttcgatcgcagcagcgggctgatgactgcgttgatgcgttttgcgccgggatcggtgctgcccgatcacgagcatgtcgggatcgagcaaagctgggtcatcgaaggcgcgctcgtcgacaaggaaggcccggctgagggcatcgcctgcaaggccggcgaattcatctggcgcgaggcgggcagccggcatgccgcctggtgcccggagggcgccctgatccttgcgatcttccaggtgccgaacaagttcttcgaagccgacggccgcgtggtcgatgcggccggccaggactgggacgagatatgggggcacaccggcgcccagcggagatctcccagctag

SEQ ID NO: 3476 - DNA, 249 bp, BradyrhizobiumColbertium
atgatgaagcggattttcctcgccgcgatcgttgccagctttgcggcgggctcggccctggcgcaagaaacctgcgagagcaaggccgtcggcaaggacggcaagccgctggccggcgccgccaagacctcgttcctgaagaagtgcaaggaagacgcctgcgcgcccaaggccgtcagcgccgacggcaagccgctctcgggcgccgccaagaacagcttcatgaagaagtgcgagaccggcgcctga

SEQ ID NO: 3477 - DNA, 876 bp, BradyrhizobiumColbertium
atgaagcaaatccggatcggcgacatcaccatcgatgcggtgatcgagcgggaagggccgtggcggcgggcgcaggatttcttcccggcctacgacgagtcggtcttcagacgccatctgccgacgatggagccggaggtgttcgatgccacgcgcggcatgatcgtcatcacataccagagcttcgtggtgcgcacgccgcgctacaccatcctggtcgatacctgcaccggtgaggacaagggccacccgccgccgttcgattttcccggcaaggagcgctggcgcaacgaattgttcgcgctcggcatctccttcgagcagatcgactacgtgttctgcacgcatctgcacatcgaccacaccggctggaatacgaccctgcgcgacggccgctgggtgccgaccttcccgaacgcgaagtatgtcttccacaagggcgagtacggggcctgggaggcggagcacgccaagggcaacgatccgccgggcaccgtgtttcgcgacaattgcctgcccatcgtcgaagcggggcaggcgctgttggtcgatgacgattacgcgctcgacgacaccgtgacgctgacgccgacgccggggcactcgccctgccattgctgcgtgaacatcgtctccagaggtcagcgcgccgtggtgaccggcgatctcatgcatcaccagatccagtgccgtgagccggagtggtcagccaagcccgactgggatccaaagctgtcggcgctgtcgcggcggaaattcttcgcctccgttgtggacacggacacgctgatcctgccgatccattttcccgcgccgaccgtcgggctgatcaggccgcttgagggggcgttcgattatcggttcaagcgggaatag

SEQ ID NO: 3478 - DNA, 120 bp, BradyrhizobiumColbertium
atgatgttcgctccctttggcgaaagcgtagcgaacggactcagggtattcaaggcgccgaacccggagcctccaatgcgccgcgtgccgcaaatcaacctcaaacgccggagaagatga

SEQ ID NO: 3479 - DNA, 966 bp, BradyrhizobiumColbertium
gtgaccgcggcgatcgtgatcgccgtcgcagctgcaatctatgtcaacaacacaagccttctggcgtcacatcaggacgacaagccgctgttgctcgcccatcgcggcatggcgcaacgcttcgacgagcgcgacctgaagaatgacacctgcaccgccgcgcggatgctgccgccggcgcacgactatctcgaaaacacgctgcgctcgatgcgcgcgagcttcgcggctggtgccgacatcgtcgagctcgacgtgcacccgaccatcgacggcgagtttgccatcttccacgactggacactggactgccggacggacggcattggcgtcacccgcgcgcagaccatggcaaagctgaagtcactcgacatcggttacggttataccgccgacggcggcaaaaccttcccgtttcgcggcaaggggatcggaatgatgccgaccctatcggaagtgttcgcagcctttccggacaagaagctcctcatcaacgtgaaaagccgcgacccggacgaaggcgagagacttgccggcgtgctgaacgcactgccggccgagcggcgccggaccatcatggtctatggcggcgacgagcccatcgacgtgatccgtcgcctcgccccggatgtccgcacgatctcgcgcgcagccatccgaagctgcctgttccgctatatcggctatggctggacaggcctggtcccgaaggcctgccgcaacgcgttggtgctggtgccaatcaacgtcgccccttggctatggggctggcccgatcgcttcctcgcacgcatgaatggcgtagacagcgccgcgttcgtgctcggcccctacagcggcggcgagttctctacgggcgtcgacacgccggaattgctggcccgcctcccgcaaagctattccggcggcatctggaccaacgaaatcgagaccgtcgccaggctgaccggcaagagcaatgactag

SEQ ID NO: 3480 - DNA, 1623 bp, BradyrhizobiumColbertium
atgatccgcctcgacaacgtcagcaagcaagccggccatcagatcctgttcattgaagcctccgccgccctcaacaagggcgagaagatcggccttgtcggcccgaacggcgcaggcaaaaccacgctgttccggatgatcgcgggcgaggagctgccggacgagggccaagtctcgaccgaccgcggcatcaccatcggctatttcaaccaggacgtcggcgagatgtctggccgcagcgcggtggccgaggtgatggatggcgccggtcccgtcagcgaagtcgcggccgagctgcgcgagctcgaggctgcgatggccgatcccgacaaggccgaccagatggacgagatcatcgcccgctacggcgaggtgcagcaccgcttcgaggagctcgacggctacgcgctcgacggccgcgcgcgcgaagcgctggccggcctcggcttcagccaggagatgatggacggcgacgtgggaaaactttccggcggctggaagatgcgcgtggcgctggcgcgcattctcctgatgcgtcccgacgtgatgctgctcgacgagccgagcaaccatctggatatcgaaagcctgatctggctggagaaattcctgcgcgcttacgaaggcacgctgctcatgacctcgcatgaccgcgagttcatcaaccgcgtgatttccaaggtgatcgagatcgattccggctcgctcaccacctatactggcgattacgaattctacgagcagcagcgggcgcagaacgagaagcagcagcaggcgcagttcgagcgccagcaggccatgctcgccaaggagatcaagttcatcgagcgcttcaaggcgcgcgcctcacacgccgcgcaggtgcagagccgggtcaagaagctcgacaagatcgagcgcgtcgaaccgccgcgccgccgtcaaagcgtggcctttgattttctgccggcaccgcgatcgggcgaggacgtcgtggcgctcaagaacgtccacaagggctacggctcgaagcgcatctatgacggcctcgatttcatgatccgccggcgcgagcgctggtgcgtgatgggcgtcaacggcgccggcaagtcgacgctgctcaagctggttgcgggcgcgagcgagccggacgagggcaccgtggcgctggggggcagcgtcaagatgggctatttcgcccagcatgcgatggacctgctcgacggcgagcggactgtgttccagtcgctcgaagacgcgtttccgaccgcggggcagggctccttgcgcgcgctcgccggttgcttcggcttctccggcgacgacgtcgagaagcgttgccgcgtgctctcaggcggcgagaaggcgcggctcgtgatggccaagatgctgttcgacccgccgaacttcttggtgctggacgagccgaccaaccatctcgacctcgccaccaaggagatgctgatcaatgcgctgtcggacttcgagggcaccatgctgttcgtctcgcacgaccggcatttcctcagcgtcctgtcgaaccgcgtgctggagctgacgccggaaggcatccatcaatatggcggcggctacacggaatatgtcgcacgcaccgggcaggaggcgccgggattgcgaagctag

SEQ ID NO: 3481 - DNA, 261 bp, BradyrhizobiumColbertium
atgggcatggacacgaaggaagccgccgcgatgacagaggcctccgggctgacggacgatcagggcggcatagagcagagttcgagcttgcggtcgggctccggagggcaaagcggagcttttgatccgcagctccggtcgccgcctgcagacgccgcgaagcggctggctgaccagctgcgcgagatcactgtcaaggcgccgttacggtcattgcttattgcgttcctggccggagcatggatcgcgcgccggcgatag

SEQ ID NO: 3482 - DNA, 732 bp, BradyrhizobiumColbertium
ttgctgatctttctgttccttgtcttcgccccgctgaccgcatccgccgtcagatatttctggctgggcgatggccgccagaactggcaaacggccgatcggtcgagtgccggtctcttgactgccgctgccgatcaccctgcagccgtcatacgggtgttcggggcgagaacggtgagatggcgcagcatcttcgccattcacacctggatcgtcgtcaaggagaaggatgcggcgacctacacccggtacgactacacggcgtggggcgagccgctccgcaccaacggctttgctccggatgggcggtggttcggcgccgcgccagaaatcatcgtggcagtcgacggagagcgagcggaggcgctgatcccgaagatccggcatgtgatcgaaaactacaggtttcgatcctacggggattacagcgtctggcccggtcccaattcgaacaccttcgtgcaggccgcactcgactccgtccctgaactccgggccgtcctgccgccgaccgcgatcggcaaggacttcccgtacaccggcaaatggttcggcctgacggcctccggaacgggcatctttgcttcgctcgccggatacgttggcctgtccattggctgggtcgaaggcgtggagatcaatttcttcggcgccgttctcggcctcgatatccgccgcccggcgctcaagctgcctggcctcggccgccttggggtaacgccaggcgcgtaa

SEQ ID NO: 3483 - DNA, 159 bp, BradyrhizobiumColbertium
ttgagcaacgatcagcgccgcagcataccgcgctcaggcaagatcgtgatgcccggtctcatcgatctgcatcgtcacgtctattcgtgcgtctcggcaatcggcattcccgccgacgagttggtgcaatttcaggtagcagccgatcagcttcgttga

SEQ ID NO: 3484 - DNA, 1314 bp, BradyrhizobiumColbertium
atgaggtccttgagactgagactgttcgcgatactgcttgccgcgaccgggatcgtctgggtcgcggcggtcgtctggatctacgtcggaagccgcgacgaggtggagcacgttctcgacacgcgcctgcaggaggccgcgcgcatggtggcctcgctggcgtcgggactcgacaatctccccggaaactcggtgcctgcggccgcgcagccgctcggcagctacgaacgccagctgtcgtgccagatctggtcgctcgacggccggatggtcgccaagtcgagcggcgcgcccgaccagcagctctcgcccgccgcctccggcttctcggaccggatcatcgacggcgaaccctggcgcgtgttctccgtcgaggacgccgaccacaatctgcgggtgatggtcggggaccgtgtcgggctgcgggaacgcctggtgacggatctgatcaagggactcatgctgcccgcgctgctgatcgcgccgctgctcggtgccgcgatctgggcgagtgtcggacagggcctgcgcccgctgcgacaaatggctcaggacctcggcacgcgggagccggacgacatgcggcaggtggaaaccgagcgggccccggccgaggtcaggccgctggccctcgccctgaacggccttctcagcagggttgaggccgcacgccggcacgaacgcgaggtaaccgccttcgccgcgcacgaactgcgcacgccgctcgcgggcctgaagacgcaggcccaggtggctctggctgccgatgatccgcaggtcgtccgtggtgcgctcgagcagatcgtaaccgcggtcgatcgcagcacgcgcctggtgcgccaattgctgacgatcgcaaggctggattccgacgctgtcaacgcgccgctggcgcccgtcgcggtcgggcccattctggaggaaatcgtcgccgctacgccaaggcacgagcggacgaccgtgacgatcgacgccggcgtccgaacgatggtgctcaacacgaatgccgaatgcctccaactcgcgcttcggaacttgcatgaaaacgccgtacagcacactcgagaaggacgtgtggtctggagcgctggcaagaacgccatcgcgatcgaggacgaggggccgggaatccctcccgacgagctcgaccagatcggcaaacgcttcttccggggaaggctgaggagcccgatcggaagcgggctgggcctcgcgatcgtcaagctcgcgcttgcgaaggtcggggcgaaactcaccatatcgaatcgcgaaggtcgccgcggcaccagatcggagctgacgttcgatgtttga

SEQ ID NO: 3485 - DNA, 663 bp, BradyrhizobiumColbertium
atgcgcatactcgttgtcgaagatgatccgatcctgtccgacggtctgcgagcgggcctgtctctgacgggcgcaaccgtcgacgcggtcgccacctgcgaggacgccgataacgcgctctcgacgacccgctactcggcggtcgtgctcgacatcatgctgccggatggaagcggcctggatttgctgcgcaggctccggggacgccaggacgcgacgcccgttcttctcctgacggcgcgcgatagcgtcggcgacaaggtctccggattggattctggagccgacgactacctggcgaaaccgttcgatctcgatgaattggccgcgcgcctgcgcgccatcgtccgccgggaaggcgggcgtgcgggtccaacgatgacctacggcgccatcgtgctttcaccggccgatctctcggcgaccgtctcaggcgaaccgatcaacctgtcgcgccgcgagtttgccatcctggcagcgttgatggagcgtccggagcaggtccgctcgcgtgccgaactggaggaacgcctctacggctggcaggaggacgtggaaagcaacgcagtcgaggttcacatccacaatctccgcaataagatcgggagggatgcaatccagacgctgcgcggcgtgggctaccggatggggaccgtccgatga

SEQ ID NO: 3486 - DNA, 489 bp, BradyrhizobiumColbertium
atgggcatggcgagcttcgcgcttctggtcggctcggtcctgatgatcggctcggcggacaacgacaatccggacgcgacgcgcatcctcgaccaattcgtgagccgcgacaccggacccgacccctccgtccgaacgatccgatcggtcgccgcgctggaccatgaactcgccgcggcgcgcgccgacgaaaggccggtcatgctcgacttttccgccgactggtgcgtcgaatgcagggtcatggatgccgtcctgcgcaaacctgaagtacgcaaacggctgcaagacttcaggatagtgcgtgccgacgtcaccgctgtcgacgacgcgagccgcgccctgatgaagcgcttcggaatcgtcgggccgccgacgatcctgctgttcggcgcacacggaagcgtcgatcccacgaccaaaatcatcggcgccgtcgatgccgacgccctgctcggaaaattgtcggccgtcgcctcggccgactga

SEQ ID NO: 3487 - DNA, 684 bp, BradyrhizobiumColbertium
atgatgtctcacaagcgatgggcggtagctgcggcgctacttctgccgatggcgctcgcaggctgtgtgtccggttccgacatcatgcccaaggccgcggcctacgcgtcgacgtccggttctcgatatgatgcggtctcggacggagactacactattgctgctgttcctgcccgcgacttgaagactcgctacatgcgtcagctcgtcgacgatccgaccggagagtctgtcgggaccgttgtcgtagatccgaagaaccgattcctctaccttgtgcaggaaggtggcaaggcattgcgttacggcgtgggcgtcggcagggccggcatggcgtggtcaggtacggccaaggtagccatcaaacgtgaatggccgagctggacaccgaccaggcacatgatcgcccgcgagccgaacaaatacgtcaagtgggcccgaggcatggacggcggcacgcagaacccgctcggtgcgcgcgcgctctatctgttcagaaacggcaaggacacgctgtacaggattcacggcaccaacgagccgtggtcgatcggccaggcgatgtcctccggctgcattcgcatgatgaaccaggacgtgatcgatctgtaccgtcgcgttccatcgggaaccaaggtcgtggtgcttccggccgccgtggagtccgcagccgcccgcgaatga

SEQ ID NO: 3488 - DNA, 384 bp, BradyrhizobiumColbertium
atgtcctactacttcgcgaagaagcttgacgttcctttcgcggaaggcgtcgaccgagcgatatcggcgctcaagggccgcgggttcggggtgttgaccaggatcgacgtgcagtcgactctaaaggagaaaaccggggccgacttccggccctacgttatactcggcgcctgcaatccaaagatggctcacgaggcgctgatggcggaggacaagatcggcaccatgcttccgtgcaacgtgattgttcaggaagttgccggaaagacggaggtcgcggcggtcgatccggtcgcgtcaatgcaggcgatacaaaacgaatccctgagagccatcgcggaacaagttcgccgtgagttgagggcggcggtcgaagcgatctaa

SEQ ID NO: 3489 - DNA, 459 bp, BradyrhizobiumColbertium
atgacgacgacgcgaaaccgtgtgcctctccattcttccgaaagcgacaacctgcgcatcaaacgcacgatgcaggccaacgttgcctatttcgccgaacaccgcgatcagatcgccggccgactgcgtgaaatcgacgaggagtgggatatcgagagggcgatcgaagccaatgccgcggttatcggcttcgccggcatcgcgttggccgccactaacagccggcgctggctcgcccttccggcgttggtcacgagctttctatttcagcacgcgatccaaggctggtgccctccggtcccggttttgagaaagctgggcttccggacgtcctacgaaatcgaggaggaacgccgagccctcatggcgctgagaggcgatttcggacacgtggctgaaagcgccgacgcggcccttcgggcttctaccggtaggacgaacgcgaccgtaccggcgtag

SEQ ID NO: 3490 - DNA, 126 bp, BradyrhizobiumColbertium
ttgaacggtgtccttgggccgaagcaggtttcgggagcgaagcggcttgagctggggccgatgttggcgaggagcaactcccgcgatccgacccaggcggcgcggaccaaacctatcgccatgtag

SEQ ID NO: 3491 - DNA, 711 bp, BradyrhizobiumColbertium
atgacgttgctggacggactctacaaggttgaatacggcgtcaacgacggttttggccgcagcatcatgtgcttgcacgacggcaagatgctgggcggcaattcggggtttgcgcatctaggcacgtacgtcgagcgcgacggcgagattatcgccggggtcatcaccgagcggcacaaccacgatcccaactacaagccgctgatgggtgcggacgtcgcctcgatcggggcgcgcggccggctgtatggcaacgagatccgtctggagggcagctcggacacgatgccgggcgccagattctgggccaatctcacgcgacttgacgacgagggcttgcctccgagcggtgcggtcgggccgggcggcatcgccaacgggctctacgggatgaagctgagcgcgctggacggcatcgatgccggactgtccggagtgatgctgctgatcgacggtcgcatcctcggcggcgatgcgttcttctattatcttggctcctattcctcggcggacggccgctggaagggcgagatgctgaaccaggagcatacgccggcgaagggggagaacccggtgttcggcggcctcgaggtcgggatcgggttctccggaacctgcacggaagacagcggcgagctcgaaggcatcgcacttgccggcaaacgcagcttgcgccttgcggcctcgctcaagctgatgagaagggcgtag

SEQ ID NO: 3492 - DNA, 537 bp, BradyrhizobiumColbertium
gtgcggctcgcgcaagagaccccggacgcagtcggcatgacgcttgaaccggcttcctccaaggcacgaccaagcggcatgaatgcgacaccgcaagcagccgatgacgagctcagcgcgatcatctccagcgccgcaaggcagccgctgctcgatgcggcgtacgagctctggcgccagcgccatcgcctggatacgattgcgggccggccgacggccgaagagatccgtttcaaccgcaccctcacccctgagcagctcagcggcaagtaccgccaagatcgcgaccacgcccatgaagggccgatgttcggctatgtgaagcgtgcccatccgcgcgccgacgaccaggcgatccggcaggccatcatgaccgccgtcaaattcgaggatgaatacaacaagcaattcgactggaacggcgatttctggaattgcgtggtgcgcgcggtggcgcaggccgggcgaaaatatccggactatctcgagaccacctaccgcgacgcccgcaacgatcttgcctaccacatgaagtga

SEQ ID NO: 3493 - DNA, 822 bp, BradyrhizobiumColbertium
atgcgaaccaatctcctcgcgatgattttcgcgcttgccgtgcccgtgatggcgcatgcgcaatcggccgacctcgtcctgtgcgaccgcattgccgccgatcccagcgatcccgacaaaccggcggacgtgaagggcgtgacggaaatcgcgccgtcagacgtcgccaccgccatcaagttctgcaagcaggccgcgccgtcagcgcgccgcgccatgttcgcgctcggccgagcccatgcggccaaccggcagaccggcgaggcgattgcggcctggcgcaaggctgccgagaagggatcgagtgcggccatggtcgagctcggcgtcgcctacgccaccggctccggcattgccaaggacgaagggcaagcgagaaagctgttcgagaaggcggcgcagtccggcaaccctcgcggcgtcagcaatctcgccgcgctcggcggcgcaggtggcgccgcgccggccgaccccgcccaggcgcgcgcgctgctcggcaaggcagctgagaccaatgcggaagcgcagtaccagcttggcctgatgctgtccgaaggctcgggcggcgccagggacgatgccgccgcgcgtgcgctgttcgagaaggcggcggcacaaaaccatcccggcgcgctggagaggatgggcgcattcgcacaggaaggccgcggcggtgcgaaagacaaggaggcggcgaaggcgtactacgagcgcgccgccgcgctcggcgacgaggacgccaggaaggcgctggagcgcattcgttgcccctatgcgatcaaggacaagcagggcaagctcgtcaccacgctgtgcttctag

SEQ ID NO: 3494 - DNA, 1035 bp, BradyrhizobiumColbertium
atgaccaagtataagctcgagtacatctggctcgacggatatacgccgactccgaatttgcgcggcaaaactcagatcaaggaattcgcgtcgttcccgacgctcgagcagcttccgctctggggcttcgatggctcctccaccatgcaggccgaaggtcacagctccgattgcgtgctgaagccggtcgcggtgttcccggatggcgcgcgcaccaacggtgtgctggtgatgtgcgaagtcatgatgcccgacggcaagaccccgcatccgtccaacaagcgcgccaccattctcgacgatcccggcgcttggttcggcttcgagcaggaatacttcttctacaaggacggccgtccgctcggcttcccggaatacggctatccggcgccgcagggcccgtactacaccggcgtcggctacaagttcgtcggcgacatcgcccgcaagatcgtcgaagagcatctcgacctctgcctggctgccggcatcaatcatgaaggcatcaacgcggaagtcgccaagggccagtgggaattccagatcttcggcaagggctccaagaccgctgctgaccagatgtggatggcccgctacctgatgctgcgcctgaccgagaagtacggcatcgacatcgaattccactgcaagccgctcggcgacaccgactggaacggctccggcatgcatgccaacttctcgactgcctatatgcgcgaggtcggcggcaaggagtatttcgagtcgctgatggctgccttcgagaagaacctgatggaccacatcgccgtctacggcccggacaacgacaagcgcctgaccggcaagcacgagaccgcgccctggaacaagttcagctacggcgtggccgaccgcggtgcttcgatccgcgttccgcactcgttcgtcaacaacggctacaagggctatctggaagaccgccgtccgaactcgcagggcgacccctaccagatcgcttcgcagatcctgaagacgatcgcgtccgtgccgaccgacaagaaggccgccgcctaa

SEQ ID NO: 3495 - DNA, 204 bp, BradyrhizobiumColbertium
atgatgaacaatggtctaagtcacggatctgcgaagatctatcaattccccgccgggggccgcgcggctctcgccggacgccgctatggcgacacccgccttcctgccgatcacgcttcgccgccttcgaacgtctcgatttgcagcgacagctggtatcatcaggatgcagtcgacgaagccaagccgaaatgggaccgctga

SEQ ID NO: 3496 - DNA, 288 bp, BradyrhizobiumColbertium
ttggtcgtcaccatgctggtggccggaatcctggcagcacggcgggccgacgcacagacgttccagacctatcgctgtgtcgatggtacgcagttcattatcgggctttatgacggcgacaggcgcgccttcctccagatcgacggtgagccggtcacgctggccaggagaccggcggtttcggggatacgctattcgggggctggggtcacattgaggattcccaaggccgggcccacgacggtgaagcacctgaagcgcccggttacggcctgcgcggtgatctga

SEQ ID NO: 3497 - DNA, 744 bp, BradyrhizobiumColbertium
atgtcagactctcctgcccgtcatcttgccctgcaaggcgccagcaattttcgcgatctgggcggttatccgaccaccgacggccgcatcacgcgttggcggcacatcttccgctccaatcatctcggccagctcaccgctgccgacatcgagatcgtccgcgcactgggcgtcagaagcgcattcgattttcgcgggctggaagagcgcgcggccgggctctgcgccctgaacgagatcatggtgcatccgcttccgatcgagccgaccgtggtggccgcgctacgcaccgaactcgcccggggcaagctcacggcgccggtggcgctggagctcatgcgcgagtcctatcgcaactatgttcgccacaacacgcactgctttcgcgcgctgttcggccatctgctggaagaccgcgcgccgctggtgattcactgcaccgccgggaaggaccggaccggcttcgccagcgcgctgatcctgcatgcgctcggcgtgcccgatgacgtcattgccgaggactacctcttgaccaaacggcactacaggcgcgacgtgtcaaccgcctcggatcttcccgccgatgttctcgaggccatcggcagcgtcgatgtctcctatcttgctgcggctttcgaagccgtcggccatgaatatggcgatctcgaaacctatctgcgcgatgggctcaagctcggcgcggcagagcgaagcgcgctaaaggctcgctatctgcaatcatag

SEQ ID NO: 3498 - DNA, 681 bp, BradyrhizobiumColbertium
atgcaagacagagtcctgatagttacaggcgcacgcggcgcgctcggcaaggtggtcgtcgagatcgcacaatcacgcggcgcgcgcgtggccggcatcgatcatgcaccgtcgcaagagtccgcaacgcttgagggcatcgagatcggcggcatcgatctgtccgacgcggctcaagcgaaaactgcggtcgatgcggcggcaaggcatttcggccggctcgatgcgctgatcaacgtcgccggcggcttcgctttcgagactgttggcgacggcgacatcaagacctggcaacgcatgtacgcgctgaatgtcctgactgcactcaacacttcacgcgcggcgctgccgcatctcgccgcatccaaggctggccggatcgtcaacatcggcgcaacgggcgcgctccaggccggcagcggcatgggtccctacgcggcgtcgaaagccggcgtgcatcgcctcaccgaagcgcttgccgacgagtggaagggcaaggtcacggtcaacgccgtgctgccttcgatcatcgacaccccggccaaccgcgccgacatgccgaaagccgacttctccaaatgggtgacgccgcaggagctcgccgaagtcatcctgttcctcgccagcgccgccgcgagcggcgtcacaggcgccctgatccccgtcggcggacgagtctga

SEQ ID NO: 3499 - DNA, 687 bp, BradyrhizobiumColbertium
ttggaaaccgcgctctatctgcccgtcaaacgcttccttgaggagctcggctttacggtcaagggcgagatcggcggctgcgatctcgtcgggctcagcgcgggcgatcctccggtcgttgtgatcggcgagctaaagcttgccttcaatctcgaactgatcctgcaggcggtcgatcgcgcgccggccggcgacgaagtctggatcgcagccaagatgtcagcgcgtggcaagggacgcgagaacgatgcgcgctaccgcaatctctgccgtcgtctcggcttcggcatgctgggagtgaccgatcgcggccaggtcgaggtgctggtcaagccgccgaccgcggcaccgcggcgcgagccgaaggtgcgctcgcggctcgtcgccgagcatcagcggcgccagggcgatccggtgctcggcggcagcacccgcgcaccgatcatgacggcgtatcggcagcaggcattggcctgtgcatccgcgctcgccgagggtccgaagcccgtgcgcgaactgcgcgaacgctgtcccgacgccggaaagatcttgctcaacaatgtgtatggctggttcgaccgcaccgagcggggaatctacggactcaccgaagccggacacgcggctctgaaacgttggccccagcagcgggttggggctaatgccggtccggcgacactgccgtga

SEQ ID NO: 3500 - DNA, 306 bp, BradyrhizobiumColbertium
atgagcgcagactggaacaccaaatatggcacgcggcgtgtccgccacgatccgcccaccttggacgaggcaatcttcgccgcggtcggcatcaccgacgatcaggcgcagcaggccgagatcgccgcagccttgatgggaatgccgctcgacgtcgtccaggccgaagtgaagaagcaggctcgaaccaacagccgcctcaccgcaacccgcgtgatcgccggcgagcaaggcgcgcagcgctccgtggtcgtcgagcgccgcgtcgtccgccgtttcggcaacgacaagcgcaccgggacctga

SEQ ID NO: 3501 - DNA, 606 bp, BradyrhizobiumColbertium
gtggtacttgaagataccgtccgcacggctcccggctatgtgcggaccctgattcagcaggaagaattaccgctcctgcgcgatcatttgctgaggctcgatgccgccagccgacacgaccgtttcaacggctttctcgatgacagcttcatcgagcgctacgctgcccgctgcgctgaggacggcaccgtcatcgttgcctatatcgtcgatggcgtcgtgcgtggcgcggccgaactgcacccgccggaaggtgattgcttgcctgaagtcgccttcagcgtggaagcctccgcgcgtcgccagggtgtcggcaccgtgctgttccgtcgcctgatcgcggaggcgcgctggaaaggctacaagcagctgcggatcaccacgggcgccgagaatcacgcgatgcgggcgctcgcccggaagttcggcgcgcatctggctttccgccacggggagtcgaccggtacgatcgacctcgtcaagacgcccgaggcagaactcgccgatctcgcagcctcgccgttcacgaccgggcgtgctctcctgagcttcaacagcacttgctggaagctgatctccagcatgtacggcaatcgcgccgcatag

SEQ ID NO: 3502 - DNA, 399 bp, BradyrhizobiumColbertium
atgacgccgctcgagaaacttaaagcgatgaagatgccgttcgccgagttcaagggcgtcgagttcatcgaggccggaaaggatcgcgtggtggcgcggatgacggttcggcctgatctctgcacacttcaccacaccatccatggcggggcggtgatggcgctggccgattccgttggcgcggctgctaccgtgatcaatctgcccgaagatgccaagggcacgacaacgctggagagcaagaccaatttcatcggtggggcgaaggagggaaccacggtcattgccacggcaacgccggtccatcggggacgacggacccaggtctggaccacgcggctggagaccgaagacggcaagctcgttgccgtggtcacccagactcagctcgtcctgtaa

SEQ ID NO: 3503 - DNA, 153 bp, BradyrhizobiumColbertium
gtgcccgaacgcggcgcagcaacgctgcgcgtccgggacacgagactgtcggcgcagcgggcctatgtcagcacggccattacctccgaggtcattgctttgccgcgtcaagcaattcacgctgcgagaacaacgaattgggaggagatatga

SEQ ID NO: 3504 - DNA, 1203 bp, BradyrhizobiumColbertium
atggccaggcttcgcgtctacgacgacaccagggcgttattccatctgcctgacggcgtgatctatctcgacggcaactcgcttggcgcgctgcctctcggagttgccgagcgcgtcaaccgcgtcatcacggccgagtgggggaacgagctgatccgcgcctggaacaccgcaggctggtacgcccaaccccgtcatctcggcgaccggatcgcgcggctgatcggggctgcagccggttcggtgatggtcggagacacgctctcgctcaaggtctatcaggcgctcgccgccgggctcgacatgaatgcttcgcgcggggtcgtcctctccgacaccggcaatttcccgaccgacctctacatggccgagggtttgatcgcgacgctcgggcgcgggcatcaattgcgcctggtggctccggaggcgattgaggctgcgctgtcggaggagattgcagtgctctacatcaccgaggtcgactaccgcaccggacgccgccacgacatggcgaagctcagcgcgaaagcgcatgcgctcgggatcgtcacggtctgggatctcgcccattccgcgggtgcgctgccggtcgatctctccggctgcgccgtcgatttcgccgccggctgcacgtacaaatatctcaatgccggtcccggtgcgccggctttcctctacgtctcgccgcggcatgccgagagcgcccgtgctgcgctgtcggggtggatgggccacgcgaagccgtttgcgttcgagctcgcctatgcggccgccggcggcgtcgaacggatgcgcgtcggcacgccgccggtgctggcgatggcggcgctggaagcctcactggacgtatgggaccgtgtcgatatcgccgaggtccgcgcgcgttcgctggcgctgggcgatctcctcatcagtgaagtcgagcgccgctgcccgcagctcaagctcgtcaccccgcgggcacatgagcatcgcggctcgcaagtctcctttgcctttgaggccggctacgcagcgatgcaggccttgatcgcccgcggggtcatcggcgatttccgcgcgcctgacatcatgaggttcgggattacgccgctctacataggtgagatcgagattgtgcgggccgcggagatcatcgaggaggtgatcgtggacgaggtgtggcggcggccagaatatcaggtcgtgaatgcggtgacgtga

SEQ ID NO: 3505 - DNA, 816 bp, BradyrhizobiumColbertium
atggatcgaaaggcacccgtcatgacgtccagcaattacgatcccacgagcgaaggcgccgagaccgatttcgcccggcggatgtcctatggcgattatctggcgctggatgcgatcctcggcgcgcagcatccgctctcggaagcacatgacgagatgctgttcatcattcagcatcagaccacggagctgtggatgcgccttgccattcacgagctcaccgcagcgcgccgagcgatctcgcgagatgaggtgcaacccgcgatgaagatgctggcgcggatgtcgcgcatcttcgagcagctcaacgcggcatgggacgtgcttcgcacgatgacgcccagcgaatatacccgcttccgctcgcagctcgggcagtcctcaggcttccagtcgacccaataccggttgatcgaattcctgctcggcaaccgcaatcacgccatgctgaagccgcatgcgcacgatgcggagacgacgaagctgctccaagccgaacttgcgacgccaagcctctatgacgaggtgttgcgcctggccgaccggaacgggctcaggatgcctgcggcggtgctggcgcgcgatgttcgcgagacccacagcttcaacgaaggcgtgctgcaggcctggcgcatcgtctacgaggcgccggagacgcactggatgctctacgaactggccgagaagctggtcgatttcgaagactatttccgccgctggcgcttcaatcatgtgaccacggtcgagcgcgtcatcgggttcaagcgcggcaccggcggcacgggcggcgtcagctatctcaagcgtatgctgtag

SEQ ID NO: 3506 - DNA, 810 bp, BradyrhizobiumColbertium
atgcgcgattgggacgatgcttatgccaattcggcccatgtcccgggctcggacaagctgccggcactctgggcggagcgggcggcggcctaccgcgcggggctgaaggaatttcgctccgacatcgcctatggcgccggcgagcgccagaagctcgatctgatcctgcccgatggcgacagcaagggcctcgtcgtcttcgtgcatggcggctactggatgcgcttcgacaaatcggcctggaccgatctcgccggaggcgcgcggcatcacggctggacggtggcgctgccgagctacacgctgactccggccgcacgcatctccgatatcactgcagagatcgccgcggcaatcaccaaagcggcagcgctcataccagggccgatccggctcgcgggacattccgcgggcggccatctcgtcacgcgcatgctgtgcgacgacagccggctggagcccgccgtctacaatcgcattgccggcacgctttcgatcagcggcctgcacgatctgcgtccgctgctcaagaccaggatgaacgagacgttacgcatgacgatggaggaggcgacgctggaaagcgcggcgctgcatctgccgcgcgggcattcgcccctgaccgcctgggtcggcggcggcgaacggcccgaattcattcgccagtcggatctgatggccaatatctggaccggcttcgacgtacccacccgcctcgttatcgatccagggctgaaccattttaccgtggtcgacggactgaaggatgcgtcgtcggcaatcacagcccgcctgatcggccttgactga

SEQ ID NO: 3507 - DNA, 1320 bp, BradyrhizobiumColbertium
ttgcgcggcatcgatgatccgaatgccgattggagttgccagatgaatgccgaaacgcagcagaggattcttgacgccgtcgatagcggcttcgaagctcagcttgcaaccacccgcgatttcgtcgcgatcccttcgacccgcggggctgaggggccctgccaggacatgatcggcgacctccttcgcgaacgcggctacgaggtcgacgattggcacatcaacgtcgacgatctgaaggatctgcgcggcttcggtccgatcgagcacgacttttcgaaggcgcgttctgtggtgggtacttaccgtccacaaaccaatgccggcaaatcgctgatcctccaggggcactgtgacgtggtgccggcgggcccgctggaactgtgggacacgccgccattctcgccggtcatcaaggacggcaagatgttcggccgcggcgcttgcgacatgaagtcaggcacgatcggtgcgctctacgccctggacgcgatcaaggccgcgggtttgaggccgacggcacggattcattttcagtcggtgatcgaggaggagagcaccggggtcggtgcactctcgacgcttcagcgcggctatcgcgcagacgcctgcttcattccggagccgacaggcggcaagatggtccgctcgcaggtcggcgtgatctggtttcgcctgcgcgtgaagggacatccaacccacgtggccttcgcaggctccggcgcgaacgcgatcatggcggcgtatcacctgatccaggcgctgcaaaagctcgagatcgaatggaacgagcgggccaaggccgatcgtcacttcaagacgctcaaccatcccatcaacttcaatcccggcatcatcaagggcggcgactgggcctcgagcgtccccgcttggtgcgacgtcgattgccgcattgccgtattgccgggctggtcgatcgccgatcaccagaaggagatcacggcttgtgtcgctgctgcagcgcgtaaccaccgcttcctcgccaacaatccgccggagattgaatggtccggcttcctgtcggaaggctacgaactgaccgacgccgccgcgccggaaaccgcgttcggcaaggccttcaacgccgtctatggcggtgcggtcgaggatctcgtcttcaccgcgctcaccgacacgcgcttctacggcctcaaccacggcattccgagcctgtgcttcggtgccagcggcggcgagatgcacggcttcaacgaattcgtcgacctggaatcactgaggaagacgaccaaggcgatggccctgttcattgccgagtggtgcggggtggagaaggcatag

SEQ ID NO: 3508 - DNA, 726 bp, BradyrhizobiumColbertium
gtgagccagaccgagacctcagattcctatccgacatcggcgcgcaaccaagtgaagcgccggcacgatcgcggcttctacgatcatgagacggttcatcgcatcctggactcctcgatgctctgccacgtttcctacgtcatcgatggacagccctactgcacgccgaccttcttctggcgcgagggcaccaggctctactggcacggatcgagcgccagccggatgttgcgcaaccagagcaagggcgagcgcgtctgcctgacggtcgctcatctcgacagcctcgtcctagcgcgctgcggcttcaaccactccgccgattaccgcgcggtcatggcattcggtactgcctatctcgtcactgatcccgaggagaaggaccgcgcggtgatcgcgatggttgaccgctttttcccgggccgcacggcgagtctgcgccagagcaccacgcaggagatcaaggcaacgtcctttatcgcgatggagatcgaggaggcctcggccaagatccgcgccaagggtgtagctgacgacgacgaggactatgcgttgcccatctacgccgagcgcatcccggtccgcaccgtgctcggccccccggagccgtgcccgcgcctgctcgacggcgtcagccggcctgcgacgctgaatggctatagggaaggccggctgctcgaagatgcattgcgggatgcttattttgtggagtacccgaacggctga

SEQ ID NO: 3509 - DNA, 1344 bp, BradyrhizobiumColbertium
atgatcgtctccggtctcgtgaagcccggcgaggcgctgccgccatcgcggacgctggccaggcagaccgggtttcggcgcaatgccgtcgtcaccgcctatgagcgcctgatcgccgacggctttgccgacgcaaccgtcggttccggaacgttcgtggccgcacgcattcccgcgagggcggcagaagcgaataggccgaaggtcgttgtcgaaacgccgaggcagggcgcgttcgcgcttggctgcacccatatcgacgagcgcgctctgcagcgctttcgggccttcgtcggccgccgcatgcgcgcgttcgggtccgagcacctgcattacggcgacccgcgcggcagtcgggagctgcgcgctgcgatcgccgaccatctgttgtcagcgcgaggcctgcgctgcgatcccgatcagatcatgctgacatcgggcacgctgcacgcgttgcgcatcgttttgagcggaatcctgaaatccaacgaccaggtctggtgtgaggatcccggctatcccgccgctcgcaacaccatcgcgcattgcggctaccgcgccgtgcccgttcccgtcgacgagcatgggatgcgtgtcgcccgaggccgtatcgcggcgccagccgcgcgcgcggcatacgtcacaccttcgcaccagtttccgcttggcatgcagatgtcgatgccccggcggctcgagcttctggagtgggcgaggcaaaccggcgcatttgtgatcgaggacgattacgacagcgagttccgctatgacggcgcgccgctcatgtcgctcgcgggcatcgatcgcctccagcgcgtgatctacctgggcacgtttgccaagacgctgtttccgggcctgcgcatcggctattgcgccctgcccgaacgcctggtcgcagtggtaacggcagcgcgcgccgcactcgaccgctttcccggcacactgatggaaggcgcggtggcggacatgctcaattccggcgcattcgccgcaaatcttcggcgcgtgcgcaaaatctatcgcgaggcgcgcgatgtgctcgcccagacgctggaagtcgcatccgatggcgcactttcggtgccggtgccctcacagggcctgcatcttgtcgcccggttcgatccttcggtcgccctgtcggtgccagcgcaggccaagcgtgcggccaacgcagaaggctggctcttggccgacacctattcgcgcgcgcccccgctgcctggcttcgtgttgggattttccggccatgcggttccacagctcgtcgcctcagccgaacgactggcccgcgaatcgcgaactgccttgcgtcgcggcagatccgcccaccgggggtag

SEQ ID NO: 3510 - DNA, 246 bp, BradyrhizobiumColbertium
atgctgttgggccgtgcggtctgcctctcgctcctgatcgccacgacgccggtcgtgacggcagacgcagctacggtcggacgcgagcaggatatcggcgatctcaagctgggccagcgcgtgcaagtggatgatggaacctgccccgccggtcaggtcaaggaagtgcgcggcgccaggatgaccgacaagggggtggcgcggaccagcacttgcgtgccgcgctacggccccaaatcgaaatga

SEQ ID NO: 3511 - DNA, 363 bp, BradyrhizobiumColbertium
atgttgctacgtctctgcgccgcagccttcgtgtttctgctgacgatcggttccgttcaagcgcaagcgcgcgcaccctccaggcttcccgatccacgcggcgaattcgtgcgccaatgcgccccgcacatgctcgggcgctgggaacatccggaggaggtctgcggctgcctgcacgatcacgccgccgcggccgtcgaggaccgcgatctgcgtgaagcactgttgcgcggcatcagcgagacgggcgtgcccaccattgagaccgattgggtgccggcctccaagcagagcgagatcggcccgaccttcaccaagatcgccaagccgaccttgcagtgcatgttcgatccggcaaagtag

SEQ ID NO: 3512 - DNA, 159 bp, BradyrhizobiumColbertium
atgcgcgcgctcagcttcatcctggccttcggttttgtgctcgccggcccgtcgttggcggggacgcccgacggcaatctccccggaatcggcaccttccagtacagcggctcgccggccgcgaccgcgaagcaggtcatggtcgccgcgcgctcctga

SEQ ID NO: 3513 - DNA, 186 bp, BradyrhizobiumColbertium
atgatggcgggaaatcgcgcaacgccgcgcgatgcggatccggggacggaccgcggggatcaaccacccattcgcggcagcgccggcgaaatggcgctgcaatcaagccggggcttcgaggccgcaccgcagatgttcgtgcgtctgaccggttcgcatctcgcgaagctgcgcgatcgggactga

SEQ ID NO: 3514 - DNA, 549 bp, BradyrhizobiumColbertium
atgtcatctcgtttccgcattctttccggcatccgtctgaaaggtcttgctttattcctccttgccctgaccgcgccaatggcgtcggcatctgcagccgatgagcccgatctgatcttccgccgctccaccgtgttcaaatggatgagcccgaacgacaagcttgcgacctacggtatcgacgatcccgaggtcgagggcgtcgcctgccatttcacggtgccggagaagggcggcttcaagggttggctcggccttgccgaggaggtctccgacatctcgctcgcctgccgccagatcggcccgatcaagttcaagaacaagatggagcagggcgacgacatgttccgtcgacgccgctcgctgttcttcaagaagatgcagatcgtacgcggctgcgacgccaagcgcaacgtgctggtttacatggtctattcggacaggctgatcgaaggatcgcccaagaactcgacctcgacggtgccgattatgccatgggggacggcggacgtgaacgtgcagaagtgcggcgagttcttcacgcagtaa

SEQ ID NO: 3515 - DNA, 1536 bp, BradyrhizobiumColbertium
atgaacagcgtgagcgggtcggattcttctgccaagcaggggcggctgtggcagatcgccattgtgacggcggcgggtgtgatcggcgcgaccagccacgcagacgcagcgtattattattggacggactattccgacgggtcctattacgctcgaccggatcgctatcccgagataccgcgacagaagccgcaaaagcgcggcacggcaagcaagaaggaaagcatcgtcgagaaggaagccggcaccaagccgcaaggaccgctcatcatcgtggtctcgatcgaccggcagaaggttacggtctacgaccgcagcggcatgttcgcggaatcaccggtgtcgaccggcatgaagggccattcgacgccgatgggtgtgttcagcgtcattcagaagcataaattccaccgctccaatctctatagcggcgcgccgatgccgtacatgcagcggatcacctggtccggcgtcgccatgcatgcgggcgcactgccaggctatccggcctcgcatggctgcatccggatgccgatgtcgttcgcgatgaagatgtggaactggacccggatgggtgcgcgcgtgatcgtggcgcctggccagatgtcgccgcaaagcttctcccaccccttgctcgcctccgtgcgcgtgccgccgcagccgacggtgagcctcgagccgcagaccaacggcgacaagatcgagaagaccgtcgccgaaagcaggccggtggagaccaagaccgccagcgccgacagcgtgctcgatcttcgctcgtccgtcggccttgtcgtcatgtcggatgtgaccacgggcaatacgccggcgcgcgaagccgccacgccggccaagtcggccgaggcacccgacgcggccaaaccccagtcggaaggcgcggtgaagcccgccgacgacaaggttgaggctgtcaagaccgggccgggcaagacagaagcggtgggcgccgcaacgacgcccggtgcacaagccacagcaccggcgcccgcggcctcgcccgatgcgaagacggacgcgacacgcgttactgaacctgcgcctgtgtcaaagccggatgcgccgaagcgggccggccagatcgcggtcttcatcagccgcaaggattccaagctctatgtgcggcagaatttcgcgcctctgttcgaggtacccgtcacgatcgcgcccagcgaccggccgctcggcacgcatgtctttaccgcggaggtcgacaaggccgattccaatacgctgcgctggtcggtggtgtcgctgcccgtctcagcccgttccgcggcacgagccgatgacagccgccttgcgcgccgccggcagggcgcagtgatgccgattgccgccaagcccgtaatcgcgccggacagcccggctgacgcccttgaccgcatctcggtccccgccgacaccatggcgaagatcagcgagatgctgacgtcaggcggctcgatcatcgtcgcggaccagggcatcagccagggcgagaccggcgaaggcaccgatttcattgtccgcctgtattag

SEQ ID NO: 3516 - DNA, 570 bp, BradyrhizobiumColbertium
atgatgaatcgcaggaccatgctcagcgcgacgcttgcaagcgtgctcgcgccggcaacacgcgcctttgccgatggcggcatgagccgggtctcggcctacgcgttctccttcccggccctgtcgggcgacgatatccgcctcgccgccttcaccggcaagccgctgctggtggtgaacaccgcctcgctctgtggctacacgccgcaatatgccggccttcaggaactctgggacgaatttcgcgatcgaggactcaccgtgatcggcgttccctccaacgatttcggcggacaggaacccggcggctccaacgagatcacgcagaaggcgcatcaccaatatggcgttaccttcccggtcacggccaaggccgtcgtcattggagcgcaagcacaccccttctacagatgggcggctgcggcgcgaccaaaggacgccccgcggtggaacttccataaatatctgatcggccgcgatggctatatcgctgacgtctttccgtcagcagtggaaccgcccgatacgcgaatcaagactgccattgccaaggcactggccgtcagttga

SEQ ID NO: 3517 - DNA, 1026 bp, BradyrhizobiumColbertium
atgcgtgtggcggcaggactgattttggcaggcgcaatgtccatggcgatgaccggcgcatcatgggcgcagacaccggctgccaagcaggcgggtgcaacgcagggcgcaccggcggcgatgccaggcgcgtcagcgcccccgacaggcccggcagccgctcccgcgacaggcgccgcgccgacggggttcgtcaatccgcccccgcccaagcaggcgccgcagccggcccgcgcagcctgcaacacgccgggcgcgctgggggttgcccgcaccgtcgagatcgacaccacgggcggtccgggcttcggcttcgagcacttcaaggagctcgacttcctgcgcgacaaggaagtggtgctgaccttcgacgacggcccgtggccgcgcaacacccccgcagtcttgaaggcgctcgcggacgaatgcaccaccggaatcttcttcatcatcggcaagcacgcgacctacgagccggagatcctcaagcaggtctacgcagccggccacaccgtcggcgcccatacctggtcgcacgccaacctcaacaacaagaagctcaacgaagcgcagcgcaaggacgagatcgagaaaggctttgcggcggtgaagtgggcgctcggcggcatttcgcccgcgccgttcttccgcttcccggcgctgcagcatccgcccgagatggtcacgtatctcggcaaccgcaatgttgcgagcttctcctgcgacatcgactcgttcgacttcaaggcctccaagcccgagaagatcgtcgagaccgtgatgaagaagctcgataccaagggcaagggcatcatcctgatgcacgacttccagaagcacacggctgaggccctacccgagctgctcaagcggctgaaggccggcggctacaaggtggtggcgatgcgcgccaagttcccggcctcgacgttgccggaatacgaccaggagctgctcaaggacctcaagctgccgacggtgagccagcgccccgtcaattccgtggtgacgaccgtttccgaatag

SEQ ID NO: 3518 - DNA, 549 bp, BradyrhizobiumColbertium
ttgtctttccgcatcgaaggctacgtcatcgtctccgcggacggcatgcttgccgacgccgatcgcgtgatgccggacagcctgaagttcgaaggcgacaagctgttcttcgagcaggcgctcgatcgcgccgcgctgatcgtgcatggtcggcactcgcacgagcagcagccgaattcgccaaagcgcaagcggctgatcctgacccggaagatcagggatctcaccgtcgatccggagatgccgaatgcgacgctgtggaatccggagcatgctagcttcgaggcggcctgcgccttcgcggatgtcgcctccggcacggtcgccatcatcggcggtccggtcgtgttcgacatgttcatggaccgctacgatacgttctggctgtcggaagccccgcatgtgcggctgcctggcggcgaaggctgttttgtcgatgtccccgagcgaacgccccatgaggtgctggcttcgcacggaatgaagccggacgcgccgtacctgctcgacgcggcgcacgaggtgactgtcacgccgtggcgacggtga

SEQ ID NO: 3519 - DNA, 891 bp, BradyrhizobiumColbertium
atggggccggtgctgatcgggttgagccgagccagcggccagcgtttccgccggacagctgaaacgatcgcgcgcagcggcgtcgaccatatcatcctacagctctacgtgacgggcggctttgacggcgtcgccggcgaccggccgatgcaggtgggcgctggcgacatctgcctgttcgacctcgcccagaccctggagacccgggcgacgccattcgagaacgtcacgctggtcgtaccgcgtccgatgttcggcacccatctcctgcgcgtcgacgatttgcacggcctcgtcctgccgggcagcagcgtgatcgcaaggctcctggcgggacatctcaccgccctgttcgaattcgcgccgcgcatgacgctcgacgaatgccaatcggtggtcgagggcacggtgtcgctggtggccgcctgcctgcgcaacgaaatcgaacgtagcgatatcgacgcaggtcatcctggcgccgcgaacccgtccttgatgcggatccgccaatacatcgaagccggacttgccagcgaggatctgtcggccacttcgatcgcggaccatttcggcctgtcccgggcctcactgtaccgactgtttgcgcccgtcggcggcatcgccgactacatccgcagccgccggctgcaccgcgccttcttcgatctcgccaattcgggcggccgaggcctgcgcatcagcgaggtcgcccggcgctggcagctcggcagcgacgcgcatttcgcgcgctcgttcaaggcagcctacggcatcacgccccgcgcggcgcgcgaggccgcattgctcggcctgcagcgcggcaccgatgcaacgaacagcgcaacgatttcccgctggatgcgcgagatcgctccaccgagagcggattga

SEQ ID NO: 3520 - DNA, 441 bp, BradyrhizobiumColbertium
gtgactttcgggcgaatcctgttcgccgtgctgttcatctacacgggcgcgaccaagctgttcgccatccaggccaccgcggacttcatcgccaccaagctcgtggtgcccgacgcggtcgcgccttatgccaagcaggtcgaggcggcgaccgcgatgaccacgccgcagctgctggcgatcgcgatcggagcgctggagatcttggccggtttgatgatcgcactgaatttcggcgcgcgcttcttcgcgatgctgttgatcatctacgtcgccgtcgcgaccgtgatgttctacgacttctggaacatggcggcgcccgacaacgccaagatgctggtcgatgcgctcaagaacctgtcgatcatcggtgcgctctgcatgatcatcggctacggccgcaccacgcgtccggccgaggcggcctacggcgacgtgtag

SEQ ID NO: 3521 - DNA, 2310 bp, BradyrhizobiumColbertium
atgtcgtcctattctgatgatctccaccaggcggcgctggcctatcatcgtttgccgcgccccggaaagctcgagatccaggcgagcaagccgcttgccaaccagcgcgatctcgcgttggcctattctccgggcgttgccgcggcctgcacagagatcgccaagaacccggccgaggcggccacgctcaccacacgcgccaatctggtggccgtcgtctcgaacggcaccgcagtgcttggcctcggcaatatcggcccgctggcgtccaagccggtgatggaaggcaaggcggtcctgttcaagaaattcgccggcatcgacgtgttcgatatcgaaattgccgccgacacgattgaccgcgtggtcgagacggttgccgcgctcgaaccgaccttcggcggcatcaatctggaagacatccgcggaccggaatgtttcgagatcgaggcgcgcctgaaggagcgcatgaagatcccggtgttccatgacgaccagcatggcaccgccatcatcgtcgcggcggccatcaccaacggcctcaggctgaacggcaagaagctgtccgaggtcaagatcgttgcatcgggcgcgggggctgccgcgatcgcgacgctgaacctgctggtgtcgatgggggcacagcgcaagaacatctgggtttgcgacatcgacggcctcgtgcacgagggacgaaatacctcgatggaccgctggaaggcggtctatgcgcagaagaccgacaagcgcacgctcgccgacgtcatcggcggcgccgacatcttcatcgggctctcggcacccggcgtgctcaagcccgagatggcgaaagccatgggcgacaagcccttgatcatggcgctcgccaatcccgtgccggagatcatgcctgaggaggcacgaaaggcgcgccccgacgccatgatctgcaccggccgctcggactacccgaaccaggtcaacaacgtcctttgctttcctttcatcttccgcggcgcgctcgatgtcggcgccaccgcaatcaacgaggagatgaagcaggccgcggtcgaggccatcgcgcagcttgcgcgcgaggcaccgtcggatgcggtcgcgcaggggttcgacaccggcgagacgcagggcttcggcccggggtccctgatcccaagcccgttcgatccgaggttgatcctgcgcatcgcgccggctgtggcgaaggccgcgatagagtccggcgtggcgacgcgcccgatcaccaatttcgacgaatacactgcgctgctcgagcgcttcgctttccgctccggcctcgtcatgaagccgatgttcgccaaggccaagacccagccggtgcgcgtgatctatgccgagggcgaggacgagcgcgtgctgcgggccacgcaggtggtgctggaggagaacctggcgcggccgatcctggtcggccgtccttccgtcgttgaagcgcgcatcaatcgcttcggcctgtcgatccgcgccggcaaggacttcgacctcgtcaatcccgaggacgacccgcgctaccgctcctacgtgcaatcctacgtcgaggtcgccggccgtcgcggcgtgacgccggatgcagcgcggacggtggtgcgcaccaacaacaccgtgatcgccgcgcttgcggtggtgcgcggcgaggcggacgccatgctttgcggtgtcgagggccgctacatgagccatctgcgccatgtccgggagatcgtcggcttctcgcctgggatcagcgactatgcggcgcttgcgcttctgatcaccagcaaaggcgccttcttcatcgccgacacccaggtgcggcccaacccgagcgcggaagaactcgcggagatcgcgtcgctcgcggcggttcacgtgcagcgcttcaacatcaagcccaagatcgccttcgtctcgcactcggatttcggcagttatgacaccgagtcctcgcgcaagatgcggcgagcgacccagctgttgaaggagaagcatccggagatcgaggccgacggcgagatgcagggcgacaccgcgctttcggccgcggctcggcgaatggtgctgccgcactccaagctggagggcgaggccaacatcctgatcatgccgaccctcgacaccgccaacgttgcctatcagatgatcaagtcgctggcggacgcgcttcccgtcggcccgatcctgattggcccggcgcgccccgcgcatatcctgacgccgtcggtaaccgcgcgcggcatcctcaacatgacggccgtcgcggtcgtggaagcgcaggagcgcgcagcccggcagcagccgacgttgtttacgtag

SEQ ID NO: 3522 - DNA, 246 bp, BradyrhizobiumColbertium
gtgtctcgcctcgcgttaccggccttcaatcaagtgccccggccagccgccacattgcggtattccggctcatggaaaccggatgaagcacggccggccgcccggtggcaacatccgaatgcgatctggtcaacagactatccgcgccgtcattgcgagccatcgggtccgcgcagcgcgcggcccgatgacaggctccgcgaagcaatccagactccctccgcggaaggattctggattgcttag

SEQ ID NO: 3523 - DNA, 1773 bp, BradyrhizobiumColbertium
atgcatcgctaccggtcacatacatgcggcgcgctccgcgagagcaacattggcgagacggtccgcctgtcgggctgggtccatcgcgtccgcgaccatggcggcgtgctgttcatcgacctgcgcgaccattacggcctgacccagtgcgtggtcgacccggactcgccggcgttctcgctggccgaaaagctgcgctcggaatacgtggtgcggatggacggcaaggcgcgccgccgccccgagggcaccgacaacgacgacctgccgaccggcaaggtcgaggtctatgtcagcgagatagaggtgctcggcccggccggcgacctgccgctgccggtgttcggcgatcaggaatatcctgaagacatcaggctcaaatatcgcttcctggacctgcgtcgcgaaaaactgcaccagaacatcatgacgcgcgtcgagatcatcaagtcgatgcgccggcggatggaggggcagggcttcttcgagttcaacacgccgatcctgaccgcgtcctcgccggagggtgcgcgcgacttcctggtgccctcgcgcattcatcccggcaagttctacgcgctgccgcaggcgccgcagcagtacaagcagctgctgatgatgtcgggcttcgatcgctatttccagatcgcgccctgcttccgcgacgaggatccgcgcgccgaccgtctgccgggcgagttctaccagctcgacgtcgagatgagcttcgtcacgcaggaagacgtgttcgcggcgatggagcccgtcatcaccggcgtgttcgaggagttcgcgaagggcaagccggtcacgaagggctggcgccggattccgttcgcggaagccttgcgcaaatacggcagcgacaagccggacctgcgcaaccccatcgagatgcaggacgtctccgagcacttccgcggctccggcttcaaggtgttcgcgcgcatgctcgaagatcccaagaaccaggtgtgggcgatcccggcaccgggcggcggcagccgcgcgttctgcgaccgcatgaactcgtgggcgcagggcgagggacagcccggcctcggctacatcatgtggcgcgagggcggcgagggcgcaggtcccctcgcgaacaacatcgggcccgagcgcacggctgcgatccgcgcgcagctcggcgtcaaggaaggcgacgccgctttcttcgtcgccggcgatcccgacaagttctggaagttctctggtcttgcccgcaacaaggtcggcgaggaactgaacctcaccgacaaggagcggttcgagctcgcctggatcgtcgatttcccgatgtacgagtataacgaggacgacaagaaggtcgacttctcgcacaacccgttctcgatgccgcagggcggcctcgacgcgctcaagtcgcaggacccgctgacgatcaaggcgttccagtacgacatcacctgcaacggctacgagatcgcttctggcggcattcgcaaccacgtgccggaagcgatggtgaaggcgttcgagatcgcaggttacggcgagcaggaagtggtcgagcgcttcggcggcatgtaccgcgccttccagtacggcgcgccgccgcatggcggcatggccgccggcgtcgatcgcatcgtgatgctgctctgtggcaccaccaacttgcgcgagatctcgctcttcccgatgaaccagcaggcgatggacctcctgatgggcgcgccatcggaggccaccaccaagcagctccgcgagctgcacatccgggtgaacctgccgcagaagtga

SEQ ID NO: 3524 - DNA, 123 bp, BradyrhizobiumColbertium
atggcaaaggctcggactctgataagccaaaaatggcagtggaggtccaaaacagggcgttcccttggttgccgccttgggtcccgtcgggtaaaccctgccgcaacttcggaccggccgtga

SEQ ID NO: 3525 - DNA, 1530 bp, BradyrhizobiumColbertium
ttggcttatcagagtccgagcctttgccatcaggcgttccagccctatcttaagcccatgacggtccatttccccttccagaactcctattcggcactgccggacagcttctttgcccgcgtcgcaccgaccccggtcgccgctccccggctgatcaagctgaatcggccgctggcgctccagctcgggctcgaccccgacctgctggagacctcggaaggcgccgagatcctggccggaaagacggttcccgccggggccgagcccatcgccatggcttacgccggccaccagttcggtcatttcgtgccgcagctcggcgacggccgcgccatcctgctcggcgaggtgatcgacagagacggtgtccgccgcgacatccagctcaagggctcgggccccaccccgttctcccgccgcggcgacggccgcgccgcgcttggtccggtcctgcgcgaatacatcgtcagcgaagcgatgcacgcgctcggcattcccaccacgcgctcgctcgctgccgtcgtcaccggcgagcgcgtcatccgcgagaccgcgctgcccggcgcggtgctgacccgcgtcgcctccagccatatccgcgtcggcaccttccagttcttcgccgttcgccgcgacaccgaggcgatccgccggctcgccgaccacgtcatcgcgcgccactatccggacctgcttcatgccgagcggccctaccacgccctgctcgcagccgtcgtcgagcgccaggccaatctcatcgcacgctggctcctggtcggcttcatccacggtgtgatgaacaccgacaactcgtcgatctcgggcgagacgatcgactacggtccctgcgccttcatggacgcctacaaccccgcgcaggtgttctcctcgatcgacgagatgggccgctacgcctatgccaaccagccgcgcatcggcctgtggaatctgacgcgcctcgccgaatgcctgctgccgctgttctcggacgagcaggagaaggcggtcgcggaagcccaggacattctcggcgccttctccgacacgttcagcgcggcgtatcaggcgggcctgcgcaggaaagtcggcctcttcactgagcgagatggcgacgaggcactgatccaggacctgctcgacgcgatggccaagaaccaggccgacttcaccctcaccttccgcaagctcggcgacgcggcggctggcgacgcagccgactcgcgcgcgcagttcatggagcccgcagccttcgacgaatgggccggccgctggcgcgcgcgtctcgcgctggagccgcagagcgccgccgagcggcaagccgccatgctcgccgtcaacccgatgttcatcccgcgcaaccaccacgtcgaggccgtgatccaggccgcggtgaacgacgacgattacgcgccgttcgaggaactggtgaaggtgctggcgaagccgttcgaggatcagcccgagtacgccgcgtatgccgatcccccgctgccggatcagcgggtgctgcagacgttctgcgggacgtga

SEQ ID NO: 3526 - DNA, 855 bp, BradyrhizobiumColbertium
atgcccttcaagttcatccacgtcactgacacgcatctcgcaaatcccggctcgacgctctatggcctcgacccgcgcgcccggttggatgcggcgatcgcggacatcaacaagcaccagtccgatgctgccttcgcagtggtgaccggcgatctcacccattggggcgagccggagtcctacgtcaacttcgccgaggcgatggccgcgttgaagattccctacatcgcgatggtcggcaatcacgatcgccgcgttacctgcctcgacgcgctgaaggccgcgccgcgcgatttcaacggcttcgtgcagggcacgcgcacgaccgagcatggcctgttcgttttcctcgacactctggacgagaccagccatgccggcgagatgtgcgagaggcgcctcggctggctggcgagcacgctcgccgccgcgcctgccgacatgccgttcgtcgtgttcatgcaccacccgccgttcccggtcggcgtgcacgcgatggacgagatcgggctgaagcagagcgcggagttcgccgaggtgatcgcgccctaccgttcgcgcatccgtcatctgttcttcggccatgtgcaccggcccatcttcggcagcttcggcaagatcccgttctcgacgctgcgcggcaccaaccatcaggtctggttcgagctcgaccagaacgcaccgcacctcgccagccacgagccgccggcctacggcgtggtgctgatcgacgacgagaacctcgtcgtgcacagccacgatttcctcgacgagaatctgcgcttccccttcgccccgccggcgggaatggacggccgcgattacgcgctcaattttcccggcgcggtgaaatga

SEQ ID NO: 3527 - DNA, 951 bp, BradyrhizobiumColbertium
atgagcctcgccgaacccgcggctctcccggtcgcgacctcggcggcgccgcgaccgcaagtcctgaagcgcttgacgagcagcttcaaggcctcgctgccggcctatctgctgctcttgccttcgctggtcttcctcgcgctgttcacctatggcgcgatggggcgcgtgctcatcgatgcgctctatcagcgcacgacgccgaaggcgcccgtccgcttcgtcgggctcgacaacatcagcgccgtacttgcggaccccgccttcaccggcgccgtcgtcaacaatctcatctacgccgtcggcaccacgatcccgggcatcgcccttgcgctgttgttcgcgctggcgctgtcgcggacccacgccgtgagcagcgcgttgcgcgccgcgctgttcctgccggtgctgatcccgatggtcgcggcgtccgcgctgttcctgttcatcttcctgcccaatgtcggcctgctcgactattacatcggccggctgctgccggtgctgccgaactggctcggcgatcccgacatcgcgctcactgcgatcatgatcatcacggtctggaagaacgccggctattacatgctgttcttcctcgccggcctccaggccgtgcccgaggacgtcatgggggccgcgcatctcgatggcgcggggccgtatcgacgcctgcgccatatcatcctgccggagctcaagccgaccttcctgttcgtcaccgtcattgccacgctcaacgctgtgacgcaggtcgaccacgtcttcgtcatgacccagggcgggccatcgaactcgaccaatctcgtgctgttctacatctaccagcaggcggtcgagcattacgacatcggcaaggcctcggccgcgacgctgctgacgcttgccgtgctgatgggtctcaccgcactttcctttcgcaccctggcgaaccgcgagggcggggcatga

SEQ ID NO: 3528 - DNA, 870 bp, BradyrhizobiumColbertium
atgaagctgttcgaccgcctgttcagggacgccccgctcgccacgcgcggcgagatcacgcccaagctcggctttgcgctgaccgtgctgctcgccatcgtctggctgatcccgtttctctggatgggcgtggcgacgttgcgtccgccgtccgacggcatcaacctgatggccgaactgctgccgagcctcaacccgacgctcgacaacatcagggatgcctgggagatcggcgatttcccgcgctacacgctcaacaccacgatcatctgcgccggcattttgctggtgcagttcgtcacgatcacgctggcgggctttgccttcgcgcgcctgaacttcgccggcaagacgctgatcttctacctgttcctgatgcagctgatgctggtgcccgtgctgctgatcgtgccgaacctgtcgctggtggcgcagctcggcctctacgacacgctcaccggcgtcatgatgccgttcttcgcctccgccttcggcaccttcctgatgcgccaggcgttcgaggcgatcccgaccgagctggaagacgccgcactgatcgatggcgccggcctgctccagcgcatccgccacatctacgtgccgctgtcgatgccgagcttctcggcgtttgcgatcatttccgtgaccagccactggaacgacttcctgtggccgctgatggtgatcaattcgccggacaagcggccgctcacggtcggcctctccgtcttcaccaagaccgccgagggcacgcaggcctggggcaccatcgcggccggcacgctgatggtgatcgcgccgctgctcgtcaccttcctgatcttccagaagcgattcatcagctctttcgtcacctcaggcatcaaatag

SEQ ID NO: 3529 - DNA, 1332 bp, BradyrhizobiumColbertium
atgctgttctcccgcaggctcatgctcggccttgccatcgcaggcacgatggcaggctccctcgccgtcccggcgaaggctgaaggcccgaccgaaatcgacctgttcttccccgtccccgtcgacggcaagctcgcccgcgacatgggcaccctgatcaaggagttcaacgagacccatcgcgacgtcaaggcgaccgcggtctacaccggctcctatgacgacacgctgatcaagacgcgcgccgcgatcaaggccggcaagccgccggccgccgtgatcatgtcggcgaacttcctgctcgatatgcagatcgagaacgagctcaccaacctcgacagcctgatcgccgccgacggcagcaccaaggagaagttcctgggccaattcttcccggcgctgcacggcaacgcggtgatcaaccgatcggtctacggcgtgccgttccacaactcgacgccgctgctctacatcaacgccgacaaggccaaggaagccggtcttgatccgagcaagccgccgcagacctgggccgagctcaccgactgggccaagaagctcaccaagcgcgacggtgacaaggtgacccagtggggcatcgccattccctgcgcctatgattattgcggctggatgatggaaacgctcaccatgagcaatggtgggcgctactacaatgaagagttcggcggcgaggtctattacgacacgccctcgatgctgggggcgctcacctggtggaacgacctcgtctacaagcacaaggtccacgcgcccggcgccacccccggcccggccgtcagcacctccttcatctcaggcaatgccgcgatgatgatgctgtcgacgggctcgctgacctacgttcgcgacaacgccaagttcgcctacaaggtcgccttcatcccccgcaacgtccgcaacgccgtgccgatcggcggcgcctcgctgatcgtgccggcagggctcgaggccgacaagcagaaggccgcctggacgctgatcaagtggatgacctcgcccgaaaagagcggctggtggagccgcgccaccggctatttcgcgccgaacatggccgcgtacaagacacccgagatggtcgacttcctgggcaagaacccggacgcgaagaccgccgtcgatcagctcgacgtcgcaaagccctggttcgcgacctacaagaccgtcccggtgcgcaagacccttgaggacgaggtgatgctggtcctcaacggcaagaagcagccgaaggaggctctcgctgccgcgcagaaggcggccgacgagacgctcaagccatacaatgcagagacgtcgctgaagctgccgtaa

SEQ ID NO: 3530 - DNA, 264 bp, BradyrhizobiumColbertium
atgacacttgccatcagccgttctgccgaaagtgctgtgatgtcaaggggctcgatgcgaattcgagccttgcaatcgggccggaatcgctgttctccgccgacgacctactcgtatcgcacgcgctgcgaggatttccgggcgcacggcagcgccaccaccagcacgcacatgacgaccagagccagtcccaggaactcgataaccaacagatccacggcgaaacctccagaaacattgctagacttgtcgggggtctgttga

SEQ ID NO: 3531 - DNA, 1149 bp, BradyrhizobiumColbertium
atggatttgattaccaccaccgctgacctcgcggctgcctgcagccgactggccaagcaccccgtcattaccgtcgataccgagttcctccgcgagaccacctattacccgctgctgtgcgtggtgcagatggccagccccgaggaggccgtcgtgatcgacgcgctggccgagggcatcgacctcaagccgttcttcgagctgatgggcaacgaaggcgttctgaaggtctttcacgccgcccgtcaggacatcgagatcgtctggcaccaggcgggcatcatcccgcatccggtgttcgacacccaggttgccgcgatggtactgggctacggcgacagcatcgcctatgacgcgctggtcgagaaggtcaccggccaccgcccggacaagacccaccgcttcaccgactggtcgcggcgaccgctgaccaaggagcagatgcactacgcagtctccgacgtcacgcatttgcgcgaggttttcgcagcgcttgacgccgacctgaagaagcgccgccgcagcgagtgggtctccatcgagatggaggtgctgacctcgccccgcacctatgatttccaccccgagcgcgcctgggagcggctgaagacgcgggtgcgcaagcccaaggacctcgcggtactgatggagatcgcggcctggcgcgagcaggaggcacagagccgcgacgtgccgcgcggccgcgtgctgcgcgacgaagccgtcaccgacatcgcgacccacgcgccgactacgctggagaagctcgcgcatctgcgctcggtgccgaagggattcgagaaatccaaatggggcgcggacatcatcgccgctgtcgagcgcgggctggcgcgggatttctcgaagctgcccaagctggagaaaccgcgcaacaattccaacggcgccgccatcgtcgagctgctgaaggtcttgttgcggatgaccgcggagcgccacgcggtcgcaagcaaggtgatcgcgaccgtcgacgatctcgaggagatcgcggcggacgatgaggccgacgtgccggccctgcgcggttggcgccgcgagctgttcggcgacgccgcgctgaagctgaagcgcggcgagctcgcactggcaatcgagaaaggccgcgtgatcggggtgcagcgggcctag

SEQ ID NO: 3532 - DNA, 1347 bp, BradyrhizobiumColbertium
gtggcctatcagctccatccctacaccaacgcgcgcgctcatcagcaggctggtccgctggtgatcgagcgtggcgagggaccctatgtgttcgacgcggcgggcaagcgctatttcgaagcgatggccggcctgtggagcgtcgggctcggcttcaacgagaagcggctggtcgaggctgcgtacaagcagatgcaggcgctgccgttctaccatacgttctcggccaaatcgcacgggccctcgatcgacctcgccgagaagctggtcgcgatcgcgcctgtcacgatgagcaaggtgttcttcaccaactccggctcggaggccaacgacaccgtcctcaagctcatcgcctatcgttcgaattcgctgggccagccgcagcgtaagaagatcatcagccgtatgcgtgcctatcacggcgtcacgattgcatcggccagcctcacgggcctgccgaacaatcaccgctccttcgacctgccgctgcccaacatcctgcacaccggctcgccgcatttctacaaggacggtgcgcccggcgagagcgaggaggcgtttgcgacgcggcgggcggaagagctcgatgcgctgatccagaaggaagggcctgatacgatcgcggccttcttcggcgagccggtgatgggggcgggcggcgtcatcgtgccgccggcgacctactgggacaagatccaggcggtcctgaagaagtacgacatcctgctggtcgccgacgaggtgatctgcggcttcggccgcaccggcaagatgttcggctgcgagacctatgggataaagccggatgcgatggtggtctccaagcagatcacctccagctacttcccattctcggcgatcatcatgaacgaccgcatgttcgagccgatcgccgacgagagcaacaagatcggcgtgctcggccacggcttcaccgcgggcggccatccggtcggatcggcgatcgcgctcgaaaacctcaagatcatcgaggagcgcggcctggtcgcccacgcagccgagctcggcggctacatgcagggccgcttgcgcgagctcaccagccatccgctggtcggcgaggtccgcggcgtcggcatgatcgcagcgatcgagctcgtgctcgacaagggacgcaagagcgccgccagcacgcccggtgccgtcggcggcatcgccagccgcatgctccaggagcgcggcgtgatctcgcgcaacatgctcgatgccatcgcgatctgcccgccgctgatcacgaccaaggcccagatcgacgagctgatcgccgcgatctcgggcgtgctgaacgacatgaagggcgaagtggccaagctgacgccggcgtaa

SEQ ID NO: 3533 - DNA, 156 bp, BradyrhizobiumColbertium
atggagctgataggccacatcccgggcctcttgcgaattgggcagcatggacatttgcgcagatccttgaaagcgtcacctcgccggagcagccggcgtcatcactcgatggcacgcaccttggctattgccacagcgcaaaacttgcaacgctaa

SEQ ID NO: 3534 - DNA, 171 bp, BradyrhizobiumColbertium
ttgtcacggggagacgaactcagggagctggcgaacgatctgtcgcgtgccgccgagagggcgcgcaggcttggtcttcgtacgacggcctatttgctctcgatggccctggtggaggtgagggaagccggtgccgccaccgacggtggggacgacgacggcgcggcgtga

SEQ ID NO: 3535 - DNA, 564 bp, BradyrhizobiumColbertium
atgctgacgtccatccatgatgatccgccgatcctgatctgtgcggatcttcaggtcgaatatctgacccccggccgccgccatgtcatctttgacggcgatgcggcaatggcgcgctgcctggaactcctgatgctgtggcgcagcaatctgtggccggtgatgcatctgaagcgtatcgcacaggcggcttggttcaatccggcatccaggctgaccgattggatcgcagaaaccaagccgcacccgggagagatgacgttcgagcatccactgccgtcggcctacagctcggcgcggttcgtggatcatatgtccagtatccgggcgatgcggtgcgttctgatcggcttctcgctggacgagaccatcctggccacggccgttgacgggtttcaccgcagtcaccgctaccaagtggtcattgacgccgtggcttgccggcagccgggcacggatgatgcagccgcctacaggaatgcggtggtgaatgtcatcgggaattttgctacagtccagtccagcgccgaactgatcagaaccagcggcgctgttgcggtttag

SEQ ID NO: 3536 - DNA, 621 bp, BradyrhizobiumColbertium
atgcacggtactaggattcctgtcgccaagccttgttcccgcgcgatcaccatccgcctcgcgcgcgatccaaatgatctcatgctggtgaccgccatccgctcggcggtctatctcgccgagcaggattgtcccttcgaggaggagttcgacggtaacgacatggtcgccgcgcatttcatcggcttcgtcggtaatgagcccgcgggctgcctgcgggtgcgcttcttcggcgatttcgccagggtggaacgcctggcagtgcggcaccaataccgccgctcacgcgtttcgttcaagctggtgcaggccagtgtcgactatgtgaagcgcaagggttttcgcaagatctatggccaggcgcaggaccggctggtcgatttctgggcccatttcggcgccaagccgctcggtcacaaccgcaagatcaccttctcggatttttcctatacggagatgttgctggagatcgagcccggcccggacgccatcacgctagacagcgatccctatgtgatcatccgtcctgagggcgattgggatcggcccggcgtcctcgatgcctcggcggggcgggcggtgacctcgccgctgcgggacctcgcactcgccgaccgctga

SEQ ID NO: 3537 - DNA, 612 bp, BradyrhizobiumColbertium
atggaaaggggctcgtttgccgcaaggcatgatttcgatgccttgccgctgagcccggatgtcgacgttcgctgtgcgcaattttccgaaattgcgacactttcggaaatggcgcgccggctggtgccgggcgtgcagatcggaacggtggagcttgcgcgatacttcactctcgatcctcaaagcattttgacgttcagccggaaaggcaagctcgtcggcggcatggccttcttgtttctcaatgaccgcggccacgatgcgctgctgctcgacgagatctgcctcaccgcgccggagacgcgttatctcgcgtcggcgaacgaggacgtcgctgctatctacatctgggcgatcgccgccacggggcgcggcatcgccggtctcggcaaggccgcggctcatctcaggcagataaggtttcgcggcgcggattgctatgcgcagccctcaacggtggccggacgcgacatcatgagggcgacgggctttgcgcccgttccgagctttcaacccgacctgtggtgttacgagcgtccctggcatcggcagccgatgcgcatgccgggcgcgatgatccaatcaaggagctttgcagatgcacggtactag

SEQ ID NO: 3538 - DNA, 1041 bp, BradyrhizobiumColbertium
atgcagcagttattgcaccggggtgctgcgatgatgcagcaccgtgaagaagccctggatgcgtcctgggacgatttgaagctgtttttagcgtgcgcaaaatacaaaagttttcgcaatgcggccgaagagctcggcctcacctccacgaccctgatgcgccgcatcgaccggctggaagagagcatcgggtgcaagctgttcctgcgcgaccagagcggactcacgctcagcgatgaaggcaccgcgatgatcgccgacgttgcacatatggagcgtcatgccttcaacgtcttccgccgcgcctcgcgatcgtcgagcgacacgtcaggcaccgtgcgcgtcgctgtgacggaaggccccggcaatttctggatcctgccacgactgatcgatttccagaagacctaccgcaagatcacggtcgatctgcgttgcgcgatggagcaggccgacgtcgcgcggcttgaatcggacattgccatccagctcgaaccgccgaccaatcccgacctgatcgttgccaagctcggccgcctgcacatctatcctttcgtctccaaggagtaccagaacctctacggcgtcccggcgacgctcgctgagctgaagaaccatcgcatcatcaagcagagcgcgccgcaggtcgacgacggcgcctatgctcgcgtgctcggattgaactcgctcgagggcatcgtcgggatcaagaccaattcgtcggtcggcgtgctctacgccgtcgagcgcggcgccggcatcggcttcctgccgaccgtgtcgatcgcgctcggcgcgccgctcgtggccgtcgatctcggcgtcagccaccacgccgatctgtggctgacctatcacaaggagttccgcagctccgaacgtcacaagatcgtagtcgactggctgaagaagatcttcgatgccaggacctatccctgcttccgcgacgagttcatccatccggacgcgctggtgccgatgatgacggctgcgcgcgaagggtttggtttggcaggctatgttgcggcgacgccgacctga

SEQ ID NO: 3539 - DNA, 1158 bp, BradyrhizobiumColbertium
atgcgctgcgccgcgcagctctccgggacacggcagacgatcgggctggtccgcgttccccggatcgtggctgcgatcgcaatggcgttcgcggtggtcgtgatgatggcggcagcgaccccgagcttcgcgcaaagcccaacgcccaccccgaccccgacgcccacgccgtcaccgaccccgatcccgtcgccgatgtcgacgaattacgatcagtcggccggcaacagcgcgctcaacctcggctcggggttcctggagcggctcggcaaccaggcttcaggcggtatcaaccgcgcgtttcgcaccaatcccggcggcggcggcgcgtccgcgagcacggaagatccgcgctaccgcacctggttcgagggctacggaatctctgtccggacggatgcgcaaggtgacttcgtcggcgacaagcgcaagaccgttggcggcgtcgccggtttcggcgcgcggcttgcgccgggcgtcaacatcggcttttcgatcgaccagagccacaccgacatcgatgtgccgctggcgttgcaatccgcaacgctcgacctgacccagctcggcttcagcggctcggccgacaagggcccctggacttgggcctttgccgtggtgcacggcttcggcaaggttcattcctcccgcgacaccggcctcggccttgcgaccgcgggctatcgcgccgccgttgacggcgcgctgaccgagatcagctattactggaccaaggaccagatgcgcatcgtgcccaagggcgcgctcgaatatgtgcgcgccacgagcgccgcgtttcaggaggccggcggcctcgccccgctcaacgtcggctcaacggcgctctctcgcgcgcgtgtgatgatcggggcggaggtcggccgctatttcatcattgagcagaaggttctggacctttcggcctacggcaagttcgtcgacaatttttaccaggatctggggtcggttcaggtcagcctgggcgcccagagcatcattgtccccggcatcggcgagagccgctacggcatggatgccggtgcctcggcctcgctcagcctgaccaacgtggcacggctttacgtcaattacgacggcaagttccgcaacgaactgacctcgcatcagggcacggccggcttcgaatacaaatggtga

SEQ ID NO: 3540 - DNA, 207 bp, BradyrhizobiumColbertium
atgccgcaaaagggcaccgtcaaatggttcaacccgaccaagggctatgggttcatcaagccgaacggcggcgacaaggatgtgttcgtccacatctccgccgtcgagcgtgccggactctccaccctcaacgagaaccaggtggttgaattcgacctcgtggagaaccgcggcaaatcatccgcggagaacctcaaggtctcctga

SEQ ID NO: 3541 - DNA, 669 bp, BradyrhizobiumColbertium
atgacgggcgctgtgatgaagcgccgggtcgccatcctgatctccgggcgcggctccaacatggctgcgctgatcagggccgccgccgctgcggattttccggcggagatatcgctcgtcatctcgaacaaggccgatgcgcccgggctcgaacgggcccgggcgagcggcgtgaagactgaggtgatcgagagcaagccgttcggcaaggaccgcgccggattcgagaaagtgctgcaggcagccctcgatcggcacggcatcgagctgatttgtcttggcggcttcatgcgcctgttcaccgccgagttcaccaaggcctggtacgggcgcatgctcaacatccacccctcgctgctgccgtccttccccggcctcgacccgcacggccaggccttgcgcgccggtgtgaagttgtccggcgcgactgtgcatttcgtgatccccgagaccgatgccggcccgatcgtgatgcagggcgcggttcccgtcggcgatcacgacaccggggatacgctgtcggaacgcatcctcgaggtcgagcaccgcatctatcccgaagcgctgcggctgctcgcgagcggcaaggtccggatcgagggcgatgtgtgcaagacggcgggcagcgcggcgtcggagaattttctgattgcgccggtggtgagctga

SEQ ID NO: 3542 - DNA, 1074 bp, BradyrhizobiumColbertium
atgaccgaccgcaaaaacgggctcacttacgccgattcaggcgtcgatatcgacgcgggcaaccgcctggtcgacctgatcaagccgatggtgcgcgccaccgcgcggccgggcgcggacgccgagatcggcggcttcggcggcctgttcgacctgaaggcggcaggcttcaaggatccggtccttgtcgccgctaccgatggggtcggcaccaaggtcaagatcgcgatcgagaccgggctgcacggcggcatcggcgtcgatctcgttgccatgagcgtcaatgacctcgtcgtgcaaggtgccgagccgctgtttttcctggattatttcgcctgcggcaagctcgaccccgaggccgctgccgcgatcgtcgctggtgtcgcggagggatgccgcgaatccggctgtgccctgatcggcggcgagacggccgagatgccgggcctctacaaggatggcgactacgacctcggcggctttgccgtcggcgctgcagagcgcggcacgctgctgccgcgcaaggatatcgcggccggcgatgccgtgatcgggctcgcctcgtcgggcgtgcattccaatggcttctcactggtgcgcaagatcgtcgagcaatccggtctcagcttcgcggcgcaggcgccgttcgcgcccgtgatgacgctcggcggcgcgctgctgacgccgacgaagctctacgtcaagtcctgcctgcgcgcgatccgcgagaccggcgcggtgaaggggctcgcccacatcaccggcggcggcttcaccgacaacattccgcgcgtgctgccgaagcacctcggcgtcggcatagacctcgcgcgcctgccggtgctgccggtgttcaaatggctggccgggcaggcgggcattgccgagctggaaatgctgcgcaccttcaattgcgggatcggcatgatcgcgatcgtcgagcccgatagggtcgaccaggtcgtcgaggtcttcaccgacgccggtgagacggtggcgcagctcggcaccgtgatcccggccgagggcgagcatcgggtcgtctataacggccacctcgatctggcgctgtaa

SEQ ID NO: 3543 - DNA, 543 bp, BradyrhizobiumColbertium
gtgagtattccgaacatcattaccctgggccgcatcatgctggtcccgatcattgtctgggccatcgtgtcgagccaaatggaggtggcgttcgccgtcttcctgattgccggcgtcagcgatgccgtggatggtttcctggccaagcgcttcaacatgacgagcgagctcggggcgctgctcgatccgctcgcggacaaggcgctgctggtctcgatctacatggcgctcggcatctggggcgcgataccgcgctggatcgtgatcctggtggtctcccgcgacatcatgatcgttgccgccgtgatcgtatcctggctgttcgaccgaccggtcgagatgaagccgtcgaaggtgtccaagctcaacaccgtggcccaagtggcgttcgcggcgctggtgctggcggcgcttgccttcggcttcaagccggccccttatgatatgatcctgatgggcctcgtcacggtcttcacgctctcctccgtgtcgctctacctcgtcgagtggctgcggcacatgagtacgatcgaggccaaatga

SEQ ID NO: 3544 - DNA, 678 bp, BradyrhizobiumColbertium
gtggcaggccgcgttcacccccgacaattggcattttcgctcccgcatgcggagagcctcagccgggacaacttcctcgaaggccccgccaatgcggccggtctcggcctgatcgacagctggccggaatggccgaaccggatcatgtggctggccggtcccgagggaagcggcaagagccatctcgccgcgatctgggccgaggaggccggtgcccgctcgaccaccgccaatgcgctgaccgccgccggggtccccggtgcgctcgccaccggcgcgctggtcgtggaagatctcagggcaaacgatttcgacgagcgcgccctgtttcacatgatgaatctcgcccgcgaggacggcgcctacgtcctcctcaccggacgcgaggcgccggcctcgctggagatcgagctgcgcgacctgcgctcgcgtctgcgtgccgtgccggtggtcacgctgcagccccccgacgaccagctctttcgcggcctcatcgtcaaattctgcgccgaccgccagctcaccgtggacgagagcgtagtcagctacctcgccacccgcctggagcggtcctcggccgccgcccggcgggccgtggagctgctcgacagcgaagccctgcggctcggccgccccgtcacccgggcgctggccgccgagctcttgcgggacgtctga

SEQ ID NO: 3545 - DNA, 2190 bp, BradyrhizobiumColbertium
atggactctgcgcaaacggttgaaacgaaagaaaaacccccggaagccgagggcttgccggcgatcgcatccagccccgaacggttcatcaaccgcgagctgtcctggctgcatttcaaccgccgcgtcctggaggaatcggtcaatctcaaccaccccgtgctggagcgggtgcggttcctctcgatctcggcgaacaatctcgacgaattcttcatggtccgcgtcgccggcatcaaggcccaggtgcgcgagggcatcgccgaacgcagccccgacggcctgacgccgtcggaacagctcgcgctgatcaaccgtaccgtctcccagctcgcctccgaccagcaggcgatctggcgcgacctgcgcgccacgctggccgaggtcggcatcgtgctggtcgacggcaaggaggtcaccaaggcggaacgaacctgggtcgaggactacttcctcaacaacgtgttcccgctgctgaccccgctcgcgatcgatccggcccaccccttcccgttcattccgagcctcggcttcaccatcgcgctccagctcacgcgcgccgccgacggcaagcagatgaacgcgctgatccgcatgcccggcaagatcgaccgcttcatccgcctgccggccgaaggaacggtgcgcctgatctcgctggagcaggcgaccaccctgttcatcaaccgcctgttccccggctacaatctgcacggccaaggttccttccggatcatccgcgactcggagctcgaaatcgaagaagaggcggaagacctcgtccgcctgttcgagaccgcgctgaagcgccgtcggcgcgggtccgtgatccggctcgagatcgacgccaagatgccggagcagctgcgcagcttcgtgcagcatgcactgtcggctgccgacgacgaggtgttcctggtcgacggcgtgctcgccatgaacgagctctcgcagctcacccgtctcgaccggccggatctcgaattcaccccctacgtgccgcgccatcccgagcgcgtacgcgagcatggcggcgacatctttgccgcgatccggcagaaagacctcatcgtccatcatccttacgagtccttcgacgtggtggtgcagttcctgcagcaggcgacgcgcgatcccgatgtggtcgcgatcaagcagacgctctaccgcacctcgaacaactcgccgatcgtgcgcgcgctcgccgaagcggccgaagccggcaaatccgtcaccgccctgatcgagctgaaggcgcggttcgacgaagaagccaatattcgctgggcgcgcgatctcgagcgcgccggcgtgcaggtggtctacggcttcctggaattgaagacgcacgcaaaactctcgatggtggtgcgccgcgagggcggcagcctcacgacttacgttcatacgggcaccggcaactatcacccggtcaccgcgcgcatctacactgacctctcctacttcacttcagatccgaccatcggccgcgatgccgcgcgcgtgttcaacttcatcaccggctatgccgctccgagcgatctggagaagatggcggtgtcgccgctgaccctgcgcaagcgcatcatcgagcacattcagggcgagaccgcgcatgcccggcacggccggcacggcgcggtctggatgaagatgaacgcgctggtcgatcctgacatcatcgacgcgctctacgaggcctcgcaggccggcgtccaggtcgaactcgtggtgcgtggcatctgttgcctcaggcccggcatccccggcctgtcggagaacatccgcgtcaagtcgatcatcgggcgattcctggaacatggccgaatctactgcttcggcatgggccagggcctgccgagcgcgaaggcggctgtgtatatctcctctgccgacatgatgccgcgcaatctcgaccgccgcgtcgaggtgttgtgtccgctgcaaaatccgacggtgcatcagcaggttctcgagcaaatcatggtcgcgaacctcaaggacaatgagcagagctggcagttgttgccggacgggtcctcaacgcgtatgaagaccgcgaagggcgaggagcctttcaacgtgcacaactacttcatgacgaatccgagtctgtctggccgtggaaagtcgctcaaggaatcctcgccgcgtcgtctcacgcgccggaacgaacgccatcaatcctga

SEQ ID NO: 3546 - DNA, 1503 bp, BradyrhizobiumColbertium
gtgaagcagccgcgcaagcgcggctcgagcgtcgcggtcatcgacatcggctccaactcggtccgtctcgtcgtctacgaggggctttcgcggagcctcatcccgatcttcaacgagaagacgctgtgtggcctcgggcgcgaggtgcagagcaccggtctgctcgcgccggacgccgtcgacaaggcgctgacctcgctcaagcgtttccgtgcgttgtgccgcgtgatgcaggtcggacgcgtgttcgcgatcgcgaccgcggcctgccgcgacgcctcgaacggccccgacttcatcgccaaggccgagcgcatctgcgcggtgaacatcgagatcctgtcgggcccgcgcgaggcgcggctgtcggcgctcggcgtgatctccggcatccaccttccggacggcatcgtcggcgacctcggcggcggctcgctcgagctgatcgacgtgcgccggaacagcgtgcgcagcggcgtgacgctgccgctcggcggcctcgcgctccaggatctcgcgcataaatcgctcaagcgcgccgaccacatcgtgcgcgaggagctcgacggggtgccgcagctcaccgcgggccgcggccgcaccttctacgcggtcggcggcacctggcgcgccctggcgcgcatccacatcatccagagcggctatccactccaggtgatgcacggttattcgatctcggccgccgaggcgctggacttctcgcgccgtctccggcgcctcgtcgccgccgacatgctcgccgacatcgagatcgtcgccgacgcgcggcgcccgctcctcacctacgccgcgctggtgctcgagcacatcattcgggtcgccaagccgaagaccatcgtgttctcgaccttcggcgtgcgcgagggtctgctgcacgagaagctgtccgaaaccgaacgcggcaaggacgggttgatctgcgcggccgaggagttgaatcagctgctgtcacgctcggccaaacacgcccgcgagctgatcgcatggaccgaccgtctcgtgcgcgtcgtgaagctgcgcgaaagcgaagaggatcgccgcctgcgccacaccgcctgcctgctctccgatatcggctggcgcgtacatcccgaccatcgcggcgaacaaacgctgagcctcgtcgtcaacggcaatttcggctcgatcacccacgtccagcgcgccttcgtcggcctgtcggtgttctatcgctatgccggtctcagcgaggaaaaccagccgccggccacgatgcaggggctgctgccgccggcccagctcgaacgcgcgcgcctgctgggcgccgcattccgcgtcgcgcatctgatctcggcggcgcgtccgggtgtcctgcctgctacccatttccgcagccggggccgcaatctgacgcttgtgttcgagcaccgcctcggcgatctcgtggccgaccgcgtcggcagccgcttccgccagctcgcccgcctgatcggccgcaccggctcgatcgtgaggcgctga

SEQ ID NO: 3547 - DNA, 1134 bp, BradyrhizobiumColbertium
atgcaactccaacatgggattcggctttccgtccgcgcccggaaagcggccgtcggcgctctgcttgcgctcgctttgagttcttggccttcggcgccgcacgcgcaggccgaactgaagctgagcgatgcacaggcgcgcaatctcggcgtgcgcctgacccatccagtcgcggtccggacggatctgacgctgccctatcccgttcagatcgtgatcccgacgcagcaattgcgggtcgtgagcgcgcccatggccggcatggtcgccaatctcctggtcgggcgcggtgaccgcgtctccgcaggccagccgctggtgaccctggagagcccgagcttcgtctcccagcagcgcgattacctgcatgcgctcgcacaggagcatcttgccagccagcagctcaagcgcaacatggatctgttcgagggcaaggccgtgccacagcgcgtgctggaggccagccaggctgaagcacgccaggccgctctcgtcgtcgccgagcggcgccagatgctgcatctgagcgggatgtccgacgaggcgatccttcggcttggacaggaggcggccatcagcggtacgcttacggtcaatgcgccgcagactgcatccgtggtcgaggtcacggtatcgccgggacagcggatcgaacaatccgcgccgctcatcaaactggcgcggctctcaccgctatgggcggaaatcgcggtccctgcgacgaatatccgcgcgatccgcacaggcgcgaaggtcgagatcaccggctattccacccccggcaaggtcgtgctggtctccgagaccatcgaccctgccacccagaccattctggttcgcgcggaaatccccaacgatggagagctgcatcccggtcagaccaccgcggctcgcatcggctttctctccgcaggcgaaagcgcgtgggaaattccctacaatgggctggtgcgtcgtggcgagcagacatcggtgttcgttgccacggccggcggcttccggctcgtaccggtcaagctggttgcggaggaccaggaccatgtcgtcatctccggccaccttacggaccaggacgagatcgcgatcggcggcatctcggcacttcgcggcattctctccggactggggcaataa

SEQ ID NO: 3548 - DNA, 3075 bp, BradyrhizobiumColbertium
atgctccggcgcctggttgcgttcgcacttgcgcagcgactgttcgtcctgctgagcgtgttgctggtggtcggcgcaggcgccgtcctcctgcccggtctaccgatcgacgcgttccccgacgtctcgccgatccaggtcaagatcatcatgaaggcgccgggcctgacccccgaagaggtcgagcagcgcatcacggtccctgtcgagctcgaactgctcggattgcccaacaagaagatccttcgctccaccacgaaatatgcgctggccgacatcaccgtcgatttcgaggacggcaccgacatctattgggcgcgcaaccaggtgtcggagcggctgtcgaacatcgcgcgtgacttccccgacggggtgagcggaggtcttgcgccgatcacgagccccctgggcgaaatgttcatgttcaccatcgacagccccgagctgtcgctcgccgagcggcggaccctgctcgattgggtgatccgtcccgcgctgcggacagtcccaggggttgcggacgtcaattcgctcggcggttatgtccgagccttcgagatcgtgccgcgcaacgatgcgctcgccgcgcgcggcatttcgtacgacgtgtttcgtcgcgcgatcgaggccaacagccgcaacgacggcgccggacgggtgaaccagggcgaagacagcgctctggtcaggatcgaaggcagcatccgctcgatcgaagacatcaaggcaatcgtcgtcgacacccgcgatggcgtaccgatcctggtcaacgacgtcgcgagcgtcaagatcgggacgctgacccgctatggcgcggtcacgtcggacggcaacggcgagaccgttgaaggcctcgtcctcggcttacgcggcgccaacgccggccagctcgtccgcgacgtgcgtgcccggctcgccgagctgcagccggcactgccgaagaccgtttccatcaacgtgttctacgaccgcagccgcctggtcaaccgcgccgtcggcacggtggtgcgagcgctcggcgaggccaccgtcctcgtcatcgttctgctgctgctcttcctcggcaactggcgggcctcgctggtaatcgctctcagcctgccgctggccatcgtcatcgcgttgatcgtcatgcgcctggtggggatgtcggccaatctgatgagcctcggcggacttgcgatcgcgatcggcatgttgatcgacgcgctggtcgtcgtggtcgagaacatcgtcggccatctcggcaagcaggagccgggcaaaaccgttccactgatccacctggtgtaccgttcggtttgcgaggtgctggaaccggtcgcctcaggggtcctcatcatcatcatcgtgttcatccccctcctgacgctgcagggccttgagggcaagttgttcatcccggtcgcgctggccatcatcttcgcgctcaccggttcgctgctgctggcgctcaccgtggtgccggtcttgacctcctacgtgctcaagtccgcgtcgcatcgcgatcccatgctggtccgtgcggcgcaacgggtctatgcgccggcattggactgggccttgaacaacgagcgcaaggtgatggctgcggcggtgatcggactgatcgccgcgggattggcctatacgaaacttggcaagaccttcatgccgacgatggacgaaggcgacgtcatcgtcagcgtggaaacgctgccctcggtcaacctcgacgagtcgctcgccatgaatgcgagactccaaaaggcactgctggccgtaccggacgttgccggcatcgtcgcacggaccggctcggacgagcttggcctcgatcccatgggtccgaaccagaccgacacgttcctcgtgctcaagccagccgccgagaggcagaccgacgaccgcgaggccctgttgcagaagctgcgcgaggttctgaccggctttcccggcatctcgctcggcttcacccagcccatcgacatgcgggtgcaggagatgatcagcggcgtgcgcggcgacgtcgccgtcaagatcttcggtcctgatatcgccaggctgaacgaagccgcagccaagctgtcggccatcctgtccagcatcgacggtgccgaggacgtctacacgacgctgaacgaaggcgctcaatactacacggttgcggtcaatcgcatggaggccggccgcctcggcctgacggtggattcgatcgtcaactcgctccgcactcagatcgagggcaggacgatcggcaccgcgctcgaggaaggacgccgcacgccgatcctcgtccgcggcagcgagaccacccgggaagcgccgacgctgctggcaaacctgccgctgacgctcgcttcagggcagcatgtcgcattgtcgcaagtcgcccggatccagcgcgtggatggcccggtgaagatcgaccgcgaggacggagcgcgcatgagcgtcgtccgcgccaacatccgcggtcgcgatatggtcggattcgtcgaggaagcgcgccagaaggttgcgatcgagcttccccttccgaacggctaccgactgacctggggcgggcagttcgagaaccagcaacgtgccgccgcacgcttgtccatcgtcgtgcccatcgcgatcggcctgatctttctgctgctcttcaccacgttcggggccatccggcaggccttgctggtgctggtcaacatcccctttgcgctgatcggtggcgtcttcgcactggtcctgacgggtgagtatctgtcggtgcctgcttcggtcggtttcatcgcactgctcggcatcgccgtcctcaacggcgtcgttttggtatcctacttcaaccaactccgcgcccatgggttgagcgaggaccgcatcgtcgtcgaaggtgccatgcgcaggctccgtccggtgctgatgaccgcgagcatcacggcgcttggcttgatcccgctgctgttcgcgtccgggccaggatccgaagtgcaacgaccgctcgccatcgtcgtgatcggcggactgttgtcctccaccatgctcactctgattctcctgccgatcctgtatcgccgctatggcggagcgccgaaggtggcgaaatga

SEQ ID NO: 3549 - DNA, 312 bp, BradyrhizobiumColbertium
atgaccgatcaaccggtctgtctcaccctgatcgtaccggaccagctccgcgaggagctgctcgactatctcaccgaccagaccgatctcgtttcgggattcacggcagcgcccggtgccggtcacggcgccggggttcgattgcagacggccgccgaacgcgtgaaggggcatgccgaccagacggcggtgcagatcatcctggcgaggagcgatgccagcaacttgctcgatcggctgcgagcctcatttggcggtaccaagctcgtctattggatcctgccggtgacggagttcggcacgatcgattga

SEQ ID NO: 3550 - DNA, 174 bp, BradyrhizobiumColbertium
ttgccctcccattgccattctggcgtccgccgtcaaagcgctcgccggggtctccagcccgacggcattcgcggcctccgtgataccaactattggtccggcgtggcgagcttctccgcgctggcgcaaggcgcgccgcgaaccctgctcttgtcgatggcgacggatttctga

SEQ ID NO: 3551 - DNA, 861 bp, BradyrhizobiumColbertium
gtgggctggctctggcagatcttcgatcccgctacgatcggggcattcttcacccagtttcgcaacgagatggccgaaccgaccttctggattgcggtcggcaaaatcatctggatcaacatcctgctctccggcgacaacgcgctggtgattgcgctggcctgccgcggtctctcgccgcggcaccggctctggggcatgatcttcggtgccggcgcagccgtgatgctgcggatcatcttcaccggcatcgtcgccagcctgatgggcctgccgtacctcaagctggccggcggtctcgcgctgatcgtgatcgcggccaagctcctggtgccggaaaacgaggacgaggacgacgtcgaatcgggcgcgcatttgtggcacgcgatccagatcgtcgtggtcgccgacatcgtcatgagtctggacaacgtcattgccgtcgccgccgcggccaatggcagcgtgccgctcttgatcctcggccttgccatcagcgtaccgctgatcgtggccggcgccgcgctgatcatggcgctcctcgcgaagctcccggtcctggtctgggccggtgcagcgctgctcggctgggtcgcaggcgaggtgatcgcgaccgatccaggcatcgcgccgaagctgcacacgctgttcgacggcccgctcggcgcctccctcgacggcatgctcggcgcgctgcgcattccgccgcagttcggccatggcggaggaggcggcgaatatttctgtgcggtgctcggcgtcatcgtcgtgctggtggtcggtttcatctggcgccgccgcagcctgatgcggacagccctcgaatcttccgagcaccacgccagggcctcggccgagtga

SEQ ID NO: 3552 - DNA, 423 bp, BradyrhizobiumColbertium
atggccatcgaacgcactttctcgatcatcaagcccgacgcgaccgagcggaatctgaccggtgcggtcaatgccgtgatcgagaaggccggcctgcgcatcgtcgcgcagaagcgcatccgcatgaccagggagcaggccgagaccttctacgccgtccacaaggcgcgcccgttcttcggcgagctcgtggacttcatgacttcgggtccggtcgtggtgcaggtgctggaaggcgagggcgcgatcgccaagtaccgcgaggtgatgggcgccaccgatccagccaaggccgccgagggcaccgtccgcaagctctacgcgaagtcgatcggagagaactccgtgcacggctcggacgcgccggagaccgccgcgatcgagatcgcgcagttcttctcgggcaacgagatcgtgggctga

SEQ ID NO: 3553 - DNA, 849 bp, BradyrhizobiumColbertium
atgagaagcatgcggccttgtcaccgcaaggcgcctcgaacgcaactcgtttttccgtcaatgcggctcgcgctcgcgctgcctcaaggcgttgaggagctgctcgaggtgcgtcggaaggcgaggctcgggtcgcagactctgctggagccgttcgcccacggcgtcgcaaatcgagcggctggtgcgccggtcgatctgttcgctgtcgttggcaaaaaggccagccatcgcgggttccgtgttctcaaagtaaggacaccgtaccaagtcattgctagccaattggtttcgccgactgtggggaatggtgggcattctcgcaaaaattgtatgaagcgcaccttgtccgtgcaaggcaaagccccggcgaggggggcgccggggcttctcttggaggtacccggggggctcaggtacctcgggaaggtgctgacggtcttagtagcagcggttgatcagccgccagcggggtccccacggggtcgggaccaaccggcgcacatagcagccgccataaccgtaggagacgggacctccgacatagaagcgcggtccgccccagccgtggccatggtgccagccgccacgccatccgccatgccaatgagcggatgcggaggtcggcgccagtgcggcacccagcgcgaccgcggcgacggcggcaagcgaaagtttcctccacatggtgatctcctcaagactgccggcgcggggccatcgcgccgaagggaaagccgccgaaacggtccgcctgacgatcaggcttcggtttcgatgggccgaccttatgccactaaagctgaaccgaaccctgacggcggtttcagactgggttcatcttggtga

SEQ ID NO: 3554 - DNA, 1860 bp, BradyrhizobiumColbertium
atgcttctcatcaccgacctctccatccgtctcgccggacgccttctgatcgaccagagttccgtgcagatcacgcccggcgcgcgcgtcggcttggtcggacgcaacggcaccggcaagtcgacgctgttcaaggtgatccgtggcgagctcgctgccgagcacggctcggtgaccctgcccccacgctggcgcatcggcagcctcgcgcaggaagcgccgaacggccccgagagcctgatctcggtcgtgctcaaggccgacctcgaacgcgacgcgctgctaactgaagccgagcacgcgaccgatccgcaccggatcgccgagatacagacccgcctcgtcgacatcgacgcgcattcggcgccatcgcgcgccgccgcgatcctctccggcctcggcttctccgccgcggatcagctccgcccctgcgccgagttctccggcggctggcgcatgcgcgtcgcgcttgccgcaacgctgttcgctgcgcccgacctgttgctgctcgacgagcccaccaactatctcgacctcgaaggcacgctctggctggaggatcacctcgcgcattatccgcgcacggtgatcgtgatcagccacgaccgcgacctcctggaaagctcggtcgaccagatcctgcatctcgagcgcggcaagctcacgctctacaagggcacctattcctccttcgaggagcagcgcgctgcgcgcgaattgctcgacgcgaaggcgatcaagcgccaggaggccgagcgcgcgcgcctgcaggccttcgtcgatcgcttcaaggccaaggcttcgaaagcgcgccaggcgcaatcgcgtgtgaagatgctggaacggctgaagccgatcaccgcgctggtcaccgaggacgtgcgcgagatcagctttcccgcgcccgagaagatcctgtcgccgccgatcatcgccgtcgacaatgcctcggtcggctacgatccggcaatgccggtgctgaaccgcgtcaccctgcggatcgacaatgacgaccgcatcgcgctgctcggcgccaacggcaacggcaagtcgacgctcgtcaagctgctggccggacgtctcgcgccgttctccggcaaggtgacgcgagcggacaagctgtcgatcgcctatttcgcgcagcaccagctcgacgagctcaacgaggacgcctcggcttacgaccatgtccggaagctgatgggcgatgcgccggaggccaaagtgcgcgcccgcgccggcgcgatcggcttctccggcaaggccgccgacaccaaggtcggcaaattgtcgggcggcgagaaggcccggctgctattgggccttgcgaccttcttcggccccaacatgatcatcctggacgagccgaccaaccatctcgacatcgacagccgcgcggcgcttgcggaagcgatcaacgaatttcccggcgcggtgatcatggtttcgcacgaccgctatctgatcgaggcctgcgccgaccggctctggattgtcgccgaccgcaccgtcaccaactacgatggcgacctcgacgagtaccgccgcctcgtgctgtccgcgcgcaacgcggaagcgccgcgcgaacgcagcgcggcaaacgacaagccgcagcgaccgaagtccgacaatcgcggctcgctgaagaagcgcatcgccgaagcagaaaccgagatcgcccgcgtgagcgagatcatcgcgaagatcgacaccgcgctcgccctgcccgacatcttcacacgcgatcccaagcaggctgcgcagctgtcaaaggcccgcgccaatgccgcggaggcgctcgcacgagctgaagagcagtggctcgaggcgagcacgcaatttgatgaggcggcggggtag

SEQ ID NO: 3555 - DNA, 525 bp, BradyrhizobiumColbertium
gtgcgacatcaaaagcttcccggctcgctcatgattacgttggccgccgtggcaccgctggtcgcgggctgctcgggcgggaccgatctgttgtcgaaggacgcagcatggttccagaagcccggccggctcttcatcaagaacatctcgatcgagtcgccgccgctgacgcccgataagccggtcggacccgaggacctcgtcagcgccgacggcgcctgtcccggcatgacgccgcctcccggaccggccgatgccaatgcctcgacgactgcacccgcgccgatggggggaacagtcgcgctcggccacaccgaatgcgacgtggtgcgcggcatcggtgcgccctcgaccgtcaatctttccaacgatgccgcgggccggcgcgtcgcggtcgtcacctgggccaccggcccgcgcgcgggcatctacacgttcacctccggccgcctgtcctcgatcgaaggcaatcccgaaccgcagccggtgccgagggcagcgaagccgaggaagaagtctgcttag

SEQ ID NO: 3556 - DNA, 444 bp, BradyrhizobiumColbertium
gtgctgttctaccatctgcaagacatgacggtagagaatgtgttgccgccgcttctcgagaaatcgctcgagcgcggctggcgcgtcgtggtgcagtcgacttctgaggagcgcgccgatgcgctcgacgcgcatctgtggacctatcgcgacgattccttcctgccgcacgcgacgtggcgggtgaacgacgccgccgatcagcccatcgtgctggcgatcgaggggggcaatcccaacggcgccaatgtccgcttcctgatcgacaacgccgcgttgcccgaggacgcacagggctacgagcgcatggtgctgctgttcaatggcgacgatccggacgcgctggcgattgcccgcacggtctggacggattgcaaggcgcggggatttgatgtcacctattggcaggccgacgagcgcggccggtggcagaagcgcaattag

SEQ ID NO: 3557 - DNA, 1500 bp, BradyrhizobiumColbertium
atgtccgatgccatcaaggtcggctttgtcccgttgtctgccgccccccgtggcatcgtggtcgtgttctgcgacgatggcctgaaactcggcccggccacgaccaaggcgctggggggcgccaacgagatcgtgaagcgcgcggccgccgccgccgccttcaaaggtaagagcggggctgcgctggacattctggccccggagggcgtgaaggcgacccggctcatcgtgatcggggccggcaaggcgaccggcctgaaggcgaacgatttcctcaagttcggcggcgtggccgccagcaagctgcccgccggcgccagcgccatgaccatcatggcggagctgcccggcggtgccatgaccagcgagcaggccgttgcgatcgcctcgggcctgcggctgcgcagctacaagttcgaccgttacaagaccaggaagaaggacggcgaggagggcggcctgcgcgccgacatctcgcttgcggttggggatgccggtgcagcgaagagggcgtttgtctcggccggccacgtcatcgacggagtgatcatcgcgcgtgatctcgtcaacgagccgccgaacgtgctctttcccgaagaattcgcgcgccgcgcggctcagctccgcaagctcggcgtcaaggtcgaggtgctcgacgtcaaggcgatgcagaagctcggcatgggcgcgctgctcggcgtcgggcaggggtccgcacggccgagccgcaccgtgatcatgcgctgggacggcggcaagaaaggcgaggcaccggttgctttcgtcggcaagggcgtctgcttcgacacgggcggcatctcgatcaagccggccggcagcatggaggacatgaagggcgacatgggaggcgcggcctgcgtcgtcggcctgatgcatgcgctcgctgcgcgtaaggccaaggtcaacgtggtcggcgccatcggcctcgtggagaacatgcccgacggcaacgcgcagcggccgggcgacatcgtcacctcgatgtcgggccagaccatcgagatcatcaataccgatgcggagggccgcctcgtgctggccgacgtgctctggtacgtggcgaaaaaggtgaagccgaaattcatggtggatctggcgacgctgaccggcgcgatcatggtggcgctcggcaccgagcgtgccggcatgttctccaacaatgacgagcttgccgaccggctgctcacggccggcatcgagagcggggagaaggtctggcggatgccgctcggtcccgaatacgacaagctgatcgattcgcagtttgccgacatgaagaacaccggcggccgccacggcggctcgatcacggcagcgcaattcctccagcgcttcgtcgacggcacgccttgggcgcatctcgacatcgcgggcaccgccatgggcgcgccgaagaccgacatcaaccagagctggggaagcggctacggcgtccgcctgctcgatcgcctggtctccgaccattatgagcgcaaatga

SEQ ID NO: 3558 - DNA, 1170 bp, BradyrhizobiumColbertium
atggggtcgatcgacaggtatatcttccgcacgacgctggcgtcgtttgcgctcgtcctggtcagcctcaccggcgtgatctggatcacgcaggcgctgcgcggcatcgacctgatgacgagccaggggcagaccatcctcaccttcctcggcatcaccagcctcgttatcccggcactggtgctgatcatctcgccgatcgcgctgatgatcgcgatctcgcacacactgaacaagctcgcgactgattccgagatcatcgtgatgaacgcggcgggcttctcacccttccggctgttctatccgttcttctacgccacctgcgtcgtggcgctgctggtcgccttcatcgcggcctatctcgcccccgacggcatgcgccggatcaagcagtgggatgccgagatcaccgccgacgtgctcaccaacatcttgcagcccggtcgcttcgctcagctcgacaagaacctgacgatccggatccgcgaacgccagcccggtggcattctcgccggcatcttcatcgacgaccgccgcgacccgaacgagcgcgtttcgatcgtggccgagcacggcgagatcgtgaagaacgagaccggatcgttcctggtgctggagaccggcaatctccagcgcttcgaggccggcaagcgcgatccggcactggtggccttcggccgctatggcttcgacatgtcgaaattctcgggccagggccgcgacgtcaccctcggcatccgcgagcgctatctgtgggagctgttctcgccctccgaggacgatcccgtctacaagcagattcccgggcagttccgctcggcgctgcacgacagcatcctcgcaccggtctatcccttcgttttcgcggtgctgacgttcgcgttcctgggcgcgccgcgcaccacccgccaaagtcgcaatttctcgatcggctcctcgatcctcgccgtgttcggcctgcgcatggccggcttcgcctgttcggtcatggcggtgaagtcgccgggcgcggtgctggtccaatacgcgatggtcgcaggcgggatcggcatcgggctcgccatgatcatcggcggcgtggtggtcgagccgcctcctggcctgatggaggcgatcaacagatcgaatgcacggatcgcgcggctgttcggacgtccggccgccgcatga

SEQ ID NO: 3559 - DNA, 1098 bp, BradyrhizobiumColbertium
atgagcatgctcaccaatacgctcgggcgctatttcgccggccgcttcgtggtcgcggcgctcggcgtgttcggcggcattttcctgctgctggtgctggtcgactacatcgagatggtgcgcaagacctcgggcctggcatccgcctcggcgatcatggtggccgagacctcgctgttccgggtgccgcagctcctggagaagctgacgccgttctgcatgctgatcggcgccatgacgtgctacctcgccctctcccgccggctcgagctcgtggtggcgcgcgccgccggcatttccgcctggcagttcatcgcaccggcgctcggcagcgcgctgctgatcggggtgatcgccaccgtcgcctacaatccgatgtcggcgaacctgcgcgagctgtccaagcgcatggaggccgagctgttcggctcggcgcccggcggcggcatccaggacgcctccggcttctggctcaatcaggtgaccagcgacggccagaccatcatcaatgcggcgcgcagtgagcagcagggcatccgactcacggggctcacgctgttccggtttgacccggaccagcacttcaaggagcgggtcgaggcacgcgaggcgacgctcgaggccggccgctgggtgttcaagggtgtccgccgcttctcgctggacgcaccgcccatcgaccaggccagcctggagattccgaccacgttgaccgaggcacaggtccgcaacagcttttccacccccgagactgtgtccttttggcaactaccgagctacatccgctcctccgaaagctcaggcttcgcgacagccggataccgactccagtatcagaagctgctggcgcagccgtttttgctggcggccatggtgatgctggcggcttccgtatcgctgcgcttcttccggatgggcggcgtgcagaagatggttttgagtggcgtgggcgcaggctttctgctctacgttctgtcgaaagtaactgaggatttgagcaaggctgagttgatgcatccgatcgctgcggcgtggctgcccgttgtggtgggcggcctcaccggctttttggccttgctctatctggaggacggatag

SEQ ID NO: 3560 - DNA, 2415 bp, BradyrhizobiumColbertium
ttgtccgtccgcagactcctgattgctgccgtcgctgcggcctcgctcggcgggctgatcgacgttgcagccgtgacgccgtcccacgcccagtacacgtataacccgctgccgccgcgtccgaagccgccgagggcccccaacgacaaccagatgctggttcaggcgaccgaggtcaattacgactacaacaactcgcgcgtctccgcggtcggtaacgtccagctgttctacaacggcacgagcgtcgaggccgaccgggtcatttacgaccagaagaccaagcggctgcacgccgaaggtaacatccgcatgacggatgccgacggcaagatcacctatgccgagatcctggatctctccgacgattaccgcgacggtttcgtggattcgttgcgcgtggacaccgccgaccagacccgcatggccgcgagccgcgccgaccgctccagcggcaactacaccgtgttcgagaacggcgtctacacggcttgcgcgccgtgtaaggacgacccgaagaagccaccgctgtggcaggtcaagggtgcgcgcatcatccacgaccagcaggagaagatgctgtatttcgagacggcacagatcgaattcttcggcgtgccgctcgcctacatgccttatttctcgacgcccgacccgaccgtgaagcgtaagtccggcttcctgatgccgggttatatttccggcaccgacaacacgggctatggcgtcgaggttccctattattgggcgattgcgcccgacatggacgcaaccatcaccccccgcttcttgtctcggcaaggcgtgctgatgcagggcgaattccgccagcgcctgatcgacggcgcgtaccagatccgcgcttacggcatcaaccagctcgatcccggagcattcgccgggctgcccggcgaccgcgatttccgcggcgccatcgacaccaagggtcagttcgcgctgaacgacaaatgggtctggggctgggacggcgtcctgatgtccgactattatttcttctcggactaccggctctaccagtaccgcgatccgctcggctcgttcctgttgctgccgacggaagcgctgtcgcagctctatctgaccggcgtcggcaaccgcagcttcttcgatgcgcgcacgatgtactggctgagctattcgggcaaccagagccaggtgccgatcgtctatccggtgatcgactactccaacgtgctcaattatccggtcttcggcggcgagttcagctacaagaccaatttcgtgaacctgtcgcgtgacgaggcggtgttcgatccgatcacgacggtcgccaacaccaacagcctctgcaccacggcgtcggccgatccgctggcccggatgccctcgcaatgcctgctgcgcggcttcccgggcacctacacccgcctcacggcggaagcgcagtggcgcagatccttcaccgatccgttcggccagatctggacgccgttcgccagcctgcgcgccgatgcgatcaactcctcggtctccaaccagcccggcgtatcgaactacctgcccgtcggcgacacccaggcgttccgcctgatgccgaccgtgggcctagagtaccgctatcccttcatcaacattcagccctggggctcgaccaccgtcgagccgatcgcgcaggtcatcatccggccgaacgagacctatgccggcaggctgccgaacgaggatgcccagagcctggtgttcgacgcctcgaacctgttcagcgtcgacaagttctccggctacgaccgtgtcgagggcggcgggcgcgccaatgtcggcgtgcagtccaccacgcagttcgataggggcggtgccgtcaaggtgctgttcggccagtcctatcacctgttcggcctgaactccttcgcggtccaggacaccatcaacaccggcctcaattccggccttgacaagccgcggtccgattacgtcgcgagcgcaagctactcgcccaacagcacctacacattcagcatccgctcccgcatggacgagcagacctggaacgtgcagcgcttcgaggcggagggccgcgccaacttcaatcgctggtcggtcagcatgctctacggcaattacgcgccgcagccggagctcggctatctgacgcgccgcgagggcatcctgaccacgggctcgctgaaggtcgctgccaactgggtggtgtcgggctcggcgcgctgggacctcgaggccaacaagatcaaccagtatgtgctcggtgccggctatgtcgacgattgcttcgtgctggcggcgaactatgtaacttcgtataggtattccgcgggtaccgcaccgcccacgctgagccacgcgttcatgttccaaatcggtctgcgcacgctggcgaactcgtcgacgaccagcagttccgccggcctccagtga

SEQ ID NO: 3561 - DNA, 936 bp, BradyrhizobiumColbertium
atgatgatcccattgcctgtcttccgcctccttctcgctatctgtgccggactgatgctgaccggcctgccctcgccattgcgcgcgcagaacatcgtcgtcatggtcaatggcgatccgatcaccgatttcgacatcgagcagcgcaccaagctcacccagctgacgacgcagaagaccccgagccggcaggaggtcatcaattcgctgatcgacgacaaggtgaagctcaaggaaggcagaaagtacggtgtcgatcccggcgtttccgacatcaaccagtcctacgagggcatggcgcagcgcatgcgcatcacgccggaacagctcaccaagtcgctcgaatccaagggcgtccgcccggagacgctgaagggccgcatgaaggccgagatggtctggaccagcctggtgcgcggccgctacaaggagcgcctccaggtcggcgagcgcgacgtcgcgcaagccgtgcaggcccagaccggcgagaaactccagatcgagggcaccgagtacaagatgcagccgatcgtcctgatcgtgccgcgcggctcgtcggcgacgttcctggaaacgcggaagaaggaagccgaggcctatcgcgcccggatcggaagctgcgaggaagccaactcgctgtttcgctcgaccccgaacgccaccatccgcgacaccgtcaccaagaccacggctgaactgcccgagccgctgcgcaaggtactcgacgatacgccgatcggccacctgaccgcgcccgagatgaccaagaacggcatcgagatggtggtgctgtgctcgcgcaagccgaccatgatcgacacgccgaaaaagcgcgaggttcgcgagaagatgtatcaggagaagtacgagaagacccagaaggcctatctcgaagagctccgcaaggcggcgatgatcgaatatcgcaaccgctga

SEQ ID NO: 3562 - DNA, 1026 bp, BradyrhizobiumColbertium
atggccgagccttcttcagagcgcccggcaaagccccttgccctgaccctgggagagcccgccgggatcggccccgacatcacgatcgcggcctggctcaagcgccgcgaactgaacctgccggccttctacctgctcggcgacgaggacctgatcgcgcggcgtgccaaggtgctcggcgccaacatcaggatcgccggggtgagccccagcgatgccgcttccgctttcactgacgcccttcccgtggtcgcgaccggcgagcgcgcgagcgccgagcccggcaagcccgacacttccagtgcgccggccgcgctcgcctcgatccggcaggcggtcaccgacgttcgcgcgggtcgcgccggcgccatcgtcaccaaccccatcgcaaagagcgtgctttaccgcgccggcttccgtcatcccgggcacaccgagttcctcgccgagctcgcggcggagaacggccgcgtgccgcagccggtgatgatgctgtggtcgccacagctcgccgtggtgcccgtcaccatccacgtctcgatccgcgatgcgctgggagaactcactagcgagctgatcgtctcgaccgttcgcatcgtcgccaccgcactgaaagcccgcttcggcatcgcaaagccgcgcatcgcggtctcgggcctcaatccgcacgccggtgaggacggctcgctcggccacgaggagcagaccgtgatcgccccggcgctgaaggtgctgcgcaacgacggcatcgaggtcaggggcccgctgccggccgacaccatgttccacgcggccgcgcgacagacctacgactgcgcggtctgcatgtatcacgaccaggcactgatcccggtcaagacggtcgccttcgacgacgccgtcaacgtcacgctcggcctgcccttcgtccgcacctcgcccgatcacggcaccgccttcgacatcgcggggacggccaaggccaatcccgccagcctgatcgcggcgctcaagcttgcgagccgcatggccgcttcccaaggctga

SEQ ID NO: 3563 - DNA, 855 bp, BradyrhizobiumColbertium
atgagcgcgatcgacgacctcccgccgctccgcgaggtcattcgccagcatgccctctcggcccggaaatcgctcggccagaacttcctgctcgacctcaacctgaccgcacgcatcgcgcgcgccgccgcaccgctggacgaagcgaccatcgtcgagatcggccccggcccgggcgggctgacgcgcgccttgctcgcgcttggtgcccgccgcgtcattgccattgagcacgacgagcgcgcaattccggcgttgcaggatatttccacacgctaccccggtaggctcgagatcgtgcatggcgatgccatgaccttcgatccgcgcccgctgctctcgggcgaacgtacgaagatcgtcgccaatctgccttacaacatcgcaacccagcttctcatcaactggctcaccgtcgagccgtggccgccttggtacgagatgatggtcctgatgttccagcgcgaggtcggcgagcgcatcgtggcgcgcgaggacgaagaggcctatggccggctcggcgtgctcgccaactggcgctgcgagaccaagatcctgttcgacatttcaccgtccgccttcgtgccgccgccgaaggtcacctcttccgtcgtgcgtctcgtgccgcgcccagaacccctgccgtgcgatcgcaggctgctggagcaggtcgcagccgcggcgttcggccagcgccgcaagatgctgcggcagagcctgaagccgctgggcgtcgatcccgcgcggctcgcgcaagctgcgggcgtcgatgcgacgcggcgcgccgagacaattccgatcgccggctttgttgccatggcgcgtgaattggcggatatacgcagcgaaacgtga

SEQ ID NO: 3564 - DNA, 1059 bp, BradyrhizobiumColbertium
atggcgctgatgcgcaggcaatccctggtcaagttcgatgcgcccttgtgcgagaccatcgtcgacacgcccaagccgcaaggccgcgaggtgctggttcgcatcgaacgctgcggcctttgccattccgacctgcacatccaggacggctatgccgatctcggcggcggcaagaagctcgacaccacgcgcggcatgacgctgcccttcacgctcggccacgagatcgccggcatcgtcgatgaagtcggccccgacgtgccggcaagcctcgtcggcgccaagaaggccgtcttcccgtggatcggctgcggccagtgccgcgactgcgccaacggcgacgagaacctttgtgtgaagcagcgcttcctcggcgtctccattgacggcggcttcgccacccacgtgctggtacccgacgcgaagtatctgctcgactacgatcccctccccgtcaaccaggccgcgacactgatgtgctccggcgtcaccgcctacggcgcactcaagcgcctggtcgatcgcccgcgccaacgcaatctcttgctgatcggcctcggcggcgtcggcatgatgggcctgtcgttcgcgcaggccatgttcaagcagccgatcaccgtcgcggatctcagcccggccgcgcgcgacaccgcgctgaagaacggcgccgccgtcgcgtacgacccagccgagcccgacgtgatcaagcgcatcctcaaggagaccgagggcggcttcgacgagatcgtggatttcgcgggcaacgagaagtcgatggccttcgcggtcgcagtcgccgcgcgcggcggcaagatcgtggtctccggcctgatgggcggccagtttaccctgcccatggtgcaatgggtctataagcgcatgaccatcgaaggtttcatggtcggcacgttggccgaggcgcacgagctgatggcgctggcacgcgccggcaagatcaagccgacgccgatgcgcgaggagccgatgggcgatgtccagaaatggatcgacgaattgcgcgccggcaaggtcgtcggccgcatcgtgctgaagaactga

SEQ ID NO: 3565 - DNA, 237 bp, BradyrhizobiumColbertium
atgtctattcgctgtaccgtcgaaagcgcattctttatcgcctggggctgcctggagaagagcggcgagctcggcccccccgacgcgagcgcaaatcttctgctcgatgccatcgaagcgcagctccggaccggcgagcgccgagacttgatgctcgccaacaaggccatcgatgcctatcgcgcgcacgcggcacaagaccgatccttgcgggactgcgaagcgcacttcggataa

SEQ ID NO: 3566 - DNA, 717 bp, BradyrhizobiumColbertium
gtgaccggtcggccccagaacgatctgctccggcagctcaaccatcaggatttcgagctgctcgcgcctcacctccagccggtcgaagtcgaaacgagccatatcctgcaccacgccggagacggcatggctgcagttcattttccctgcggtcccacgctcgtgtcgttcgccgtgccagtcgaggacgatcgcgaggtcgagagcctgctggtcgggcgcgagggagcggtgggcattgcctccggccgcaccccttcgctcgcctattcgcgcatcgtcgtgaagctcggcggcacgctcttccgtctgccgctccgcgcattcgagcaggcgcagcagaggtcggcgacactccaggagtccttctcgcgctatgccgactgccagttcgcgcagttgctgcagaccgcagcctgcaacgcggcacactcgatcgagcagcgcgctgccaagtggatcatctcggcccaggaacgtgtcggtggcgccgaaattcccctcacccatgagcagctcgcaggcatgctcggcgtctcccgcagctatgccagccgcgtcatccagatgttcaaggcaaggcgcatcctcgcgacccgccgcggcgccatcctgatcctcgacgcggcagcgctcgaagcaagagcctgctcctgcaacgactgggtgaagaagcatttcgacgaagtgctgggcgcggcaattgccggcggttag

SEQ ID NO: 3567 - DNA, 720 bp, BradyrhizobiumColbertium
gtgctgatccggaacctcggcgagcacaccgaactcgcacaggaggatatcgcggagatccgcgcgctcaccttcacgctgcgcgatttcgaccccaatgaggatttcatccgccagggcgacgaacccgagcattcggcgctggtggtctctggcatggtcgcgcgctaccacctgctcggcagcgggcggcggcaatacctggcgtttcacctcaccggcgacctgccggatgcgcagggcctgttcatcgaccagatggatcacgggctcagtgcgctcggcccggccacggtcgcgttcatcccgcatcgcgaattgttcgtcgcgttccggcggcggccgaactttgggctggccgtctggcgtgagacgctgctcgacgcagcgatctttcgggaggccatcaccaacaacagcgcccggtccatgcagacgcggatggcgcacctcttctgcgagctgttctaccgcgcccgcgcggcgcaactggtccgcggcaatcgctgccccgtgccgatcagcctgggccaactcggcgagacgctgggcatggcgatcgcgacggtgaaccggacactcgccgaccttcggcggagcggagccatggacctgcgcgagggcgagctcgtcgtgctgaaatggcgcgagctgcagcggctcggcgatttcagtccggcctatctgcaccttaagcggcagtcgtcgccgcgggcgtga

SEQ ID NO: 3568 - DNA, 240 bp, BradyrhizobiumColbertium
atgagccctacgacgatcctggagcgcatccgtagcctgttcccgccccgggcgagcgagcacctcgacagcatcggcgatgccttcgagaacggcatgatgaaggagccgatccggccgatgtccgatcaggaactcgcccgcgccatccgcgagttccgcgccgcgccggcctccgactggaccatcgcaaaactctcgcggcgctccgtcggggcgtcggtgccgcgggacgcctga

SEQ ID NO: 3569 - DNA, 702 bp, BradyrhizobiumColbertium
atgccgtattcgaagttcatcgcgcgtctccaggcgatcgaaggcctatcggaggaggaacgccggcaggtggccgccctgccttctgcgctgcgccaggtcgccgacggcgagatcgtgctgcgccagggcgagtctgcctcgcgctgcgtgttcgtcgtcagcggcttcctctaccaggcgcgcatcgtcggcgaccgcagccagatcctcgcgttccacgttcccggcgacatgccctgcctgcacacgctgctggtctcgccgatggatgcggatctggtcggactcggaccgaccatcgtcggcacggtcgcacacagccagctcaagcagttgctcgacgactccatccatctgacccgcgccttctggcgcgagacgctgatcgacgcggcaatctcgcggcaatggatcgcgcgcctcggcgcacaggcagcgctgcccaaggtggcacatctcatctgcgagctcgccgcaaggctggaggtcgtcggccttgtcaaggacggctgcttccagatgcctatgacgcagcgccacgttgcggacgcctgcggattgtcgatcgtccacgtcaatcgcaccatccaggagctgaggcatcgtgaattgattgcctgggaaggcagcgaaatcgagctgcttcagtcggatgagctgcgcaggttagcggatttcaggcctgactatctgagctga

SEQ ID NO: 3570 - DNA, 288 bp, BradyrhizobiumColbertium
atggccaactatagccaaatgaccacgcgacgcaatcatcagcgatacgagaagggcgtcaagctctcctatgggatgagtcggccatttgcatccttgccgcgatgttcggctcgccggcgcggcggcgagccgcggttcggctacacgattgtcttcgagccggatttcttcattgccccgccgggcggcatcgcgaaggttcggaggccgaagacggatcccgtgatggggagcggcggcacgctgctcagcgcctggcggacaaagccgcgtggaggggggtaa

SEQ ID NO: 3571 - DNA, 1098 bp, BradyrhizobiumColbertium
atgagtggatctgagcatctcgatcatctgattggccgcatctacgaggccgggctggtaccttcattgtggcccgaggtcctcaatgaaatcggtatcgccgtcggcgggaatggcggcctgctttttgccgtacgcgacggctatgtcagtgggatcaattccgccaaccacgaccagaccatgccgcttttcctgaaggagggatggagcgagcgtgatccgttgctgccgcgtgcggccgcactcaaccacgccggcttcctcgttgatggagaccttctatcggagcacgagattgcgaccaacgacgtgtattgcagtttctatcgcaggcacgggatcggctacagagccgggacaatcattccaatcccgagcggcgattcgatagcgatcgtcatgccgcggcatcaggacaatgggccggtgccgcgcgacgtcgtcttgtttctggatgacttgaggccgcatctggctcgggcgtccatgaccgcaaaccgccttggtttcgagcgcgctcgcgcgcaggccgatgctttgcaggcgatcggcctgcccggagcgatattgcgcgaaggcggccgattgctcgcggcaaaccgcctgttcgaagcgctgatgccatcgctatttcatgaccgcgccgaacggttgactttgaccgatgctgccgcggacgggttgttcttggcagcgctggcgacttcgtccgttgctggcagtcggatcgtcaagtccatcgccatcgcagcggcgatggatcgcgtaccgatggtcctgcatgtcatcccggtgcgcggatcggcgcgcgatatcttcacgcgagccactttcatgctcgtcgtgactcccgtcgatcgcggcgcggtaccgagtgcggaagtcctccaagggctgttcgacctgacgccggcagaggcccaggtggcgcgtcgcgttgcacaagcggaatcgctcgacgcgctcgccgcggcaatcggcgttgcgcgagagacagtccgcacgcagctcaaagccgtgctttcaaaaaccggtctttcgcgccagcaggagctcgtcagcctgctcgcaggcaaggcattgcgcggcgactag

SEQ ID NO: 3572 - DNA, 120 bp, BradyrhizobiumColbertium
gtggttcattgtccgatcaaggccgagcggcgcggaaagctggggccgccgatctatgccccgctgccccattcagcctggacgaccgccaaccggggacttgaatgcgagcctcgctag

SEQ ID NO: 3573 - DNA, 660 bp, BradyrhizobiumColbertium
atgacgacgggcggtcacggaattgacggtgtcgagcggcgcggattgatgttcgtgctgtcctcgccctcgggcgcgggcaagacgacgctgtcgcggatgttgctcgagcgggagcccggcctgaagatgtcggtgtcggcgaccacgcgcgaaaagcggcccggagaggtcgaggggcgtgactatttcttcgtcgacaagcgcaagttcgagatgatggtggagcagggcgaactgctcgaatgggccatcgtgtttgacaatctctacgggacgccgcgtgcaccagtggaagcggcgctggcggctgggcaggacgtgctgttcgacatcgactggcaaggcacacagcaactgcatcagaaagcgagcgtcgacgtcgttcgcgtctttatcctaccgccttcggcggccgacctcgagaagcgcctgcattcgcgggcgcaggattccgacgaggtgatccgcaagcgcatgagccgcgccagccacgagatgagccactgggccgagtacgactacatcgtgatcaatcacgacgtcgaccaggcctttgccgaggtgcagtcgatcctgaaggccgaacgcctcaagcgcgagcggcggatcggcctcgtaggcttcgttcgaagtttgcaaggtcagcttcaaggttag

SEQ ID NO: 3574 - DNA, 888 bp, BradyrhizobiumColbertium
atggcgctgtcgtccatgaccggctttgcccgaagccacggtgcgagcgggccgtacacgttcgaatgggaattgaagtcggtcaatgccaagggctttgacctcagggtacggctgccgcagggcttcgacgaactcgaggcccacgccaagaagcgcgccggcgagctgctctcgcgcggaaccgtctatgccaatctcaacgtcaagcgcaccaacgccgccgccagcgtgcgcgtcaacgaggacgtgctcaacgccgtcctgaaggccgccgcgctgatcgccggaaaggtcgacgccgtcgcaccgagcatcgacgggttgctcgccatcaagggtgtggtcgaagttgccgagcccgagggcgatgaggaagaggacagggccgcgcgtgccgctgcggccgacgccttcgacaaggcgctcgtcgagctcgtcgagatgcgcaagcgcgagggtacctcgctcgggcagatcctgacccagcgcgtcgacgagatcgagcagctggcgaagaaagcggaaggttcgcccggccgaaagccggaggcgatcaaggccaggctcgccgagcagattgccgcactgctcgacacttccgatcgtttcgattccgaccgcctgatgcaggaggcgatcctgatcgccaccaaggccgacatccgcgaggagctcgaccgcatcgcttcgcatatcgcgcaggcgcgcgagctgatcggcaggggcggcccgatcggccgcaagctcgacttcctggcgcaggagtttcaccgcgaggtcaacacctgctgctcgaagtcgaacgacatcgagctcaccaacacgggactcgcattgaagaatgttgtcgagcagttccgcgagcaggtccagaatctggagtga

SEQ ID NO: 3575 - DNA, 1173 bp, BradyrhizobiumColbertium
gtggtcgtcggcaacgccatcatcacccttctcttgatcgccatgctcggtgccggcggcgtctattattacggccggcaggtgttggaagcccccgggccgctgcaagaggacaagatcgtcaacatcccgcagcgtgccggcaagcgtgacattgccgagacgctgaaccgggaaggcgtgaccgacgtcaatccctgggtgttcatcgcgagcgtcgccgcgctgaaggcgagctcggaccttaagccgggtgaatattccttccagaagaacgcctcgctgcgcgacgtcatcgcaaccattgtcgaaggcaaggtggtgcagcatgcggttacgatccccgaaggcctgacctccgagcagatcgtggcgcgtctgtccgacaacgagatcttcaccggcagcgtgcgcgagctgccgcgcgaaggcacgctgctgccggagacctacaaattcccgcgcggcaccacgcgcgagcaggtgatccagcgcatgcagcaggcgcacaagcgcgtgctggccgagatctgggaacgccgcaatcaggacattccgatcaagacgccggagcaattggtgacgctggcctcgatcgtcgagaaggagaccggcaagccggatgagcgcagccgggtcgccgcggtgttcgtcaatcgcctgaagcagaggatcaagctgcagtcggatccgaccatcatctacggtctcgtcggaggcaagggcaccctgggccggccgatcaagcgcagcgagatcacgcagccttcgccttacaacacctacgtgatcgagggcctgccgccgggtccgatctccaacccaggccgcgcttcgctcgaggccgccgccaacccggcccgcacccgggacctctatttcgtcgcggacggcaccggcgggcatgcgttcaccgagacctacgatgcgcaccagaagaacgttgcgaagctgcgcgcaatagagaagcagatccagaacgacacggtcgaaccggccgaggaggcgcagccgccggccgctgccgcgccgggcggcgccgccgatgcgccgacggcgacaacgccggcgcgacccaaccagcagaagaggccgccggcggcgcgcccggccaatcctgcaccggctcggcagggcgcggtgcagtcctcgccacccgtggtgcagcgctag

SEQ ID NO: 3576 - DNA, 1266 bp, BradyrhizobiumColbertium
atgaggcgggtcgtcgtcacaggtctcggcatggtttcgccactcggctgtggcgtcgagccgacctggaaacgcatcctcaacggcgaaagcggtgcgcgcaggatcgagagcttcgacgtctccgatctgcagaccaagatcgcctgcacggtggtgcgcggcgacgggaccaacgacagcttcaatcccgacaagtggatggagccgaaggaccagcgcaaggtcgacgacttcatcatcttcggcatggccgcggccggccaggcgctcgacgatgccaactggcatccggagactgaagaggacaaatgcgcgaccggcacgatgatcgggtccggcatcggcggtctcaacggtatcgccgagaccgcgatcctgctcaaggaacgcgggccgcgccgggtctcgccgttcttcattccgggccgcctcatcaatctcgcctccggctatgtctcgatcgcgcatgggctgaaggggccgaatcattcggtggtcacggcctgctcgaccggggcgcacgcggtcggcgatgccgctcgcctgatcgcgcttggcgatgccgatgtgatggttgctggcggcgccgagtcgccgatcagccgcatcggcattgccggcttcaacgccgcgcgcgcgctgtcgacaggtttcaacgagacgcccgagaaggcctcgcgcccctatgacaaggaccgtgacggcttcgtgatgggtgagggcgcgggcgtcctggtactcgaggaactcgatcatgccaggcgccgcggcgcgaggatctacgccgaggtgatcggctacggcctctccggcgatgcctatcatatcacctcgccatcgcccgacggcgatggcggcttccgcagcatgtcggcagcactcaagcgcgccggactcacggcctccgatctcgactacatcaacgcgcacggcacctcgacgccgctcggcgacgagatcgagctcggcgcggtcgagcgtctgctcggcaacgccgcatcgaaagttgcgatgtcctcgaccaagtcgtcgacaggtcatctcctcggtgcggccggtgctatcgaagcgatcttcgcgattctcgcgattcgcgataatgtcgtgccgccgacgatcaatctcgacaatccctcggtcgagactgcgattgatctcgtgccgcacaaggcgaagcaacgtgaggtcaatgtcgcattatcgaactcttttggttttggcggtaccaatgcgtcggtcatcgtccggcgcttggcaagttag

SEQ ID NO: 3577 - DNA, 240 bp, BradyrhizobiumColbertium
atgagtgacattggcgagcgggttaagaagatcgtggtcgaacaccttggtgttgaacccgagaaggttgtcgacaacgcgagcttcatcgacgacctcggcgccgacagtctggacaccgtcgagctagtgatggcgttcgaagaggaattcggttgcgagattccggacgacgccgcggaaacgattctcaccgtcggcgacgccacgaaatttctcgagaagaacgcgaagagctaa

SEQ ID NO: 3578 - DNA, 738 bp, BradyrhizobiumColbertium
atgttcgacctgactggccgaaaggcgctcgttaccggcgcgaccggcggcatcggcggcgcaatcgcacaggcgctccacgcgcaaggcgccaccgtggcgatatcaggaacgcggaaggaagtgctggacgagcttgccggcaagctcggcgaacgcgcgcatgtgctgccctgtaatctttccaaggccgatgaggtcgaggcgctggtgccggctgcggaagcggcaatgggccaggtcgacattctgatcgccaatgccggcatcacgcgcgacaatctcttcgtgcaactccgtgacgaggactgggacgaagtcatcaacgtcaatctgactgcgaccttccgcctggcgcgcgctgcgaccaagctgatgatgcgcaagcgcttcggtcgcattattgcgatcacctcggtggtcggcgtcaccggtaatcccgggcagggcaattacaccgcgtcgaaggcggggttgatcggtatgatcaagaccttgggtgccgaatacgccaagcgtggcgtcaccgcgaactgcatcgcgccgggcttcatcaagacgccgatgacggatgcgctcaacgacaagcagcgtgaaacgattctgaccaaggttccggccgcccgcctggggacgcccgaggacatcgcggcggccgccgtctacctgagttcgaacgaggcgtcctatgtcaccggccaaaccatccacgtcaacggcggcatggccatgatctga

SEQ ID NO: 3579 - DNA, 960 bp, BradyrhizobiumColbertium
atgacggctgcattcacatttccggggcagggttcccaggcggtcggcatgggcaaggccctggccgacgccttcccggtcgcgcgcgccgtgttcgacgaggtcgatgccgcgctcggggagaaactgacggctgtcatctgggacggtccggctgaaactctccagctgactgagaacgcccagccggcgctgatggcggtatccatcgccaccctccgcgtgctcgaggctgaggctggtttttccgtgggacgagacgcagccttcgtcgccggccactcgctcggcgagtattcggcgctggccgcggccggcagcctgacggtttcggataccgcccggttgcttcgcacgcgcggtctcgcaatgcaaaaggccgtcccggtcggtgccggagccatggccgcgctgctcggtctcgactacgaggccgccatggaggtcgcaggcgaggcggcgcaagggcaggtctgccaggccgccaacgacaatggcggcgggcaggtggtcgtctccggcgacaagacagcggtcgatcgcgccgtcgagattgccaaagccaagggcgccaagcgcgcgatgctgctgcccgtctccgcaccgttccattgcaagctgatgcagcccgctgcggacgccatggcagaggcgctgtcgaaggtcgcgatcaaggcaccggccgcgccgctggtgtccaacgtgctggcgagcgccatcaacgatcccgacgagatccggcgtcgtctggtcgagcaggtcaccggcacggtgcgctggcgcgagtcggttgcctatatggcagggcggggcgtcacccatttcttcgagatcggcgcgggcaaggtgctgaccggtctcgtcaagcgtattgccgacggcgccgttggcgttgcggtcggtggccccaacgacattgccgccgccaaggatgcattggccgctgcgaagcaggcctag

SEQ ID NO: 3580 - DNA, 810 bp, BradyrhizobiumColbertium
atgcatgacggtgcgcatggctgcctgtccgccgacgaaaagaccaatctggcgctgagccagtggttctgcgcatatccgctgtttgcggagacgcgcagctaccggcgctatcacctgcagcatcatgcgcgcacgcagcaggaggacgatcccgacctcgtgctgtcggcgccgtttcccatcaccaagatcagctaccgccgcaagttcattcgcgacatcaccggccagaccggttatcagcagcgcaaggcgcaattgctcaacgcgcttgggccgaaagactggccctggcgccagcgtgcggcgcatttctgggagaagcttggcccgcaatgtgtggtcaatgcgatcatgcttgtggcgctcgccgcggcgggcgtctggtgggcctatccactgctctggctggtgccgctcctgacctggatgatggtcatcacccggatccgcaatatcgcagagcatgccgttgttcccgacagcagcgacccgttgcgcaacacccgcacgacgcatgccaattttcttgagcgcctgttcatcgcgccctactacgtgaactaccacctcgagcatcatctcttgttctacgtgccttgctacaatctgccgaaggtgcatcgtctgctgagtgcgagccggtacgcaggtcgtatggaagtccagccgaactacgccgcggtgctgcggctggcgacggcaaagccgaaccgcgaagatcggcccgggcaacttgtcagcagtgcgcgccgcgcacaggccggggcagaggtcgacgccaaccagaccgccggcgggttttga

SEQ ID NO: 3581 - DNA, 264 bp, BradyrhizobiumColbertium
atgcgcaccgtcatgcatcaggatcgcaaggccaagctggcgcgagccgatgatggcgacggcgacgatgtaggtgatcggattgggccaccacgcaaccagagcgatcgcaccaatgatcagcgcccaggcgtgcgcaatgagtgcgacgcccttctaggtgacgcgctggcgcacgtcggccagttgatcatcggtcaggaaatcccgggcacgcatgcgaagcgcggtcatggcctaaccctctccgttcgaattgcttga

SEQ ID NO: 3582 - DNA, 705 bp, BradyrhizobiumColbertium
atggcggaaacctcggcccaggagccgctccaggcggcgggtgatcctaagcataccgcgcgcgcgacgcgctcggccgggcgcaagatgcgatcgctgctcttggatgcggcgagcccgctgtttcgcgagcgggggttgtcggggacggcgatcaccgatatcgccaccgccgcgaacgccttccctagccagatcacctattatttccgcaccaaggaggcgctgttcgtcgaatgcgcctgccgcgaattgctgtacctggcgcgcgccacagagcggacggcgctgcaggcgtgctcgccccaggaatacacacgcacgctggcggagaccgtgacggcgagcgattcggtcgccttcttcgcggaagcattgacactgacgcgtcggcgccaggatctcgcacccctggtcgagcgtaccatcgagcgcctgcacggcgaaggcgcgcgcgcctatgcgagccaggtcgcacggcacggttggcgctcgctccgggcgcccgacgaaagttcgcggagattctgggccgtcgccatcggcgtcattctcgagggttacgcgatgggccgttcgcccgagcagctttgtgccgagatgttgcgcgtgctcggagagcaggcgaaatccgcgaacgacacggggcgcctgcgtctcgtcgaggagcctgatgcatcaagcaattcgaacggagagggttag

SEQ ID NO: 3583 - DNA, 468 bp, BradyrhizobiumColbertium
atgcctctttacgagcatgtctttctcgcgcgtcaggacgcgagcccgcagcaggtcgaagagctgactgcgcagatgaccggtattgtcgagggtctcggcggcaaggtcaccaagaccgagaattggggcgtgcggtccctcacctaccgcatgaacaagaaccgcaaggcgcacttcgtgctgctcaacatcgacgcgccgtccgcggcgatcgccgaaatcgagcgccaggagcgcatcagcgaagacgtgatccgttatctcagcgtccgcgtcgaggagctcgaggaaggcccgtcggccatgatgcgcaaggccgatcgcgatcgggaacgtgatgaccgtggcggcggcttccgcggcgagcgcgaaggcggcttccggggcgaccgcgagggcggcttccgcggcgatcgcggtccgcgccgtccgcgcgacgaagctgaaaccacggatggggagtaa

SEQ ID NO: 3584 - DNA, 240 bp, BradyrhizobiumColbertium
atggctgaagctggtgcacgtcgcccgtttttccgtcgtcgcaagagctgcccgttcacgggcgccaatgcgcctaagatcgactacaaggactccaaactgctgatgcgttacgtgtccgagcgcggcaagatcgtgccgagccgcatcactgccgtgtccgcgaagaagcagcgtgaactcgcccgcgccatcaagcgcgcgcgcttcctgggcctgctgccctacgtcattcgctga

SEQ ID NO: 3585 - DNA, 987 bp, BradyrhizobiumColbertium
atgatggcgtttgcactgatagccctgatcgccggcgcggcgtcggccctgatgttcgcctcgatagcgtcgggcgcgctgatctcgctcgccctgttctacctcgcgccgctgccgctcatggtcgccgccattggctgggggccgctctgtgccagcctcggcggcattgccgccgcgatcggcctcggcgcgctgttcggcctcccctactgcatcgccttcgccgttaccgtcgcgttgccggcctggtggctcggccatctcgtcctgctcggccggcagttgggaagtgccgcgccggagggcacaaccgccgggccgccgacggaggcgaaggtcgagatcgagtggtacccggttggccgcatcctgctctggatcgcaggcttcgccacgctgacgacgatggctgccttgctcacgctcggcaccgacgccgaaaccatcatcggcacgctgcggcgcggcctgatgcgcctcctccgcaccaccgatccgcaaacctcgggcgaggccagccagttggtggacgcgctggtgcgcatcgccccagccgccgccaccattgtcgcgatgatgacgctaactctcaacctctggctcagtgccaaggtaaccgcgacgtcgggccggctgcgccgtccctggcccgatctgatggcggccgagctgccgccgatgacgctggtggcgctctgcatcgcgctcgccttttccttcaccggcgggctgctcgccatcgtcgcgcagatcgccacggccgcgctgctgatggcttacgcgctgaccggctttgccgtgctgcatacgctgacgcttgcgttgaagggccgcacgttctggctcagctcggcctacgccgtcgtcgtcgtgttcggatggcccatgatcgcggtggtgatcctcggccttgccgattccgtcttcggcttccgcgagcgcttcctgcgcagccggcagccgccacccctgccgaccccttaa

SEQ ID NO: 3586 - DNA, 600 bp, BradyrhizobiumColbertium
atggaagtcattttgctggaacgcgtcaacaagctgggccagatgggcgaagtcgtgaaggttcgcgacggctacgcgcgcaatttcctgctcaagcgcggtaaggcgctgcgcgccaccgccgataaccgggccaagtatgacggcatgaaggccgagctcgaagcccgcaacctcaaggccaaaggcgaggcgtccaaggtcgccgagaagatcgaaggcaagaacatcatcgtgatccgccaggcatccgaagccggccagctgttcggctcggtcaccgtgcgcgacatcgtcatggcgttcgaaaccgacggcgtccacctcgaccgcccgcaggtgcagctcgacgcgccgatcaagaccatcggcaagcacacggtcacggttgcggttcaccccgaggtcgaggtcgagatcaccgtgacggtcgcccgcagccaggacgaggccgagcgcatcaaccgcggcgaggacatctcgacccgcaacgaggaccgcgacgcagcggccgaagcgattgccgctgccggcgagttcttcgatccggaggcccagcaggacgaagtcgagccggcgccggccgcggacgagaagtaa

SEQ ID NO: 3587 - DNA, 468 bp, BradyrhizobiumColbertium
atgcgagccgaagctgatccggaattcgcgcatatttccgagcgcatccacgccaatgtcggccggcagggcttcatgaacctggtcggcgcggagctatcagaattgtcacgcgggacctgcacgatcgcagtggagcggcggccggagctgctgcagcagcacggcttcttccatggcggcgttacggccttcctggtcgataacgccacgacgatcgctgcggccacttcgcgcggccagccggcgctgacggctgaatacaagctcaatttgttgtcgccggcagtcggcgaaaagctgatctgccgtgcccgggtgatcaagccgggccgtcaggtcgcggtggtggcggccgatgtgttctgcgtcaaggatggtgtcgagaagcatacggccaccgcgctggcatccatcgcgatgctgaacgaggacgttgccggcaaaacgaaaagcccggccgcctga

SEQ ID NO: 3588 - DNA, 597 bp, BradyrhizobiumColbertium
atgcggacgagtgtgcgtgacgatcttttggcagccggactgatggtgttcgaccgcgtcggcttcgaggcagcgaccgtggccgctatccgcacccgtgcgcgcgcctccaatggcagcttctttcacgcgttcggctcgaagaaggagctcgccggtgcgctgcttctggaagtcttgcggcactatcatgccgcgatgctggccgcgctcgatcccattcccgatgctgagcagggtatcgatcgcctgatccgggcgcaccttgactgggtcgtcaccagccggcgcgaagctcggtacctcttcgagatttcgcgtggcgaatgggccgacgacgtgcgcgacgcccagcgcgcacagaatgcgcgacttgccgaggggatcgagcgctggcgtgcgccgttggtcgcgaggggggaactcctgccgatgccgccgatgatgttcataagccagctgattggcccggcgcagatcttctgccgcgccttcctctcgggacgcgaccgcactgatccgcgcaacggggtcgacacgctgatcgcctgcgccaaccgtgcgctccggccattcgaccgcatcatcaagcaatga

SEQ ID NO: 3589 - DNA, 933 bp, BradyrhizobiumColbertium
atgtcgagccgagcgctcagcctcgcgacggtattgcttctgatcggcttcgcagtggccgattccgttctagcgcagccgacgaatctcgaagccggcaagaccccctcccagcttttcgctcagacctgcaatgtctgccacaagagcccacgcggacttctgaagtctgtggcgccgggctcgctgccgggcttcctgcgtcagcattacacgacgagctcggacatggcgggcgtccttgcgacctatctgatctccaacggcgccaccgacacccgctaccaggccaaggacggcaagaaggacggcgccgctgcgggtcagtcgcctgagcatcagggccgccgccagcgctcgcaggaggccaggccggagggcgagggtgccgctccggccggtgatggcccgcgaccgaagcgcgctgcacggccaccggcagaggacggctcgcagccggagggacaggaagcgcccgaggcacgtaagggcaagcggcgggttaagccgggcacccaagatgctccgaaggccgatgccgccgcgccggcgaccgaggacaagaagagcgagccgaagccagagaccgtcaagcccgacggcgccaaagtcgagcccgacagcggcaaggctgccgagaagccagcggagaccaagccggagagcccgagagtcgagccgcgcggcagcgagcctccggctttgcgatccgagccggccccgcaagtgacgccggctgcacctgccgcagcgaagcccgccgaaccggcgatacccaagccggcggatgaggctgcttccaagccggctgcacctgcggcaagctccgaacctgcggccaagccggcgcaggcggagcccgcggctcctgccgccccgcccgcggcgccggctgcgtcatccggtccgccggcaccgccgatttcgcgctaa

SEQ ID NO: 3590 - DNA, 1251 bp, BradyrhizobiumColbertium
atggaccgtttgttgcgtaaattcctgtctcaattcatccgccgcgggtcgatgacggtgacctgcgcaagcggatcgaagttcaccgtcggcgacggctctggcgagccggtcgcggtccgcttcgtcaccgcggacgccgagcggaaggtcctcgtcaatccagagctcgggctcggcgaggcctatatggacggcgagttcgtcgtcgagcgcggcacgatagcagatgccctcgccatcctgctcgatcaacccgacctattgccgcagtgggcaaaaccgtggtggcacctgcgctacctgacgcggcacctcaagcagttcaatccccgcgcccgcgcccgccacaacgttgctcatcactacgatctcgacggccggctctattcgctctttctcgacgccgacaagcaatatagctgcgcctatttcgaaacgcccgagatgtcactggacgacgcgcagcttgccaagaagcggcacattgcagcgaagcttctcatcagggacggccagcgcgtgctcgacatcggctccggctggggaggtctcggcctctatctcgccgagatcgcgggcgccgacgtgaccggggtaacgctgtcgaccgagcaattgcaggtagccaatgctcgcgcggctgagaagggcctgagcggctcggcccgattcctgctccaggactatcgcgacatcgacggtacgttcgaccgtatcgtctcggtgggaatgctggaacacgtcggggcaaggttctatgatgcctatttccagcgctgcgccgaactgctggacgaggacggcatcatgctgctgcacgcgatcggccgttcgcagggtccggattcgaccaatccctggatcgccaaatacatctttcccggcggctacattcccgccctctcggaggtgctgccggcgatcgagcgcgcgggcctgctggtcaccgacatcgagatcttgcgcctgcactatgccgagacgctgaaggcctggcgagagcgcttcatcgcccggcgcgaagaggccgtgcagctctacgacgaacgctttgccctgatgtgggagttctatctggcggcctgcgagatgacgttccgcaagcaagcgatgatgaacttccagattcagctgacacgccgtcagggcgtggtgccgatgacccgcgagtacctcccccgggaggaagcactgctgcgggcgcgcgaaggcgcgacccagcccaggctcaagctcgctggtgaatag

SEQ ID NO: 3591 - DNA, 147 bp, BradyrhizobiumColbertium
atggccgcgatcaacccggacagccaatgccggctgcctgcctcgcttcgccagttctggtgctgccgttctggccgcatcgctcgcctcgtgttcgttccggcgggattgggacaacctccggcccgcctgccggttccggcataa

SEQ ID NO: 3592 - DNA, 120 bp, BradyrhizobiumColbertium
atgagcaaagagacccgatcctccttcgatgtgcaggacgacctccgcaccgatttcgccctgatcgtcaccggcgtcggggctgccgtggttgcgctcgtctacctcctcctggtctga

SEQ ID NO: 3593 - DNA, 1506 bp, BradyrhizobiumColbertium
atggccctgactgattcgaacgttctcaaactcgcgcccgatgccggaactccgacctatcggagcgcgccgcacaatattgaggcggaacagagccttctgggcgcgatcctggtcaacaacgacgccttctaccgcgtctccgatttcctggagccgaagcacttcttcgagccgctgcaccagacaatcttcgagaccgccggcagcctgatccggatgggcaagatcgcgacgcccgtcacgctgaagacgttcctgcccgccgataccgacgtcggcggcatgaccatcgggcagtatctggcccggctcgccgccgaagccaccaccatcatcaacgcccaggactatggccgcaccgtctatgacctgtcgctcaggcgtgacctgatcggcatcggcgaggacatggtcaatgtcgcctatgacgcccccgttgacttccagccgcgggcgcagatcgaggacgccgaacgcaagctctacgaacttgccgagtccggccgctatgacggcggcttccagaagttctcgcaggcgctgacggtcgcagtcgatcttgcggcgaaggcattccagcgcgacggcaagctgtcgggcatctcgacgggcctgcgcgacctcgacaccaagatgggcggcctgcaggcctccgacctcatcatcgtcgccgggcgtcccggcatgggcaagacgtcacttgccaccaacatcgcctacaatgtcgcgcaagcctacgttccagaattgcaggccgacggcaccatgaaggccgccaatggcggcgtgatcggcttcttctcgtgcgaaatgtcggccgaccagctcgccacgcgtatcgtcgccgagcgcaccgggatcccctcctcccacatccgccgcggcggcatctcggaagccgatttcgagaagatccgccaggtctcgatcgagctgcaatcgctgccgttctacgtagacgcgaccggcggcctttcgatcgcgcagctgatggcgcgcgcgcgccggctcaagcgccagaagggcctcgaccttctggggatcgactacatccagctgctcgcgggctcgggcaagcgcgccagcgacagccgcgtgcaggagatcacggagatcacgaccagcctgaaggcgctcgccaaagagctcaacgtccccgtgattgcgctgtcccagctgtcgcgtcaggtggaatcgcgcgacgacaagcgcccgcaactctcggacctgcgcgaatccggctcgatcgagcaggacgccgacgtcgtgctgttcgtgttccgcgaggaatactacctcgccatgaaggagccgcgccccggcaccgaggagcacgccaaatggcaggccgacatggagcgcacggtgggccgcgccgaagtcatcatcggcaagcagcgacacggccccaccggcacggtggagctgcacttcgatgcatcggtcacgcgcttcggcgatctcgcgcatgacggccaattgccggatcgcaccgactattaa

SEQ ID NO: 3594 - DNA, 1248 bp, BradyrhizobiumColbertium
atggcgtccgacccgaaaacgaacccgcaatccgggcctctctccgcagaggccaatcaagccgctgcgctcgcggcctatggtggcgtgctgaccgtcgatctcgacgcaatcatcgccaattggcgcaagctcgagaagaccgcggtgccggccgaatgcgcggcggtgatcaaggccgacgcctatggctgcggggccgagcaggtgtcgcgcgccctcagccaagcgggctgcaagaccttcttcgtcgccaccatcgaggaagcgcgcaaggtgcgcgcggcggttccggagcccacgatctacgtgctgggcgggtatttccagaacaccggcgaacactatgcgaagatcaactgccgtcccgtgatcggcgatctcaacgagcttgccgaatgggacgtattctgccgtcgcaccggctggaacggaggcgccgcaatccacatcgacaccggcatgaaccggctcgggctgacgctgtcggaagcgcaggccatcatcccccgcatcaacgccggcgaccacggcatcacgctggtgatgagccatctggttgcggccgagcagctcaacagcccggtcaatgcacgacagcttgcggccttccgcgccatcgccagcgaattctcgggcgtgccggcggcgctcgccaattcctccggcatcttcctcggcgcgccgttccagttcgacatggtgcggcctggcgccgcgctctacggcgtcaacccgacgccggaagccgacaatccgatgcagcaggtcgtcgacctcaaggcgcgcatcgtgcagatccgcaccatcgagcgcggcgagacggtcggctatggcggcacctggaccgcaaggcggccgaccaagcttgcgatcatcgcggtcggctatgccgatggctatttccgcgcggccagctcgaacgatggcacccgcggcgccgaggtcatcgtcgccggcaagcgctgccccgtggcgggccgaatttcaatggacctgatcgccatcgacatcaccgacctgccgccgaacgcagtgcggcgcggccatatggtgacgctgctcggtgagggaatcaccgtcgacgagctcgcacatcatttcggcacgatcggctatgaggtgctgaccagcctcggccgccgctacgcccgcatctacaagggcggcaatgtggaggagccgctggtgaggctcgctgcagtgacgggagagcagccggccgctccgcagtcgctacccagctga

SEQ ID NO: 3595 - DNA, 219 bp, BradyrhizobiumColbertium
atgtccaagtcgagctttgttgccatcgcactcgccctcgcgttttccggaggcgcatctgcacaatcgtccgatcagcgcggcgcgtgcaaggcggattatgataagttctgcgccggcatcgcaccgggcggcggcatcgtcgcatgcctgaacggcaaacgcgaccagctcagtgcgccctgcaaggcggcgctggacagccggaagaagaagtaa

SEQ ID NO: 3596 - DNA, 771 bp, BradyrhizobiumColbertium
atgaagatcgcgacattcaacatcaacaacatcaatcgccgcctgcccaatctgttggcatggatgcgtatcgcgaagcccgacgtcgtcgcacttcaggagttgaaggcaagtgatggcgaatttccggcggcgccgatcgaaaaagccggctacggcgcggtgtggcgcggacaaaagacatggaacggcgtcgccatcctcgctcgcaacgccgagcccgtgctgacgcgcgaccgattgccgggaaggccctcggatcacgaagcccgctacatcgaggccgccgtgcgcggggtcatcgtcaccagcatctatttgcccaacggcaatccgcagccggggccgaaattcgactacaagctggactggttcgcgcgcctcaagcgccacgccaagagcttgatcaagcaggacctgccggtcgtgctcgccggcgactacaacgtcgcgccaaccgagatcgacatctatccgacgcggtcatgggacatggatgccctgatccagccgaagagccgcgcggcgttcgcctcgctggtcgagcaaggctggtgcgacgccatccgcgagctgcacccgggcaagcgcatctacacgttctgggactacaagcggaaccgctggccgcgcgatgcggggctgcggctggaccatctcctgctgagccctgccctcgctcagcgcctcgccaaggccggcgtcgacaagaagatccgcggcgaggacggcgcgagcgatcacgcgccggcctgggtggtgttgcgctga

SEQ ID NO: 3597 - DNA, 807 bp, BradyrhizobiumColbertium
atgatctgcgcaaaccgcgatcatgatgccgtgaccctcacatccctcagaagcagcgttcgcgacctctacgagggcgcaacgccgagcggcgtgcgattccgctatgctttgctcgccttcgacattgtgacggtgctgttcatcatcgcgacctcgttcgtgcatcccagcgagatcatcgaaacgctcgatgtcctgttcggcgtaacgctgcttgcggacttctcggcgcggctcctggtcgatcggcatccgcttcgcaagttcacccagctcgcaacgtgggccgacatggttgcaatcgtatccttcctggctccgcttgccggcgaggcggccggcttcctccggatcctgcggacgttggggctgcttcgggactaccagatgctggtgaggttgcgcatcgattctccattctttcggcgcaacgaagacgtcgtcttcgccgtcacgaacctggccgttttcatattcgtcatgaccgggctcgtttacgagactcagaagtttcggaacgatcagatccggaactacgccgatgctctgtatttcaccgtcacggcactgacgacgaccggtttcggggacattaccctgccgggcacgatcggtcgcttgatctccgtcgtgatcatgattttcggtgtcacgctgttcttcaatcttgcccgcgcgctcctcagtcccagcaaggtgcgatttccgtgtccgacttgcgggctgcagaggcacgatgccgacgccgtgcattgcaaggcctgtggcaccattctcaacattccagacgaaggagcggtctga

SEQ ID NO: 3598 - DNA, 726 bp, BradyrhizobiumColbertium
ttggcctttctcttcgtcctcagcgtcggcctcgccgccggtaccgtttcaggcatcgtcggcaccggctcgtcgatcatgctgatgccggtgcttgtctatgcctacgggccgaaggaggccgtgccgatcatggcggtggcctccgtcatggcaaatttctcgcgaattctggcgtggtggcgcgaagtcgactggcgagcctgcgcagcctattcgatcacgggcattccggcggccgcgctcggcgcgcggacattgctggcactgccctcgcacgtcgtcgatctcgccatcgggaccttcctgatcgcaatggtgccggtgcggcactggctggcgcggcatgacctcaaggccggcctctggcatctgctcatcggcggcgcagtcatcggctatctcaccggaatcgtggtctcgaccggcccgctcagcgtgccgctgttcctgttctacggcctgtccaaaggcgccttcctcgccaccgaagcggcctcctcgctcggcctctatttcgccaaatcggtcaccttcgagcgcttcggcgcgctgaccggcgacgtgttcatgaagggcctgatcgcgggctcctcgctgatgtcaggtgccttcatcgcgaaacgcttcgtgctgcatctgaagccggacgtgttccgcctggtgatggacgcgatcatgatcgcagccgggctctcgatgctctggaatgcggccctgccgtag

SEQ ID NO: 3599 - DNA, 2070 bp, BradyrhizobiumColbertium
atgcgaaaggatgaggcgatgaccgatccggattgcagcgagcaggcggggacgccgcgcttgcgctcggtcgtccacgcgatgatctgggcgaccgtgcccgtcctgctgctggtgcaactgctcgcctccgccggcgtcgaggcatcgagcttctggtcgcagctcaggcagatcgatgcccgcatggcccgcctcgccgagagccgggccgcgctgatcgccgagccgctctggaagatgcgctacgatcaggtcacgggcgtactcaacgaaatcctgcacgacgagaccattgcggctgcggcggtctatgacgataccggtgccgcgattgcccgcgcgatcgcgcggcccgaaggccaggcggtcgcggaggtctcgcgcccgatccactacagcaacggcaacatggccgttcaggccggccgcatctcgatcgcctattcccgtgcgacgctttacgccgatgcgggcagccgcctgttgctgctgctggtcgtcggcctgctcgcaacgtttgcgaccctgattgccatgcggatctccgccaacatcttcatcggcaggccgctggccgccatgatgtcggcgatccagcgcagcaaggatgacggacgggcctatccggcggacgtcacgtcatcgaacgaattcggtcagctcgcgcgggccttcaacgccatgcagcacacgacgtcaggcgcgctggaccggctcggacacatggcgacgcacgacccgctcaccggactgccgaaccggcgctcgctgaccgagcgcctggccgtggcaagccggaacggaggctcgccggatacgctggtcgcgttctgcttcatcgatctcgacgacttcaagggcatcaacgataccttcggccacgaggccggcgacaagttcctggttcagatttcggagcgtcttcgcaacgaggtcgaagcggaggactgggttgcgcggctcggcggcgacgaattcgtcgtcattcgtcccgaggtcagcaacgaagcgtcggcgcacgcattcgcgcagcgggtgctgaacgccatttccgagccgatccgcctccacgacaagcaggtcgtgccgcgtgccagcatcggccttgccgtgcgccgcgccgacgatccggaattgtcgcatctgccgacgctcgccgacatcgcgctctatcatgccaagagcaaagcgcccggcacggtcgccgtgctggacgaggcgcttcagcgtgactatcgccgccgcagggatctcgagcttgccattcccgccggcttcgccgagcggcagttcgaggtctggtaccagagccaggtcgatctccgaactcatgagatcgtcggtctggaagcgctgatccgctggcgccatcctgaacacggcgtaatcggccccggcgaattcttgccgctgatcgagcgcagcggcaacaatgcgcggctgacgcgctacgtgctgaccgatgcctgctgggccttgcagcggttggccgctgcgggcaagccgcagatccggatcgcgatcaacttgccgccgtccgagcttgccgaccattcgctcgccgccgagctgggcgcgacctgcgcccgcttcgatgtttcggcctcgtcgctcgaactcgagatcaccgagggatcgctgatcaacaacatggccagcgcctccgaaacgctgcatcgcctgcggcgcctgggcgccacgatcgcgctcgacgatttcggcaccggctacagctcgctcgctcatctcaggcgcttcccgctggacaaggtcaagatcgacaaggcctttgtccgggaaattcccgacagcgccgaagacaaggccatcgtcggggtcatcgcttcgctcgccggcacgctggggctgactctggtcgtcgaaggcatcgagcgccccgagcaggccgaggccatgcgcgagatgggcgtcagattcggacagggcttcctctatcagcggccgcagccgctcgaagccgtgctgcaatggctcgacaggcaggcggcggaggcgagctgcgtccttgccgagagcccgtcgatcgcgccggaattcgcggcctga

SEQ ID NO: 3600 - DNA, 1149 bp, BradyrhizobiumColbertium
atgacaagattcctgcgcgtgttgctcgctgcgggcatggtctgtggcgttttcgcatcggctggacgcagccttgccaagcccctcgacatcgtgttcgtcaatcccggcaagacgggcgaggtctattgggacatggtcgcgcagaccatgcaggctgcgggccgcaagctcgatgcgcgcgtcgaggtgctgaccagccagcggaattaccgcaccatgcaggagcttggcctcggcgtggtggcgcgtcccgacaagcccgatttcctcatcctgtcgaacgaggagtctgccgccgttccgatcctggaggcggccgaggctgcgggcgtcaagacgctgctgctttcgaacacgctgatcggcgaggatgcggcgcgtcttgggccgccgcgccagaagctcaagacctggctcggcgacatcacgaccgatcttcggactgcgggcgcgcgcatggccaacgccctgatcgcggcggcgcgtgccgagaaatggcagagctccgacggcaagatccacattctcggcatcggcggcgacgagatcacgcccgcctcgatcgcccgcaacgccggcctcaagctggccgtggatgccgcgcctgacgtcgtggtggaccggttgctgttcgccaattggacgcagtccgaggccgagcgggtcacggcaaattacctcggctgggcttctcgcaaggagatccggcctgccggcatatgggcgggaaacgatccgatggcgctcggcgcactgcgcgcggtgaccgctgccggcctcgtgcccggccggaacatccaggtggtgggcctcaactggtcagatgaggcgctgcgcgaggtcaaggcgggtcgcctgcttttgaccgacggcgggcatttcctgctcggcggctggtcgattgttctcctgcgcgactatgccgatggctgcgatttcgcggccgtttcccctcgtgtcgaggtcaagacatccgcgatcacgcgcgacaatctcgcttccgtcggcgatctcgtcaggacgcgtgcgttcgagcggatcgactttacgcgcttccaggccaagcccggacgctgcggtcaatacgacttctcccttgatgcgctcatctcgtcgctgccgcttccggaaggcgcggcgaactga

SEQ ID NO: 3601 - DNA, 1446 bp, BradyrhizobiumColbertium
atggccaaatccaccctctccttcgtctgccagaactgcggcgcggcctataaccgctggcagggcaagtgcgaatcctgcggcgagtggaatacgctcgcggaagaagacaccagcggcagcgtgccggtgtcgatccgctccaagcgcaagggccggaccttcgcgctggagagcctttccggaaagagcccggatgcgccgcgcctgtcctccggcatgaccgagctcgaccgcgtcaccggtggcggcttcgtccgcggctccgtgcttctggtcggcggcgatccgggcatcggcaagtcgacgctgctgacgcaggcgaccagcctgctggcgcgtgccggccaccgcgtcgtctacatttccggcgaagaagccgtcgcccaggtgcgcctgcgcgccgagcggctcgggctgtcggatgcgccggtccagctcgccgcggagacttcggtcgaggacatcgtctcgaccctgtctgagggcgcggtgccccggctgatcgtgatcgactcgatccagaccatgtggaccgataccgtggaatcggcgcccggcaccgtgacgcaggtgcgcgcctcggcgcaggcgctgatccgctttgccaagaagacgggcgcggccatcatcctcgtcggccacgtcaccaaggacggccagatcgccggcccccgcgtggtcgagcacatggtcgacgccgtgatgtcgttcgagggcgaaggctcgcagcaattccgcatcctgcgcgccgtcaagaaccgtttcggcccgaccgacgagatcggcgtattcgagatgacgggcctcggtctgcgcgaggtcaccaacccctccgagttgttcctgtccgagcgcgatctcggcacgcccggcaccgcagtctttgcgggaatcgagggcacgaggcccgttctggtcgaattacaggcgctggtggcgccgacctcgctcggcacgccgcgccgggccgtggttggctgggacccgagccggctgtcgatggtgctggcggtgctggaggcgcattgcggggtcaagctgtccgggcacgatgtttatctcaacgttgcgggcggcctgcgcatccaagagccggcggctgatctcgccgccgccgccgcactggtgtcgtcgttggttaatgcgcagttgccgaccgatgccgtctatttcggcgagatctcgctgtccggcgtgatccgcccggtggcgcagaccccggcccggctgaaggaagcggcgaaactgggcttccagcgcgccgtgctgcccgaatcagcccgcggcgagagcggcggcgatgcgggattgtcgctcaatgcggtcaacagcctgacgacattggtggccgagatcgccgcccgcggctcccgcagcggcgaatcgaacgcgccggcagagaaaaatgccacaccggcaagattccgccgtggagagggctag

SEQ ID NO: 3602 - DNA, 630 bp, BradyrhizobiumColbertium
atgccagtaaccatcctcgacctgatcctgctcggtgtgatgctgatctcaggcctgctcgccatggtgcgcggcttcatgcgggaaatcctgtcgatcgcggcctggggcgccgccgcgatcgtcacgctttactcgttctcgaagctgctgccgaccgccaaggcctatttcaacaacgacacggtcgccagcgtggtcgtggtcgcgggcgtgttcatcggcacccttgtcgtggtgtccgtgatcacggtgcggatctccgacatgatcctggattcgcgcatcggtgcgctggaccgcacacttggcttcctgttcggcctggctcgcgggcttttgatcgtcgtggtcgccttcctgttcttcacctggctggtgccggacaagcagcgcccggactgggtcaccggggccaagtcccgcgtcgtgctccaaggaaccggggattggctgatggccctcttgcctgacgaccccgagaacaccatcttgaagagattcaagaaaaacaaaccagatgatgatcaagctgaatccgagcagcagccttcgggcagtggcgacgggtacagcaagtctgctcgtgacggcatgaagaagctgatcgagaaacctgcggcgcgttga

SEQ ID NO: 3603 - DNA, 1524 bp, BradyrhizobiumColbertium
atgcgacaccctgaccaggacgcccaacttgatctcgatccaaacgccggtccgggtccggccccgctggaggttcaggacgatctggaaggcgatacgctgcgcgaggaatgcggcgtcttcggcatctacggccatcccgacgccgctgccatcaccgcgctcggcctccacgccctccagcaccgtggccaggaagccgccggcatcgtctcctacgacggcagccgctttcattcggaacgccgcctcggtctcgtcggcgacaccttctcccgccgcgaggtgatcgaccgcctgcccggcaatgttgcggtcggccatgtccgctattccaccaccggcgccaccatcctgcgcaacgtgcagcctctgttcgccgagctcaatgccggtggcctcgcggtcgcccataacggcaacctcaccaacggcctgacgctgcgccgcgagctcgtgaagcacggcgcgatgatgcagtcgaccaccgacaccgaggtgatcctgcatctggtcgcgcgctccaagcgcgcccgcttcatcgagcgctatatcgacgcgctgcgcgagatcgaaggcgcctacgcgctggtctcgctgaccaacaagaagctggtcggcgcgcgcgatccgcgcggcatccgcccgctcgtgctgggcgaactcgacggctgcccgatcctgacctccgagacctgcgcactcgacatcatcggcgcgcgcttcgtgcgcgacatcgagccgggcgaagtcatcgtgttcgacgagaacggccaggacatccacaagccgttcccgccgatggctccgcgcccctgcatcttcgaatacatctacttctcccgccccgactccatcgtccacggccgctcggtctacgaggtgcgcaaggccttcggtgcgcagcttgcgcgcgagagccacgtgccgatcgacgtcgtcgtcccggtgccggattccggcgtgccggcggcagtcggctacagccagtattccggcgtgccgttcgagctcggcatcatccgcaaccactatgtcggacgcaccttcatccagccgacccaggcgatccgcgaatccggcgtgcgcatgaagcactcggccaaccgcgccgcgatcgaaggcaagcgcatcatcctgatcgacgattccctggtgcgcggcaccacctcgaagaagatcgtgcgcatgatgcgcgatgccggcgccacagaagtccatttccggctcgcctcgccgccgatcctctatcccgattattacggcatcgacctgcccgaccgcggcggcctcctggcggcgacgcattcgctggaggagatgcgcgagatcatcggcgcggactcgctggcgttcctgtcgatcgacggcatgtaccgcgccatgggagagcccggccgcgacccggccaacccgaaattctcggatcattgcttcaccggggcgtatccgacccacctcaccgaccagacccagaccgagccgcagccgcggcaactgtcgctgctggccgaggcgagctga

SEQ ID NO: 3604 - DNA, 741 bp, BradyrhizobiumColbertium
atgaccaagcccctcgccaaccgcatcgctctcgtcaccggcgcctcgcgcggcatcggctatgccaccgcaattgcgctggccaaggccggcgcgcatatcgttgcgacggcccgcacgcaaggagggctcgaagagctcgacgacgagatccggaaggacggcggcagcgccaccctggtgccactcaacctcaccgattccgacggcatcgcgcgattgggcgccggcctgcatgagcgctaccgcaagctcgacatcctcgtcggcaatgccggcgtgctcggcccctcctcgccgatcggccatatcgagctgaagaccttcaacgacgtgatggcggtcaacgtctccgcgaacttccagctgatccgctgcatggagccgctgctgaagcagtctgacgcggggcgcgccgtcttcattacctccggcgccgccaacaaggccaccgcctatgtcagcccctatgccgcgtccaaggccgcgctggaaacgctggcccgcgcctgggcgcaggagaccgccaactcgaagctgcgcgtcaacctgttcaaccccggcccggtccgcacccgtatgcgcgcgaccctgatgccgggcgaggatccggagacgctcgacacgcccgagcaggtggccgaattcatcgtgccgatgtgcgcgccagactggaccgaaaccggcagattctacgattacaagacccgcaccttgatgagcttccgcgcaccggcctga

SEQ ID NO: 3605 - DNA, 2541 bp, BradyrhizobiumColbertium
atgacaaacgataatggaagcgccccaaattcaggtatgttgtcatccggaagacatcgcaggtcattctttgcgcatctggttgatctttatcaaaaggaagtcgcgtttcgcgggatgacagatttcgctgttatcggcgtggtagtccttgttttcgtaagcccccctaacaaggttgtttggccttggtcgaacggaactactggccaaaactccgcttccgtattgcaaccttccccaagcagcgcagtcaatcaatcgactacgcctcaaacaacaacggcagcgggaccggttattccaattccgttccaagacgtattcaagcagccaaagctgtctctcggatttctgtttgacatcgacgacactgcgttcaatcaatcactgcctgcggatcgcgaaaaattaatagctgcacgcttctcaattgcacggcagaactcaggcgaagccatcgaaatactgcggagcgctacgccatccgatcccaatgtgatgctattacggggtgctgcatttatcttgaatgataacgcagacggcaaccgaaccgccgagcttctttggagacaagctgtcgcgggagggaacaggcaggcttacgcattgcttggccgattgctgatttcgggtcgagaaggcgcaacgaataatgcgaccgaaggattgcgtttgatcgaggctggtgccgctgcaggcgaccctcaagcgatgcgttttgctgggatgggctatctgagtggagagtttggccgctttgacgcattcaagggtagcgaatttttcaaacgtgctgctgatgccggagacggaatggccgcgggattctatgctaggctgatggcggacggaattggtgttcccgctcctgatgtaaagcaagccgaagcctatctgcgccgtgcggcgaatagtggtgttacgctggcgcaatatgcgcttggggcgtggctgcaatatcaggccgcaaagggtctcgtgccggatccgaaagaaggcgttgaatggctcaccaaggcatatgaaaaaggcaactacatcgcctccctgccaaatctatcatacatatactttaacgggaccgcgccgccctggaacaatccggctctcggcgcgcaatggattcggaaatgctccggattcaagatggccgactgtcatactaacactgcgtacgcctacgaagtgggtcttttcggctccgtgaacttactgatggcttatgtgcaccgtgaaattgcgagacagatcaatcccaatgtaggtgattacgctcaaaagctgttcgcgcggttgagcacggatgaaaaagagcaagccccgaagatactgaatgcgacattagcagccttaaaagctcagccccccgtcatcggccttcaatacaagggtatgccaccaataactccgccagtcgcagatattgtcggagcgcccgccatcaaacaacagccaagtccccaagcaaacgtctcctccggagcggatgcaagggcaaataaggcctcacaacttaccgaccaaggaaagtacaaggaggcaatcccggaggcgacggaagcgctcgtagaattcccgtcgaatgcagtggctctgttcgcgcgagcaagatcttatcttgagttaggcgaatatgatctcgcgttagccgactacaacgtacttattcgtcaggacgccagaaatgccaagtatcttaatgatcggggactcgcttattttcgaaagggcgccaatttctttgataacgcgctggcagactacaccttggcactgagttcgactacgtcagatgcttttaaatcggtttttcattccaatcgcggtctgatctacagatctcgcgcgcaatatgatcaagctttagctgaatttaacgaagctgagagattggacccaaagaatggcggaatctatatagatcgcggtcgagtgaagctgctgcagaaaaaatacgacgacgctatagttgattttaatcgagcaatcgagatgaagccgcaatccggcgacggctacttttaccggggattgacaaatgcgaactcgatctatgatcggcaaggcgactgctctaactcttcaggaagttcgcgagcgactattggcggatcgtgcagtttaccgctggactttgatggcgccttaaaggatctcaaggccgcgatatcgagagactccaataattccgaatatcactttcaactcggacgcttgctcgccgcagccaagaataatgatggcgctctgcttgcttattccaattcgatcaaattcagagcgacatccaatggcttcctcaaccgcggaaatgtctacgcagatatgaggcaatacagtcaggctatgtctgactatgacgaagccataagacttgattctcgaaacaaatatgcatggggtggccgcgccagcttgtttgacaggtttggcgataaacagcgagccatatcagatttcagatatgcgctgagcattgatcccagctatacttatgcaaaggaggggttgaggcggttgggtgttcggccatga

SEQ ID NO: 3606 - DNA, 1203 bp, BradyrhizobiumColbertium
atgacaggcctaaattgggttggtcgtttgggcatcgtcatagccttgatcgttatcgaaaaagcgtcccctgctctggcttggttcttggtggtagccgcaggattggcggcaacatgctatctgctcttcaaaggcaacttccttccgaggtttatcatggatccgctcgagcgcctaacacgcaaacgtgagctagttgatacattcgaatccaaaaccaagaagcttgcaatcatcgacgataaaactctggcaagtgagctcaaatcgaaggtgatcggccaaaatggcgtcgtagatagtctcgcaacacgtttaaggcagcgactggccgcgcgccgcccgagcaagccaatcgctgtgatgtgcttcgccggtgctcccggcatcggtaagacatatcttgccaaagtgttggttgagcaactttatggcagcgccaaacaccttcatatgatcgagatggcgcagttcgatcaggctcatgccgcagcaacactgttcggctcccccaaaggatatgtcggatcgaacgagccgggacagatttcaaaagcgctgcgtgacattccaaattccatcattttgctggatgagtttgagaaagcccaccgtgatattcacaagagattcctgtctgcttggaacgacggctttgttacagaacttagcgacggatccaaatatcccacaaacgaggcaattttcattctgacagtcaatgctggcgcgcgacgcattgccgaatacgctcgcgatccaagcgtgacacaagatgaacttaacaaatttgctaagggagccttgcaagacgctcagttcgcccctgaagttttgtcgcgcatcgacgatgtttttgcatttcgtgaactggcaggcctcgatattgctcgtgtcgtcgcccttgagatggagcgcaagacgaaagagtatcagcttgagatcgccggtggaggcattgatccagatattctttattcagcaatcgatgcgttcactcagcgcaagcccgaaggaggcgttcgggaaatcgcaagacatatcgaagatctgatagcggatggattgatcgaagcaaaagcaggcggtgcgaacttggttgagttcgtagctgacggtgagcgcgtattggtcgtcccggtggatgaaagtctgccagcggaaaaaccaacacctgccaagacggaacctacaggctga

SEQ ID NO: 3607 - DNA, 120 bp, BradyrhizobiumColbertium
atgacggcgtccgcctgcttcatcagtttcttctgcaatcgcgcgttctggaatgcgcgcgcgccggcgccgctgctctgcaaagtattctctccggaggatcgcccggagaaagtctaa

SEQ ID NO: 3608 - DNA, 432 bp, BradyrhizobiumColbertium
gtgctgcgtccatggctcgtcaaggacgaaaatgagaagctcgccaagcgcgccgaagcttgccttatgcgtgtgggggtgccgccggaatggtgggaccgtctggcaagcgatctgccctacggtcatcaaaggcgtgtcgagatcgcccgagcgcttgcgcaagatccgcaagtcctgctgttggatgagccggccgctggtctcaacccgagtgaggctgccgaactgggccggcttatcgtcagtatcgggcaggacggcctagccgtcctcctcgtggagcatgacatgcgcatggtgatgtcgatttcctcccacatcgttgtgttgaacttcggctgcaagctggcggaaggaacgcctgcgcaagtatccgcaaacaaggacgtcattgccgcgtatctcggcaatccccaggaaatagtatga

SEQ ID NO: 3609 - DNA, 729 bp, BradyrhizobiumColbertium
atgattgaattgctcaagatcgaagacctcatcgcaggatacggcgccatcgatgttctgcatggtctgtcgctttccgttcgaggcggcgagatcatgtcaatcatcggcgcgaatggagcgggaaagtcgaccttgctcaacactatctccggatttgttcgaccaaaggcgggatgcatccgatacgaagggtgctcgatcgtcgggcaagctcccgcactgatcgcgcgagccggcatccgtcatgtgccggaaggacggcgcgtcttcgccgatatgacggttgaagacaatcttcttcttgggggctatggccggccgcacgaacaaaccttgaagcgggtcgaggagatctatcaactctttccaagattggccgagcgccgcaagcaggcagccgggaccatgtcaggtggcgagcaacaaatgctcgccattgggcgtgccctggccgcggatcccaaggttctgatgcttgacgagccttcaatgggtctcgctccgctcatcgggatcgagatattcaggcttatcctccgccttcgggacgcctacggactgggtattcttctcgtcgaacagaatgcccatgctgctctgcgtatcgccgacaaagcctgcgtcctatctctaggtcgcgttgtgaaacgtgatgctggatctgcactcctcaacgatcctggtgtcgtcaaagcgtttcttggagggcatgctgacgttgcctag

SEQ ID NO: 3610 - DNA, 198 bp, BradyrhizobiumColbertium
ttggcaaaatcgtattggtgccgaacctacgaccatgaaagcgaactcgatcccggccttgtgccagcaacgttcgtccacacgcacgattatgccggattgatctcagagcgctttgaaaacacttcggacgcggagctcgactgcgtacgcggccacaaaaccatgaaaatggcgctgtcgctgataaaaccgtaa

SEQ ID NO: 3611 - DNA, 1014 bp, BradyrhizobiumColbertium
atgcgcgcggtgataggacatcgcttcgggggaatcggcgacctcgtctacgatgacatcagctcgccggcgatcgagcccggtaccatccgcatttcggtgcgtgccgcgggcgtaagtttcgcgaacctgctcttcatcgccggcaagcatcagaacaggccgactattccgttcgtcccgggcaccgagatcggcgggatcgtcagtgagatagctcccgacgtccggtcagctctgaacgtcggcgaccgagtctgcgccggacttccgtccggcgggttcgctgaagaagcgatagttgatgctgccaacgtcttccgcatccccgattccttgagcttcgaaggctcgacacttttcccgaccatctacgcgaccgcttatgccggcctcaagtggcgggcgagccttcaatcgggcgagaccctgctagtccacggtgcggcaggcgccagcggtttggccgccatcgaggtcgggcgcgccctgggcgcaacggttatcgcgaccgctggaggcgaacggaagatcgacgcggtcaagcggtacggcgccaatcacgccatcgaccaccgcagtggcggtttccgggatcgcgtgctggacatcaccggcggtcgcggcgccgacgtcgtattcgatcctgtgggcggcgaagtcttcgacgaatcccttcgctgcgtcgctccccttgggaggttgattccgatgggcttcgcctccggccgcatccctcaaattcccgcaaacataatcttggtgaagaacctcaccgtgatcggtctgtattggggattctacatggcgtggggcaagactaaggcggatgccgcgctacgcgaaaaggtccgcatcctatacgaagagatgtttgagctcttcgaagctggaaacttgcgggcgcccatcgatagttcgctcccactagcgcaattcgccgccgcgatgcgccgcgtcgaaagccgcgagggcattggcaaaatcgtattggtgccgaacctacgaccatga

SEQ ID NO: 3612 - DNA, 774 bp, BradyrhizobiumColbertium
atggcagaccgtcaaaagctgttgatcgagaacgacgggccgatcaccgtcatcaccatcaatcggcctggtgtccgcaatgctttggacagcgagaccgccgcggcgctcgcgaaggcgctgcgggacttcgaccagagcgagggtcaggccaccgccgttctgacgggtgcgggtgggcatttctgcgcgggcgctgatctgaaagagctcgccgcgggttacgaatacaagccctgggccggcgatccggacggcccgtgccatggcgttttgtcgaagcccgtgatcgccgccgtcgcgggctacgcctgcgcgggaggtctcggtctcgcccttagatgcgatctccgcgtcgccgaggagaccgccacattcgccgttctctctaggcgatggggcattccgatgagcgacggaacgaccgttcgtttaccgcgcctcatcggtgcaggcagggcgctcgacatgctcctgacggcacggaagatctccgggacggaagcagttgcgatcgggctcgccgaccggctcgtccttacgggccaggctctgagcgcggcggtggaactcgcacgccagattgcggcgtttcctcaaattgcgatgcgatccgatcgtatgtcggccatccgtcagtggaacctttcggagaaggacgctatcggcttggagaccgaactttccgtcgaagcccgcgcgaaggaagcacaggccggagccggtcgctttgcatccggagctggccgccacgggcatgtagaaaagaattga

SEQ ID NO: 3613 - DNA, 963 bp, BradyrhizobiumColbertium
gtggcggagctcaacgacaaaggcggcattcttggacggcagcttgatctcgttgtggttaacgcgggggcgaccgatgccagcgccgccgtcgccgccgcaacggccgccggcgtagataaggtcgatgtcgttgttgcgatggtgacgagctctgcgaggaagctcgttgcgcgggaactgcacaagcgccgcgttccgttcgtctacacgccgcagttcgaaggaggggcgcttgatcccggggtcgtcacagtgggagagaccgccgaggatctgctgcggccgggtctttcttggctcgccacggaaaagcacgccacccgatttttcctcttgggcaacgactatgtctggcctctgcaatccatggtgcgggcatgccaattgatcggcgacatgggctgctttgtcgttggtagcgcggtggttccgttcggagtcgaagaccacgagcagctcttgagccagatttcccgcgcccgcccgcacgtggtcgtatcttggatgttggggcacgaggctgtcgttttcaacagagccttcgctgctgcagggttatcgtcacgaattctgcgtttcagcagcgcgattgacgaaacgatcctctatgccatcggtgaagcctgttccgcggatctctatgtcgcttcgggatatttctcctgtctccgctctcacaacaacgccgcgtttttggagcgctatcacacctattttggcgacacgccaccgcccatcaacgcgttcggtgaatctctctacgaaggtgttcattgtattgcggggctggtggaggcggcggacagcctgcatccttcggatcttcaccggaaagtcgggcgtgcggcgcaagaacggacggcgcgcggttttaagaaccatatcgttgcaggtgcggcccatccgatccacctggcggttgctgaggggcacgatttccgtgtgatcgcgcgccggtaa

SEQ ID NO: 3614 - DNA, 198 bp, BradyrhizobiumColbertium
atggccatgactgaagacctttccttccgacgcaaacccctgacccccgaacagcgccaggcccgcgacgcggcacgccggatcgaggccgagaaggccatgcgcgaccatgaagcggcgcaaaaggcgttttacgccaacaaggaacggctgagggccgagcggcttgcgcgcgaagctgccgcctcaaaatcctga

SEQ ID NO: 3615 - DNA, 720 bp, BradyrhizobiumColbertium
atggcgcccgtgcgattcatgacgtggaatgtgcacggtacgttcaatctcaatccaaggttcgatctggagggtgtttgttccatcattcgcaagtggtcgccggatgtcgtcgcactccaggaggtggattcgcgatcccggtcggacgatccatttgcgaagctggcgagtgtcgtcggcgatcaccgtgttcacgccaagtcgatcgtcacgaaggatggcgactacggtcagatgctgctgagtcgcttttcgttctccagcgtgcccgagatcgtcgacgtgtcgtatcaggagcgggaaccacgccgggccattgcgacggatttgctgacgcctgccggcgatgtgcgcgtggtggccacgcatctcggcttgagcattcatgagcgctattcccaggcacgcgcccttgtgagcctggtgaaaccggtgagaaccgtcgtcctcggcgatttcaacgactggttctgggtccggtccgtgcggcgcgttctcgcacaggcctgtcccaaccgtacgcagctgcggactttcccgtcacgcctgcctctgatgcggcttgaccggatctatgccacgcccgacagccggatcgggaaagtctggaccgacggagaggcgagggcctattcggaccatctgccggtcattgcggagatcgagattccgcaaacggaaggtgccggtcatccggatcggtcgggcccgggatga

SEQ ID NO: 3616 - DNA, 2157 bp, BradyrhizobiumColbertium
gtggaacccgttgcttgttcgaggcgtttagacgcgaatcccagttgcgaggtccacctgcttcagactgcatcgacactgatccccggcgacaccgtctggcggcggtgcgaagccgctcgcgtagcggttctgaacgatgcggccgcatatttcgcggccctgcgggagacgctgctggaggcgcaggacgtcgtctacatcatcgggtgggatatccatagcaagaccccgctggtcggcgcgtctgggcgggcggatgacggattgccggagcagcttggtccattcctgcgcgcgctcgttcggcgacgtcccgccttgcgcatcaacattctggtctgggatttcgtctcgttctacgcctccgagagggaatggaattcggcggcgaagttcaccgcggacacggacgaccgcgtgcggtttcacctcgacgcgacgcttccgtttggttcggcgcaacaccagaagatcgtctgcgttgatggctcactggcattcgtcggcgggctcgatctgacggtcaggcgctgggacacgagtgaccaccgcgccgacaatgcaatgcgctgcgatccccagcggaagcgatacccgccgtttcacgacgttcagtgcctggtcgacggggatgttgcggagcggctgttcgaactcgccgaggaacgctggcgggcggcgggccaacaggctgatgaacggcgcgtcctgaagagcgctcgctggccgacgaatgtaccggtcgaaaccgagcacttgcctgtgggtattgccaggaccgatgtggtctctcctgcgggctcgacgatcagggaggtcgaacgctcgttcattgcaggcatccggtcggcgacgaacttcgtgtacatcgagaatcaattcacgagcgcgaccaggatggcgcgcgaactggcggagcagatgcgtcgcgtgccgtcgcttcgcgctctgatcgttgcgcccaaactgcattcctcgtggctggaatcccaggcaatgcagaacggccggggcgccttcatggactgcttcggggagactggcgtcgccgatcgcatccgtttcgtctacccggtctcgcgcagcggaaacaaggaagccgcggtgatggtccacagcaagctcatggtcgtcgacgaccggatcctgaggatcggctcggccaacctgaacaatcggtcgatgggcgccgacagcgaatgcgacctgatctttgaagctgcaacggaggagcatcgggatttcatcacctcggtgcgccgtcgcctgatcggccatttctgcggtctcgacgaacacgccatcacgcagaacgagcatcgcctgttcgccctgctggacgaggtgtcgaaagctcgtggcccccagacgttgcggaaagtcgagtcttcggttctaaccagtacgctggccaccctggttcagccggtggcggaccctgagctgcctcttcatctggagcgcgcggcctctcgcatgtggagcacgaaaacgttaatcgggatcgcctcaatcgccgtggcgcttttcgggctggcgatggcctggtcgtacacctccttgagcgatttcgccgatgcaggtcatctttcgacgcttctgtctgcctattcgcagtccatctgggggccgccattggcagtcgcggcctttgtcgttggcgggctcgtcgtctttccagttctcgtgctgattgcagcaactgccgctgcccttggcccatggctgggtttcgtcacggcgatggcgggcgtcctggtcagtgctttgatcctttttgcgatcggccgcgtcctcggccgagaacgccttcagcgtctgttgggccgacgtgccgcgcgcatccaggagcgtgtcgttgggaagggggtcgtggcggttgtcgtcatccggatgctccccgtagcgccgttctcagtagtgaacgtagtggccggtgcgagcacactgcctcttcgtgactttatcctcggaactctgttgggcagcacgcccggtatcctcgccatggcggttctgggctcgcagatcgcagaactcgccagaaatgcgtcctggagcaacatgttgctgctggcactggcattcctcggctggctcgcactctgcgccggcgcgcagttcgttacgacgtggctcgccgggaggcgctga

SEQ ID NO: 3617 - DNA, 297 bp, BradyrhizobiumColbertium
ttggaaacgaccatcatcggagaattcgacacgcgccgcggcgccgagctcgcggtcgagcacgtcgtgcaggaatgcggcgtgccgcgaggcgacgtcttcgtccagcccgccggcgatgcgaacacggtgggaacacgcccggcgggccctgacgtcaaggctgcgcccgcaccggaggggcgacaaaagctcgaaggtgtgattgaagtctccgtcgatttccacggcgacgccccggagaaaatcgccgatgccttgaggagcgcgggcgcaaagactgtccgcaccaaatga

SEQ ID NO: 3618 - DNA, 225 bp, BradyrhizobiumColbertium
gtgatcgagtgcgaacaacgggcgagccggggccgagttcctgaagccgcgcgcgcagcatatctcgaagtcgaagatgacggattggcagtgagcggcgatgatcagaaccgaattattccgaacaggagcagcagcgccaccgtgatgaagccggagatcagcagcgaaccgagacatcccagccggttcgagaaaaagaagaacatgcgttgcccgccatga

SEQ ID NO: 3619 - DNA, 609 bp, BradyrhizobiumColbertium
atgtcacagcagagcagcatgcatcactatctgaattgggccaaggagcggatcgacgaaatggatgccgcgttggcctcgttcgaggtcaaggccggccaggccaaggttgagtccaaggcgaagaccgatcagttcctgttcgatctgacgaagcgccgcgacgagtttcaggagatgctcaaggccaaggcgcaggccggcgaagcggcctgggtggaggccaaagccgacctggaaaggcagtggaatggattcgaagcgcaggtgaaggcctacttcgaaggcgcgggcaaacagctcgagcagcagcaagcgacgttcaaggatattgccgctgcacaggccagggcctggcgggaggccgcagacaaaatcggcgaggccgcgggcaaggtggccgcagcccgcaccggggacatcgacgcggcgctcaagcagatgaaatccgatgcctccgaagccgaagcgcgccttcagaagctgaagcaggcaggcagcgagtcctggtcggtgatgagcgccgcgctcgccgaatcccggaaggcgttcgatcaggcgaacaaggccgcctgggaggcgctgaagggcgctgatacgaagagctga

SEQ ID NO: 3620 - DNA, 981 bp, BradyrhizobiumColbertium
atgtcgctcgattcggacatcatcgtcgatcgccgcaggatccgccgcaagctgacgttctggcgcgtgatggctgcgctgatcgcggttgcggcgattgcaagctttgcgctgatcgcgacaccgggtgcgcgcggcaccttcgcgtccgtcggctcgatcgcgcgcgttcatatcgatggattgatccggagcgattccgatcgcacgcaggcgctggagcgcctcgagaattcccaagctgccgccgtcatcgttcatatcaactcgccgggcggcaccaccgccggctccgagcagctctacgactcgctcgtccggctgaaggcgaagaagccgctcgtcgtggtggtggagggcttggccgcctccgggggctacatcacggcgatcgcgagcgaccatatcatcgcgcagcagagttcgctggtcggctcgatcggcgtcctgttccaatatccgaatgtttccgagctcctgaagaccatcggcgtcaaggtcgaggaggtgaagtcctcgccgctgaaggctgcgcccaacggattcgagccgaccagtcccgaggcgcgggccgcgctcgacgcgctggtcaaggattcctacgcctggttcaagggaatggtgaaggagcggcgtggcatggatgacacgcagctggaaaaagtcgctgatggacgcgtcttcaccgggcgccaggcgatcgatctcaagctgatcgaccagatcggcgacgagaagacggcggtgacctggctggtcgagcacaagggcgtcaagaaggggcttccggtgcgcgattacaagctccagccgctttttggcgacctgccgttcctcaagacggccgccgccgtaatgctggaagcgatcggtttgggttcgattgcgcatcaaatcgggcaaaccggcctcgtacaggcggtcgatcgcctcggaatggatggaatgctggcgctgtggcagccggctgcgtcaaactga

SEQ ID NO: 3621 - DNA, 306 bp, BradyrhizobiumColbertium
atgatcaaatccgaacttgttcagcgtatcgccgagcacaacccgcatctgtaccagcgggatgtcgagaacattgtgaatgcgattctcgaagagatcgtagcggccctcgcacgcggtgatcgcgtcgagctgcgtggcttcggtgccttctcggtcaagcatcgcccagctcgtgcagggcgcaatccacgcacgggcgctcacgttccggtcgatcagaagagcgttccgttcttcaagaccggaaaggaaatgcgagagcggctgaaccgcggccatccggatccgggggcggccgactaa

SEQ ID NO: 3622 - DNA, 393 bp, BradyrhizobiumColbertium
atgcgaaagttcctgaccgcgctgatcgtgattccgctgggcgtgatcctggtggcgttcgcggtcgccaaccggcatttcgttacggtttctttcgaccccttcatttccgaagatccgtcactgtcgatcacgttgccgctgttcctgctgctgatcctggtggcggccattggggtcttcgcgggaggctctgccgtctggttcggccagcggcgctggcggcgcgcggcacggcggaatgatgcggaggctcgggcggcccgggccgaactggccgggctgcgtgcccaggcgaccgcagcgaagcccgactccgagcgccttcccgttccctcgggggtgggcctgtacgggcccatcgggcgagacaagcagcgcgcgacgttgtag

SEQ ID NO: 3623 - DNA, 672 bp, BradyrhizobiumColbertium
atgtccctgctcgtcaaaatctgtggcctgtcgacacgcgagacgctcgacgtcgcgctcgacgcgggcgccgacatggtggggctcgtgttctttccaccgtcgccgcggcatctctccctggaactcggccgtgagctcggccgccaggtgaaagggcgcgcgctaaaggtggcgcttaccgtcgatgccgacgatgcgacgctcgacaacatcatggacgcgttgtcgccagatgttctccagctccacggcaaggagagcgtggcgcggctgcgtgacatcaagcagcggttcggccgcccggtgatgaaggtggtcccggttgcgacagcagccgatctcgccgtgctgccgggctatgccgcggtcgccgaccgcatcctgttcgatgcgcgcgcgccgaaggatgcgacgcgccccggcgggctgggggagccgttcgactggcacctcctggaaaagctcgatctcaaattgccctacatggtctctggcggattgcgcgctgacaacctcgccgaggccctgcgcgttacccgcgcccgcggcgtcgatgtctcttcgggggtcgagagcgcccccggcgtcaaggaccccgagatgatcaaggccttcatccgcgccgcgcgcgcaagccaagatgcaagtcaagaatcgagcgcccgatga

SEQ ID NO: 3624 - DNA, 1215 bp, BradyrhizobiumColbertium
atgaacatcgccaaaccaaactcctatcgcagtggcccggacgagcgcggccatttcggcattttcggcggccgcttcgtcgccgaaaccctgatgccgctgatcctcgatctggagaaagcctacagcgaagcaaaggctgacccggcattccaggccgagatgaacggctacctcaagaactatgtcggccgcccctcgccgctctatttcgccgagcgtctcaccgagcatctcggcggcgccaagatctacctcaagcgcgaagagctcaaccacaccggctcgcacaaggtgaataacgtgctcggccagatcatgctggcgcggcgcatgggcaagaagcgcatcatcgccgagaccggcgccggccagcacggtgtcgccacggcgacactgtgcgcgcgcttcggcctcgaatgcgtggtctatatgggcgccgtcgacgtcgagcggcagcagcccaacgtcatccgcatggagatgctgggcgccaaggtgatgccggtccagtcgggcacgcgcacgctcaaggacgccatgaacgaggcactgcgcgactgggtcaccaacgtgcacaacacgttctattgcatcggcacggtggccggtccccacccctatccggcgctggtgcgcgacttccagtcgatcataggtaacgagaccaaggcgcagatgcaggagatcgagggacgcctgccggattcgctgatcgcctgcatcggcggcggttcgaatgccatgggcttgtttcatccgttcctcgacgaccccgccgtcgagatcttcggcgtcgaggccgcgggccacgggctgacgcagcttcacgcggcctcgatcgcaggtggccgtccgggcgtgctgcacggcaaccgtacgtatctcttgatggatgccgacggccagatccaggacgcgcattcgatctcggccggcctcgactatcccggtatcgggcccgagcattcctggctgcacgaggtcggccgcgtgacctatctctccgcgaccgatgacgaagcgctcgccgcattccaactgctgtcgaagctcgaaggcatcatccccgcgctcgagcccgcgcacgcgatcgccaaggtggtggagctcgcgccgaagcggcccagggatcacctgatggtcgtcaacctctccggccgcggcgacaaggacgtcccgcaagtcggcgacatcctgaggggcaagaagtga

SEQ ID NO: 3625 - DNA, 837 bp, BradyrhizobiumColbertium
gtgaccacgcgtattgacacccgttttgccgagcttgccaagcaaggccgccccgccttcgtgaccttcctgatggccggcgatccggatccggcgacctcgctcgagatcatcaaggcgctgccgaagtccggcgcggacgtgatcgagatcggcatgcctttcaccgacccgatggccgatggcccgtcgatccaggccgccggtctgcgcgcgctcaaggccggcatgacgctgaagaagacgctcgagctcgtgcgcggcttccgcaaggacgacaacgcgacgccaatcgtgctgatgggctattacaacccgatctacatctacggcgtcgacaagttcctggtcgatgcgaagagcgctggtgtcgacggtctcatcatcgtcgatctgccgccggaggaggacgacgaactctgcctgcccgcgctgaaggccggcctcaacttcatccgcctggcgacgccgacgaccgacgacaagcgcctgccggccgtgctcgccaacacctcggggttcgtctactacgtctcgatcaccggcatcaccggagcggcagccgcggactccaccgctgtcagtgaggccgtggcccgcatcaagcgacataccaggctgcccgtgtgcgtcggcttcggcatccgcacgccggagacggcgcgcgctattgcctcgcatgccaacggcgcggtggtcggcaccgcgctcgtcgatgcgctcaagaacagcctcgacgccgaaggacgggcaaccgcaagaaccgtaaacgcggtcgcggaattgaccgcggccctggcccagggcgtcaagggcgcgcaacaggcggcggaatag

SEQ ID NO: 3626 - DNA, 942 bp, BradyrhizobiumColbertium
atgaactggcttaccaacgtggtccggccgaagatccgcaacatgctgcggcgggagacgccggagaacctgtggatcaagtgcccggattccggacagctcgtgttctacaaggacgtcgaggccaaccagttcgtcattcccggctcgaactaccacatgcgcatgggcgcggtggcgcggttgaagtcgatcttcgacaacgagacctggttcgatgttgcgctgcctgaggtcacgcccgatccgctcaagttccgtgacgagaagaagtatgtcgaccgcatcaaggatgcgcgggcgcgcaccaatctcaacgatgcggtcaagatcggctacggcaagctcgaaggcgcagcggtcgtcgtcgccgcgcaggacttcgacttcatgggcggttcgctcggcatggccgcgggcgaagcgatcgtgcgcggaatggagctcgcggtcgagaagaagtcgcccttcatcatgttcgctgcatctggcggcgcgcgcatgcaggagggcatcctgtcgctgatgcaaatgccgcgcaccacggtggcggtgcagatgctgcgagaggcaaagctgccctacatcgtcgtgctgaccaatccgaccaccggtggcgtcaccgcatcctacgcgatgctcggcgatctgcacatcgccgagcccggcgcgctgatcggctttgccggtgcccgcgtgatcgagcagaccatccgcgagaagttgcccgagggtttccagcgcgccgagtacctgaaggagcacggcatggtcgacatggtcgtgcatcggcacgaattgcgccccaccctggcgcggctatgccgcctgctgaccaaggcgccggcgcaggacagcgcatcgaagccggtgcagccggtcgctagcccggcgcagatcgtatcggctgccgagacggcgccggctgcgccgcacgcgtga

SEQ ID NO: 3627 - DNA, 1344 bp, BradyrhizobiumColbertium
gtgaacgcgtccgctgacagcggaaagacaccgcttcacgaattgatcgcgcggctgtctgccctgcatcagaaacgcatcgatctcgggctcgagcggatgcaccgcctgctggagcggctcggccaccccgaacgtcagctgccgccggtgatccatatcgccggcaccaacggcaagggctcgacgctcgcctatctgcgcgcgacgctggaggcggctggcctgcgcgtccacgcctatacctcgccctatctcgtccgcatcaacgaatgcttccggctcggccgcgtgggcggcggtgtgctcgtcgacgacgaggcgctgcgcgtcgcgctggaagaggtcgaacgggtcaatgccggcgagcctgcgacattgttcgagttgaagacggccgccgctttcctgctgttcgcgcagaacccggcagacgtggtgctgctcgaagtcggcctcggcggccggctcgattcgaccaacgtgatcgatgcaccggccgcctgcgtgatcacgcccgtcagcatggaccacatggacttcctcggcgatacgctcgcatcgatcgcgggcgagaaggccgcgatcatcaagcgcggcgtccccgtggtttgcgccgagcagatgccggaggcaatggaagtgatcgaggcgcaggcgaagcgcatgcgcgcgccgctgttcgccgcaaacgagagctggcacgtcaacgtcgagcgcgggcgtctggtttattccgacgatcgcggcttgatggatctgccggcgccgcgcctgttcggccgtcaccaattcgccaatgccggccttgccatcgcaacgctgcgtgccgttccgggcttcaaggtcaaccacgcagcgttcgaggccggcatcgtcggcgccgaatggccggcgcggatgcagcgcctcgcctccggcgagctgctgtcctggggcccgcagggctcggagatctggctcgacggcggccacaatgccgagggcgggcgcgtcgcggcggcggcgctcggcgatctcgaagagcgggtgtcgcggccgctggtggtcatcgcgggcatgatggccaacaaggacgcgaagggctttctggccaacttcgccggcctcacccgtcacatcatcgcagtgccgattcccgataccgaaaacgcgatgccggtcgaccgtctggcggatgccgcgcgcagcctcggcatgcgcgtggagcccgcgccgggaatcgaagcggccctgcgtgcattggcaaagctcgcctacgaggcgccgccgcgcatcctgatcaccggctcgctatatctcgccggccacgtgcttgcgatcaacggcacgcctcctgcatga

SEQ ID NO: 3628 - DNA, 741 bp, BradyrhizobiumColbertium
atgcgttttgctgcgattgccgacatccacggaaactacctcgctctggaatctgtcctcgcggacatccgtgctcagggcatcagcgatatcgtcaacctcggagacatgctgagcggtccgctcgatgcgcggcgaaccatcgaggtcctcatgcagctcgacgccgtgcacgtgctcggcaatcacgatcgctatctgatcgaccgcgttccggaaaagatgggctcgtgggatcgtcccgcccatgcagcgctcgacgccgcgcagctcgactggctgcgcgcgcagccgatgacacgcgtgttccgcgatcgggtgtttctctgccacgcgacacccgagaacgatgaggtctattggctcgacactgtgcatcccgacggcgcggtggcgctgtcgccgctcgatcgcatcgagcagtttgcgggagggatcacgcagtcgctcatcctctgcgcccacacccatctcgcccgcgccgtccgcctgcgcgacggccgcgtgatcgtcaatcccggcagcgttggcagtcccggttttcgcgacaagcatccattcccgcatgtcgtcgaagccggcacgccgcacgcccgctatgcggtcctcgaacttgtcgatgcagcctggcaggtgacgttccgccatatcgtgtatgatcacgaggcgatggccgcgctggcgcgtcgcaacggccagccggaattggcgaacgcgctggcgacgggatggatcaagtag

SEQ ID NO: 3629 - DNA, 1014 bp, BradyrhizobiumColbertium
atggaggcgcgctcggtcgatgaaatcccgcgcggcaaggaatggcagtacgagccgaaatgggatggcttccgctgcctgctgtcgcgcaacggcggcaacgtcgatctgcgctcgaagtcgggcgaggacctcgcacgctacttcccggaagtcgtcgccgccgcctcagggctgaaggcggaccacttcacgctcgacggcgagctcgtggtgccgcacggcaaaagcttttccttcgacgcgctgctgcagcggattcatccggctgcgagccgcgtgaagaggctctcggtggagacgccggcgctctatctcgccttcgatctgctcgcgacggcccgcgacaaagggctggctgagaagacgctgcgcgagcgacggccggccctggacgcttttgcggaatcctacctcaaggacagcattttccggctgtctcccgcgacagcgagttacgccaccgccaggaaatggctggcacaatccggcggcggctccgatggaatcatcgccaagcgcaccgacctgccctaccaggcgggaaatcgcgacgggatgcagaagatcaagaaattccgcagcgccgattgcgtcattggcggcttccgctacgccacgaacaggatcgccggacgcaaggtggtcggctccctgctgctcgggctctacgacgatggcggcttgctgcaccatgtcggctttacctcggccatcaaggcggaggcgaaaccagccctgaccgaccggctcgaagcgttgatcggcgagcccgggttcaccggcaacgcgccgggcggaccaagccgctggtcgaccgagcgctcggcgaaatggtgcccgctgaagccgaagctcgtgctcgaggtctgctacgaccatttcagcggcgagcggtttcgccacggcacctcgatcctgcgctggcgtcccgacaaggcgccgcgacaatgcacgttcgagcagctgaagcagaaggtggccgatccgatgaagctgttgaagcgtccgtag

SEQ ID NO: 3630 - DNA, 321 bp, BradyrhizobiumColbertium
atggccgttggcaaggtttccgacgcggatttcgaaaccgaagtgctcaaggcgaacggccccgtggtcgtcgatttctgggccgaatggtgcggcccctgccgcatgatcgcgcccgccctcgatgagatcgccggcgctatgggcgacaaggtgaagatcgtcaagctcaacgtcgatgagagcccgaagaccgcgtccaagtacggcgtgatgtcgatcccgaccctgatgatcttcaagggcggcgagatggcctcccgccaggtgggcgctgcgccgaaggcgaagctgcagcagtggatcacctccgcggtctga

SEQ ID NO: 3631 - DNA, 3510 bp, BradyrhizobiumColbertium
atggtgaaggcgccccgacccatcccggacgaggtgcgcgcgcggcaggcgcgcgcgtcggatccgaccgcctcggctttcgtgtcggccaatgccggctcgggcaagacccatgtgctggtgcagcgcgtgatccgcctgctgctgtcgggcgtcccgccggaaaagatcctctgcatcaccttcaccaaggccgccgccgccaacatggccgagcgcgtgttcaccacgctcgggcattgggtgacgctggacgattccgcgctcgatgcggcaatccgagccgtcggcatcccccacccgagcgcaaaactgcggcgcgatgcgcgaaagctgttcgcctgcgcgctggagacgccgggcgggctgaaggtgcagaccatccacgccctgtgcacgcgcctgctccagcaatttccgttcgaggccaacgtgccggcgcgctttgccgtgatcgacgaacgcgaccagaccgacatgatggaacgcgccaatctgaaggtgctgctggaggccgcacgcgcccctgatagcgtcaccggccgcgcgctgctgacggcgatggcgagcgccgcggatgtcaccttcaaggaggtcgtgcgggaagcgtgtctcagccgcgatcatttcatggcctggaccgacgaggctggtaacgcagaggccgcggcggcgcaaatggcagccgtcctgggtgccgacagcggcgatcgcatcgaggacgtcgagacagagattctcgacggcccgttcctgccccgatcgcgctgggacgacatcgccgctgcgctggaagacggcagcaagtcggacaatgaccaggctgcccggctgcgcgaggcaaaggtcttttccggcagcgctcaggtcgatgcctatctctgcgtcttcctcaccgacgagaaactcccgcgcaaagcggtgctgacgaagaagctttgcgaccacaacccgtccgtcgcgcgcctgttcgaagcggaagtccagcgccttgcaggattgatcgagaagcgccgcgcggtaaccatgcgcgaccgtaccgcggccctgctgcatatcgcgaccgccgctgccgcgaactaccgccgcgagaagcaggagcgcgggctgctcgactatgacgatctgatcgacaagacgctggcgatgctgaaccgcgtcgcctcgggctgggtgcattacaagctcgatcgcggcgtcgaccacgtcctgatcgacgaagcccaggatacgagcccgcggcaatgggacatcgtggcgcacatcatctcggagttcacggccggcgaaggcgcgcgcgaggggttgaaccgcaccatcttcgcggtcggcgatgagaagcagtcgatcttctcgttccagggcgccgcgccccacgaattcgacgcgcgacggcgcgagctgcatcgcaggttcacggcggccgggctaaaattcgatccggtcgccttcacctattcgttccgttcgggcgcgacgatcctgcattcagtggatcacgtcttccgcgatccccagatctacaagagcatccattcggtcgacatcggccatcccctgcacaatgcgctagccgatgcagggccgagcgtgatcgagctgtgggatctcgcagaggccgatgagaggcaggacatcgagggctggcgcgcgccgttcgacggcgtcgcggtcaccagccctgaagtcaagctcgcgcgccgcatcatgaccgagatcaagcggctggtcgagagcggcacgctgacgggacacgaaggcgagcgccgcccgctgcgctatggcgatatgctgatcctggtgcgtcggcgcggcaacgccttcgacgccgtgatccaggcgttgaagcatgctggcgttccggtcgcgggcgccgaccgcctcaagctcaccgagcatatcgccatcatcgacctgatgaacctcgccgacgcgctgctgttgcctcaggacgacctcgcgctcgcggttgcgctgaagagcccgctgttcgggctcgacgacgacgacctgttcacgctggcctgggaccgcaaaggctcgctgcgccgcgcgctcggcgaacatgcgggcacaagcgagaagttcgccgcggcgttgcggcgcctggaagcctgcgagatccgtgcccgcgaggagacgccgttcgcgttctatgcatggttgctcggcggggacggcgggcgcgcgcgcatcctgcgccggctcgggcacgaggccaatgatgcgctcgacgaattcctggagctcgcgctgaactacgagcgcaaggcgccggcctcactgcagggcttcatggcctggctgcgctcggccgacaccgaggtgaagcgcgacatggagatctcgcgcgacgaggtgcgggtgatgaccgtgcacggcgccaagggcctggaggcgtccgtcgtgttcatggtcgacaccacatcctcgcccgcggattcgcagcggctgcgcctgatccacgtgccgcgcggcaatggcggcaaggtcgtggtctgggccgggcgcaaggccgatgatcccaagccggtcgccgaggcgcgcaaggcgatgctcgaggagaccgaggacgaataccgccgcctgctctatgtcgcgatgacgcgcgcggccgaccggctgatcgtcggcggctgcatgcccggcaacatgaagacggtccgcaagctgagctggtacgatctcgtcaacaccgggctcgccggctcgggactggacaagcaggtcatcgagacgccgctgggcaaggcgacccgattcgcccggccggaggatgtcgcagcgctgggcacgcccgcgccatcaatgcaccagaccatcgcgttgccggactggctgcggacaacggctccgcgcgagaccatcgacgatgatcccgtgcgcccctcgggccagtccgccgaggaaggccgcagcgtgagatcaggcgaatcaatccagtcgcgcgcactggcgctgcagcgcggcacattggtgcatcggctgctgcaatccctgcccgacatcgccgtcgcgcgccggcgcgaggccgcgctcggcttcatggcccgcaacgcctcggactggccggaggccgaccgcaccgcgctggccgacaaggtgctcgccttgatcgctgaaccgcgtttcgccgcagtcttcggccccggcagccgggcggaggtcgccatcgcgggcaggctggagcgaccgggtcgccccccggccttggtatcggggcagatcgaccggctggtcgttcgctccgatgaggtgctgatcgtcgacttcaagaccaaccaggcggctccaaggagcgccgccgaggcgccgccggcctacgtccgccagcttgcgctgtaccgggcggtgctgtcgcagctttatccccaaaccccgatcagggccgttctgctctggaccgaggcccttgaatacatggagatttcggcccccgcgctggacgcggcgctggcatcccttcatctcggcgtgagcctccttgacccggcaagaggccgttcatag

SEQ ID NO: 3632 - DNA, 3147 bp, BradyrhizobiumColbertium
atgcgcgttttcagcgtccccatctcagttccgttcctgcgcacggtcgtctcggccctgctcgacggccggctggtcgagggctttcaggcccgcaatgaacctgcgcggctggcggatgccacgctgtacctgccgacgcgacgcgcaatgcgcgtcgtccgcgagatctttctcgacgagatgaaggcagacgccgtcgtgctgccgcgcatcgtcgcgctcggcgacatcgacgaggacgagctcgccttcgccgatgaaggcgagcagttctccggcgcgacgccgctggacattccgccgcggctcggcgagctcgaacgccggctgacgctggcgcagctggtcgcggcctgggccaagggcccggtgctgtccccattggtcgtcggcggtcctgcatcgacgcttgcgctggccggagatctcgcgcgcctgatcgacgacatggtcacgcgcggcgtcgactggagcacgctcgatgggctcgtgcccgacaacctcgatcgttattggcagcactcgctcgagtttctgcggatcgcgcggatcgcctggcccagtcatctcgccgagatcaaccggatcgagccggcggcgcggcgcgatctcctgatcgcggccgaagcccggcgcctgaccgcgcatccgaacggaccggtgatcgcggcgggttcgaccggctcgatgcccgccaccgcgaaattcctccacgcggtcgcatcgctgccgcatggagcggtggtgctgccggggctcgacaccgatctcgacgacgatgcctggcgcagcatcggcggcgtgcgcgatgcgctcggcaaattcgcggagcatccggcctcaaaccatccgcaatacgccatgcatgcactgctggatcgcttcggcatcaagcgcagcgatgtcgagattcttcagccgccggccaaaggtggccgcgatctgctcgcctcggaatcgatgcgaccgtcggccaagacggaggtctggcacgaccggctgaagcagcctgatgtcgccgcgaggatcgccgccggcatgacgaaccttgcggtcgtcgaagcccccaaccccgagatggaggcgctcgccatcgccatcgccatgcgcgaggcgcgccatctcgacaaatcggcggcgctggtgacgccggatcgcgcattggcgcggcgggtgatggcggcgctcacccgatgggatctcgctttcgatgattccggcggcgatgtgttgatggaaacgtcggccggcgtctttgctcgcctcgctgcggaggccgcgaccaagggcctggagccgccgacactgttggcgatgctgaagcatccgctgtgccggctcggccgcgcgcccggcgcatggaaggcggcgatcgcgggactcgagctcgcgctgttgcgcggcacgcgcccacccgcgggcaccgcaggcctcctgcgcgaattccgtcgctttggcgaggagctggcaaagctgtggcgcagcgagatgtccgcgctgcataaggccgagccacgcgcgcgcctcaaggcggaggatcttgatcgcatccaggcgctcatcgaggtcttgcagaaggcgctggcgccggtcgagagcctcccctcatcgagatcatacgacttcgccgagattgcgcatcggcatcgcgaggtcatgatcgagctgtcccgcgacgagcaggggattcctttcgccttcgaggatcgcgatggtctcgcactcgcgaatgccttcgacgacctcctgcgcgggggcacgaccagcggattgatggtgccgctgcccgattaccccgacgtcttccagacggcgttcagcgaccgcgcggtgcgccggcgcgacagaccgggcgcgcgcttgcagatctacggcccgctggaatcccgcctgatgcaggccgaccgcatcatcgtcggtggcctgatcgaaggtgtctggccgccggccccgcgcatcgatccctggctcagccggccgatgcggcacgaactggggctcgacctgccggagcgccgcatcggcctgtccgcgcatgatttcgcgcagttgctcggcggcgacgaggtgatcctcacccattccggcaaggccggcggcgcaccggccgtggcttcgcgcttcctgcaccggctggaagcggtggcaggcgacgacctctggatggcggccattcgcgccggcgagaaatacgtgcagttcgccaccgcgctggaccagcccgccaaggtcgagccgatcaagcaacccgagccgcggccaccacgcgcaacgcggccgacaagcatgtcggtcaccgcggtcgaggactggctgcgcgatccctacacgatctacgcaaagttcatcttgcgtctcgctgcgctcgatcctgtcgacatgccgctctcggccgccgatcgcggttccgccatccacgaggctcttggcgagttcaccaagacttatgccgggcgtttgcccgacgatcccgcccgtgtgctgcgcgccatcggcgagaagcactttatgccgctgatggagcgccccgaggcacgggcgctatggtggccgcgcttccagcgcatcgcgcgctggttcggcgaatgggagaccgcgcggcgcgatgcgatcgagaccatcgcggctgagacacgcggcgagatctcgatcgcgctcgacaataaccgcagcttccgcctttctgccgtcgccgaccgcatcgagcggcggaagggtggctcctatgccatcctcgactacaaaaccggacagccaccaagcgacaagcaggttcgcgtggggctgtcgccgcaattgacgttggaggctgcaatcctgcgcgaaggcggtttccctgatatcgacgccggttcatcggtaagtcagctcgtctatgtccgtctcagcggcaacaatccgccgggcgaagagcggatcgtccagctcaagataaataaaggtgacgaaccgatccccccggatacggccgccgccgaagcgcgggccaagctggaagcgctggtccgcgccttcgaggacgagagccaaccctatccctcgctgaccctgccgatgtgggcgaaccgctacggcacctatgacgacctcgcccgcatcaaggaatggtcggcggccggcggattggggatcgaggaatggtga

SEQ ID NO: 3633 - DNA, 723 bp, BradyrhizobiumColbertium
atgcccgtcaaaccgaccaaggccatggtgctcgccgcagggtttggcctgcgcatgcgtccgctgacggacaagatgccgaagccgatggtgccggtggccggccaaccgctgctcgaccacgtgctcgacaagctcggcagggcaggcgtgaccgaggccgtggtcaatgtccattacctgccggaccagatcatcaatcacaccgcatcgcgccagcatccgcgcgtgatcatctccgacgagcgcgaccaggtgctcggcaccggcggcggcgtggtcaaggcgctgccgctgctcggccacgcgccgttcttccacgtcaattccgacacgctatggatcgacggtgtgcgcccgaatctttcgcggcttgccgaaaccttcgaccccgcgcgtatggacatcctgctcctgatggcaccgaccgcgaccagcatcggctatagcggccgcggcgattacggcatgctgccggatggcgccctgcgcaagcgcaaggagaaggaagtcgttccgttcgtctatgccggcgcggcgatcctgtcgccgtcgatctttgccgaagcgcccgggggcgaattctcgctgacgagaatgttcgatcgcgccaacgagcaggagcggctgttcggccttcgcctcgacggcgtctggatgcatgtcggcacgcctgatgccgtgcatgcggcagaggaggcgtttctcgagagcgtggtgtag

SEQ ID NO: 3634 - DNA, 318 bp, BradyrhizobiumColbertium
atggcggtaaagacggaccagcgcggcaacagccgggttgttttcgaacgcgggattccggcccagatgatgggaatcgacggcacctggcggcgcgactgcaccatggaggacgtctccgacagcggtgccaagctgaccatcgacggttcggtcgaaggcctgcacctcaaggaattctttctcctgttgtcgtcgaccgggctcgcctatcggcgctgcgagcttgcctgggtcaatggcgaccagatcggcgtcaatttcctcaaggtgggcgacaagaagaaaaaggcgcgttccacagccgttggagcgtga

SEQ ID NO: 3635 - DNA, 1521 bp, BradyrhizobiumColbertium
atgagcaagcccatcacattctcggtcgcgctccacaacgagacggcgactgcgcaattgatggccgatctcgcgctgctgatcggccccggcgacgtcatcactctcaccggcgacctcggtgccggcaagaccgcggcggcgcgcagcctgatccgctatctcgccggcgacgaggagctggaagtgccgagcccgacctttacgctggttcagggctacgagctgccgcccttcccggtgctgcatgccgatctctaccgggtcgaggacgggagcgagctcgaggagatcgggctgtcgccgctccccgatgccacgctgctgctgatcgaatggcccgagcgtgcgccgtcggcgatgcctgaggaccgcatcgacatcgcactgacgcaccggccggcactgggctcgaatgcacgcgccgccgacatcaccggccatggcaggtgcgccgcgcaagtcgcgcggctgaaggcgctgcgggaattcctcgatgcatccggctatatggatgcgacacgcaggcgcatggccggggacgcctcgacccgctcctatgcgcggctgctgcgcgagggcgaaaccgtcattctcatgaactttccgcagcggcccgacggcgcggcgctctacaacggaaaatcctacagcgccgccgtgcatctcgccgagaatgtcagacccttcgtcgcgatcgccgaaggcctgcgcgcgcaaggcatctccgcgcccgcgatccatcattccgatctcgatcatggcttcctgatcaccgaggatttcggcagtgaaggcgtcatcgagggcgatcctccgcgcccgatcgcggagcgctacgaggccgcgaccgatgtgctggccacgctgcatggcaagacgctgccggcaacattgccgctcgcggatcagacctatgccattcccgtcttcgacaccgaagcgctgcttgtcgagatcgggctgatgccggaatggtatctgcccgatcgcaacgcaccgctgagcgatgaggcgcgctccgagttcttcacgatgtggcgcgagttgctcgtgaagccgctctcggcgccgaagacctgggtcattcgcgactaccactcgcccaacctgatctggctcgaagatcgcaccggcatcgagcgggtcggcgtgatcgacttccaggacaccgtgctcggaccgcaatcctacgacgtggtgtcgctgctgcaggacgcccgcatcgacgtgcccgagaccgtcgagctgacgctgctgtcgcgctacatcaaggcacggcgtgcgcaggacacgggcttcgatgccgccggcttcgccgaactttatgccatcatgtcggcgcagcggaacacgcgcctgctcggcaccttcgcccggctcaaccgccgcgacggcaagccgcattatctgcgtcaccaaccgcgaatctggacctatctccagcgctcgctggcgcaccccgcgctcggaaccttgcgcgcctggtatctcgccaacgtccccccgcctcaagcctga

SEQ ID NO: 3636 - DNA, 2505 bp, BradyrhizobiumColbertium
atgtcaggcgtgatcgtgtcgatgcgtcggacgctgttgtcgtgcacatcgttggcgcgcaacggcttggtgggtggcgctctcgcagcgctgctgccggctgcgccggctcaggccgccgacctcatcgacactctctccgtcatgctggatttcaaccggcaggaaatcgcggtgctcgccaccgcgctggctctgctcggcttctcggtcatggccgcgatcctcttgatgcgcacgcgcgtgcgcacggcaaacagcgaggcgcggctgcgtgcccgaatcggggaactgcagctccaggccgaccgcttcggcgcgctgctgttcgcggagccgcagatcctgatctcctggccggcgggcgacaaccgtgcgcagatttccggcgacatctcgatggtgctgccgcgtgattcctcgccgcagcgcgtgctcgcgttcggaacctggctgccgccggagcccgcgttccagatggaccatgcggtcgacgcgttgcgcgatcgtggcgacgggttccagctgaccttgaccaccgcgcacggccatacgctggaggcgatcggccgcgccatcggcggccaggccatcgtccggattcgcgagctctccggtctccgccgcgacctggccgagaccaatctgcgctacaaggcactctccgacgaaaccgagatgctgcgcggctttgccgccgccgcaccctggccgatctgggccaagggcgagaatggcgcactgacctacgccaacccggcctatgtgcgcgccaccgaggcgaacagcgtcaccgatgcccaggagcgcaagctcgagctgctcgacagcgccgaccgcaccgcgatggagcgggggctgaaggacgccgccaacttcacttcgcggctgccgatcgtgatcggcggcgagcggcgcatcttcgacgtgcgcgccgtcaatgtcggccgcggcagcgtcggcatcgcgatcgacgccagcgaggcggaggcgctgagctcggcgctggtgcgaatggcggaggcgcaccgccgtacgctcgaccagctctcttccggcgttgccgtgttcgacggccagcgccgcctcgccttctacaacgattcctatcggcggctgtgggacctcgaccgcaccttcctcgacgccaatcccgacgattccagcgtgctcgaccagctccgcgcggcgcgcaaattgccggagcagcctgacttccgcgcctggaaagccaagctgcacgaagcctatcgcgcagtcgagaccgccaaggacacctggttcctgcccgacggccgcgcgctttcggtggtcaccacgccgaatccggaagggggcgtcacctatctcttcgacgacgtcaccgaaagcctcgacctcgcccgccgcttcgacggcctgatccgggttcagcgcgagacgctggacagcctcgccgagggcgttgcggtgttcggcagcaacggcaaggcgcagctgttcaatccggccttcgtccggatgtggaagctctcgagcgatgccatgcgcgacgagccgcacatccagacagtggaaggctggtgccatcagctctgcgatgatcccgtcgtctggcgtcagatccgcgaggccgtcacctcgatcgagaaccgcgccgacgtgccgctgaagctggagcgcaaggacggcagcgtgctcgacggcatgatccggccgctgcccgacggcgccaccatgctgacgttccaggacatcaccgacaccgagaatgtcgagcgggcgctgcgcgagcgcaatgaggcgctggaggctgccgaccagatgaaggtggatttcgtccaccacgtctcctacgagctgcgctcgccgctcaccaccatcatcggctttgcgcatttcctcagcgatccctcgaccgggccgctgacgccgaagcaggccgaatatctcgactacgtcaccaaatcgaccaacgcgctgctcgcgctcaccaacaacatcctcgatctcgccaccatcgacgccggcgcgatgaagctggaactcgggcaggtcgacgtcagcaaggccatcgagctcgccgccgagggtatccaggaccggctcgccaccgaccgtatccgtctcaaggtcgagatcgcgccggatgtcggcagcttcaccggcgacgagaagcgtgtggtgcaggtgctctataacctccttgccaatgccgtcgggttctctccacaggattccacggtcgggatcagcgcgcggcgcaccgaacacagcgtggtcttcaccgtgacagattcaggccctggaataccggccgacatgaaggacaaggtgttcaactggttcgaaagccgctcgcagggctcgcgtcaccgcggcgccgggctcggcctgtcgctggtgcgctccttcgtcgagctgcacggcggcaaggtgcgggtggattcgacggtcggccggggcacggtcgtgatctgcgacttcccaaccgaccaggcggcgcatcgcgacgccgccgaatga

SEQ ID NO: 3637 - DNA, 459 bp, BradyrhizobiumColbertium
ttgagcacgacggtcacggtcgaactgcagcgcctcgcccacgccgaaggtctgccgctgccggcctatcagacggcggaggctgccggtctcgacctgatggccgccgtgccggagaatgagccgatgacgctcgcccccggccagtatgcgctggtgccgacgggccttgcgatcgcattgcccgccgggcacgaggcccaggttcggccgcgctccggcctagcggccaagcacggcgttaccgtgctgaactcgccgggcacgatcgatgcggactaccgcggcgagatcaaggtgatcctgatcaatcacggcgcggcgcccttcgtgatcaagcgcggcgagcgcatcgcccaaatggtgatcgcgccggcgatgcaggcagcgctggttcccgtagccaccttgtcgacgaccgatcgtggcgccggcggcttcggctcgaccggccgctaa

SEQ ID NO: 3638 - DNA, 1509 bp, BradyrhizobiumColbertium
ttgcattgcaatcatgtgaatgatagcatcgccatcattccgcgctggaggggcgtcatggcaagcctgaccatccgcaagctcgacgacgccgtgaaaacctatttgcggctgcgctcggccaagaaccgcagatcggtggaggaggaggtccgggtcatcctgcgggagctgatcgagggccgcgaggaaccgctgacgccatttgcggtcccgccagcagcgtccgccgccccgacgcctctgcgcagcggcgccctccccgaagccagcgtcaccctgatcatcggcggcggcatcgcaggctacaaatcgctcgacctgatccgcaggctgaaggagcgccgcatcgaggtgcgctgcgtgctgaccaaggcggcgcagcaattcgtgaccccgctggcggtcagcgcactttcccacgagcgcgtctacaccgaccttttcgaccctcagagcgagttcgacgccggacacatccgcctcgcgcgcgactgcgacctgatcgtggtggcgcctgcgaccgcagatctgatggccaagatggcgaacggccatgccgacgatctcgccagcgccatcctgctcgcgaccaaccgcaaggtgctgctggcaccggcgatgaacccgctgatgtggagcaacgcagcaacgcgccgcaacgtcgcgcagctccagcgtgatggcgcggtcctgatcgggccgaactcgggcgaaatggcggaagcgggtgaagcgggcatcggccgcatgtcggaagcgatcgagatcgccaatgctgccgagcggctgctgcgaccgccggtgccgaagccgcttgccggcaaacgcgtgctgatcaccgcaggccccacgcacgaggcgatcgatcccgtccgctacatcgccaaccgctcctcaggcaagcagggctttgccattgcagccgcggcgcaggcggcaggcgccgaggtgattctggtcagcggcccggtcgatctcgacgatccccccggcgtgacggtgaagcacgtcgaatcggcgcggcaaatgctggagcaggtgcaggccgcgcttcctgccgacgtcgcgatcttcgccgccgcggtcgccgactggcgcgtcgccaacgagggcgaacagaagctgaagaagaccgcaggcagcatgccgccgcttcagctggtcgagaacccggacatcctcgccacgatctcgaagctgaccgacaggcgcccgccactggtgatcggatttgccgccgagaccgaacacctcatcgacaacgccaaagcgaaattcgcccgcaagggctgcgactggatcgtcgccaatgacgtctcgccggcgactggcgtgatgggcggcgaccgcaacacggtccacctcctcagccgcaagaacgatgcgaagaacggcgagattgcggttgattcctggccggtaatgacaaaggaacaggtcgctatcgagctggtcgcgcatatcgcaaggagcgtgaccgacaaatcccgggagccggcatcttga

SEQ ID NO: 3639 - DNA, 1575 bp, BradyrhizobiumColbertium
gtgatctctgccttcacccacattgcgcgcctgatccgcgccgcgttcgtgttcgcgcgcgagggcgtgttcggctcggtcgatccgagcctggtgccgccgccgggacagctcgcgctgaagctggcgcgactcgtcgaacgccgcggcaccaagcacggcccgcggatcgcgcgcgcgctgacgcggatgggcccggcctatctcaagctcgggcagttcctggccacgcgccccgacgtggtcggcgtcatcatggcgcgcgacctcgaaagcctccaggatcgcctgccgccgttctcgcaggccgaagcggaagctgcgatcacgacgtcgctggagcgtccgctgacggacatcttcgcaagcttcggcccgccggtcgcggcggcctcgatcgcccaggtgcaccgcggcgaggtgttgcgcgacggcgttcgcaggtcggtcgcgatcaaggtgctcaggcccaacgtcgccacgcgcttccgccgcgatctctcggatttcttcttcgtcgcgcacaaggccgaagcctattcctccgaagcgcggcgtctgcgcctgatcgaagtcatcaacaccatgtcgcgctcggtcgcgatggagatggacctgcggctcgaggccgcagcactgtcggagatggcggaaaacacgcgtgacgaccctgatttccgcgtgcccgatgtcgactgggatcgcaccacccacaacgtgctgacgatggagtggatcgacggcatcgcgctgaacgaccacaagcgccttgcagcggcgcaagttgacctgcccgatctcggccgcaaggtgatccagagcttcctgcggcacgcgctgcgcgacggcttcttccacgcggacatgcatccgggcaatctgttcctcgatgatgccggccgcctggtcgcggtcgatttcggcatcatgggccggctcgggatgaaggagcggcgcttcctcgccgaaatcctgctcggcttcatcacccgcgactatcgccgcgtggcggaggtgcatttcgaggctggctacgtgcccgcgcatcattcggtcgagaatttcgcgcaagcgatccgcgccatcggcgagccgattcacaatcgaacggcggaagagatctcgatggcacggctgttgacgctgctgctcgaggtcaccggcctgttcgacatgaccacgcggcccgagctgatcctgctgcagaagaccatggtggtggtcgagggtgtggcgcgcggcttcgaccccaagctcgacatctggaaaattgccgaccccgtggtgcgcgaatggatcgagcgcaatctcggacccatcggccgggtacagggcgcgctcgccggaaccggggacattgcacgggtcctgatgcgcctgccggagatcgccgaacggtcggtgaaggtgctcgagcagctcgagaccatgacccgggacggcataaggctgtcgccggagagcatcgcggcgatgggccgcagcgagggccgcaagaaccgctggcgcaccgtggcgctctggatcatcgccgcgaccttcataggcatcctgatcgccgtccggaatctatga

SEQ ID NO: 3640 - DNA, 762 bp, BradyrhizobiumColbertium
atggatcggccgggcgaaaccacgcattttggcttcaggaacgttcccctcggggacaagcagacgctggtgaacgacgtgtttcacagcgtggcctcgcgctatgatctgatgaacgacctgatgtccggtggcctgcaccgggtctggaaggacatcatgatcacggcactcgacccgccgaggggcgatcggccgttcgccctgctcgacgttgccggtggcaccggcgacatcgcgttccgcgccgccagagcggccggccccggcttccatgccacggtctgcgacatcaattccgacatgctcgcggtcggccgcgagcgcgccgccaaacagcatctcgacacccgggtcgatttcgtcgagggtaatgccgaagcgctcggcttcgccgaccgcagcttcgacgcatatacgatcgcgttcggcattcgcaatgtgccgcagatcgatctggcgctgcgcgaggcctatcgcgtgttgaagcccggcagccgctttctctgcctggaattctccaccgtcgagatgcccgggctcgacaagctctatgatctgttctcgttcaaggtgatcccgccgctcggccgcatggtcaccggccccgccgaatcctaccaatatctcgtcgagtccatccgcaagtttccaaggcccgctgcgttcgccgacatgatccgcgaggccggctttgcccgcgttagctggcagacgctctccggcggcatcgtcgcactgcattcgggctggcgtttgtga

SEQ ID NO: 3641 - DNA, 882 bp, BradyrhizobiumColbertium
atgcctgaattgcccgaagtcgagaccgtccgccgcggccttcagcccgtcatggaaggtgcgaaaatcctcgctgcggaggcccgccggccggatctgcgctttccgttccagcccgacttcgtggcgcggctcaaggggcaggtggtcaccgggctcggccgccgcgcaaaatatctcatggccgatctcgcctcaggcgacgtgctcttgatgcacctgggcatgtcgggctcgttccgtgtcatcaagccggacaacagcctgcagcccggcgagtttcactatcccaggggaaaggactccgcgcatgatcacgtcctgtttcggatgtcctccggcgccgacatcgtgttcaacgatccgcgccgcttcggctacatgaaggtgatcgcgcgcaatgcgctcgaagacgagccgctgctgcgcgggctcggccccgagccgctcggcaacgaattcgacgccgcgatgctggcgcgctcctgcgccggcaagaccaccagcctgaaggcggcgctgctcgaccagcgcgtggtggccgggctcggcaacatctatgtttgcgaggcgctgcatcgctcgcatctgtcgccgcggcgcattgctgcaacattgtcgaccaagaagggcgaggcaacggaccacgcaaaacgattggtcggtgcgatccacaccgtgctgaacgacgcgatcaaggccggcggctccagcttgcgcgaccatcgccagacctccggcgagctcggctatttccagcattcattcaaggtgtatgaccgcgaaggcgagacgtgcacgacgccgcgctgcggcggcacggtcaagcggttcacgcagaatggccggtcgacgttctggtgcccgaaatgtcagaagtga

SEQ ID NO: 3642 - DNA, 744 bp, BradyrhizobiumColbertium
atgcacacgatcgtactggccacccaaaagggcggcagtggcaagagcacgctcgctatcggcctcgcgctggcggccaagcaggccggcttcactgtccgcctgatcgagaccgacccgcagggcaccctctccaactggcagcgccgccgcaacaatgacgacgtcgtcgtcgagccgatctatcaagccgccaacatcgagccgcgcctgacgatgctggccgacagcggcctggagctcgcgatcgtcgacactgcggccggcctcagcgcggcaaccaccgccgcaatccgccattccgacttctgcctgatcccggcccgcccgaccgtcgccgatatcgaggcgaccgtctcgactctcaacgtcgctcgcgcctggaagcggccgtacagcttcgtattgaaccaggcgccgatccgcggccagcgcatcgacaacgccgccaataccctcgccgaggaagccgcgctcgaccttgctgatgtactcgcccggccgctgatcgcaatccgcaacgaccaccaggacgcgctggcgaaaggtctcgcggtgagcgaattcgcaccgaacggcaagtcggccgacgagatccgcaggctctggcgctggatcgagacgcggctagagctcgaagccaagacccatctgctgatcgaccaggtgatgtcggctgccgacggcatgttgcatctcgccgccgaccttgccgcggacgagaccaccacaatcgcgtcctga

SEQ ID NO: 3643 - DNA, 252 bp, BradyrhizobiumColbertium
atgattgctgaccaccatgccgcggctcgagaccgccggcatcttctggcagtcaaaagtggttgccgtccggtcgcgccagtttccgcccatgctgcctgcccttcttgtttcacggcggagagcacatcatacgcacgattacgggtccagtattggtacggattagctgacattcccaattctgccaccatcgccttggttgattcggacatccgcggtccgctttggatcgggcagggcacgtcctga

SEQ ID NO: 3644 - DNA, 1605 bp, BradyrhizobiumColbertium
atggtggtcagcaatcatccgttggcctccagtgccggtgccgagatgctggcggccggcggcaacgcaatcgatgccgcgatcgccaccctgttcacgttgacggtggtcgagccgatgatggtcggcatcatcggtggcggcatggcacatatccggctcgccgatggcagccaccgcttcatcgacgggcagagcaccgtgcccgcggctgtgcgcgacaccacctacctctcgaagcccggctcggcgcatgacgttttcgacaccgtcggcaacgagaacctcaacggaccgaaggccgtcgcggtgccgggctcgctgaaggcctggtgcgagacgctgcgccggttcggcaccatgtcgctttccgacgtgatgcaacctgcgattaagcatgccgcacgtggctatgcgacgaccccctatctgcatgaatgcatcagcgagagcgcagacgagatgcgcaaggacaggacgatcgcgtcgatcttcctgcctgatggcgagccactgaaggtcggcgagcgcgtggtgcaggccgaatatgcggacacgcttctctacatcgccgatcacggcgagaaggcgctctacgagggggctctcggcgatgtcctcgtcgactacatggagagggccggcggcttcatccgccgcaacgatctcacgaactacaagacgatcgaacggcagccgatccgcgccgactatcgcggatggactatcctcggtccgccgccgcccgccgcgtccggcgtgcatatcgcgcagatgctcaacattctggagggttacgacatcggcgggctcggcttcgggacgtcggaggccatccaccatctcgccgaagtgctgaagattgccttcgccgaccgcgccgccgccagcggcgatccggattatgtcggcgtgcccgtggagaagttgacctcgaaggcctatgccgaggagcgccgccgcgccatcgatccagcacgggcgcaggcgtggggtgcgggcgtgtcgcagctcgaaggcgcgcacaccacgcatgtgacggcggcggacagcttcgggaacgtggttgcgaccacgcagaccatcaacagtctgttcggcgccaagatcatgatcccgggcctgggggccatcgccaacaactacatgaatttgtttgatccgcgaccgggccacgcgctctcgctggcgccgggcaagcgtgtcaccacctcgatgtctccgatgatggcgctgaatggcggcaagctgcgctatgcgctcggcttgcccggaggcaagcgcatctttccgagcgcgatgcaggcgctggtcaatctgatcgaccacggcatgagcctgcaggaggccgtcgaggctccgagggtctggaccgagggcaacgcgctcgaggtggaacagactgtgccggagagcgtgcgcgtgcagctcgcggcgcttggccacgaggtgcagccggtctcgaccgtcgcgggcggcatgaacggaatcgccttccaggacgacggcaccatgattggcgccgcctgctggcgcgccgacggtacgccgatcggcatctccggcggtcttgcgaagagcgggatcaggttcaggctcgcctga

SEQ ID NO: 3645 - DNA, 405 bp, BradyrhizobiumColbertium
atggtgaaagtggcgctgctgacgctcaacgacgccaacctcaccggcaactacagtgtcctccatgcaaagatggcgagaccgtttcgcgaacgcttttcagccgccacgctgaagcaggcattcgcgacctttgccggacatcacatcgacgcaattgccggcatgccgatcataagcacggaagccccgaggatcggcgacaacggcgcgctgttgttgcgcggccatttcgaaacggcaccgtcgcagctgagctacgcgctggactacgccgtgtcggagggcgaatggaagttgatcgcgatcgacgtcaaggtccgatcgctgcagaccaatgcgggcgcagcagacctggtcgcgcgcgccgccgcggacatggcgggcagcggcgctcagaaatga

SEQ ID NO: 3646 - DNA, 1422 bp, BradyrhizobiumColbertium
ttgttcgcgaccaacgagatgtgcttcaatggcactgcgttcaatgggctggttggatttgtcatgagatcgatgcttgcggcaaccttgatgtttgcggccgccaccggcgcacacgcccagacgacggcgccacaagtgcccggcaccaagccgaagacggtccagaccgtgccgatccagcctcccgcaacgcagacgccctcggggaccgccgatgccatgtcaaaagcagagcgactggcgctccaatccgatctcgcctgggccggccgatacaacggcgcgattaccggagacgtcagcgaacgcatggtcaacgccatcaaggagtaccagaaggccaagggcggcaagccgaccggcgcgctcaatccgcaggagcgcgctgcgctcgccgaagcggcccgcaagaagcaggagagcgtcggctggaagatcgtgacggagccgaccagcggcgcgcggctcggcattcccaccaagctggtgccgcagcaggcaagcgacgccaacggctcgaaatggacctcgccgaccggaaccgtgcaggtgctgctcagccgccgcaaggaggtgaacccgacctcggcgaagctcgccgatctggagaaggagccgtccggacgcaagatcgactacaccgtggtgaagcctgacttcttcgtgctctcgggattgcagggcctgaagaaattctacgtgcgcggcaccttcaagggcgacgaggtccgcaccatgacgatcctctacgaccaggcgaccgagaacgtcgtcgagccggtggtgatcgcgatgtcgagcgcgttcaatgcgttcccgtcgggaccgctggccggaccgccgccgcgcaagacggtggaatacgggaccggcgtcgtcgtcagcgacgacggtgcgatcgtcaccgatcgcctcgtcgccgatggctgccttgcgatcacgatcgcaggtcatggccgcgccgaccgactcgctgaagacaagcaacacgatctcgcgctgctgcacatctacggcgcccgcggactgaagccgctcagcctcgctggcggtgcagcgaagacgaacgtcgacgtcatcggcatcgccgatccgcagagccagggcggtgccgccggcgtgtcgagcatcaaggcgacgctggcgccaggcccatcgggcgattccgcactgtctcccccgccgtcggtcggcttctccggcagcccggccgttgacgccgacggcaagttcgccggcattgcgctgctgaagccggcaatggtggcgggtcctgcgacctcggtgccggcctcgcaggccgtgatggtatcggcggatgcggtgcgtgatttcctgaagaccaggcagatcacggcgaacggcacgtcgaccgacgccaaagccgcagtcgtacgcgtgatctgcgtgcggaagtag

SEQ ID NO: 3647 - DNA, 804 bp, BradyrhizobiumColbertium
atgctcagcccggacgaactcgaacgctatgcccgccatatcgtcctgcgcgatgtcggcggtcccgggcaggccgcgttgaagcgggccgcggtgctggtgatcggtgccggcgggctcggcgcgcccgcgctgatgtatctggccgccgccggtatcggcacgctcggcgtcgtcgatgacgacgtggtgtcgctgtccaaccttcagcgccaggtgatccacaccacgcccgatatcggccggcacaaggtcgagagcgccgccgagcggatatcggccctcaatccgcatgtccgcttcgtcggtcatgccacctggctcaacgctgacaatgcactcggcctgatcggcgactacgacctcgtgctcgacggctccgacaatttctcgacgcgatatctcgtctccgacgcctgcttcttcgcgaagcggccgctgatcacggcggcgctcggcaccttcgacggctcgctcaccaccatccgtgcccatgagacgaacgagcagggcgagttcaacccgacctatcgctgcctgtttccggaaccgccgccgcccggcacggtgccggcctgtgcggaggccggggtcatgggcgcgctcgccggcgtgctcggttcgatgatggcgctggaggcgatccgcgagatcgtcggcttcggcgacggcctcgtcggccgcctcctcatgatcgatgcgcgcgcaatgcgcttcgagactctgcgctacgcccgcgatcccgccaatcccctcaatggcgacgggcccgtgatcagcgatctcagcgcccatcgcacctga

SEQ ID NO: 3648 - DNA, 561 bp, BradyrhizobiumColbertium
atgggccatctgctcggccaccacccgcagcgtcgcgctgaccgaggcggggaattgctgctgtcgcgcgtggcgccagcgctgcgtgacgtgggcgatgcgctggaccaggtgcggggcctgcgcgaggtcgctgcgggccgcctgcgcatcaacgcaccgccgccggcggtcgatctggtgctggcgccgatggtcggcccgtttctcaccgcgcatccacaggtcgatctcgacatcgtctccgagagcggcttcgtcgatatcgtcagcgccggctttgacgccggtgtgcgctatggcgagcacctcgcgatctcgaccaatatgagccttgcgatgcgcgccgcgcgcgacggtgtcggcatctgggcgacgctcgacggctatgccgacgaagcgctgaagtccggcgcgctcgtcagcctcatggaagattggtgcgagccgtttcccggctccttcctctattatccgagccggcgccaaacgccgcctgcgctgcgcgctttcatcgatttcgtcgccgattggcgcaagcgcgacaagcgcgggcagtag

SEQ ID NO: 3649 - DNA, 1002 bp, BradyrhizobiumColbertium
atgtcggtgaagaaaaagcccctcgtcgtggtgacgcgcaagctgccggattcgatcgagacgcgcatgcgcgaattgttcgacgcgcggatcaatctcgaggacacgccgatgtcggccgagcagatcgcggaagcggcgcgaaccgccgacgtgctggttccgacggtaaccgatcacatcagcgccgaggtcgtgaaccagcccgactgcaagctgcggctgatcgccaatttcggcaacggcgtcgacaatatcgacgtcgcagccgcccatgcccgcggcatcaccgtcaccaacacgccgaaggttctgaccgaagacaccgccgacatgaccatggcgctgatcctcgcggtgcccaggcggatgatcgagggtgcctcgatcctgaccgaaggaaaaccctgggcgggctggtcgccgacctggatgctcggccaccgcatcggcggcaagcgcctcggcatcatcggcatggggcgcatcggccaggccgtcgcgcgtcgcgcccgcgccttcggcctgcagatccactatcacaatcgccgcccagtggcgcccgtcatcgccgaagagctgggtgcgacctactgggaaagtctcgaccagatgctggcgcggatggacatcatctcggtgaactgtccgcacacgcccgcaacctatcacctgctgtcggcacggcggctgaagctgatccgcaaagatgcctacatcgtcaacaccgcgcgtggcgaggtgacggacgaggatacgctgatcaagctgatcgagggcggcgagattgccggcgcaggcctcgacgtctacgagcacgagcccgcggtcaacccgaagctggtacggctcgccaaggccggcaaggggacgctgttgccgcatatgggttccgccacgatcgaaggccgcgtcgagatgggcgagaaggtgatcatcaacatccgcaccttcctcgacgctcacaagccgccggatcgcgtgctgccgagcatgctctga

SEQ ID NO: 3650 - DNA, 528 bp, BradyrhizobiumColbertium
atggcgttggggcggttctgttcggtgatggcgcttgtttgcacctggttgagcgcctcggtcagcccctcgcattcggcgaaggataccccgcagactgccagcggcttgccggtgccgcgctatgtcagcctcaaatcggaccacgtgaacgtccgcgccggcccaaccaaggacaatgacgtcgcctgggtctacacccgcgccggcctgccggtcgaaattaccgccgagttcgagaactggcgccgggtgcgcgattccgagggggccgagggctgggtctatcactcgctattgtccggccgccgcaccgcggtcgtcaccatgaagcacaaggacgagttcgccccgatctatgaccggcccgatcccgacagcgcggtggcagcaaagctccaggccggcgtcgtcacgcaggtgaagaagtgcgctgcaaactggtgccgcgttatcggaaacggctttgacggctggattcagcaggagcgcctctggggcgtctattcggacgagcaggtgaattga

SEQ ID NO: 3651 - DNA, 492 bp, BradyrhizobiumColbertium
atgaacgagaataccgcgtcccatcacgacgacgacgtccatgccgcggccctcttgtccggccgccagccggcgctgaccggctgcccctggcacgacgtcaacgaaatgctccagtccgctgggctccgcccgacgcgccagaggatggcgctgggctggctgctgttcggcaagggggcgcggcacctcacggctgaaatgctttacgaggaagcgacgctggccaaggttccggtatcgctggcgaccgtctacaacacgctgaaccagctcaccgatgccggcttgctccgccaggtcagtgtcgacggcaccaagacctatttcgacaccaacgtcaccacccaccaccactactaccttgagaacagccacgagctggtcgacatcgaggatccgcacctggtgctatccaagatgcctgaggtacccgagggttacgagatctctcggatcgacatggtggtgcgactgcgcaagaagcgctga

SEQ ID NO: 3652 - DNA, 141 bp, BradyrhizobiumColbertium
gtgccaggggcagccggtcagcgccggctggcggccggacaagagggccgcggcatggacgtcgtcgtcgtgatgggacgcggtattctcgttcatttccagatttcgggcacgcgtgaacaatatctctctgtaacataa

SEQ ID NO: 3653 - DNA, 522 bp, BradyrhizobiumColbertium
atgctgaacaggcgcaacggttatgaatacgaagatctgctggcctgtgcccgcggcgagatgtttggcccgggcaatgcccagctgccgctgccgccgatgctgatgttcgaccgcatcacggaaatcaccgacgatggcggcgagttcggcaagggcctcgtgcgcgccgagctcgacgtaaagcccgacctttggttctttgcctgccatttcaagaacgacccggtgatgcccggctgcctcggcctcgacgcattgtggcaaatggtcggcttctatctcggctgggtcggcggcgaaggccggggccgggcgctcggcctgagcgagctgaagttcgggggacaggtgctgaccgaggctcgcaaggttgtgtacaacgtcgatatcaaacgcgtgatgcgttcaaagctcgtgctcggtatcgccgacgggtggctttcggtcgacggccagattatttatcgcgccaaggacctgaaggtcggcctgttcaagcagggcacgagcctgggctga

SEQ ID NO: 3654 - DNA, 1212 bp, BradyrhizobiumColbertium
gtggtcaccggaatgggcatcgtctcgtccatcggaaacaacacccaggaagtgcttgcgagccttcacgaggcgaagtctggcatttcgcgggctgaaaaatatgccgagctcggcttccgttcgcaggtgcaaggtgagccgacgctcgatccttcgacggttgtcgatcgccgtgcaatgcgtttcctcggccagggtgcggcgtggaatcacatcgcgatggagcaggcgatccaagactccggcctctcgcctgacgaagtctccaacatccgcaccggcatcatcatgggctccggcggtccctcggcgcgcaccatcgtcgaggctgccgacatcacccgctccaagggtccgaagcgcgtcggcccgtttgcggtgccgaaggcgatgtcctccacggcctccgcgacgctcgcgacctggttcaagatcaagggcgtgaactattcgatttcctcggcctgcgcgacgtcgaaccattgcgtcggcaacgcctatgagacgatccagatcggcaagcaggacgtcatcttcgccggcggctgcgaggaactggactggacgctctcggtgctgttcgacgccatgggtgcgatgtcctcgaggtacaacgacacgccggccacggcctcgcgtccctacgacgtcaaccgcgacggcttcgtcatcgccggcggcgccggcgtcctggtgctggaagagctcgaacatgccaaggcgcgcggcgcgcgcatttacggcgagatcgtcggctatggcgcgacctcggacggccacgacatggtggcgccgtcgggcgaaggcgccgagcgctgcatgcgcatggcgatgtcgacggtgaagaccaaggtcgactacatcaatccgcatgcgacctcgacgccggccggcgatccgccggagatcgaggcgatccggaaggtgttcggcgtcggcgagaagtgcccgccaatctcggcgaccaaggccctgaccggccactcgctgggcgccaccggcgtgcaggaagcgatttattccctgctgatgatgaacaacggtttcatctgcgagagcgcgcacatccaggagctcgatcccgtgttcgccgacatgccgatcgtgcgcaagcgcatcgacaacgtcaagatcggcaccgtgctgtcgaactccttcggcttcggcggcaccaacgccacgctggtgttcagccggctggacgtgtga

SEQ ID NO: 3655 - DNA, 801 bp, BradyrhizobiumColbertium
atggacggattgatgaaaggcaagcgcggtctgatcatgggcatcgccaatgatcactcgatcgcctggggcatggcgaggacgttgcatgcccatggcgccgagctggccttcacctttcagggcgaggctctcggcaagcgcgtcaagccgctggccgagcagctcggcgtcgatctggttctgccttgcgacgtcgaggacatcgccagtgtggatgccaccttcgctgcgcttcgcgagaaatgggggcgcctcgacttcgtcatccatgcgatcggctttgccgacaagaacgagctcaaaggccgctacgcggacaccagccgcgagaatttttcgcgcacgatggtgatctcctgcttctctttcacggaggtggcaaaacgcgccgccgagctgatgacggaaggcggcagcatgatcacgctgaccttcggcgcgtcggagcgcgcgatgccgaattacaacgtgatgggcgtggccaaggcggcgctggaagcctcggtgcgctacctcgctgccgatttcggaccgcgcggcatccgcgtcaacgcgatctccgcaggcccgatccggacgctcgcgggctccggtatcggcgaggcgcgtgcgatgttcgccttcatgcagaagcattcgccgctccgccgtggcgttacgctcgacgacctcggcggctcggcgctgtatctgctgtcggacctttccggcggcgtcaccggcgagatccattacgtggattccggctacaacatcgtcctgatgccgaggccggacgatttgaaggcgtcggagtag

SEQ ID NO: 3656 - DNA, 1989 bp, BradyrhizobiumColbertium
atggtgcatgcgatgtgccgcgcgagcgcgctggcgttcgttgccggcgcgatgctgctctgtggcggctctcgtgcccttgcccagtcgacggtgtgggattcgaccctttccaacacgaactggtatgttccgactgcgcaactgctcgcctatgctgcaccgagaaccggtttttccaatcccatcccgatcggcgaccagaccctttggtcgctcgcgagcgcgaccaacggctccttcaccggcacgagcgtggcacagctcaagatcgggcccgcgcttctgaccgacacgtccacgatccaaggattcgtaaacaccgcgggccagatcacgatgctgttcacgccgacttccggcggcacagtgaccgtgggcctcggccacatgcggacggttggcggcgtgacctcgatggagatgcagatgatcacgggcgacagcgtgctcgtgacgcattgggcatacatgcttccttacgatcccgcgaccttcaccccgcccgcttcgcagcccgttcccgccaactccgtgccgcaatgggagtggacggccggaacgccctggcggatttccagcaactccttgttcggtacgtcggctcccgggcgtttcgtcatcaccgattacaagaacggatatttctggggggcaggcatcgcgccgactgggagcagcgccgccaatttcaccctgctgggctcggtgacgcccgagggcagcgttctcttcaacacgctctcgcgcggcacgctcgcaagtctctatggcgcggccagcggcaatgcatcgggcgcgcagatgctcgtcagcacctacgatctatcgggcaatccgaccggcggcgtcgcctatctctcactggtgcggccctacgccgaaacgctccaggcccagaacagccgcgtcggcttgggcgcagccgacatgctgtatcgcctgtctgcgacgccgctcggctggaccggcagcatggcgaccggtttcaccgcgctcgacaatctcggtggttccggtctcgtcaactcgatcaaccagaccctgcctgttctgacgggagctgcatcgcaggcgacctatgccacgcagcgcgccttccaacaggcgatgacggggcgattggatgaggtgttcgggctgaatggggccgcgacacgcgagcggaacttctggatgaagccgctcggcggtaccctccggcagggcagtgtcgatggcgtccccggctatcacgcctccggcggcggcatcgccgtcggtgcagacgcgatgatctccacgcgcgcgaggctcggcggcgtgttcgcctactcgcatcaaagcatcgccggaagcgaggatgccgttccgaacaggctggccgtcgattcctatcaggcggggctttacggcgcctatgctctcggtcagggcgttcaggtcgatggccagctcgatggcgcgttgaacgacaatggcgagagccgctcgctcaccttcatcaacggcaaggccggcgccggctatcgatcgtatggcggtcatgcgggcgttggcgtccgcaagctgatgccgatcaagccggacctgacggtcgcgccgtcgctgcggctggattatgggcagcttcgctcgccggcctatcaggagggcggcgcgggcggcttcagcctcaacgtggattcgcagatctatcgtgagctgacgctgacggcaggactgaagagcgcctacaggatcgcgaagcaggtgtatctcacaggcgatgtcggcatcggttacaacacgctgaatcagggacttcagatcaagtcggcctttgccggcggtggcgaagcgttcgtcaccaacggtcttgcgttgtcgccctggatctactcgacagcgctgggcctggccgccgccgacggcaagggccttgatctcggcatccgctacggcgttgcggccacatcttccgggctgctccagcagtccgggcttgcagttctcaagatcaagctttga

SEQ ID NO: 3657 - DNA, 597 bp, BradyrhizobiumColbertium
atgatcaagctatactggtcgccccgttcgcgctcgttcacgacgctctggctgatggaggagagcggcctgccttacgagcgcgtgctgaccgacatttcgacgggagcgcagaaggcgccggactttctcaagatcaatccgatggggaaggtgccggcgctgaccgacggcgatgccgcgctcggggaagccgcggcgatctgcgcctacatcgccgaccgctatcccgaaaccaagctggcgcctgccgtgaccgatccgcgccgcgcgcgctatctgcaatggctgttcttctcaccgggctgcatcgagcccgcgatcatccagatcttcaccaagatcgagatcccgacctcgaccgcggcgtggggcagcgcgacgcaggtgttcgacgtgctggaagccgcgctcgagaagggaccgtggattctcggcgacgaattctccgcagccgacatcgcaatcggctcgggcctgaattttgcggtgcgcctgttcaagatggtgcagtcgcggccggccttcgacgcttatctcgcgcgctgcatggcgcggccggcgttccagcgcgcggagaagatcgcggccggttga

SEQ ID NO: 3658 - DNA, 927 bp, BradyrhizobiumColbertium
atgctcaacgtgacgctacgccagctccggtacttcgatgcgctggcccgtcatggtcacttcggccgcgcggccgaggcctgctcgatctcacagccggccctgtcgatgcagatcaaggagctggaggagacccttggcggcctgctgctggagcgcagcgcgcgccaggtggcgctgacccggttcggcgaggagctcgcccagcgcgtccgcgacattctgcgctcggtcgacgagctcggcgatttcgcccgcgcctcgcaggaccgcttcgccggccgcctgcgcatcggcatgatcccgaccatcgcgccctatctgctgccgaccatcaccaagaatctcacgcgcatgcacccggagctcgacatccgcgtgcgcgagacgatgaccccgcggctgatccaggagctggtcgagggccgcctcgacaccgccatcgtggcgctgccggtgtcggagccctcgctcaccgaggtcgccctgttcgaggagaaattcctgctggtgcggccaagcgcggatgaaggcacaccggcgccgtcacgcgagatgatgcgcgagatgcggcttctgctgctcgaggaggggcactgcttccgcgaccaggcgctctccttctgcaacatgcagtcggcgccgccgcgcgagatgctggatgcgaactcgctgtccacgctggtgcagatggtcagcgccgggatcggcgtcacgttgatcccggagatggcggtgccggtcgagacgcgatcggcctcggtctcgctggcgcgcttccgcgacccagaaccctcgcgcaccatcggcatggtctggcgcaagaccagtccgctggcgcggcagctgctgcagatctccgaggtggtgtgcctgtcggccggcaaggtgcgggctggtcacagcgtgcgcagctcgcgaagttaa

SEQ ID NO: 3659 - DNA, 2166 bp, BradyrhizobiumColbertium
atggacgacacttcgaagtgcccgttttcgggcggaaaacgcacgcgctcaaaccgcgattggtggccgacgcagctcgatatcgaggtgctgcacaagaattccgagaaatccgatccgatggacgaggatttcaactatgccaaggaattcaagtcgctcgacctcaacgcggtcatcaaggacctgaccgcgttgatgacgaattcgcaggaatggtggcccgccgatttcggtcattacggtggcctcatgatccgcatggcctggcacagcgcgggcacgtaccgcacgaccgacggtcgcggtggcgccggtgcgggtcagcagcgtttcgcacccctcaacagctggcccgacaacgccaacctcgacaaggcgcgccgtctgctgtggccgatcaagcagaaatatggccgaaagatctcctgggccgacctgatggtgctcgccggcaacgtcgcgctggaatcgatgggcttcaagacctttggtttcgccggcggccgcgtcgacgtctgggagccggaagagctctattggggacccgaaggcacctggctgggcgatgaacgctacagcggcgaacgccagctctccgagccgctcggcgccgtgcagatgggcctcatctatgtcaatccggaaggcccgaacggcaagccggatcccgtcgccgcggcgaaggacatccgcgagaccttcttccgcatggcgatgaacgatgaggaaaccgtcgcgctgatcgcgggcggccacaccttcggcaagacccacggcgcgggcgatccgtcgctggtcggtccggagccggaagccggtgcgctcgaggatcagggcctcggctggaagagcaagcacgcgtcgggactgggtggcgattccatcaccagcggcctcgaggtgacctggtcgcagacgccgaccaagtggagcaatcacttcttcgagaacctgttcaagtacgaatgggagctgacgaagagcccggccggcgcacagcagtggagggcgaagaacgccgagccgtccatcccggatgcgttcgacccgtcgaagaagcatgtcccgaccatgctcacgaccgacctctccctgcgcttcgatcccgcctatgagaaaatctcgcggcgtttcctggagcacccggatcagttcgcggacgctttcgcccgcgcctggttcaagctcacccaccgcgacatgggcccgatccatcgctatctgggaccgctcgtgccgaaagagacgttgatctggcaggatccgattcccgcagtggatcatgagctggtcggcgagcaggacatcgctgctctcaagtcgaagatcctggcctcgggcctcacggtgccggagctggtctcgaccgcctgggcgtcggcttcgacgttccgcggctcggacaagcgcggcggcgccaatggtgcgcgcatccgccttgccccgcagaaggactgggaggtgaacgagccggcccagctctccaaggtgctcggcaagctcgaagcgatccagaaggacttcaacgcgtcatccggcgcgaagaaggtctcgctggcggacctgatcgtgctcggcggcaccgccgcagtcgagaaggctgccaaggacgccggcgtcgacgtgaaggtcggcttcacgccgggccgcatggatgcctcgcaggagcagacggatgcggcctcctttgcgccgctggagccgcgggccgatggtttccgcaactacatcggcaaacggcatcagttcatgcagcaggaggaagctctcgtcgatcgtgcccagctgctgagactgaccggtcctgagatgacggtgctggtcggcggcctgcgtgtgctcggcgccaacgcgaacggttcgaagcacggcgtgctcaccagcaaggtgggaacgctcagcaacgacttcttcgtcaaccttctcgacatgagcacgcagtggacgcccgcggcggacggcagctatgagggacgcgaccgcaagaccaacgcggtgaagtggaccggcacgcgcgtcgacctgatcttcggcgcccactcccagctccgcgccttcgccgaagtctacgcggcctccgactccaaggagaagttcgtcaaggacttcgccaaggcctggaccaaggtgatgaacctcgaccgctacgatctcgcggcgtga

SEQ ID NO: 3660 - DNA, 732 bp, BradyrhizobiumColbertium
atgtcatccatatcccggcgccgtctcatgttcgcagcaagcggcctcgttgcggctgccgctgccccgcgcttggtgtttgcgcaggcggccatggcgccagcaggcccgttcaagctcggtccgctgtcctatccggcgaatgccctggaaccgcacatcgatgccaagacgatggagatccatcacgaccgccatcatcaggcgttcatcaccaacctgaacaatttcgccaaggacaatccgcagatcgcggagaagccggtcggcgaggtgctcggaaaccttggcgcggtgccggacgcgatccgcaccgcggtccgcaacaacatgggaggtcatgccaatcacaccatgttctggcagatcatgggaccgaacggcggcaagccggacggtgccctgctcgccgccatcgacagcgaccttggcggaatggagaaattgcagacggatttcaacgctgccggaggacgcgtgttcggctcgggctgggtgttcgtgacagtcagcaaggagggcaagctcgcgatcgagacgcgacccaaccaggacaatccgatgatggacggcaagcgggcactgctcggcaacgacgtctgggagcacgcctattacctgaactaccagaaccgccgcgccgattatctcaaggcgtggtggaacacgttgaattggaaggtcgtgggcgagcgctacgccgccgcgaaggccggcacactcggcgtgtga

SEQ ID NO: 3661 - DNA, 2163 bp, BradyrhizobiumColbertium
atgttcaataagcattcagtcgagatcgactggggcggacgcccactcaagctcgaaaccggcaagatcgcccgccaggccgacggcgccgtcgtcgccacctatggcgagaccgtggtgctcgccaccgtcgtcgcggcgaaggcgccgcgcgaaggtgtcgacttcctgcccctcaccgtcgactatcaggaaaagacctacgcggcaggccgcattcccggcggctatttcaagcgcgagggccgtccgaccgagaaggagacgctggtctcccgcctgatcgaccgtccgatccgtccgctgttcgtcgacggctggcgcaacgagacccaggtgatcgccacggtgctgtcgcacgacatggaaaacgaccctgacatcgtcgcgctggtggcttcgtcggcggcgctgaccttgtcgggtgctccgttcaagggcccgatcggcgcagcccgcgtcggcttcgtcaatgacgaatatgtgctcaatccgacgctcgacgagatggtcgacacccagctcgacctcgtcgtcgccggcaccgccgacgccgtgctgatggtggaatcggaggccaaggagctgaacgaagacatcatgctcggcgcagtgatgttcggccaccgtcacttccagccggtcatcaacgccatcatcgagctcgccgagaaggccgcgaaggagccgcgcgaagtcaccgtgatcgacaatgccgcgctcgagaaggaaatgctcggcatcatcgagcaggagctgcgcgccgcctacgccattccgatcaagcaggaacgctacgccgcggtcggcaaggtcaaggaaaaggtgatcgcccattacttcccggaagggcaggagccgaaatacgacaagctgcgcatcgcagccgtgttcaaggaactggaagccaagatcgttcgctggaacatcctcgacaccggcaagcgcatcgacggccgcgacagcaagaccgtgcgcaacatcgtcgccgaagtcggcgtgctgccgcgcgcccacggctcggcgctgttcacccgcggcgagacccaggcgatggtcgtgaccacgctcggtaccggcgaggacgagcaatatatcgacgcgctgtcgggaacgtacaaagagacgttcctgctgcactacaatttcccgccctactcggtcggcgagaccggccgcctcggcggcaccaagcgccgcgagatcggccacggcaagctggcctggcgcgcgatccatccggtgctgccgccgcaccatgaattcccctacacggtgcgcgtggtctcggagatcaccgagtcgaacggctcctcgtcgatggcctcggtctgcggcgcctcgctggcactgatggatgcgggcgtgccgttgaagcggccgacggcgggcatcgcgatgggcctgatcctcgaagacaagcgctttgcggttctctcggacatcctcggtgacgaggaccatctcggcgacatggacttcaaggtcgccggcacggaagcgggcatcacctcgctccagatggacatcaagatcgagggcatcaccgaagagatcatgcgcgtcgcccttggccaggccaaggaaggccgcatccacatcctcggggagatggccaaggccctcaccaatgctcgcgccgagctcggcgagtacgcgccgcgcatcgagaccttcaagatcccgaccgacaagatccgcgaagtgatcggcaccggcggcaaggtgatccgcgaaatcgtcgagaagaccggagccaaggtcaacatcgaggacgacggcaccgtgaaggtcgcctccagcgacggcgaagccatgaaggccgcgatcaagtggatcaagtcgatcgcgtccgagccggaagtcggccagatctatgacggcacggtcgtcaaggtcatggagttcggcgcgttcgtgaacttcttcggctcgaaggacggcctcgtccacatcagccagctcgcggcgaaccgcgtgcagaagacctccgacgtcgtcaaggaaggcgacaaggtcaaggtcaagctgctcggcttcgacgaccgcggcaagacccgcctttcgatgaaggtggtcgatcagaccacgggcgaagacctcgaggccaaggagaaggccgccgagggcgagaaggccccgcgcgaagcagcgggcgagtag

SEQ ID NO: 3662 - DNA, 141 bp, BradyrhizobiumColbertium
gtgcgcgtcggatgcgatccgttgacggatctgcatccgggcatgaagagcgaacaccgcggttcggtgctcgcgttcgtgccgactgacagtccagcagcaatccggcggctgggcacaacgggcaaggcgcccgtatga

SEQ ID NO: 3663 - DNA, 270 bp, BradyrhizobiumColbertium
atgtcgattgccgcagaacgcaaagcggaagtcatcaagacgaatgccaccaaggccggcgacaccggctcgcccgaggttcaggtcgcgatcctttcggaacgcatcaacaacctcaccaatcatttcaagacccacgtgaaggacaaccattcgcgtcgcgggctcttgaagctggtctccacccgccgctcgctcctcgactacctcaagaagaaggacgaggcgcggtacaaggcgctgctcgaaaagcacaatattcgccgttaa

SEQ ID NO: 3664 - DNA, 1119 bp, BradyrhizobiumColbertium
atgacgatggaccccgctcacggcacgatcgacagcaacgaggccgatcagcgcgatgtgcagacgaatgatttcgcggattcgggaagcaacgcgcggccgcctcaggagccgcgccgcgtcaacaacgatccacgcgccaagcagcagaagggcaaccaggttcgccgcgaccgccgcgacgtccatggctgggtcgtgctcgacaagccgatcggcatgacgtcgacgcaggccgttgccgtgctcaagcgcctgttcaacgccaagcgcgccggccatgccggcacgctcgatccgctcgcctcgggcgggttgccgatcgccctcggggaagccaccaagaccgttcccttcgtcatggacggccgcaagcgctaccagttcacggtctgctggggcgaggagcgcgacaccgacgacatcgagggccgggtgaccgcgacctccgaccagcgtccgacccgggaggcgattctcgccctcctgccccgcttcaccggggtgatcgagcagatcccgccgcgctattccgcaatcaaggtgcagggcgagcgggcctatgaccttgcccgcgacggcgaggtcgtggagctggcgccccgtccggtcgagattcaccatttaacccttgtggatcaaccggataacgaccgggccgtgttcgaggccgaatgcggcaagggcacctatgtccgagcgctggcccgcgacatgggccgaattctcggcactttcggccatatttgcgcgctgcggcgcaccctggtcggcccatttggcgaaaacgacatgattccgctggatcagttggaggctttgtgcgatagagccgcgtccggcgagggcagcctcgccgacgcgcttttgcccgttgagaccgcgctggacgacatcccggcactggccgtcactcgggctgatgcggcaaggctccatcggggtcaggccgttttgttgcgcggacgggatgcgcccacttgtagcggcacagtctatgtcacggtggcaggccgtcttttggcgcttgctgaagttggcaatggcgaaatcatccccaagcgtgtgttcaacctgaccggcctgactgccagtgccggtcgcaacgagagaaactga

SEQ ID NO: 3665 - DNA, 435 bp, BradyrhizobiumColbertium
atgccacgccatcatcagaagaagagttccgcagccggcggaggctcgcaacgtcagttgcgcgtgggcgagcaggttcgccacgcgatggccgatattctggcgcaaggcaacgtgcatgatgcggatctcgaaggtcacatcatcaccgtgccggaggtgcggatgtcgcccgacctgaagctcgctacggtctacgtgatgccgctcggcggccgcgacaccgagatcgtgatcgctgcgctcgagcgcaacaagaagttcctgcgcggcgaagtcgcgcgacgcgttaacctgaaatttgcacctgacattcgcttccgcgtcgacgaacgattcgacgaagcggaacggatcgagaagcttttgcgaacacctgcggtgcagaaggacctggaacagaatccggcttcggatcgggaagaagagcaatga

SEQ ID NO: 3666 - DNA, 2685 bp, BradyrhizobiumColbertium
atggttgataccaagacccctggcgacaagaagctgagcgttccgagcaagacgctatcgctcaagccgcgcgtcgaaacgggcactgtgcgccaaagcttcagccatggccgcagcaagcaggtcgtggtcgagaagcgcggcaagcgccggatcgacggcactcccgagccgcagggtgccgaggtcgcgaagcccgcgccggctactcccgctgcggcgccgcgtcccgctccgaaagccgctccgccccgcaacgccggttccggcgtggtgctccgcacgctcaccgaggacgagcggtcggcccgcgccagcgcgctggcggacgccaagctgcgtgaagtcgaggagcgccgccaggccgaggaagaggcccagcgccgcgctgtccgcgaggccgccgaacgggctgagcgcgaggccgccgaagcccgtcgcaaggccgaggaagagcgccatcgccatgaggacgaggccaagcggaaggccgagaccgaggccaagaagcgctttggggaaggcgagcagcctgctgccgcgcgcccggcaacggcagctccggtgacgagcgctccgcgttccgcgccgagcacggcgcgacctgcggcgaccaccactgcacgtccgacaacgaccccacagcggccggcgggccctgcagggcgcgctcccgcaattgcggccggccccgacgaggacgacggtccgcgccagatccgtcgcggtcccggcggcgccgcgcgtcctgcggcagcccccaagaccacccacaagcccggcccgcagaaagagcgcggtcgcctgacggtcgtcacggcgctcaatgccgacgaggtccgcgagcggtcgatcgcatcgttccgccgccgcacgcagcgcctgaagggccacgcctcgaacgagccgaaggagaagctgatccgcgaagtgacgatcccggaagcgatcaccatccaggaactcgccaaccgcatgtccgagcgcgcggtcgacgtcatccgcatgctgatgaagcagggcgcgatgcacaagatcaccgacgtgatcgacgccgacaccgcgcagctgatcgccgaggagctcggccacaccgtcaagcgcgttgccgcgtcggacgtcgaggaaggtctgttcgacaccgtcgacgattccaccgacaccgagacgcgttcgcccgtcgtgaccgtgatgggtcacgtcgaccacggcaagacgtcgctgctcgatgcgctccgccacgccaatgtcgtctccggcgaggccggcggcatcacccagcacatcggcgcctaccaggtggtgtcgcccgaaagcggcaagaagatcaccttcatcgatacgcccggccacgccgcgttcaccgcgatgcgcgcccgcggcgccaaggtcaccgacatcgtcgtgctcgtggtcgcggcggatgacggcgtgatgccgcagacggtcgaggccatcaaccacgccaaggcggcgcgggtgccgatcatcgtggccatcaacaagatcgacaagcccgatgccaagcccgagcgcgtgcgcaccgagctgctccagcatgaggtgcaggtggagtccttcggcggcgaggtcgtcgacgtcgaggtatccgccaagaacaagaccaatctcgacaagctgctcgagatgatcgccctccaggccgaaatcctagacctgaagaccaattcgcagcgtccggccgaaggcaccgtgatcgaggccaagctcgaccgcggccgtggtccggtcgcgaccgtgctggtgcagcgcggcacccttcgcgtcggagacatcatcgtcgccggcgctgaaatgggccgtgtgcgcgcgctgatctcggatcagggcgagacggtgcaggaggccggcccctcggtgccggtcgaagtgctcggcttcaacggtccgcccgaggccggcgatcgtctcgcggtggtcgagaacgaagcccgcgcccgtcaggtcaccagctaccgtgcgcaccagaagcgtgagaacgcggcggcctcgatctcgggcatgcgcggctcgctcgagcagatgatgtcgcaattgaagacggcgggccgcaaggaattcccgctgatcgtcaaggccgacgtgcagggctcgctggaagcgatcctcgggtcgctggagaagctcggtaccgacgaagtggcggcccgcattctgcatgccggcgtcggcggcatctcggaatccgacgtgacgctggccgaaggcttcaacgccgcgatcatcggcttctcggtccgtgccaacaaggaggccgctgcggccgccaagcgcaacggcatcgagatccgctactacaacatcatctacgacctcgtggacgacgtgaagaaggcgatgagcggcctgctcgcgccgaccttgcgcgaaaccatgctgggcaatgccgagatcctggagatcttcaacatctccaaggtcggcaaggtcgccggctgccgcgtcaccgacggcactgtggaacgcggcgccaatgtgcgcctgatccgcgacaacgtcgtggtgcacgaaggcaagctgtcgacgctcaagcgcttcaaggacgaagtgaaggaagtccagtccggtcaggaatgcggcatggccttcgaaaactatcacgacatgcgtgccggtgacgtgatcgagtgttatcgcgtggagacgatccagcgctccctgtaa

SEQ ID NO: 3667 - DNA, 684 bp, BradyrhizobiumColbertium
atgctcgccagcactgacagcgaactcgaccatgggccgcggaccgaaaggtccgcgaccatgcggatgtgcgcggtcagccgggaggttcggccgatcgacgagctgatccgcttcgtcgtctcgccgcagggcgaggtggttcccgacctcaagcgcaagctgccgggacggggcatgtggctcaccgcctcgcgccaggtggttgcggaagccgtgcggcgtcaccaatttagcaagaccttcaagcgcgagctgcgcccccctcagacgctttccaccgatatcgaggcgctcttggttcggagcgtgatggaagcgcttgggatcgccgccaaggcgcgtcaggtcttgaccggtttcggcaaggtcgagagcgcccttcgggaaggtacggtcgaggtcctgatccacgccagcgacggggccgcggacggaatccgcaaattggacatgctggcgcgtcaaaatgccggaaatggcggtgccaagccgcagattcccgtcatcaccgtactgaaatcgatagaattggatttggcactgacccggtcaaatgtgatacatgctgcgctgctcgcgggcccggcgagcaagtcattcctgtcacgtagccagatgctggtccgataccggatggcggacgatgacaagactgccgaaaagcccggccaggatttctga

SEQ ID NO: 3668 - DNA, 1608 bp, BradyrhizobiumColbertium
atggcagtcagcgccaatcgactcgaattgcttcagatcgcggacgccgtcgcacgcgaaaagtccatcgaccgcggcatcgtcatcgcggcgatggaggacgccatcgccaaggcggcgcgggcccgttacggcagcgaaaccgacgttcatgccgagatcgatccgaagaagggcgagctgcggctgtcgcgccacatgctggtggtcgacaaggtcgaaaacccttccaaccagatctcgctggtggatgcgcagcgcgccaatcccggtgcccaggtcggcgacaccatcgccgacaccctgccgccgctggaatatggccgtatcgccgcccaatcggccaagcaggtgatcgtgcagaaggtgcgcgaggccgagcgcgaccgacagtaccaggagttcaaggaccgcatcggcgacatcgtcaacggcgtcgtcaagcgcgtcgaatatggcagcgtgatcgtcgatctcggccgtggcgaagccatcatccgccgcgacgaaatgctgccgcgcgaagtgttccgcaacggcgaccgcgtccgcgcctacatcttcgacgtccgccgcgagacacgcggcccgcagatcttcctgtcccgtacgcatccgcagttcatggcaaagctgttcgcgcaggaggtgccggagatctatgacggcatcgtcgagatcaaggcggtcgcccgcgatcccggctcgcgcgcgaagatcggcgtgatttcccgcgattcgtcggtcgacccggtcggcgcctgcgtcggcatgcgcggctcgcgggtgcaggccgtggtgaacgagctgcaaggcgagaagatcgatatcattccctggtcgcccgacatcgcgaccttcgtagtcaatgcgctggcgccggccgaggtttccaaggtcgtcatcgacgaggaccgcgagcgcatcgaggtggtggtgcctgataccaacaaccagctttcgcttgcgatcggccgccgcggccagaacgtgcgtctggcctcgcagctcaccggctgggacatcgacatcctgaccgagcaggaggaatcggagcgccgccaggccgacttcgagaactccacccgcgtcttcatggaatcgctcaacgtggacgaagtcgtcggccagctgctggcgtccgagggcttcacctcggtcgaggaactcgccatggtggacgtcaaggaactcgccggcatcgagggtttcgacgaggaaaccgcacaagagctgcagaaccgcgcccgggaatatctggaacagcaggaggccgagctcgaagcccggcgcaaggagcttggcgtggaagacgcgctcaaggacgtgcccggcgtgacctcgaagatgctggtgaagttcggcgagaacgacatcaagacggtcgacgacctcgccggctgcgccaccgacgatctggtcggctggaccgagcgcaaggaaggcagcgagccgaccaagcacgccggcgcgctcgacggcatcgacatatcccgtgacgatgccgaagcgatgatcatgcaggctcgcgtcaaggctggctggatcaccgaggccgatctcgccaagcccgaggaggccgcggcggccgaagaccagccggcgtaa

SEQ ID NO: 3669 - DNA, 699 bp, BradyrhizobiumColbertium
gtggtcgagcctggcgtcgcggcacgggtgtcggcggtggctgctccggtgcttcagggcatgggctatcgcctggtgcgaatccgcatttccggcgaggccggctgcaccgtgcagatcatggccgagcggccggacggctcgatgcagatcgaggattgcgaggcgatctcgcgggcattgtcgccggtgctcgacgtcgccgatcccatcgatcgcgcctaccggctggagatctcctctccgggcatcgaccgtccgctggtgcgccgctccgatttcgagcgctatgccggccatctggtgaaaatcgagatggcggtcgcccatgaggggcgcaagcgcttccgcggcacgctcggtccagtcgaaggcgatcgcgtccatctgcatcgcgacgacgtcaagccgggcgacgaagccgacattctcctgaccatggaggatatcggcgaggcgcgcctggtgctgaccgacgagctgatcgcggaatccatgcgccgcggcaaggccgaggagcgcaagatgcgcagggatctcggactggagccgccggctgcaccgcacgcagagatcagtgcgaagatcacaaagaacaccaagccgaaaaagaagccggcaccgaccaacacgaagaaacatcgccttgccgccgaacgcgcgcggcgcggcgagaccgagcctgaccaaggagactag

SEQ ID NO: 3670 - DNA, 1083 bp, BradyrhizobiumColbertium
atgaccgttgccacgtcgctcatcccaggactggacgatattgtcaggcgcggcgatccgcggcgacgcggcgagatcgcgcgcgctgtcgcacagttgtttctccaggatgcggagaagctccgccccgaattggtcgccctcttcgacaatgttctgatcgatctcgttccgcatgccgagctggcctcgcgcgtcgatctcgccgagcgcttctcacgcctcaacaacgcgccaccgcacctcgtcaaccagctcgcgcgggaaaacgagatttccgtggcgggtcccgtgctgcgccgctcgcctgtgctcgacgatgcggccctggtcgagatcgcgcgtttgaagggccagggccatctcctggccatgacggaacgtcccgccttgtcgcccgtcgtcaccgacgtgctggtcgagcgcggtgatcgcgacgtggtgcgccgtgccgcaagcaatgccggtgccgcgttctcgccaagcagctattccgagctgatcaagcgcgccgcgcaggacggtgtgttgacgctcaagatcggccagcgcaacgacctttccggcgagcacctgaagcagctgctcgacggcacgctcgacgtcatccgccgccgcctctccagcgtggtcaaccccgcgcgccaagccgaaatcaagcgcgcgatggcggcgatcgaggaggctgcccggccgccgggaccgcgccgtgattactcggcagcacagcgcaccgtgctggcgctgtaccgcgaaggccatcttggcgagagcgcgttgcttggcttcgccaaggcgaacaaatacgaggaatcgatcgccgctctctcggccatgtccggcgttcgcctctcggtgctcgaccgcctgatcgcgggcgatcgctacgatccgatcttgatcttgggccgcgtgctgaatctcggctggcccacggtgcgcgcgctgatccggctctggtatggcccgcaacgcgcgcccgccgacgccgacatcgagaccgcgcgcgtgaacttcacgcgactgatgccgacgaccgccgagcgcgtcgtgcatttctggcgcaaccggcagacgatctga

SEQ ID NO: 3671 - DNA, 711 bp, BradyrhizobiumColbertium
atgagcgaacgcaaatcagatcccggtcgcgacgacagcgagcgcgccttcttcgggcgccgcaagggtcacaagctccggcagcatcaggccgagctgatcgaccatctgctgccgcatctcgcgctcgacatcaacggcgaggcgccggtggatgcccgcgcgatcttcgctcccgcagccgacgacgtacggctcgagatcggcttcggcggaggcgagcatcttgctgccgaggcgcagaacttccccacgaccggcttcatcggctgcgagccctatgtcaacggcatggcgaagatcctcgcgcagatcgaggccgccaacatcggcaacatccgcctgttcgcgggcgatgccgcagagctcttggcctggttgccgaagggggcgctgtcgcggatcgacctgatccatcccgatccctggccgaagcggcggcactggaagcggcgcttcgtccaggacaggaccatcgccgcgatggcgcgcgtgctgaagcctggcggcgaatttcgcttcgtctgcgacatcgacgattactgcgcctggacgctgtcgcatcttgcacgctcgcaggacttcgtgtggcttgccgaacgcgccgacgatttccggcagccatggccgggctacaccatgacacgctacggacggaaggccgcgcgagaaggacgcaaggcggcttatttgcggttcaggcggatatga

SEQ ID NO: 3672 - DNA, 1128 bp, BradyrhizobiumColbertium
atgaccagctccaattggttcgattcccaaaccattctcgacggcatccgccgctgggtggagatcgagacgccgacggaatcacctgagcaagtcaacgagctggtctccttggtcgcggagcaataccgcggcctgcccgtcaccctcgagcgcgtcgccggcgtggctggctgcggcgatcatcttgtggcgcgcacgaattggggtcaggaccggccaggcatcctggtgctgagccacctcgataccgttcatcccgttggattcatcgagcgcctgccgttcaaggtcgaaggcgacgtcgcgtttggacccggcatctacgacatgaagggcggcgcctacatcgcccatcatgcctttggcgcgctctgcgccaccggcgatcgctcgccgctcggcatcacgcacctgttcacctccgacgaggagatcggcagcccgacgtcacgtgcgctgattgagaaggaagggcgcaaggccaaatatgtgctggtgaccgagccggcacgcgacggcggcaagatcgtcaccggacgcaagggcgttggtcgcttccaggtgcacatcaagggtgtgcccgcgcatgccggctcccggcccgaagacggccgcagcgccgtccgcgagctcggccacgtcatcctggcgcttgaaggaatgaatgatcccgcgcgcggcgtcacagtcaatgtcggcctggtgcgcgggggcacgcgccccaacgtcacgccggaagaggcttacgccgaagtcgatctgcgcgtcgtgagcctgaaggacgcggacgagtacgtcgacaggattctcgccctgacagcgaagaccgacggcgtcaccgtcagggtcgccggcgggctcaatcgtccgccctacgagaagagcaacgcgggggcctccctgtacgaacatgcgaggttgctcgccagggagatcggattcgagctgatcgacacccataccggcggcggctcggatggcaatttcaccgccgcgcacaccgcgacgctcgacgggctcggcgtcgacggcaagggcgcacacactcatttcgagcagctctacgtctcgtcgctcgcgccacgcgcgcggctgctccatcggctgtatcagaccctgcgatga

SEQ ID NO: 3673 - DNA, 120 bp, BradyrhizobiumColbertium
atggtttgggaatcgaaccaattggagctggtcatggatgcatctgtgcctttgaatcgcatcatcgaagcggaggtgcatcaatgcgcggtcgcaaatgacgacataggccagatttga

SEQ ID NO: 3674 - DNA, 414 bp, BradyrhizobiumColbertium
atgtcaaaagcgcccaaccctgttgacaaatatgtcggcagtcgcgtgcgcatgcgccgcatcatgttgggcatgagtcaggaaaagctcggtgaagctttgggcctgactttccagcagattcagaaatacgagaagggcacgaaccgggtcggcgcgagccgaatccagcagatcgccgaaattctccaggtgccggtctcattcctgttcgagggcggcccgagcggcgtgccgggtccggaaggcttcagcgaaggcgcctcgccctcttacgtctcggactttctcgcgacctccgaagggctcgccttgaccaaggcgttcacgcgaatcaccgattcgaagatgcgccgctcgatcgtcgatctcgtcgagcagatcgcggcccgcgaaggtcccgacaagcgctga

SEQ ID NO: 3675 - DNA, 1614 bp, BradyrhizobiumColbertium
gtgagtccattgcagcgactccggcagatcgcgcttgccatcatcctcacctggggatggaagcgcgcggtgatcgccatggcggcgggggcgctgtcggtgctggcgctggcgccgttcaacctcttcccggtgctgttcatcaccttcccggtaatggtctggctgatcgacggcgccggggccggccgacatggcggcgtccccgccgccgcattgaccggctactggttcgggctgggctatttcgtccccggcctctactggatcggctatgccttcttcgtcgacgccgatgtgttcgcctggctgacgccgttcgctgtgctcggcctgcctgcctatctgtccatcttcacggccatcggctttgcactggcgcgcctgctctggaccaagaacgccacgcgtgtgctggcgctcgccgcgagcctcaccatcagcgagtggctgcgcggtcatgcgctgaccggctttccctggaacacgttcggctacgcgctgtccgagccgctgccgctggcacagacggcgtcgctgatcggcctatggggcatgacgttcctgaccgtcgcgatcttcgcaagcccggcgacgctgatcgaccgcacgcccgaccgccgcccgcaatggcgcgtgccaagcgccgccgtcgcacttctgatcgtcatgagcatcttcggcgcaatccgcctgtcgctccatccgaccgcgatggtctcaggcgccaagctgcgcctgatgcagccgaacctgcagcaggacgccaaattcaactacgccgccaaggcggaggtgatgaagaaataccttgcgctgtcggaccgcgcctccggcccgcaatcgaccggcgtgcgcgatgccaccatcctgatctggccggaatccgcctttccgttcttcctgacccgcgaagccggcgcgatggcgcagatcgccgacctcctgcccaagggcaccgtgctgatcacgggctcggtccgcgcgcccgacctgccgcgcggcacgccgatcacgcgcgcctacaactcgatctacgtgatcgatcacgacggcagtgtgctcgcagtgtacgacaagctgcatttggtaccgttcggtgaatttctcccatatcaggcattgatggagaagctcggtttcgagcagctgacgcgtgtgcgcggcggcttcattcccggcaccgtgcggcatgcgttgccggtcgccggcgcgccgcctgcgctgccgttgatttgttacgaagcgatctttcccggcgaggtggcagggcgcaacgaacgtccgggctggatcgtgaacctcaccaatgacgggtggttcggcatttcgaccggtccttatcagcatctcgagcaatcgcggatgcgcgcgatcgagcttggtttgccgctcgtgcgctccgccaacaccggcatctccgcggtgattgatccggtcgggcgcaccatcgccagcctcggtctcggcatcgaaggcatcttggatgcaaacctgccggccgcactgccgccgaccgtctatgcgcgcgtcggcgatgcgcctgcagccatgctcgttgcgctcgcagtgattgtggcggtccggcggcgcgtcgccaagcggcacacctga

SEQ ID NO: 3676 - DNA, 1116 bp, BradyrhizobiumColbertium
atgccggattccgatccaatccaggacaacccgcgcaacacggccaatttgccggtcgtggtgacacaaggcgaggtgatgcgtccgacggcggacggctggctgctgcgcgccatccggacgctgttcggctggaaggcgggatcggtccgcgacgacctcaaggtcgtgctcgacgcaacgaggcccgacgacaccggcttctcggccgtcgagcgcaccatgctgcgcaacattctcggcctgcatgagcgccgcatcgccgatgtcatggtgcaccgcgctgacatcgtcgcagtgaagcaagacatcccgctcggcgagttgatggaccgcttcgagagcgccggccactcccgcctcgtggtctacaacgagacgctcgacgatcccgtcggcatcgtccatatccgcgacctgctcgccttcatgaccgcgcgcgcccgggtgtcggaagtcaccaagaccaagcgcaagaagccgctgccggcagggctcgacctgcgtgccgtcgatctcgcgctgccgcttcatgaagcgcgtatcatccgcaagctgctctacgtgccgccctcgatgcgggctattgacctgctcgcgcagatgcaggccacgcgcatccatctggcgctggtggtcgacgagtatggcggcagcgacgggctggtctcgatcgaggacatcgtcgagcagatcgtcggcgagatcgacgacgagcacgacagcgacgagccaccctcgatcgtgcgcctgcccgacaacgccttcatcgccgacgcccgcgcccgcctcgacgatgtccgctcggtgatcggcgaagacttcctgaccggcgaggccggcgaggaggtggagacgctgggcggctatctggtcagcttcgtggggcgcctgccggtgcgcggcgaggtgatctcgggccccggcacctacgaggtcgaggtgctcgacgccgatccgcgccgggtcaagcggctgcgtatctcgacgcggaaggagcgccccgcgccgcgcgcccagcgcgagagaagccgccgcgaggcggcccccgacgcaggtcagccgccggcgggcgaaacgcccacgtcgccgagcgacgggaccagccaacagtga

SEQ ID NO: 3677 - DNA, 489 bp, BradyrhizobiumColbertium
atgaccgaggtcctcgtcgtcgccgattgctggcagcgcgagcccgattccgaagccgtgatccagcgagcggtggccgctgccgccgagagcattcacgaggacgttgccgatgcggaagtggctgtgatgctgaccgatgatgccggcatccgcaccctcaacagcaactggcgcggcatcgacaagccgaccaacgtgctgtcgttccccgcgcttcagcaggagggcgaccggaagccgggcgatgcgccgcgcatgctcggcgacatcgcgatcgcctatgagaccatgcggcgcgaggcggacgaggaacacaagccgttcgatcaccatctgagccatctcgccgtgcacggcttcctgcacctgatcggctacgatcacgagaacgacgacgacgccgaggagatggaagcgctggaaacgcagatcctggcgcatctcggcatccctgatccctatgcagaccgcgcggggacacactga

SEQ ID NO: 3678 - DNA, 996 bp, BradyrhizobiumColbertium
atgcaagttccgcccgagacccaggtcgtcatcgacttcgacgacaaccgcgccgcttccgcgctggtcggcccctacggccagcacctcgcgcagatcgagcggcggctcggcgtcgtcgtcgattccaagggcaaccacatcaccatcggcggcagccgcgacggctgcgacgccgcgcgccgcgtgctggagatgctctatgcgcaggcggcgaagggacaggatctcgaccagggcgaggtcgagggcgcgatccgcgccgtgatcgcccagggctcgctgttcgagttcgacgccaagtccgccaaatcggcgttcgacagcatcaatctgcgcaagcgccccgttcgcgcgcgcacggccgcgcaggactcttacatccgtgcgctgaagcggcacgagctggtgttcggcgtcggcccggccggcaccggcaagacctggctcgccgtcgcccacgccgcgcagctgttcgagcgcaaggaggtcgaccgtatcatcctgtcgcgtccggcagtggaagccggcgagcggctcggcttcctgcccggcgatctccgcgagaaggtcgacccctatctgcggccgatctacgatgcgctgtacgacctcatggacgcgcgtatcgtcgagcgtgcgctccagaccggcgagatcgagatcgcgccgctcgccttcatgcgcggccgcaccctcaccaatgccgccatcatcctggacgaagcccagaacaccacatcgatgcagatgaagatgttcctgacgcgtctcggcgagaacagccgcatgatcgtgaccggcgatccctcgcagatcgacctgccgaacggccagacctcgggtctggcggaggcaacgcgtcttctgaacggcgtcgaaggcattgctcaggttcatttcagggccgaggacgtgatccgccacgaactcgtggcgcggattgtcgccgcctacgaagggccgccgcagcggccgaccaccggtcaatcctga

SEQ ID NO: 3679 - DNA, 1395 bp, BradyrhizobiumColbertium
atgacgccgccgcgcaagctgcacatcaaatcatatggctgccagatgaacgtctacgatgcgcagcgcatggtggatacgctggcgccggaaggattcgtggagacggccagcgcggaggatgccgacctcgtcatcctcaacacctgccatatccgcgagaaggcctcggaaaaggtctattccgaactcggccgcctgcgcgtggccaaggacgaagccgcgcgcgcgggccgcgcgatgcagatcgccgtcgcgggctgcgtggcgcaggccgagggcgaggagatcgttcgccgcgcgccggcggtcgacgtcgtggtcgggccacagagctatcatcatctgccggagctgttgaaacgcgccggcagtgaaggccgtgcgatcgagaccgaattccctgcggcagacaagttcggcttcctggcccagcccaagccagacgccatccgcgcgcgcgggatttccgccttcgtcacggtgcaggaaggctgtgacaagttctgcaccttctgcgtcgttccctatacgcgcggcgccgaggtgtcgcgtcccgtggcgaagatcgtcgatgacgtgaagcgtcttgccgacaacggcgtgcgcgagctcacgctgatcgggcagaacgtcaacgcctatcacggcgagggtccggacgggaaaacctggccgctcggccggctgctcgaacatctggcggccattcccggcatcgcgcggctgcgctattcgaccagccatcctcgcgacgtcgacgacagcctgatcgcagcccatcgcgatctcgatgccctgatgccgttcgtgcacctgccggtgcaatcgggctcggaccgcatactggccgccatgaaccggaaacataccgccgatgattaccggcgcgtcgtcgaccgtttccgtgctgcacgccaagacattgctttttcatcagattttatcgtcggcttccccggcgagagcgagcaagattttctcgccaccctcgcacttgtcgcgcaaatcggctacgctgcagcctattcgttcaaatactccgcccggccgggaacgccggcggcggacatgcaggagacggtatcccccgccgagatggaccagcgattggagcggctccaggaactgatcgacagccagcaatcggccttcaacaaggctgcgatcggctcgacggtcgacgtgctgttcgagcgtccggcccgcaaggagggccagatcgtcggccgcaccgcctacctccagccggcgcatgtgatggcttcgcccgacatcatcggacaaatcctgccggtgcgcatcgaccgcctcgagcgctacagttttctcggcgaactcgtgacgccgcgtggcgcgcgcgagcacgctttatcgcaagccactggagcctga

SEQ ID NO: 3680 - DNA, 681 bp, BradyrhizobiumColbertium
gtgccgatagacctcatcatcttcgattgcgacggcgtactcgtggacagcgaggtgatctcctgtcgcgcgcatgccgacgtgctgacgcggcacggctatccgatcacctcggagcaggtgttcgaacgcttcctgggacgctcgacgcggcaggccaatctcgagatcgagaccgagctcggccgcaagctgcccgaggcctatcacggcgatcttcaggacgagctgttccgctcgttcggggccgacctcgaagcgatccgcggcattcgcgacgtgctcgatgtcgttacgcaagctgtctgcgtcgcctcgagcggctcgcaccagcgtatgcgcgtgagcctgggaagtaccggtctctacgagcgcctggcgccgaacatcttctcggcctcgcaggtgaagaacggcaagccggcgccggacctgtttctgctggcggcgagcgaaatgggcgtggcgcccgagcgctgcgtcgtgatcgaggacagcctggccggcatcgccggcgcccgggccgcgggcatgacggtgttcggcttctacgggggcagccattgccggcccggttatgccgagacgctgcgcgaggctggcgccgacctgatttttgccgacatgcatcagctgccggagcttgtccggcgtgcgggagcgaaggccctggcgggctaa

SEQ ID NO: 3681 - DNA, 456 bp, BradyrhizobiumColbertium
atgaccgcattgaaaccctcctccacatccaaagcgtccgatatcgaggcgcgctgcgctgccacgggcatgcgcatgaccgagcagcgccgggtcattgcccgcgtgctcgcggaggctgccgaccatccggatgtcgaggaattgtaccgccgctgcgtcgccgttgacgacaagatatcgatctcgaccgtgtatcgcaccgtgaagctgttcgaggatgccggcatcatcgaacgccacgattttcgcgagggccgcgcgcgttacgagcagatgcgcgacagtcaccacgaccacctcatcaatctgcgcgacggcaaggtgatcgagttcacctccgaggagatcgagaagcttcaggcggaaatcgcccgcaagctcggctacaagctggtcgaccaccggctcgagctctattgcgtgccgctcgacgacgacaagccgacgtcctga

SEQ ID NO: 3682 - DNA, 486 bp, BradyrhizobiumColbertium
atgatgggatggctgtccgaatggtggcgcggcggcagcgccgtcgtcgagcctgcgaccttgcgcgatgccgcgcggctcgcgcagctgcacggcgcgtccttcgcgcgcggctggggcgaaggcgagttcgagagcatgatcagcgagcgcaacacgctggtgcatcgcttgcgtctgggcggcaagacgatcggctttgcggtgtcgcgggtcggcgcggacgaagcggagattctctcgatcgcggtcgacgcggcttatcgcggccgcggcctctcccgcacgctgttgatgacccatctcggccatctcgccggacgcggcgttcgcacaatatttctcgaggtcgaggaaaataaccagccggcgcggcggctctacgagcgggccggattcacggtggtcggacgccgcgaacgctactataagcagccgaacggggaacaattgaacgcccttctgatgcggcgtgacttgtcgtaa

SEQ ID NO: 3683 - DNA, 696 bp, BradyrhizobiumColbertium
atgctgatcctcgccatcgatactgcgctcgacgcctgcgcagccgccgtgctcgacaccgaaacggccgagctgcgcgcgcacgaatcgctgccgatgaagcgcggccatgccgaagccctgatgccgctgatcgcgcgggtgatgcaatcggccgagctcggcttcaccgcgctcgaccgcatcgccgtcaccaccgggcccggcagcttcaccggattgcgcgtcggcatctcggccgcacgcggactggcgcttgcctccggcaagcccgcggtgggattgacgacactgtcggcctatgccgcggccatcgtcagccagaacaagccggcgcccgtgctctccgcaatcgatgcgcggcacgaccatgtctttttccagatcgtggccggggacggcagccagctggtgcgaccgggtgtcgcctcgatcgacgaggcgatcgccgcctcgcaattcggcgcgccgcatctggtcggcaatgccgcaagcatcctcgccgatcgctggcccaaggatggaccgcagcctgtcgcggtcgacgcgcaacctgcgcccgacatcggctggatcgcctggcttggtgcagctgccaatcccgacaccaccccggcgcggccgttctatctgaaggcgccggacgcaaagccggcggcgcagaagcacctcgcagcacaagccgcgacctcatga

SEQ ID NO: 3684 - DNA, 570 bp, BradyrhizobiumColbertium
atgttcattcaaaccgaagccactcccaatcccgccacgctgaagttcattcccggccgcgtcgtggtcgacggcaacccgatggagttttcgagccgcgaatcagccgcgcgctcgccgctggctgaaaagctgttcgacgtgcccggcgtcaccggcgtgttctacggatcggatttcatcaccgtgaccaaggcgaacggtgaatggcagcagctcaagcccgcgatcctgggtgccatcatggagcactatatgtcgggcgcgccgctgcttgccgacggcacagcgcaaggcgatgccgatctcgacgacgaggacgagttcttcgatgaggccgacgccgagacggtcgacatgatcaaggacctgatcgagacccgggtgcggccggcggtcgccaatgacggcggcgacatcaccttccgcggtttcaaggacggcatcgtctatctcaacatgaagggttcttgcgccggctgcccgtcgtcgacggccacgctccagcacggcatccagaacttgctgaagcacttcgttccggacgtggtcgaagtccggccgatgtga

SEQ ID NO: 3685 - DNA, 495 bp, BradyrhizobiumColbertium
atgaccagcaagcgactttgctacgagccgggccacaagcccaaatgcctcgtcatcgtcgatgacaccgccgaatgggatcgcgcggtgtattacgccagccgctgggcgattcgggccgggggcggcgtggtgatgcttcgcatcatcgagcccgaacagcagagccaggaatggcttggcgttgccgacatcatgcgcgcggaagcgcaggaggccgccgaagccgcactcgaccgcgccgccggccgggccaatggcatcgccgcaatcaccccggagcgggtgatccgggagggcgcgccgatggaacagctgctcgcggtgatcgacgaggatcccgatatcgccatgctggtgctggccgccaatcccggcccggaagggccgggaccgctggtcgcgatgctcgcgcaggcggtcggaacctttccaataccggtgacgatcatctcgggggcgctgagcgaccagagcgtggatctgctgtcgtag

SEQ ID NO: 3686 - DNA, 1053 bp, BradyrhizobiumColbertium
atgccattcgttgaacgggtcttttcgggcgtccagccgacaggcaatctgcacctcggcaattatctcggcgcgatcgtcaacttcgtgaagatgcaggaaacccacaactgcatctattgcgtcgtcgacatgcacgcgatcacgcagggcgtcgacgtctggggcggaccggccgagctcacgcgcaacacccgcgaggtcaccgctgcgttcatcgctgccggcatcgatccgaagaagcacatcgtgttcaaccagagtcaggtctcgggccatgccgagctcgcctggatcttcaactgcgtcgcgcgcatgggctggctcggccgcatgacccagttcaaggagaaggccggcaaggaccgcgagaacgcgtcggtcgggctgttcgactatcccgtgctgatggcggccgacatcctgctgtaccgcgccactcacgtgccggtcggcgaggaccagaagcagcatctcgagctttcgcgcgacatcgcgcagaagttcaacaacgatttcggcgattccattcgtgcccagggcgccagtgacggcctgttcttcccgctgcccgagcccctgatcacgggaccggcgacgcgcgtgatgagcttgcgggacggcaccaagaagatgtcgaagtcggatgcctccgacaattcgcgcatcaacctcaccgacgatgccgacaccatcgcgcagaagatccgcaaggcgaagaccgatccggaaccgttgccgaccgaggaaaagggcctggaagcccgccccgaggccgacaacctcgtcggcattttcgccgcgctctccggccgctccaaagccgatgtgctgcgcgatttcggcggcggccagttctcgagcttcaagaacgcgctggcggagctgtgcgtcaccaagctcgcgccgatcgccggtgagatgaagcgcctcgtcgccgaccccggccatatcgacgcgatcctgaacgacggctccgaccgtgcccgcgccatcgccgacgagaccatgaagctctcgaaggacatcgtcggcttcatccgccggcgctga

SEQ ID NO: 3687 - DNA, 1533 bp, BradyrhizobiumColbertium
atgatccgctccttcctgaccgtctcgacgggaacattggcctcgcggctgctgggttttgcccgcgattccctgattgcggcgctgctcgggaccggcgccgtggcggacgcgtttctggcggcgtttcagctcgtcaacgtggtccggcggcttctcagcgaaggcgcgctgaacgcggcgctgatcccggcctggctccgtatccgcgaccatgacgggcagcgggctgccgcggcattcgcggggcgcgtgctcggcacggtcagcgcggccctgatcgcgatctcgatcgtcatcgcacttctgatgcctctggtcatcacggtgatcgcgccgggattcctcggcagcggcacgctcgatctcgccgtcgcgaatgcgcggctgatgctgccctaccttgcctttgccggtccggtcacggtgctgatgggactgctcaatgcgcaagggcgctttgccctcaccgcgttctcgccgctgctgttcaacatcgcgctgatcgccgcgatcgcagtgctgctgctggaccgcgcagatgcaagcttcgccgcgtggatcctggcggccagcgtcggcatcgccggcctgctgcagcttctcatgctgctgtcgcagcgaagcgcgcgtcttgcgacgccgctgcgcgccagcttcgacaaggagatgcgcggcttcttcgccaaggccatccccggcatgctggcaagctcgggcccgcaatggctgatggtcgcaggcgcgatcatcgcctcggcgacgccctccgcggtgtcctggctctatttcgccaaccggctgatcgagctgccgctcggtatcgtcggcgtcgccatgggaacggtgctggtgccggagctgacgcgtgccgtgcgcagcggagatcgcgacgcggtggcgcacgccgaatcgcgcgcgctggagcttgcgaccgggctgacgctgccggcgaccctcggcctgatcgtactggccgagccgatcgtgcggctgttgttcgagcatggcgctttcggcgcacaggacagcgcggcgacggcgaacgccctgatttggctggcgctcggcctgccggcgcatgtgctgatcaaggcgctgtcgccggcgttctatgcccgcagcgacaccatggcgccgctgctggccacggcccagggcttcgtggtgacggtcgtgctcgcgcttctgctcggccatgtcttcggcgcgagcgggatcgccgcaagcatcgcggccggcgcctggagcagcgcgctcgcgctgctccgcaagggcacgagcgagttcggcttcgcggtcgatgcgagcgcccgcacgcggctgccgcggatcgcgctggccgcgatcgcgatgggcggcctgctctggctgaccacaggtctggtgcctgccgagagccaaggcttcatcaagttcgtcgcgctgggtgtgcagatcgcggcggggatcgccgtctatggcctgctcctgcggatcctcggcgtcacctcctggcatgaggcggtcggcgcgttgaaacggccccgctaa

SEQ ID NO: 3688 - DNA, 1002 bp, BradyrhizobiumColbertium
atggctgacgtgaaatacgacgttctcggcatcggcaacgcgctgttcgacgtgctggtcaggaccgacgaggcctttctggccaagcatggcatgaccaagggcagcatgtccctgatcgacgaggcgcgcgcggccgccatctacaaggacatggggccggccacggaagtctcgggcggctcggccgccaacaccatcgtcggcatcggcagcctgggggcacgcgccgcctatgtcggcaaggtcaaggacgaccagatcggcaagctctatgtccatgacatccgcgccgccggcgtcgccttcgacacgcccgctgccaaggatggccccgccaccggctgctcctacatcctggtcaccggcgacggtgagcgcaccatgaacacctatctcggcgcggcgcaggatctgtcgcccgccgacatcgacccggccgagatcgcggcagccggcatcgtctatctcgagggttatctctgggaccccaagaacgccaaggacgccttcgtcaaggcggccaagatcgcccatgacgccaagcgtaaggtggcgctcacgctctcggattccttctgtgtcgaccgctatcgcgacgaatttctctccttgatgcgcaacggcaccgtcgacatcgtcttcgccaacgagtccgagctgcactcgctctacatgacctcggatttcgacaccgcgctgaagcagctgcgcaacgacgtcaatctcggcgtcgtcacccgcagcgagaagggctgcatggtggtgtcggtggaagacgcggttgccgcgcccgcattcccggtcgacaaggtggtcgacacgaccggcgccggcgatctcttcgctgcaggattcctgtatggtttggcgcgcaatcttgcctacaagcagtgcggcgagctcggtgcgcttgcggctgccgaagtgatccagcacatcggcgcgcggccgcaagtgtcgctgaaggagctggcggagcagcgcgggctgacggcgtaa

SEQ ID NO: 3689 - DNA, 1707 bp, BradyrhizobiumColbertium
ttggctgataatttggctgacaaggcggacagctacgtctgcggtatctcggacacgtcactgctcggcgacacgatcggtcgcagcctggaccacgcggtgcggcgctggggcgatcgcgaggcgctcgtctcgcccagccacggcgtcagatggacctggaaagagttcgccgagcgggtcgacgcgctcgccgcgggctttctcgcgctcgggctcgaacggggggagcggatcggcatatggtcgctgaaccggccggaatggacgctgacccagttcgccgccgccaaagccggcctgatcctggtgacgatcaaccccgcctaccggctcagcgagctggaattcgccctcaaaaaggtcggctgcgcggcgatcgtcaccgccaccgcgttcaagaccagcaattacatggagatgctcaacacgctgcttccggagctggcgcgggcgaaacctggacatttgcaggcagcgcggttgccggctttgcggatggtgatccagatcggcggcccggcggccccaggcacgatccccttcgacaacgtcgcacgcatgagcggagcggagcatcgtcagcagcttgccgcgctcggcgccgcgctgcagttcgacgaccccgtcaacatccagttcaccagcggcaccacgggttcgccgaaaggcgtcacgctgacccaccacaacatcctcaacaacggctacttcacgggacgcgcgatgcgcctgacggagcaggaccgcatctgcattccggtgccgctctatcattgcttcggcatggtgatgggcaatctggcctcggtcacgctcggcgccaccatggtctatccgggcgagggctttgatccgctcgcgacgctgcgcgcggtcgagcaggagaaatgcaccgcgctgtacggcgtgcccaccatgttcatcgccgagctcgatcatcccgagttcaagacgttcgatttgaaatcgctgcgcaccggcatcatggcgggcgcgccctgcccgatcgaggtgatgaagcgcgtcaacaccgagatgaacatgcgcgaggtcaccatcgcctatggcatgaccgagaccagcccggtcagcttccagagcgcgaccgacgacccgctggagcggcgcgtctcgaccgtgggccgcattcacccccatgtcgaggtcaaggtcgtcgatctcgaaggcaagatcgtcaagcgcggcgaacgcggcgagctctgcacgcgcggctacagcgtcatgctgggctattgggaagagaaggaaaagacggccgatgtgctcgatgcccatggctggatgcacaccggcgacctcgccaccatcgacgacgagggctattgcaacatcgttggacgcatcaaggatctggtgatccgcggcggcgagaacctctacccgcgcgagatcgaggagtttctgtaccgtcaccccaagatccaggacgtgcagattttcggcgtcgcggacacccgctacggcgaggagctttgcgcctggatccgcggcaggccgggcgagacgctgacggccgaggaggtccgcgccttctgcgacggccagatcgcccacaacaagatccctcgctacgtggagttcgtcgaggagtttccgatgacggtgacgggaaagatccagaagttcgtgatgcgggatgcggtggagcagcgactgggattgaaggcggcgaagacggcgtga

SEQ ID NO: 3690 - DNA, 1197 bp, BradyrhizobiumColbertium
atgcaaagcaaagctgacatcgacgagattctgcggcagaagagcgagaccaaggagattccgggcgtcgtcgccatcgccgcgagcggcaacgacgtgctgtatcagggcgcgttcggcaagcgcgacctgtccaggccggatgcgatgaccgacgacagcgtgttctggatcgcctcgatgacgaaggcggtgaccacggcgggcgcgatgcagctggtcgagcagggcaagctgtcgctggatgcgccgatcggcgatgtattgcccgatctcgccaatccgcaggtgctcgaaggtttcgacgccaatggcgaggcaaagctgcgccccgccaagggcccgatcacgctgcgccagctcatgacccacactgccggcttctgctacaatatgtggaacggcgatctcgcggtctatctggacaagaacggcattcccgccatcaccacctgccagaacgcggcgctgaagaccccgatcatgaccgaccccggcacgcgctgggaatatggcaccaacatcgatttcgtcggcaaggccgtggaggccgccagcggcaagcgattggacgcctatctgcgcgacaatctgttcaaccctctcggcatgagcaacacggcgttcaagatcaccgacgacatgcgcaagcgcctggtcggcatgcacgcgcgcggcgaggacggccagctggctgccatcccgttcgagctcgagcaggagccggaattccacatgggtggcggcggcctctattcgacggcggcggactacatcaggtttacccagatgatcctgaacaagggccgcggcaacggcaaccaggtgttgaaggccgagaccgtcgcaacgatggggcagaaccacatcggcgatctcgccatgggcaagatgacgacggccgccccgatgtacaccaacgacgtcgatctgtatccggagcaggtgaagaagtggggcctcagcttcatgatcaacaccgccaagaccgccgagggccgtagcgccggcagcctcgcttgggcggggctcgccaacacctattactggatcgatcctgcacgcgacgtcaccggcgtgatcctgatgcagcttctgccgttcgccgatgcgaaatgcctggaagcgttcgcgggattcgaacgcggggtctatgccgggctcgatgctgccgggagcgggcagaaggcggcctaa

SEQ ID NO: 3691 - DNA, 123 bp, BradyrhizobiumColbertium
atgtcagctttgctttgcatggcgttcctcaggtttgattattgttggaagcagccgattgtcctcccggatggccggcgcggcaagcgcatctatgtacctgaaccggtcgcgatgtcgtga

SEQ ID NO: 3692 - DNA, 321 bp, BradyrhizobiumColbertium
atgatttcgacctggagcgaatggaagcgctatccccgtccgggacgcggcgagaacctggaggcgccgatttcgccggggatctatgaggtgcgcgtcgccggcaccggcgcactctactcgttcggggcggtggacaatctggcgcaggcgctgtcgctgttgccggtcggctcgaaatcatggttcggccgccgcgacacctctcatgttcccgatctcgaataccggacctgcgcgacctcctcgaaggccgacgccaaggccgcggccgagcggatgatcggccgtcgcgagacctatatgagcggcgcggcctga

SEQ ID NO: 3693 - DNA, 1494 bp, BradyrhizobiumColbertium
atgacccagaccgccgccgctcgcgctccgcaagccacctccaatctgcgcgaccggctgaaggacccgtcgctcctgaaggaggcctgttatatcgacggcgcctgggtcggcacgccggtattcgccgtcaacaatcccgcgaccggcgtggagctggcaaaagtcccgcagcttggcgcggacgacacgaccaaggcggtcgaagcggccgagcgcgcctttccgggctgggccaagcacacggcaaagcagcgctccaacatcctgcgcaaatggttcgagctgatcatcgccaaccgcgaggacctcgcgctgatcctcacctccgaacagggcaagccgcttaccgaggctctgggcgaggtcgatatcggcgccgcctacatcgagttctttgccgaggaagcccgccgcgtctatggtgagaccatcccgacgcagcggcccgatgcgcgcctgctcgcgatcaagcagccgatcggcgtctgcggcgccatcacgccctggaatttcccgaactcgatgatcacgcgaaaggtctcgccggcgctggccgccggttgcaccgtggtgctgaagcccgccaatgagacgccgctgtcggcgctggcgctcgccgtgctcgccgagaaggcgggcatccccaagggcgtgctcaacatcatcacgggtgacgcaccgccgatcggcaaggtgctgtgcgagcatccggccgtgcgcttcgtcggcttcaccggctcgaccgccgtcggcaagatcctctaccagcaggccgccgtcggcgtgaagcggctcggcctcgagctcggcggcaacgcaccgttcgtggtgttcgacgacgccgacattgacgctgcggtcgaaggcgcgatcgtctcgaaataccgcaacatgggccagacctgcgtttgcgccaaccgcctctatgcccaggacaagatctacgacgagttcgtgcagaagctgtcgaagaaggtcgcgtcgatgaagatcggcgacggcaccgagagcggcgtcacgcaaggacccttgatcaacatgaaggcggtcgacaaggtcgagcgccacatcgccgatgccgtcaagcgcggtgccaaggtcgtcaccggcggcaagcgcagcgagctcggccgctccttcttcgagccgaccgtgctggccgacgtcaagccggattcgctggtgtcgcaggaggagacctttggcccgcttgccccggtgatccgcttcaaggacgaggcggacgtcatcgcgatgtgcaacgcctcgccattcggcctggcctcgtacttctactcccgcgatctgggccgcgtctggcgcgtcgccgaagcgctggaatcgggcatggtcggcgtcaacaccggcctcatcaccacggaagtcgcccccttcggcggcgtcaaggaaagcggcctggggcgcgaaggctcgcgtcacggcatggaagaatatctcgagatcaaatacgtgatgatggcgggggtgtga

SEQ ID NO: 3694 - DNA, 915 bp, BradyrhizobiumColbertium
atgaccaccatgctctccagcgacctgccgcttcccaagatcggacgcggcaaggtgcgcgatatctatgccgtcgacgatgagcgcctgctgctcgtcaccaccgaccgcatcagcgctttcgatgtggtgatgggcgaaaccattccgatgaagggcgcggtgctgacgcaaatcagcgcgtggtggttcaatgagctcgaaggcgtggtgccgcatcacatgatcagcgcggacaccgacgagatcattgcggccgtgccggcactgaagccgcaccgcgccgagatcctcggccgcgccatgctgtgcaagcgcaccaccgtgtttccgatcgaatgcgtgatccgcggttatctctcgggctccgcctggaaggaatatgccgccagcggcacgctcgccggcgagaagctgaaggccgggcttgtcgagagcgagaagctggagcctgcgatcttcagccccgccaccaaggccgagagtggccatgacgagaacatcacgatcgcgaagatgcgcgaagtggtcggcgacgaggtcgcctatacgctggaaagcatgacgcgcgcgatctacacgctcggcgaggagctggcgcgcgaacagggcatcatcatcgcggatacaaagttcgagttcggccgcgacagggacgaccgcatcattctgatcgacgaggtgatgacgccggattcctcgcgcttctgggcggtcgacacctacaagcccggccagccgcaggcgagcttcgacaagcagccattgcgcgactatctcgacgccgagcgccgcgccggccgctggaacggcgacgccccgccgccaccattgccggcgagcgtcgtcgaagcgaccagcaagcgatatctggaagcgtaccggcgcgtgacgggatcggagttgaagatttag

SEQ ID NO: 3695 - DNA, 918 bp, BradyrhizobiumColbertium
atgagctggcagccctcgaacgatcccgtgctcggcgatcccatgtcctgcgatgcgctcgatctcgtcatcgtgccgcggacgcgcgatctcggcgacggcttcgcggtgcgccgggcgctgccgcacggcaagcggcagatggtcgggcccttcatcttcttcgaccatttcggaccggtgcagttcgtctccggaaaaggcatggacgtgcggccgcatccgcatatcgggctcgccaccgtcacctatctgttcgacggcgcgatcatgcatcgcgacagcgaaggcaacgtccaggagatcgcgccgggggcgatgaacctgatgacggccggccgcggcatcgcccattccgagcgcacgccggatgcacagcgtgcctcgggccagaagatgctgggcctgcaaagctggatcgcgctgccggccggatcggaagaaatcgcgccgtcgttccaacactacggggcgggcgacctgccgatgatcaccgaacgcgatttcaccgcgcgcgtgatcgcgggatcctcgttcggcatcacctcgcccgtatcgatggtgtcgccctggttctacgccgaggtgactgccctcgccggcgcgagcgtgccgctcgatcccgatcacgaggagcgcgcgatttatgtcgtcgacggcgaggtcgagatcgcgaacgagcgctatgaagggccgcggctcctcattttccgccccggcgaccgcattacggtgaaggcgctcaaggcgacccggatgatgtttcttggcggcgatgcgctggaaggtccacgccatgtctggtggaatttcgtttcatccagcaaggagcggatcgagcaagccaagcaggactggaaaaccggccgtttcgcgccagttccgcaggaacatgagttcattccgctgccggaatag

SEQ ID NO: 3696 - DNA, 1371 bp, BradyrhizobiumColbertium
atggcctttgaaaccgcaacgctcgcagcctatgtctccaatctgaagtaccaggatattccggcagaggtgctggagcgcgccaaagtgctgacgctcgactttctcggcagcgcgatccgggcaaggcgcgaggcggaatcgaccccgtcgatgctgaagatgctggaggcgctcgcgctcgacaccaagggcgaatccaccgtgttcggcgataccaagacctggactccggcagtcgcggccctgctcaacggcgcgctggggcattccctggatttcgacgacacgcacgccgattcctcgctgcatccgagcgccccggtggttcctgcggccttcgccgtcggcgagatggtcggcgcgtccggccgcgacgtgctgacggcgatcgtcgcgggctatgaggtctgctgccgcctcggcaacgcactcgatccgacctcgcattatgcacgcggcttccatccgaccgcgacggctggcacctatggcgctgccgcagcggccggaaaactgtttggcctcagcgagaagcagctgatcgcggccttcggcgtgtccggcagccaggccgcgggttcgctgcaattcctggtcaacggcgcctggaacaagcgctaccaggtcggcgcggccgcgatgaacggcgtgatcgccgcgacgctcgcccgcaacgatttcgtcggcgcgaccgaatcgatcgagggcaagcacggcctgctcgccggctacaccgacgacgcgcatccggacaaagcggtcgccgagcttggcaagacctacgagacgatgaagatcggcgtgaaaccctatccgagctgccgctacactcatgccgcgatcgacgccctgatcgccatgcggcgcgagcacaatctgactcccgaccaagtcaagcgagtcgagatcggcttgcaccgcaacggcatcacgctcaccggagatgccgcgaccaagcgccatccgcgctcgatcgtgggcggccagttctcgatgttcttcaccggcgcgctcgcgcttgaccagggctcgttcggctgggacgactacaaccggcttggcgatgccgcgatcgacgcgctcgcggacaagttcgacgtggtgcaggacgaccggctcgagatcggccgcacccacccgttcggggcgcgcgtcagcatcaccaccgacgacggcgtgcatgagcggctctatgccgatccctccggcgagccgacctcgttcccggacgcgcaggccatgcagcagaaattcctgacgctggcccgccccgtgctgaacgcgcgggcggagaaattcgcggacgcgatcatgacgctggagcgcttcgaccgcgtggcgcaggcgaccgagctgggacgtcagtaa

SEQ ID NO: 3697 - DNA, 1113 bp, BradyrhizobiumColbertium
atggcactcgcaggacagctgttcgacaggatccgggcgcgaaggacgcagctggggctcgcgatccgggtcacggtggcggcgaccgccgcctacgcgatcgccaccgcgctgcacctcttgctgccgctctgggcggtgctgacctcgctgatcgtgacgcagatgagtgtcggccgctcgctcaaggcgacgcgcgactacatgctgggcacgatcggcggcgccgtttacggcggtgccatcgcgatcctgataccctattccagcgaagcgggcctgttggggctcctggtcctctcggtcgccccgcttgcgttcatcgccgcgatcaatccgagcctcagtgccgccacggtgaccgcggtgatcgtgctgctggttccgaccatgcaccattccgatcccctggcctcggcgatcgatcgggtgagtgaggtcgcggtcggggcggtcacgggattgctggtgtccttcctggtgctgccctcgcgcgcggtgcggcagatccgcgccagcgcggccaagctgcttgaattgatcgccgacgctttcaccgagctgcttgcgggcctgacgcgcggccgtgacaacgatgcgctgcaccggattcaggacgggatcggcactgcgatggtcgatctcaacgcgatcggctccgaagccgagcgcgagcgcgccgcgcatctgtcgagcggcccggacaccggccccttgctgcgcacgatcctgcggctgcgccatgacgtcgtgatgatcggccgggccacggtggtgccgctgccgatcgaggtgcagacgcggctggccggcccgttgacggaggtctcgacggtgatcgcccgtttcctgcgttcggccgcctcggccttgcgcgaaggcgcaggcgcgccgccgatccatccggtccacgtcgcgctccagcactacgccgaagcggtcgcgtccgtgcggcaggacggcctgattcgcggctatccaggcgacaccgccgagcgcttcttcgcactcggtttctccctggagcagatgcaccagaatctgtgcgatctcgatcgtgtcgtcggcgaatggtcagaggcggcgagcaagtccgcgcgcattgcagactga

SEQ ID NO: 3698 - DNA, 1311 bp, BradyrhizobiumColbertium
atgcatctggcaaaattcttccatcgcgcaccgggcgacgacgatcgcgagctgatgctgatcccgggcagcgagcccatggtgatcggcatccgcatgaaccgggacgacgaacccggatcggatcaatatctgcgcgaggaatttccggacattgccgaggccgccgcagccttccgtcgccatgccgccgaactggtagcgcacggttacgtcgagacccaccacacgcgttatacgttgcgcaatctcctgcccgatccgcaggcaaagccggactggcaaaaaggactcgacgagctgatgatgctggcgctcagcggcccactcgcggagcaggcaaagcaactcgacctgctcaagggcacgccggccgagcacgagccgctgtatctctggcacgccgcacgccgcgattacgctgccggagacgacccggccggggcggtgcgccttgctgaacaggcacacaatgaaatccgcgcgcggcgcgcatccggacagccgcactatgcgtggtccatctccgagaacgacctcgaggagcgcattctcgagctgctgtgcgacgcctatctctatgccgacgatgcagatgcggcgctgaagaccgccgagcacctgtgcaggaccgccccgaaccatgaacacatcctcaagcgcgcggagattgtctgcggatatttccccgagcggcgggaagaagccttagacgatgcctatcaatggtcgcgcttcggcggctacgaggacatcattgcgtttcccggctatgctgagtacgaaagccggcgcaaggcgggatcggccaggagctggcgctggaggcccggcacgccagcgagcgaagccgatgtgagtgctgcgcagcgggccctcggagtcagactgcccgatgattatcgcgacttcctgctgacccgcggcgagacggagctgctggtgcggctgcccgagtcctcctccgagcttcgcttctatggaccggatgagcttgccacgcagcatcgaagcctgctcgatttcatcgcctattccgaggaagtgctcgaggaagcctgcgcccattttcgcaagcaatacggcgtgtcgctaaagcacctggtgccgattgcggaaccatcgcagctcagccgttgtctcctcctccatgtcgagcccggaacgcgctatggtcagtgttttcaatgggaccatgacggggcgtgggaactggagcaacctcagccaagcttcgatgccgcattgaacgcgctgaccgagggcatagagcggcgcgatgcgacgcagctcgcgttcttcgatctgtaa

SEQ ID NO: 3699 - DNA, 651 bp, BradyrhizobiumColbertium
atgaccctcgccgtcgacctcttcttctccttccgcagcccctacagctatctggcgctgcccaagacgcaaaaactcgtcgaagactacgatctggccgtgaacctgcggccggtctatccgctcgcggtgcgcgtgcccggctttttcaagaaggccaacccgcagtttgcgcgctacgtcgttcgcgattccatccgcgtggcggaatacgagggcatcccgttccgttttccgcggcccgatccgatcgtgcaggacatgacgacgctggaggtcgcggccgagcagccctacatccaccgcctgacgcggctgggtgccatggcgcagctcgaaggccgctcgctcgcattcacctgcgcgatcgcccgcgtgctttgggacggctcggtcgccggatggaacgaaggcgatcatctcgcgcgggcggccgagaaagccggcttcgatctcgccgcaatggatgcggcgatcacagccgacccggatcgctacgagcaggtgatcgctgagaacgagacggaccacgcggcgtcaggccattggggcgtgccgaccttcgtattcgagaacgagccgttcttcggccaggaccgcgtcgatctcctggtctggcgcatgcagagcaagggcctgacgcggcggtaa

SEQ ID NO: 3700 - DNA, 489 bp, BradyrhizobiumColbertium
atgaacgggacagttcgcgaaatcactcccaatgtcgatgtcgaaacggtgctggcaggcgcgcagttcatcgacgcgtttcgcgtggagatcggcgcggcggcgctcgatgcccgcgaagcctgcaccaggatggtgctccacgggccgcgctggaccgacgcgctgctgcgcctgcgcaacattctggtgaaaccgttcggactgaggacatcgggcgaaggcgctccggcgccgcacgggttgatcggcctgtttccggtgctcagcgaaacgcccgaacggctggtcgctggtttcaacgactaccatctcgattttcgcatcgtggtcgatgtcgcaggctcggcggcggaccgcgaggtgacgtcaaccacgctggtgcgcacgcacaatctgctcggccgcacctatctcatgctgatcatgcccttccacaagctcgtggtccgcagcatgatggggcggattgtggagccagcacgatga

SEQ ID NO: 3701 - DNA, 1401 bp, BradyrhizobiumColbertium
atgactgaacttctggacaccgaacagccgggccacgcacgctcggatgcaccgccgaaccatctcgccgaggagttggccgagacgctgcgcctcgccgtgccgttgatgctgacgcagctcgggcagatcgcaatgatcaccaccgacctggcgatgatcggccggctcggcgaggacgccgtggccgctgcggcgctggcccatacggtctatttcgtcagcttcaccttcgggctcggattgacgtccgcggtgtccccgctggccgcgcaggcgttcggtgccggcgacgtcaggctgatccgccgctccttgcgcgtcggcctgtgggttgcgctcctgatctcgctgccgatgatggcctcgccgctctacggcgagcagatcctgctcgcgctcggccaggcgccgcaatcggcggcgctggcgcagcgctacctgaacggcctcgcctggggcgtcgcgccggcgctcggcttcatcgcgctgcgcggcatgatgagcgcggtgaaccggccacaggcgcccctatggatcaccgtggcggcgatcccgatcaatgccgcgctggtctatgccctgatccacggcctgttcggcctgccggagctcgggctgttcggcgcaggactcgcgaccacgctggtcaatctcggcaccttcctcgccgcgctcgcgatcgcggcgctgcgcgagccgtttgcggattaccatccgctcgcgcgcctgtggcggatcgactggcccttgatgcgccagctcattgcgatcggcgcgccgatctcgttctcgctgctgctggaatacggcctgttctcctcggcggcgctgctgatgggattgatctcgaccactgcgattgccgcgcaccagatcgcgctccaggtcacggcggtgctgttcatggtgccgctcggcatcggcatggcagcgacggtgcgggttggccatgccttcggccgcaatgatccggcggcagtgaagcgcgcggggctggtcgctgccgtgctcggcctcgcgctggtctcagcgctgaccatcgccatcataatcggccgctaccagctcggccggctgtttttcggcggcggcgccgaaagcgcggcgacggtcgaactgaccgggactctgctgctggtcggcgccagcttcttcatcgccgacggcctccagaccatcatgggcggcgcgctgcgcggcatcaacgacaccaggatgacattgctgttcgcggcgatcggctattggtgcatcgcctttccgatcggctgggtgctggcgttccacacaaggttgggcgcgatcggtgtctggatcggattctcggtcggtacgttcgtctatgccggtctcctgatcttgcgcttccggatgctcgcgcgcagattggcggcatga

SEQ ID NO: 3702 - DNA, 717 bp, BradyrhizobiumColbertium
atgacgttcgccgcgctgctcatcgggtctgccctcacgggcgccggcgccgctgcagcggccgacctgaggttgcccgcatcgccgcccccgcaagcccaggccgcatctgcggccctcttgagctgggcggggccctatctcggcgtgcaggccggctacctgtcgggccgcactgagacctcgtttcccgccaccggggaatttcacttcgtcgatcccaagggggcgaccgtaggtgcaacggcaggcttctccgcgcaatggggccgtatcgtcgccggtatcgagggcgacgtgaactttgtcgatgcgcgggcgacggtcgacaccggctttgccccgaccccttccgtcacccagcttcagtccgcggtcaattggaatagccatctgcgtggacgcgtcggctacgccttcggccggacgatgctgtttgccagcgggggcctcgccgttgcgggggtcgaaagcaaagcgttcgacaatgcgagcggggcggtcgccaactggaccgatacccgtgtcggctggtcgatcggagcaggcagtgaattccgcttcgcaccgaacgcgtccgcccggctcgaatatctctatgacaattacggctcaagaaccctcggaagccagacggttggagccgtcagtttcaccgaacgcgcgtccaggctcgatacccataccgttcgagcaggcgtctactggcgcttttga

SEQ ID NO: 3703 - DNA, 561 bp, BradyrhizobiumColbertium
atgatggaagaaccatcggacgagaccttgatgtcggaggtttcggcgcagcggcagcacgcgtttcgcatcctgatgcggcgtcacatgccccgcgcgctgcgggtcgcggagcggatcgttcgcgatccggccgaggccgatgacatcggccaggaggcgttcatgcgtgtctggaccaacgcggcctcgttcgatccgaaggtcgcgaaattcacgacctggctctaccgcatcgtcctcaacctgaccttcgaccgcacgcggcgccgaacgtttgagcctctcgaagaggccggcgaggtacctgacaccgggccgcatgccgtcgagcggctgatcgccgacgaggagctcagccttctcaaccgcgcgatggccggcctgtcggaccggcagcgcggcgcgatcgcgctcttccacatggaggggctgagcggcgaggaggcggcgaaggcgatgaatctcagcgccaaggcgttcgaatcgctgctgggccgcgcccgcctggcgctgaaggcaaatgttcgaaaaatacaggacacggggagctacgcatga

SEQ ID NO: 3704 - DNA, 429 bp, BradyrhizobiumColbertium
atgacgcccgatcagttcagggaattggccgagacatggggaggcgacgtcgagcgctggccggcggcaacgcgcgaggccgcgcggcgatttgcggcgagcgcggaaggcgccgccgtgctggctgagcaggagcgcctcgaccgcctgctcgctgtcgccccggagatcgagacgacgcgggcggaccgttcgagctttcttgtcctgcagaggctcgccgccgtcccgccgcagcgtcggccggcatggcatcagcgcctgttgcgctggccggcgctcgttcccgccgcaagtctcgcctgctcggtgatggtgggcgtgtggctggcgggagcgatgccctatgcccacgcgccgtcggacgtcttgtccgtcatgagcggcgtcttcgacgtctacgcaatcggctatggatcggtgccatga

SEQ ID NO: 3705 - DNA, 402 bp, BradyrhizobiumColbertium
atgctgctgtcgctgtgcgccaacgtcgtccttttcacctatgtctcggtgcaatggctgctgcccggcggcttcaggcccggcgcgggcgtgccgatccgcatgatcgagcgtgtcgccgagagattgccggcagaagacgcagagatcctgtggagcatctatcgcggcaaggaggccgagctgctgccgctgcagtccgaataccggctcgcgctgatcaaggccatgaagacggcggcacagacgaacctggacaaggcggaactggaagcggccgtgaaggatgcccgcgacaagcgggtgaagataggcgacctcgtcgtcgcaaccttcgtcgaaatgctggaacgaatttcaccgaaaggacgccgccaactcgtcggcggctattttcgctga

SEQ ID NO: 3706 - DNA, 264 bp, BradyrhizobiumColbertium
gtgagcttctcgcggcgtacggccgtctatgtgcgtgcggctctcgcggccgcgagcttgatcgcccttctcgtgctgttcctctcgcaagcttccgcggaggacgcacggaacgaagcgaagcaggcctgcaaggcggattattcgcgcctctgcgcgggaacgatgcccggtggcggccgcattcgcaaatgcctcagcgacaattacggcggcttgtcggcagcctgcaaacaggccctcgatgcacgcccgccgaaatag

SEQ ID NO: 3707 - DNA, 1293 bp, BradyrhizobiumColbertium
gtggcgcccatccaatacatcgtcgagggcggtcaccggctctcgggctcgatcgaaccgtccggcaacaagaattcggcgctgccgatcatcgccgccgcgctgctcacggagcatccggtcacgctggagaacgtgccgcgcatccgcgacaccgagacgctggtcgagctggtccgctcggtcggtgcgtcggcggaatggagtgcccgcaatacgctgcagatccatgccaagagcatccgcgcggccgacctcgacccagagctgtgcgtgcgcatccgcgcctccatcctgctcgcaggccccctgctcgcgcgctgcggcgaggtgatgctgccgccgcccggcggcgacgtcatcggccgtcgccgattggatacgcatgtgctggcactggagcagctgggggcaaaggtcaccgcgaccgaccggctcgaattccgcgcgcccaagcttgcgggagccgacgtgttcctggacgagccgagcgtcaccgcaaccgagaatgcactggtcgcggcggtcgccgccgacggcgtcacctatttgcgcaacgcggcctccgaaccgcatgtgcaggaccttgccaatttcctggtcgcgctcggcgccagaatcgaaggcatcggcaccaacaccatgatcgtgcacgggccggcgacgctgggagaggcgacctacaggattcagcccgatcacatcgaggtcggctcgctgatcggactcgccgccgtgacgcgatcgccgctgcgcatcacgcgcgccggcgtcgagcatctgcgctcgatccgaatgggtttcgagcggctcggcatcatctgccgcgtcgaaggcgacgacctcatcgtgccctcgaaccagacgctgaagattcaggacgatttcggcggccatgtgccgaagctcgaggaccagccctggccggccttcccggccgatctgatgtcgatcgcgatcgtcaccgccacgcaatgcgagggggtgatcctgatgttcgagaagatgttcgaatccaggatgttcttcgtcgacaagctgatcgcgatgggcgcgcggatcgtgctgtgcgacccgcaccgcgccatcatcgccgggccgagccgcctgcacggcgcgaccatgacctcgccggacatccgcgccggcatggcgatgctgctcgcggcggtctgcgccgagggcacctcgaccatcaacaacgccgaccagatcgagcgcggctatgagcgcatcgaggagcggctgaacgcgcttggtgcgaagatcaagcgcgtgccggcacggacttag

SEQ ID NO: 3708 - DNA, 123 bp, BradyrhizobiumColbertium
gtggttctcgctgtcctgttgctgggcggctattcgggcggaaactacagagaatcgagcgcgggagcaattggagcgggcggtggttcgtggcctgttcgcgagcccaggcgaggctactga

SEQ ID NO: 3709 - DNA, 468 bp, BradyrhizobiumColbertium
atgatcgcctctgcgacgcccagttccgctgcgccatcacgccgcctcggcatcatcggcagcattgtcggcgtgctcgcgcttatggcggcggtgctgccgcactgggtcgtgccgatcgtgttcccgccgcccccggcggacaaggtgatcgtcgacaccgggtaccgcatcaaggaccgcatcgtcgcaaaggtgaagggcgtggattaccaggctcccaggtccgacaaatcgcctggacgaagctggagtgaaatcgcgtcggtcaccgcgatctcgctcggcctgctcgccatcctactttcggtgctctcgctgatcttccgggaagaacggcttctcgccgccgtcgccgccgcgctcggcaccggcgccatcgcgatcgaaatctccttcttcatgatcggcgcgctgatcctgatcgcgctcctctatgtgatcgggaatatcatcgggctgttttga

SEQ ID NO: 3710 - DNA, 2436 bp, BradyrhizobiumColbertium
atgacagaacctgctcggcagccgcttgccgaaaacgagccctccaccgcgagcgaatacggcgcggaatcgatccgcgtgctcaagggtctcgacgccgtccgcaagcgcccgggcatgtatatcggtgacaccgacgacggctcgggcctgcaccacatggtctacgaagtcgtagacaacgccatcgacgaagcgctcgcgggccatgccacgcgcgtcgacgtcatcctcaacgccgacaattccgtcaccgtgcgcgacgatggccgcggcattcccgtcgacatccacaagggcgaaggcatctcggcggccgaggtcatcatgacccagctgcatgccggcggaaagttcgaccagaactcctacaaggtctccggcggcctgcacggcgtcggcgtctccgtggtcaacgcgctgtcgagcaagctgatgcttcgcatctggcgcgacaacaaggaacactacatcgagttcgcccacggcgattccgtggcgccgctgaaggtggtcggcgatgccccgggcaagcgcggcaccgaggtgacgttcctggcctcgacggaaaccttcaagaacatcgagtatgattttgccacgctcgagcaccggctgcgcgagctcgccttcctcaattccggggtccacatcgccctctccgacatgcggcatgcggtcgagaagcgcgaggagatgcactattccggcggcgtcgaggagttcgtcaaatatctcgaccgcaacaagagcccgatcgtgccggcgccgatcatggtgcgcgcggaagccaacggcatcggggtcgaggccgcgctgtggtggaacgacagctaccacgagaacgtgctgtgcttcaccaacaacatcccgcagcgggacggcggcacgcatctggccggtttccgcggcgcgctgacgcgccaggtcaacggctatgccgaggccaacgccaagaaggaaaagatcgcgctgaccggcgacgactgccgcgaaggcctcacggccgttctctcggtgaaggtgcccgatccgaagttctcgtcgcagaccaaggacaagctggtgtcctcggaagtgcgccccgtggtcgagaacgtcctcaacgaagcgctgcaggcgtggttcgaggagcacccctccgaagccaagatgatcgtcggcaaggtgatccaggcggcggcggcccgcgaagctgcgcgaaaagcacgcgagctgacgcgcaagagtccgctgtcggtctcctcgctgcccggcaagctcgccgactgccaggaaaaggatcccgccaagtccgaactgttcatcgtcgagggcgactcggcgggcggcagcgccaagcagggccgcaatcgcgaattccaggcggtgctgccgctgcgcggcaagatcctcaacgtcgagcgcgtccgtcccgacaagatgctgtcgtcggaacagatcggcacgctgatcaccgcgctgggtaccggcatcagcgacgagttctcgatcgagaagctgcgctatcacaagatcatcgtgatgacggacgccgatgtcgacggcgcccacatccgcacgctgctgctcaccttcttctaccggcagatgcgcgacatcatcgacggcggctatctctatatcgcccaaccgccgctctataaggtctcacgcggcaagtccgagcaatatctgaaggacgagcgggcgctggaggattatctgatcgacgccggcctcgacgactgcgtcttcattcccggcacgggtggcgatcgcaccggccgcgacctgcgggcgctggtcgacgatgcccgcgtggtccgcagcatcttgcgcaacctgcacagccgctacaatcgcaaggtcatcgagcaggccgccatcaccggtgtgctgaacaaggcgatctacggcgaccccgaaaaggctgcggctgcggcgcaatacatcgcgagccggctggacaaccaggccgaggaggtcgagcgcggctgggtcggacagtatgccgagggccagggcttccagttcgagcgtaccgtgcgcggcgtcaaggaagccgctattatcgacgatgccttccttggatccgcggaggcgcgcaagctcgacgagtacaccgtcaagctccaggacgtgtatgcccgccccggcaagctgcggcgcaaggatgtcgagcacatggtctacggaccggccgatctgttcgaagccgtcaccgacgcgggccgcaagggcatcacgttgcagcgctataaaggcctcggcgagatgaacccggagcagctctgggagacgacgttggacaccgaggcgcgctcgctcctgcaggtgaaggtcaaggaggtcgaccaggccgacgacatctttaccaagctgatgggcgacgtggtcgagccgcgccgcgacttcatccaggaacactcgctgagcgcgacgatcgatatctga

SEQ ID NO: 3711 - DNA, 303 bp, BradyrhizobiumColbertium
ttgagccgcgaccaacaacgtgcactccctcacccgccggcgggcgagggagcggggtccgaagcagctccccaggcacttcggaacctgcctttccgccgcgctgaatccacgtttttcgacgcctcgggcgagccgtcgaatcgcgctttttgcagcgcccagaaacggctttccaaagccttgaaaaccggcctaaaactcctatctgatcaaggggttgcgggcggatactttacgctaggcgcaatccacctttcgtggcacaacagccctgcaaatcagcgccttttgcgccgctga

SEQ ID NO: 3712 - DNA, 2160 bp, BradyrhizobiumColbertium
atgccgatgatccggcgcgggacgcaagtcccggcaagatggctgctgcttgcctgcggcattctcgcgatggcgggcgcatcaggtcccgcgcgcggggccgacgaaggcatcgtcgacgtccataagctgccgcggctcgaaggcgcaacggaagacacttcgcgcgccgatccccatcgcgtggtctattccgtaccgaccgccgtgaccgttacgtccgacgcggccaggaagctgctgagcgccgagggctgggtgccctatgtctattcgctggacgagaaaagcacatcgctgagcttcaagaagggacggcaggggctgcgcgtctccttcacgcagacgcgcggccgtcccgatcagtccgccgtgtcctacacgccgaaccggatctattccaacgtgccgtttccggacggtgcgaccgaactcgtgttcgacgagacgcggccctatctcggctgcatcgcgcccggcacgctcgatgcgacagcggccttcttcaccagggagatggcgacaatcggctggcgcaagctgacgctagaagcggcggcacgctggccgaatgcggatctcggcgagacagtgccgaacggggtgcgcgtcttctacgagcatcccggcggcgacacgacgcaattctacaagcagaagccggtgatgctgacactgacgcggcgcgaggacggtcgcaccaatgtcgaaatccgggtggcgccgtttgcgttgcccgaggtgctcgaggccgatgacgacatggccggcctgccgcgacccaagccgaccagatctgcgaggggacttggcagcacgaactccaacaagcgcgagatgtcggccgcagcgatggccgagctgcccgccgtgctcgccttctatcgccgtgagctcgcggcgcgcggctggcaggaggacggcaacgccccgctcgcgtccggcgacgaggtcgcggtcaggatctcctcggcggaggaaaccggcatgctacggcttggccgcaagtatgatttcaccatgatcaacgtgaccgcccaggtgaaggaatcagcgctcgccgcccgcgccagggccaagaaggaggccgacgcgagattcctcggcgatgccttgagtgcggcccagcagctcatcgccgccgacgagagcaggcgcaaggcacaatccgcttccctgtcggatgcgcctctcaatgcactatccgacagcaagacgccggtgccgctgcccgagaacgccgaaagcgtgaacttcgagggcggcaacggccggctggagttctcctcggcttcgagcgtgaaggcactcagcaccttctatcgctcggcgttgaagagctcgggctggaaggagcagccctcggtcatcaaccagcccaacatggcggtgatggctttctccaagggcggcaaatcgatctcgatgaccgtgatgcagatgggcccgaaggtgaatgtccgtgccgacggatcgggcctggtgaccgaagcggccaaagctgcgagcagcgccgaggcgcaggccaagccctccgagcccctcaagcccgactccgaatcaccacttccagtaccgacgcagcgttcgtcgaaatcgcttgggacttcgaagattccgggcagcgatgcgccgctccgccgcgagctgaccgccagcgtcccggcgccgctcgacgacgtccttgccttctaccgtgcagaactgtccaagctgggctggcaggaaaagaccaacggcgcggccgcgtctgcagagcatgcgcagatcgagttcacctcgccgcaaggcccggccgtgctcaagcttggccgcgccaagggcgagaccacggtcactctggtgcagaagaacgcggatgctgcggccaaggccgacatgatgccaaagccgggccaggccaggctcatgttcggaaatatgggaccgaaagaggcgtcgctgacgatcaacaggcagactgtgaagatcgcggccggcgccggcggcccgcaatcgccgaaggggccgatcctcgacctgccgccaggcaagtaccagtacgccctgcgcgtggacgggcacccggcccgcaccgagaccctcgccgtggccgccggcgaggcctggggcctcatggtcgggccgagcggagacgtgctgccgcttcagatgtattga

SEQ ID NO: 3713 - DNA, 744 bp, BradyrhizobiumColbertium
atggcggcggtggggcgtggagcgcaagctccggcacgatggcaacttgttgcgtgcggccttgcgctcctcgcaagctgcctgcttgcggccagcgccggcgccttcgtgtcgaatctgccgccgctgttttcggccgcgctcacgcgcgatcccgatgccaggttgcccgcgccgacccgctacagctatcgagggatccacaccacggtgatacccggcatcgaagctccgctccggaccaggctcgaagcccgcgtgcccgcaacgctcggtgacgtcctcgccttctaccgtgccgagcttggaaagctcggctggcaggagcagcaggacgtcgcatgggtcggcaccgatcatgcgcgtctcgccttcgtctctccgatcgggccggcggcgctggagcttgcgcgcaaggacggcggcacggcggtgcagctcgtgcagaagaattcggaggtcgcgacgcgcgcgaacgtgctgcccgagcccggccgggccaagctggtgttcagcaatatcggcgaaaaggaagccgtgctcacgatcgacgaacgatccatctcgcgccaggccggcgccaacgccgtcgcgctggacctgccgcccggcagatacgcctacggcgtgagcgtgcccggccgcccagccagcacgaacatgcttgacgtcgcagccggcgatacctgggagctcacggtggggcgcgacggcgagccgtggccgccgctccagctgtattga

SEQ ID NO: 3714 - DNA, 1137 bp, BradyrhizobiumColbertium
atgaccccctcccgcattcatcgcctgacgctgacgcattttcgcaattatcgggcggcggggctcgagacggcggctgacatggtggcgctggtcgggccgaacggggcgggcaagaccaattgcatcgaggcgatctcgttcctgtcgccgggacgcggcttgcggcgggcgacgctggaagacgtcgccgacaatcagggcgacggctcctgggctgtctccgcgcaagtcgagggcgcgctggggctcgcgacgctcggcaccggcatcgacgccccgcgcgccgataccgcggtcagccggcgctgccgcatcgaccgcgagccggtaggttccgccagcgccttcggcgaccatatccgcatggtctggctgacgcccgcgatggacgggctgttcatgggggctgcgtcggaacggcggcgcttcttcgaccgcctgtttctcgcgatcgacagcgagcattccagccggatcaacgcactcgagcgttccctgcgttcgcgcaaccgcctgctcgagacacgcaattacgacgaccattggtgcggcgcgatcgagcgcgagaccgccgagcttgcggtcgcggtcgcggcaacgcgcggccagactgctgcgcgtctcaccggcatgctcaacgcgcgcgcgcaacaatccgccttcccatctgcccagatcgcgctcgacggctggatggagaacgcgctgctgacggagaccgcgacctcggtcgaggaccgctaccgccagatcctgcgcgacaatcgcccgcgcgatgcgattgccggccgcaccaccgacggtccgcatctcaccgacctccaggtcgtctatgcgccgaagggcatgccggcgcgcgatgcctccaccggcgagcagaaggcgctgctgatcggcctcgtgctggcgcatgcgacgttggtggcggaaatgaccggcatcgtgccgctgctgcttctcgacgaggtggtcgcgcatctcgatccgagccgccgtgccgcgctgttcgatgagctgaagaagctcggcgcgcaggtgtggctgaccggtgcggaccctgtcgccttcgccgagattggcgcgggcggcgaagtgtttgacgtcgagagcggacgagtctcggcccgcagatag

SEQ ID NO: 3715 - DNA, 396 bp, BradyrhizobiumColbertium
atgccgaatgacccgcatcatcggccgattgccaatcatcttcgccagttcgcgaagaacatgcggcacgagcctacggacgcggaagcggctatgtggcgattgctgagggatcgccggctatcggcttacaaattccgccgacaggtcccgatcgagaactacatcctcgatttcgtctgcttcgagaaacgcctcgtgatcgagatcgacggcagtcagcacgcggatcgcagcgcgacgcagttcgagacgcagcactttccgctgaaggtttctcaatcgcccgctactggaacaatgacgtgctgcaacagcccgcttctgtgttggaggatctccttgcaaagctcggcgcgcggtaagatacccctcacccgtcgcctcacttcgtga

SEQ ID NO: 3716 - DNA, 246 bp, BradyrhizobiumColbertium
gtgaggggcgtggtcccttcccggcggagactgcctttagaatcgaacgcgatgctcgttgatgcgccctctccccctgcgggagagggcatctccgctatcggccaagacatcactcgggtgaggggtcctctcgcggcaccttctatgtggaggcaacccctcacccgccgccgcttcgcgtcggcaccctctcccgcaaagggagagggtgaaggcaccgcgccccaacacctttcagaatga

SEQ ID NO: 3717 - DNA, 1119 bp, BradyrhizobiumColbertium
atgaaggttacggtcgaacgcgcgcaactgttgaagtcgctgggccatgtccaccgcgtggtcgagcgccgcaacacgatcccgatcctcggcaacgtgctggtgcgcgccgagaacgcgaaactgtcgctgaaggcgaccgacctcgacctcgaggtgacggagacgctgccggcggaaaccgcgacggccggctccaccaccgtgccggcgcacatgttctacgacatcgtgcgcaagctgcccgacggatcccagatcgtgctggaggcggacggcgaccgcgcggtgctggcgatccgtgccggccgctcgcgcttcaccctgcagacgctgccagagaacgatttcccggacctggccgccggcgacatgtcgcattcgttctcgctcgccgccaaggacgtcaagcggctgatcgaccgtacccagttcgcgatctcgaccgaggagacgcgctactacctcaacggcatctatctgcacgccgccggcacgcccaaggccgcaaccctgcgcggcgtcgcgaccgatggtcaccgcctcgcccagctcgacctggtgcagcccaagggcgccgagggcatgcccggcgtgatcgtgccgcgcaagaccgtcggcgaggtgcagcgcctgatcgaggacaccgaggcagagatgacgatcgagctgtcgcaggccaagatccgcttcacgatcggcaacgtcgtgctgacctcgaaactgatcgacggcaccttccccgattacggccgcgtcatcccgcagaacaacgacaaggagctcgtcgtcgacaagaaggatttcgagaacgcggtcgatcgcgtctcgaccatctccagcgagcgcggccgcgcggtgaagctgtcgctgtcggccggcaagctggtgctgtcggtgaccaacccggattcaggcagcgcgaccgaagagctcgaggtcgaatacgcctccgacgccctcgatatcggcttcaactcccgctacctgctcgacatcgccgcccagatcgaaggcgacgtggccgtcctgaagctcgccgaccccggctcgccgaccctggtgcaagaccgcgacgacaagagcgcgctctacgtgctgatgccgatgcgggtgtga

SEQ ID NO: 3718 - DNA, 1404 bp, BradyrhizobiumColbertium
atggaacaggatcgctggtcacgcgtgaagggtcggctgcgctcgagcgttggcgaggacgtgtacacgagctggtttgcacgcatggatctggaaggcgtgcaggacgagagcgtgcggctctcggtaccgacgcggttcctgaagagctggatccaggcccattatgccgagcgcgtgctgtcgtgctggcaggccgagatgccggaggtgcatcgcatcgacctgacggtccgatccgccgtgcgcccggccgcgcagccgaaggaaacgccggcgccgatcgaagcacgccgcgcgccgacgccggaattgcgctcgaccgcgaccgcgccggtctcggccaaccacgacgcgctcggcggctcgccgctcgatccgcgcctgaccttcgcgagcttcgtcgtcggccgctccaacacgctggcgcatgccgcagcccgccaggtcgccgaagggcgccgcggcgatcccgtcatgttcaacccgctctacatccatgccggcgtcggcctcggcaagacgcatctgctccaggcggtgacctgggccggcaattccggcagcgagcgcaaggtgctttatctcacggccgaaaaattcatgtacggcttcgtcgctgcgctgaagacgcagaccgcgctggcgttcaaggaagcgttgcgcggcatcgacgtgctcgtgatcgacgatctccagttcctgcagggcaagtcgacccaggccgagttctgccacacgctgaatgcgctgatcgacgccggccgccaggtcgtgatcgcagccgaccgtccgccgtccgatctcgaaagcctcgacgatcgcgtgcgctcgcggctcgcgggcgggctcgtggtcgagatgggctcgctcggcgaggagctgcgccacggcattctcaagtcgcgcgtcgcagcggcccgcgcccatcatgcgacgttcgaggtgcccgaggaggtgctgctttatctggcgcgcaccatcacccataacggccgcgacctcgaaggcgcgatcaaccgtctgctcgcgcattccaagctcaacaaccgcccggtgacgcttgaaatggcggagcacgaggtccgcgacctggtccggccgcaggagcccaagcggatcaagatcgaggacatccagcgcgtggtggcgcggcagtataatgtgagccgctccgacctgctctcctcgcgccgcaccgccaacgtggtccgcccgcgccaggtggcgatgtatctcgccaagacgctgacactgcgctcgctgccggagatcggccgccgcttcggcggacgcgatcacaccaccgtgctgcatgcggtgcgcaagatcgaggcactggtctccaaggataccgcgctctccgaggaagtggagtcgctgaagcgccagcttcaggaataa

SEQ ID NO: 3719 - DNA, 267 bp, BradyrhizobiumColbertium
atggccaataccacttccgccaagaaggcgacgcgcaagatcgcccgccgcaccgccgtcaacaagtcgcgccgcacccagatgcgcggtgccgtgcgcaccgtcgaggaagccatcaagagcggcgatcgcgccgctgccgtgaaggcactcgcgactgccgaacccgccttgatgcgcgccgcccagcgcaacatcattcacaagaacaacgccagccgcaaagtctcgcgcctcaccgcgcagatcgccaagctcgcgaagtga

SEQ ID NO: 3720 - DNA, 318 bp, BradyrhizobiumColbertium
atgatccgcggctttttccgactgattgggctcttgctgctcgccggcgggttcatcttcatggtctatgatggcgcccgctgggtggccgaccagaccctccagttcacccggttcggccagttctggaacgacatcaatcaggccagccaggcggcattccgcacctgggtcgaggccaaggcgccctggctatggacctcggtgatccgcctcgtgctggatcagccggtcttcgccgtcctaggcattctcggcatcctgctgatgatcctgttccggccgcgcaagccgttgatcggctattcccgggattga

SEQ ID NO: 3721 - DNA, 657 bp, BradyrhizobiumColbertium
atgctgttcatgcgcaagaccaccgcattgccgagcgcaaccgaagcgctgccgggccgtgcacaggccatccccaccgcgaccacccatttcgtcaacggcgccaagctcaagccgcctcatccggccggtctcgagcaggcggtgttcgggctcggctgcttctggggcgccgagcgcaagttctgggagcttggtgacggcgtccacgtgactgccgtcggctacgccggcggtcacacgccgaacccgacctatgaggaagtctgctcgggccgcaccgctcataccgaagtggtgctggtcgtgttcgatccgaataagatctcctacgacaagctcctgaagacgttctgggagagccacaatccgacgcagggcatgcgtcagggcaacgatatcggaacgcaatatcgaagcgcgatctacacctattcagatgcacagaagaaagcggccgaggaatccaaggcgctctaccagaaggcgcttgctgcaaaaggccttggtgccatcacgaccgatatcgcgcccgcaggcgcgttctacttcgccgaggactatcaccagcaatatctggcgaagaatccggccggctattgcggcctgggcggcaccggtgtgtcctgcccgattggcgtcggtgtgagcgcgtaa

SEQ ID NO: 3722 - DNA, 1662 bp, BradyrhizobiumColbertium
atgtctcgcctgcccctcgtcagccgccttggtcgacaactcgcccgctttgcagcggccgagcaaggcaatatcgccgtcatcttcgccatagcgctggtcccggtgctgggtttcgtcggcgccgcggtggattacagccgcgtcgtccaagcccgtacctcgctgcaggttgcgctcgactcggcggcgttgatggtttccaaggacctgaccaacggcgtcatctcggaatcccagatcgaagagaagacaaagtcctatttcagcggcctctacacgggccgcaccggcacggtttcgaccgcagatatccatgccagctacacgccgaaggactccagcggaatatccaatatcgtggtcacaggatcgggcaccatgcctaccgatttcatgaagatcgcggggtttccgaagttaggatacaacgtgagctcgactgcggcatggggaaacacccgcatgcgggtggcgatggtcctggataatacgggatcgatggcccaaaacggcaaaatggcggcaatgcaagccgcggcgaaggacatgatcgacaccctgtcgaactacaacaagcagacgggcgacgtttacatttccatcattccattctcgaaggacgtcaacgtcggcacgaccaatgtaggtgcgtcctggatcaactggaccgaatgggaggccgagcctccgatcctggtgaacaataagtcgagcgccttcaattcagcggtcggcgggtcggattgccccttcacgaagagcacccacggcttcacctgcatggaccgaccagcgaccctgcccggcgccaaggctgcgccgtacggtaagataccgtcgaccggcacgtacgctggatatatctgtcccagcgtagacagcggcaacaagcgggcaggcaaagccggcatctactacaatggttgctacaccaccgccaccgggtcgggcgcaagctgcggatcgagcacgagttgcacctgcacaggcagcggctcgggcaagatctgccatctctggcgcggcgacggcacggcggcgacggcggcggcagcgccagaccgcagcacctggaccggctgtgtcaacgatcgcgatcaggactacgacaccaagaactcggcccccggctcgggcggcgggaccccctcgtcgcagttctatgctgagcaatggtcaggctgcctgccggccaccgtgtttccgatgagcaaccagtggcagacgctcaaggaccagatcacggcgatggtaccgagcggcaataccaaccaggccattggtcttgcgtggggatggcaatctatcagcacgaccaatcagccgatctcggcgccgagcaaggccagcaactacgtctacaaggactacattgtgctgctgtccgacggcttgaatacccagaaccgttggagcacgagccagtccagcatcgacgcccgccaggcgatcctctgccagaacatcaaagccgacacggcaaacccggtcacgatcttcacgatccaggtcaacatcaacaatgcggacgcgaaatctcaggtgctgcaggattgcgcgaccaatgggaacttccagatgatcacgagcgcctctcagacctcggacgcgttcaagaatatcctgacgcagatttccaagctgcgcgtggcgagataa

SEQ ID NO: 3723 - DNA, 162 bp, BradyrhizobiumColbertium
ttgctggcgaacaatccggcttggccggattatcgggagcggcgatccaacaaagcggcgcgcctgcgcaaggcccaaagggcgggctgcgcggtcgccgccattcgcttccgtggggaatttgaacgcctgtgccatgccgcaattgactttcagtattga

SEQ ID NO: 3724 - DNA, 393 bp, BradyrhizobiumColbertium
atgccgcaattgactttcagtattgatctgcccgcgccagccgctgccgacgctcctcgcatgagcaatgacgagaaccgttcgggcaacccttcaggtccgaacacctcggtgatcaccaaggtcaagccgaagaccaagcgcccgaacctgtaccgtgtgctgatcctgaacgacgactacacaccgatggagttcgtcgtgcacgtgctggagaagttcttcaacaaggatgtcgaagccgcgaccaagatcatgctccacgtccatcatcacggcatcggcgagtgcggcgtgttcacctacgagatcgccgagaccaaggtgacgcaggtgatggatttcgcccgcaagcaccagcatccgctgcaatgcgtgatggaaaagaaatag

SEQ ID NO: 3725 - DNA, 2409 bp, BradyrhizobiumColbertium
atgccgactttttcccaaagccttgaacaatccctgcatcgtgcgctggcgatcgcaaatgagcgtcatcaccaatacgcgacgctcgagcatctcttgctctctctgatcgacgactccgatgcagccgccgtcatgcgcgcctgtagcgtcgatctcgacaagctccgtacgagcctcgtcaactatctcgaaacggaattcgagaacctggtgacggatggtgccgacgacgccaagccgaccgccgggtttcagcgcgtgatccagcgcgcggtgatccacgtgcagtcgtccggtcgcgaagaggtgaccggcgccaacgtgctgatcgcgatcttcgccgaacgcgaaagtcatgcggcgtatttcctgcaggagcaggacatgacgcgctacgacgcggtcaattacatcagccacggcattgccaagcggccgggcgtatccgaggcgcgacccgtgcgcggcgtcgacgaggagacggagaccaagggcaacgaggacgccaagaagaagggcgaggcgctcgagacctattgcgtcaacctgaacaagaaggcgcgcgacggcaagatcgacccggttatcggacgcaattccgagatcaaccgcgccatccaggtgctgtgccgccggcagaagaacaatccgctgttcgtgggcgaagccggtgtcggcaagaccgcgatcgcagaaggcctcgccaagcgcatcgttgacagcgaggtgccggaggtgctcgcggctgccactgtgttctcgcttgacatgggcacgctgctcgcgggcacgcgctatcgcggcgatttcgaagagcgcttgaagcaggtgctgaaggaactcgaggcgcatcccaacgccatcctgttcatcgacgagattcataccgtgattggtgcgggtgcgacgtcgggcggggcgatggatgcctcgaacctgctcaagccggcgctggcctcgggcacgatccgctgcatgggctcgacgacctacaaggaataccgccagcacttcgagaaggaccgcgcgctggtgcggcgcttccagaagatcgacatcaacgagccgacggtcgaggacgccatcgcgatcctcaagggtctcaagccgtacttcgaagactatcatcggctgaagtacaccaacgaggcgatcgaggctgcggtgcagctttcctctcgctacatccacgaccgcaagctgccggacaaggcgatcgacgtgatcgacgagtcgggcgcggcgcagatgctggtggccgaaaacaagcgcaagaagaccatcggcatcaaggagatcgagaccacgatcgcctcgatggcgcggatcccgccgaagagcgtgtcgaaggacgatgccgaggtgctcaagcatctcgagcagaccctgaagcgcacggtgttcggccaggacagggcgatcgagtcgctcgcggcctcgatcaagctggcgcgtgccggcctgcgcgagcccgagaagccgatcggctgctacctgttctcgggtccgaccggcgttggcaagaccgaggtcgccaagcagctcgcggcgacgctcggagtcgagctcctgcgcttcgacatgtccgagtatatggagcggcacaccgtgtcgcgcctgatcggcgcgcctcccggctacgtcggcttcgaccagggcggcctgctcaccgacggcgtcgaccagcatccgcattgcgtggtgctcttggacgagatcgagaaggcgcatccggacctctacaacgtgctgctccagatcatggatcacggacggctcaccgaccacaacggcaagcaggtcaacttccgtaacgtgatcctgatcatgaccacgaacgcaggtgcggcggatctcgccaagcaggcgtttggcttcacgcgcacgaagcgggaaggcgacgaccacgaggcgatcaaccggcagttcgcgccggaattccgcaaccgtctcgatgccatcgtctcgttcggccatctcagcgtcgaagtgatcggaaccgtcgtcgagaagttcgtgcttcagctggaggcgcaactcggcgatcgtgacgtcaccatcgaactgtcggagccagccaaggcctggctggtccagcacggctacgacgagcagatgggcgcacgtccgatggcccgcgtcatccaggagcacatcaagaagccgctggccgacgaggtgttgttcggcaagctcaagggcggcggccacgtccgcgtcgttctcgtcaaggatgaggccgacgagaccaaggagaagatcggcttcgagttcgtcgaaggtccggttacgccgaagcaggagaagctccccggcgcccgcaagcgcccgtcgggcaagtcgaagccgggaggtcccggcggctcgaaggggccgacctccaaggggccgctggtcaaggcctga

SEQ ID NO: 3726 - DNA, 450 bp, BradyrhizobiumColbertium
atgcgttcatttggaattgtggcgctcagcgtcatgctgggcggctgcgcgtcggtcacgcgcggcacgaccgagaacatcagtatcgcatcgacaccgtcaggcgtggaagccgtggtgagcgggctcgaggtgcccaccacctgcaccacgccatgcgccatcgtcgccaagcgcagcgccgacattacgatcactttcgagaaggaaggctaccagtcgcaaaaggtgcaactcaccaaggaagtgtctggcaccggagccgccggcttcgccggcaacctcctcgcaggcggcctcatcggcatgggggtcgatgccgcgacgggcgcagcaaccgatcacaagccgaatccggtcatcgtgacgatgcagccgtcggtcccccacgcagcaccgcgcgcaccgcggaagccgcggccgccgcgcgaaccgcaggccggaacgtaa

SEQ ID NO: 3727 - DNA, 1422 bp, BradyrhizobiumColbertium
atgtcgtccgcaccgatcgagcatgccgacggacttccgcagccgcagcgcaactgggcggtgctgaccattgcgctcggcatcatcatggcggtggtcgacagcgccatcgccaatgttgcgctgccgaccatcgcggccgacctggatgcaagcccggccttctccatctggatcgtcaacggctaccagctcgcgatcacgatcgcgctgctgccgctggcttcgctcggcgaggtcgttggttatcgccgcgtctatctggtcgggctggtgctcttcacgctggcatccgccttctgcgcactggcagatacgctgccgatgctgaccttcgcacgcgtcatccaaggttttggcgctgcgggcatcatgagcgtcaatgcggcgctggtgcgtttcacctatccccgcagccagctcggccgcggcatcgggctcaacgctctcgtcgtcgccttttcggctgcggtcggaccgacgctcgccgccggcatcctcgccgtcggaagctggccatggctgtttgccatcaacgtgccgctcggtgcagcgacgctggtgctgggcctgcgcagcctgccgcacaccaaaccggccagccgtcgctttgactggcaaagtgcgggcctgtcggcgatcacgttcggcgtcggcatcgccgcaatcgacagcgtcggccatggcgcgcctgcgatcacctggctcgtgcagttcgcaatcgctctcgtcgcgggtgcgctgctgatctatcgcgagactcacatgacctcgccgctcctgccgctcgatctgctgcgcattcccgtgttcgcattgtcgattgccacctcgattgcatcgttctgcgggcagatgctcgccttcgtcgcaatccccttctatctccagagccgcttcggctattcggcggtgcatatgggcctcttgatcacgccatggccaatcgcggtggcgttcgcggcgcccctggccggccgcctggtcgagcattatccggccgggctgctgggcggcatcgggctcacgctgttcgcctgcggcctcgccgcgctcgccttcctgcccgcaagccccacgccattcgacgtgatctggcggatggcgttggccggtgccggcttcggcctgtttcagacgccaaacaaccgcaccatgatcgcggccgcgccgcgcgagcgcgccggcggcgccagcggcatgctggggacggcgcgcctgctcggccagaccacgggagcagccctggtagcgctgctgctcggaaggtatccggttgaggggaccaggctggcactcctcgccggcgtcggctttgcgctctgcggcgcggtgctgagcatgctgcggctatctcctgcgggcgcacggggggccgagcacgttcgcgtgcaggacgaccagcgtctgcggggagactag

SEQ ID NO: 3728 - DNA, 339 bp, BradyrhizobiumColbertium
atgaattgcctcgcaccggcgctgctagcggtcggcgttctctggagcaccagtagtcaagctctggacgccgaacagcggcgcgctgaggcgttgctgcagcagatgtgcgcgcagtgccatgcggtcggcaggtcgggcaccagcccgaacgaactggcaccgcctttccggaacctcggcgagaacaaactctacgaccccgatttcttgcaacgcctgcaggacggctacagcagcattcaccgcttcatgccgacggcgcggttcggccgcgacgacgccgagggcgtggtgagctatctcagggcgattcaggagctgcggaagccgaaatag

SEQ ID NO: 3729 - DNA, 1026 bp, BradyrhizobiumColbertium
atggaacaccgacgcctgggccgttcgggcctgatggtgcctgctttgagtcttggaaccggcaccttcggcggcgtcggccgcctcgccgcgtggggggctacggacgcgaccgaggcgcggcgccttctggacatctgcctcgaggccggcgtgtcgatgttcgacaccgcgaacgtctactcgctcggcgaatccgagcgggtgctcgggcaagccatcaaggggcgccgcgacaaggttctgatttccaccaaggcgacgttccgcttcggcgacggtccgaacgacattggctcgtcacgccaacatctgctggctgccgtcgatgggtcgttgagccggctcggcaccgactacattgatctgttccagctccatggcttcgacgcgttcaccccgcctgaagaggtgctcgccaccctcgacgtgctcgtccgtgccggcaaggttcgctatgtcggcgtctcgaatttctcgggctggcacctgatgaagtcgctggccgtcgcggacaggcacggttttccgcgctacgtcgccaaccagacgtactactcgctgatcggacgcgactacgaatgggagctgatgccgctcgggctcgaccaaggcttgggtgcagtggtctggtcgccgctcggatggggccgcctcaccgggaagattcgccgtggccagccgaagccggaagtcagccgactgcccaagacggccgagttcggcccgcccgtgccggacgagcatgtctatcaggtcgtcgacgccatcgatgaaatcgcgaaggaaacgggcaagagcgtctcgcagatcgcgctgaactggctgctccagcgccccacagtctcgacgctgatcatcggcgcgcgcaacgagacccagctgcgcgaaaatctcggcgcagtcggctggtcgttgaccaaggaccagatcgcaaagctcgacgccgcgagcaaggtgacgctgccttacccctattggcaccagcgcgtgactttcaccgagcgcaatccgccggcggtgtaa

SEQ ID NO: 3730 - DNA, 1389 bp, BradyrhizobiumColbertium
atgttctccagcgccaatcgcaaacgttcgatcgttgctctggagggatctctcacagcgccggaccagttgacgatgctgcaagcccgtgacgaggctctggcagagtatatcgaggccttgaccgagggcaattttctcgcgcctggctgcaagggagaagaccgcctgtccaaggccgtcgcaaatctcgcggccagattggccgaagacgcgtcgaacaagctggacgccatcgtcgatatcaacgtccagagcaatgaaaccgcgatctccgcagcccgaatgctcaccgcttgccgggatgtcgaccagcgtacgcaggcgctcgccgccgccagcgaggagatggtcgcttcggtgggacagatcagatcgaacgcagaagatgcagctgcaaacgccgcgcaaatgagagctggcgcagaacagggaatgtccacggtccggctcgcatccaaggcgatggagcgggtcgaggcgactgcgaacgacgcgtcggacaaggtcctggcactcagtgcggcgtccgaagaaattggcgccatcgtagggtcgatcgatgcgatcgccaggcagaccaatctcttggcgctgaatgcaacgatcgaagccgcacgcgctggagaagccggacgcggctttgccgtggtcgcatccgaggtcaagggactgtcgcagcagaccggcagggcgacggaagacatccgcgagcggatccagcgcctgagagacgaagtcgacttgatcgtgaccgccatgtccgattgcaagtcggcggctgccgagagcaagggcgtcgtcacgcagttgggcgaggagatgtccaacgtcgaaaatcggacaatcaccctgaccggcggcatggacgagatcgccagcatcctcaatcagcaaaccgatgcctcccgggaagtggccgagggcatcgccgcgatcgcccagatgacgctggcgaacgtcgagcagatcaagaagatttcgtcgcagctcgacgtcgcccagggaatcgctggaaaacaacttcagggcatttccggcctgtccttcgacaacaagattccccggctcgccaaggcggaccacgtcatctggaagaagcgcctcgcagacatggcaatcggccgcgcaacgctcaaggccgacgaacttgccgatcatcattcctgccgattgggcaaatggtactacggcgatggctctctggcgatgcgcaatcaccgggcattcggaccgctcgagaagccgcacgccctcgttcacgaccacggaaaacgggccgcgaagctcttcgcagacggcgaccttgccggagccctcagggagatctcgctcgtcgaagaggcgtcggtggacgtgctccggctccttgatgacctttctcgctga

SEQ ID NO: 3731 - DNA, 171 bp, BradyrhizobiumColbertium
ttggtagagaggcccgaagtcaatttaggcactgatactaaacagctggtaagctttcctatcggaattctgcaaacggctggcgtttggctgcgttgttgcccgagagatgcgtggcgcactacgccacggcatctgccatcgtaccgaggtcgccagggcacctcctga

SEQ ID NO: 3732 - DNA, 957 bp, BradyrhizobiumColbertium
atgccgatccagttcacgacagacggcagccccggccatcggcggctagccctctggcagaacatcgtctgcgacgtcttcgtcgggctcgattgcaagtcggacctcggcagtgccttccacggctcggttacccaggcttcgctcggcaaggcggtgtgctccgaggtctgctccgaccgccagcacgtcttccgcacgccctcgcgcatcgcccgctcggatcaggatttcgtgctcatcgcgctcggcaatcggggcaacggcgccgtggtgcaggacggccgcgagaccgtgattcaccccggcgagttcgcgctgtacgacaccacgcgtccgtatgagctgaagttcaaggacgtcttcacccagagcatcttcaaggtgccgcgcgagatgctgcatcgccggctggcgggcaccgagatgctgaccgcgatctcgttcggcgcccacgcgccgctcgagcggctcgcctatgatttcatctttcgcctttgccaaaccgcggacgggatgcccccggataccgccgacgcgctgtcggagcaggccgttgatctgcttgcgatggcattgagtgagcggctcggcagaacatcgttaccgtcctcgacccaccgctcggccctgctctttcgactgaaggcgcaaatccgcgcgcacctcgccgattccaacctctcgctcgcggagaccgccgccgcgcttggcatctcgccgcgctacgtcaaccaccttctcgccgacgaggacacctctttccagcgttatgttcttgccgaacgcctggcccgatgccggcgtgatctcgcctcacccgtgctcgcccatcgccacatcagcgagatcgccttcgcctggggcttcaacgacctctcgcatttcggccgcgtcttccgcgagcgtttcggaatgtctccacgcgacttccggcagagccagttgcggcactga

SEQ ID NO: 3733 - DNA, 1017 bp, BradyrhizobiumColbertium
atgggcatcgaacatccgaaatacaaggtggcggtggtgcaggcggcgccggcctggctcgacctcgacgcctcgatcgacaagtccatcggcctgatcaaggaggccgcggacaagggcgccaagctgatcgcctttccggaggccttcatccccggttacccttggcatatctggatggactcgccggcctgggcgatcggccgcggcttcgtccagcgctatttcgacaattcgctctcctacgacagtccccaggccgagcggctgcgtgatgctgtgcgccaggccaagctcaccgccgtgatcggcctgtccgaacgcgacggcggcagcctttacctggcgcaatggtcgatcgggcccgacggcgagaccattgccaagcgccgcaagctgcggccgacccatgccgagcgcaccgtctatggcgaaggcgacggcagcgatctggccgtacatgcccggcccgacatcggtcgcttgggcgcgctgtgctgctgggagcatcttcagcccttgtcgaagtacgcgatgtacgcccagaacgagcaggtccacgtcgcggcctggccgagcttctcgctctacgatcccttcgccccggcgctcggcgccgaggtcaacaacgctgcctcgcgcgtctatgcggtggagggctcctgcttcgtgctcgcgccttgcgcgacggtgtcgcaggccatgatcgacgaactctgcgatcggcccgataagcatgcgctgctgcatgccggcggaggctttgccgcgatctatggccccgacggcagccagatcggcgagaagctggcgccggatcaggagggcctgctgatcgccgagattgatctgggcgctatcggtgttgccaagaacgcggcagatcccgccggtcattattcacggccggatgtgacgcggttgctgctcaacaagaagaggtcccagcgcgtcgagcaatttgcgttgcccgtcgacaccgttgagcccactgatatcgccgcggcggcgaactga

SEQ ID NO: 3734 - DNA, 639 bp, BradyrhizobiumColbertium
atggtgacaatcttttttgatctcgacggcacgctgaccaaccccaagccggggatcacccgctcgattcaatacgcactggagcggctcggcgttccggtgccgaacgaggacgaactgacctggtgcatcggccctccgctgcttgcgagcctcagaaaactcacgggaaccgatgagctcgccgaccgggcgctgctgctctatcgcgagcgcttcagcgatatcggcctgttcgagaacgaggcctacagcggaattgcggacacattgacgtcgctcgcagcgacgggccagcgcatgttcgtcgcgaccagcaagcccgccgtctacgccacccgcatcgtcgatcatttcggcctgaaaccgtatttcgagcgcgtattcggctccgagctcgacgggacccgcgtcgacaagcgcgacctgctccgctacgcgatcgaggagatcaagatcaatcccgccggtgcgatcatgatcggcgaccgcagccatgacgtggtcggagccaggagcaacggcatgaccgccatcggcgtactctatggctacggcagcgaggccgagcttcgcgatgccggcgcgcaccacatctgcgccgcacatcctgagctgctcggccattgcgccgcatag

SEQ ID NO: 3735 - DNA, 954 bp, BradyrhizobiumColbertium
atgcggatagctctgatcatcgctgtcgtgtgccaaacgctcatgttcacgccggtgctcgcggaggagacaccgccggccgccgcgcccgcgaatgccgaggaaactgcgaagccgacggagaaatcggaggacgcccgcgagagcgatacacgccagtcgatctgcctgatcgtggaggcggccgcacgcgacaacaacctgccgctggagttcttcgcgcgcgtaatctggcaggagagtcgcttccaggccgatgcggtcggccccatgacgcgcagcggcgagcacgcgcaaggaatcgcgcaattcatgccggggacggcaagtgagcgcgggctgctcaatccgttcaatccagtgcaggcgttgccgaaatcggcggagttcctgaatgagctgcgcaaccagttctgcaatctcggccttgccgcggccgcctacaatgccggtccgcggcgggtgcaggaatggctcgcgggcaccggtggaatgccggagcaaacccgcaattacgtctatgcgatcaccggtaccagcatcgatgcctgggccaaggctggctcgaccggcaagggcccgccgagctcgccgccgacgagctgtggcgatctgatggcgctgctcaaacgggcgccgaatccgttcgtcgccgagctcgagcagcatgtggagcttgccgctgcaaagagttggggcgtgcagctcgcggccggcttcgatcgcaacaaggcgcttgcgatgtactcccgagcggttacgaagctgagcgccgtgatcggcgagcgcgacccgagcctgctctcgtccgtgatgcgcagccgcggcacgcgcgccttctatcaagtgcgcatcggtgccgatacgcgcgccgaggccgatgatctgtgcaaccgcatccgcaaggcgggtggcgcgtgcttcgtgttgaagaaccgagggttgccgggctag

SEQ ID NO: 3736 - DNA, 741 bp, BradyrhizobiumColbertium
gtggcgcttcctccgctcgattcaccacaatggaatagcccttggcttgccttcggctgggggctgcgctcgatcacacagacgatcctcaccatcgtgctcttcgtgacctatctcggcatcggcgcgttggcgcatgacactcacttcagcctgatctgggcgctgtgttcgacgctgttcgtctgggcaggtccggcgcagatcattctgatcacgacgctcggctctggcgcgaccattgttcaagcggcgatcgcagtgaccgtcagcgcgatccgtttgtttccgatggtggtctcggtgctgccgctgatgcgcacgccgacgaccaagcggcgcgagctgatatttgccgcacatctcaccgccgtgacgctgtgggttgagtgccatcgcttcctgccgcaggtgccgcgtgagcggcgcatcgctttcgttcatggcctcggctgcggcctcgtctcggtctgcctcgtcgccaacacagtcggctatgtcctcgccgccaacctgacgcagacgcttggagcggcgatcctgctgttgacgccgctgtccttcttgttctcgaccgcgcgcaacagccgcgagatcgccgatgtcgtcgcgctcgtactgggcatcgtgctctatccggtggccgccaagatgaactcgggcctcgacatcctggtcagtggcgtcctcgccggcacgatcgcctatggcgtgcattggtggcgacaggtgcgctcatga

SEQ ID NO: 3737 - DNA, 351 bp, BradyrhizobiumColbertium
atgagctttgcgcaggcggtcggtgactggcacgcgcttgtcgtgctgttcgttgccggcgtcgtccccaaccagatctggcgcatgcttggcctctggttcggcggcggcatcgacgagggctcggagctgctggtctgggtgagggcggtcgcaacggcgatcctcgcgggcgttatcgcccagatcgtggtccagccgccaggcgcgcttgccagcgtgtctgatgttctgcgctacggcgcggtcgctgctggccttgtcgtcttcctgctgacccgccgctcgatctttgcgggcgtggtcgcgggcgaggtcttcatgctggccggcaagtggtggttgggctaa

SEQ ID NO: 3738 - DNA, 492 bp, BradyrhizobiumColbertium
atggtccgcgaacaggatctccgcgagggcgaggtcgccatcgagctgccgccggcgcaagatgccggtctcgtcttcattggccgcatccgcaccccctggacgtcacggctggagacgccgcggcaggggcgtcaggacggcccgatatgccggctcgagatcttcgagccgtttgtcccggcaatcaagggcgtcgatttctacagcaatctcgaagtgctctactggctcgacaagtcgcgccgcgacatcatcctgcagagtccgaagaataacgagaagacccgtgggacattttcactgcgctcgccggttcggcccaatccgatcggcacgtcgatcgtgaagctggtcgggatcgagggcaacgcgatcctggtgcgcggcctcgactgcctcgacaacacgccgctgatcgatctcaagcccgaccgctgcgagttcacgccgctggccgcgccgcagacgggtgatttcgagacggagtaa

SEQ ID NO: 3739 - DNA, 429 bp, BradyrhizobiumColbertium
atgaccgcctacgacaccaacaacatcttcgcaaagatcctgcgcggcgagctgccttgccacaaggtgtacgaggacgagcacgtcttcgccttcctcgacatcatgccccgcgtcccaggccatacgctggtgattccgaaagcccctgcccgcaacatcctcgacatcaagccggacgactacgcacatgtcgcccgcggcgcgcacaagatcgcagcggccgcgatgaaggcgttcaatgccgacggcatcaccgtgcagcagttcaacgaaccggccggcggacaggtggtgtttcacctgcacatgcacgtgatgccgcgccacgatggcgtcgccatgctgcccccggcaagccgcaaggaagatgacaagctgctgcaagaccacgcagccaagctgatcgcggcgttgaaggcgggctga

SEQ ID NO: 3740 - DNA, 1242 bp, BradyrhizobiumColbertium
atggcatcatccgacattacgctcgaggccgtaccgtccattggcgaagtctcgcccgaggattgggacgcttgcgccggtcccggcgacaagtgcaaggggcatggcgcaggaatctcatccgccattccaggcgattccctcggcctctcaagacctgcctataacccgttcgtctcgcacgcatttctatctgccgtcgagagatcgggttcggcgaccatccgcaccggctggggtccgcggcatctcgtggccaaggtcggcggccgcgtcgccggcgtcgtgccctgctatctgaaatcgcacagccagggcgaatacgtcttcgaccgcggctgggcggacgcctatgagcgtgccggcgggcgctattacccgaaacttcaggtctccgttcccttcacgccggcgaccgggccgcggctgctggtccgcaacggcgtcgaccgtgcgcagatcaccgaagccttggcgagcggactggtggcgctgtgcggcgtcacgaaggcgtcctccgtccacgtcaccttcgcgcgggaggccgaatggaagctgctcgccgagcacggcttcctccagcgcaccgaccagcagttccactggcataatgagggctttgcgactttcgacgatttcctggcgacgttgaactcgcgccaccgcaagtcgatcaagcgcgagcgtcgcgatgcgctcgccgccgggatcaccatccactggctgaccggcaaagacattaccgaggacgcctgggacgccttcttcgacttctacatggagaccggctcgcgcaaatggggccggccgtacctgacgcgcgagttcttctcgctgatcggcgagaccatgagcgaggacgtgctgctggtgatggcgcgccggaacgatcgctggatcgcgggcgcgatcaacttcatcggctcggacacgctgttcggccgcaactggggggcgctcgagcaccatcccttcctgcatttcgaggtctgttattaccaggccatcgattttgcgatcaaacacggattgaaacatgtcgaggccggcgcgcagggcgagcacaagatcgcgcgcggctacctgccgcgcaccacccattccgcccacttcatcgccgaccctggcctgcgccgcgctatcgaagattatctcaagcgcgagcgcgcctatgttgcggaggccggccgggagctggccgagttcggccccttccgcaaaggcgccgacgaggcgccttga

SEQ ID NO: 3741 - DNA, 180 bp, BradyrhizobiumColbertium
atggacggtacggcctcgagcgtaatgtcggatgatgccattgcgcccaagatcgtgcatcgcagcagcgacttcaaggggctggagccatacgcgtgcagcgcgtcctcggcggtgcgctgcagtcccgtatcgccaccgcaacgctaccgcgttgcagcctgtccggaacaggaatga

SEQ ID NO: 3742 - DNA, 747 bp, BradyrhizobiumColbertium
atgcgcgccccggattggctgacagcccggccggtcgcccatcgcggcctgcatgacatctcgcgcggcatcgtcgagaacatgccgggcgcggtacaggctgcgattgcgggcaatttctccattgaggtcgatatccagctctcgtccgatggcgaggccatggtgcatcatgatcacgcgctgggccgtctcaccgaggccacgggggacgtcatctcgaagaccgctgcggagctgaaggcggtcaagttcagggacaccgccgagcgaatgatgtcgctcagcgatctctgcgccatggttgccggccgggtgccgctggtgatcgaggtaaagagccattttggcggcgaccgcaagctggtgaagcggatggccgaggtgctggcgtcctatgacggccccgcggtcggcatgtcgttcgatcccgaccaggtactggcgctgcgccagttgcttccctcccgtccgcgcggcatcgtcgcgcaacggacctatgaggacgagtactgggccaacctgaccccggagcagcgcgacagcatgctctacctgcgccacggcttccagacccagccccacttcgtcgctttcaaggtcgaccaccttccggccccggcaccctggatcgcccgcaacgtcttcggctgcgccctgctcggctggaccgtgcgcacgccggagcagcgggcgcgggtcgggcggtatgcagatcagatgatctttgaggggttcgtgccgtaa

SEQ ID NO: 3743 - DNA, 468 bp, BradyrhizobiumColbertium
atggcgggcacggtcgagcagaaactggcggaacagggcatcaagctgcatgaggcccccactcccgtcgccaactacgtcccgttcgtgcgcaccggcaatctgctgttcgtctccggccaggtctgcttcgatcccaccggcaagctgatcgccaagggcaagctgggtgccggcgtctccatcgaagacggtgcggcggccgcccgcggctgcgcggtgaacctgctggcccaggtcaaggccgcactcggcgacctcgacaaggtcgtccgcgtggtccgtctcggcggcttcatcaattcagcgcccgacttcctggacggaccgaaggtgctcaacggcgcctccgatctcatggtggccgccttcggtgacaagggccgccatgcccgtaccaccgtcggcgtcgcctccctgccggccgacgcggcagtcgaggtcgaaggcgtgttcgaggtcgcctga

SEQ ID NO: 3744 - DNA, 879 bp, BradyrhizobiumColbertium
atgtccaatctgcgctttcctcagggaacagacatggtgcaccttttccggacttcgctcggtgtgatggcgctcgcggcggccacttttggccccggctgcggggcgctggccgccaacggtccgtttctcgcgcatcaggcgctctacgacctcagcctcgtcaaatcgcgctccaattcggtcaacagcgcccgcggccgaatcctctacaatttcacagggaatgcctgcgagggctatacctcggaattccgccaggtgtccgagctcgacagcggcgagggcaaggtcacactgagcgacctccgctccaattcctgggaggatgccgccggcaagagctatcgcttcaagatcgagacgcggatgaatgaggccgatgccggccgtgtcgacggctcggccgagcgcgacggcgaccaaatcaacgtcaagctgaagctgccggcaccgaaaagctttacgctcgacggcaagatcgtattcccgaccgagcagatccagcgcatcatcgcggccgccaaggagggcaagtcgctgctcgagctctccgtctatgacggctcggacgacggccagaaggtctacaacacgctgaccgtgatcggtcagccaatccccgccgaccgtgccacgtcttcggacccgtcgaccgcggacgagcacatgaaatccctgaagcgctggccagtcaccgtcagctatttcgaccgcgacgcccagcagaaggaaggcgagcagacgcctgtttatgcgatggcgttcgagctctacgagaacggcgtctcgcgccagctcgtgctcgactacaacgatttcgtgatttccggcgcgatgggcaagttcgacgtgaaggacagcaagccctgcaattga

SEQ ID NO: 3745 - DNA, 402 bp, BradyrhizobiumColbertium
atgcccaagcttgatcatctctgccccagcggtttgcataacaatccggcctattctcacgtcgtcacagcttccggcgcccgcaccatctacatctccggacaggtctcggtcgacgaggaggggcggatcgtcggcgagggcgatattgccgcccagacgacgcaggtgatgcagaatctcggccacgcgctgaaagcggccaacgccaactacgccaacatcgtcaagatcacgactttcgtcgtgaactacaagccggagctgcgcccgatcatcggcaaggcccgctccgcgttcttcgaaggcatggagccgccggcctcgacgctcgtcggcgtctccgcactcgccgcgccggaatggctgatcgagatcgaggcggtagccgtcgcggattga

SEQ ID NO: 3746 - DNA, 402 bp, BradyrhizobiumColbertium
gtgatgataggtgaacgcgatctcgccgcgctgcttaaacacattgagccggagctgcggcccggcatcttcgttttctgcaggctttcgaaaagcgaggggatcccctcagcactagatccgctcctgacgtttcgcgagcaggaaggcacgacgctggtgatctctcaagaagcggctgagcgcgcaggcttacgctatcaattcgtctcgcgcctgatcaccctgacggtccactccgcactcgatgcggttggccttctggcggcagtcacgtcacgtctggccgaagccggcatcagcgtgaatgccgtttcggccttctatcacgatcacctgtttgtgccggtggacagggccgacgaggcgatggccgttctactagagctagccaactactag

SEQ ID NO: 3747 - DNA, 1227 bp, BradyrhizobiumColbertium
gtgggcgtgcgccgctgttccgcctgcggatcccctcgcctcgtccgccacgccgcgctcgcgagcctgaccatcgcccatatcgactgcgacgccttctacgcgacggtcgagaagcgcgacaatcccgacattgccgacaagcccgtcatcatcggcggcggcaagcgtggcgtggtgtcggcagcctgctacatcgcccgaacctatggcgtccgctccgccatgccgatgttcaaggcgctggaagcctgcccgcatgccaccgtgatcccgcctgacatggccaaatacgtccgcgtcggccgtgaagtgcgtcaggccatgcaggcgctgacgccgctcgtagagccgctctccatcgacgaggccttcctcgacctctccggaaccgagcgcgtccacggcatgatcccggcaaaggtgctggcgcgctttgtccgcgaaatcgagcgcgacatcggcatcaccgtctcggtcggcctgtcctgcaacaagttcctggccaagatcgcgtccgacctcgacaagcctcgcggctttgccgcgctcgaccaagaggaagcccgtttgatgctggcggaaaagccggtcggcttcatctttggcgtcgggccggcaacgcaggagcgcctcgtgcagcgtggcttccgcgtcatcgccgacctccagaaggccgacgagatcgagatgatgcggcagttcccgagcgatggacgcaggttatggaggctcgcgcgcggcatcgacgaccgcctcgtcgagcctgaccgcggggccaagacgatctccagcgagaccacattcgagaccgacattcgtgatttcccgacgctggagaagatcctctggcggctgtgcgagaagacgtcgtcccgcctcaagagcgccgagctcgccggctcgacggtcacgctgaagctgaagaccgccgatttccgccagcgcacgcgctcgcaatcgattgccgcgccgacgcagctcgctgcaaagatgtttgcgatctgccgcgagatgctggcgaaagagatcgacggcaccgccttccgcctgatgggcgccggcgtcagcgcgctgcgcgagggctcggcctccgacgataccgatatgctagaccgccgcgctgcgcacgccgaacgcgccgtggacagcctgcgcaagaagttcggcagtgccgctgtcatccgcggcattgcgtatgaagggccggagaaggcgccggagtga

SEQ ID NO: 3748 - DNA, 312 bp, BradyrhizobiumColbertium
gtgaaaaagcctgttcacaacccccgcgaagttgctgaaatcgttgcgattcaggccctgtccttcgtcgcgagcgatcccgagcggctcggcctgttcctggccgagacgggggtcggtccagagaccctccgcaatgccgcctcggatccgaactttctcctcagcgtgctcgatttcgtgatgcgggacgatgccaccgtgaaggcctttgccagctcggccgaactgcatcccaccaacgtcgccggggcccgacaggtcctgggcgatgccctcggcgattcctcctgggagcgcgacgtgccgtga

SEQ ID NO: 3749 - DNA, 366 bp, BradyrhizobiumColbertium
atggctaagaccgtcctgatcgtggaagacaacgagctcaacatgaagctcttccgcgacctgttggaggcgcacggctaccagacctcgggcaccagcaacggctacgaggcgctcgacctcgttcgcaagatgcggcccgacctcgtgctgatggatatccaattgccgcaggtttcagggctcgaggtgacgcgctggatcaaggacgatccggagctgcgcagcattcccgtcgtcgcggtcacggcgttcgcgatgaagggcgacgaagagcgcatccgcgagggcggctgcgaagcctatttgtccaagccgatctcggtcggcaaattcattgagacggtccggcgttttatcggatag

SEQ ID NO: 3750 - DNA, 1374 bp, BradyrhizobiumColbertium
gtgtccgcgcgtatcctggtcgtcgatgacgttcctgccaacgtcaagctgctcgaagcccgcctgtccgctgaatactttgacgtgatgaccgcctcgaacggcaccgaggcgctggcgatctgtcatcgcgccgagtgcgacatcatcctgctcgacgtgatgatgccggacatggacggtttcgaagtctgccgccgcctcaagaccgatccggctacgcatcacattcccgtcgtcatggtaacggcgctcgacagccccgccgaccgcaaccgtggtctcgaagccggcgccgacgatttcctcaccaagccggtgtccgacgtcgtgctgattgcgcgggtgcgctcgctgacgcggctgaagatgatgacggacgaattgcgcatgcgcgcgatcacctcgctcgagatcggcatgcaggcgcccgagcgcagcgccgtggccgacaccggcaagggcggccgcatcctgctggtcgacgaccgcgagtcctcctacgagcggctggcgacgatcctcgccgccgagcacaccatcgacgtcgagccgaatccgacggaagcgctgttccacgccgccgagggcaattacgacctgctgatcgtctcgctcgacctcaacaatttcgacggcctccgcctctgcagccaggcgcgctcgctggagcgcacccggcacgtgccgatcctcgcgatagccgaccccgagaactcgacgcggctgctgcgcggtctggagatcggcgtcaacgactacctgctgcgcccgatcgacaagaccgaactcctggcccgggcccgcacccagatccgccgccgccgctacaccgatcacttgcgcgacaacgtgcagaactcgatcgagatggcgatcaccgacgcgctcaccggtctgcacaatcgccgctacatggagagccatctggcgactctcgccgagcaggcctccatccgcggcaagccgctggccctgatgatcctcgacatcgattacttcaaatcgatcaacgacaattacggccatgacgccggcgacgacgtgctgcgcgagttcgcggtgcgggtgcgcaagtcgatccgcggcatcgacctggcctgccgctacggtggcgaggaattcgtcatcgtgatgccggagaccgatttgcacgtcgccggcatggtcgccgagcgtttgcgccgctcgatcgccggcgagccgttcgcgatccacaagggcgccaagcgcatcgaggtcacgatctcgatcggcctcaccacgctggagcggaagggcgaggcggtcgccgacgtcctcaagcgcgccgacaccgcgctgtatcgggccaagcacgacggccgtaaccgcgtggtctcgcaggcggcctga

SEQ ID NO: 3751 - DNA, 582 bp, BradyrhizobiumColbertium
atgaaagagcggatcctcgagaccgccgacaagctgttctatctgcaaggaattcgcgccatcggtgtggataccatcgcggccgagatcggcatctccaagcgtacgctctacaatcacttcccctccaaggatgcgctgatcgcggcctatctcgagcgccgcttcgttcacgcacgcccctccgacaagccccccgccgagcagatcctcgcgacgtttgattcgctggagcggcgttttgcagccaaggattttcgcggttgcccgttcgtgaatgcggtggccgagctcggccctcaggacctcgccgtgaagaagatcgcgatcgccttcaaggaaagccgacgcctctggtttcgcgaccgcctgagcgagctcggtgttgccaatgcggatgcactggcaacgcagctcgtgctgctcgtcgacggctccatcgcgcaagatctggtgcgcgatgatccggccatggcgcgcgcggccaaggaagcggcgaaggtgttgttgcggaatgcgggcgtggatgtgtcggatggtgcggagaggccggcggcatcaggtaagcgcgcgccccgataa

SEQ ID NO: 3752 - DNA, 1239 bp, BradyrhizobiumColbertium
atgcccctgctgcaggtcctgcgcccgaccttgcccatcctgatcggtgcctcggtcatgctgacgctgagcatggggttgcggcagtcgctcggcatcttcatgcagccgctgacgcatgacatccatatttcgatctcggatttcacgctggcactggccgtgcaaaaccttgcctggggcttcctgcagccccccgccggcgcactcaccgtgcgttacggcttccgcccgatcatgatcgtgggcgcactgatgtacatcgcaggcctcgtgctgatggcaacggcgaacgggctcgtcagcatcatgatcggcgccggcgtgctgatcggcacctcgatggcctgcaccgccgcggcgatcgcgatgtcggtggcggcgcgcgcagtgccggagaccgtgcgctcgaccgtgctgggcatcgtctccggcgcgggctcgctcggcgcgctgttgtcggcgccgatcggacagatgctcaacgagggctttggctggcgcgtcgggcttgccggtttcgtcgtcatgtcgctgctgatgatcccggccgcgtggtatgccgggcgcgtcgacaaaatcccgctgccgaagcccgccgccgccgacctcggcgatgccacggctgcgatcgcggcgaagacagcgttcggcaacgcgtccttcgtcgtgatgacctgcgcctatctcgtctgcggcatgcagcttgtgtttctcaccacgcatctgccgtcatatctggcgatctgcggcctcgatccgatgctcagcgcgcagacgctcggcatgatcggcggcttcaacgtgctgggctcgctgttcttcggctgggccggccagcgctggaacaagctggcgctattgggcgcgatctacatcctgcgctcgctcgcgctggcctggtatttcacgctgccggccagtccgttctcgacgcttctgttcggagcgatcatgggcttcctctggatgggcgtcggcccgctcgtcgcgggcgccgtcgccgaaatgttcggcctgcgctggcaggcgatgatccagggccttgccttcatgagccaccagatcggcagcttcctcggtgcctatggtggcgggctgctctacgacgcgctcggctcctacaccatggcctggcgcatcggcgtcgcgctcggccttgccggcggcatcgtgcaggtggcgttcgcgctgatccggccgtcgcaaccgccggccccggtgctgcggacggcctag

SEQ ID NO: 3753 - DNA, 1986 bp, BradyrhizobiumColbertium
atgaggcccgtagcgagacagcccttcaagccacgcaccaccgaagagctgatggcgctgctgagtgcagtagcgaccgggattctgaccgtcatcattatctcgatgctctatttcggtcgagacatcttcgtgcccgttgcgctggctattcttctcagcttcgtgctggcgccgctggtcggaatattgcagcggatccatgtcccgcggggactggcagtcgtgagcgtggttgtcgttgcgtttatgctgatcttcgcgatcggcagccttctcgccactcaactgacgcaactcgccggtgacctgccccgatatcaatcgacgatcagcgacaagatccaggcattccgggataccaaggccgggaggggcacgctggagcgtgcttccgatatgctgaaggatctcagcgaggagcttgataaaccgaaagacgcgccatccgcgccgaggaccggcgttgtccccggctcaaatgcctccccgccaccggtcccagtcgaggtacgccagcctgatcccggcgcgttggagagtctgcgaaccctgatttctccgctcattcatccgctcgctaccaccggcatcatcatcattttcgtcatattcattctcattcagcgcgaggatcttcggaatcgcttcattcggctggcgggctcgctggatctgcagcgtacgaccgctgcgttggacgatgcagcgagccgcctcagcaagctgtttctgacccaactcatcctgaacggcgcattcggcgtggtgatcggcaccggcctctggttcatcggaattcccagcgcgatcctttggggcatcctcgcggccgcgcttcgcttcgtcccttatgtcggcgccgttatcgctgccgcattcccgctggcgctcgcggtcgccatcgatcccggctggtcgatgctgctttggactctcgctctatttcttgtcgttgaaccgctcgtgggccatgtcatcgagccgatggtttacggccgcagcacagggctttcccccgttgccgtggtcgcgtcggcaacgttctggacggcgctctggggaccaatcgggctcgtcctcgcgacccccctcacgatctgcctcgtggttttggggcggcatgtggagcgattggaattcctcgacgtcatgtttggagaccgaccggcgctttctccgccggaaatgttctatcagcggatgctggcgggggatccgaccgaagcggccgaaaaggccgaggggtttctgaaagagcgttcgctggcttcgtactatgatgaggtcgccctgaagggtttgcacttggcgcaagccgacgtggagcgcaatgcgcttgaccaggaacgtctcatgaagattcgagatgccgtcagcgagtttgtcgccgatcttgccgatcaggacgaccggccgcccccgaggagtagttccaccactgatgctgaagcatcatccgcggtcgaaggcattgccgagaatgcggccaatgaacgcttgccttacctgcgtagcgaaacgctaccgccggattggcagggtgaacaccctgtcctgtgtgtggccggacgccccctgatcgatgaggcggccgcgatcatgctggctcagctctcgactgagcacggcctcgctgcgcgagtcgaaggcgcagcatcgctttccacgacgaatgtctttcgcctggatacaacgggcgttgcgattgtctgcttggtctacctcgatgcccgcgctgcggcacacatgcggtactccgtccggcgtctgaggcggaaactgccgaaggcaaccatcatcctgggctgctgggtcaacgacattgaccaggccgccatggaattgttgcggacaggcgccaaagctgacctcattgcgacgagcatcggtgaggccgttaggctgtgcatcgaagcgacagggataacggaacaggggcacgaagcccccgggcaggacaagcccacaacggctgcggcgtga

SEQ ID NO: 3754 - DNA, 180 bp, BradyrhizobiumColbertium
gtgctgtacgacgcgctcgaatcctacgcgatggcctggcgcatcggcgtcgcgattggtctcgccgtcggcatcgggccggtcgcattcggcccctgggcgcatggcggatgcgctgcaaacgcgtcgcccgggcggctcaccattgtcattacgccgctgccgctaccttcaccttga

SEQ ID NO: 3755 - DNA, 1230 bp, BradyrhizobiumColbertium
ttgcccctgctggatccgctgcgcttcggcgctgcgcttggcgtcgccgtctttcaccagatgttctggtcctgggcctgggtctcgatcggcgtcccgggcttcgagcgctacgtcgccgccgatgtcctctacccgtctgccgcgcccttcacatggttcggctgggtcggcgtcgaaatctttttcgtcatctctggtttcgtcatcgccaattccgcggctcaatcctcgccgggcggctttcttctgggccgtgcgctccggctttatccggcggtctgggtgtgcgccactgcgacgtttctcgtcctgcttctcttcggcagcggacccgtctccgaaatcatccagccctacatccacgccatgctgatggtgcccaagggcgtcacgggccattggcttgacgaggtctattggacgctggcggccgagatcgcgttctatggtctcgtgttttgcgcgatgctcacgaagaggatcactctgcggcacctcgccttcggcctcaccatctacagcgcactgttcaacgcggtcgcgctggcggtgctgtcatgcgcgacgccatccgacctgccttatctcgtcatcctgatgtttcgggtgccatgcgcggcgtttctgttgacgcatggctgcttctttgcgctggggatctggctgttcattctctcgaacaggcaattgactgcgctggagcaggtcgccgtcgccgtcgcctgtctttcaggcgcggcggagatctacttctttgcatctttccttctgacgtccatacccgcgatcgccgatcaatcggcgctcgtgccgatcatggtttgggcggccgcggtgctgctcattgcgcttgccgcaaaccgcaacagacggttcgccggcatcgcttcccctgaggcacctgcctatctgagaacgcttgggctgatcacctatccgctctatctcacccacaacgtcatcggcgcggcggtcattcgtgcattggtcgacgccggtctcgatgcgacctctgcgctttggatcgcacttgccatgctcatcctggtctgctggttcatttgcgcgaagatcgagccggccgtcaggtccgcactgatgcaaatcctttcgcgcttcggaaagctgccgcagagacacccggtaacgcgccgccctgcgttcgcccgggggcttcgccttccgctgcccgtctcggtcaaggtgaaggtagcggcagcggcgtaa

SEQ ID NO: 3756 - DNA, 138 bp, BradyrhizobiumColbertium
atggaccagattcatgcaacgatcccgttcgagatattgaatccggtcgaggtgctctgcgaggcgggtcacactcgcttcgcccgccaagcaccgatcatggagagcagggtgtccgtagccggaagcccgcagtag

SEQ ID NO: 3757 - DNA, 168 bp, BradyrhizobiumColbertium
atggccaaagcggtcaccatcaaggtcaagctcgtgtcctcggccgacaccggcttctactacgtcgccaagaagaactcgcgcaccatgaccgacaagctggtcaagaagaagtacgatccggttgcgcgcaagcacgtcgaattccgcgaagccaagatcaagtaa

SEQ ID NO: 3758 - DNA, 801 bp, BradyrhizobiumColbertium
gtgcgcgatgtcgagagcgggctgttcttcgatcccgcgaagatgcatacgctcgaccacaagggcaaatatctgaaggttcgcggccctctcaacatcgcccgacccgtgcagggctggcccgtgatcgtgcaggccggcgcctccgaagacggcaagcagctcgcggccgagaccgcggaagccgtcttcaccggcggcggcagcctcgccgacggccaaaaactctatgccgacatcaagcgccgcatggagaaggccggccgtgatcccgagcatctcaagatcctccccggcgccttcgtcgtggtcggcgacagcgtggatgaggccagggaaaagcgcgcgctgctcgacagccgcgtgcattacgacagcgccatcgcttcgctctcggtgatcctgggcaccgacgcctccggcttcgatcccgatggccctctccccgcgattcccgagaccaacgccagcaagagcggccgccagcgcatggtcgatctcgccacgcgcgaaaagctcaccgtgcgccagctcgcccagcgtgtcggcggctatggcggcctgtccttcgtcggcactgccaagaccatcgccgaccagatggaggaatggctggtcgggcgcggctcggacggcttcaacatcatgttcccgttcctgcccgccggcctcgacgatttcgtcgacaaggtcgtcccggagctgcagcgccgcggcattttccggaaggagtatgaaggggccactttgagggagaatctgggcctgccgcggccgaaaaatcgcttcttcgaggcctaa

SEQ ID NO: 3759 - DNA, 807 bp, BradyrhizobiumColbertium
atggtattccgcctgtgtaagcaacaagcaagaaaacgggttttgggtgaggacatgacggatatttcgcaggccgaggagaaaaccagggttcacgaggagaaggaagccgatcaccatccctacttccgcccgagggatgcggcgacactgatcctggtcgatcgcagcggcaccaccccgaaagtgctggtcggcaagcggcacgacaaggtcgtgttcatgcccggcaagttcgtctttccgggcggacgcgtcgacaaggccgattatcgcgtgccctgtgccgcccccatcacgcccgagctggaggccaatctcgccaagggcagcccgaagacgccggcttcgcgcgcgaagtccctcgccattgccgcgatccgcgaggcctgcgaggagaccggcctctgcctcggccgcaaggccgaaggcaaggtgacaaagctcgagggcccctggaggccgttcgccgatgccggcctcctgcccgatccttccagcctgttcctgatcgcgcgggcgatcaccccgccgggccgggtcaagcgcttcgacacgcgcttcttcaccgccgatgcctccgcaatcacccatcgcgtcgagggggtgatccatgccgatgccgagctggtggagctggtctgggtcgagctcggctcaaagccgctcgccgatctgcatccgatgacgcgcaacgtgctcaacgagctcgacacccgccttgccaccggcccgcttcgtcatgatgcgccggtgccgttcttccatttctacggcggcaagatgcagaaggatgtgttgagctga

SEQ ID NO: 3760 - DNA, 441 bp, BradyrhizobiumColbertium
atggtgatgatcagcacggcgccaaagatctggacgcgcgagacgggtctcgtcgagcagcgcgacctgtggacggcgatgaagcgcggctttcgcggccgctgcccgcgctgcggcgagggaaagctgttccgtgctttcctgaagacggcagatcattgcgccaaatgcgagctcgacttcacgccgcaccgcgccgacgatctgcccgcctatctcgtcatcgtcatcgtcggccacatcgtggtgccggccatcctctggatcgagaccaactattcgacgccggtctggctcagcttcgcggcctatctgcccttcaccttcatcgcctcgctcgcactgttgcagccggtaaaaggagctgtggtcggcttgcaatgggctctgcgcatgcacgggtttgacgagaaccctccggatggtattccgcctgtgtaa

SEQ ID NO: 3761 - DNA, 2364 bp, BradyrhizobiumColbertium
gtgaaacgcaagaatgaccttggctttcccgaccggaacgccatcgtcgccttcatcaaggccaatccgggaaaggtcggaactcgcgacattgcgcgcgagttcggcctgaagaatgctgatcgcgccgagctcaggcgcatgctgcgcgagctcgccgacgacggcatcatcaagaagaagcgccacaaggtctccgagccggaggcgctgccgccgacactgcttgccgacatcacaggccgcgacagtgacggcgaattgatcgcctcgcccgccgaatgggacgaggtcgagagcggcgagccaccaaagatcctgatcgagatgccgcgcaagccgaagccgggcaccgcggccggaatcggcgaccgcgccctgctgcgcgtcgagcgatccgacgagaccgaaggtccggcctggcgcggccgcatcatcaaggtcatcgacaaggccaagagccgcattctcggcgtcttccgcagcctgcctgaaggcggcggccggctcgtcgccgtcgacaagaagttcgcggaccgcgaactgaacatcgccaagaccgatacccagggcgcgcaggacggcgatctcgtgagcgtcgacatcgtccgctcgcgcggcttcggcctcgcatcgggccgggtcaaggaaaagctcggctcggtcaagtccgagaaggcgatcagcctgatcgcgatctatgctcacgacatcccgctgcaattctcgtccgcggccgagcgcgaggcggaagccgccgagcccgcgaacctgaaggggcgagaagactggcgcgacgtcccgctcatcaccatcgatccgcccgacgccaaggatcacgacgacgcggtccacgcgcagcccgatgacgatcccaacaacaagggcggcttcatcgtcaacgtcgccatcgccgacgtgagcttctacgtgcggccgggcaccgcgctcgatcgcgacgcgctcgatcgcggcaactcggtctattttcccgaccgcgtcgtgccgatgctgcccgagcgcatctccaacaatctctgctcgctggtgccgggcgagccgcgcggcgcgctcgcggtgcggatggtgctcggccccgacgggcggaagcgttcgcacagcttccaccgcatcctgatgcgctcggcggcgaagctgagctacgcgcaggcgcaggccgcgatcgacggaaagcctgacgacaccacaggccccctgctcgatccgattctcaagcccctctatgccgcttacgcctgcgccaggcgggcgcgcgacgagcgcgatccgctcaacctcgatctccccgagcgaaaaattctcttgaagagcgacggcacggtcgaccgcgtcgtcgtgccggaacgcctcgatgcgcacaagctgatcgaggagttcatgatcctcgccaacgtcgccgcggcggagatgctggagaagaagtcgctcccgctgatctaccgcgtccacgacgagccgacgctggaaaaggtccatgcgctcgcagagttcctggagacgctggacgtcccattcacgaagtcaggcgcgctgcgcccgacgctgttcaaccgcgtgctggcccagctcgaaggccatgactattacccgctggtgagcgaggtcgtgctgcgcgcccaggcccaggcggagtactcttccgaaaattacgggcatttcggcctgaacctgcgccgctatgcgcacttcacctcgcccatccgccgctacgccgaccttgtcgtgcaccgtgcactggtccgcgcgctcggcctcggcgaaggcgccctgcccgacagcgagacgccggaatctctcggcgaggtcgccgcgcatatttcgctgaccgaacggcgcgcgatgaaggcggagcgcgagaccgtcgaccggctcatcgcgcatcacctcgccgaccgcatcggcgccagcttccagggtcgcgtttcgggcgtcacccgcgccggccttttcgtcaagctgagcgagaccggcgccgatggtctgatcccgatcagatccctcggcacggaatatttcaactatgacgagagccgccatgcactggtcggcacgcgaagcgggaccatgtatcagctcggcgacgtcgtcgacgtccgtctggtcgaagcggctcccatcgccggcgcactgcggttcgagctgctgtcgtcggagagcgagggcggcccgcgcacgcgcggatctttccgcccgcagcgcaagccatcaaaagctcatcccggacgcagcccggagaaaaaacgcaagccggagaagcaaaagcctgccaaaggcaagaaggccaaaggaaaccgggccaaaaggaagaacaagagcaaaggacagaagggcaaggcatggtga

SEQ ID NO: 3762 - DNA, 2739 bp, BradyrhizobiumColbertium
atgaatatcgtcatcgtggagtcgccggcgaaagccaagacgatcaacaagtatttgggctcgtcctatgaggttctggcctcgttcggccatgtccgcgacctgcccgcgaagaacggctccgtcgatcccgatgccaatttcaagatgatctgggaggtcgaccccaaggcggccggccggctcaacgagattgccaaatccttgaagggtgccgaccgcctgattctcgccaccgaccccgatcgcgagggcgaggcgatctcctggcacgtgctggaggtgttgaaggaaaagcgcgcgctgaaggaccagaaggtcgagcgggtcgtcttcaacgccatcaccaagcaggcggtgtcggatgcgatgaagcatccgcgccagatcgacggcgcgctggtcgacgcctacatggcgcgtcgcgcccttgattacctggtcggcttcaccctctcccccgtgctgtggcgcaagctgccgggtgcccgctcggctggccgggtgcagtcggtggcactgcgcctcgtctgcgaccgcgagctcgagatcgagaaattcgtgccgcgcgaatattggtcgctgatcgcaaccctgctgacgccgcgcggcgatgccttcgaggcccggctcgtcggcgccgacggcaagaagatccagcgcctcgacatcggcaccggcgccgaagccgaggacttcaagaaggcgctggaggccgccagctacatcgtgaccgcggtcgatgccaagcccgcccgccgcaatccgcaggcgcccttcaccacctcgacgctgcagcaggaagccagccgcaaatacggctttgcgccggcgcacacgatgcgcatcgcccagcgcctctatgaaggcatcgacatcggcggcgagaccaccggactcattacttatatgcgtaccgacggcgtgcagatcgatccgtccgcgatcacccaggcgcgcaaggtgatcggcgaggattacggcaacgcctacgttcccgatgctccccgccaataccaggccaaggcgaagaacgcccaggaagcgcacgaggcgatccggccgaccgacctgtcccgccgccccgacagcctgaaccgcaggctcgatgccgaccaggcgaagctctacgagctgatctggaagcgcaccatcgcaagccagatggagtcggccgagctcgagcgcaccacggtcgacatcaccgcgaaggcaggctcccgtacgctggagctgcgcgccaccggccaggtcgtcaagttcgacggcttcctcgcgctttatcaagaaggtcgcgacgacgaggaggacgaggattcccgccgtctgcccgcgatgagcccaaacgacgccctgaaacggcagagcttgtcggtcacccagcatttcaccgagcccccgccgcgcttctccgaggcctccctcgtcaagcgcatggaagagctcggcatcggccggccctcgacctacgcctcgatcctgcaggtgctgaaggaccgcggctacgtcaagctggagaagaagcgtctgcacggcgaggacaagggccgcgtcgtgatcgcgttcctggagagcttcttcagccgctacgtcgaatacgatttcaccgccgcgctggaggagcagctcgaccgcatctccaacaacgagatctcttggcagcaggtgctgaaggatttctggcgcgacttcatcggcgcggtcgacgacatcaaggatctgcgcgtcgcccaggtgctggacgtgctcgacgagatgctggggccgcacatctatccgcctcgccccgatggcggcgatgtcaggcaatgcccgaattgcggcactggccggctcaacctcaaggccggcaagttcggcgccttcgtcggctgctcgaactacccggagtgccgctacacccgtcagctcgccgccgacggcgaggccacggccgaccgttcgcttggccaggaccctgagacgggtcgcgatgtctgggtcaaggccggccgcttcggcccctatatccagctcggcgagcagaaggattatgaggaaggggagaagccgaagcgcgcgggcattccgaagggcacttcgcccagcgacgtcgacctcgagcttgcgctgaagctgctgtcgctgccgcgcgagatcggcaagcatccggagacgggtctgccaatcaccgccggcctcggccgcttcgggccgttcgtcaagcacgacaagacctatgcgagtctcgaagccggcgacgaggtgttcgacatcgggctcaaccgcgcggtgacgctgatcgccgagaaggcggcgaagggcccgagccgccgcttcggtgccgatccaggcaaggccatcggcgatcatccgacgctcggcaccgttacggtcaagagcggccgctacggaccctacgtcacagccggcggcgtcaacgcgacgattcccgccgagttcgagaaggacgccatcacgctggcgcaggcgatcgcgctgatcgacgagcgtgcggccaagggcggcggcaagaccaaggcgaagaaggcggccaagccggccaagaccaagaaggctgcaaacggcgaggatgcctcgccgaagcccaagaagccggccgccaagaaagctgcggccaaaaccaaatccgaatccaccagcaaggcgcgcgctgccgtgtcgtcgaccgcgaagacgtcgccgaccaaagcggccgcgaccaaggctccggccaaaaagagtgccggcaagaattag

SEQ ID NO: 3763 - DNA, 144 bp, BradyrhizobiumColbertium
gtggccttcatcgccgagcagaccggggcattgcgcgagctggccgagcgccacaagctcgccgtgctgcattatctgctgggtatgaccaagctggaggctgacgagcacatgcgactgcggaccaagcgcaagctgtcgtga

SEQ ID NO: 3764 - DNA, 330 bp, BradyrhizobiumColbertium
atgatcctctcgatcccggcggaccagttccgtaacgacgttcgcggtctcgtcatcgcggcctgcctgatcggaggactgatcctctggtttgcgatcgcaggccggtccgaccgcgtcatctatcgcggtgtcgacaaggcatggtccgagcccggtcgcgtccatctcaacacggagccccccggcaattacgtgatcgagcgaaacgcagaatttgatgcgatgaagatcggctgtgtctacgctctcaactatgacgccgggtttggtcggcagggtcacaatccctggaaggcggttcgcagtttcactcttgtccggtgctag

SEQ ID NO: 3765 - DNA, 480 bp, BradyrhizobiumColbertium
atggtgaaaagaacgagcttcgaaggcgatgcatgcccgatcgcgcggtcgctagaggccctcggcgactggtggtcgctgctgatcatccgcgaggcgctgttcggcgtacgccgtttcggcgaatttcagagcaagctcggcatggccaagaacattctggccgcgcgcctgcggtcactggtcgagcacggcattttggcgaccgcgcccgcttccgacggcagcgcctaccaggaatatgtgctgaccccgaagggccgcggcacctttccgatcctggtcgcgctgcggcaatggagcgaggagtacgacgaccaccccgaggagatcgcgaccatcctggtcgatcgcgagaaaggtcgcccggtgaagaagctggaaatgcgcgcggaggacggacgccttctcgcgccagccgacacgacgatcagaccacgccagccatcgaagggagtaagccggagtcggtcgggctag

SEQ ID NO: 3766 - DNA, 774 bp, BradyrhizobiumColbertium
gtgagactgaagaacaaggcagcactgatcaccggcggcaacagcggcatcgggcttgcgaccgcaaagctgttcgtggccgagggcgcgaaggtggtgatcaccgggcgcaacaagcagacgttggaggcagccgcgaacgaactcgggtcgaacgcgctcgcactcgcggccgatgccaccgacatcgacgccactgaagccgcaatcaagcagggcgcggaaaagttcggcaagttcgacatcctgtttgccaatgccggcattgccggcggcacgccgctgggatcggcgaaaccagaggtgttcgagaagatcatcagcaccaatctgaccggcgtgttcttcaccgttcaagccgcactgcctcatctcaacgacaatgcctcgatcatcctcaacggctcggtgatctcggtgctcggcattcccggttactctgcttacggtgcggcgaaagccggcgtgcgcgcgatggcgcgggtcatggcctcggagctgtcgccgcgcggaatccgcgtcaacgtggtggcgcccggcgcgatccgcacgccgatctggggggctgccaccgcgacgccggaagccgagaaggagttcgagaagcggatcgcgctgacgacgccgctcggccgtatcggtgaaaccgatcacgtcgccaagacggtgctgttcctcgcctccgacgattccgcgcatgtgcagggccaggagatctttgtcgatggcggcgcggtggcctcgccgagcggcgcgccgatctatcgcggctga

SEQ ID NO: 3767 - DNA, 609 bp, BradyrhizobiumColbertium
atgaaactcctccacctcgactccagcgtgctcggcccccaatccgtcagccggcaggtttccgccgccatcgtcgaccggctccggcaggcgacgccctcgctcgaggttgtctatcgcgatctggcccacgccccgctcgcccatctctccgggtcgcaccttgcggcggcccacggcgcgccggcgccggcggaactcgcgcccgacctcgcggcgagcgcggtcgcgctggaggatttcctggcggccgacatcgtcgtcatcggtgcgcccatgtacaacttcacgatcccgagccaactcaaggcctggatcgaccgaattctggtgcctgggaagacatttaagtatggccccactgggcccgaggggctcgcgggcggcaagcgggtgatcgtcgcaatgtcgcgtggcggcttttacggcgccgagacgccaaacgcggccggcgagcacctcgaaacctatctgcgctgggtgttcggcttcctgggaatcaacagcgtcgagttcatccccgccgacggaatccagatcgacccggaccaccgcgagaaggcgctcaccggcgctctccaggcagcaacggctctgcgttcagcatag

SEQ ID NO: 3768 - DNA, 363 bp, BradyrhizobiumColbertium
atgccgcatcccgaccatgcggactgccgtggggtcgcttccgtgctgtcccgcgtcggtgacaaatggagcgtgttcgtgatcatgatgctgagcgacgggccgaagcgattcaacgagctgaagcgcatgatcaacggcatctcgcagcggatgctgaccctgacgttgcgcgggctggagcgcgacggcctcgtcacgcgcacgatctttccgaccattccaccgcgcgtggactatgagctgaccgatctcggccgcggattgcagcagccggtgaaggcgctgggcgagtgggcgatcgaacaccaggagcagatcgcggcagcgcgcacgcgcttcgacgagcggaacgaccggtag

SEQ ID NO: 3769 - DNA, 1119 bp, BradyrhizobiumColbertium
gtggacgtcatcaatccgagcgtggagctgaccgagcaagagcggatcgaccgcctgcggctgatccgctccgacaatgtcggcccgcgcaccttccgctcgctggtcgatcatttcggcaccgcgcgggctgcactggagcggctgcctgatctggcgcgccgcggcggtgcgcagcgatcgggccgcatctgtagtgccgacgaggcccgggccgagcttgccgcaagccgcaagttcggcatcgcctggcgcgcgcccggcgaggatggctatccgacgcggctggcgatgatcgacgacgcgccgccgctgctcgccctgcgcggcgacgccaagaccctgatgcggccgacgatcgccatcgtcggctcgcgcaatgcctccggcgccggcttgaagttcgccggccagctcgcgcgcgagctcggcgaagccggctttgtcgtcatctcgggcctcgcgcgcggcgtcgaccaggccgcgcatcgcacgagcatcgagagcggcacgattgcggtgctcgccggcggacatgactgcatctatccgcccgagcatggcgatctcctcgccgcaatcctcgaccacgcgggtgcggcgatctccgagatgccgctcggtcatgagccgcgcgcccgcgactttccccgccgcaaccgcttgatctccggagcctcgctcggcgtcgtcgtggtggaagccgcgcaccgctcgggctcgctgatcaccgcgcgcatggccgccgaacagggccgcgaagtgttcgcggtgccgggctcgccgctagatccgcgtgccgccggcgccaacgatctgatcaagcagggcgcaacgctcgtcaccgaagccgccgacatcatcaacgcggtgcagccgatcatggagcgacccctgatgcaccccgcaggcgagcccgacagcgagccgttcgagagcgatccgcaaggccacgaccgcgaccagatcacaggcctgctcagccccgccccgatctcgatcgacgacctcgtgcggatgtccggcgcctcgcctgcgatcgtgcgcactgtgctcttggagctcgagctggccggaaagctcgagcgtcatggcggcgggttggtgtcgctgctttag

SEQ ID NO: 3770 - DNA, 1245 bp, BradyrhizobiumColbertium
atgatttcacttgccgacctccagcgccgcatcgaggcgggggagctttcgcccgatgccgccatcgcgcaatcgcacgccgcgatcgaggccaaggagaaggacatccgtgccttcgtgcggcacgacaagtcggcgaaagcgcaaggctccggcccgctccgcggcatcgcggtcggcatcaaggacatcatcgacaccgccgacatgccgaccgagatgggctcggagatctatcgcggctggcagccgcgcgccgatgcgccggtcgtgatgatgctgaagcgggctggtgccaccattatcggcaagaccacgaccacggcgtttgcctcgcgcgatccgacgccgacgctcaatccgcacaatctcggccattcgccgggcggctcgtccgcaggctcggcggcggccgtcggcgccggcatgatcccgctggcgctcggcacccagaccggcggctcggtgatccggcctgccgcctattgcgggaccgcggcaatcaagccgtcgttccggatgctgccgacggtcggcgtgaaatgctattcgtgggcgctcgacacggtcggcctgttcggcgcacgcgccgaggatctcgcgcgcgggctgcttgcgatgacgggacgtacggagttctccggcatcgtcgcggcgaagtcaccccgcatcggcgtcgtcaggcaggaatttgccggcgcggtggagccggcggccgaagagggactgcaagctgcgatcaaggccgccgagcgcgccggtgccagcgttcagacgatcgatctgcccgaagcggtgcaggaggcctggcgcatccatcctgtcatccaggacttcgaggcgcatcgcgcgctggcctgggagttctccgagcgtcacgacgagatcgcgccgatgctgcgcgccagcctcgatgcgacggtcgggctgacgccgaaggaatatgatgaggcgcgccggatcagccgtcgcggccgccgcgagctcggtgaggtcttcgagagcgtcgacgtgctgctgacctattccgcgccgggcactgcgccggccaaggagctcgcgaccaccggcgatccccgctacaaccggctctggacgctgatgggcaatccttgcgtcaatgtaccggtgctgaaggccgccggcctgcctgtcggcgtgcaggtgatcgcgcgcttcggcaacgatccgctcgcacttgcggtcgcctggttcctggaagaagcgctggcgaaatcaggctag

SEQ ID NO: 3771 - DNA, 1209 bp, BradyrhizobiumColbertium
atgagcgagaagattttcggcgcgcaggacggggttggttcgctgggtggttctggcaccgcggcgagccggctgctctcgtcaaccaatgtctggtgcgatgcgccctccccgcctgccgagccaaagcctctccccatttcaccgccagcgtcggtgcctgattccgttgcgaaagcgcctgttgcagttgatgtcgtaaccacggctgcgccgattgtgcccatgcagccccgatccaaccagtggccaccgcgacgattgtcactcgctctccagggtggcggcacctttgccgccttcacctggggcgtcctggagcggttgctggaagagacgtccattgagatcgacaccatcagtggggccagcgccggcgccatcaatgcgctgctgctcgccagcggtcttgccgaaggcggacgcgaaggtgcccgttaccggctgaaccgtttctgggtccggctgatgcacgaggcctcgttccgctcgctgatgctggtcggcggcttttcgcccgcggggagctcggtcgcgttcggcccgaccctgcgctccggccagttcgatccgttcgatctcgacccgctgcggcaggcggtctcgcgcgacatcaacttctccgtcctgcgcgacacgcgctgcccgaagctgctgatcgcagcgacgcggatccgcgacgggcggccgcagatcttttccaacgacgccatcaccgctgacgtcgtgctggcctcgacctgtccgccgctggttcactgcgccgtcgagattgacggcgaggcctactgggacggcggcttcggcggcaacccgccgctgctgcggctggtgcaggaaacgacgacgtccgatgtcctgctggtccaggttacgccgacgcgcgacacttacgtgccgatcacgctcgccgcgatcgaccgccggctcgaccagatcgcggccaacgccgcgctcaacgccgaggtcgcggcaatcgaatgggcgcaggcccatgccgcgccgttgctgcggctgtcccggattgccgcagaagactcggtcgatgggctggcgcagcgctcgtccaccgatctcggccgcggcttcattcgcctgctgcaccgaagcggccgcgaggcggccgggcgctggctcggacaaggtgcggacggcagcgcgcccgcgcgcacgcgagaggcggctcgggcggaacccgcgctagtctag

SEQ ID NO: 3772 - DNA, 597 bp, BradyrhizobiumColbertium
atggcgcttgaagcttttctgccggtggccttcgtcatcggctacctcctcggttcgattccgttcgggctgatcctgaccaagctcgcgggcacgcaggatatccgctcgatcggctccggcagcatcggcgccaccaacgtgctgcgcaccggacgcaagagccttgcggcgggcaccctgctgttcgacgcgctcaagggcaccgtggccgtggtgatcgccggctatattgcagggcccaatgccgcgatggtggccgggctcggcgctttcctcgggcatctcttcccggtctggctcaaattcaaaggcggcaagggagtcgcggtctatatcggcatcctgctcggcctgttctggcccggcgccgtggtgttctgcctgctgtggctggccactgccttcaccacccgctattcctcgctctcggcgctggtggcggcgttcatcacaccgatgttcctgtggtggttcggccacctcgccttgtccgcactggcggcggtgctgacgctgctcttgttctacgcgcatcgcgagaacatcaggcgcctgcagaccggcaaggaaagccggatcggcgaaaaggcttag

SEQ ID NO: 3773 - DNA, 1308 bp, BradyrhizobiumColbertium
atgccgatgttgaccgaccgccgccccattctgctcgccaatgctcgcatcgtcgatcccagcagggatttcgacggcatcggcgacgttctcatcgccgacggcaccatccgcgagacccgccgcggcatcggcgcggccggcgtccccgagggcacggacatcatcaactgctccggcaagatcgtggcgcccggcctgatcgacatgcgcgccttcgtcggcgagccagggctcagccaccgcgagacctttgcctccgcgagccaggccgccgcgaccggtggcatcaccaccatcatctgccagcccgccacctcgccggtcatcgacaattcggcgaccgtcgacttcgtgatgcgtcgcgcccgcgacaccgcgatcgtcaacatccagccgatggccgcgctcaccaaggggatgcatggcgaggaaatgaccgagttcggcctcctgaaagccgcgggcgcggtggctttcagcgacggcgacaagagcgtgaccaacgcccaggtcatgcgtcgcgcgctgacctacgcccgcgacttcgacgcgctgatcgtgcatcacaccgaggaccccaacctcgtcggcgaaggcgtgatgaacgagggagagttcgcgacccggctcggcctgatgggcatcccgaatgccgccgaagccgtgatgctggagcgcgacctgcgcctcgtcgcgctgaccggcggccgctatcacgcggcttcgctgacctgcatcgattcgctcgacatcctccagcgcgcccgcagtgccgggctcgcctgcagcgcctcggtctcgatcaaccatctggcattgaacgagaacgatatcggtccttaccgttcgttcctgaagctctcgccgccgctgcggaccgaggacgatcgccgtgcgctggtggcagcgatctcctccggcctgctcgatgtgatcatgtccgatcacaatcctcaggacgtcgaggtcaagcgcctgccgttcgcggaagccgcgcccggcgccgtcggactcgaaacgatgctgccggccggcttgcggctggtgcataatggcgaactggagctgaagacgctgatccgcgcgatgtcgacgcggcccgccgagttgctcggcctatcaggcggaaccctgcgggccggcagcccggccgacgtcatcgtgatcgatcccgacacgccctgggtggtcgatcccgccgtcctcaaatcgccctgcaagaacacgccgttcgacgaggcccgctttacaggccgcgtggtgcgcaccattgtcggcggccggacggtctatgagcatgtctga

SEQ ID NO: 3774 - DNA, 948 bp, BradyrhizobiumColbertium
atgacatcgaaatcgaccttcgtcctcggccaccggcatttgctgggcatcgagggcctttccgccgccgacattaccggcctcctcgacctgtcggaagaatatgtcgagctcaaccgccaggttgacaagaagcgcaccgtcctgcgcggacggacgcaggtgaaccttttcttcgaggcctccacacggacccagtcctcgttcgagctcgccggcaaacggctgggcgccgacgtcatgaacatgtcggtgtcgtcctcctcgatccgcaagggcgagacgctgatcgataccgccgtgacgctgaacgcaatgcaccctgacatcctggtggtgcgccatcacgcctccggcgcggtggaactgctggcgcgcaaggtcgacggttccgtcatcaatgccggcgacggcgcgcacgagcatccgacccaggcgctgctcgacgcgctcaccatccgtcgcaacaagggccggatcgaggggctggtggtcgcgatctgcggcgacgtgctgcactcgcgcgtcgcccgctccaacatcatcctgctcaataccatgggcgcccgcgtccgcgtcgtcggtccctccacgctgctgccgcccggcatcgagcggatgggcgtcgaggtggcgcgcgacatgcgcgcgggactggaaggcgccgacatcgtcatgatgctgcggctccagcgcgagcgcatgaacggctccttcgtgccctcgtcatcggaatacttccactatttcgggctcgaccagaagaagctcgcctatgccaagccggacgcgctcgtgatgcatcccggccccatgaaccggggcgttgagatcgactcgatcgtggccgacggcgcgcagtccctgatccgcgaacaggtggagatgggcgtcgccgtgcgcatggccgtgctggaagcgctcgcccgcaacctgccgaacgcgtga

SEQ ID NO: 3775 - DNA, 1302 bp, BradyrhizobiumColbertium
gtggcgctggtcatcggcaacgatctctatccgaacctgccggccgaccggcaattgaagaaagcggcgaatgacgcgacgtcggtggccgacgcgctgagatcacttggttttgagatcgtgctggggaccaatctcggccgccaggcaatgatcgaccgtctcgcggatttcacggcgcggctggagccaggcgataccgccgcggtgttctatgccggacacggcgttgcgatcgcgggcgtgaactacctcgtgcccagcgatgtgccgaccgtcaacgagggcgccgaagcgcgggtgcgcggcgcctccattgcggagccggatgtgatcgcggagcttcaggcgaagtcggtgcgggtcgcgttcgtcgtgatcgatgcctgccgcgacaatccgttcccgcgcgccgcgggccgttcgatcgggaacacgcgggggcttgcggattcgaagccggcacgcgggatcttcacgctctattccgccgggataggtcagaccgcgctcgaccagctcagcagcaacgatacggcgcataattcggtgttcacgcgggtgttcgtcgagcagcttaagcggcctgaactgcatctcggcgatctcgcagtcgaggtgcgcgagcgcgtggcggcgctggcgctgacggcgagcgatggcgccggagagcccgtgccgcacgaccagacgccggcctattacgaccagacgctcggcgggcggatctatctctgggcgtccctctcgtcggagcggccggtggcaggcatgttggtgaagccgcaagcgagaccggcggttgcggagcgtgcggccatgcgtccaccgcgtccgtccgcggcaggcgaaagctgcgcccgcagcggcttcgcgacctattgcgtcagctcgatgctgaagccgcagttcggcaactcatacggcgtggcgaacttgttcgacgcctcgacgggaacggcatgggtggagggcgcctcgggcagcggcatcggcgaatggatcaccatcgagttcgaggccccgcggcgggtcaaatcgatccatgtgcagaacggctatcagaaaactcccgatatctttgccaagaacaacagggttcgccagatccgattgcagttctccgggggagagtcgcagaccttcaccctcgacgacaagttttcagcgcagctcctgacgttgcggtcgccggttacggcctactggctgcaattcgtcatcgacgacgtctgggccggcaacaaatatacggacaccgcgatcacgaagcttctggtcaactcggatccggtgcaatga

SEQ ID NO: 3776 - DNA, 774 bp, BradyrhizobiumColbertium
atgattgcaaggaaggacatcacggcgcgggccgcgctcgtcgcgttgcttgcaacatttgtcctcgccccggtgcgcgcgcagaccttgcccggcggcttcgtctatctgcgcgacatcgaacccagcatcatccaggatatccgctacgccacatcgaacaatttcgtcggccgtccgctcgccggctatggcgcgggcgagtgcgtcgtgaagcgcgaggtagggctgcgactgaaggcggtgcaagaagagctcgccgcccagaatctgtcgctgaagatgttcgactgctaccggccggcgcgggcctcgctcgacatggtgaaatggtcgcagaacggtcatgagacggcggccgagcggcgctacaacccgaggattcccaagaccgagctgttccgcctcggctacatcgcgagccgctcgcagcattcgaccggcgcggcgctcgatctcacgctggtcgacctcaaggctgacaattccgccaaatatgatccgtcgaagagctatgccgattgtacggcgccggccgaggtgcgggcgccggagggcagcgtcgacatgggcacaggctacgactgtaccgacgtcaggggccatacggcggcaccatcgatcaatccggagcagcgtgcctggcgcaagcggctggtggccgcgatggccaggcaaggctttgtgaactattcgaaggagtggtggcatttttccctgccgggggcgggcggggcggcctatgatttcccgatccagccgcggacgaggtag

SEQ ID NO: 3777 - DNA, 1644 bp, BradyrhizobiumColbertium
atgacccagccgaactttgcgacccatgaagtcttcaaccagtcaccgcccttcgaggacgtcaatctctttaccctggaccagccgttggtcgcggcggtgaaggccaatggcggcgcggcggcggaacgggaactgtccgcgttcggcaaggagtggggttctgcggcgatggccgatcgcgggcgcctcgcgaacgagaacacgccgaagctgcgcagcttcgatgccaagggtcaccggcgcgaccaggtcgagtttcatcccgcctatcacgaactgatggcgcacagtgcgcatgcaggcgtgcacaattcgacgtggacggccgatggacgaccggcggacgatgccgccgaggtcatccgcgcggcaaaattctacatggctgcgcaggtcgagaccggccacctctgcccgatcacgatgacgcgcgcttccgttggtgcgctggcgatgcagcccgacttgctggcgcgcgtcatgccggtgctgtccacgaagagctacgatcccggctttgcgccgtggtggggcaagcgcggcatgacgctcggcatgggcatgaccgagaagcagggcggcaccgacgtgcgcgcgaacatgacgcgcgcagttcgcgacgggaatgcgtatcgcatcaccggtcacaaatggttcatgtcggcgcccatgtgtgacgcgttcctggtgctggcgcaggcggatggcgggctgacctgtttcttcatgccgcgcttcgcgccggacggttcggtcaacgccatccagttccagcgattgaaggacaagctgggcaaccgctccaacgcctcgtcggaggtcgagttcgtcggcgctcatgccgaacggatcggcgaggaaggcaagggcatccgcaccatcatacagatggtgcagttgacgcggcaggattgcgcgattgcgtccgtcgggctgatgcgttcggggctcgcgcatgcgcttcatcatgcgcggcaccgcagcgttttccagaagcatcttgccgatcagccactgatgcaggcggtgctgtcggacatggcgctgcatgtggaggcgagcacggcgctggtgatgcggctctgccgcgccttcgaccgcacgccgcgcgatgcggcggaagctgcctatatgcggctgctcacgccggcgatcaaatactggacctgcaagagtgcgccgccattcctctatgaggccatggaatgcctcggcggcaacggctatgtcgaagacggcattctggcgcggcactatcgggagtcgccggtcaacgcgatctgggaaggctcgggcaacgtcatgtgcctcgacgtgctccgcgcgctctcgcgcgagccggacgcggcgatgacggtgctgcacgcgctggcagccgaaaccaagggcttgccgggagcagggcaagcggttgcgttcatcggcaagaccttccgccgcgccgacggcgagcgcgtcgcgcgcctggcggtcgagaagctggcgttgctcgccgctgcggcggcgctccaggcggtgtccccacacaatgccgaactgtttgcgagcacgcggcttgcgaccaatcatgccagcatgtacggcgcggtggaactcgagagtgccgatgtgcgcatgctgctggagcgggcgctgccatga

SEQ ID NO: 3778 - DNA, 765 bp, BradyrhizobiumColbertium
atggactccctcaatcccgatcatccgccactgacggaagctcctgtcgcgccacgcgtctggaagttctggggcactgcgctctgggggctcttcatcttcgtcgcgatgttcgtcgggcagatcggcgccgtcatcgtgctcgcggcgcagcgcggtcttccaatggacctcgcctcgctccagctcgtcggtcgcgagccccagacgctcgcgttctcggtcatcatgggactgccggcgacgcttcttgcggtttggctcgccattcgcatcaagagggcttctttcgtcgactatctcgcgctgcattggccgtcgtggaagcagctgctgttcggcgccatcggccttatcctgatcgtggtggtctgggagaccatgtcacgcgcgctcgggcgcgaagcgacgccgggtttcatgaccgatctgttgaagtcaggacgagacaagggcgccgcgctgttgcttctgttcgccttcagcgtagccgcgccgacgtcggaagagattctggcgcggggcttcctctatcgcggctggtcggcgagcttcctgcgcatacccggtgcgatcctcctgtcgtcgctggtttggacaatcgtccacctgcaatacgacatgtacttcctcgccgaagtcttcgccatcggcctctggttcggctacatgcgctatcgtgccaactctctctggctcacaatcatgctccatgcgttgaacaacctgacagcagtggtgctgacgatgtggctggggagctag

SEQ ID NO: 3779 - DNA, 924 bp, BradyrhizobiumColbertium
atggccgtcgtgatcgcggccttgctgccggtcttcatcctcatcgtgctcggcatcgtgctgaagcgcagcctgatgcggctcgacacgcaatggcacgggttggagctgctgacatatttcgtgttgtttccgatgctgctgatccagaccctggtgaaggccgacctgtccaaggtgccggtcgccggcgtcggcggcgcgctgctgctgtcggcactggcgatgtcgcttttgtgcctcgcgctgcgcccagccctgtcgcggctcggcgttgacggccccgccttcacctcgatcttccagggcgcgacgcgctggcagaccttcgtggcgctgtcgatcgccgccaatctgttcggcgatgtcgggctggcgctcgcctccgtggcgatggtggcgatcatcccgctcgtcaacgtgttcagcgtctcggtgctcgctcgctacgcatcgccggaaaagcaatccggccgcgccatcgtcatcaccttggttcgcaatcccctgatctgggcctgcatcatcggccttaccgtcaatgtcacccacctgccgctgccaaggctctggcatgaggttgcagacgcgctcggcagttcctccctcgccatcggcctgctcgtcaccggcgcggggctgcatctcgaagggctcttccgtccaagcctcggtgcagccgtcggcgtcgttttcaagctcttgctgatgcccgcgctcgcgatggggctcggtttctggttcgggctgtccggcaacagcctcgcgatcgtggcgatctgctcggcggtgccgacctcgtccagcgcttatgtcctcgcccgccagatgggcggcgacgcgccgctgctggcccagatcatcacgctgcagacgatctttgcagccattacgatgccgatcgcgatcgggctggcggcctag

SEQ ID NO: 3780 - DNA, 486 bp, BradyrhizobiumColbertium
atgtcggcccttatcctgcccctcgtcgatgctgtaacccactggcccgcgcgcggcgcgctggtcgggcttgatctcggcaccaagaccatcggcgttgccgtgtccgaccccgatcgtcggcttgcgaccggcgtcgagacgatccagcgcaagcaattcaagcaggatgccgcgcgcctgctcgcgattgcggccgagcgcaaggcggccgggttcgtgctgggcctgcccatcaacatggacggcagcgagggcccgcgcgcgcagtcgacccgcgccttcgcccgcaacctcgccggtctgaccgcgctccccatcggactgtgggacgagcgcctgtcgacagcggcggtcgagcgcgagctgatcggcatggatgtcagccgcgccaagcgcgccgaggtgatcgacgaacacgctgcgatgttcatcctgcaaggcgcgctcgaccgtctcgccaatctccgtcccggggccgcctga

SEQ ID NO: 3781 - DNA, 135 bp, BradyrhizobiumColbertium
gtgctgacattattcgacctgttcgcggtcgcggcgatgccgatcacttacgccctggcggagtgcggccaccgattcgtgctgctgttcgcgcctcatgcgcctccatcgtcgcaccgcggcggtggcacctga

SEQ ID NO: 3782 - DNA, 2217 bp, BradyrhizobiumColbertium
atgctcatcaagccaagcctcatcgcgggctccgaaaggcgattcaagcaagccgagttctcacccgatgccttgaaccggaaactgggcgacggcccgatcgagatgtccgtcgaaaagatgcgcctgcgccagcgccagctactggccgagacgcacgacatgcaggcagcggagaaagggctggagcggatcatccagggcaatgatctcgacagcatcaattatctcgcaaaggggacggccgccgcacgctctgtttgccgtattcagctgagggatctgaagtcgaacctgctcggctatggctcgggctttctgatcgggcccggcctgctgctgaccaaccatcatgtcttcggcaagccggcggacgccgcgaattcgattgccgatttcaactatgaactggatatctcgggacaagagcgcctgccggagaggttcggattcgagcccggcagattcttctacaccaatgacaggctggatttctcggtcgtcgcggtggcccagacttcgctgtcgggccacgagcatcttgacgactggggatggctgccgctgagcggtgcacccggtaaggcagacccgggcgaatatctcaccatcatccagcatcccagcggccagatgaagcaggtctgcgtccgcgagaacaagctgctcaaatatgccggcgacttcctctggtacaacaccgacacgacggctggatcgtcgggctccccggcgttcaaccgcttctggcaggtggtcgcgctgcaccacagcggcgttccgcggaaggatgggcagggccgcaccctgaccaaggacggcaaggtatggaagccctcgatggacgaatcctcgatcgactggatcgccaacgaaggcatccgagtcagcgcgatcgtggccgatctcaaggtggccgtcggctcccccccgttgatcaagccggtgttggatgaggaagagccgccaatccggcaagagagcgcgaaagtccgggcgccggaggccgtgcctgcgttcggcgccaatttctgggtcgagcagtccgtcgacggcacctctctcgtggttccagtgcgcgtgccattgccgatactcaggaaggaaattccgttcgctccgctcgcccccgtgccgggcccggcgggagctgacggaggtacagcgaacggcagcatacacaacggcggcaagccgctgatcgccccgccggctggcctcctgcctcacatcagtccgagaaacggcctgcccatggaggccgtgcatatcgatcagagcacgctgaaatcgcgtccggggtacaaggcgaacttcctcggcaccggaaaattctcggtcccgttgccgaagattccggccgccctcaagtccaggatcgcgatgctcaagggcagctccaggcagttcgagctgagatatttcaactacagtgtggtcatgaacaagcagcgcagactcgccttcttcagctgcgtcaatatcgacggcgccaagcagcaggacgtcggcaagcgtgaaggcgattcctggctgcgcgatccacgcatcgacgacgatgcccagatcggcgacgagttctaccgcaagcaggcgaccttcgaggcggatcgcaccaggaatccgttcgatcggggtcatctcgtgcgccgcctcgatgcgacctggggcgacaccgtcgccgcggccaagcagcatggcgacgattccttccatttcaccaactgctcgccgcagttcttctcgttcaatcagggcaagcagctctgggccggattggaggactacacccgcgatgtcctgctcgaaggcgaggagaagggcatcgtgatgaacggtccggtgttcgatggaccggacgccgacggatccgatctgcccaatccgaacggccggccgcacaaggacccgagcttcggcggcgttcagattccgaaatacttctggaagataatgatccggcgcgacgaagacggcctcaaggcggcggcattcctgatgagccagcgcaagcaggtcatggagatcgaccgcatccgggaggcggatctgctcgagcggatgtccgaggaggacgtcagcgtcttccaggtctcgatcgccgatctgacgaaattgaccaagctcgacttcggcaatcttgccgacgcggactcgcacgaggcgacctcggtcggtccgcgtcggatcgagtcctatgaggacatccggatctga

SEQ ID NO: 3783 - DNA, 936 bp, BradyrhizobiumColbertium
atgcgcaatacgctcgtgttgtgctgtgtcgtcgcattgtcggcgatatcaggaacagcaaacgcccaggactggaccaagtcgaaatgggggccgaacgacgagatcggctccgccaactacatgacgcccgagctcgtggtgaaggccgcctcactggtgaagaccggcaagacctacgccctcggcatgcccgtcacatcccaaacgccggcctacccgccgcgcagttacaagatcaccgttgtgcagccgggtcaggccggcagttccggtcttggccccaacaaggccacctacaacgacgatatcctcgacagctgggtcggcgtcggcagccagctcgacggcctcggccatctcggcatcgagcacgtctattacaacggcaacaagctcgccgatttcgccgatccgacggggctgaagaagctcggcatcgagaaggtgccgccgatggttacccgcggcgtcctgctcgacatggcagcctatttcaagaccgacgtggtcaaggaaggcaccgcgttcaacgtcaaggagatcgaggaggccgccaagcagcagaacgtcgagatccgtcagggcgatgtcgtcatcttccacaccggctggctcagcctggtcggcaaggacgacaagcgctattcggccggcgagcccgggctcggcgtcgagggggcaaaatatctcaccggcaagggtgtcgtcgccgtcggtgccgatacctggggactcgaggtgctgccgttcgaatccaagaacgtgttcgaggtgcaccagattctgctcgcgatgaacgggacctacattctcgaaaacatggacacggccgcgctcgcacgcgacaagggctatgagttccttttcgtgctgggacagccgcgctggaccggcggcgtgcaggcgatgatcaacccgatcgcgatccgctga

SEQ ID NO: 3784 - DNA, 891 bp, BradyrhizobiumColbertium
atggaactcagcgatctccagacctttgcggcagtggctcgcgtcggcggcattacccgcgctgcggaagcgctgaatacagtgcagtccaacgtaacccagcgcgtgaaggcgctggaggcggagatcggcacggcgctgttcgaacggcattcgcgcggtatgacgctgacgggcgccggcaggcgcctcctcccctacgcgctgaagatggcggcactggcgcgtgaggccgtgcttgctgcgcgcgatgatggcgagccgagtggaccgctctcgatcggatcgatggagacgacggcggccgtgcgcctgccacccttgctggcggatttccatcgccgttgtcccgccgtgcgtctttccttgcgcaccgcgccgaccgccgacctcgtcgccgacgtgctcgacggcacgcttaacggcgccttcgtcgcggggcccatcacgcacgccgatctcacggctacgattgcattccgcgaggagctggtgctggtcagcgcgcggcgctgggcttcgctggccgagctgcgcgctggcacgccggagtccggcccgaccgcactggtgttccgcaccggttgtacctaccgtcagcggctcgagcaaatattcgtcgagttcggctggccgtcggcggcacgcttcgagctcggcacgctcgacggcatgatcggatgtgtcgccgccgacatgggagtgacgctgctgccgcgcgcggtgattgaatgcagcgcgatgagcgccagcatctcgatccacacgctgagcccgtcgcatgcgcgcgtcgagacattgttcatccaccgccgcgccggacatcaaacgagcgcgctgagcggttttgtcgagtcccttgccagggacgacgaggtcatcgcggcctga

SEQ ID NO: 3785 - DNA, 1026 bp, BradyrhizobiumColbertium
atgcccattgcgacatcgctgaccaggctgctggagatcaggcaccccatcctgctggcgccgatggatattgtcgccggcagccgtctcgtctcggctgtgagtcgcgccggtgggttcggcattctcggcggcggctatggcgagcggacttggctgaagcgggagacggcgaaactcgcggatctgcgtgcgccgttcgggatcggcttcatcacatggagccttgccaggcagcccgagcttctcgacatcgcactcggcgcaaagccttccgcgatcatgttgtcattcggcgatcccgcgccgttcgcgccgcgcatcaagtcggccggcgcgcgcctgatctgtcaggtgcaggatgaagcgatggcacggcaggcgctcgaggccggcgcggacatcctgatcgcgcaggggaccgaggcgggcggtcacggcgcttcgcggaccagcatcgatctgctgccggccatcgtcgatcttgccgcgggtcgtgttcccgtggtggcggccggcggcatcgccgacgggcgcgggctcgccgccatgatgatgctgggcgcgagcggcgtgctgctgggcacgcgcttctatgcgagtcaggaggccgatggcgcggaggaagccaagcggcgcatctgtgcggcgagcagcggctcgacgctccgcggcatcatcttcgatctctcccgcaacaacgtctggccggcgccattcaccggccggtgcctgatcaacgaccatgccaggcgctggatgggacgcgaagtcgaactgatgcagaatgtcgccgcagtcgcggcggagtatgcggcggcaaaggcggccggcaatttcgacgtggccgccgtgatcgcgggagaggcggtcggcttgattcatgatattccgccggcggccgagatcgtcgatcggattgcggttgaggtcgagcagttgctggaggggcggcggaattccggtgcttcttttccttctccccttgtgggagaaggtggcgcggatgcaatccgcgccggatga

SEQ ID NO: 3786 - DNA, 1077 bp, BradyrhizobiumColbertium
atgtggcctgaccgtcgactgatcgatctcttcaagaccgaattccccatcgtgctggcgccgatggctggcgtgatggatgcggagctggtgattgcggcggcgcaaggcggggcgctgggctcgctgccgtgtgcgatgatctcggcggagaaggcgcgcgagcaggtcgggctcatccgccagcgcgtaaaggcgccggtgaacatgaacttcttctgccacacaccggtcgagctgacggcggaggccgaggcgcggtggaagcagcggctggcagggtactacgccgagcacggtctcgatccggcggcgccgatcgccgcggccgaccgcgcgcccttcgacgccgccttctgcgaggtcgtcgaagagctgaagccggaggtcgtcagcttccatttcggtttgccggagccgtcgctgctcaagcgggtcaaggcggccggatgccgcgtcgtctcgtctgccacgacggtgaaagaagcggtctggctggaagagcgcggcgtcgacgccgtgatcgcacaaggtgccgaggcgggcggccatcgcggcatgttcctcactgacaagattgcagaacagcccggcaccttcgcgctggtgccgcaggtcgtcgatgccgtgaaggtgccggtgatcgctgccggcggcattgcggacggtcgcggcattgccgcagcctttgcgctcggtgcctccggcgtgcagatcggcagcgcttacttgcgctgtccggagtccaaggtcagcgcgggcggccgcaaggcgctcgccgaggcacgagacgattccacggttatcaccaatgtcatgaccggccgtccggcgcgcggggtccagaaccggctcatgcgcgaggccggcccggtctcgccggatgcgccgccctttccccatgccgcgaccgccctggggccgctgaaggccgccgccgagaagcagggcagggtggattttaccaatctctgggccggacaggccgtggccctcggtcgcgaggtccccgcggcagaattgacccgcgatctcgccagatcggcgctggctcgcctgaaagcgctcgccggatag

SEQ ID NO: 3787 - DNA, 288 bp, BradyrhizobiumColbertium
atgtccgtcgacgccgctaccgtccgccgcatcgcgcatctggcgcggattgcggtttccgaggacgacgttccgcatctgcagggcgagctcaatgccatgctcgcctttgtcgagcagctctcggaggtcaatgtcgtgggcgtggagccgatgacctcggtcaccccgatgcagatgaagaagcggcaggacgtggtcaatgacggcgagatcgccgacgatatcgttgccaatgctcccgcgaccgagggccacttcttcctggtgccgaaggtcgtcgagtaa

SEQ ID NO: 3788 - DNA, 213 bp, BradyrhizobiumColbertium
atgtgcctgctttgcgacgatgagaaggcctatcaggcctatatgaactatctcgacaagatggagcggcagggcaaggctgccgatcccaatgtcgccgtcaatgccgtgctcgatgagctcgaggctgctgcgaatgccgctgccaagaaagacgacccggccaacgacaagaccttgtctccgttcttctgcagcccgatcaataaatga

SEQ ID NO: 3789 - DNA, 1476 bp, BradyrhizobiumColbertium
atgaccgatttgacatcgctgacgctcgcagaggcccgcaagggcctcgcggccaagactttcacgtcactcgagctgaccgacgcgcacttgtccgcgatcgaggctgcgcgcgtgctcaacgccttcgtgatggagacgcccgacaaggcacgggccatggcgcgcgaggcggacagcaagatcgccaagggcgatgcggggccgctcgccggcatcccgctcggcatcaaggatctgttcgcgaccaggggcgtgcgcaccacggcgtgctcgaagatcctcggcaatttcgtgccgacctacgagtccaccgtcacctcgcagctctggcgcgacggcgcggtgatgctcggcaagctcaacaacgacgagttcgcgatgggctcgtcgaacgagacctcctgcttcgggcccgtcggcaatccctggcggcgcgacggcagcaacaccacgttggtgccgggcggctcgtccggcggttcggcctcggccgtggcggcgctgctgtgcatgggcgcgaccgcgaccgacaccggcggctcgatccgccagccggcggcgttcaccgcgaccgtcggcatcaagccgacctatggccgctgctcgcgctggggcatcgtcgcctttgcctcctcgctcgaccaggctggtccgatcgcacgcagcgtccgcgatgccgcgatgctgctgcgctcgatggcgggtcatgaccccaaggacacgacctcggtcgacattcccgtgccggactacgagaccgcgatcggcaggtccgtgaagggcatgaagatcggcatccccagggagtatcggctcgacggcatgccggccgaaatcgagaagctgtggcaagcgggcgcggattggctcaggagcgccggcgccgagctcgtcgaggtctcgctgccgcacaccaaatatgctctgccggcttattacatcgtggcgccggcggaggcctcctccaacctcgcccgctatgacggcgtccgctacggtctgcgcgagccggccaagaacatcatcgagctctacgagaacacccgcgccgaaggctttggcgccgaagtgaagcgccgcgtcatgatcggcacctatgtgctctcggccggctattacgacgcgtactatttgcgcgcccagaaggtgcgcacgctgatcaagaaggactttgaggactgcttcgcccagggtgtggatgccatcctgacgccggcgacgccgtcggcggccttcggcatcggcgagaaaggcggcgccgatccggtcgagatgtacctcaacgacatcttcacggtgacggtgaacatggcgggcctgccaggtatcgccgtgcccgcgggcaaggacgcgcagggcctgccgctcggcctgcaactgatcggccgtccgtttgacgaggagacgctgttctcgctcggcgaagtgatcgagcaggccgccggccggttcacgcccgcgaggtggtggtga

SEQ ID NO: 3790 - DNA, 297 bp, BradyrhizobiumColbertium
gtgaatgtcgctgacttcatcgcgagcctcgacggcgcggcgccggcgcaggagctgagtgcgccgctcgtaggcctctggtgggcagcgaagggtgactgggaccgcgcgcacaagatcgtccaggacgacaacggccgtgaagccgcctgggtgcatgcatacttgcaccgcgtcgaaggcgatctgggcaatgccggctattggtaccgccaggccggccaggtcgcagcaaaggattcattggaagcggagtgggagcggatcgctgccacgctgcttgggagcaggacatga

SEQ ID NO: 3791 - DNA, 1479 bp, BradyrhizobiumColbertium
atgagcacggcaacgcacaagcttctcaagggcgccaccggggattgggagatggtcatcggcatggagatccatgcccaggtgacgtcgaacgccaagctgttctcgggtgcctcgaccgcgttcggcggggagccgaacagccaagtctcgctggtcgacgccgcgatgccgggcatgctgcccgtgatcaacgaggaatgcgtcaggcaggctgtccggaccggacttggcctcaacgcgaagatcaacctgcgctcggtgttcgatcgcaagaactatttctatccggactcgccgcagggctatcagatcagccagtacaagtcgccggtggtaggcgagggcgaggtgctggtcgagctcgacggcggccgcagcgtcaccatcggcatcgagcggctgcatctggagcaggatgccggcaagttgctgcacgaccggtcgccgaccatgtccaatgtcgatctcaatcgctgcggcgtggcgctgatggagatcgtctccaagcccgacatccgcgatgccgagcaggccaaggcctacgtagcgaagctgcgctccatcctgcgctatctcggcacctgcgacggcgacatggagaagggatctctgcgcgccgacgtcaacgtctcggtgcgcaagcccggcgggccgctcggcacccggtgcgagatcaagaacatgaactcgatcaatttcatcggccaggcgatcgagtacgaggcgcggcgccagatcgagatcctcgaggatggcggccagatcgaccaggagacgcggctctacgatcccaacaagggcgagacgcgctcgatgcgctcgaaggaagaggcgcacgattatcgttacttccccgaccccgacctgttgccgctggagttcagccaggcgttcgtcgacgagctgaaggcccagctgccggagctgcctgaccagaagaagacgcgcttcgtcgccgatttcgggctctcggcctatgacgcgagcgtgctggtcgccgagcgcgagagcgcggtcttctacgagacggtgctcgacaggctcgccaaccgcgcccgcgacggcaagatggcggcgaactgggtgatcaacgagctgttcggccgtctcaacaaggaaggccggggcatcacggactctccggtcgatgcccaacagcttgcagccatcatcgacctgatcggcgagggcacgatatcggggaagatcgccaaggatctgttcgagatcgtctggcaggagggcggcgatccccgcgcgctggtggaaagccgcggcatgaagcaggtcacggatctttcggcgatcgaaaaggttgtcgacgacatcatcgcggcgaaccccgacaaggccgcgcaggtcaaggacaagccgcagtcgctcggttggttcgtcggccaggtgatgaaggcgtcgggcggcaaggccaacccgcagagcgtcaacgacctgctcaagtccaagctgggcgtctag

SEQ ID NO: 3792 - DNA, 159 bp, BradyrhizobiumColbertium
gtgcattcgatccccgaatgcacgcagcgattaaagccatctcacacatcggagggcaacatggccaagaaagcgaagaaggcgaagaaggcgaagaaggcgaagagcgcagtgaagaagactgcgaagaagacccgcaaggtcgcaaagaagaagtaa

SEQ ID NO: 3793 - DNA, 153 bp, BradyrhizobiumColbertium
gtgggctatcgaactaccattcgaacggttgccgagcgagttcaagtcctggaggcgcaacacccgatctctgcgaaatgttctccaaaatctttctgctcgatcgcttccttccgtccgaatgcggtaatcgcgctgatccagcagcactga

SEQ ID NO: 3794 - DNA, 1242 bp, BradyrhizobiumColbertium
atgttgaggcgaacaaagcgaaagcttccggtcacggtcctgtccggatttcttggcgccggcaaacagaccctattgaacgagttgcttttgaaccggactggtcgacgcatcgcagtcatcgtaaacgatatgtcggccgtgaacatcgatgcagccctaataaaatccggggctgcgcagctatcccgtaccgacgaagcgctggttgaacttagcaacgggtgcatctgttgtacgcttcgcggtgacctcatcgatgaggttagaaaactcgccacgcaacggcggtttgacaatttggttatcgaagcgacgggcatttccgaaccgttaccgatcgccgctgcattcgcgtatcgagacgcagatggttcgagcctcgacgatatcgcctatattgacaatatgatcacggttgtcgacacagctcagattgttcgcaatttttggtcgcgcgaattcttgaattcgagcgagaccgtatcacccgatgacaaacggacgattgtcgaacttttggtcgatcagatagagttcgctgataccatcgtcctgaacaagatttcgtcggccagcattgaccagcgccactccgcatattcgatcgtgcgcgggcttaattctgacgcaacgatacttgaggcggatttcgcgcgtttggatcttcggcaactgatcgatgtcaaccgttttgacaacgaccgagcgcacatgcatccgctttggaagaaggagctcgacggtttccgagaccatgtacccgaaaccgaggagtacggcatttcgagtttcgtctaccgcgcccgtcgtccatttgatccgacacggttatcagaatttctcgtcagcccctggagcggtatcttgcgtgcaaagggcttcttctggcttgcaagtcgtcctcggtgggtcggtgagctcagtcattgcggagcgctggtgcgaacgactggacggagttggtggtggtcggcaatcagcaagactctttggcccagggatcccctgtggcgacgcgagcttgaggccacatgggacccgagatatggcgatcgcaagcaagagctcgtgttcattggcacagatgttgatcccaacgaactgtgtaaaaagctggatctgtgcctgacggattcctggccatcacagatgtattcagaactggtcgacgaggaagactgctttccgatctggcttacaaaagccgatctaaataacggtgcctcggcgccgcggtga

SEQ ID NO: 3795 - DNA, 492 bp, BradyrhizobiumColbertium
atggcggtttatcagagcatgcagcgcgtgcggttttcgagcgaagacggctataagaaattccaggtcgttttctccaatgtgcgtcatcacctgaagaaacttcccggattcctgcatttgacgtggtgggtgcatccagatgacccgcactggtataacgaggtcagcttctggaccagcttcgaggcgctgaaagactggcatatggacacgtaccacaaacacgcgaaggagtgggctgtccgtaccggcgcgatcatggaagacatcatcgtcaacttcgaatacaagaacgcgcgcctcattcgcgtttgcccggcatgcgcgcatatttcggatacggctttcgatgttgcgcaggagcagaccgccctcgctcagccctgtccaaaatgtggtttcattttcccggtgatggcggaaaccgcgaacagtacggcggtcttcaaggatgtcgcgccagcaccagtggccattgcggcggagtaa

SEQ ID NO: 3796 - DNA, 1968 bp, BradyrhizobiumColbertium
ttgttgtcacgtggacgaaggccaaacgtcggctgctttttgatcttcacggaccttcgacctcatctaacaacacatctcgaccttggccgtaggtcctgcttggatatttgcgatggagccagagttcggccgcaaggaccgcggcacgagcgtggggagaccgccaagcaacccaataacgccgctcgtgttcgccacggtgacggctaccttcgtcgcgcaacccatataccgtctgtgtcgatttcgtttggtgattgcgaaacttgcggcctgccgggtcaaggtcggcccgcgaccatccgttttggcgacacagttagattgactgcggaagcgggacgggggacgatgtggcgtgccggcgacgcccctaacgggcgtttcgatgggtccagattcgagtcctgttcgagccagcgatgcttgagctccgaacatcacaccacaaacaggtatgattccgagaggaactcaatgcacttattgatcagcattgaccgtgcggatggacgacctttgcaagtccagatctatgaatcgatccggactttgatcctgaacggcactctcaaagccggaaaacagctgccgtcgtcgcgaagtctctcggaacaattgggcatcgcccgtaacacggtggtgctggcatacgaacgtctcgcggcggaagactatatcaattcccggatgaaggccggcatcttcataaatgacaagcttccagatgctgctgtgctggtcgggagcgggcactcgacctttacatcaaaggggcgacgcgttcgtcttggaaagaatccaacattcaccggacgagcccctatgctctggatggaagagcgggcgcgtccgcgatttgacttctttgttgggcgtccacacgccaaaagctttccgacaaccttttggcgtagcgccacggcgcgccatctggcctttgctcatgggactccgacgcaatatggggatccccgcgggctgagcgctctgcgcgaggcaatagccgatcatttgaggacaacgcgaggcatggaggcagatgccgaccaggtcctaatcacctcaggcattcagggggcgctcaatctgctggctcgcatcttcgtcaacggacctggggaaaccggtgtcgctgtcgagaatccctgctatcagggcgcagcctttttgttcagcagctacggtgccaatatacacccggtgcgggtggacgatcatgggttgatcgtatctcagctcgaaggatttctcggcagtcttgtctatgtgacaccgtcgcatcagtttccgaccggctgtactttgagccttgagcgcaggctccgcctgctgagctgggcgtatcaaacgggaagctatatcatcgaagacgattacgacagcgattttcgctacgatggtccacccttggccgctctagctgggctggatcgccgaggacatgtcatctacctgggcacattttccaaatcgatcggcgcagggatcagaatcggttacgcggttcttcctcgccacctactcgatcaggcctggatcgcaaaggctttgcttgatcatggggcaccctggctggaacaagcggttgtcgcggatttcttgaaggaaggggcgttcattcggcatcttcgtcgtatccgacgatcgtacatggccgctcgagatgctctggtcgacgcgatagagcatcagttcccgggtggcgtcctttcgggccgtgaatgcggcatgcacgtgatgtggacgctgccacccaatttgccgacggcgagcgaattacattccctcgcgcttagccgtggagtgggactctatccactttccaaggcggcggcccatgagtatggcaaggcacaattgcgggatcgggccctggtccttggctacactgcattgtcggaaggtgaaatccgcgatgcgatcgcgcgcgttgctgtggcaatcaagaaccacgcgagttga

SEQ ID NO: 3797 - DNA, 135 bp, BradyrhizobiumColbertium
atgaccagtgaaactgataggaagggtgaggtcgcagaggacaaagtgcgaaccgaggaggctcgcttaattgccaaagagcaggccgaagaccttcgcgtcgtgcgcgagaagctgaggcgcaagcttcattga

SEQ ID NO: 3798 - DNA, 2490 bp, BradyrhizobiumColbertium
atgagccttgacgatccgaatttagagcccgaataccttctcgaaaatgaaatcgacagactgcaagcccgttggtctgtttccaaaaggcctgtcgagagattgcctgcgtacgaggacgtggtactgggagacctcggccgagtggcggagcacttggtcatcctgtcagtacgagagggcgactggtacgttctaagtgccggcttgacggtgcctatctggtttggcgggcgcgcgaagggccaggcattgtctagtctgtctccggactgcgccggcgcgctcagaacgatagccgccgatgcgttgacgtcgttcaagccgaagatcgctcagacgcattgtgcccgtgatggactcgttcagcgctacaggctcctggcattacctctgcgaaacagatggggtcctgaaatcgttgcggtctacgtggggctggacggtgccaaatacagtctggtcgatgcgatcttccgttccaccgaggagggcgtaatcgctctcgcccctgttcagggcgtcgacgacgagatcgattttcaggttgtggatctcaattccggagccgctgatatgctgggcttggcgctggagacaatcaggtggcgaaagctagggcaaggaacgcatgccttcaacacaccggaactcaagcggaagttgacccgcatactcgatgccggtggccgagacaccttcgaagtgtctgttgtcagaaatggcacgacgctgagcctgagcgtcggtctgacatccatagggcagttggtctgcgcgacacttaccgacgtcagtcacctcaagaggcgagaggagtcctttcgacttcttttcgacgcgaacccgatgccgatgatgatcttcgacatcgtcggccacgcgatacggaaggtcaacgacgcggcaactcggcagtacgggtatgcccgtgaagagctgatcggaatgcgggtcgagcgacttctgccggaaaacgagcaggatgacggaatcggcgtggtcgaaaaatgccgcgagtcggaagaatcggccttgaacgtcacgttggtactcgccgaccaccgcaggatcgatgcgctccttttcggacggaagatcccctttgaagatgctgaagcgtatatagtagcgcttgtcgacataacggagcggaagcgatcggaagctagggtcgcctaccttgcgcaccatgatgttttgaccggcttgcccaatcgtgcatgcttcaactcagaccttttgggtcggttggagatgcaagagcctccttcggcgagaatcgcgatgatcgcgatcgatctcgatctcttcaaggaagtcaacgacacgctggggcattcggcgggcgatcgtgtgctccagatcgtagcgcatcgactacgatccggactgacctcccgagagatcgtggcgcgcctgggaggcgatgagtttgctgtgatagttgatgactttccggacgaagatggattgaagcggctttgctcggagctcctcgaatccttgcgccagccgtatgatgtcgacggtaaagagatcgtcatcggcgcgagcctaggcgtcgcggtctttccccgcgacggcaagacggccgaagaactgtcgaagaaggccgatctcgcgctgtaccgagcaaaagcagagggaagaggcagcttgcgcttctacgacgaggaactcgaagtcggcgtgaggactcggcgtgcgatggaaagtggcctgcgaaaagctctgcaggccggtgagttcgagcttcactatcaacccctgatcgacgttcgcggaaatacattgctggggttcgaagccttgctccgttggagaaggaatgaagcgttggtgccgcccggggacttcatccctcttgcggaggagaccggcctgatcaactcgataggagaatgggtagtaagcgaagcgtgttcggaagcctcaaagtggccgacatctattggaatcgcggtaaatctgtcgcccgtgcaattcagagacaggaacctagtcccctccattgttggcgccctggagcgctccggcttggcaccatcgcgtctggaactcgagattaccgagtcggtgctgctcggagagaccgacgcaaatttcagttctcttaagaagttgaaggccgcgggaataaggatctcgatggacgatttcggtaccggctattcgagcttgaagtacttgcgcctctttccgttcgacaagttgaaggccgaccgatctttcgtccaggacgcagtggatagcggcgattctcgtgcgatccttcaaaccgttgcgtcgctagggcgaagtctgcggataactacgctggccgaaggcgtggaaacgaaacggcagttgatgattgtcaaaaaggcggggttcgatgccgcacaaggttatctcttcagtccccctgtgcgcgccggcgaagtccctggactactggagaagcttcggagcggagcggaggtcaaatcccctaaaaaagtcgcgtga

SEQ ID NO: 3799 - DNA, 114 bp, BradyrhizobiumColbertium
gtggtctcaggtctcggattgaccattctcagtccgccgcttggcaagcgaacccgtgaacattaccctggctgggatcgctccgtcaccaaggactacccgaaaggcgattga

SEQ ID NO: 3800 - DNA, 927 bp, BradyrhizobiumColbertium
ttgcgtgacttttcggatgaggccagagccgccaaggtgctcgctggcgagcgaagattgttcgagctgcggcaagcctcgcgcgcgggacaaaaagcccagcttcgcgagaagatcggacaaatcacagagcagatccagggcttgaacgagcaaattgccggcaaaaagcaagaggtcgagctgatcaaccgggagctcgtcggcgtgcgcgagctctgggccaaaagcctcattccgatccagcgcatgaccgcgctggaacgtgacgcagcacgcatcaagggagagcacggccagctgatggcttcgaccgcggaagccaagggaaaggtttccgaaatccagttgcagatcatccaagtcgaccaagatcttagaagtgaggttgcaaaggagcttcgtgaaacggaaggcaagatcggagaactcgttgagaaacgcgttgcagctcaggatcagctaaatcgaatagacattcgatcgccgcaaagcggcattgttcatcagctctcggtgcacacgatcggaggagttatcagcccaggcgagcagctgatgctcatcgtgcctcaagccgatgttcttgtagtcgaggcgagaattgcgccaaaggacattgacgagatcagactgcgacagccagcgatcctccgcttcacggcctttaatcagcgcacgacgcccgaagtcgggggcactgtgacgctggtgggcgccgatgaaatcaatgatgagaagagcggcaagtcgtacttcaaggttcaaatcacaccgtcgccagaagatttggaccgactgaaacacgagaagctcgtgcccggaatgcccgttgaagccttcgtccaaacggcttccaggacagccctttcgtatttcgcaaaacctatcagcgatcagcttactcgcgcctttcgcgagcaataa

SEQ ID NO: 3801 - DNA, 1797 bp, BradyrhizobiumColbertium
atgagtgcgcaggattcttctttggcctcagggcgcagcgacgacaaggagacaagccggccacagctcgggcctgcgcttgtcgggatcgcctttctaagcgcgcttgttagcgtcctttacctgaccggctcgctctatatgctcgaagtctatgatcgagtcttgccgagccgtagcattcccaccttgattggcttgagcgctattgttgcggggctctatatatttcagggatttttcgacttgatgcgttctcggcttcttgtccgactggccgcggttgtggacctggctcttcgccgaaaggtctatgaagcggtggtgcaggcgcctttgagacgggcttcgcggggcgaagggcttcagcccttgcgggatctcgatcagattcgatccttcttgtcgagccccggaccggccactctgtttgatctcccgtgggtgccagtctatgtcctgctatgcttcgccttccacttctggatcgggatggtcgcctcgattggcgctatcttgctccttgccttgacactggcgaccgagctgttgtcacggcgaccaacacagcgttcggcgagcgctgcagcagcagccatggacttggcgggagccacgctaagaaatgctgaagtgctccgagcccttggtatggtgccgcgcatggccgatctttgggagcaacggcgcgatgctcacggcggcaattacgcgcgcgtggccgacgtggccggcggattaggagccatcaccaaggtcatccgtttaggcctccagtcgggcgtactggctacaggggcctggctggtggtccaaggcgaagcaaccggcggcatcatgattgcgagctccatcctgttggcccgcgcactcgcgccggttgagcttgcgatcgccaattggaagggctttgttgcggcacgccaaagctggagccgcttgcgtgccttcctgctgcgctcgcctcagaaacatccgaccgtcatgctgcccccgccatctcgccagatcagtgtcgaatcggtcagcttggcggctcccgggggggagcgcttgttgctacgcgacgttaatttctccctctctgccggacaggtcttggcggtcgtgggaccatcgggcgcgggcaagtcgtcactcgcgcgcgcgcttgtgggagtttgggaggcaataaggggcaggatcaggctcgatggcgcaccgctggatcaatggttgcccgagcagctcggccgtcacataggttacctgcctcaggacgttgagctgttcgaaggcagcgttgcccagaatatctcacgctttttgcctgatgcgccctcagggtcggtgatctcggctgctgcggctgccggcgtccacgacttgatatgctctctgcctgatggatacgataccgagatcggaccgcgtgggacgtcattgtcggccggccaacgccagcgcatcgcactggcgcgcgcgcttttcggcgatccttttctggtcgtgttggatgaaccaaattccagtttggacgcggacggcgaggctgcgctgctggaggcaatccggcgcgggcgcgaaaaagggatcgcgttcgtcattatggcccatcgacaaaccgtcctcgcggtcgtggatctcatccttgttctcggagccggccaaatgcgggcgttcggcgcaagagacgaggtgctgaaggctttgagacaggcagatccttctgacaaagctgagcatctgccccaaggcacgcgagcccttaccccgcaatcgggtgcatcgttgcggatcactcgagtgggcacatga

SEQ ID NO: 3802 - DNA, 1320 bp, BradyrhizobiumColbertium
atgaacgtcgcgtttgggcggggtggcaacgatcaattgtcgggctcttcgaaggacgacgacctgatcgggggagccggcaacgatttcctcacgggaggcatgggcgccgatcacctcgtcggcggcgcaggcaacgaccgattgatgggtggggaccaagctgacatgctgatgggcggtccgggcaacgatatcctgaacgaagggcccggtcacggcgatttggaaggggggccgggcaacgacatcctgacgggcggcttgggtgccgatgctttcgtcatttcgccagacagcggcaatgatatcataaaggattttcgcgctggccctggaatgttcgatcatatcgcagtcatgaatctcgaacccgagcaactgcgtttcgaagacaccaaggggggcgtgctgatcagttgggataccagcaaaggagacggctctgttctgctcgaaggcgtctacaaaaatgacctggcccaagatgacttcatgtttaccgacgagcgtcacctgctcaatccggttgacgaaaacgcacatcgtgtcactgctgaacatctgggaacgacgggtggtaatgaagctggccccggtccgacaggtgctacaaccagtccatcattcaacagcgctttcgatgacaacaatgtaaaattcggaagcgatgctcaaaatgacacgcttctaggcaccgccaagaacgacttctactttggcttggccggcaacgattatctttccggcggagccggcgacaatcacctcgacggcggagccggcaatgattcccttgtcggaggacctggacaagacgacctgcgtggcggtgatgggaatgacaagctttacggcggcgccatgggcgacagcttgatgggcggggcaggcaacgattacctgagcggaggtgcagggcacgacatgctcgatgggggcatgggcaacgacatctacaatggcggtgccggcgctgacgcgttcattgtcgcgcacggcagcggcaacgatgtggtcatcgggggcttcgatccaggtcccggggcgttcgatcacatcgcattcactgacatcatgccgaacgaagtcaccgtggcggattccgcttcgaaccacggggatgcccatacaggcgtgctggttgcttggggcgatgggtcgatattcctggaggggctcgccaagagccagatggctcaggatgacttcatgttcaacgccgtggaaggcggggccttcgtgcccgattcccaaatcagcaccgagggaagccgaatgctgtttcagaacgggcatcccgattggcccatggcgtga

SEQ ID NO: 3803 - DNA, 405 bp, BradyrhizobiumColbertium
atgaaaaagcttggtcagtttgcatttgccgcgacattgctggtcgtggggagcctcccggcggtcgcacagcaggcgcaaaccacgccgtccggcggatccatgcagggcatgtcggacaagaatatgaacccatttcagaaagacgctatgtctgcaatggacaagatgaacaagtccatgatgcaggggatgatggacgccgaccctgagatggcatggatgaagggcatggccgcgcatcatcagggcgcgattgacatgtctgaggcccttctcaagaacacaaaggacggtgaaaccgccaaagaggcgcgcaagacaatccagcagaatgagaaggatctgaaagagcttcaggcgaaaatgaaaaaggaagacaaaaaagaggacaaaaaaggctag

SEQ ID NO: 3804 - DNA, 537 bp, BradyrhizobiumColbertium
gtgttcatcacgtcagggacatatgacatcggagccgacacacctcactgggcgctgacgcggcagatcatggagctcacgcgcgagcgctccatcgcggctcgcaccgcctctctgacctcacctgatctttccgacgagcaaggaatactcaagggtgccggacagtatgccgcaatgtgcgcgaactgtcattcggagcccggcaagcctgatacagagttaggagaagggctctatcctaaaccgcccagcctgtccgaaacgagtctggatgcaaaagcgatattttgggtgacaaaacatggaatcaagatgacggggatgcctgcctggggacgctcccatgatgacgccacgatctggaacatcgtcgccttcgtggttaaactgaagggcatgtccagcgctcaataccaggagatcatcgcgaaagctccgcccgacgatgacatggagaacatgcccaacatgcgtcagcaaaacacgcccaaatcatcttccgaggcaaacaagccggctgggcaccaacactga

SEQ ID NO: 3805 - DNA, 753 bp, BradyrhizobiumColbertium
atgacggaacatgccgcaggaaggcggacaatcggagcctcgatctcaggatggctgaagagcgcagtttttcgggtgcgcgtcggcgccgcgcgcttgatatacaaccgcatacttctgtccatggtgaccgatgttgagtggtgctctcgcctataccccttgcttgattccgattttggcgagcaggtgctgatcgtcgggccgcagagctttgcggcggcattgtccttcgcaaggcgccacccagatgtctgctttgttgcagtcgagccgcacgaaagtcgacggtacgcgcgctctgcgcggcgccgagacctcaacaatgtcaaccttattgaagtgcccgcgaacgcggagcttccattcacggacgaggcattcgatacgatcgtctgcaatttcgccctgcatagcctggtgccggtaaataaaattgcgctgctgcggggccttacacctcttttgcgccagggcggtcgtctccacgtcgtcgagttggtccggccagctgcgagccgagaagccaagatgctcggctttgcggcggtgctctggggaactgaagctgttgcaccgcattttgatgacacctggcgcagctgcctgtcgctggccgggttgcgagcactggcgccggaccggtcgttttcgatcgtcgcgggcaggatttcggtcgtggtggccagtcgcaagcgtcctggctctaaatcaataagagaccccaaaagagaacccaaagataaggattga

SEQ ID NO: 3806 - DNA, 1197 bp, BradyrhizobiumColbertium
atgaattacatgacgaagatcacgacaccggaggaccatgggcctgctaccaagacgcccgcgagggacggccgtgacttgaggctcgacctttttcgagggcttgccaactgggcgatctttctcgatcacatcccgaacaatgcagtggcatggctgacgaccaggaattacggctttagcgatgctgccgacctgtttgtcttcatctccggctacacggcagccctggcttactccaaacccatgcgccgcgatggcttttgggcaggtgcagtcaagttaatgcggcgcgtctggcaaatctatgtggcgcacattctcctgttcgttgtctacgtcgcggcgatcggctgggtcgcgcaaacctatcgtcactcgcaccttttggacgaattcaatgttgccgggctcatcgccaacccgattgggtatctcaccgcggggctgctgctcaagttcaagccgttgaacatggacgtgttgccgctctatatcgtcttgatggcattttttcccgtagtgctgcgcgcgatattggcgttgcccaacgccacgctcctctgctcgcttggcctgtattttcttgcacccttgcttggctggaatctgcccgcttggcccgagggcgtctggtatttcaatcctttcgcctggcagctcctgttcgtgcttggcgcgtggagcgctcttgggggagcgacgcaagcgggctggttgttaacctctccggcggcgctgggcgtctgtatcctttacctggtcttcgcactgatcgtggcgctgccgcaaaatttggggatgcaatcatccgcgctcgcctcggtgtcgaatggcttggccatagacgacaaaaccaatcttgctccctcacgtcttctgcattttatggccttggccatcctgactgttcacctcgtacctcgccgcagccgctggcttggcagtccagtcctgcgtcccatgctgctctgcgggcgccattcgctcgaggtcttctgtgtcggtatcttcctgtcgttcgtcggccatttcctgctcgaactgatctccgattctttgcctatgcagctcgctgtgagcatcggcggtatcgcgattctcattgcagtcgcctggctgagatcatggtcgcccaaggattcgcggaacccttcaggtccggatccttccagcgccgacgcaagacgacaatga

SEQ ID NO: 3807 - DNA, 963 bp, BradyrhizobiumColbertium
atgatcgacacgttcgatctttccggggaagcaatgagagaaatggctgccgtcaagccttcgcaagtgacctacgtcgcctcgaaggacgccaaaggagatcaactccttcagccgcgtgtggaaaatggcatcaaggtcttcgacatcgaagcatccgtcattcgctggaatattcttcccgaggttgcggctgaggcctacgcgtataaccggcaggtcccgggaccgcgcctgcagttgactgagggcgaccacgtgcggatcaatgtccgcaacttgcttccggagggcacgacgatccattgtcacgggctgatcgtcccgaacgaaatggacgggccggcaaaaatcactcaagatccggtgccgcctggctgctcgttcacctacgagttcgaggttgggcagagcggtacatatttctaccatagccacgatcatccggaccggcaacaggcgttgggcctctacggtgcgctactcatctcgccaaaagatccttcgatggaagtggaagctgaccaagattacaccatacagctgcaagaatggctgaagcgggaatggctgacctatccggccatgctgatggagggagcgctaccgaattacttcacgatcaacggcaaggcttatccctccactgacacgatcaccatgaaagtgggtgagacgatcaagcttcgcttcatcggtacgaacaacaacttcgtgcatccgatgcatgtccacggcggaccgttcgaagtcgtggcggtcgacggcgtcaacctcaaagatagcgctcgctatcaggccgacacggtgaatgttggtccgggtcaacgttacgacgtggtctggacggcaaggcggccgggcaaatggctcgttcattgtcatatcccgcatcataccgccaacaacaatgtggaacagcatggcggcggcggatcgacgctggttctcgacgtgcgatag

SEQ ID NO: 3808 - DNA, 441 bp, BradyrhizobiumColbertium
atgaacgccatgatggccggcatggcgccgacgatgagcctgctgatgatgggccgggacatgcgcgcgatggaccccctcgaattgatcttctgggccgtgatgtcgcttggcgtcatggtcggatttgcgacggcctatcctttcaacgtctggatggtaaagaaaaagatcaagcacggcctgatgaccgagcgggatgacggccggcagggcagcggtcagcgtcatgaagggcacggaggggcagcggcgccatcggccggacatgggcagcaaggcgctggacaccagatggccagcgaggccacgacacctcaactggcagcgctcgcaggcgtcacagcgttcttatttcaggaatggttatccccggtttctcggtcaatcttcggctcagcgcgcgcgacgtcaacggctccatcatgcctcccggtatga

SEQ ID NO: 3809 - DNA, 792 bp, BradyrhizobiumColbertium
atggcaccccgcgaactcctcgtgcgattgaacgaggatgcgctttttgcaatgcctttctgcgacgcatactggagcagactgctcaattgcagctacgattatgaacgagagatcgaggcgtttctgagtgccgcttgtcaggatcactacaccttgctggattgcggcgccaattttggttactggtccgttcttgccacgagccgcccgttcggcgctcagcaggcgattgccatcgaggcatccagctcgaatgccgagcgtttgaaacgcaacgccgagctcaatgggaatcgctttcgctatctgcatgccgccctcggcggccgaagcggcgagattgtgcgtgtcgcgggcgccaagcacgaaaagtttgcaaccgttccgctcacgcaatcagagccagggtgcgttgagactgtgtcgctcgatgggttagccgaggcagggctgatcgatgcctcagggccgcttgtcatcaagctggacgtcgaaggcgtcgagatcgaggctttgcgcggcgggcaaggtctgctcaaaactgattgtgtcgtgatttgcgaagagcatggctccgatcggacgcatgcggtttcgcgctatctcgcagaagagacctcgctcaagcgctacatattcgatgaggagaatggcgttttcatgcagcttgaagagctcgacggtctcgcacgaatcaagaagcatccttgggtcggatacaacgtcttcgccacggccagcaaacgctggcgcgaaaggctgctatcggcgaggtggacatccaaatga

SEQ ID NO: 3810 - DNA, 306 bp, BradyrhizobiumColbertium
atgaagccaaacaagttcgcaatcaccgcccttgcactgtcactcgcatggtcgtcaactggcgcgcttgcgcagaccgcgatggtcaacggcgaagtcaagaagattgatgaggccgcggggaagatcactctcaagcatggtccaatcaagaacctcgatatggacgatgacgggatgacgatggtcttccgtgtcaaggattcatcgatgctcaagcaggtgaaggtcggtgacaaggtccagtttgaagctgaacgggcgtcaggtggcattaccatcaccaagatgcagaaagctaaatga

SEQ ID NO: 3811 - DNA, 315 bp, BradyrhizobiumColbertium
atggacctcatcaaagtcgaaaaaatgaaacttttgcaaatcgccgtcatcttcgcctcgattgtcgcgtccaaggctgcattcgcccagaacgcgatggtcaagggcgaggtgaaaaatatcgatgaagccgcgggaaagatcacgctcaagcacggggcgatcaagaacctcgaaatggacgcaatgacgatggtgctgcgcgtcagcgatcccggcatgttgaagaatttgaagattggcgacaaagtcaaattcgaagccgaacgtggccagcagggagtgacgatcacgaagatgcacaagtcgaaatag

SEQ ID NO: 3812 - DNA, 486 bp, BradyrhizobiumColbertium
atgaaacacaccacgctctctctgatcgcttttgctgcattgacatccatctccaccatcgcttgggccggcgcaggccccaagggccacagccacgacgattcgttttcggccggcgaaccgggcgacccccagaagccggcgcgcgtcgtgcagatcacgatgggtgaaacggacgggaaaatgatgttcatgccgatgaagatcgaagtcaagaaaggcgaacaactcaagttcgtcctgcgcaataacggagagctggaccacgaactcgtgcttgcgacgacggccgaaaacctcaagcacgccgaagccatgaaaaagactcccgacatggagcacgacgatccgaacgcgaagcggctcgcgccgaagaaggccgacgagatggtttggaagttcaccaaatcgggcgagttcgaatattcctgcctgattcctgggcatcgggagtccggcatggtcggcactgtgaccgtgaagtaa

SEQ ID NO: 3813 - DNA, 270 bp, BradyrhizobiumColbertium
atgcccgataataccctgatgatgatgaccggctctggccaattcggcccgatcgagatgggcggcatgttcactgtcatgaagatccgcgaagacctggcgcgagatgattacgccgacccgggcccctacaaatatcctgcgggcaccgtttcctatgaggtcgacgcaccatcgcagcaacctgtgcgcagggacaaaccggcgggggctgcgaaggagggcgacatgaaggcaatgaaaggcatgaagggaatgaaaggcatgtag

SEQ ID NO: 3814 - DNA, 1446 bp, BradyrhizobiumColbertium
atgttgacccgatcaaatccgatgcatgttcgtcgtgcgatgccgatcctttccgcggttgccggcgcgctgctgctttccggatgtgccgccttttcgccggatgccggcatgtccgtcgtcgcagatgtggcgcagcagaccatcaagaaagacgtcgttgcgatccgctcggcggaagacgcagaatgggcaaataacgccgtccgccggctgttgcggcgcggcctcaccgtggacagcgccgttcaaatcgccttgttgaacaatcgtggattgcaggcggcctataatgagctcgcgatcgcagaggcggatcttgttcaggacagcctgcctcctaatcccacgttctcgattagccggatcgctggcgatggagcagtcgaaatcgagcgacaaatcgtcggcgacattttagcgcttgcgacattgccgttccgctccgaaatcgcacgccaacgttttcaggctgcacaactgcgagccgccgaagaaacgctgcggctcgcggcggaagtcagacgggcctattatcgggcgctcgctgcaaacgagcttgtcggtttgttcaccgatgcaaaatccacggctgaagcaaccgcacagctcgcgcttaagcttggcgagacaggggcgatgaacaagctcgaccaggcccgcgaacaggcgttctatgccgaaactgcggcagagctggcaacccttcgccaagaggcgatatcatcgcgcgaacgcttggcgcggctattaggattgtggaacggcgatctgggctttcacttgccgggtaagctgcctatcttaccagcgcgacccttctccctgccgtttatcgaagttgatgccgtcacgcatcgcctcgatcttcagattgcacggattgaactggcggctttggcaaaatctcttgcgctgacgaatgcgtcacgtttcatcacggttcttgatgctgcaggcatcgaccgcaagacgcgtgatcccgacggaactccgttccgggaacgtggctttgacgttcagttccaaattccgatcttcgacggcggcgaggtgcgtgttcgacgtgcgctcgcgacgtacaatgaagcgttcaatctgttgacggaaagagccgtcaatgtccgctccgaagcacgagaagcctatcgtatctaccggtcgagctacgatatcgccggccattatcagcgcgaggtcttgccgctccggaacatcatctcagatgagatgcagctccgcttctcgagcatgcaagtcgatattttcacggttctgcaagaggcgcgccagcgcctggtcgcaatgcgggccgcgatcgaagccaaacgcgagttttggctggcaaaggccgaactacagacggtcgtcaatggtgggggcggtggagaggcgcgtcggcagactcgtccttccatcacgcaagcgaacgcagctaccaactga

SEQ ID NO: 3815 - DNA, 417 bp, BradyrhizobiumColbertium
ttggccactgaaattctcaccgaaaaggcgatcgctgttgcgcggatccacgagggatttctggtcgacttcgccgaagaaacggcagccgcgcgaacgcttcttctggcgacgggcgttgtcaatcaccggcccgacatgagtgcacaggtccaccgtgatgccgtcgcagccggccttatccgctattgtcccgtttgcgacggctttgaagccaaaggccaaaagattgtcgtcttgggcaagggtcctcatggcgtacgcgaggctgtgtttctgcgcacgtacagccaggatgtgacccttatatctgcttcagcgatgaatgaatgcagttcaagacagcttgcagccgcgggcgtctcgctgatcgaacagccgatcgcccgcttgacaatcgaccaaggaaaattttga

SEQ ID NO: 3816 - DNA, 285 bp, BradyrhizobiumColbertium
ttgatcgaaaccgcctcagctgcgcgcctttcattcgacactctctatccggccttgggctccagcagcaacacggatttgctgcgatctttgggagcttcgctctccagtcagggatgcatcctcgtcgattcgcatcaaatgactgatgtgagcggcctctatgcggctggagacgtcgtacaggggcttgatcagatcagcgtcgcttgcgggcaggctgcgatcgccgcgaccgccatccataataggctgcgcaaacttgatggcttgggcgatccttag

SEQ ID NO: 3817 - DNA, 255 bp, BradyrhizobiumColbertium
atggacgaaaagcgcgacgaattcagatcccgcgttttgaaggccgcaaccatcagttttggcaacggcggggtcatcagttgtgtcattcgcaacttgtccccgcgaggggctgcgcttgacgtcgaaagttcgctcgacatacccgacgagttcaagctgatcctggatcgggaggaagagcattatcattgccgcttgatctggcgtaaagcaaagcgcatcggcgttcgctttcgttctggaccggagtga

SEQ ID NO: 3818 - DNA, 264 bp, BradyrhizobiumColbertium
atgacgggcccggaagtgatggcctcggccgaggaagccctcttcaccgtcgtcctggtatctgcgcccctgatggttgtgggaaccatcaccggtgtcctcgtgtcgctgctccaagccttgacacagatacaggagcagacgctcatttacgtcccgaagattgttgcaacctttctcacgctggtcgtcgcgctgccgtttatggccgatctgtcgcatcagcactttctgcgcatgacagcccgcatcttggctccgtaa

SEQ ID NO: 3819 - DNA, 159 bp, BradyrhizobiumColbertium
atgcatcacatgtccggaatgaagggacataagatgacgggacataagatgtccgggatgtcagagcacaagagcggcatgagcggtatgggtgataacgacaagatgcccgggatgagcggcgaccatggcaagatgaagggcatgaaggggatgtaa

SEQ ID NO: 3820 - DNA, 153 bp, BradyrhizobiumColbertium
atgaagcgagtagcaatcgcgaccgcggctatgttcttggcctccgtcgtctcgacgcaagcgatgacgccggcgcccgcccgagttctcaaaagcggagcagaggtcacgcagatcaaaaaaaaaagaaaatgcatcacatgtccggaatga

SEQ ID NO: 3821 - DNA, 2520 bp, BradyrhizobiumColbertium
ttgcgcgcgatcgcggcggtgcatccgatcgatgggccaagcgacaacaattccggcaaaagggtctccgcagtcgccggtttgatcgcagtggcctccttctcaggcagcgcggaagcgcagcaaaccagccttccgccagtcacggtggacgcacctgtcgagcggccacgagcgctcgcgtccaagccctcgcccgagcaggtccgcgcccgcaatgccttacggcgcgccgcgcagcgcaaccagcccgcggccgctccgctgcccttcccgaacgccggcggtttggcaccggaccgcaacccctatgccgacccgatcgcaccctacaaggtcgatcggctgcaggcgtccggcaagtttccagagccgctgctcaatacgccgaagaccgtcaccgtgctcagcaaggaggtgctcgaggacaagaacgcgaccaccttgaagcaggcaatcctgagcacggctggcgtgaccctcggtacgggcgagggcggcaatgccttcggcgatcgcttcttcatccgcggttttgatgcgcgcaacgacatcttcatcgacggcgtgcgcgatcccggcgtgagcgtgcgcgagaatttcttcaccgagcaggtcgagatcctgcgtggtcccggctcgtcctttgccggccgcggcaccacgggcggcgccatcaacatcgtgaccaagcaggccaccaccgagaagagcttctacaacatggacaccacgtttggcaccgacaagaccaagcgtgtggtgctcgacgtcaaccaggtaatcagcccgagctttgcggtgcgcgcaggcggcttgttccaggacgcgggcgttgcggggcgcgatttcgtcagtgatgacaggggcggcggctttgtcgccgccaaatggacgccgactgatgccgtgaaggtcactgccggctatatccacaccgacctgcacgggttgcccgacttcggcgtgccctattatcggccgagcacggcgagtaccgccggcggaccgttccctgattttggctccaatcgcaacaactggtacgggttcgtcaaccgcgacttcttccaggtcaagcaggacatcgccagcatcaacacggaggtgcaggtcgcgccggatctgctggtcagcaacaagacgagggcgtcgcagtcgctgctcaattacatcggcaccctgccggaggccccggtgatcgcgaatccgctgtcagcctcgacgctgacggcaaatccgcagagccgctatcaggtcaccaacgttctggtcaatcagaccgaggccacctacaagtttgcaaccgagggctggcatcacacggcgctggcgggtgtggaggtgtcgcaggaaacagccaagatcgacaagtatacaggattgagctctgaagcgctgggcggtgcgcccgcgagcggttcggtcccgggtgtcagcgtcttcaatccgcaatacaccttcttgccgtttggtacgccgtcattggccggattcccaaccaggctgggaatcgacacgacgagcgcgtatctgctcgacaccgcgaacttcaacgaccttgtcattctcaacggcggcgttcgctacgatgattacaatatcaaggtgaacggctacggcactgtcaacggcgttgccaacgtcttcgggcaacaggagcagcgctacggtctgccgaacttcaaccttggcatggtgctcaaacccatgccgatcgcgagcgtctacgccgcctatgcgacctcgtcgaacccggtcggctcagagttcgatgggacgagcgctcagtatggtggcctggcgccgaccctgaacggcaacgccaaccagatcttcggacccgagaaaaacagggcgatcgagatcggcacgaagtgggagctgttcgaccgccacctgctgctgaccgctgcggtgttccagaccgagaaggaaaacgcgcgcgagtcgcgcaacatcacgcctgcgactgcgactacaagctgtccgtacccaaccggttcgaccggcgccgtgtcgtgcatcagcgccggcgcggcctaccgcatccgcggcatcgatctggaagcaggcggcaagatcacggacaaatggagcgtgttcggtggtctcgtgctgatgcagtcggaggtgacgaaatcattgatcccgccaggcaacacgattctctacgcgagcaatgtcgggttgccgctggccaatgtcgcgcatcagtccttcagcctgctgaccaaataccagctgacggatgtatgggagctcggcgggcaggcggtgtaccgctccaagatctacggcggcacattcctcgccgcgaaccagggcacgtcgctgccgagctattggcggttcgacgccttcgcggaagccaaggtgaacaagaactggaccgtgaagctgttcgtgaacaacatcttcgataagcgctactacgacgccctgtaccaaagcgctgcacctttcgcgctgcaagctccagggcgcgcggcttatctcgttgtttcagcgcgctactga

SEQ ID NO: 3822 - DNA, 117 bp, BradyrhizobiumColbertium
ttgacaaccacggtgccggggtcgatacccacgctgcagcgccccacgatcaagcgggccacggtgatcatcgcgacaatcctgcgccgcgggatcattgagccgctgctgatgtag

SEQ ID NO: 3823 - DNA, 2655 bp, BradyrhizobiumColbertium
atgccatctgccccccagcgcgaaaaaggacagtcgaagccgctcgtcctgatcacaggagcaagcggcttcattggaaaggcggtggtccgccgccttgcggacgactatcgcctgatcggtctcgaccgggctggaccgcccgatccgccgtgcccggctcacgccatcgattttgatgttagctcgagcgaacaggtcaaaaccgcgcttgcaagtgtaaggtctcgcttcggtagacagatcgcttccgttctgcacctggctgcctatttcgacctgtcgggcgagccgagcccattgtatgaccgaatcacggttgagggcacgcgacggctgatcgaggccctgcaggagttcgaagttgggcaattcatttttgcgagctcgatgctcgtgcacgaggcgaccgatagtcctgagaaaacgatcaacgaggattcgccaattaagccgtcatgggcttacccggaatcgaaggtgcgcaccgaggatctgctccgaaaagagcatggaaagatcccagtcgtgctgctcaggattgccggtgtctatgacgacttggcccataatcctttccttgccgaacagatttcgcgcatctacgagcacaggctgagcgcgcatgtctaccccggaatgttgtgcgccggccaatcgttcgtgcacgtcgatgatttgacagaagccgtggcgcggctgattgcccatcgcaaccgattgccacgagagctaccgctcctcgtcggcgagaccgaggcgttaggctatgccgaggtgcagaacatcgtggggcaggtgttgcacaaggaacactggaccacgttgcgaatgccccaggaaatggccagcatcggcgcatggcttgcggacaacgtcctcggcgaaaaagagtttataagaccttggatgattgcgcaggcaaacgcgcattatccgctcgataccacgcgagctcgcaaattgctcgaatgggagccacaccattctttgcggcgtacgctgccaaaaatcgtcgcttcactcaagagcaatccgacttcctggtacaagagcaacaagctcgatgctgcgcgggttgcctggtacggtagtgggaccggctcgcctgctgaggacatctccggccccgccgagccgcagcagacttcgtcaccatcacggcgccagggccacgttggtcattgcacacaaaacggctcgcggacgactgaggcctcccgtgggcaccatgctgatcatatgcagatgatggaagaagacgccagacgcacgcgctgggcgcacttcgccaatgtcggtcttggcttttggttggctgcgagccccgcgatctatgatgccctcgccaacaactccgtcggtccaagggtgtttgaggtcacattggagcgtcgcttgccgccggtcgaatggcgcgcagacatgctcatgacaagcgacgtcgtgagcggacttctgattgcaatcttcggcgcgctgtcgctttcgcggaaaacggcctggtttgcgcaatgggccaacacgctcgttggcatctggcttctgtttgctccgctgttgttctggagccctagcgcggcgcaatataacaacgatatgctcgtgggcaccctggtcatcgcgtttgcagtgctggtgcctatgatgcccgggatgagcatggcagcgatgatggatcgcaaggtcgtgccgcccggctggacttactgcccgtcgaccggcgcacagcgcctgccgattgccgcgatgggcctgactggcctcttgattgcgcgtatgctcaccgcctaccagcttggtcatgttgaccacgtctgggagccgttctttagcggcgacttggccgatccgcggaacgggactgaggagatcatcacatcttctgtctcaaaggcctggccgatacccgatgcgggacttggggctgtaagctacaccttggagattgtgatggccgtcatgggtggccgcgaccgctggcgcaccatgccatggatggtgacgttctttggaatcctggtgatcccgctgggcgtcatcagtatctacttcatcatcatccagccaatcgtcatcggaacctggagcacgccggccctgattgctgctttggccatgctcatcatgatcccgttcgcgctcgatgaagtgatcgcgatgggccagttcctctactgggcgttctgccagggcaaaccggtcttgcgtacgtttcttcagggcgacgcgatcgagcgcggcgccgaggatgaccacgacactttgtccagcgtgagagcattctggagcgataccatcaaaggcacaacagcgccctggaatctggtttgcgcaatgggaataggaggcctgttgatgctgagcaggttgttgtttggcgccagcggctcggcggccaacagcgaccatctgatcggcgctcttgttttgaccatagcgatcattgcaacggccgaagtggcgcgtccgctgcgcttcgtcaacatcctgttcggctgttggctgatcgctgcgccttggctgcttcgcggcgcgacatggcacagcgctatcgtggacgtggcttttggtattgcgctgataatgacaagcctgccgcgtggagtgaggagccgcgagcattacgcatcttgggacaggtatatcgtctga

SEQ ID NO: 3824 - DNA, 291 bp, BradyrhizobiumColbertium
atgcagcgcaaaaattcagatgcgatcacgccccgatttgagagaccggccgacggctacgaaatcctcgtaacctggccggatttccgcgagggccaccatgaccaggagatctggtacgccaatgtgagcgatcaggcggaggccgttcgcctcgtgcagcaagcctgtggcgcgttaaacgatgccaagatcgagatccttgcgcccgcggctgaagccttccttgccaaccacggggtccgtgccggcgaggttaagcgcgcaacttcgcggtttagcggcgcctga

SEQ ID NO: 3825 - DNA, 762 bp, BradyrhizobiumColbertium
atgccggaagccgtcgccagtcctgtgatcgcggaacttcgagagcgcatcgcgcgtctcgagggcacgacaggacgcgcgcgaaaggtgcttcccttcggcgtatcggacatcgacagacggcttccgggaggtgggctggcactcggcagcctgcatgaggtggccggcgggggcaatggtgctgtcgatggcgcggcggccgcgctgtttgcggcgggcgtcaccgcaaggaccaaaggcaaggtgctctgggtggtgacgcggcgtgatcttttcatgccggcaatcgcgcaggccggattgcatcccgaccggctcattcatgtcgaggccggtgatgagaaggcgctgctggcctgcatggaggaagggcttcgccatggagggcttggtgccgtcgtgggagagaccgcgcggctttcgatgacggcgtcgcgtcgcctgcagcttgccgctgaagggtccgggacactcggcatcgcgttacgccgctggcggcgacagaccgaagccgcagatttcggattgccgacagcgagcatcacccgttggcgcgtctcggttttgccgtccgcgccgctgcctgtcccaggcctcgctcgcgcgcgatggctccttgaactcattcgttgtcgcgcgggcgaaagtgcggattttgaagtggaagcttgcgatgacaagggtcgtatcgctcttccttccgaggtggccaacggatcgcctcagaaggaaattgggcggcgcatcgcctctgcatga

SEQ ID NO: 3826 - DNA, 204 bp, BradyrhizobiumColbertium
atgccgcgcacgcgcatccgcgccggcgatgatcaaccgtgggctatcaatcgggccggtcagagcggtgccgtgctcgacagcttcgcgttgcctgtcgtcaaatttttccagatgcgctgcattcatcacggtccgctcggttttcgcttgagaatcaacggccgtccgcaagcacacggttgttctcaaactaatctatga

SEQ ID NO: 3827 - DNA, 369 bp, BradyrhizobiumColbertium
atggccgttcgcggcttgggatgtcctgtacggttcaggcttaccgcaggtcagaagggcgatgcaccgcaagccgccgcattgatcgagggattgcccgccgaggtcgtcatggccgatacggcctatgacgccgatcacctgcgccaagccatcgccgccaagggggcgatcgccgtcatccccaacaacccgtcacgtgcgctcaaacacccgctcgacaaggatctctacgcccagcgccatctcgtcgaatgctgcttctcaaaactcaagcagttccgccgcgtcgcaacccgcttcgaaaagaccgcccgaaattaccgcgcagtcatcactctcgcagcaatcgtcttatggatgcgataa

SEQ ID NO: 3828 - DNA, 375 bp, BradyrhizobiumColbertium
gtgatggagcggttggttttgagcgacgcggcgtgggaacggatggcgccgctgatcataggccgacctgaccagaagggctccaccgggcgcgacaaccggatgtttgtggaaggtgtgctgtggatcgtgcgtacgggctctccctggcgtgatcttccggaagcgtttggggattggaacagcgtgttccggcgcttcagtcgatggagcatcaagggtgtttggtggcggatcttcgaggcgatgtccgatgatccggacttcgaatatctgatcgtcgattccaccattgtccgggcgcatcagcacgccgccggggcgaaaaaagggggtctgaagatcaggcgatcggccgctcgcgcggcggcctga

SEQ ID NO: 3829 - DNA, 906 bp, BradyrhizobiumColbertium
gtgcggcgagacctactcgacggcgtcgttgcgttccttagggtggcggagcgccagagtttcacggcggccgcagccgagctgggcgtctcttcacaggcggtcagccagacgattcgtcagctcgaggcgcgggtcggcgtggcactgctcgcgcgcacgacccggagcgtgtccctcaccgaggccggccgccgattcctggccgaggcaaaaccaggcgccgagtcgatcgcaaaagcctttcacgcagcatcggccatgggcgaccggccgatgggccatctccgagtcaacgtgccgcgcattgccctttccgggttgatcgaaccgcttttgcccagcttccgagcggcgcatccggacgtgactgtcgagatctttgtcgaggacaggctcgcgaacatcgtcgcggacggctccgacgctggcgtgcggctgggggagatcgtcgacgccgacatggtcgcggtgcgccttacgccgccagagcgaatgacggtcgtcggctcgcccgaatatctagcccgtcacggccgcccgaacacgcctgtggaccttcgaggccacgattgcatcaacttccggaacacagcgcgcggcgacctctaccggtgggagttcgagggcgatggcggcgacatagaagtcgcggtctcgggcagtgtggtcgtgaacgactcaggcttagtcgtcgccagcgccgcaatgggactaggccttggctacacccttacatccgttgcagcccccctcgttgggctgggtgcgctggaacctgtgttggaggctttctgccctgagacgccggggttcttcttgtactttccctcgcgcgcgcaggtcttgccgaagttacgcgccttcatcgaccatgcaaggcatgtcttggaggctcgagcgtga

SEQ ID NO: 3830 - DNA, 954 bp, BradyrhizobiumColbertium
atgaccgaagccccgaacagccgccgcaatttcatccgggccacgctcgcagcgggggccaccgccgcggcggcggggatcacctccagcgccgaagctcaggaaaacagttccagctccaagctgttcgccggcaaagccgtcctcgtcaccggcgcggcacgcgggattggccgtgccatggcggaggcttttgccgatgccggcgcgagcgtcgcgctgctcgatattgccgacccgagcgcctatcgaaccgcacagggctaccgcgtcgccaacatggcggaactcgacgcggccgttacgtcggtcggcagactcggcggtcggacgatgaagctcgtcgccgatgttcgggatcatgcccagatggagcgtgcgatggcgcagacggccgacacgttcggcggcctggacgtcgtccttgcgaatgccgggttcgtatcctggcatccgttcgaggacggcaagcccgcgcaatggcgcgaggtgatcgacaccaatgttcacggcgtgtggaacacaatgcatgcctcgatcccccacctccgccgccgaggcggggggaagatcatcgctacgtcttccattggcggccgattcggcgtgcctggcaacggcgcctacacttcgtccaaatgggcggtgatcggcatggtgaagcaagcggccgcggagctcggcaagtacaatatcgcggtgaatgcgatcgcacccgggcccgtcgacacgccgatgtatcggtcgcaaggccagaaggagtcgattggcgcccgaaccgatgccgatcaggatgcgcgggttcgccccgcacttccctacggcggccgcgcggtgcaggagccccgcgaaatcgctgatgctgcgctgttcctggcgagcgacgccgcgcgcgctatcaccggcgtgtcactcgacgtggcgctgggattcaactccagttacacagcatag

SEQ ID NO: 3831 - DNA, 153 bp, BradyrhizobiumColbertium
gtggcgaagtcaaccgacgaggcgaagccggcggcgagcacgacctcggtgacgctctgcctaggatcggcattctccttagcgctcgatgcgttggcgcacgagcagaggtccggcggctccgccatcgtgatcctgaacgcgcagaagtga

SEQ ID NO: 3832 - DNA, 129 bp, BradyrhizobiumColbertium
atgacgatcatgacgccccagtggatcgcgcttcatacggccggattatgcgcagcggtttttcgcgtcgctgatggtcgcgccgtgatagaggctgcgctcaagcagcggtgtgatatcgcggactga

SEQ ID NO: 3833 - DNA, 129 bp, BradyrhizobiumColbertium
atgactatcgaagatgcgctcaaatacgaaggccgggagggcgagcggccacttagagaagaggcgcatcgaggtgccgcacggtttgcatccggcctcggccggggcggagacttcagttcgatctga

SEQ ID NO: 3834 - DNA, 150 bp, BradyrhizobiumColbertium
gtgatcgcgttcgcgcgtgctcgactcgccgggtacaaggtcccgaagtcgattcgggtggttgaagagatacctaaaagtgcagtgggaaaaattctgcgacgagctcttcgggacgaattttgggccggaaaggaaagaaaaatatga

SEQ ID NO: 3835 - DNA, 114 bp, BradyrhizobiumColbertium
atgggcaacaggttccaatcctcgttcggcctcgcgcagacgctcccggacgttatcaagcggcgtatgggcatcgccgagtcgccgcgctccgtgccatcgggcgccctgtaa

SEQ ID NO: 3836 - DNA, 1176 bp, BradyrhizobiumColbertium
gtgcgttcactgacgcgtctgatcgagtccgatgctgatctgctcagcgcacagctgaaggaactccgcactcgtgccttccctccggcggcggagaaggagctacgtaaattcacctcaggcgaggctgcgaagctgatcggcgtcacggatgcctatatccgccagctatcgatcgcgggagacgtgccagagaccgaaaagaatgcccgcggccggcgtctgtttacgcttgagcaaatccacgaagtgcgtcggacgctcgcgcgcaccaagccgaattatttgccaactcgtcgtgcgggcgatcatctccaggtaatcgcagtcacgaatttcaagggcggatcgggcaagacgacaacggccgcgcacgtcgcgcaatattttgcgatgcgcggatttcggacgctcgcgatcgatctcgacccgcaagcgtcgttgtcagctctcttcggactgcagcccgaattcgacctacaggacaacgacactctctacggtgctatccgctacgacgaccaacagcgcccgttgagcgatattattcgaacgacgtacttcgcagggctcgatatcgtcccaggcaatctcgagctccaggagtttgagcacgacacaccgcgcgtactcgccgagcgccgccgcggctctgaccgaatgtttttttcgcgcatcgcgacggcgttggcttcagttgaagaccgatacgacgtcgtcattctcgactgccccccgtcgctcggtttcctaacgctctcggcgctttgcgccgcgaggagcgttcttgtcacgattcatcctcaaatgctggatgtcgcgtcgatgtcgcagtttctgcacatgacctcaagccttcttgacgtcgtcgagcaggcaggtggcgacgcagactacgacttctttcggtacgcgatcacgcgttacgagccttccgacgggccacagggacagatcgtcggcttgatgcgaagcctgttcggcgaacgcgtcctgacaacacctatactcaagtcgacggcgatcgctgacgctgggttgacgaagcagaccctttacgaaatcggccgtgagaatttcacgcgcagcacctatgaccgggcgatcgaggcactcgacacggtccatgttgaaatcgagaatcttgttctcgagtcttgggggagggcgacatga

SEQ ID NO: 3837 - DNA, 660 bp, BradyrhizobiumColbertium
gtgcgggcttcgccgcggccacgccggcgcaagagcaagcgcgcggtgacgcgtgacatcctcgacaagctcgctgcaacctgcgcgaccgaccggctggccgacacccgcgatctcgcgatcttgcttgtggcgtttgcctccggcgggcggcgccggagcgaggtggcgcgacttcgcgtcgagcagctgggtgaggagcaggacgtgccactcgatccgcgcgatccgaattctccgaccttgccgtgcatctccgtccagctcggccgcaccaagactgcagacgccgacgatgagggcagggtgttcgtggtcgggccgccggtcgaagcattgcgggagtggctgtttcgagctgatattcagacgggccctgtcttccgtgcgatcgaccgttgggaggcgatcgaggagcgcgcgctgacaccgcaatcgatcaacctgatcgtcaagcggcgctgcgcgatggccgagctcgaccccagggagttcaccgcgcacggattgagatctggatttctgaccgaggcggcgcgacaggggatcgggctgccggaagcgatgcagcagtcccaacatcggtcggtccagcaggcgtcgagctattataacgaggcgcagcgcgcgcggggcagagccgcgcggctcggggtataa

SEQ ID NO: 3838 - DNA, 1230 bp, BradyrhizobiumColbertium
gtggcggcgatccgtgccccattccgaggtgccgacggccatccaggcgagctgccgagcctccacagtccacgacgccaattccggcatgtggcggatcttgatgtccgtatccatcgtctccttcacgaaggcgacgatatcggcggccggtatccagggcgcgccgagccgcgcggtaatgtcggagggacgcagatccgccggctgcacgccctgcaacgcagtggcgttgcgctcatagtcgggatcgagtgcggcggcagcctgggccgtcttcagccggtcgcggacgggacccgacagataagcgtcagcggtctgccaggacccatcggccggatcacggaagatcgcgctgccgagttcggcaacgacatcgtcgctatccctatgcagaagctccgcgatgtggtcgacgtcgacgcgaccgcgcgcgttgagaacgacagcgagcgcatcggcggcgcaggtgatcaccggaggcgccggcggcgagatcacgcgctctgtgaagatcggacccggcttcgcggtgttggtctcgagatcatagtcctcgatggaagcgacgagccagcaatcggggtcgtccaggaaaggctggatgttcgggcggcgatgcgtctcgcgcatctcgccggtttcctcgtcctccgtcatggagaccgtggtgaagttgatcggaccgaagtcgcggacgaaattcgaccaggcgatgcgcagcctgacctgcgcctccttccacggccggtcgagctcctgcgctttcaacagctcacgcacggcgtcccggatcgggatcagcttccggatgatccggacatgcttctcggggatgccgtctgcgctgcggcccttgcggaccttgatcgcggcggccacgccgccgaggacctgcatcaggccacgcgacgggtcgaagaaatagctgccctcgcgaacgtgacgctccgccggcagacccgcctcggcctgatcggcgtcatcttcccgatccgcttcgatcacgtccggctcgccgtcgtagatggcctccggaaggagattgactgcagcggcgagtgcggcgccgaggtcctcgccgtcgcgggagcgacatgtgtaggtttcgccgaacggaccggggacggtcgcatgggcgccgagtacgagttccggatgtcttgcgaaccatcgattgacgtggatggcgccttcgtcgtcagttgtcggacggatctcgtctag

SEQ ID NO: 3839 - DNA, 258 bp, BradyrhizobiumColbertium
ttggcgaaggaaactttccgaatcctgcgccgtggaggtgtattttatgttgcggactatgaccgaccgaccagccgcgaagagcgcatcgtcctcaaccttgcagcgcagatttcaagcaggattgcggttcaatcccacgtcgatggaacttggggcaaacacttcaagaaggcgggctttaccggggccaaactgcagtcctcgcactcggtgcggatcggacgggttgcaatgctatcgtttaggaagccgtga

SEQ ID NO: 3840 - DNA, 123 bp, BradyrhizobiumColbertium
atgaaaggcgagtacgcacatcgcgcggtcgaagctgccggtgtgaaccggaagggccacaacggaaggtgcgtcgatgaacgtaatattctcaatgtgctgttcttcgatcgctcgctttga

SEQ ID NO: 3841 - DNA, 144 bp, BradyrhizobiumColbertium
gtgaaccgctccgcaagcgagatcgccgtcgctgcgcttccccgtccgaacgccaagaggcgctctccgcgctttggagacatcaactcgaacaagggctcctgccacgacgtgtcgcgcagcattgcagcggcgaatcggtag

SEQ ID NO: 3842 - DNA, 531 bp, BradyrhizobiumColbertium
atggaaaccaagcaagttgaaggttcgcagactccggcgccggacgacctcttgcagcgattgtcctgggaggtgaagcaaattcacggctgtttgagcgaagtgcagaagtgttgggcggccggcctgggtgtcacggtggctcaatggaacattctgatggcgatatcgcatcttgcggacgaagagggggtgcgggtcagcgtggtgtcggacaagctcgccgtggacgggtcctttgtcacggcgcaatctcaattgctcgagtccaaaggactgatccgccgcaagccgagcgctaccgatcgccgtgttgttctcctcgcgctctcgagcaacgctcggtggcagatagaaaacctgtctggctccatgaacgcagcgaacgcgtatgttgccaataacgcgagcggcaaggctcaccggcttctcgcagaactcgaggagctgaagagcgtcctcaagcgcgcgaagcttctgacggcttcggacgcgctccgccattggcctcgcggtcgcgacaccgcatga

SEQ ID NO: 3843 - DNA, 735 bp, BradyrhizobiumColbertium
atgtccgacaagaccgtcatcgggctatcgcgattgatcaccctgcaacagcaattggacaaggttgctcgaaacgttgccaaccagacgacgaccggattcaaacgcgaggggcttcagttccgcgaatatctcacgaaggccaaggaagccgacgacattccctcggctccgatgcgatcgcttgtggccgccaccggttacactgatttttccggcggcccgctcaaggccaccgggaatggaacggatgtcgcggtcgtcggtgacggcttctttgtcatccggacggctgccggagatcgctacacgcggaacggagcgttcacgctcgacaaggaaggccgcgtggtcacgttgtcgggcgatatcgtgttgactgcgaccggccccttacaggttccgccacgcgatgggccggtgagcatcggagccgatgggaccatctcgacggcgaggggaccgataggacgtctacgcctagtcaagttcgaggataatgccaagttgcgcgccgagggaaacactctgttttcatcggagttgcctgcgaacgaggtgcctcccgcgcagattaggctcgctacgggagccttggagggggcgaacgtgaacgcggtccatgaaatgagcagtctcgtcgctgcgacccgagcctacgatcaagttgccaacacgatcctgcgcgaagacgacaagaacgaacttagaaagttggctggtgaggatttgtag

SEQ ID NO: 3844 - DNA, 375 bp, BradyrhizobiumColbertium
atgaaacccgccgcattcatactcgccgtactgctttcggtcgtcccggctcacgctcaacactcacacggttcgaagggacccaatggcggcgttcttgcggatgcggccggcgtgcatatcgagttcctgccgtcgggaaatgccgtgacgttcaacgtcctcaacgaggacaacaagcccgtgtcgactaagggctatacggcctccgctctgatcgtgaacggcgacgatcgcgagacgattgtcctttctccgtcgggagagaacgtcctgaagggtgaaacgaagaagccgattacggcatccaccgcgatcacactcatgatcaagacggacacgggcaagtcgggccaagccaagtacaagggctga

SEQ ID NO: 3845 - DNA, 3249 bp, BradyrhizobiumColbertium
atgagcactgagcagggcccgatcggcgaccggaagcacggggtcatcaccgcaataatcgcattctcgatacgccagcgatggctggtcctctttgcggtgcttgcggtcggggcgataggagcctggaacttcacgcgccttccgatcgacgcggtaccggacatcaccaacgtccaggtgcagatcaacgtgagcgcggcgggctattcacctctggaggtcgaacagcgcatcacgtttccagtcgaaaccggcatgggcgggctaccgaacctccagtacacacggtcgctgtccagatacggactaagccaggtcaccgtcgtcttcgccgacggcacgaacatctatttcgcgcgccagttggtcaacgagcgtttgcaacaggtgaaagacctcctgccgaacggcatcgaaatggcgatgggaccgatttcgacgggcctcggcgagatattcatgttcgccgtcgaggcgaagaaggcagccaaaaaccccgacgggagcgagatcagcccgatagacctccgcacgatccaggattggatcatcaagccgcagttgcggacggtgcccggcgtggtcgaggtcaacaccatcggcgggttcgagcggcaattccacgtcctgcccgatcctaccaagctgatggcgtatcggctgaattttcgcgatgtgatgaccgcgcttgcgtcgaacaatgccaacgtcggcgcgggctacatcgagcggaacggcgaacaatacctggttcgcacgccggggcaggtgggcgacgcgagcgacatccgaaacatcgtgatcggggcgcgggaagggatcccggtccggatcggcgacatcgcagaggtgatcgaagggcgagagctccgtaccggttcggcaacgctgaatgggcgcgagaccgtcgtcggcacggccatgctgctcatcggcgaaaacagccgcacggtggcccagcgtgtatcggcgaagctggacgagatcgcgaaatccctgcccgacggtgtggtggcgagggcgctctacgaccgcacgcgcctcgtcgaggccacgatcgctaccgtggagaagaatttgctcgagggcgcgatcctcgtcatcgtgatcctgctgctgatcctcggcaacttcagagcggccgtcgccaccgcgctcgtcattcccttgtcgatgctcattaccgtgacgggaatggtcgagaataaggtcagcgcgaacctcatgtcgctcggcgccatcgacttcggcattatcatcgacggtgcggtcatcatcgtcgagaactgcctgcggctgcttgcggaggagcagcaccgcagagggcgcatactgagccgcgaggagcgtttcgatacgattttggcgggagcaggggaggtcgtgcagcccagcctattcggtaccctcatcatcgcggtcgtctacctcccagttctcacgttgacgggcgtcgaagggaagatgttcacgcccatggccctgacagttctcatggcgttgggcggcgccgcgatcctgtcgatgacctttgttccggccgctgttgccattctggtgaccggcaaagtgaccgagaaagagaactggttcatgcgcggggctcgcttcgcctatgtgccgcttctcgatgcctcgatacgcaatcgacacatggtcgcactggcggccggcgcgttggtgatcgtcagcggaattgccgcgtctcgcatgggcggcgagttcataccctcgctcgatgaaggcgatgtcgccacacacgcgatgcgcattccagggacgagcctgacgcaggccgtggatatgcagatcaagctggaggaggccatccggagggtgcctgaggtccgtgaggtcttttccaagatcggcacggcagaggtggcgaccgatccgatgccgccgaacgtcgccgacacttacatcatgctcaaaccccacgctcagtggcctgatccttcgatgaccaaggcgcagctcgtctccaagatcgaaaaggtcgtcgcggaggtgccgggcaacaactatgagttcacccagccgattcagatgcgcttcaacgagttgatatcgggcgttcgtagcgacgtcggggtcaagatcttcggcgacgacctgaacacgcttctgcaggtcgccggccaggtgcaaagcgtgctgcaaggtgtgcagggagctgcagacgtgaagacggagcaggtctccgggctgcccgtgctcacggtcaaattgaaccggcaggccttggcacgacaaggcctgagcatctccgatgtgcagggcatcgtcgagatcgcggtcggaggcaagagcgccggcctggtgttcgaaggcgatcgtcgtttcgaaatcatcgttcggctgcccgaacaccttcgctcggatatggaagcgatccgcaatcttccgatccctcttcccgtgcgcgaaggtcaggctggggccatcaaggcggcttggggaaattcaccgttggggcaggtccgttatgtcccgctctcctcggtcgccgagatcgacgcggctccgggtcccaatcagataagccgggaaaacggcaagcggcgcatcgtggtcaccgcgaacgtgcgcggccgagacctcggctcgttcgttgccgacgcccagcggcggatcaccgacggtgtcaaggtgccggcgggttactggatcacctatggaggacagttcgagcagttggtttccgcaaccaagcggctgaccatcgtcgttccgatcgcgctgctcctgatcttcgtgttgctcttcatgagcctgggaacttttgccgatgccgcattggtcttcagcggggtgccactcgcgctcacgggtggcattgccgccctgctgctgcgcgacatcccgctttcgatcagcgccggtatcgggtttatcgcgctatcgggcgtcgcagtgctgaatggcctggtcatcatcgcgttcatccagaagctgcgatcggagggccgccctgtcgtcgaagccgttcgcgagggggcgctgacccggttgaggccggttctgatgaccgccctggtggcaagcctgggattcgtgcccatggcgatcgcgaccggcgccggcgccgaggtgcagcggccactcgccaccgtggtcatcggcgggatcgtatcatcgaccattttgacgctgctggtcttgccggcgctctacacgctcttccgtcgtgaagcggtcacgacgaagtcgacttccgcaaccgcacaaggagaaactgcatga

SEQ ID NO: 3846 - DNA, 954 bp, BradyrhizobiumColbertium
atgaagcggcttttcgcgaactcggtcctggcaactatcgccttggccgcaatcggcttcttcctgttgaacttgcctcagcagagctccggcaagcaatcggaggcggggcatggccacgaagaaggaggtcacgccgacggcgtcgaaatgagcgacgacaagctcaggtcttccgatatcgagctcctcgtcgcagcgcccggcgttcttcgcgacagtctactcctcaacggcattttgcagccaaatcaagaggctctcgttcaggtaactccgcgatttccaggagtcgtccgcgagatcaaggcgagcgtcggtcatcgcgtcgaaaagaacgacctcctggccaagatcgagagcaaccagagtctcacgacgtatgagatccgggcgccgttggccggcacggtcatcgaccgccaaatttctctcggtgaatacgcgtcggagcaaaaggcagccttcacgatcgccgatatttccaccgtatgggtcgacctatccgtctatcgacgggacctgaagcgggtgcgggaaggcgacaaggtcgtcatcgacgtcggcgacggcgggaagccgatcgaggccaggctgacctacatttcgcctgtcggcagtgcggatacgcagagcgctcttgcgcgcaccagcgtgccgaacgaggggacaagactgaggccaggcatgttcgtcacggcgcgcctgatgctctcggacaagtccgcgccgatcgtcgtcaaatcgaccgccgtccaaagcttcgaaaaccgcaacgtcgtcttcgtccgcaatggcctgaaattcgaggtgcgcgaggtcgagctgggtgctcgcgatcgcgagcacgtcgaggtgcagttcggcctggaggagggcgacctgtacgtgggacggaacagtttcatcgtcaaggcggaaatagccaagggaacagccgcccatgagcactga

SEQ ID NO: 3847 - DNA, 351 bp, BradyrhizobiumColbertium
atgccgatcgccgccaccagcaatgctctacttcgccggctacgcgatctgctggttctgttgcttgcgttcggccatttgagcgccgccgtcctccatagtgcccatatcgaccatgtggcaatcaccggctcgaccgagaccgtcttttcgactgcagggctgggaagcacgaccggtggcgacagcgttctgaccgaacggcattgccacgggtgcttctccgtctcgcccgctcgggccacggcagcctggtcgctcgctgcggccgtgacgaagccggtcgctatgccgacgaagcggctgaccggcacctcctccgcattggatactccccctccaaaggcctga

SEQ ID NO: 3848 - DNA, 414 bp, BradyrhizobiumColbertium
ttggcaaccgaaattcaccctcaggctcctcataagcttccgttcttcctgccgggggccgatggctccgacgtgctcctggtggtgatgggggtcttcttggtaggggtgatcttttccgtgggagtgctttactggaagctgcacagcctgcccgagcggatggcgcacaagtcgcaaaagctgcagttcgagttcgtcgccgtgctcggcctgatctccttgttcaccgggatgcacgcgttctggatcgccggtttgctgttggctttgatcgacatacccgacttcggcacgccgctgcgaggcattgccggatcggtggagcgaatagccgatgcgaaatccgaggcagccgagaccaccggcctatctccaaccctccgaaatgacccggagcgtcgcgtaggctag

SEQ ID NO: 3849 - DNA, 345 bp, BradyrhizobiumColbertium
atgggaaggggtgcgcaaattgccgtcctctatggaaatccggcaaagccgggcttgttcgtagtccgcgtcaagttgccggcgaacttcaagttgcctgtgcactcccatccagacgaacgggttcgcaccatcattgcgggcacgtactattcggcgatcggcgacagcgtcgacagcacaaagctggtcgcttttccacaaggcacgttctcgcacgtgccgccccgagtttggcagttcgcagaaacgaagaatgaagaggtcgtattccaggtgactggtattggtccaaccgggatagactatctgaactctagcgacgacccgcgaatggctcagtag

SEQ ID NO: 3850 - DNA, 504 bp, BradyrhizobiumColbertium
atggatgcgttcggcgcattgaattatttgaggacgcgttccgacgtccgccccgacagcattgccatcttggggcaatcgtatggtggaatggcaatgatgtttaccattaccgctgccagcttgcctacggctgtatcgcctgaaaaggattttcgcgcagcgatcgccctttacccgaactgccctccggtcgcggacaaagatcccaaatggcagcctcgtcaaccgatgctgctcctgatgggcgaggcggacacggccacgcctgccgggccatgcaaggacatgatagcgcgcgcaagagaggctggcagccctccgatcgaggcgcacttctatccagatacagttcacgcgttcgaccatccgaaccttccactggcgccaatgacgagtcagaggcggccggacggcagcgcacccatgatgggttcaaatccggaagcgcgcgccgatgcgattggtcgcgtcaatcggtttctggcgagcgaattgaagtag

SEQ ID NO: 3851 - DNA, 243 bp, BradyrhizobiumColbertium
atgaccctgcaaatccgggattcccgtgctcgcgagctggcgaaaaaactcgcggagaagcggaaggttaccatgacggatgctgtgatccaggcgcttgagggtgaatggcgtcgggaggctgagaaggagccactggcggcccgcgtgaggcggatcgccgacgatctcgccgcccatgctggcccaaaccgacggacgatgtccaaatacgagatcgacgccatgtggggccattcctga

SEQ ID NO: 3852 - DNA, 414 bp, BradyrhizobiumColbertium
gtggggccattcctgatgttcatcgatacttcggtgatcgtcgccctgctcgccggcgaaccggaggctgaccgcttcgcgcacgcgatcgcgagctccaaggcgcgttttacgtccggtctggtggttctggaggcttcaatgcggctctcaaccatgctggacttggacccggtcctcgtcgagacccgcattcaggccttgttcgaggaagccgggatttcgatcgtgccgatcaacggcagcatcgccactaaggccgtggccgccttcgccagctttggcaaagggcgcggccatccggcacagctcaacctggccgattgcatgtcttacgcttgtgcacaggcctatcgcgtgccgttgctgttcaagggctctgatttcgcccggaccgatatcccggtggcatag

SEQ ID NO: 3853 - DNA, 213 bp, BradyrhizobiumColbertium
atgttgcaggccgctcgcgacatccgcaaggtcgcgctctggcttggccacgccgatatccgcaccacggagagttatctccgcatggatccctctgaaaagctggaggcggtggaagcggtcgttccgccggcgccgcgccgtggacggttcaaggcaccagacgcgctgattgcctcgctgttggagaaagcccctctgccttcagggtga

SEQ ID NO: 3854 - DNA, 249 bp, BradyrhizobiumColbertium
atgttgcacctgtgcttcgctggcggcctgcgcgtctccgagtgggtcggcctcaccctggagaacgtcactctgcagccgacgccaagcatcctggtgttcggcaagggccggcgcgaaacgcagccttccgctctggaaagaaaccgcacgcgacctgcgcgcgtggcttgcggtgcgaggaaagccgccggcgacggagctgttcatcaacgcccaagggttggcgatgacccgcgccggctttga

SEQ ID NO: 3855 - DNA, 753 bp, BradyrhizobiumColbertium
gtgcacgtgatggagcagacctctgcgaaagacacgcgagccctggagacggttcgggcgcttgccttcgacgtgcagggcacgtgcgtggatttctaccaacctatactgcgcatgggcgaagctgtgaaccgtgccaagggcttggatatcgactggactgctctgtcctctgattggcgcgatctctaccgcatggcgcttgaccaggttattgcaggtcaacgaccatggctccgggtcgaccgcatctatcgcgaagcgctggacacgctgctggagcggcggggcctatcgggagtctttacgaccggtgagcgagatgagctgaatcaaatctggactcgactcgatccttggccggatagcatcgaaggactcacacggttacggcggtgttttgtcacgtccaccctttccaatgcgggcatggcggcggttgtcgcagtggttaagcatgccggcctgccgttcgacgttgtgctcacagccgagctcgcgcacagctataagcctgcatcagctgtttaccagctcgcggtcgattacctcggctgtcggcccgacgagattctgatggtggcgtgtcacaagtacgacctaagagccgcgcgagcgttcgggatgcgtaccgcgttcgtggcacgctcgttggagttcggtccgagcgctaatccggataccgcacccgagagttggttcgatctgtatgtcgatagctttgtcgggctcgcgcgcgccttgggtgcctga

SEQ ID NO: 3856 - DNA, 216 bp, BradyrhizobiumColbertium
gtggtttggcttcagaaaatcggagacatgaaaaaaggcggcattgttgatcaggattgccccaagcagcgcctgttcggactcgatattgtgcggcatcatccgatgctgctcaatctccgccagttccagcctgtgtgccgcttgggtcattgccgccgtgccggttcaagtgtgcggcacaaccgaatcgggacgccgcttcccgaaggctag

SEQ ID NO: 3857 - DNA, 750 bp, BradyrhizobiumColbertium
atggtttcagagtggcgcgccaatctggtgcgccaggtggtcctgccgcgaccgatctcggtccaggtgcagggcaagctggtcaccttcgacgtcgcgcgcacggcgatcgtgatcgtcgacatgcagaacgatttttgccaccccaagggctggctggcacacgtcggcgtcgacgtcgcgccggcgcgtcgcccgattgcgcccttgcgccggttgttacccattctgcgcggctcttccgtgccgatcatttggctcaactggggcaatcggccggaccggctcaatctcagcccgtcgctgctgcatgtgtacaatccgagcggcggcggcatcggtctgggtgacgcgctgccgggctcgggcgcgaaggtgctggagcgaggcagttggtcggcggccattgtggatgagcttccagtcgcgaagaccgacatccacgtcgcgaagtaccggatgtcgggctttcaggacaccgagctcgacagtatcctgcgtaatctcggcgtgaccacgctgatgttcgccggcgtgaacgccgatcaatgcgtgctttgcacgctgcaggatgcgaatttccggggctacgattgcctgctcctggaggactgcgccgccacgacgtcgcccgactattgcatggccgcaaccctctacaacgtcaaccagtgctttggcttcgtggtcaggtccgaggcaatcgcggctgaactcgcacagcgtccatccatgagcgaacgatcgtga

SEQ ID NO: 3858 - DNA, 420 bp, BradyrhizobiumColbertium
atgtcgtttagcgtcgccgagctcacgcgcgcgaaagcctttcgcatttcgccacgggacaccaactacttcgcggtcttgttcgatcaggtgacggaccggatcggaaacatcttcgtcatcgagatattcaagccaggcggggcgacgccccccaatgagcacgcttccgcgcacgagttcttccatgtgctgcacggcgtgggcgttgcacgctgcgacggcaagtcgctgccaatcaagaagggagactcgctgctgctgcatcccggctccgagcacgtcatcgagaatacggggccaggcaagctctatacgctcaccgtgatgacccccaacgagggtttttccgagttgatccgcagcggcgagccggtcgagctcgacgccgaagacatccgcgttctgcaagggctctga

SEQ ID NO: 3859 - DNA, 903 bp, BradyrhizobiumColbertium
atgcttcacagccggctgctgaactatatcgacgaggttgcccgcacgggctcaatccgcaaggctgcggatcgcctgaatgtcgccgcctccgccattagtcgtcagattctggcgctcgaaactcagctgggaacgccgatcttccaacgtcttcccaagaagctgatcctcacggccgcaggcgaagtcctgatcggtcatgtccgtcagacgctcaaggagctgacccgaacacaggtcaagatcgaggaattgaaaggccttcggcgcggcgagattacggtggcgatgatgagcggtcttgcctccaacctcgtccccggcacggtcaaggagtttcgggttgccaatccgcgggtcaagctcaacctgacgctgttcaataccggagcggagattcagctggctgttgccagcggcgaggcagatctcggcatcggattcgactttggtaaggacagcaatctgaaagttctggcacgtggcgtcggtcggctcggcgcggtcatgtcacccagtcatcccctggcaaagcgacccagcatccgcctcagcgattgcaccgattacccactggtcatcgccgatagcaccagcgcgatccggccctatctggatgcggctttcgcccgcgtcgcgatcgacctgcacccggcgatcgaaacgaactcgatcgagatcatgcggcatgccgtcagtttgaacgacggcatcactttcctgacgccgtttgacgtcgagtcggagcggcgtgccgggcggctcgcctacgtgaccattcgggagctctctcacgatgctcaggcgctgatgctgatcggccatgttcgagggaccagcgccatcgcgagcgtgctcgcggagatgctgaaggccatgatcagggatgttgccagctga

SEQ ID NO: 3860 - DNA, 828 bp, BradyrhizobiumColbertium
atgaaactaaaatcgcattggtggtgggacctctccgcagaggatttccgtcacctcgacatgagccggatcgtcgccgttctgccggtcggcgccgtcgaacaacacggacctcatttgcccgtccgcgtcgacaccgccatcctcgatggcatcatgcagcacgcggttgcccggatggctgacgactttccggctctcatcctgccgacgatgtcgatcggcaaatcgaacgagcattccacttttcccggcaccctgaccttgtccgcggaaactctcgggcgtctctggtacgaggtctgcgagagcattcatcgcgccggggtgcgcaaggtcgtcttcgtcaactcgcatggagggcaaccgcaggtcgtggagatcgtctgtcgcgagcttcgtgtcaggctgggaatgctcgccgtctcctcgcaatggtcgcgtttcacggatctgtccgacctgttcaccgcgaccgagcgcaagcacggaatccacgccggagaaatcgagaccagcgcgatgctctatctgcatcccggtctcgtcgatatgacgtttgccgaggatttccggtctctgtcccagaccctggagactgaatgcgaaatcctgatgccggagagccacgcagttgggttcggctggcagatgcaggacatcaatcccaagggagcctgcggcaatgccgccctcgcggacgataagcgtggccggcaggcaatcgaccgcgcggccaatcgtctgatcaagctgatttcggaggtcgacaattatccgctctcccgcatcaggacgaccgcggacttcacgccttcgaccaagtga

SEQ ID NO: 3861 - DNA, 1686 bp, BradyrhizobiumColbertium
atgtcagcaaaatccttccgggtacccgtccttccgcccaagatcgaaacgttgacattgaaggacggcacacggctcgatgcggacgtttatcgcccggcgacgccgggaccctacccggttctgcttcagcgtcaggcctacagcaggcgcatcgcatgcagcatctgctatgcgcatccggcgtggtacgcctctcatggctatgtcgtcgtggtgcaggacgtcaggggacgcggcacgtcggaggggacattccgccccggagaaaccgaagtcgaggacggcgccgagaccgttgaatgggcggcgcgtcttgatggcgcgaatggcgatgtggcgatgtacggcttttcctatcaagcctacaaccagctgcttgccgctgcgggagactgcccatccctgaaagcgctcgcgccggcgatgggtccgtggaatccagcggattgggcttacgagaacggcgccctgcaaatgaagcacatgatcggctggggcattcagatcacagccgaagccgcacggcgggccagcgacgacgacgccttcagtgcccttcaggctggaggaatcaacctgccgttcaacggtccagtcgcggccatgccgcagctgttgcagaagtaccggcactattcgcacgtcatggactggctcgaaacgcctgccgattcaccgtattgggaccagatctcgcccgtgacgcacgtggaggccattcgcgctcgccggctaccgatgttgttcgtcggcgggtggttcgatccctttctgccggccacggtcgagtccttccgggccctcgcaagcagcagcgaggacaccaggctcatcgtcggaccctggatccattttccctggacgcggaaggtcggcgcggtcgacttcgggcccgaagcgcagcgcaacgtcgacatcgatcacattcggttctttgaccacattctcaaaggtttgccgagcgaggcggacaacgggaggatcgagttcttcgatatgggactgaagacatggcgacgatatcaagatttgccgtccagcacgcacgtgctgtttcttgatggcacaggtcggacgtcattggaccctcacgacggtgcgcttggtcctcgacagcccacgcaggatagcgtcgaccatatcgtgcatgacccctggcggcccgcaccgacagtcggcggttactatggggttccgacggggccggtcgatcgccgggtcgccgatgaacgtggcgacgtcctgaccttcacgacggaagctctcgagcacgcaatcgaggtggtcggcgaacccgaggtcgaactcgacctaagctgcgatcgtcccagctttgatctctcctgcatcctttcactcgtgacctccgatgaaagggttcttcagatctcaagtggatatgcccactatcgcgtcgccaagcctgggctatatcggctgaaactggcagtcacgtgcgtaacgctaaagaacggtgatcgcctgcgcctctccattgcgggagccgactatccagcgtacccagtaaatccgggtacgggcgaagatccggtgagtgtaccgaaaacgcacgcagtcgtgaccacaattgcactctggcatggtccttcccggccgtccctccttcggctgcctgtcggaatgtactcggagatcggatctgccggatctcaggctggctga

SEQ ID NO: 3862 - DNA, 147 bp, BradyrhizobiumColbertium
atgacctgtcggcatgatgcagacgagttcatcgtgaccgatagtttcgacatcgagatcgtgatgaggcaaattattcatcgcgatgccgagcgaaacatcgcctcttcgcaacatctcgacaatgttgaccattggtgcgattag

SEQ ID NO: 3863 - DNA, 426 bp, BradyrhizobiumColbertium
atgccgacaggtcatcgactggccgaaagggccgccgtccgcttttcggacatccaggaagagacgctgatctcctatcgcgccgacacattgccagctcaccttcttgcgggcgctgccgaggccgaggaggtttctttctcgccgtcgatcgaaatcgatgtatcgatcacggctctctcattcgtgagggacgggcttggtatcgccatcgttgatgggttggtaccgtgggaacagttcccaggcgtcgtcagccgccctttcgcgccgcaaattttggtcccgattgcaattctcacgaacaaagagcgcccgctttctgccattcacgaactcatgcgcgattatctgcgtacggcctggagcaccagagccggtctgcggagcggcggcaaaatcgtctctggaacaatcgaaacttga

SEQ ID NO: 3864 - DNA, 1929 bp, BradyrhizobiumColbertium
atggcgcatactctccagcgtacggcccattccgccttcgtcaaggagacggaagatttcacggtcatgttgatgaatcgcaagggagataccttcgccgtgccgatggatcttggtgcgacctggtatcctggccttacctatggacgcgcgatcgcgatgatagacagttacaagccgggcgatgtcggattcacgaacgatccgtatgcctgctacgtcgcgacgcatgcacccgatacccatctttggaaacccattttccatgaaggtgaaattgtcgcctggaccggcggccatatccataacaccgacatgggcggcgcggtgcctgcttcgctctcgcggtcgctgacggaaatccatcaggaagggatccggtttccgcccatgaagctccttcacgaaggcgtgttcgacgagcaaatcctgaaaatcatggcgaccaatgtgcgcaaaccggatttgaacatcggcgacatcaaggcccttgtcggcgcgctcaataccggcgaacgcaaggttctcgcgatggtgaagaaattcggcccagacgccttcctcgaaggtgtcgaagtgctgctagaccacgcggaggcgcaggcgcgcgatacgcttcgttcgatgcctgacggtacttgggagttcgttgactatgcggatgaggattcggttgaagccaatccttgccggctgaagctcaagctgactattcgcggtgacgaggcgatactcgattttaccggctctgatccgcagttggcgtcttcgctgaacgtgccctcgggcggagatccccaccacacgatcctgctggtcggtatctactatgtcctttacacgctcaatccgaagatctttctcaacactgggttgacccgaccattcacgtgcattgtgccgcagggtagtgttttgaatccggtctatccagcggcggtaggcatgcgatccctcacctgcgctcgcctgcgctcggtgatattcggcgcgttctctcaagtcttgcccgacaggatgccggccgcgccggccggcaataattgtatcgtcaatgtgatgacaacggacgaacgaacccatcgcaccatcattgccgcggtgaacccggtcgttggcggcagtggaggcatgccccatcgcgacgggacgaacggatcgggaggcgatgccgcctacctcagaaatacaccgatcgaaattaccgaaaccgaagcacctgtcgagtttgtccgatacggacttgtgcaggacagcggtggagcaggacgttggcgaggcgggttagccacggagatggctttccgcgtgttcgcgccggacagccgcgtcaccgcgcgcaatcgcgatcgaagcttcttccgcccctggggcgttcttggaggacaagcggcgggcctgtccgacatggtcgtcaaccctggtctgcctggtgagcgtcgtctcggaaatatcgatacgaccattctgcaaccgggcgacgtgctggaaattcgctcggctggcgggggcggacgcggtgccccccgggatcgcgagtcgtggcgagtagcccgagatgtcgcacgcggctatgtctcggcggaagcggctgagcgggactatggcgtcatcatccgcgaccacaaagttgacgagcctgcaacggcggcgttgagaaagtcagggaaatctccaacggcacattttcaatttggtcctgaacgcgacggctacgaaaaaatttggacttccgaggcctatgacctcctgacgacaatcctagcgagtctgcccattcattggcggttcttcgccaagaccgagatcttccgcagaatggaggggcggagcggagcgcagggagtggagcgagcactggaacaggtcatggaacggtttcccgctatgccaaggccgacacgcttcgcaagcgaagcggctcagtga

SEQ ID NO: 3865 - DNA, 762 bp, BradyrhizobiumColbertium
atgcctgcggcgaagaagctgaaaggcaacaccgcctccaactcgcatgctggcacagaggatgtcatcgtggcatcgaagggtcggcccgatgtgacccgcaagggtgtggaaatgatcggcgactaccgcaccgacgcgttgcgggaagcacttggccgcgcgccgatcgaggacgacaccctcatggcgctgctgatcctcgcctttgctggtcagaatgtttcggtcacgaccggaagcggcggcacctattatggccacagccgtctggccaagcacgcggcggcgctgttcgacgcagacggcaaacttgtcttcgacatggatgggctgcgcgttgcagcgcgcgccatgctgatcgacgtgttctcgtgtcgggagaatgccacaaacagcggcatcgtcgcccgcgtcgccggcgccacgatcggcgcggacgagttcctgccgacgatgggcaccgaagagttcctctcgtgcttgtcgcggccggcgcttgagagcgcgtgcaaggatacgccggtcctgccgcgccagcgcgtcaaggatacgcgcgctgcgcttgttgagcacttcaaggatggacgtttcgtgcatcccgccgcgctcttcgcgcccgatgcggcgaagctcgccgaatggcagacgtccagcaagcgcgagcctgaggacgccgacgacgtggaggacgagcgcgacggtatggccgacgggccgtctgacgaggacaccgaggcgttcagggaagcggccgaatag

SEQ ID NO: 3866 - DNA, 189 bp, BradyrhizobiumColbertium
atgtccgcgcatacgatcatcgacgatgcacagctcggctcgatcatcccccggtctgatcgggacgccgtggaggaacgccgctttttcgttcccttcgatgaatccaagtgcggccggctcggcttcgttattgtttcggaccgccgtgccgtcgatggcgcctccgtgcggggaggcacatcatga

SEQ ID NO: 3867 - DNA, 414 bp, BradyrhizobiumColbertium
atgagcgcctcgcctgatctattgattgacctctctcgcatggaggaagcgaggcggcagattcagcgccagctcgacatgatcgatcggcttatcacgcgccgcatgacggcgatgatcccgcagttgaagccgaagcatacatgctatcggcgcggcaagccgcccaaccggaacgcgttcctcgaacgttatcgcgcaaagcttgcggcaatcaccgccgagcaccagccggaggtcgacgccctttaccgcaagcttgcccgccaggatagggccatcgccgcgttctgtcatcgccatggtcttgatcagggtaacctccacagcatcgcagcggccggtgaatctacgcacgattgcactggcgccgaggtgccgtcgcgtggccaaaaagagtgtgatcgcggatga

SEQ ID NO: 3868 - DNA, 123 bp, BradyrhizobiumColbertium
atgatcgcgatgaacctcgcgacgcgtttccatacagccttcccggtcggccagccgggacggcactggcgcgtgtcaggtttggattttacgcgcccagatcctccggccgccgtagcctga

SEQ ID NO: 3869 - DNA, 672 bp, BradyrhizobiumColbertium
ttgcagctccctgagcgtggcttcaatattgcccgtcagcgccacggtatccgcagccggctgcttcatcacgctgatgatgacggcaggcttgccgttgtacccggcgtcgccccgcttggtgcgcgctgcaaaatcgaccgacgcgacctgcttcagcaggatcggctgctggtcgcggttggcaacgacagtgttagcgagatcttcgatcctcctggtgattccaacgttgcggatcaggtattcgcggccgtgctggtcaacaaagccaccgccgctgttggtgccgaactttgcgaccgcccgctcgatctggtcatggtcgatgccgagcgcctgcattgtcgcgacgtttggcgtcacgcggtactggcggacctcgccgccgatgggtatgacctgggcgacgccgggaatggcaaggagctgcggtctgacgacgaagtcggcgatctcgcgcacgtccatgggcgacgccgtgccatcgctggtcagcgcgatcagcatgatctcgcccatgatcgacgtcaccggccccatctggggattgaccgaagcaggcaattgttcgcggatcagcgccagccgctccgagacgaattgccgggcccggtagacgtcgacaccccagtcgaattcgacgtagacgaccgacagaccgacgcctga

SEQ ID NO: 3870 - DNA, 1707 bp, BradyrhizobiumColbertium
atgttgatcaatcggcgctgcccgaaagggcggcttggtatccttgggctggccggccttggcttggtcgcgagcctgttctttggtttgtcgagcgcccttggccatgagggacacgatcacggcgaagccgacaaaccggcggttgtttcgtcggcctacccacgcgtggccgcgcggtccgagctgtacgaggtcgtcggtatcctgaaagacggcaagctttccgtcttcattgacgatgcgaccacgaacgagccggtttcagatgcggccttgcagatcacgctcggcgagtccgagccggtcaatgccgagaacgtggggaagggggtctactccgccggaattcccagtggtacgccgtccggatcagttgaagtcatcttctcgatcaccgcgagcaagggaaacgatctgctggtggactcgctcgtgccggtgcgtgccgccgttgcccggcccacggaacaaaagcacgagcacggtccgctcttttccagccgaaccgcgatcgccgcctctgtccttgcggctgcgggattcggtctgctctttgcctattggcgacaacgtggccgcagcgtggctgcctccatctgcgccgtgatggcaggagccttcgtcattctcgcggccatcgtgttcggcgagggcccgacgaacgcaacgcgaccaaatccgccggaagctcccgcactgagcgatgccccgcggcgcctgcaagacggcacggtctttgcagccaagccgacgcagcggctgcttgatgtgcggaccgccgcggccgagccgcggacaattcgacccgcggttacgctgatcggccgcgtcatggccgctcccgaccgcagcagcatcgtgcagagcatctacggggggcgcgttgttcccggcagtgacggcatacctcgcatcggacaatctgtccgcaagggcgatctgctcattcagatcgaaccgagtctgccaatcgcggatcggacgacgatcctcgagaaagtcggcgagatcgagcagctgatggcggtgacggaaaacaagctggggcgtctgaggccgctggccgaccgcggcgcggtgccccaagggcaggtcaacgacctcgagagcgagttggagggcctgcgggcgcgccgcgaaaccgtccgaaattcccgcaccgattttgaagagctgcgggcgccgaccgacggcatcatcacgtccgccaaagtcgtgccggggcaagtcatccaaccgcaagacgtcctgtttcagatcgcggacccccgcagcctctgggtcgaggcattggcctatgacgatataggctcgaagcagccggaagccgcaaccgcaatgtccccgagcgggcagcagatcgcactgaccttcgttggaacaagccgaacactgcgccagcatgcagccgtcgttcagtttgcgataccggagccgccgacgggcctcaatatcggccaaccgctcaacgtgatggtccagaccggcactcccgtggcggggctgatcttcccgcgcgaagccgtcgttcggagcggcaatggcgagaccatcgtctggctgcactccgggcccgagcgcttcgagccgaagccggtccgcgtgctgccggtcgacgcggcccgcgtgatcgtggcggccggcctcaacgagggtgaacgcatcgtcgttcgcggtaccgacctcatcaaccagatccggtag

SEQ ID NO: 3871 - DNA, 165 bp, BradyrhizobiumColbertium
gtggcctgggacatgttcggcacctcgatcgcctcgccgcacttcattcacctgcccagctcgttcgaagtgctcggtgccatcgagctgccgcttgcacgcgcgcttgtcggaatgagcccagaggcgctcgttcggccgccaagtaccttcagcatcgcgtag

SEQ ID NO: 3872 - DNA, 978 bp, BradyrhizobiumColbertium
gtgaccgatcggaccatgacggatcgagcccggcgcatcgctttgctcggcgctcccatcgacatgggggcttctcagcgtggcaccttgatggggcccgcggcgctgcgcaccgccggccttgcgacgctgctcgaaagcctggatttcgatgtcgtcgattgtggcgatctgtccgtggctgaacttcgggaccttgccgacaagccgcctcaaaacgccaatcattaccgcgaaatccaacgctggacgcgcgccctgagccgcaggggctatgagatcgcgacaaccggcgcgctgccgatcttcctcggtggcgatcacacgctgtcgatggggtcggtcaatgcgatggcgcgccattggcaggagcgcggacgcgaactcttcgtgctctggctcgatgcccacgccgattacaacacgccggagacgacgatcaccgcaaacatgcacggcatgtcggccgccttcctctgcggcgagcccggcctcgagggcctgctcggcgacgaaccgcgcgcctcgattggtccggacaagctggacctattcggcgcgcgttcgatcgacaagctcgaaaaggagttgatgcgctcgcgtcggatccggatcgtggacatgcggcagatcgacgagtttggcgtcgccgtcttgatccgccgcgtcatcgagcgggtcaaggcgagcaacggtgtgctgcatgtcagcttcgatgtcgattttctcgatccatgcgtagcgccgggcgtcggcacgacagtgccgggcggagccacctatcgcgaggcgcacctcatcatggagctgctgcacgattccggcgtcgtcgggtcggtcgacattgtcgagctgaatcccttcctggatgagcgtggtcggacggcgcgtacggctgtcgagctgatcggtagcctgttcggccaacagattaccgatcggccgaccccgagcaacgcgatcgcgccgggcgagtga

SEQ ID NO: 3873 - DNA, 222 bp, BradyrhizobiumColbertium
atggccgaacgtgccatcgacacggcggcggacgtttcccgcacgatcggtgaagtcgccggaggtctgcacgccgccgtaggtagtgttacctccgccgtcgaggaatcgcggaaacctggcggggcgcttgcgacagtcgcagcgatcacccgcgaggcgccgcttgccagtctgttcgtcgcgttcctcttcggcgtcgcagtcgcgcgccggcgctag

SEQ ID NO: 3874 - DNA, 1131 bp, BradyrhizobiumColbertium
gtgctgcgcgcggtcgctgagcgtctgcggagcgaagtcgacggcaaagcgatcgtcgcccggctcagcggcgacgaattcgccatagccatcgattgcctggaagccggcgaacagatcgcagagtttgctgagcggatcgcgcaggcgtttcaagccccgctttcagcaggcaagcggcagcaccgggtcgggatcagcgtcggcgttgccgtctatccggaaggcgggcagaatgccgacgatcttctgagcaacggccatctggcgctgagccgcgcgaaggcaacgcggcgcggcagccatgtcatcttcgagactgcgatcaggcaggagctcgagaatcggctgacgctggagagcgagctggcgcttgccgcggatcgcggcgagttcgagctgttctaccagccgcaggttcgcctgatcgacggcagcctagtcggggccgaagcgctcatccgctggcgacatccggtgcgcggctatgtttcgcccgcggagttcatgccggtggttaacacctctgcgctgtcggagcggatcgcgaactgggtgatggagaccgcctgccgtcaagcgcgcgcctgggaattgtccggcaacaacgtgcgcgtcgcgatcaacctctcgccctcgcagcttcaatcgggcgatctcgcgcactcagttgcagcactgctcgaaacgaccgggctgacgccgtcgcttctcgaaatcgaagttaccgaggatatcctgcttcatgacgagcgccgtgtgctcgacttgttcaagagaattcaaaacctcggcgtccgcgccctgttcgatgatttcggcaccggttatgcgagcctgagctatctcaagaagttccctctcgacggactcaagatcgaccggtcgttcgtgttcggtcttcttgccaactccgacgatgccgccatcgtcggctcgaccatcggcctcagcaagcaactcggtctcacggtggtggccgaaggtatcgagaacaaggcaacggccgacttcctggtcagcatgggatgcgaagaagggcagggatatttcttcggccgtccgatgccggccgaggcatttgaaaagcaattcctggcggtccagatcgaggccatcagcgcagcctga

SEQ ID NO: 3875 - DNA, 195 bp, BradyrhizobiumColbertium
gtgcccgagcatgttattgatctcttggaagccatccaggccgagcacgagcagtgcgacaccgcaggaccgccgctccgccgcactgatcagatcggtgagggccacatgcagcatgggccggttggcaagaccggtcagcgcgtcgtgttaggccaggtatctgatacgttcagcttcgcgtttgcgaactga

SEQ ID NO: 3876 - DNA, 1446 bp, BradyrhizobiumColbertium
gtgaaacgctatcggccgcatattctggttgtgatcgcgctcgcgatcgtgctgtccacgggatggcatggttcgcttcgcaatgcgctcaccgaccttcggttcgcctggcaatcgcgtgatgccagcggcaagatcgtggtcgtggccatcgacgcgccgtcgatcgatcagatcggggtctggccctggccgcgccggctgcacgcggagctgctgcgcagactcgaggcggcgggagcgcaggacattgccttcgatgtcgatttcagcacgccgtccgattcggcctccgacgaggctttcgcacgcgcgcttcgggaggttgggggctcgacgattcttccgtccttcaagcagccgacgcagaatggtggcccggctcacgtcaaccgcccgctgaagtcgttcagcaaccagtcgtggccggccgtcgtcaatgtcgccgtggaaaccgatgggctcgtgcgccgctatccgttcgacgagaagatcggcgacgctttcatgccctcgatggcggtcgtgctggcgggccaggacgccaatcgccggcggcccttcctgatcgacttcagcattcgcgcggcctccattcccgccgtctcctatgttgacgtgctgcgcggcgatgccgccactctgggcaagctgaaagacaagaaggtcgtcatcggtgccactgcgctcgagcttggcgaccgattcagtgttcccaacggcaagatcatctccggaccggtcctccaggcgctggccgctgaatcgatccttcagaaccggatgctgcgttggacatcaaatatcggcatgatactcggcctgggcgcagtctgcctgctgatggtctactcgtggcgacgcttcgcactcagcagtcgggtcgcaatcctgatcggagccggcgtaaccgtcgagctggccgctgccttcgtgcaggcgagatggccgctcgtcatcgacacatcgctgctccacatcgctgtcatcgtctacctgaccgcaattgcgctggacgaaatcgacttccgtagtctgcttggacgcatcgccgagagccgctttcaccgcatcgcgatgtcgctcggcgacgggctcgtctgcaccgacggggaacaccggataacggtctggaatcccggcgcgagcgcgatcttcggctacatgccggccgagatcatcggccgccggttcgacacgctgtgcgccgtaccaacggacggcgacgcaagaccttcaatgctcgatgatgcgcgccaggcgcttctggtgccgggcggggcggtcgtcgtcgagttcgagggccggcgtaagaacggtgaaacctttcccgtcgaagcgagcttctcggggtggcagggaacggacggctttcaatacggagtgatcctacgcgacatttcagttcgcaaacgcgaagctgaacgtatcagatacctggcctaa

SEQ ID NO: 3877 - DNA, 1206 bp, BradyrhizobiumColbertium
atgcggtgcgccttcgcggcggcgctgatcctcgcgacggtttccggtgcgtccgccgcggacggcggagcttggtcggtgagcaaggcctcgggcgaggtctgggtcgccaccagcggcgcgcagcaggtgtcgctgaagcaggaggaggcgctgaagcctggcgataccattcgcaccgggcgtaacgggcgcgtgctgctggtccgcggcgaggaaacgatgctgatttctcccaactcggtggttggccttccagccgagcagaaggagggtctttccaccactatcatccagcaggcaggttcgatcctgctcgaggtccaaaagcgcaacgtcaagcatttcgaggtcgagacgccctacctcgcagccgtggtcaagggcacgaggttcagcgtcaccgtggcggcgggcagcaccaaggtcggcgtgctccgcggccaagtccaagtctccgacttcaggacgggacagattgcccaggtcatgccggggcaggctgccaccgtcttcgagcacggcaagcctggtctcagtctgagcggcgcaggcacgttcagtccgatcgagcaaggcaagccgcgcgccccgaccatcgagcgggtgcccgtgccgaaatcgggcctgtcggcaccgcgcaatgccgcgaacggccatgcaatccacgctctcggtccagtcgacaagagcacgaaggcggctggtgcacccaaggcgtcgggacaggcgtccgaggggcatgcccccaagccgggcgtggtgcgtatttcgaactcgctcggcgaggtcaagctgaacgtccacaaggtcacgcgcggcctcgctcatggcggcggtgtgcccggacaggtgcgcaacgcgaatgccagcaccgacaatccgacggtgtggagcgacggcaagaccaatccggccgcatccaacagcgcggcagccagcggtgtcggcaacacaaatgcgacgatcgccgcgacgacagccggtgcatcgagcgatgctccgcgggccaacaacggaaacggcggtggcaacggcaacaacggcaacaacggcaacaacggtaacggcgggaataacggcaacagcggcaacggcggcaacagcggccatggcaacaatggggccacgggcaacggcaggggcaatagcggcaacggcggcaatagcggccatggcaacgcctatggtcacaaccgacgctga

SEQ ID NO: 3878 - DNA, 1722 bp, BradyrhizobiumColbertium
gtgacatggcacctgcttagcgttctcgggctgttagcaccaattttcgcaggggccctgcaagcatccgcacaacaggcgaaccagccgggcttcgatccgcgccagcctgagaagtactttgataaccagaccgagcaggaatccctcggccggccaccggtccggttgccgagcgtcggacagcccactccgggcggggatgccaagccgcaatttgtgctgcgcggcatcgacgtcattggcgctcacgccatctcccgcgatcgcatcgccgcggtctatcagacctaccttgccaagaaggtctctcaggccaatctcgctgcgattgccggcgcgatcagcgaactgtaccgcgaggccggattccacttaagtcgcgcaatcgtgccgccgcaggatatcgccgacggccgggtccggatccaaattatcgaaggcgccattgtgcaagccgagctgaaaggcgatggcgccgaacagttcggcgtcaggccgatgctcgggccgattctggccgaacaaccctcgcgccttgcaacgctcgaacgccaactgttcctgatcaacggcagaccgggcgtccggatcaccgataccgcgctggaggagatcggcggcacgacgggccgcttccgcctgatcgtctatttgaagacctggcacgtcttctcctcctttggcctcgacaatctcggatcatcgtcggtcggcccctggcaaacctacgcgaccggcgcgttcaattcctacctcacgcccggcgacaccctttcggtcaacctgtcgaccattgccaacgatccgcgcgagctcggcttcgcgcggatgtcctacgacgcgccggtcggtgtcgatggtttgcgcctcggcgcatcggtgctgtacagcgcggtgaggcccggcgacgcccgacgcctcgacagcgacatcaccacgaccgaagcattcgagctgcgtgccagcaccgttccgctgcagtcgcaatcgtccacgctcacgctgacagccgcgatgaccttcagcaatgtgtccgagcatgacctttacgggccgtggtacaacgaccacatcaggacggcgagcctgaccgccgactataggcttcaagacggcttcggcggcaccaatttcgcgacggcgagcttccggcaaggcctggacatctttggcgcatcacatttcgacgacgatctgctatcgcgcgctggcgcctcgtcgaacttctcggtgctgagcttgtggttcacgcgccaccagacactcaacgatgcctggtcgatcaaggtctcggctgcgagccaaaccgcgtcacggccattattcacttcgcagcagttctatcttggcggcgcggctttcggccgaggctatggcgcagccgagatcagcggcgacaacggtcttgccggcacgatcgagctgcgcttcgatcagaagctcaatttccgctactggaccggctatcagctctatgccttcggcgacgcgggcgccgtctggaaccacggctaccgcctgagcgatggcctgtcgctcacatctgccggagccggtgtgcgcttcttcctccctgacgatctccatgccgacttaggcgtggctgtccccttgagctaccgggcacctgacaacgagcgtcgcagcccacgcttccttttcacgctgtcgagcgcattccggctctgccccgaacgcggcaaggccggctgcctttag

SEQ ID NO: 3879 - DNA, 162 bp, BradyrhizobiumColbertium
gtgtcgcactataccgcaagccttgatacgaagagccttggcctggccgcggcaagagtgcccgcattcgtacggcatctctatcgttcgacccgcaagctgttccggtcggtcatcgcccgcattgacctctcgcagtttccaggatcatgctgcggttga

SEQ ID NO: 3880 - DNA, 177 bp, BradyrhizobiumColbertium
atgacagctcgcgcaccagcgcctggcaaggtcggcgccgtgatcggcgtcagcggccagggcggacgtaccgacgccagagactacgccaatcaggaggcaaatccttcttacgtgccgggacatgggcaatctttctacgttcgctcgcgtctgccgcgctcaaccgcagcatga

SEQ ID NO: 3881 - DNA, 186 bp, BradyrhizobiumColbertium
gtggcgaacgggcagacccaggcgagcgccgatgttccctcctttccgtccgttgcgcgcaggcaggacttcagtccggaaaggctcgccttcttcctgctcgatccgcacccgaagatgccgaactttcccttgagccgagccgaagccgcggatattgcggcctacatcgcatcgctgcgatag

SEQ ID NO: 3882 - DNA, 342 bp, BradyrhizobiumColbertium
atgatcgaaccgaaactcgaagttccggccgagctgcgcgacttggcagagaagacgatcgaccaggcggaaaaggccttcggcatgttttttgaagccgccagcaaatcaatgtcatccgttccgggcgcggggacggaggtatcgaagcaggcgctcgcttttaccgagcagaacatgaagtcggcctttgagcatgcgcgcaagcttgtacatgccaccgatttgcaggaagcgatgcgtatccagtccgatttcctgcgcagtcagttcacgagcgcgggagatcacatgcgccaaatgacgggcagtctcatgcaaccaggcaaggacaagtcttga

SEQ ID NO: 3883 - DNA, 186 bp, BradyrhizobiumColbertium
atgaaagacctcaatttcgccgccgagctgcatctcaagctcggcgtgcctgcaagcggcaccgtcgagagcctgcgcctgctccgcgcgtttctgaagctcgcgcctcgacagcgtttcgaagtgatcaagctggtcgaagatctggccaccgaggaagctcttcctgagcaccccttgtcctaa

SEQ ID NO: 3884 - DNA, 357 bp, BradyrhizobiumColbertium
atgctttctcgctgcgatctcatcaagggcgctgcagtcgcgcttctcaccctctcggtacaaggcgcatgggcccaggagacaaagatgaacctcttcaagatcgttaccgtcaaggacgaaattgtcgtcggattgtcggcggaggagcttcaggcgcttggcggcaacgatgcgagcgccgttgcacgcgcgctggcacagaaaggcgacctcacggtttggcaatacaatgtgcgtcgaggcccgaacggcgaactgcagcaggcgccgaccgccaagatcggtcttttggccaacgcgtcgcttcgcgtcgagccctacaccacgccgtacaggatactgcctcatccgtaa

SEQ ID NO: 3885 - DNA, 576 bp, BradyrhizobiumColbertium
gtggcacgtgcccgacgcaacaagtcttacaaactggcgcagatctacgaccggcggtcgagggaggtgccgttcaatgccgagctggcggaggtggaggtcgacaatccgctcgcgctcgattcaggcgagaagatcctggctatgcggtcgatccgcagcgatccgctcggccggctgcatgcgcaccaccagatcgacgaagcgcaataccgcggcgggcgcgcctttcagaacgattgggagcgggctgagcgggggcctcaggcggtggacacgacccgcgaatatgtcgatggcaccagcacgcgcgagccggtcaccgagagccagcgaaaggcggtgctgcggctgaaccgggtcgagcgcgagctcgggactgacggcgccgcgctggtgcacgatgtgctggtgctgggtctgaccatggatcagatcgggcagcgtcgtgccgtccgtacgcagcgctggaacgactattttgggcgccgctttcgcgaatgcctggatcggctggcgctgatctacggctttgcgacggaagctgggacgctgcgtccggaccggcggagatga

SEQ ID NO: 3886 - DNA, 534 bp, BradyrhizobiumColbertium
atggaaccgggccattggccgtcggagcactccgacgcgcttcgcgactattttctcaaaggcatgtcttatgcggagatcgggagacagctaaacgcacgattcggaacggcttacacgcgcagcgcggtggtcggccgcgccaagcggctcgggctcgtcctgccggaatggatgacaagcccgtcgatcgcgccatcgtggccgggcgaggccagcccgcttgcgccacggcgcgtagccttgccgaacctgaatctgccgccgaaatcggcaatgaagcccgcccaacgggtgaagctgcgctgtgtcggcgtccagccgcgcctgataccgctcgtcgaactcgagccggccgactgccactacccctatggcggcgacaaggacggcgaggagattgccttctgtggccacccccgccagccggcgtccagctattgcgcaccgcatgctcgcttgacgcgtcgctctggcacgccgtccgcccgtgtcgccgggcgggtcgtgctgaggctggtcggcgtcccttga

SEQ ID NO: 3887 - DNA, 594 bp, BradyrhizobiumColbertium
atgatcgagcggggcctggagaaaacgggcaagagcaagggcggcctggcggcggccatgggcgtgcgccccggggcggtctcggagattctcggcggcgagcgcttggtaaaagcctcggagatcattccgatcatggaatatctcgagctcaatcttgcgccgatcatgggccgggtcggagccggcgcggtgatcgagccggactatgaacaggtccccccggaaggtctcggcgacgtcacgttgcccttcccgatcatggaagagacgatcgcattcgagatcgtgggcgattcgatgctgccaaaatacgaaagcggcgacgtgatcgtggtctacaaggatcagcgccatccgttgtcgagcttctacggtgaagaggcggtggttcggctcaagaccggcgagcgctatctgaaaaccatcgagcggggaaaatcaccctctgtcgtcaacctcacgagcttcaatgccaagccgatcgtcggggtcaagctcgactgggtcggggagatctgcctgtccatgcccaaggggcaactcgaacgactgcgcgcgaaatcggcgcggccccgcaagaagggcaagtga

SEQ ID NO: 3888 - DNA, 351 bp, BradyrhizobiumColbertium
atgaccattgacaaaattccggtttccgacaatactctgccgcgctacgaccacggggcgcggcaggatcgtttcatgcaatacttcgtcgtgatgatcgactatgggcggcggggccgcgaggcggtcgtcgatccggagatcacgaggcgcgaagtcatctcgcgcatcgcctcgggcgaataccagaacatctcgttcatccacgagatcctggagaatgcggtcgaggacgtgaccgaggccatgctaactgaggccgccctgccccagatcccgcctgaggatatagacctccaggcaatcgaccttgatcacacccgcgatctgcgcaagcacgaacggtcatga

SEQ ID NO: 3889 - DNA, 975 bp, BradyrhizobiumColbertium
atgacgcatgccattcgatttcacaagaccggtgggccggaagttctggtctgggaggaggtcagcgtcggcaagcctggacccggcgaagcccgcatccgccacaccgctgtcggtctcaatttcgtcgatatctataaccgttcgggcttgtatccggcgcaactgccgagcgggctcggtagcgaggcagccggtatcgtggaggaggtcggcccggatgttaccgatctgaagccgggcgaccgtgtcgcttatggcgcctcgccgctcggagcttactccgaggcgcggctgatccccgccgaccggctgttgaaattgcctgacggcgtcgacgacaagaccgcggcggcgatgatgctcaaggggctgacgacgcaatatctgatccggcagacctatagggtgaaggcgggcgataccattctgcttcatgccgcggccggtggtgttggtctgatcctgagccaatgggccaagcatctcggcgcgaccgtgatcggcacggtcagcagcgatgagaaggccaagctggccaaggcgcatggttgcgaccatgtgatcatctatacacgagaggatttcgttaagcgggttgacgaaatcaccggcggcaagaaggtgccggtggtttacgattccgtgggcaaggacacgttcctgaaatcgctggattgcctcgcgcccctcggcgtcgcggcgctgttcggtcaatcgtccggcgtggtcgagccgctcaatcttggcctgctggcgcagaagggctcgctttacgtcacgcgtccgacgctgttcacctacgccgccaaacgcgaaagcctggtcgcgatggcgaacgaactgttcgatgtcgtcaagtccggtgcggtcaagatcgaggtgcaccagacctatccgttgaaggaggccgcaaaggcgcacgccgacctggcggcacgcaaaaccacgggatcgacagttctgttggtgtaa

SEQ ID NO: 3890 - DNA, 201 bp, BradyrhizobiumColbertium
atgccagcttacgttcagcatcatcaggatgtcgaggtcccgcccgtgaattgccccgcctgcatggggttcctgccgatgtatgtgcgcgaggtcgagccgcattggggtctcgccagaatcgacttcgtttatgaatgcgccgattgcggcgccgaggtcaggcagacaatccgcaaaccggagcagctgcggcactga

SEQ ID NO: 3891 - DNA, 948 bp, BradyrhizobiumColbertium
gtggctgatcagaagccctcgacgtcgatcgaggcagtggaaagcggcctcgccgcgcaaggttacatcgcgagccggcagatcgcgacggccgtctatttgtcgcagcagatcgagaagccgatcctggtcgaggggcctgccggcgtcggcaagaccgagctcgccaaggcgatcgctgcctggcgcggcatgaagatgatccgcctgcaatgctacgagggcctcgacgaggccaaggcgctctatgagtggaagtacgccaagcagcttctctatacgcagatcctgaaggacaagctcggtgaggttctcggcggcgcgcagacgttgcacgccgcgctcgaccagctgcacgatttcggcgacgtgttcttctccaaggagtttgtcgagccacgtcccctgctccaggcgctggagcagccgggcggctgcgtgctgctgatcgacgagatcgacaagtcagacgctgagttcgaatcgctgctgctggagatcctgtccgacttccaggtcaccattcccgagcttggaaccgtttcggccatcacgccgccaaccgtgatcctcacctccaacagcgagcgcgacctcggggacgcgttgaagcgccgctgcctgcatctgcatataggctttcccgagcagcggctggaggagcggatcgtcgaaagccgcgtgcccggcatctcgcaggcgctgcgacggcagatggtcggcttcatccacgagatccgctcgctcgatctgaagaagctgccctcggtcagcgagaccatcgactgggcgcgcgtgctggtgctgctccaggcttccgaactcgattccgagatcgtcaaggacacgctcaacgtgctcctgaaatacgaagccgacatcgaggctgcaacgccgcaagtgacgaccttcattgccaaggcggcacggtccaacgtcttcggttga

SEQ ID NO: 3892 - DNA, 1377 bp, BradyrhizobiumColbertium
atgcgcgagaacctccatcgtttctttcgggcggcacggggcgccggcgttcacgtctcgcctgcggaaagcatcgatgcgatgcgagcagtcgcgcaggtcggcctctccgaccgcgcaatcctgcgcgacgcgctgctcctgacactcgccaagtcacaggacgagaagctcgctctcggcgattgctttgatctcttcttcagtcagccggagccgaggcaggaccagcccgaggcggacaacgacgacacttcgcccgatgcggatcagtcgcccccctccgacgctcccggcgatgctggcgaaggtcagccttcccagggtttgggcccgctcgcccagatgctgctttcgcaggaccgcaatgcgatcgcagccgccatcgccagcgcctccggtgcggcctccctgtccgacatccgctattccactcagcgcggcatcttctcaagccgcatactcgacgcgatgggccttcagcgcctgcgcgacgacctcgacgagctgaccgcgaccaatccggccctggccgagcgcctgcgcgccgcactcgacggcttgcgcgaagccgtgcgcgatacggtctcccaggggcttgcactctacgcccgcgaggaggccgagaacctccgcaatgagatcctgcgcaacgcgccgcttgctcgcatcgagcggcgccaggtcgccgagatgcgcgcactcattcgccagatcgcgcgccggctgcgagagcgctactcgaagccacgcaagcgccagcgccgcggccatctcgacgtgcgccgcacgctccgccgcaatgcggcctggggcggcattcccttcctcacggcatggaagcgcaagcatcgtgaccgaccgaagatcgtcgcgctatgcgacgtctccgggtcggtcgctcaagtctcagacttcttcctgctgctgatccactcattgcacgaggtggtcgacgacgtccgctccttcgccttctcctcccatctgatcgaggtcagtgaaatcctggaatcgaagtcgccggaggaggcgatgtccgagatcatgtccaaggtcggttttggctcgtcagattacggctcttcgctggtcgatttcgagaaggagttcatgagcacgctgacgcctcggaccaccgtgatcgtgctcggcgacgcccgcagcaacaatctcgacccgcgtgccgacattttgcgccgcatctccgagcgctccaagcggctggtctggctcaatcccgaggggcggctcgcctggggctttggcgattccgagatgccgcgctacgcgaccttttgcagcgtcgtgcgccaatgcgccaccgcacagcagctcgagcgcgccgtgtccgatatcgtagcgacgtatcagtaa

SEQ ID NO: 3893 - DNA, 183 bp, BradyrhizobiumColbertium
atgaacaagctggttgaaattcgcagtcaggaatttctatgccgtgagcgcgcggcgctcgactccgaacgtcgtgtattctggctcgcacaggcccaggaatgggagcagcgtgcgctcgatgaaatcgcctatcacttccgggagtgcaatctcgcgcaggccgagcggaacgcggcctga

SEQ ID NO: 3894 - DNA, 222 bp, BradyrhizobiumColbertium
atgagcaacgacgtcgatttcgatcttaccccggaccaatgggacgctctgcgcacgctccgcaacgccacgtcgagtggtcgcctctcgaaggcctacctgatcgaaagcctcgtgaagcttggtctcgtggacgtcaatgacggcgtaccgtcgatgacgccgacgggacgcaaggtgctcgtgcgcgggtcatgccggctgctggatctcgcggcatag

SEQ ID NO: 3895 - DNA, 1203 bp, BradyrhizobiumColbertium
atggagagtgccttttcgctgaccgaggctttcctcgtcacgggcgcaccacacgcctccgcctattatccccgcgacttcgcgtggttctatcctgatgtcctcgatcccgaaaccatcttggatgcgcaggatgctgtccggcgcgctcggctgctcgacaagagcgtccgcttgttgctggacgcggttcgtgccggcgtcgtcacgacgaccatcgtccccgcgggacgcggccggtacctcggggtgaattatttctcgcgcccgtccgacacgctgctcggcattctcgccggcctccagcagatgatctctgccgaggagaggaaaccgtcctatctcgcgatgtcgcaatgcgcgcatgccggccgcttgttgctggcggagtatggcgccgacctgaagcgagccattctgcagctcgcaagcgagctcgaaccgttcgatgatggcggaaccaggtctttgctttgcgatgtcaacgcaccccgttccgctgcgacagacacccgcgccgagcgcaagcgcttcgtaaccaatgcttctgtctacacgaccttcgtgtggggcgtgcagctcgggatcgtcggtgagaacgagctgaagcggctgctcgggcgagaccttgtgcagtacaagagggacctgctccgcctgtttggcaaggacggctacatcaggcattccctggaagaccggacgacctcgccggcgtcatcagtcgcactggatttcgtcggtgtgcatcgcggattctggaccatgagcgatgcgagcgagcgggcgctgttcgctgccacggcggatctgatcatcgcggaaccgcggtttcgtatccccagcacgtttcatttcctggtgtcggccgacaatcccaggaacaagatgatccacaagattgccgcacctgcctatcaggggcgctcctcctggccgacgttcaacgtcgagttcgcagatcgcatgctggattatgacgagttcacggggcgcgatacctaccgcgcctgcgcacaaggaatattgaaggacattcggactgcgaccgaggtccacggcggctatcaggagctgatttccgaacaggggctgaagtaccgcacctgggcctataagggcgccgtggcccattcctggttcccgcgctttctgtcggtctggaggcgggcgtacgggacgccgctcctccggtgggattga

SEQ ID NO: 3896 - DNA, 1305 bp, BradyrhizobiumColbertium
atgggggccgtcagtgccgttcaaagtgcatcgctcggcgaggtgatcgttcgccggatcaacgatctggccgcaatctcggaggagggcggcagcctcacccgcatctacctcaccacggagctgcgcgaggcagcggacctcatcctgagctggatgcgcgaagcaggcatgagcgcgcgcctcgatgggatcggcaacgtctgtggccgctacgaaggcgaccagccgggtgcgccatgcctgatgctcggctcgcactacgataccgtgcgcgatgcgggcaaatgggatgggccgctgggtgtgatcacggcgatctcttgcgtcgccgacctcaaccgccgcggcaagcgcctgccgtttgcgatcgaggtggtcgggtttgccgacgaggagggggtgcgtttcgcctcgaccttgctcggaagccgtgcggtggccgggaccttcgacgagaatgtgctgaacacgcgcgaccgcgatggcgtttcaatgcgcgatgcgctcgtgcagttcgggctcgatcccgaccgtatcggcgcagcggcacggacgcggggcgaactgctggcctatatcgagttgcacatcgagcaggggccggtgctggaagcacagaacctgcccgttggcgtggttacagcgattgccggcgccacgcgccttgccgcgcggctgaccgggatggccggtcacgccggcaccgtcccaatgccgctgcgccgagacgcgctcgccggtgcggccgaatgcatcggcgcgatcgagcagttttgccgcaccgacgagggcggccttgtcggcaccgtcggccacatccaggcgaagcccggtgcgaccaacgtcattccgggccaggtgtcgttcaccatagacatgcgggcgccgaccgacgggcatcgtaagcgcgcggtcaccgaaatcgtccgccagatcgaggctatcgccaagcgccggcggctggcgcttcaactcgatgtcactcacgagaaccgcactgcaccgtgcgcgccttggctccagcagcagatcgcgcaggcgatcgaggccgaaggcttttccgtcttcgagctgccgagcggagcagggcacgacggcatggcgatgatcgacattgccgatgtcggcatgatcttcgtccgctgccgcggtggcatcagccatcacccggatgaacatgtcgaactcgccgatgccgacgcgggcgcgcgggtgctgttgcgggtgatcgagaatttcaggccgcaggaaggtcgacggcaggctgaagaagccccagccgaagcagccaggtcatcgtga

SEQ ID NO: 3897 - DNA, 888 bp, BradyrhizobiumColbertium
atgtcacagatctcgctcgccgatctcaatggcgccagcagggacgacttcgttgcggcgcttgccggcgtcgtcgaatgttcgccgtggctcgccgggcagcttgcggcaaagcggcccttcacaggcatcaatcaactccacgccgcgctgattgcggcgatccagagcgccgagcccgacgttcagctgtcgttgatccgcgcccatcccgatctcgcgagcaagacgcaacctgccgccggccttacggcggaaacggccgacgagcagaacagagccgggctcgaccggctgtcggagcccgaatacgcggcgttcgggcgcgccaacaacgcttaccgcgtgaagttcggctttccctatatcgtctgcttgcgccgtcacaccagggattcggtgctgcgcgactgcgagacgcggctgctcaatatcgcgaagaccgagacgcgacgtgccatcgaggaaatcggccgcatcgcggcgctgcgcctggatcagctcgtcattgcggacgacaagctgaaggtgcacggccggctctcgacgcttgtgctggacaatcagattggcaagccggcaccgggcatcccggttgagctcgtcgagctcgcgaccctcggcgagaaccgcgtcatcgcgcgcgcggtgacaaatgccgacggccgcaccgaccagccgctgatcggcggccgtccgctgccgatcggccgttacgaactccgcttcagcgtcgccagatattacgccgagcgaaacgtgccacagtccgatccgccgttcctcgatgagatcccgctgcgctttgccgtcagcgagccggaaggccagtatcacgtgccgctgctggtcacgccgtggagctattcgacctatcgcggcagctag

SEQ ID NO: 3898 - DNA, 936 bp, BradyrhizobiumColbertium
gtgactgagccccgctacccgcgcgatctccgcggttatggccgcaacccgccgcatccgcagtggcccggcaacgcgcgggtcgcagtgcagttcgtcgtcaatttcgaggagggcggcgagaacaacattttgcatggggaccgagcctcggaagcctttttgtccgacgtcctcggcgcgcagccctggccgggccagcgccacgccaatatcgaatcgatgttcgaatatggctcgcgcgccggcttctggcggttgtggcggatgttcaacgagcggaagtggccgacgaccgtgttcggcgtcgccaccgcgctcaagcgcaatcccgagatcgtcgcagcgatgaaggaatcgggctgggacatcgcgagccacagcctgaaatggatcgagcacaaggacatgaccgaggcgcaggagcgcgccgagattacggaggcgatccgcgtccacaccgaggcaacaggatcgcggccgctcggctggtacacggggcgctcctcgatcaacaccaaccggctgctgatggaggaaggcggcttcctctatctctgcgactcctatgccgatgatctgccctattgggtaaggggaccgggcggcaagcagctcttcattccctacacgttagatgccaacgacatgcgcttcatcaacccgcaagggtttgccgaaggcgaacagttcttcacctacctgaaggacgcattcgacgtgctttatgcggaagggcagaccgcaccgaagatgatgtcggtcggcctgcactgccgcctcgccggccggcccggccgcgcggcgggcctgatccgcttcctggactatatcggcaagcacgagcgcgtctgggtgccgacccgattgcagatcgcgcagcactggcacgacaagcacgcccatctggccgccgacgcattcgagatcgggtga

SEQ ID NO: 3899 - DNA, 447 bp, BradyrhizobiumColbertium
gtggggccgctggccctgatccagagagatgagatgagcaaactcgttatccgtgccggcgacttcaccttcgatgcccgcttcgaggaggagctggcgcccaaaaccgtcgccgctttccgcaacgcgctgccgttcgaaagccacatcatccatgtgcgctggagcggcgagggcgtatggatgccgctcggcgacctggatttcggggtcggctatgagaaccacaccagctaccccgcgcccggtcagatcatcctctaccccggcggtatcagcgagaccgagatcctgctcgcctatggcggcgttcatttcgcgagcaagatgggccagctcgcgggtaaccacttcatcaccctgacctccgggctcgagaatctggcgacgctgggcaagagcgtgctgtggaagggcgcgcagccgattcgcttcgaggaagtctga

SEQ ID NO: 3900 - DNA, 198 bp, BradyrhizobiumColbertium
gtggccgaacagatcattgacttctttgaaccgatcaaggtcgatacaaagtactgcaatcctctcaccctttgcgcgagcggcatcaatttctcgatccacttgggcattgaagtgattacggttaggcagcgacgtaagggaatcatgatgcgcgagatatcgaatgtggcgctcggcttctctgcgcgtacgtag

SEQ ID NO: 3901 - DNA, 309 bp, BradyrhizobiumColbertium
atgttcgacgtgatctcgattttggccaggatcgacgcatccggaaagcagatcgacagctcgcaccccacgagccgttcggccgacaatccggtcatgcgagcgaagctgtcgttgacggtcgcgacgatatcgccgtcgcaaacgacaagtccctcgatcgctgcattggcgaggctacggcatcctgtctgcctcaatctctatgcgtcgacggtcgcgcaggtcgagcgcaatgccggccagcgcgagaatgacaacaacgaagctggcgaacccgacggctccggccagccaataggctggtag

SEQ ID NO: 3902 - DNA, 123 bp, BradyrhizobiumColbertium
atggcgatgaaatgcgtcgcccagattccgaagccggtggatatggcagacacagcaagccagacgctacgcagatctccggttgatccacgcgaatggcggagcaaggttatcgcggcatag

SEQ ID NO: 3903 - DNA, 312 bp, BradyrhizobiumColbertium
ttgagtcccggcgaagggctgctcgtcgcctggaattcctatcatgatcatatcggcaagatcgccaagcggatcttccgcgaaacgctcgtggtcgccaccacgatcctcgaccgctgttgccaccacagccacgtgctgacgatccgcggcgacagctaccggctcggcgctaagcctagagcggcctcatcaagccgacgaccgccggtgttggctctccagtcggctccgcctccctccggcccgtcactagcggaaacaaccttcaatcgagatcataagccagatggcgggggcagttcttcatga

SEQ ID NO: 3904 - DNA, 699 bp, BradyrhizobiumColbertium
atggggcggcgcgcgcgaacgaaagagtatctcgacctcgaattggcggacctgccaccggaactgcgctggcgcgaatggatggggcgggtcgaggcggtgatttttgcctcgccagagccggtcgcgcgcgaggtgctggcgcgagtcatcggccgcgattgcaacctcgagctcatcatcgacgacatccgccgagagctctgcgatcggccctatgagctcgtctccgtcgctggcggctggcagcaccgcacccgaaagaatttcggcgacgcgatccggacggcgatcggcagcagcgaggataagtccctgtcgcaggccgaaaacctgatcctcgcctgcatcgcctattatcagccgatcacccgcagcgagctgtcgcaattcttcggcaaggaggtcagccgcgatactatcgcgcgcctacgcggcttagagttcattgctgctgggccgcgtagcccgcaaccgggtgcgccctatacctacgtaacgaccaaggcattcctgtcgcacttcggcctggaaaccctgcgcgatcttccggacatggaaatgctcgaggaggctggcctcctcagcaaggataagctgctggcgggagagcttcccgatccgatcggggaggtcaacgaagacgatctcgatgacgatggagcggtgggcccgattcctaaggatagagagctttga

SEQ ID NO: 3905 - DNA, 219 bp, BradyrhizobiumColbertium
gtgcgccgcgccgctcgcttgttggcggccgcgccaaaactgcgcggcaaggatgccgacatgatggtggcgctcctgttgatggaagacgctcagcccgccggcgccggcaagatcgcgagcgatcgcagcgcgcgccggctgttcgagcggctcgtggcgctcggcgccgtgcgcgagctgaccggccgaccgaccttccgcttatacgggttgtga

SEQ ID NO: 3906 - DNA, 807 bp, BradyrhizobiumColbertium
atgccgacacgcttctcgcggacgagtagcgcattcgcgctcgctatcgccattgcgacgccatcgggcgattcggcattcgccggctcttccgtcggaggcgtcggtggcgcaacggagttcacccagcttctcaacaacggccagttgatccagctcgctggtcaatccgcgcaacagatcaacaatcagatcacgcagattacgcagctagcccaacagcttgagaaccaactgaagatctataccaacatgttgcagaacacggcgcagttgccgtcgcatgtctgggggcaggtcgagaacgatctcaagcagttgcagaatatcgtcaaccagggccaggccatgtcgttctcgatgggtaacatcgacgacgtgctcaagcagcgcttccaaagctattcgcagttcaagaccaatctcccgaacggttcgagtttcgcgtcgacctatcagacttggtcgacgacgaaccgcgacaccatctctggcaccctgcaggccgcgggtctcacctcgcaacagtttgcgacggaaaactccacgatgtcgcaactcaagaccgcttcggagagtgcagacggccagatgaaggcgctgcaggttggtcatgagatcgcggcacaggaggtcgcgcagattcagaagctgcgggggttgatcgcgcagcaaacgacgatgatggcgacctggtatcaatcctcgcaagcgagcaaagaccttgcgcaagcccgtcgcgaacagtttttcaacacgactccaccggcaacatccggcggtcagaccatggagccgcggtggtga

SEQ ID NO: 3907 - DNA, 357 bp, BradyrhizobiumColbertium
gtgacgccagacgccgtcgtgcagaagaaatacattgatcgaacctacgcgttgttgcgtacctcagatcccgccacgcagaagatcaacgattggtttcgcagcaactcgccgttcgagacggcgaaaacaacgacgatcgccatcgaggtgaacaacatcgtcgcgctgtcgaaccaatcgtatcagatcgactggaccgaattcgagcgcgatcggaaggggaaggaaaccggcgagcaccgttttcgcggcatcgccacagtgacgctcactccgccccaggacgagcagaccatcaggctcaatccgatcggcctttatctgcgcgatttggactggacggcgcaactttaa

SEQ ID NO: 3908 - DNA, 621 bp, BradyrhizobiumColbertium
gtgtgttcaccactcgaggtctgcgatatcgaactccaggctggcgaggtcgtgcgcgacgttttggttggcgataccgttcgctggaaggtcgagcctgccacctcaggggcggtcggaggccaggccattcatctgatcgtcaagccgtcagaaccagcgctcgtcacctcgatggtggtgacgacttcgcgcaggacctatcacatccagctcaaatcttcgcctactcaatacatggcgcgcgttggcttcgaatacccggaagaggtcgggagcaagctggcagatatcaacgcacgccttggctcggaccggaactcaggctcaggcgtcccggccgagcaattgaattttggttacagcataagcggcagcgcctcctggcgcccgacgcgagtctatagcgatggagtcaagacatacatccagttcccatcgtctctcgctggtcaggacgcgccagtcctcttcgtcgtgtctggaggccaaaaccgcatcgtcaattataggctcaaggacgacatgatggtggtcgactatcagatcgagaccgccatcctggtctcaggcgttggcttttggaatcaggacaaggtgacgatccggaggggaagctga

SEQ ID NO: 3909 - DNA, 447 bp, BradyrhizobiumColbertium
atgggcttctcgatcaatcgcattattttctcgtgcctgcttggcttgtcgctggccggatgcgcatcgattgggggtgggggcgtggtcgcgagttcagcaccccctgatttgtcaggcgcagcggcggccgcgattgccggcgacttggttacaaagttcgccgagcaggtcaaacctagctctggcacgatcatcctaaagcccgacggaacgccattcggccaggcgcttgagacgtcgttgaagagttggggttacgcggtagcaaccgaccaaaaaacgggtgctgagaaggcgatcccgctcgcgtacgtgattcagacgtatgaaggtcaagtcctcgcacggttgtcgaccgcgagcgtcgatctcggccgcacctacacgacaacggccgctggcgcatcgccagcaagtccactttcagtgatgcaacgcagttag

SEQ ID NO: 3910 - DNA, 1305 bp, BradyrhizobiumColbertium
atggcgcaatccctgaagcttggaagcggtcctgcgggagaggagggcacaaggatccgccgcctcaaccgactgcctatcatcgtcgccatcgcgctggtgatcgtattcttcgcggttatcttctacggtttaacttcgcggggactatatttccgccgcgacgcaggcattgacactgcgtcggcgaacccagcttctaactacgccgatcaactgaagaagggcatttccaacggcattatcggtgaccagcgggacgcgcagacgtttcagcccgagcctcaacaggtggagaaggcggcgaccaatccctttgccggtcgacagcaaacagacgctcgctcgggcgcgcacctcgagccggaggagctttggcgagcgcgtctcgaccgcgaggcgcatgaacaatatctacgcgaacgacaacgtcagcgcatggcgcgggtgcaggcgagcgatgccgcctacgactctccgctctccgtcagtcttggcaaactgcaatcagcgggtgcgacgacaaatgatgctgttgcgacgtcgaagagcgcctcccaggttgggcttggaggtggtacgcaggacctttatgcgaccgccttgcgcgcaggcctcggcttgcagaatatcgatccgaacggtcagagagcgaaggaggacttcttcaacgcggacctgaaaaagatcggctaccttcccaataaggtcgtgtcgccgacatcagcttacgagttgaaacgtggatcggttgttccggcgacactgattaccggcatcaactccgatctccccggccgcatcactgcgcaggtaagccagaacgtttacgacagtgcgacgggccatcttcttctgatcccgcagggtgcgaagctgttagggcggtatgactccaaggtttcgttcggccagagtcgcgtgctcgtggtctggaccgacatcatcttcccgaacggatcgacccttcagatcggcaccatggcgggcaccgacgccgaaggctatggcggcttcacagatcaagtagacaatcattatttccaggtgtttggctcagcgatcatgatagccgcgattggtgctggcatcgacatggcgatgcctgccagttcaccgtacggctatcggcaaactccgacagatgcggcacgaaacagctttgtcgagtcctttggacgcgtcgccgagcagacgatcagcaagaacctgaacgtccagccgaccttggaaattcggccgggttacgtgttcaacgtcctggtcgaccaagacatggtgtttccgggcgcctaccgcggctga

SEQ ID NO: 3911 - DNA, 948 bp, BradyrhizobiumColbertium
atgacgcgcgccttcaccgcggagggcccggcttacacacaattgctggcagggctgctcgtgctcgcactgaccattttcggttcggcgatatggctcgcgcgcgtgctgttctcatggtcgcggaagattgcggttctggaggaagcgctgggcaagagcgaaaacagctcggtcgaccttccaaggcttccgcgtaccggcgagcgggagctcgatcggctggtcgacgcgctgaaccagaccggcgatcggcttgcgctggagcggcgccgggcaggtacagccgagcgcatggcggccgtcggacggctgtcggcaggacttgcgcacgagatacgcaacccgatcgcggcgatgcgactcaaggcggaaaatgcgcttgccgccagcgacgacgcccgcaagaagaccgcgctggaagcgattctcaagcaggtcgcgcggctggacacgctgctccgcaatctgctgcagatgacccaggccggcgagcccaagtggatggatgtcgagcttgcgtcatttctgcaaggcacgatcgagccgcaccaggaactggcggcggccaacggcttgtcgctggagacggggactctcgcaccgaacaatccattacctcgctttgatccttcccagttgcagcgggccctcgacaatctgattctcaacgctatccagaacacgcccgcaggcgggcgcatcgtcgtggacgcgctgcggcaacaggacaaattgctgctgaccgtgaccgacagcggcgcaggggtgagcgaggagatgcgcgagcgcctgttcgagcccttcgcaaccgcgcgctccgagggaaccgggcttgggcttgccatcgtgcgcgaaatcgcgcgtgctcacggcggagaagcccgccttgcgccaactgaacgcggcgcgcggtttgagatcgaggtgccatggcaaacgtcctga

SEQ ID NO: 3912 - DNA, 438 bp, BradyrhizobiumColbertium
atggcaaacgtcctgattgtcgatgacgacccagccctgcgcgagggtctcgcggaggcattgagcgacctcggccacacgccgcaaacggcctcatcgggacgcgaaggtctcgccgcgctgtccgagacggtggacgcagtgctgctcgacctcaatatgcctggtatggacggcatcgaggtgctgcgccgcatcagatcgcaggagagctcgcctgccgtggtggtgctgaccgcctttgcgagcgccgagaataccatcgaagccatgcggctcggcgccttcgaccacctcaccaagccgatcggacgcgacgagctgagaaccctcatggaacggctgccgtcgcgcctgcggccggtcactaccgcgggcaaaggcagcctcgataccctgatcggacctcctcgtccatctccggcctgcgtttcgtga

SEQ ID NO: 3913 - DNA, 174 bp, BradyrhizobiumColbertium
gtgatcgcgcgcgcgcgtgcgcgcgcggtcgcgtcgagcggcgatcccgatatcacccagcgaatctatgaacttatcattagcgaattcacggccgtccagttgagggaagccgcacgacaggctgacgaaccgcaatcggcagagaaggccggaggaacccatgcgaattga

SEQ ID NO: 3914 - DNA, 762 bp, BradyrhizobiumColbertium
atgcgaattgagagtgtcatcgcttacgatgctgacttgataaggcggttcgatggatttcgtgccggtcttctgctgatcaacgagctcgacctcggcgaggttgaatccgccgttccgcagatagtcctttcggacgatcaagatgtcgcggagatggccagcatcaaggcgtggcgtaacgtctataggcagatgggcgctaacccgaccaaaacacgtaacgcggcggaagcgttgatacgacggttcaagaaggatggcagcttgccaacgatcaatcccgtggtagatgcctgcaatcacgcggccgttctgcacggcgttccgattgcggcggtcgacatatcgacgatgccgctgccccttctggtgaagcaagccgcgggcaccgaggtgtttttcgacatatctggcaatgaaagcacgctgagcagcgaggaagttacctacctcgatgagcgtggcgagccacatgcgcgctattggaatcataagcaaagcggtgcatccgccgtcaaccgaacatcgaggcgcgttcttattacgatcgaagcgatgcacgaggaagcagatacgtcggtgagaatggcgatggatgacgtcgtccgcttgctgaaggctcacggtgtccgccttacagctagcaattttcacacctggctttacgacggaaactccgggacgttcgacatgctcccggtcgtcgacggctcagagggcgtcgaacggctccaacaaggagcaggtcttgccgaataa

SEQ ID NO: 3915 - DNA, 369 bp, BradyrhizobiumColbertium
gtgacggacaagacatcagtgcactctgacatgagtgcgctcaagcaatccacggtgcggatcaacctcccggaaatgtcctgggataaatgggtcaagccgggtgccgatggcagggtcaagctcgcgcgtgcgttcggcaagcgggtgcgaatcctcgaactacccgaaggattcgacgagcagaattggtgcgacaagggacatcagggtttcgtgctcgagggcgaattcacgatcagcttcgagaccggagacgaattcacctgcaagcagaacgacgcgttcgtcattcccgataactcgcgaccctcatctccggcacgggccgcctcgatggtcgcattcaacgccagcggattcatctga

SEQ ID NO: 3916 - DNA, 147 bp, BradyrhizobiumColbertium
ttggatctcaccgacagggtcgtccggggcatagctttcgcatctgagaagcattcgcgctctatctttctcgcgccttgcgacgtctgtcgcggcgatttcgcctacgcctggcctgttcgccggctggctgccatgtccagatag

SEQ ID NO: 3917 - DNA, 1563 bp, BradyrhizobiumColbertium
ttgacgagcgggtttgcgcgaagcgctcgaagattggatgagtctttagaaccaacccgacacccctccgataagatcattcatacgtcagcaccaaatgctaccgcacggagcgccgcggcaacaatcgaacctttccggaccagatcaccgtctcgcaacaccgagagatttgtcggcgcagaaacaacatcccatttgaggctgaccgcaatcgacccttcaatgctgcaaggagctgttgcaagttcgattggaggtcccgcacttgtcatgcgggtttttctgccttttgctattgggtactacctctcttatctctttagaacgatcaacgctctaattgccgcacctctaacgttggagatagggctggacgccggtgaactcggcttgttgacttcggtctactttcttacctttgcggcggctcagatacccatcggcatccttttggaccgttatgggccgcggcaaatccagagtgctctgttgattgctgctgcggtgggtgcggcattgtttgccgtcgcagacaatttgccagtgctgcttgtcgggagggcgttgctcgggctcggcgtagcagcaagcctcactgccggactgaaagccctcgttctgtggtttcccaaagaacgtctcccattcttaaacggcctaatggttatgcttggtggtttaggagcggttacggcgagttccccggcgcatttcttgctggattggatggggtggagacaactctttgcattgttagccgttgtcacggctggctgttcgaccctgatctacctcttggtgccccccacggcatcgacaacgccggccggcggaggaaaagtcgtggtcagtttgaaagagatttataccaatccgcacttctggcgtctggcgccattatcggcgacctctgtcgggacggcgtgggcgttgcaaggactttgggcgtcgcagtggcttacagacgtcgacggccttgatcgagcagcgatggtgcagcatctggtcgtcatggccgtcgcgctgagcctcggcgcgcttttattaggtgttctggccgatcgactgcgtcgttatggaattggcaccgaggtggtacttggggctgtcggcctcctgtttattgcaacccaatcggcgatcatcttgcgatgcccaatatcgtcatacgttttgtgggccgccgtggcctgtgtcggcgcagcgacagtgctgagctatgcaatcctcgctacttactttccgaaagagcttgccggacgcgcgaacgctgcgttgaacgtgttccatatcggcggagcatttgtcctgcaatctgcgaccgggattgtgcttgagcaatggatgcctactgccgggcattatcccgagatcgcttatcaaacggcctttgtcctcaatcttgtcgtgcagaccgccgcctggatctggtttctggtctcatggatgatcactccgtcgaccagcacacggaaggatcagattgcggccgatcaagaagctgaaaagcctgttggatctcaccgacagggtcgtccggggcatagctttcgcatctga

SEQ ID NO: 3918 - DNA, 993 bp, BradyrhizobiumColbertium
ttggaatatcaacactatcgcttttctgtggccccgatgatggattggaccgaccggcattgccgggtgttccaccgtcacctaagccggcgggcgctgctctatacggagatgcttaccaccggggccgtcattcatggcgacggcaagcggctgctcgggttcgatccgtgcgagcatccggtggcgcttcagctcggcggctcggatccgcgtgaccttgccgaagctgctcggatcggcgaggccttcggctacgacgagatcaatctcaatgtcggctgcccatccgatcgcgtgaaggatggccgcttcggtgcctgcctgatggcagagccggagctggtggcgagatgcgtcgctgcaatgaagagcaccgtcgccattccggtcacggtgaagtgccgtatcggaatcgacgatcaggacccggaagccgcgctcgatgcactcgcacatgcggtggtcgcctccggctgcgacacgctgatcgtgcatgcccgcaaggcctggctcaacggattgtctccgaaagaaaaccgcgacattcccccgctcgactacgatcgcgtctatcgtctcaagcgcgcgatgcccaatgtgcctgtcatcatcaacggcggcatctcttgcctcgaagaggcgaaaggacatctcgaccatgtcgatggcgtgatgcttgggcgcgccgcatatcaggagccatggcggctgctgtcagtcgatggcgagatcttcggcgagacggcgccccacgcgtccatgcaggaagcgctcgaggcgatgatgccctatatcgatcagcagctcgcgcgcggcacgcggctgcacgcgatcacgcggcatttcgtcggcgcattccatgccgtgccgggcgcgcgagccttccgtcgtcatctggccgagcagggggtgaagcccggcgctggtctcgaggtgctgcgcgatgcgatcgcgcgtatcggcgcccgcgtcccggtggaggcggcgtaa

SEQ ID NO: 3919 - DNA, 555 bp, BradyrhizobiumColbertium
atgatccgcttcctgctcgttttcgtcctgctcgccggcacggcaggtgccgtcgtcgcctatggcgacgccggtcagatcgcacgcgccagccacaaggtttcacacatttttcgtgcccaggcggcggcaccggcccctgccgtgcagatcccgcgcggccagggcggcgaattcgcgctgcgtgcgaagatcaatggcgtcaccgcgccaatggtgatcgataccggcgcgacgtcggtcgtgctgacctgggaaaccgcaaaagcaatcgggctgccgctcgagatgcttgaatatgacgtcgacctggaaactgccggcggccgcaccaaggcagcccgcctcacgctcgatcgtctctccgtcggtcagctcgtggaaaaatcggtgcccgctctcgtcgttccacgcggacagatgaaaaccaatctgctcggcatgagcttcctcgatcgcctggagagctggggcgtgcgcgccgacacgttgatgctcaccggctatccggagctccagcgcagtccccgccgctcgcgcacggccgtcaactaa

SEQ ID NO: 3920 - DNA, 171 bp, BradyrhizobiumColbertium
atgatcgatcccaagaccaagctatgcttcggctgcggccgaaccttgcccgagatcgcgcgctggcacgccatggaaagcgcggagcggctcgcgaccatggccctcttgccggcgcggatggcggaagccggacttacgccgaccgggggatcgccgaaacgcatctga

SEQ ID NO: 3921 - DNA, 1596 bp, BradyrhizobiumColbertium
atgagtaaccccgctgaaaagcccgaggtcgtgcagcttccggccgagccggtgagcgctccatcggcgagcagccgaagggctgcggcgcagcgggtgcgtgaggcacgggacaagttaacgtcgaccagtggaacccgtccggctttcgacgccgagatgctgcgacaatacgcgcaaacgcggctgtcggcctcctacgtcgtcatgctgctggtggtggccaccggcgtgctgttcgggctgtggatgcagccgatcccggccgcggcctggacagtcggcatgctctgcatccacgcggcgatgatccggagctgccggcgcttcctgagcgagcccgcctctccgactgcgacgcgcgcctggcggacgcgcttcgtcgtgatcgatctgctctatggcctgtgttggatggcgatcctgatccatcccgtgctcgacatggtcacggaatccctgatgatgttcctgatgctgctcgtgatcgcagtatcgagcatgctcgccgccaatctgccgatcgccgcccttgccgccaccgcgccggtcgcggtcgcaatggcacttagcctggcgatgaccggctcgctggacaactacatcctggccgcgctcgccctcgccgccgaaggctacttcgtgttgctggcgcaccgcctgcactcctcgaccttcgccacgctggaagcgcgcgccgagaaagacgcgctgatcggcgagctcgaacaggccaaggcgatctcggacgaagcgcgccaccgcgccgaagccgccaacgtcgccaagtcgcgcttcctggcacagatgagccatgagctacgaacgccgctgaatgcgatcctcggcttttccgaggtgatgaagagcgaaatattcggggcgcatgcggtgccggtctacaaggaatattccgccgatattcacaattcgggcgtacacctgctcaacctcatcaacgagatcctcgatctgtcgcggatcgaggccggtcgctacgaactcaacgaggaagcggtgtcgctggtcggtatcgtcgccgactgccatcatttgatgaagctgcgcgcatcgagccgcggcatcaccatccacgaagtattcgagcagggcatgccgaggctctgggctgacgagcgcgcgatccgccaggtcgtgctcaatctgctatccaactcgatcaagttcacacctcaaggcggcgagatctggctcaaggcgggatggaccgcctcgggcggacaatatctctcggtgaaggactccggctccggcatccccgaagacgagattccggttgtgctcgcctcgttcggccagggctccaactcgatcaagtcggccgaacagggcgctggcctcggtctgcccatcgccaagaatctgatcgacctgcatggcggcacgttcacactgaaatcgaaactgcgcatcggcaccgaggtgatcgtcaccttcccgccggagcgcgtgatgagtgcgcttgcgccgctatcggatgatgctccgccgctccagccggagagttcccctctgccggacgagaaacgccggccgcggcacaagcccatcatgagcgccggcacaggctcctaa

SEQ ID NO: 3922 - DNA, 1509 bp, BradyrhizobiumColbertium
gtgatcgccgccattctcgtcgttgcctgtgtcggcctagcgctggagcgtcgacggggacaccccgaggtcgccaggcgtggaatctatcgacggctctcccgcctcatcaccagcccgctcatcgttgctatcctgatcctgactgcatcaccttcgcagactctggccgcatcgctcgatggcgccagcattggcccgcaatgggcgcttccatttgcgggcatgctgctgtccatcgcaatatttccgctagcagcacctcacttctgggagcatcatcaaggcaagattgccgcgatgtgggccgccctgatcgtgctgccgcttgcaatctggtacggtccgcttccaaccatccaggcactcgctcataccgcgctgctcgaatacgtcccgttcattctgctgctacttgccctgttcacggtcgccggcggaatcgtggtgcgcggcaatctccacggctccccggtcctgaatacgctgctgctcgcgctaggcactctgatcgcgagcgtcatcggcacgaccggcgcgtcgatggtcatgatccggccggtgatccgcgccaacgacgaccgtcggcacaacgcccacgtcgtgatcttcttcatctttcttgtgtccaacatcggcggctcgctttcacccttaggagacccgccgctgtttctgggctttctgcgcggcgtggacttcttctggacgacgacgcacctgttcccccagaccacgttcgctgcctggattctgcttgtcctgttcttttgcatcgatgcttatctttaccgcaaggaaggccgcgtcaaaccggacccaactccggacaatcccctgcggatcagcggcggcctcaacttcgctttgatgggagtgatcatcactgcgatcctcttgagtgccaagctcgacctcggcggatttgaagttctgggcacgcacctccagctgcagaatcttctgcgcgatgccgtgatgatcggcgtcgtgttcgcatctctcgccgtcacctcgaaggaggaccacgacgcgaacggcttctcctggggccccatagtcgaggtggcaaagctgttcgccggcatcttcatcaccatcatccccgtgcttgcaattctcaacgcgggcaaatccggcgcgtttgcctccgtcgtgaacatggtcaccaacgccgacgggacgccgaacaatgccgcctatttctggttgaccggcgtgctctcatcctttctcgacaatgcgccaacctatctcgtcttcttcgagcttgccggaggcgacgccaagcagctgatgacaaacggcgccgtcacccttgcggcgatttccgcaggtgcggtgttcatgggcgcaaactcctacatcggcaacgcgcccaacttcatggtgtacgcgatcgcgcgagcgggcggcgtcgcgatgccgggcttcttcggatacatggcctggacctccgtcctgctgctgcccgtgttcgcattggtcacgctcgttttcttcaaatga

SEQ ID NO: 3923 - DNA, 873 bp, BradyrhizobiumColbertium
atggctaaagtcgctttcctcggcctcggcgtgatgggcttccccatggccggacacctcgtgaagaaagggggccatgaggtcaccgtctataaccgcaccgcggccaaggcgaaggaatgggcggacaagttcggcggcaagacagcaccgaccccgaaggccgccgcggagggccaggacttcgtgatgtgctgcgtcggcaacgacaatgacctgcgcgcagtcacgatcggacccgacggcgcgttcgccggcatgcggaagggtgcgaccttcgtcgaccataccactgcctccgccgaggttgcgcgagagctggatgcagccgccaccaaggccgggttcaaattcgtcgacgcgccggtctccggcggccaggccggcgccgagaacggcgtcctgaccgtgatgtgcggtggcgcggaggacgcgtattccggcgccgagccgatcatcacaggcgcctacgcgcggatgtgcaaactgctcgggcccgctggctccggtcagctgacgaagatggtcaaccagatctgcatcgccggtctggtgcagggtctctccgaggggatccacttcgccaagaagagcggcctcgacgtggccgcggtcatagagactatctcgaagggggccgcacaatcctggcagatggaaaatcgctacaagacaatgaacgagggcaagtacgatttcggcttcgcggtcgaatggatgcgcaaggatctctcgatcgcgatcgccgaggcccgccgcaacggcgccaacctgcccgttaccgcgctggtcgatcagttctattctgaggtcgagaaaatgggcggcaagcgctgggatacgtcgagcctgctcgcacgcctgcaacgctga

SEQ ID NO: 3924 - DNA, 438 bp, BradyrhizobiumColbertium
atgggcggcgtgagtgttggcgtcctcgatcatttcaacatccggacccggaatctggccgagaccgttcgcttctacgaggacgtgctgggcctggaaaaaggcgctcggccgaacttcgccttcccgggcgcctggatgtatagcgagggcaagcccgtggtgcatctcgtcgatatttcccctaccgctgagccacaaaagccggattcaggcgttgtccaccacgtcgcctttgtcagtcgcggctttgacggcatgaaacagcggctggcgtcaaaggggatgaagttcgaggcccgtcaggtgcccggcggtgagctctggcagatattcgtccacgacccaaacggcgtcatgatcgagctgaactacgaggctgccagggagcaggggggagcgcccatcgaaaaggccgacgatatcggccggcagtag

SEQ ID NO: 3925 - DNA, 1137 bp, BradyrhizobiumColbertium
ttgagcgtgacgcagcaacaggttctcgacagcctcaccagggtcaagtcgccccgcggggtcgcgctcacccatgccaatgtgctgagcgcaatcagcgcggccgacggaaaggtgttcttctcgatcaatgtcgatgccgccgaggcgagggcctgggaatcggtccgggccgaagcggaggccgccgtgcgcgccattccaggcgtcaccaccgtcatggtggcgctgacggccgagcgcaagccgggctccgcgccgccgccacctccgcagccgagccgcggcacgcccggcgtgcagccggcgcatgcccacaagccgccgcagggaggccaatcgccgatggcgcggcaatcggaaatcccgggcgttgccgccgtaattgcggtcgcctccggcaagggcggcgtcggtaagtcgaccaccgcgctgaatctggcgcttggcttgcgcgacctcggcctcaaggtcgggttgcttgatgccgatatctacggcccctcggtgccgcgcctgacgggcctgcgcgacaagccggagctgaacgaggagcgcaagatgattccgctccggcgtttcgggctcgccatcatgtcgatcggcttcctggtcgaggaggagaccgcgatgatctggcgtggtcccatggtgatgtcggcggtgacgcagatgctgcgcgacgtcgagtggggcaagctcgacgtgctggtggtcgacatgccgccgggtaccggcgatgcccagctgacgctggcgcagaacgtgccgctcaagggcgccgtgatcgtctcgaccccgcaggacctgtccttgatcgacgcgcggcgggggcttgccatgttcaagaaagtcaacgtgccggtgctcgggatcgtggagaacatgagctacttccagtgcccgcattgcgggacgcgctcggacattttcggccatggtggggcccggcacgaggctgagaagctcggggtaccgttcctgggcgagatccccctgcacatggcgattcgcgccacctcggatgccggaaatcccgtggttgacagcgagccggacggccctcatgcggcgatctaccgcgccattgcgggccgggtccgggaccagctgaagggcgtcattgccgtggcctga

SEQ ID NO: 3926 - DNA, 1089 bp, BradyrhizobiumColbertium
atgaagcgtcgtgattttctcaaagtgtcggcagcaggcgcggcggcgaccgcagtggcttcaccggcgatcgcgcagtcctcgcccgaggtgaagtggcgcctgacttcgagcttcccgaagtcgctcgacaccatctatggcggcgccgagcaggtggcgaagtacgtcgccgagatgactgacaacaagttccagatccaggtgttcgccgccggcgaaatcgtccccggcctccaggcgctcgatgcgaccacgaacggcacggtcgatatgtgccacaccgtgtcctactactatgtcggcaaagaccccactttcgcgatcttcgcctcggtgccgttcggcctcaatgcgcgccagcagaactcgtggctctatcagggcggcggcaacgagctcgccaacgagttcttcaagaagtcgaacgtgatcggcttcccctgcggcaacaccggaacgcagatgggcggctggttccgcaaggagatcaagaccgttgccgacctgtccggcctcaagatgcgcatcggcggcatcgccggccaggtgctgcagaaagtcggcgtggtgccgcagcagctcgccggcggcgatatctatccggcgctggagaagggcaccatcgacgcggccgagtgggtcggcccctacgatgacgagaagctcggcttcgccaaggtcgccaagtactactattatccgggcttctgggaaggcggtccgaccgttcacgccttcgccaacctggataaattcaatgcgctgccgaagaactaccaggcgatcctcaccaacgcgaccgcccatgccaatacctggatggccgcgcgctacgacatgcagaacccggcggcactgaagcgtctggtcgccggcggcacccagcttcggcccttcaccaacgaggtgctggaagcctgcctcaagtcgaccaacgaattgtgggcagagatctcgggcaagaacgccgagttcaagaaggcgatcgacgccatgcaggcctaccgctccgacgaatatctgtggtggcaggttgccgaatacacctacgacagcttcatgatccgctcgcgcacccgcggctga

SEQ ID NO: 3927 - DNA, 1089 bp, BradyrhizobiumColbertium
atgaagagaagagacttcatcaaggtcacagggcttggtgcggccggtgccgccacgctcgcggctcccgcgatcgcgcagtcgctgccggaaattaaatggcgcatgccgacgagctggccgaaatcgctcgacacgctgtttggcggcgccgagatgatgtgcaagatggttgctgaagcgaccgacaacaaattccagatacagatcttcgcggcaggggaaatcgtcccgggtctccaggtgctcgacgccgtgcagaacggcacctgcgagatcggccacaccgcgtcctactattatttcggcaaggacccgaccttcaccttcggctcagccgtgccgttcggtcccaacatgcgcattaaccaggcctggtacatgctgggcggcgggcgcgacgtgctcaacgagttctacaagagctacaacgtcatatcgctgctcgcgggcaacaccggctgccagatgggcggctggttcaggaaagaggtcaatacgcccgaggacctgaagggcatgaaattccgcatcggcggcttcgccggccgcgtgctccagaagctcggcgtggtgccgcagcagctcgccggcggcgatatctatccggcgctggagaagggcaccatcgacgccgccgaatgggtcggcccctacgacgacgagaagctcggcttctacaagattgcgccgcactactactatcccggctggtgggaaggcgggccgatgctgatggccttcgtcaacctcgacaagtggaacgcactgccgaaatattaccagagcgtgctggagcaggccggccactacgccaacaactacatgatggctcgctacgacaacgccaatccactggcgctgagaaagctgctggcgggcggcaccaagctgcacgccttctcgccgtcgatcatggatgcctgccacaaggccgccaaggagctgcacgccgaagtcgcagcgaccaaccccaacttcaagaaggtgcacgactcgctcgccaagttcacgagcgacggctactcctggttccaggtggccgaggtcggctacgacatcttcatggcgcgccgctcgcagagctga

SEQ ID NO: 3928 - DNA, 210 bp, BradyrhizobiumColbertium
ttgctcgctgcgatgacggaggtgcactccgtcccgccgcgtcgcgccgacctctgcgcaggcgggcgagttgaacaccctcgcattcgaatcaacctcgagcggcgttggatcggccatggctgctgccagagcacgatcaggaaggtcgcgcagcggcttattggaaagattatgcaaagcgacaagctaaagctggatcgattgtag

SEQ ID NO: 3929 - DNA, 210 bp, BradyrhizobiumColbertium
atgccttacttcccaccgaacgagaaccaggacttccgcgtctgcaaggtacttgccgatatcttttgtgcaatcttgatcgggaccttctcggtggccttcttcggctggctcggcggtctcgtcgcatttgtcatcgtcgaagcaagcctcctggcgctcgattggctcattccaaccaaggatgatgccgccggcgttgttcgctaa

SEQ ID NO: 3930 - DNA, 675 bp, BradyrhizobiumColbertium
atgcgccttctgatcgtcgaggacaatgtcgagctgtcacggctcgttgccggggggctggctgcggccggctaccagagcgatatcgtcgggagcgcggccgaggcgcgcgaggcggtgagcagcgtcggctatgccgcgatgatcctcgacctcggtctgcctgacggcgacggcatgtcggtgctgcgcgaactgcgcctcgagatggagccgctgccggtgctggtgctgactgcgcgcgggggcctgcaggaccgcgtcaccggtctgcgcagcggggccgacgattatctgtcaaagccgtttgcgatggaggagctggtggcgcggctcgaggccatcctgcgccggccaggccagttgctcggccgctccctcaatctcgccaacctcgtctacgacaccgagagccgccagatcttcgtcgacgaccagccgcgcatcatctctgcgcgcgaggcctcggtgctcgagatcctgctgcgccggcaggggcgggtggtgccgaagaagaacgtcgaagaccacatcttcgggctcgacggcgaggtcgcatccaatgcagtggaagtctatgtctcgcggctgcgcaagcagcttgcagagcacggtgcgaaagtcgcgatccacaccgtccgcggcgtcggctatctcatgaccgaggagagatag

SEQ ID NO: 3931 - DNA, 1386 bp, BradyrhizobiumColbertium
gtgcccgccgggggctatgtcagatcgctcgcgttcaaatcgctgatctcgcggatcgtgttcctgcacatcgtcgcggtcgccgtggtcgcgatcttcctgcccctggttctgttctggctgctcaactccgagatcgaccaattgcatcgcgatgccatgcgtgcgcaggccgaggtgctggcggagcgcgtcgtcgcgcagccggacggcacgttgagcttcaacctgccggacagcctcaagggactctattcggacgcctacggacgctaccagttcgacattcgcgatgccgacggccggttgctgttctcctcccaccgacgctcagcggcgacggcgctctcccgtttctccgaaaccatctccggcgccagcgtcactcgggaggtcgccggcaagacggtgcgcatccaggttgccgaggatctggcgcaccgggacgtcattatcgacgatatcgtttcgaactttttccggcgggtagggtggatcaccatcccgatcctcctggtcctgctcgccatcgacatcatcatcttccgccgcgcgattgcgccattgtggaaggcctctcaggaagccagcaatatcggcccggcccgcaccgacattcgtctgccgaccgcgcagatcccgagcgagatcatgccgctggtcaccgccgtgaaccaggcgctcgatcgcctcgagggcgggtttcgcgtgcagcggcagttcacggcggacgccgcgcatcagttgcgcacgccgctcgcgatcctgcgcacgcggatcgagacgctcggcgacagggtggcccgccgggcgctgcatgcggacatcgaagccatgagccggattgtcgcccagttgctggagatcgccgaactcgacacattggtgctcgatcccggcgagaccgcggatttgcgcgccgtctgcgccgaggtggtcggctcgatcgctccgttagcgatcgcgcagaacaaggacatcgcgctgaagggcgccgactcgcccgtcctgatccatggcaattcggagatgctccagcgcgcgatcttcaacctcgccgaaaatgccatcaagtttaccgcggtacacacctccgttgagattgaggtgcatgacgacggttcggtgctcgtacgcgattacggtccgggcgtcccggaagccgatcgcgagttgattttccaacgcttctggcgcgccgaccgccggcgcagcgacggcgcggggctggggctctcgatcgtgcgcgcggtggcggacgatcacgccgccacgatcgcagtgacaaatctccccggtggcggcgcggagttcacggtgcggttcaggttggcagaccaaacggtatcttcgccctccccgggaggggagggcagtcgcgcctga

SEQ ID NO: 3932 - DNA, 1656 bp, BradyrhizobiumColbertium
atgaccgcattcatcatcgccaatatggcgccaatcatgttcgtgtcgctggtcgtcatgctgctgcttggctacccggcggcattctcgctcggcgccgtcggcctgttcttcgccatcatcggcgtcgagctcggtcagttccaccccgacttcctccaggccttgccggagcgtgtctacggcgtgatgaacaacgacacactgctcgcgatccccttcttcaccttcatggggctggtgctggagcggtctggcatggccgaggatctgctggataccatcggccagctgttcggcacgatccgcggcggcctcgcctatgccgtgatcttcgtaggcgccctgctcgccgcgaccaccggcgtggtcgccgcctccgtgatctcgatgggtctgatctcgctgcccatcatgctgcgctatggctatgatcgccgcgtcgcggccggcgtcatcgccgcctccggcacactggcgcagatcattccgccctcgctcgtcctcatcgtgatggccgaccagctcggcaaatccgtcggtgacatgtacgaaggcgccttcatcccgggcctcgtgctcgccggcctctatgccggctacgccttcctcgtcagcatgatcttcccggcggccgcgccgggcctgccgaaggaggccatcggcttccgtgaggacaatggcgaccgcggcctggtctcgctcggcttcctgttccttgcgagctgcgtgttcggatggttcatgatgcgaaattcgaccgtgcacggagccgattacgtcgtgctcagcatgttctatggcatcatcttcgcgtttgcgatcgccgtgctgaactgggccgtcgataagctgaccggcttccgtttcctctccaagatggcgcagcagaccacattcgtgatggtgccgccgctgttcctgatcttcctggtgctgggcacgatcttcatcggtatcgcgacgccgaccgaaggcggtgcgatgggtgctgccggcgccctcctcctgggcgcggcgaagcggcggctgagctgggacctgatacgtcaggccacggaatcgaccgccaagctgtcggctttcgtcgtgttcatcctggttggcgcccgcatcttttcgctcaccttttacggcgtcaacgggcacgtctgggtcgagcacctgctcacctcgttgcccggcggccaggtcggcttcctgatcttcgtcaacgtgctcgtgttcatcctggctttcttcctcgacttcttcgagctggctttcattgtgatcccgctgctcgggccggccgccgaaaagctcggcatcgacctgatctggttcggcgtcattctcggcgtcaacatgcagacctcgttcatgcacccgccgttcggcttcgccctgttctatctgcggtccgtcgcgccgaaggagcgctacacggatcgcatcacgggcaagcggatggaccctgtcacgaccggccagatctattggggtgcggtgccattcgtcgtcatccagatcatcatggtcggcctggtcatcgcgttcccggcgatggtgatgcactacaagggcgtccagaccaacatcgatcccagcacgatcaagatcgaggtgccgcagatcgagctgccgccactggatttcggaccgccgcaaaagtag

SEQ ID NO: 3933 - DNA, 582 bp, BradyrhizobiumColbertium
ttgcaagcgctccttaagctgagcagcaggatcgacgcgttcacgcgctggaccggcaagcgcattgcgtggctgatcgtgctcgccgtgatcatctctgcagtcaacgcgatcatccgcaagacgttcgacacctcgtccaattcctggctcgaactgcaatgggtgctgttcagcatcgtcttcctgctctgtgcgccctggacgctgctcgacaatgagcacatccgcatcgacatcgtgaacaacacgctgccgaagaaagcgcgcaacgtgatcgacctggtcggtcacgtgttcttcctcatgccgatctgcatcatcatgatcattaccggcgtgccgttcttcctgcgctccttcgagatcaacgagcaatcgggcaatgcaggcggtcttccgcaatggcccgccaaagccctgatcatgatcgggttcgctttcctgctcgtccaaggcatctccgagctgatcaagcggattgcggtgatgcgcggattgatacccgatccgcacgaatcccaggtgtcggcgctggaggccgaagtcgaacatctcgtcgaagcgatcgagaagaagtag

SEQ ID NO: 3934 - DNA, 1020 bp, BradyrhizobiumColbertium
atgaacggatccgccgcattgtcgagcccgatgaccgatccgttcgggcggaccatcagctatctgcgtgtctcggtcacagaccgctgcgacttgcgttgcttctactgcatgtccgaagacatgacgttcctgccgaaggccgacctgctgacgctggaggagcttgaccggctctgcaccgccttcatcgccaagggcgtgaagaagctgcgactcaccggcggcgaacccctggtccgccgcaatgtcatgacgctggtgcgctcactgtcgcggcatctttccagcggcgccttgaacgagctgaccctgaccaccaacggcacccagctcgccaggcacgcacgggagctcgccgattgcggcgtgcgtcgcatcaacgtttcgctcgacacgctggatcccggtaagtttcgcgagatcacccgctggggcgagatcgacaaggtgttggaaggcatcgaggccgcgcgcgccgcggggctcggcgtcaagatcaacgccgtggccctgaagaacctcaacgaagacgagctgccctcgttgatgcgctgggcccacggcaagggcatgggtctgacgctgatcgaagtcatgcccatgggcgagatcgggtcgggacggatcgaccagtacctgccgctgtcgctggtgcgggcccgcctcgcccagcaattcacgctgacggacttggccgagagcacgggcggaccggcccgctatgtcagcgtcgccgaaaccggcggcaagctcggcttcatcacgccgatgacccataatttctgtgaatcctgcaatcgggtacgcatcacctgcaccggaacgctgcacacctgcctcggccacgaggatgcctccgacctgcgtaaacctctgcgtgcatcgagcgacgatctattgcttgcggatgcgatcgaccgcgccatcggactgaagccgaagggccacgatttcatcatcgaccgccgccacgaccgccccagcgtctccaggcacatgagcgtcaccggcggttag

SEQ ID NO: 3935 - DNA, 693 bp, BradyrhizobiumColbertium
atgacctcccctcacaccatcgtcttcgatctcgacggcacgcttgtggatacggcgcccgacctgatcaccgccttgaactacgtgctcgaccgcgaagggctgccgcccgtgccgatggcctcggcccgcaacatgatcggcgccggcgcccgcaagctgatcgagcgggggctggaggccgagggccgtacggtcacccccgcggacatggaccggatgacggcggatttcatcgcctattatgccgaccatatcgccgtcgaatcccggccattcgagggacttgaggccgcgctcgaccactttgcggcgcagggccatcgtctcgcggtctgcaccaacaagctcgaatggctgtccaggcggctcctcgaccagctcgacctcagcggtcgcttcgcggcgatctgcggcgcggacacgtttggcgttcagaagccggatccgaccatcttccgccagaccgtggcgcgcgctggcggggagatgaaggccagcatcatggtcggcgacgccggaaccgacgtgggcgtcgcgcggcgggccggcgtccccgtgatcggggtcagcttcggctacacggacgtcccgatcgccgatctgaagccggaccggctgatccatcacatgcgcgatctgccggaggccgtcaccagcctgacgacgacaaaactcgcagcaagccactga

SEQ ID NO: 3936 - DNA, 162 bp, BradyrhizobiumColbertium
atgttcacgtctgcgcccgcccctgaattcgtgagccgccgacagcggccgctttcggcggcctatgtagcctcgtttttctggcgggaacaggcctataaggtgatcttatgggcccgccccttgcgtcgatccggccggcccgatagcgcttggtcatga

SEQ ID NO: 3937 - DNA, 714 bp, BradyrhizobiumColbertium
atggaccagttgaagcggcaggcggcggcgcgcgccctcgaggcggtgcgcgacggcatgcagctcgggctcggcaccggctccaccgccaaacatttcgtcgagctgctcggtgagcgtgtcgccgccgggctcaaggtggtgggcgtgccgacctcggaggccacgcgcgctgatgcggagcgttgcggcgtgccgctgacgacgctggacgagatcgaccatctcgacctgacggtcgacggcgccgacgaaatcgacgccgagctcaatctgatcaagggcggcggcggcgcgcttttgcgcgagaagatcgtggccgccgcctcggatcgcatgatcgtgattgccgacgacagcaaatgggtaccgacgctcggcaagtttcccctgccggtcgaggtgattccgttcgggctcggcgcaacccgccgggcgatcgaaaaggcatttgccgaatgcggcctttccgggcaaatggcggtccgcaaggacaaggacggccacgttttcgtcaccgatggtggccactggatcgtcgatgcccagctcggaagtattgtggatccccccggtcttgccaaggcgttgagcgccatccccggggtggtcgagcatggtttgttcatcggcttggccagctcggccgttttggcgggcggcgaaggaattcgcgtgattgaacggcgcaagccgaaaggagaccaggaatga

SEQ ID NO: 3938 - DNA, 546 bp, BradyrhizobiumColbertium
atgaagaacgtgttgaaactcttgccggccgcgactctcgctgtgggactggccgtctcggccgccccggccgtcgcccagcagccggcccagcccaaggctgccgccgccccggcccagccgaaggcgtcgccggccgcgatcgcggcggcgaaggagattctgcagatgaagaacgcgaccgcgatgtatgccggcgcggtgcccggcgtcgtcgagaagaccaagatcgcgctgattcagcagaacctgaattatcagaaggagctcaacgaggttgcgccggtcgtggcccagcaactcgccggccgccagaacgagatcggcgaaggcatggcgcagatctatgccagcgagttcaccgagcaggagctgaaggacctcgccaccttctacaagtcgccgctgggcaagaagctgatcgaggccgagccgcgcgccatcggcctcagcatggccttcatgaactcctgggcccagaacttctccgagacggtgatgggcgctttccgcgccgagatgcgcaagcgtggcaaggagatctga

SEQ ID NO: 3939 - DNA, 1389 bp, BradyrhizobiumColbertium
atggctgaattcgacgtcgacctcttcgtcatcggtggcggctcgggcggcgtgcgtgccgcccggatcgcggccggctacggcgcccgcgtgatgatcgcggaagagtatcgcatgggcgggacctgcgtgatccgcggctgcgtgccgaagaagctgttcgtgatcggctcgcactttcgccaggagctggaagacgccgcgggcttcggctggaccgtcccgccggccagcttcgactggccgacgctgatcgccaacaaggacaaggagatcgcgcggctggaggcggcctacacggccaacgtcgagaagtcgggcgcgcagatcgtcaagagccgcgcggtgatcgaggacaagcacaccgtccgcctgatcgagaacgacaggaagatcaccgcgaagtacatcctgatcgccaccggcggcgcgcccaaccacggcgcagcgattcccggcatcgagcatgtgatctcctccaacgaggcgtttcatatcgagaagctgccgaaacggatcgtgatccagggcggcggctacatcgcgctggaattcgccggcatattcgcgggtttcggctccgacgtcaccgtgatctatcgcggcgacaacatccttcgcgggttcgacgaggacgttcgagtccatgtccgcagcgagatggagaagcagggcatcaccatcctcaccggctgcaccgtgaccaaggtcgatcgccacggcgaggaattcaccacgcatctgtcgaacggctcgagcgtcgcctccgatcaggtgatgttcgcgatcggccgtcatcccaacgtcgccaatctcggcctggagaatgccggcgtcgccatcaatcccgcaaacggcggtatcgccgtcgaccatttctccagaagctcggtcgacagcatctacgcgatcggcgacgtcacccaccgcttcaacctgacgccggtggcgatccgcgagggccatgccttcgccgacaccgtgttcggcaagcgcgaggtcagggtcgatcacgccaacatcgcgaccgcggtgttctcgcagccggaagtcggcaccgtcggcctcaccgaaaccgaggcgcgcgcgcaattcagccacgtcgacatttacaagacgacgtttcgcccgatcaaggcgacgatgtcgggccgcgacacccgcgtgctgatgaagctcgtcgtcgacggcgcgaccgatcgcgtgctcggctgccacatcgtcggcgatgccgcggccgagatcacgcaagcggtcgcgatcgccgtgaagatgaaggcgaccaaggccgatttcgacgcaacgatcgcgctgcatccgaccgcggccgaagagctcgtcacgatgcgcacgccgaccgcacgccacgtgcgtcaggcgacggggtag

SEQ ID NO: 3940 - DNA, 1140 bp, BradyrhizobiumColbertium
atgaacgtgcatgctgccggagatctcaagttcaccggcctcacccatccgaacggcgcgcggctccgcctcagcgagcaggatttcgttgcgatcgatcgcgaccgggatgcgaagttcgaggcgacgtaccgaccgcaggcgctctacaatcgcgccaatgagggatttcacgccaacaacgaaaccttcctcctgcacgaggtcgcgaccaatctgccgatctaccgggcggacaccggcccgaccgatttccatcttcatcttccgccgggcgggtttcagctcgtgctggtcacttcgggcgcgttcaccttcgactatgatgggcgcttctacaatgtcggtcccggcgcggtgatgctgcaaagcgcgatcgtgcaccgccagctgttctacacatggtcgggattgtcgaccgaagagaatctgaagacgccgcagacggtggtgcccgacccgatctcgatgggcttttcaggcaaattcctcgaggctttcatcaccgacccgacaacctttccgaacccgaccatcgtcggtccggaccagatcgacgaggcagagacgccccgtgtggcttggcgccatcccctgcacgaccggccggccggcgccggcttctggctgcaggatcccctggcattggatgcgctgtacaagccgctcggcgaaagttcgatcaaatcggccatgccggtccacgtgcgcgatatcggcatcgagattccgagcggccatctcgtcaccggccacgtcatcgcgaccgatccgcgcggtcagtcgctgctgccgaagagcacgtctgtcgccgcggacgcgaccttcttcgccaggggcgaggtcgtgatctaccgcgtcattcgcggaaccgccgaatttcagaggaagggcggcgggagcttcgaactttgcgccggcgacgtggtgacggcgggcaaagattccatcagcctcgcaggcgtcggcgaaaacacccagatcctgcggctcggcctgctcaagggcgtgaacgagctgcgcagctggacgccgacccagcgtgacgagatcgacggcctcgccggccagatcatcacgcaaagggacctacgccccctgcgcaccgaaggcgagccggtcggatatctgtacggctga

SEQ ID NO: 3941 - DNA, 222 bp, BradyrhizobiumColbertium
gtggctttcctgaattcgacgatcgtggagaagggcgtgaatcgcatcacattctgtaccggctgcggccatgcgctcgtcccgatgctgacgaccgaaggtcgcgcggagccgagctgcctctggtgcgaaggcttcgacgcccgcgcgttggacatggcgaagtgggccgagagcccgttcgggaagccggagccagcccgccgtcaatcgttggattga

SEQ ID NO: 3942 - DNA, 1230 bp, BradyrhizobiumColbertium
atgccatttgcttcagacgttttgaaacggctgcgcctcgattcctccgatggcaagcagcacgtcgtgatccgttctgccggcggaggcggcaaggtcaccgaatattccttcggcatcgaggaggaatacttcctggccgaccgccgcagcttcgaggtcgcgatcgagactcccaatgaactgttcgaatcggcgaattggtcgaccggcggccaggccatgcgggagatgctgcaatcccagctggaggtcgcgaccaatgtccacgtcgacgtcaacgacgcacgcgaagagctgcgcttcctgcgccgcgaggttgcgggggtcgctgcgcagtacggcttcgtgatcatggcctgcggaacgcatccggccgcggtctggcgcatgtcgcagccgagtccgaagccgcgctacgaggagatgatcgaggacctgcggagcatcggtcaccgcaacatgatgtgcggcatgcacgtgcacgtccagctgcccgatcccgagaagcggatggcggtgatgcgggcgatgctgccgcatctgccgctcttcatcgcgctctcggcgtcctcgccgttctggaattcgcacaagaccggcctgaagggctaccgcctcgccgcctattccgagctgccgcgcaccggcctgcccgaattgttcgaaggcaagcaggacttcgacgactatgtcggcgccctgcagcgctccggcgtgattcccgatgaaagccacatctggtgggcgatgcgcccctccatgcgccaccccaccctcgagcttcgcgcgcccgacacctgcaccttcatcgacgacgccgtcgccattgcctcgctctaccgctgcctgacgcggcacctctacctgagacctcatctgtcgaaggaggtcaccgccgtcgagcgcgcgattgcggtcgagaacaaatggcgggcccagcgctacggcaccgattgcatcttcgcctccactgccgggccggtgacgatctcggagctgctcactcgcgtgatcgacgacgttggcgaggacgcagccgcgctgaactgcgctgccgaggtcgagcattgccggaccatcgtggagcgcggcagctcggccgaattccagctccggacctatcgcgaaagcggcgaagacatcacagccgtgtcacgatggatcgctacatctacgctctccggaacgagcctgcctgcccaacgcagcgctcctgcgccgtcatag

SEQ ID NO: 3943 - DNA, 828 bp, BradyrhizobiumColbertium
atgtgccgctggatcgcataccggggcgagacgacgtcctttgagccgtacgtcaccgagcccgaacattcgctcgtggcgcaaagcatccgctccctccagtccacggcgggctcgaacggcgacgggtttggtctcggctggtatggcgagcatccggagcccggcctttatcgcgagacgcggccggcatggtcggacgagaacctccgctatctctgccgccatctgcgctcgcacctgttcttcgcccatgtgcgcgcggccaccggcacggcggtgacgcggcagaattgccatccctttgcctgcggacactggctgttcatgcacaacggattcgtcgggagctggaatcggctgcggcgaaaagtcgaggcgctgattcccgacgcctattatccgtcgcggctcggcacgaccgattcggaagccgtgttcctggcgatgatgggtgccggcctcgaggaggatccgctcggcgcaacgcggcgcgtgcttcaagccctcttctccttcgtcaatgagggccaactccgcgaacggctgcgcttcaccagcgcgattgccaacggtcgcgacctctacgccttcagggttgcggtcaacgacgacgcgaacacgctctatttccgcgaggacggcgaccaagtcgtggtggtgtccgagccgttcgacagggaagaggattgggcagaggtaccgccaaatcacgccctgatcgcgcgcgcatcggaaagcgtgaagattgttccgttcgacgcgacaatttgcagtggcaccgggcaggaacccgctgttaccagaaggattatcgcccgcaggtaa

SEQ ID NO: 3944 - DNA, 468 bp, BradyrhizobiumColbertium
atgtctgacgccaaaacctcacatccggtcgagatcacggagccgcccggccagaacgagcaggctgcggccgcgctggtgatcgtgggcgcgctggttgcggttgccgaccggcgcgtgtcgtccgtggagcgggacgaggtgatcagcttcatccgggatcgcaagctggcgccgcacgtttcggacgaacggctctatgcgatgttcgatgaactcgccgaacggctcgaggagcccgatttcgccaatgtcgtgatcgacacgctgcggccggtttcggatctgccgctctcgacccatctggtggagctgtctgaacgcgttgctgcagcggatgaggacgtagatccccacgaaatgcaggcaatcaaattgttgcgcttgctgaccctggtgctgcctcgcgcgaagccgctcgtgccgagcgcagccggcgccgagcctcagcccgccctgaaggagtaa

SEQ ID NO: 3945 - DNA, 360 bp, BradyrhizobiumColbertium
atgagcgcagctctggacgagcgcacggacaccaagagcgccaccagccagatggctggtggcgatccgcggctcgacaagctcgtcgatcggctgccgccgcgcatgggtgacactgtcacctatcttctcaaaccgtccagccgctggttgagaatcccctcgggcacgctgctgatcgccggcggcgtgctctcgattctgccgttgctcggcgtctggatgctgccgctcggcctcgcgttgctggcggaagacgtgccgtcgctgcgctcctcgcgcgcgaaggttctggactggatcgagaggaagaagccgcactggctcgatccctcggcatcggggaatgatgaaaaatga

SEQ ID NO: 3946 - DNA, 639 bp, BradyrhizobiumColbertium
atgactgaattcatcactgcggaagcgctgaccgcgctgtttcaagtcgtcctgatcgacctcgtgctcgctggcgacaacgcggtcgtcatcggccttgccgcagcgggcctggctcccgatcagcgccgccgcgccatcatcgtcggcatcgccgccgccactgcactgcgcatcctcttcgccggcgttgcgacccagcttctgcaggtgatcggtctgttgctcgccggcggcgtgctgctgctctgggtgtgctggaagatgtggcgcgagctgcgtgagcaggctacgcatgccgagcagctcgcgttcagcaatggcggcggaggggacgctgcgccggcgcagcgaaagaccttcggccaggcggcgatgcagattattgccgccgacgtctcgatgtcgctcgacaacgtgctggcggtcgcgggcgccgcgcgcgagcatccctacatcatggccttcggcctgttgctgtcggttgcgctgatgggcgtcgccgcggacttgcttggccgcttgctccagaagcagcgctgggttgcctatgtcggcctcgccatcatcctttacgtcgcgttcgagatgatctatcggggcacgctggaactcgcacccgttattgccagtctttga

SEQ ID NO: 3947 - DNA, 546 bp, BradyrhizobiumColbertium
gtgccgccgcggctcggcctgctcgctcagctcatatttggctcgcgctggctgcaatttccactttatatcggcctgatcgtagctcagggcgtctatgtcctgctgttcctcaaagagctttggcacttggtcgcgcactcgttcgaggccaccgagcagcagatcatgctggtcgtgctcggactgatcgacgtcgtcatgatctcgaaccttttgatcatggtgatcgtcggcggctacgagacgttcgtgtcccggctgaacctgaccgggcatcccgacgagccggaatggctcagccacgtcaacgccagcgtgctcaagatcaagctcgccatggcgatcatcggcatctcctcgatctcgctgctcaggaccttcatcgaggccggcaatctcggcaccgcgcgggccaatttcaccgagagcgccgtgatgtggcaggtgctgatccacatgaccttcatcgtctcggccatcggcatcgcctgggtcgatcgtctcagcgatagcggacatcgacaggaagccggtcatcactga

SEQ ID NO: 3948 - DNA, 309 bp, BradyrhizobiumColbertium
ttggaaccgatctgcatcctgcccgcaacagggcagggcatcaacatgtcaattctcagggagatcgtcgcatcagtcgcgggagtctatgcgctcctgttcgtctgcgacgcattgttcggggtcggcgaggcacgcttcgacgacgcctattaccgcgccagcttctacgcgccgcggccgcaggaattccgcttcgccggcgatacgccgccggcagtccgcgtcagcgacgccttcgcacagtttgcgccgggtgaagccaagccgaacaggcgctactcgtcactgaccacgatcatccgctga

SEQ ID NO: 3949 - DNA, 897 bp, BradyrhizobiumColbertium
atggacgcggccctggacgatgttttcatcgacgagatcagctttccggcgaccgacggctatgcgctgaccggcaccctgttcctgccgcgcggggccaagcgccacgccgtcctgatcaactcggcgaccgccgtgccgcgcaagatctatcggggctttgcctcctatctcgcccatcgcggctgcgcggtgctgacctacgactatcgtggtatcggcgattcccggctgccggcgatggtcggctacaaccgaccgaaatcgctggtcggcttcaaggcctctatgtcggactgggccgcgctcgacgtcactgccgcggtcagctggatgcgcgagcggtataatagcctgccgcttgcctatgtcggccactccttcggcggccaggcgctcgggctgatcgcgaacaacacggagatctcgcgcgccgccttcgtggcctcgcaggcggcgacctggcggctgatgaccgcgccggagaaataccgggttttcgccttcatgaacctgattggcgtaccgctcgcccacgcgctcggctatgcgccgggctgggccggcatcggtgaggatctgcccaagggcgtcttcctgcaatgggccgagtgggtctcgagcccccgctacctcttcgattcacgactgccggagctggagaatttcgcgaggttcaagggcgagttgcgggcgctgtgcttctccgacgatccctgggcgacgcgcccctccgtcgaactgctcgcccgcggcttcacggcggtcacgccggaggtactgaccgtgcagccatccgacgtcggggccaaggccatcggccatttcggctttttccgccccgcgcaccgcgacacgttgtggcgcggcgtcgcggagtggatccagggggaatga

SEQ ID NO: 3950 - DNA, 1389 bp, BradyrhizobiumColbertium
atgtccgagcggtggacgcccgagtcctggcgcagcaagccggtgctccaggtgcccgattatccagatgccaaggccctggccgacgtcgaggcgcagcttgcgacgtttccgccgctggtgttcgcaggcgaggcacgcaacctgaagaaggcgctcggccgcgtcgcggccggcgaggccttcctgctccagggcggcgactgcgccgagagctttgccgagcatggcgccaacaacatccgcgacttcttccgcgtgctgctgcagatggcggtggtgctgacgtatgccggcgccgttcccgtggtgaaggtcggccgcgtcgccggccaattcgcaaagccgcgctcctcgccgaccgagaaggtgaacggcgtcgagctgccgagctatcgcggcgacatcgtcaacgacatcgccttcaccaaggaagcgcgcgtgccggatccgcagcgccagctgatggcctatcgccagtcggcggcgacactgaacctgctgcgcgccttcgccaccggcggctacgccaatctcggcagcgtgcaccaatggatgctgggcttcctcaaggattctccgcaatcccgccgctacaaggaacttgccgaccggatctccgacgcgctgaacttcatgcgcgcctgcggcctcgatctcgaggcgcatcccgaactacgcgccacggatttctacaccagccacgaggcgctcctgctcggctacgagcaggccatgacccgcgtcgattccaccaccggggactggtacgccacctcgggccacatgctctggatcggcgaccgcacccgtcagctcgaccacggccatgtcgaatatttccgcggcatcaagaatccgatcgggctgaagtgcggcccctcgctcaaggccgacgagctcctgaagctgatcgacgtgctcaatcccgacaatgagccgggccggttgacgctgatcggccgcttcggctcggacaagatcggcgagcatctgccgagcatggtccgtgccgtgaagcgcgagggccgcgtggtggtctggtcgtgcgatccgatgcacggcaacaccatcacctcgacgtcgggttacaagacgcggccgttcgaccgcatcctgtccgaggtgaagtcgttcttcgcgatccacgccgccgaagggacccatgccgggggcgtgcatctggagatgaccggccaggacgtcactgagtgtctcggcggcgcccgcgcgatcacggacgaggatctcaacgaccgctatcacacggtctgcgatccgcgcctcaatgccgagcaatccatcgatatggccttcctggtcgcggaactgctcaagcaggagcgcgtcggcaaggcccagccgatgccggccgctgcggggctctaa

SEQ ID NO: 3951 - DNA, 354 bp, BradyrhizobiumColbertium
ttgctgcggatctggaaggccacgatcaattcccggaacggtctggcctttgcattccaatcggagcaggccgtccgcgaggagatctttgcgctcctgttgtcggtgccgcttgcctggttcatcggcgcgacggcgatgcgcacggtcgaattggtctgttcggtcgcgttcgtgttgacggtcgagctgctcaacaccgcgatcgagaagcttgccgatcggctgacgatggaccacgacaagcagatcggccgcgtcaaggacatgggctcggccgcggtcggcgtcgcgctgttgatggccggcgcgttctggatctttgcgatcgtcgagcgactgggcttcgtctga

SEQ ID NO: 3952 - DNA, 1758 bp, BradyrhizobiumColbertium
atgaccgaacgtctcgacacattcgcggtcacgctcgcccagctcaatccgaccatgggcgatatcgagggcaacgcggcgaaagtgcgtgcggcgcgtgcgcgagctgctgcggacaaggccgatctcgtgctgtttccggaattgttcatcgccggctatccgccggaggacctggtgcagaagccggccttccaggccgcctgccgggccgcgatcgagagcctcgcgcgcgagaccgccgatggtgggcccgcgatgctggtcggcacgccctggctcgaggagggcaggctctacaatgcctgcgcattgctcgacggcggccgcattgcgagcttgcgattcaaatgcaacctgccgaactacggcgtgttcgacgagaagcggctgttctcgcaaggccctgccgccggtccggtcaccgttcgcggtgtgcgcatcggcgtgccgatctgcgaggacatctggcttgaggaatccgaggattacgagaacgtggtcgagacgctggcggagaccggcgccgagatcattgtcgtgccgaacggctcgccttacgcacgggacaagaacgacgtgcgcctgtccgtcgcggtggcgcgggtgacggagagcgggctgccgctggtctatctcaaccaggtctgcggccaggacgagctcgtgttcgacggtgcatccttcgcgctcaatggcgatctctcgcttgcggcgcaactgccggctttcgaggagaacgtcgtcaccctgcgcttcaccagaagcggggacgactggcgctgcaccgggccaatggccgaactgccggagggcgacaaggccgactacgccgcctgcgtgctgggcctgcgcgactacgtcgtcaagaacggctttcccggcgtgctgctcggcatctccggcggcatcgattccgcactgtgcgcggcgatcgcggtcgatgcgctcggcgccgaccaggtgcacggcgtcatgctgccttatcgctacaccgcaccacactcgattgcggacgccggcgagctcgccggccatctcggcatccgctacgaggtgctgccgatcgcggaggccgtgaacgggttcgagaccatcctgtccgacatcttcaagaatatgccgcccgacatcaccgaggaaaacttgcaggcgcgcacccgcggtacgctgctgatggcgatcaccaacaagaccggcctgatggtggtgacgacgggcaacaagtcggagatgtcggtcggctatgccacgctttatggcgacatgaacggcggcttcaacccgatcaaggacatctacaagacgcaggtgtttcggctggcggcgctgcgcaacagctggaagccggaaggcgcgctcgggccggcgggcgaggtgattccacccgatatcatcacgcgcccaccgagtgcggagctgcgggagaaccagcgtgatgaggattcattgccgccctatgacgtgctcgacgccatccttgaacgtctggtcgaacgtgaacagccgctggatcagatcatcgccgccggcttcgatcgtggggtggttacccgcatcgaccacctgctcaacgtcgccgaatacaagcgccgccaggccgcgcccggcgtcaaggtgaccgccaggaacttcggccgcgaccgccgctatcccatcaccaaccgttttcgcgacaagggcgaggcgcttgccgcgccggacgagacgctggtctcgcgcgggagccgggcgtcgatcgacgcgttcgaggggtag

SEQ ID NO: 3953 - DNA, 1206 bp, BradyrhizobiumColbertium
ttgggccgtgacctcgctagaatggcggatatgcctgaattcttgtctctctcccgtgcccgcttcctccttgcctgcaccgtgctcctgagcacgatcgtgcttgccaccggcgctttcgcgcaggccggaccacccggcccgccgcctcagcccggccagaacgggctgggaccgaacccgatgtgcgtgcgattggaaggccagctcgccgcgctcgatcgcggcggcggtgatccagcccgcgaagagcagatccgccgctatcaggattcccaggccaagcagcaggccgagctcgaccgggtcaccatgcaggccaaacgcatgggctgcgattcctccggcttcttctccctgttcaacggtcagtcggcgcagtgcggcccggtcaacagtcagatccagcagatgcgcgccaatctggaccagatcaccgccagtctcgagcgcctgcgcgccggcagcggcggcttcagcccggagcgcgacagccagcgccgctcggtgctgacggcactggcgcagaacaattgcggcccgcaatatgccaatgccgcgcagccgcaaggcggcggcaacttcctgagcaatctgttcggcggcaacaatgcgggcaatccgcaagccatgccgccgtccgatctcggcccgcaatccggcaccttccgcaccgtctgcgtgcggacctgcgacggcgcctatttcccgatctcgtttgccacggtgccggcacgctttcccgacgacgagaagacctgcaaggcgctgtgcccggcggcggaagccgtgctctacacccatcgcaatcccggcgaggacatgaactcggcggtctccatcggtggccagccctacacggcgctgccgactgcgttcaaattccgcagcgagttcaacccgtcctgctcctgcaaggcggcgggacagacctgggcggatgcgctgaaatcggccgacgacaaggccgcggccgagcagcagggcgacatcatcgtcaccgaggagagcgccaggaagatgcagcagcagcggctcaacaagggcacgcctgcgaatgccaggaagggggcaacccccgcgccgacgacggcgagtgcgccggccgcaccgccgcccgccgacaccggcgcgccggcgtcgggttcggagaacaagccgatccgctcggtcggcccgaccttcctgccgcagcagcagaagtag

SEQ ID NO: 3954 - DNA, 291 bp, BradyrhizobiumColbertium
atgcgatccctgctcgcgctcattttcagcgcttccgtccttgcgatctcctgcgcttccgccgagacccgcctcttcatcatcgccgaccggttcgaccagtgcctcgccaagggcgacaagtgcggcgcatccgccgcccgcacctattgccaatcacgagattttgcccaggcatcaagctaccgccgggtcgatcccgacgaaattaccggctccgtccccaaatccggcgcaaactgctcccatggccattgcgacgaatatgtcgcaatcacttgccagcgctga

SEQ ID NO: 3955 - DNA, 1383 bp, BradyrhizobiumColbertium
atggaattgcgtctttacgatacgctgagccgggaaaagcgcaccttcctgccgctcgatgcgaacaacgtccgcatgtatgtctgcggaccgaccgtctatgacttcgcccatatcggcaacgcgcggccggtgatcgtgttcgacgtgctgtttcgcctgctgcgccacatttacggcgaagcgcatgtcaaatatgtccgcaacatcaccgacgtcgatgacaagatcaacgaccgcgcggcgcgcgatttccccggcctgccgctgaacgaggccattcgcaaggtcaccgagcagaccggaaggcagtttcacgctgacgtcgatgcgctcggctgcttgcggccgaccgtcgagccccgtgcgaccgagcatatcggcgagatgcgcgagatcatcgagaggctgatcgccggcggctttgcctacgtcgccgaggaccacgtgctgttctcgccgcaggcgatgaacgcggcgaattcctcgctgccgcgctatggcgcgctgtcgaagcgttcgctcgacgagatgatcgcaggcgcccgtgtcgacgtcgcgccttacaagcgggatgcgaccgacttcgtgctgtggaagccgtcgaaaccgggcgagccgtcatggccgtcgccggccggcatcaaggccgagggccgtccgggctggcatgtcgagtgctcggccatggcctggaagcatctcggcgagcatttcgacatccatggcggcggcatcgatctcgtgttcccgcatcacgagaacgaggtcgcgcagagttgctgcgccttccaccgggagcgcatggccaattactggatgcataacggcttcctgcaggtcgagagcgagaagatgtcgaagtcgctcggcaacttcatcaccatccatgagctgctcgcggactggccgggcgaggtgcttcggctgaacatgctcaagacgcactaccgctcgccgatcgactggaccatgaagtcgctggaggagagcgccaagacgctcgacgactggtaccgcctcgcagccgacgccgcgcccgggaaacccgcagcttccgtgatcgagccgctgctcgatgacctcaatacgccgctggcgatcgcggcgctgcacggcctgcgcggcaacgacgtgagcgcgttggctggctcgttgcggctgcttggcttcctctccgaaagcgcggcgcagtgggaaggacgaaagcagcaggcgagcggggtcgatgccaacgaggtcgagcgcttgattgcggagcggacggctgcccgcagccgcaaggattttggcgagtccgaccgtattcgcgatctgctcgccgcgatgggcgttgcgatcaaggactcaaaggaaggtacgacatgggagatcgcacgatga

SEQ ID NO: 3956 - DNA, 129 bp, BradyrhizobiumColbertium
atgggagatcgcacgatgaagcggcccgatacgcctttcccgcggcactggctctattacatcgcgctgaagatcgcgctgctggccggcgccgtggcgctggtgctcaagctctacggaatgtggtga

SEQ ID NO: 3957 - DNA, 492 bp, BradyrhizobiumColbertium
atggcacaagcgcatcccaagcccggcttgcggcccttcctgcctgctgacgtgccggtgcttgccgcgatcttcgccgccagcatcgcggaattgaccggcgatgactacagcgaggcgcagcaggaagcctggatggcggcggccgaggacgaggagtttgggaagcggcttgcggccgacctcacgctgatcgcgacgctcgagggctcgcccgtcggcttcgcctcgctgcgcggcaacgatcacattcacatgctctatgtgcatccggccgtggccgggcagggcatcgcgaccatgctggtcgacgcgctggagaagcttgcgggcggccgcggcgcgcaaagcctttcggtcgatgccagcgacaccgcgcagggcttcttcgccaagcgaggctacactgcccagcagcgcaacagcgtcaccatcaacgacgagtggctcgccaacaccacgatgaagaaggcgctcggagcggggcaatga

SEQ ID NO: 3958 - DNA, 1599 bp, BradyrhizobiumColbertium
atgagcaaggagcggctctacctgttcgacaccacgctgcgcgacggggcgcagaccaacggcgtcgatttcacgctggccgacaagcaggtcatcgcggcgatgctcgacgatctcggcatcgactatgtcgagggcggctatcccggcgccaatccgctggacagcaaattcttcgcgaccaagccgaagctcaatcatgcgcgctttgccgcgttcggcatgacgcggcgggcagggcgctccgtctccaacgaccccggtgtcgccggcctcctggaggccaaggcggatgcgatctgcttcgtggcgaagtcgtcggcctatcaggttcgcgtcgcgctggagacgacgaaagaggagaacctcgcctcgatccgcgacagcgtcgcggccgcgaaggccgccggccgcgaggtgatgctcgactgcgagcactttttcgacggctacaaggaagacccgggattcgcgctggcctgcgccaaagcggcctatgaggctggtgcgcgctgggtggtgctctgcgacaccaatggcggcaccatgcctgatgaggtcgaggccatcgtcagagaggtgacgacgcacatcccgggggatcatgtcggcatccacgcccataacgacacggagcaggcggtagccaactcgctcgccgcggtgcgcgccggcgcgcggcagatccagggcaccctcaacggtctcggcgagcgctgcggcaacgccaatctctgctcgctgatcccgacgctgaagctcaagaagggttttgccgaatccttcgagatcggcgtcacgacggagaagctggcgaccctcgtaaaagtctcgcgcacgctcgacgacatgctcaaccgcgcgccgaaccggcatgctccttacgtcggcgagagcgccttcgtcaccaagaccggcatccacgcctccgccgtgctgaaggatccgcagacctacgagcacgtgctgccggaactcgtcggcaatcatcgcaaggtgctggtgtccgatcaggccggccgctccaacgtcatcgccgagctcgatcgtgccggcattgcttacgacaagagcgatcccaagctgacgcgcctcgtcgaggaattgaaggagcgcgaggcacaaggctacgcctatgagtcggccaacgcttcgttcgagctgctggcgcgccgcacgctcggcaaggtaccgcaatatttcgaggtcgagcaattcgacgtcaacgtcgagcagcgctacaacgcgctgggagagcgggtcaccgttgcgctcgcggtcgtcaaggtcgacgtcgcaggcgagcatctgatctcggccgccgaaggcaatggccccgtcaacgcgctggacgtcgccctgcgcaaggacctcggcaagtaccagaaatacatcgagggcctgaggctgatcgactatcgcgtgcgtatcctcaacggcggcaccggtgcggtcacgcgcgtgctgatcgagagcgaggacgagaacggcgaccgctggaccacagtgggcgtgtccccgaacatcatcgacgcctccttccaggcgctgatggattcggtgatctacaaactggtgaagtcgggggcgccggcgtaa

SEQ ID NO: 3959 - DNA, 378 bp, BradyrhizobiumColbertium
atgatcgaccacatctccgtaggtgtcagcgatctcgatcgcgccgcgaaattctacgaggcgacgctcgccgcgctgggcctttcgcgcctcgtgacgcggccgcggacgatcgggttcggcaagacctatccggagttctggatcaacttgcgcgaaggcatggcgcgtgtcgcgccggagagcggcgtgcacatctgcctgcgggcgaagacgaccagcgaagtggatgcgtttcacgcagcggcgttgtccgcgggcggcgcctccgatggctcgcccggcgtccgcccccacgaccgcgtgcgttactacgcggccttcgtcctcgatcccgatggcaaccgcatcgaagcggtgacttttccgcaggaatag

SEQ ID NO: 3960 - DNA, 615 bp, BradyrhizobiumColbertium
atggtatcaatgagcacgatcaaaaccgtctgcgtctattgcggctccggccctggaaccaatcccaacttcatcgaagcggcgaaggcgctcggcaaagcgctggcggaaagcaagatccgcctcgtttatggcggcggctcgctgggcctgatgggtgcggtcgcaacctccgtgctggatcacggcggcaccgttaccggcatcattcccgactttctgcggatgcgggagaacgcgctgactcgcgtgcaggaaatggtcgtcacgcccgacatgcacgaacgcaagcggttgatgttcgagcgctcggatgccttcgtcgctttgcccggcgggctcggcacgctggaggagctggtcgagcagctgacctggcagcagctcggccgtcacgccaagcccgtgctgctcgccaatgtcgacggcttctgggagccgttattctccctggtcgcgcacatgcgcgaaacccagttcatccgggccggcctgtccgtcgatatcctgaaggcggacaagatcgaggagatcattccgcggctgcgcgccgcggctgcacagattcccgacagcgagcaggatctcgcacccgacgtggcgcggcggctgtag

SEQ ID NO: 3961 - DNA, 1881 bp, BradyrhizobiumColbertium
atgggcacgctggcgcatctgtggccctatatctggccgggcgatcgcgtcgatctgaagatgcgggtggtctggtcgctggtgctgctgctcgccgccaagctgatcacgctcgcggtgccattcagcttcaagtgggcgacggatgcgctgaccggcgccaataccgcgccggtcgcggccgacaactggcatctctgggtgattgcctcgccgctgctgctcaccgcgagctacggcgtgatgcgcatcctgatggccgtgctgacgcaatggcgcgacggcatcttcgcccgtgtcgccatgcatgctgtgcgcaagcttgcgaccctcaccttcatccacatgcacgagctgtcgctgcgcttccacctcgaacgcaagaccggcggcctgacgcgcgtgctggagcgcggccgcgagggcatcgaggtcatcgtgcgcatggtgatcctgcaactgatcccgaccatcgtcgaggtctcgctgctgctggccgtgctgctctggcaattcgactggcgttacgtggtcgccacgctgatcacggtcacgctctatatgtactacacctacatcgcgaccgagtggcggatcggcatccgccgcaagatgaacgattccgacaccgaggcgaacaccaaggcgatcgactcgctgctcaactacgagaccgtgaagtatttcagcgccgaggcgcgcgaggcgcaacgctatgacaaatcggtcgagcgctacgaagaggcgagcgtccgcacctatacttcgctcgcggtgctcaataccgggcaggcagtgatcttcacgctgggcctgaccgcgaccatgctgatgtgcgcgatgggcgtgcgcaatggtaccaacacggtcggcgatttcgtgctggtcaacgccatgatgatccagctctaccagcccctcaacttcatgggcatggtctatcgcgagatcaagcaggcgatcatcgacatcgagaagatgttcagtgtgctggggcgcgaggccgagatcaaggatgcgcctgacgcgaagccgctggtcatctccgccggcacggtgcgcttcgaggacgtgcgctttgcctatgagccgtcgcggccgatcctgaaagggatcagcttcgaggtgccggccggcaagacgatcgcgatcgtcggcccgtccggtgcgggcaagtcgacgatctcgcgcctcctgttccggctgtatgacgtctccggcggcaagatcctgattgacggccaggacatccgcgacgtcacgcaggcgagcctgcgcgcatcgatcggcatggtgccgcaggacaccgtgctgttcaacgacaccatccgctacaacatccgctacggtcgctgggacgccagcgatgccgaagtcgaggaagcggcgcggctggcgcagatcgatcatttcatccgcatggcgccgaagggttacgagacccaggtgggcgagcgcggcctgaagctgtcaggcggcgagaagcagcgcgtcgcgatcgcgcgcacggtgctcaaggcgccgccgatcctggtgctggacgaggcgacatcggcgctcgacacccacaccgagcacgagatccagggtgcgctcgaccgcgtggcaaagaaccgcacctcgctggtgatcgcgcaccgtctttcgaccatcgtcggcgccgacgagatcatcgtgttggatcagggacgcatcgccgagcgcggcacccacgcgaagctgctggcgcagggcggtctctatgcgagcatgtggaacaggcagcgcgaggccgaggcggcgcgcgagaagctggccaggatggctgacagcagcgaggcacccaaccggcagccgccgccggtcgatgatgtcctgacgaggcctgcggcggtggagtga

SEQ ID NO: 3962 - DNA, 699 bp, BradyrhizobiumColbertium
atgtccattctcgattcgatccagcgtcagatcccgccgatccacaaggagggctatcccttcatcggtggctttgcgctggcaagcctgctcctgttctggctgtggtcgccattggggtggatcggcacgatcctcaccgtttggtgcgcgctgttcttccgcgaccccgtccgcgtgacacccgtccgtgaagggctggttgtttcgcccgccgacggccgcgtctcgatgatcaccatggcgctgccgccggccgaactcggcctcggcgaccggccgttgccgcgcatttcggtgttcatgagcgtgttcaattgccacgtcaatcgcgcgcccgtagctggcagggtggaccgcatcgcgtaccgtccgggtctcttcatcaacgccgagctcgacaaggcgagcgaggataatgagcgcaactcgctggtgatcacgacgccgacggcgcggatcggcgttgtccagatcgccggcctcgtcgccaagcgcatcgtctgcttcgtcaaggagggacagtcgatcggcgccggcgagcgcttcggcctgatccgcttcggctcgcgcctcgacgtctatttgcccgtgggcaccaaggcgctggtctcggaagggcagaccgcgattgccggagagacgatcctggccgaccttgccggcgacgacccgagccgggtctaccgcaccaattga

SEQ ID NO: 3963 - DNA, 882 bp, BradyrhizobiumColbertium
atgacgccctatgacttcaaatatcccgatgcacgccgccggcggttccgaccgatcccggtgcggatgctggtccccaacgtcatcaccctgctggcgatttgcgccggcctgacctcgatccgcctgtcgatcgaggggcggatgtcgctcgccgtctacgccatcgtgttcgccgcggcgctcgacggcatcgacggccgcatcgcccgcatgatcaaggggcagtccaagttcggcgccgaactcgacagcctcgcggatttcgtcaatttcggcgtggcgcccggcctgatgctgtatttctggcagctgcacgagctcggcaatgccggctggatcgctgcgatggtattcgcaatctccggcggcctgcgtctcgcgcgcttcaacgccaccatggatgatccgaacaagccggccttcgcggccaatttctttaccggcgtgccggcgccggccggcgcaatcacggtgcttctgccgatctacatcgcgttcctcgatctcggccgcacccctgtggcggtgacggcggcctatacgcttctgatcgcctttctgatggtgtcgcgcctgccggtattctccggcaagaccaagcgcatgcgcgtgccgccggagctggtgctgcccgcgttcgtcgccgtgatcgttttcatcgcgctcctgattgcctatccctggcatgtgctgtcgattggcacggtgctttatctgctctgcctgccgctcggctacaaatcctaccgcgaccaggcgcgcgcgctgcaagccgccgcgcctgcggaaggggaagtctcgtcacctccttctgcgccgacgctgtcgaacctgtcggagccgccgcaggatgacgaccggcccggtcggctgcactga

SEQ ID NO: 3964 - DNA, 720 bp, BradyrhizobiumColbertium
gtgactgataccgcgaccgggccgctgcccgcttccgtcctcgaggcactgggccgctacgatacgccgacgatctgcaatgccatggagatcgtggcgcccgagcgacggttgatcggctacaccaccaagcaactggtctgtccgttccccgatttgccgccgatcgtcggatatgcccgcacggtgaccatccgttcggtgttgaaatcctcgcttcccgccgaggagcagtccaagcgccgcatccagtattacgagtatgtcggcaccgggcacggtccgcgcatctcggtgatccaggacatcgacggtcctgatgtcggctatggcgcgttctggggcgaggtgcagagcaacgtgcacaaggcgctcggctgcctcggcgtcatcaccgacggctcgatccgagacatcccgcaatgggcgcccggcttccaggcactggccggctcgatcggcccgtcgcacgcctgggtgcatgccgagaattttggcggggaggtgcgcgttgccggcatgaccgtgaggtcggacgacctgatccatgccgaccagcacggcgccatcgtgatcccgctcgaggtcgcggcaaagctgcccgaggctgccgagctctgcggccgccgtgaaacgccgatcctggagattgcccgcagccccgacttctctctggagaagctgaaggccgcgctgaagcgctcggcggagatccattga

SEQ ID NO: 3965 - DNA, 294 bp, BradyrhizobiumColbertium
atgttgacgctgttcagtgttcttactgcgctgccggcggtgctggcacttcacctgctcgaaccggagctcgtcctgccggtcttcagcctcgtgctctttgcagaggcggctttcgccgtgatcttggcgcgcctgattcccatcccggacaatgcggacagcatcaccctgttggacctcgccggcgggttcaccctgattggatgcgccgcagcgatgttcggcgagccggaccaggcggtcctgtttctgacggaacaaggcgacccgcggccggcgtcgcggccgtag

SEQ ID NO: 3966 - DNA, 774 bp, BradyrhizobiumColbertium
atggatatcgcaacacttgtcggcttggtggcgggcgccactttggtgtcgaccctgatcttgatgggcggcagcttcgggatgttttacgacatccacgccgtcatcgtcatcttcggcggctcgttcgccgcaacaatgatccgctttccactgtctgcgatgatccacggcgtgccgctcggcgcgaagtttgcctttaccctgagccgcctttcggcccacgacctcgtcgacgagctcgcccgcatcgccgaaatcgcccgcaagcagggcccggtcggactggaaaaggtcgagacggacgagccgttcctcgccaagggcatccgctacgtcgccgacggctacgatctcgatttcattcgcgacaatctggagcgcgaccgcgacaacttcctgatgcacctcgacgaaggcagcaagatctatcgcgccgtcggtgactgcgctccggcgttcggcatgatcggcacgctgcttggcatggtgcagatgttctccaacatgtcggatccttccaagctcggtccgttcatggccaccgcgttgctggcgacgctctacggcgccgtcgtcgccaacctgatctgcttgccgatcgcagacaagctgcacggcaagctgctggacgaagagacgaaccgcaccctgatcatcgacggcatcctgatgatccgcgactccaagagcccaacgctcgtgcgcgaaatgctgctggcctatctgccggagaagcatcgtcacaccgaaggcgagccggtgccggcttga

SEQ ID NO: 3967 - DNA, 831 bp, BradyrhizobiumColbertium
atggccaagaaaaagcgcggcgatgctcacggcggcggccacggctggttcgtaaccttcgccgacctgatggcgctgctgctggcgttcttcgtgatgctggtcgcgttctcgacacaggatgccaacaagctcaagatcgtcgcgggctcgatgcgcgaggcgttcggcgtgcagaccgaagcgcgctactcgggcatcgtcgaatccgacggcctgccgacgcgtccgcggctcaagaacgtcgaccacatccagcccgaagattcgtccaacacgccgacgccggatcaggaggatcgcgagaagacctccggcgccaagatcaaggtcgaccgcaatttcgccctggccgcagcctcgctgcgccaggcgttgcaggacatgccggagctgaccgagatgtccaagcacatcatgttcgaggaaaccaagcagggcctcaatctcgagatcgtcgaccaggacggccgctcgatgttcgccgacggctccaaggtgccttacgaccgcacgcggcgcctggtcgagaagctagcgatcccactcaaggccaccccgctgcgggtttccatcaccggccacaccgcggccggattcgtgccgacccgcagcgactacggcgccttcgacctgtcggcagaccgcgccaacgccgtgcgacagatcctcgaacgcgaaggcctgccgccgtcgcacatcttcgccgtctcgggcaaggcggatacgcagccgctgtttccggacgatccctcgctcgctgccaaccgtcgggtgaccatcaccctgatgcgtgaagatccgccgctgccgcccaatctgaagccgtga

SEQ ID NO: 3968 - DNA, 1902 bp, BradyrhizobiumColbertium
atgacggcgagcatcacatcgaccgagacccaggacgggcaaccggtcaaaacaggcttttgggcccttacgctcgggagcatcggcgtcgtcttcggggatatcggcacctcgccgctctatgcattccacgaggcggtcaagggcgcggcccatggcgagccggtgtcgcgggtcatcgtgctgggcgtgctctcgctgattctgtgggcgctgctgatcgtcgtcaccgccaaatacgtgctgctgctgctgcgcgccgacaataacggggagggcggcacgctgtcgctgatggcgctcggccagcgcgcgctcgggcgacgaagctgggttctgctcgcgctcggtgtggtcggcgcttccatgttcatcggcgattccatgatcacgccggcgatctcggtgctgtcggcagtgcagggcctcaagctggcaacgcccgcgctcgagcactatgtggtgccgctgaccgtcctcatcctggtgctgctgttcgcggtccagagcaagggaaccgccctggtcgcatcggccttcgggccggtgatggtcgtctggttcgccgtgattgcggtgatgggggcagtgcacattgccgacgaccccaccgtgctcgcggcaatcaatccctattacgcggtgcaattcgtgctgtcgcacggcatcatcggcctcgtcacgcttggcgccgtgtttctggcggtgaccggcggcgaggcgctttatgccgatctcggccatttcgggcgcaagccgatccagtcggcgtggatgttcttcgtgctgccggccctcttgatcaactatttcgggcagggggcgctcgtgctgtccgatcccagcgcgatcgaacattccttctaccgcatggtgcccgacagcctggtgctgccgctggtcggacttgcgacggcggcaaccgtgatcgcgagccaagcggtgatcacgggcgcctattcgctggtctatcaggccgtgcagctcggtctcttgccgcgtttcgaggtgcgttacacctccgaatcccacgccggccagatctatctgccccgcgtcaaccgcctgttgctgatcggcgtgatgctgctggtgctgctgttccacacccccagcaatctggcctcggcctacggcattgccgtctccaccaccatggtcgtcgacggcatcatgggtttcgtcgtgatctggaagctgtggaactggcgcgcggcaacggccgcagccgtgatcgtgcccttcgtgatcgtcgatttgagcttcttcagcgccaacctgctcaagctgctcgacggcgcctgggtgccgctgctgttcggcgtcgtcatggcagggacgatctggacttggcgcaaggggtccggaatcctgatccagaagacgcgacggatcgaggtgccgctggacgatctggtcggcagcctggagaagcggccgccgcatatcgtcaagggcacggcggtgttcctgaccagcgatcccgccttcgtaccgaccgcgcttctgcacaatctcaagcacaacaaggtgctgcacgagcacaacgtgatcctgaccatcgagaccgcgcacacgccgagggtcgatctgtcggagcggttccggatggagaagatcagcgacaagttctccaaggtccgtctgcgcttcggctatatggagcagccgaacgtgcccaaggcgcttgcgatcgcgcgcaagcagggctggcaattcgacatcatgtcgacatccttcttcgtgtcgcgaaggtcgctgaaggcatcggcgcagtcgggcatgccgctgtggcaggaccatttgttcatcgcgctgagccggtccgccaacgatgccaccgactacttccagattcccaccgggcgggtggttgaagtcggaacccaggtcaccatctaa

SEQ ID NO: 3969 - DNA, 1890 bp, BradyrhizobiumColbertium
gtggccaatgggcatggcgaggcccacacaacggcccgtttcggtgcactgaccctcggcagcatcggcgtcgtctatggcgacatcggcaccagcccgctctacgcgttccgcgaggccgtgatggcggcctcgggtgcggagggattgccgacgccggcagccgtgctcggtgtgctctccctgatcctatgggcgctcatcatcgtggtgacgctcaaatacgtcgtgatccttctccgggccgacaacaacggtgagggcggcaccctggcgctgatggcgctggcccaacgggcggttggcaccggcgggggaaccatcgtcctgctcggcatcatttccggagccctgttctatggcgatgccgtgatcacgccggccctgtcggtgctgtccgcaatcgagggcatgaaggacgtcaccctgacattcgagccctatatcgttccgctgaccatcgtgatcctcgtctgtctgttcgctgtgcagtcccgcggcacggcgcgcgtcgcagcgttctttggcccgatcatgtgcgtgtggttcgcagtcatcgcggcagcggcggtccatccgatcatccagcagccgcaggtgctgcttgcgctcaacccgctccatgcggtgtccttcatgctgcaccatggcatcatcggcttcgtgaccctgggcgccgtgttcctggcagtcaccggcgccgaggcgctctatgccgacctcggccatttcggcaagcggccgatccagtttgcctggctctccatcgtgctgccgtcgctggcgctcaactatctagggcaaggggcgcttgtcctcagcgaccccggcgcgatcgtgagcccgttcttccagctctttccgcaaggctttttccgcggcagcatggtcgtgctggccatcgccgccacggtcatcgcgagccaggccgtcatcaccggcgcctattcgctgacgcggcaggcgatccagctcggcctattgccgcgcttcgaaattcgccatacgtcggaagctcattccggccagatcttcatcccccgcatcaaccagttgctgctcgtcgcagtggtgctgctggtgctcttgttccgctcgtccagcgccctggcttccgcctacggcatctcggtcaccggcaccatggtggtcacggcaatgatgggcttcgtcgtgatctggaagggctggcgatggccgccgctcgccgccggggtgctgatcgcaccgttcttgttcctggatctgaccttcctgaccgcgaacctcctgaaggtgttcgagggcggctggatgccgctggcgctcggcgcgctcatggtcatcctgatgtatacgtggcggcgcggcagccgtctgctgttcgagaagtcgcgcaagctcgaattcccgctcgcggacctcgtggccatgctggagaaacggccgccgcaacgagtcccaggcaccgcggtgttcctgacctcggacccgctcagcgcgccgaccgcgctgatgcatagcttgaagcactacaaggtgctccacgagaagaatgtcattcttaccatcgagaccgcgcagaccccgcggatcgatccggccgaccgcgtgaggctggagcagatctcgccgaccttctccaaggtgacgctgaagttcggcttcatggaatcgcccaacgtgccgaaggcgctcgcgatcgcccgcaagctgggctggcagttcgacatcatgtcgacctccttcttcctgtcacgcagagcgctcaagcccgcggcccattccgacatgccgcgctggcaggaccggctgttcatctcgctgagccgctccgccaacgacgccaccgattattttcagatcccgagcggccgcgtcgtggaggtcggtacgcaggtggcgatctag

SEQ ID NO: 3970 - DNA, 327 bp, BradyrhizobiumColbertium
gtggcaaatcaagtgcaggatctgaccccggacgaggtctccaaaggtgtcgcggaaggacgctatctgctcgtcgacgttcgcgagccgaacgaggttcaggccgaggcctatcctttcggcgtcgtggtgccgctctcgaccttcgatcccaaggccatccccgatcccgcaggcaaggaggtcgtgttcgcctgccgttcgggcaagcgctcggtgacggcctcgctggcggcgcaggcggcgggcctgccttacgacaggcatctggccggcggcatgctggcctggaaggcggccggactcccgaccaggctcggcggctga

SEQ ID NO: 3971 - DNA, 1179 bp, BradyrhizobiumColbertium
atgtccaaaagctcgtccctgaacaaggtcttcgccgatcttcccgtcaccatcttcgaggcgatgtcgcaggccgcgcgcgacaacgaggccatcaatctcggccagggctttcccgacgatcccggccccgaggacattcgccgcgccgcagccgaggcctcgctgaacggctacaaccagtacccgtcgatgatgggtctgccggagctgcgccaggcgatcgcgacccattatggccactggcacggcctcaagctcgacccgatgagcgaggtcatggtgacctccggcggcaccgaggcattgacctcggcgatcctcgcggtggtgcagcccggcgacgaggtggtctgcttccagccggtctatgattcctatttgccgatcatccgccaggccggcggcattccgcgcctcgtccggctcgagccgccgcactggcgcctgaacgaggacatgctgaagagcgtgttcaattcaaagaccaaggcggtcctgttcaacaacccgctgaaccctagcgcggtggtctatccgcgcgaggacctcgagctgctggcgcgctactgccaggagttcgacgtgatcgcgatctgcgacgaggtgtgggagcacgtcaccttcgacgagcacaagcatatcccgctgatcaccatccccggcatgcgcgagcgcaccatcaaggtcggctcggccggcaagatcttctcgctgacggggtggaagatcggcttcgtctgcgccgcgccgccgctgctccgcgtcgccgccaaggtgcaccagttcctgaccttcaccaccgcgccgaacctgcaagtggccgtcgcctacggcctcggcaaatccgacgactatttcctgtcgatgcgcaaggatctgacccggagcagggaccgcctgaccaagggcctcgagagcctcggcttccccgtgctgaagtcgcagggcacgtacttcctcaccgtcgacctgtcgccgctagggctcaacgagagcgacaccgagttctgctggcggatcgtgaaggattacaaggtcgcggcgatcccggtctcggcattctacgagcaggacccggtgacctcagtggtgcgcttctgttttgccaagaaggaccagacgctcgataccgcgctggagcggctctcggatgcggtgcgcgggcgcaagaggtag

SEQ ID NO: 3972 - DNA, 1119 bp, BradyrhizobiumColbertium
atgacgaaggtcggccgctcggggtttcgcctcggtctcgcaatcaccgcggcggtgtcgttcctttcccaggcggccgccgccgaggagcgcgtcgtcaacttctacaactggtccaattacatagcgcctggcgtcctcgaagccttcaccaaggagaccggcatcaaggtggtctatgacaccttcgatgccaacgagacgctggagacgcgcctgatggccggcaagtccggctatgatgtggtggtgcccaccgcctatttcctgcagcgccagatcaaggccaacatcttccagaagctcgacaagtcgaaactgccgaacctcgccaatgcctggccgatggtgaccaagcaccttgcgacctacgaccccggcaacgtctacgccgccaactacatgtggggcacgaccggcatcggttacaatgtcgccaaggtgaagcagatcctcgggcccgacgccaagatcgacagctgggacatcgtcttcaagccggagaacctggcaaaattcaaagattgcggcgtgcacttgctggactccgccgacgacatctttccggcggcgctgaactggctcgggctcgatccgaactcgaccaagcaggccgacctcgagaaagcagcggaggccgtggcaaaagtccggccctccgtacgcaagtttcactcgtccgaatatctgagcgcactcgccaccggcgagatctgcttcgtggtcggctggtccggcgacatcatgcaggcacgcgcccgcgcagccgaagccaagaacagcagcggcgtcgagatcggctacgccatcccgaaggaaggcgcgcagatgttcttcgacaatctcgcgatccccgccgatgccaagaacgtcaatgaagcatacgagctgatcaactatctctaccgccccgaggtcgcggcgaagaacgccgacttcctgtcctacgccagcggcaatctcgccagccagaagctggtcgatccgaagatcctgaacgacaagaacatctatccggacgaggcgacgctctcgaagttgttcgtcatcaccgcgcgcgagccggccacgcagaggatcatcaaccggctctggaccaaggtgaagacggggcgctga

SEQ ID NO: 3973 - DNA, 933 bp, BradyrhizobiumColbertium
atggcgctgctgactgcgagcacgaaggcccgcgcgcgcgaggctgccaaatcgctcggcggaagcctgattggcgccgcgaccgtcggcctgctgcgcaccacgcgctatttcgatccggtcaagacctccgacttcttcgcgcgcgtcgtgaagacgatcggcccgcgcctgcgcgagcatcggatcggccgcgccaatctcgccgctgcctttccggagaaatcgccggaggagatcgagcagatcctgatgggcgtgtgggacaatctcggccgcgtcggcgccgaattcgcccatatggacaaggtctgggactacgaccgcgaccatcccgagaacagccggatcgaattgtcgccgcgcagcatcgagctgttcgaccggatccgcgatgacggcaagccggcgctgatcttcgctgcgcatctcgccaattgggaattgccggcgctcgccgccgtcgcgcatggactggagaccgcgatcctctatcgccgcccgaacatcgcctcggccgaccgcatcatccaggagatgcgacaggtcaacatgggcacgctgatcccggcgggccgtgacgccccgctccggctcgcccaggcgctgaaggacggcaagcacgtcgcgatgctgatcgaccagtatctcaccggcggcgtcgaggtcacattcttcggccgcaagacccgcgccaatccgatgctggcgcgcctgctccgccaggtcgaatgcccgatccacggcgtccgcatcatccgcctgcccggtggccgtttccgcggcgaactgaccgaagaggtcaagccggtgcgcgatgcggagggcaggatcgacatccaaggcacgacgcaggcgatcaccagcgtggtggaaagctgggtgcgcgagcatcccgagcagtggctttggctgcatcgaaggtggcgttag

SEQ ID NO: 3974 - DNA, 1278 bp, BradyrhizobiumColbertium
atgactgcaccacgcgacaaactcgggcgtcccgtcgtcgtcgtcaccggcatgggcatcatgacctcgctcggcgccggcaaggccgacaattgggcgaagctcgtcgccggcgaatccggcatccgcaccatcacgcgttttccggtcgacggcctgaagaccaccatggccggcacggtcgatttcgtcagcgtcgatccgttctcctcgaccgccctgtccgagcggatggccgagttggtgacgcaggaagccttggagcagtccggcatcggcgccaaggccgacttcccgggtcccctcttcctcgcggttgcgccggtcgaggtcgaatggccgcagcgtcgcgagcttggtcgcgcagtcggccagcaggacatcacctatgatgatctgctccgcatttccggcggcggcaagtacagcgcctatcatcatcgcttcatgttcggctcggtcgccgcctacctcgccgagaccttcggcaccaagggctccccgatctcgctgtcgacggcctgcgcgtccggagccacctcgatccagctcggcgtcgaagcgatccgccgcggagagaccgatgccgcgctgtgcgtcgcgaccgacggcacggtcaatcccgaggccatggtgcgcttctctctgctctcggccctgtcgacccagaacgatccgccgcaggcggcctcccgccccttctcgaagaaccgcgacggcttcgtcatggccgagggcgccggcgcgctggtgctcgaaagctatgaggcggcgactgcacgcggcgcaaagatcctcggcgtgatcgccggttgcggcgagctcaccgattccttccaccgcacccgctcctcgcctgacggcaagccgatcatcggctgcatgaacaagacgctggccgacgccggcatgacgccggaccagatcgatcacatcaacgcgcacggcaccgcgacgcccgagaacgacaagatggagtacaacacgacatcggccgtgttcggcgagcttctgcggaagattccggtcacgtcgaacaaatccatggtcggccacaccatctcggccgccggcgcagtcgaggcgatcttctcgctgctcacgctcgagcatcagcgcattccgccgacgatcaactacgacaccccggacccgacgatcctgttcgacgtcgtcggcaacaaggcgcgcgatgcccgcgtcaccgcggtgatgtcgaactcgttcggtttcggcggccagaacgcttcgctgatcctgacccgcgaaccggcctga

SEQ ID NO: 3975 - DNA, 1206 bp, BradyrhizobiumColbertium
atgactgacacttccgtttcgaagccgggccagaccgaagtctggatcacgggcattgggctcgccacctcgcttggcgagggcctggatgccaactgggccgcgcttcaggagaagcgcatcaatgtcgacgagaagggctttgccccctacatcgtgcatccgctgatgccggtcagcttcgacagccagattcccaagaagggcgaccagcgccagatggaggcctggcagcgcatcggcacctatgccgccggtcttgcactcgattccgccggcatcaagggcaacaaggatatcctgtcgaagatcgacatggtggtcgccgccggcggcggagagcgcgatctcaacgtcgacaccggcattctcaccgccgaggccaagggcgccaacgcgccgggcttcctgaacgagcggctgatgagcgatctcaggccgacgctgttcctggcccagctctccaacctgctcgccggcaacatcgccatcgtgcacggcttgggaggtacctcgcgcaccttcatgggtgaagaggtcgccggcgccgatgccgcgcgcattgcgctcgcgcgcatcgcctcgggcgaaagcgacatcgcgctggtcggcggctcgcacaacggcgaacgcaaggacctgctcgtcctctacgaattcggcgacttcaacttgaaggacaagttcgctcccgtctgggcgcgcaaggaccatcccggcttcgcgctcggctcggccggcgctttcctggtgctggaatcgaaggcgcatgcggaagcgcgcggcgcgaagccgttcgcaaagctgtcgagcgtggtcgccgacctcgccaagcgcaagcagcccggcgacatggctgcgaccctggagaagctgtggacccagttgccgaagcgcgatggcaagggcgcgatcatatccggcgcgaccggtgccgagcccgcgacctcggaagagcgcaatttcctgaagaaccatgccgagttcccggtgcgctcgaccggcacgatgttcggccacgccatggagacgcaattcccgctcggcatcgcgctggccgcactgtccatctcgcgcggcgcgctgttcccgccgcatgattccacggggaccgagattgaaatgcagggcgcacccacccagattgtcgtggtgggggccggacattggcgcggcgaaggcatggcgctggtcgaggcagtttag

SEQ ID NO: 3976 - DNA, 471 bp, BradyrhizobiumColbertium
atgcaactcgaatacttccacatgatcgatcgcatcgtcgacctcaaggtcgacgagaagacgatcgtcgtcgaagcccaggtcccgaaggaaagcaccgtattcgaggggcacttcccgggctatcccttgatgcccggcgtgcttctgatcgaatcgatggcgcaggcctccggctggcttcagctcggcgtgttcaagttcgaacgtatgccgatcctggctgccgtgaaggaggccaaggtgcgcggctcggtgttccccggcgatctcatgagcatcgaggcgagcctcacccacgaaggctccggctatgccatgaccgaggccaagatcaaggttggcggcaagctgcgcgcgaattcggcgctcaccttcacgctgattcccttccccaatgcggacatgcgctcccacatggacgcgatcgccaagcgcgtcgggtttccgcaacaggccgtatcgccatga

SEQ ID NO: 3977 - DNA, 288 bp, BradyrhizobiumColbertium
atgtcctccacattcgatcaggtcgctacgatcatcgctgaaacctgcgacatcccgcgcgacacgatcacgccggatagccacgccatcgatgacctcggcatcgacagcctcgatttcctcgatatcgccttcgcgatcgacaagcagttcggcatcaagctgccgctggaaaagtggacccaggaggtcaacgacggcaaggcgaccaccgagcaatatttcgtcctgaagaacctgtgcgcccgcatcgacgaactggttgcggccaagggtgcgagcgcctaa

SEQ ID NO: 3978 - DNA, 342 bp, BradyrhizobiumColbertium
atgaacaaccagcggcccataagctctgatgacgagcaccgggtgctccagttcaggccgcgcaccgcgccttcccggccggcccagcgcggcagcggcaccgtgcagccgctgcgcatcgcacccgaacggctcgacttgtcgcgctatgagcagccccgcgccgaacccgacaattttcgccagcgcatgcttgccaacatcgcagcgctggccttcaccattgctttgaccgcgatcgggatctggctcgcggtcagcatcgccgacctgcgccggacccaggattgcgtgctgatgggccgccgcgactgtatcaagatcacgacgccacacatctag

SEQ ID NO: 3979 - DNA, 624 bp, BradyrhizobiumColbertium
atgacgaacacgcgcgagccgagagtgcatccggtcccgattatgtcgctccggccgacacagatgacggtcggactgcgcgaggtcagggagaaacgcaagcgctggcgcgagcacgacaacaaggagcaggccgacctgctcggcaagcacatgattcccgtcgtcttcggtccagacaagcgctactacgtcatcgaccatcatcatctcggccgcgcgctgcacgatgaaggcgtcaaggaggtgctggtgaccatcgtcggggacctcaggatggtcgagcgcgaggctttctggggcgtgatggacaacaggcgctgggtctatccttacgacgccaagggcgagcggcggtcgttccgcgacctgcccaaatcgctcgccgatctcaaggacgatccattccgcagccttgccggcgaattgcgccgcatgggcggcttcgccaaggacactacgccgttctccgaattcctgtgggcggatttcctgcgcagaaggctgtcacgcaaggcggtcgacgctgatttcgacaaggcgctcgagatcgccatggctgcggcgaggagcaaggatgcgatctacctgcctggctggtgcggtccggaggacgaggattag

SEQ ID NO: 3980 - DNA, 144 bp, BradyrhizobiumColbertium
atgcgccgtctgatttttgtcattgccgtgctcgccgtcgcctcagcaggcatctccgcctcgtttgccgcagttcaccacgcccgaacattgacatttgccgagcggtttgccccggcgctcgaggcgatggcaaagcgctag

SEQ ID NO: 3981 - DNA, 168 bp, BradyrhizobiumColbertium
atgagcatcatctttcgtctcctgttcatcatcgccggcgcggtcaccgcactgttcgtcgcgcgtgatgcgctgaacttcacgatcatccagaccttcgttgcgattttgctcgtgaccgctatcgtgggcgttggaagtctctggagcctgcggcggaagacgtga

SEQ ID NO: 3982 - DNA, 2436 bp, BradyrhizobiumColbertium
gtgctgcgcgaaccgatgctcgcgctccttctgtgcggcgggctggtctacctcctgctcggcgatctccgcgaggcactgcttctgctcgtgttcggggccatctccgtcgtgatcaccatcgtgcaggagacccgcaccgaacgtgtgctggaagccttgcgagagctgaccagtccgcgagcgctcgtggtcagggacggggaacgccggcggatcgcagggcgggaagtcgtccgtggcgatctcctcgtcctctccgagggcgatcgggttccggcagatgccatgcttgtcagtgcgcgagatctggctgtcgacgagtcgctgctaaccggcgagtcggtgcccgttcgcaagcagctcgccaagatgccgcccgcggaagcggcatcgaccgatcatcgcccgggcggtgacgaccagccattcgtgtattcgggctcactcgtcgtacgaggtgagggcctggccgaggtcgaggccaccgggccccgcagcgagatcgggaagatcggattgtcgctgcatggcttgcggccggagccgcctcggctgcagcagcagactgcccggctcgttcggctttgctttctcggcggcgtggcgatcagccttgccgctgtcctgctctatggaatgttgcgcggagattggctgcaggcgttgctcgggggcatcgcaatcggcatgtccatgcttcccgaggagtttgccgtcgtcctgacggtgttcatggccatgggcgcctggcgcatctccaaggcgcgcgtgctgacgcgtcgcgccgcagcgatcgaggtgcttggctcggcgacggtgctctgtaccgacaagaccggcaccttgacgcagaaccggatgtcggtcgcggagctgaggttgcgcgacggcgtaaatatgcgggctgggtcctcgcaggcggctcccgtaagaacagagtttttcgaactggcgcgttgcagcgttctggcaagctcgccggaaccgttcgatcccatggagaaggcgctgcacgcattcgtgcatgcaggtctcccgcaggacgacgaggccgcggacgctcggaccttggtacgcagctacggcctgcgccccgaactgctggcgatgacccaggtctggcgttggtcgcatcagaagggcctcgtcgcggcggcgaaaggcgcccccgaggcgatcgcgcacctctgtaagctggatggtgcggatcaggaggcgatgcgggatgcggtcgcggtgatggcgaagaatggtcttcgcgtgctcggcgtggccgccgcaacctaccacggcgaggacctgccgccgtcccaggaaggcttcgcctttcgcttcatcggtttggtggggttggccgacccgcttcgtccgggcgttcccgaggcggtgggtgaatgccgctcggccggcattcgcgtcgtcatgatcacgggcgactatccggcgaccgccatggcgatcgccgggcaggcgggactccatgtcaacgaagtcgtgactggcgagcagatcaagcttgcggacgacggcgagctcgatgcgctcgtcagaaacgtgaacgtcttcgcgcgcgtcctgccggagcaaaagctgcggatcgttcaggcgctgaagcgctgcggcgagatcgtggcgatgacgggcgacggcgtcaatgacgcgccgtccctgaaagccgcgcatatcgggatcgcgatgggcggccgcggcaccgacgtcgctcgcgaggcatcctcgatcgtcctgctcgacgacgatttcagctccatcgtcgcctctatccggctgggacgccggatctacgacaatctgcgcaaggccatggccttcattttcgccgtccacgttccgatcgccgggcttgccctgcttcccctggttttcgggctgccgctggttctcggcccggttcacatcgcctttctggagctgatcatcgaccccgtatgctcgctggtgttcgaagccgagcgggaggagcgcgacgtcatgcagcgcccgccgcgacgggccgatgcggagctgttctcgtggcccttgatcggctggagcgtcctgcagggcgccatggcgttcgccttgatcgccgcgatcttcgtcggagcgattcgttccgggcttccgcccgatgaggcgcgcacgatcgcattcatcacgctcgtcgtctgcgtgatcgcgctggtgctggtcaaccggtccttcagcgcctccttcttgtctgccttcttccgccccaacccggcgctgctgtggatatttctctcgattgcgttcgtgctcgccacggctctgttctggccgcccgcgtccggtctctttcgtttcggtcccctgcacctggtggacctgatgatcacgctcggcgcgggattgctggtgcttacggcgctcgaactgctcaagccgttgtggggccgccggcttcggttctag

SEQ ID NO: 3983 - DNA, 504 bp, BradyrhizobiumColbertium
atgacagagctggactggcccgaaatcctgctgcgcctcggcagcgcgacgctcgccggcagcgcaatcggcctcaatcgcgacctgcatggcaagccgatcggactgaagacgctcggcatcgtcgggctctctaccgcaacggtcgtgctgctcgcggtcgcgttcgccgagcccggcgggatcaccgatgcggcgagccgcgtgatccagggcattctcaccggtatcggctttctcggcgccggcgtcatcgtccacgagagcgaccgctttcgggtgcggggcctcaccagcgcggcctgcacctttctcgccgcctgtgtcggcattgcctgcggcgccgggcagtggaagatcgtcctggtcgcgctcgcctttaccttcgtgctgctcacgatcggccgccgcgtcgaacgctggctgcatcgagccctcggcggcaaggaagatccgcaacggacagagaccttgccgcagacggattcccgagggagcggctag

SEQ ID NO: 3984 - DNA, 582 bp, BradyrhizobiumColbertium
atgacaaagaccgccccgcagcgcttccccgcacccgccctcgatacactccccgacgacatccgcacgcggcttctcgccgtgcaggagaagagcggcttcgtgccgaacgtgttcctgacactggcctatcgtcccgacgagttccgcgcctttttcgcctatcacgacgcgctgatggagaaggacggcggcctcaccaaggccgagcgcgagatgatcgtggtggcgacctctgcggccaaccagtgccagtattgcgtgatcgcccacggcgcgatcctgcgcatccgcgccaagaacccgctcatcgcggaccaggtcgcggtgaactaccgcaaggccgacatcacgccgcggcagaaggcaatgctcgacttcgcgatgaaagtctcgaccgaggcgcagcgcatctccgacgacgatttcgcagcgctcgccccgcacggcttcagcaacgacgacatctgggacatcgccgcgatctccgccttcttcgcgctgtcgaaccggctggcgaatttcacgggcatgcgtccgaacgacgagttctacctgatgggacgcctgccgaagacatga

SEQ ID NO: 3985 - DNA, 1668 bp, BradyrhizobiumColbertium
atgccgatctcggaggttcgggcgaccgtcggccgcttcgtcagcattcgttgcgccagctcggtcatcgtcgcgatgatcactgaggtctcctgcgagaacctgtcgagctccgacggctacatcgccattgcctcggtcgatctgctcggcgagatcctcaacgccgcggacaaggccaaattccagcgtggcgtcaccaactatccgacgatcggcgacgccgtcgacctgatcaccagccaggagctgcgcacgatttacgcgccgacggggtcggaccagatcaatgtcggcttcctccagcaggatcgctccgtcgtcgcctatgtcgacgtcgaggaaatgctgtccaagcactttgcggtgctgggatcgaccggcgtcggcaaatcgacgggcgtctcgctgctgctcaacgagatcctgaaggcgcggccgaacctgcgcatcttcctgctcgacgttcacaacgaatatggccgttgcttcggcgaccgcgcgctggttctcaacccgcggaacctgaagctgccgttctggctgttcaacttcgaggagatcgtcgacgtgctgttcggcggtcgcgccggcgtgccggaggagctcgacatcctcgctgaggtgattccgctcgccaagggcgtctacacccagtaccagaacgccgaccgcatcggtctcaagcgcatcgatcccaagcagatcggctacaccgtcgacacgccggtgccctatcgcctcgtcgacctgctgtcgctgatcgacgagcgtatgggcaagctcgagaaccgctcctcgcgcatcatctatcacaagctgatctcgcgtatcgaggccgtgcgcaacgacccgcgctacgccttcatgttcgacaacgccaatgtcggcggcgacaccatggccgaggtgatcagccatctgttccgcctgccagcgaacggcaagccgatgacggtgatgcaactcgccggcttcccggcggaagtcatcgattccgtcgtctcggtgctctgccgcatggccttcgatttcggcctgtggagcgacggcgtctcaccgctgctgttcgtctgcgaggaagcccaccgctatgcctccgccgaccgcaacatcggcttcgggccgacccgcaaggcagtgtcgcgcatcgccaaggagggacgtaaatacggcgtctatctcggcctgatcacgcagcgtccggcagagctcgacgcgaccatcatctcccagtgcaacacgctgttcacgatgcgccttgccaacgatcgcgaccaggccttgctgcgcgccgcggtgtcggacgccgccgcgaacctgctctccttcgtgccctcgctcggcacgcgcgaggtgctggccttcggcgaaggcgtcgcactgccgacgcgcttgcgcttcaaggaggtgccgccgcatcaattgccgcgcggcgaagccaccatctcgagcgtgccctccgtcacctccggccatgacatgcatttcgtcagcgccgtgctcgagcgctggcgcggtgccacatcgcagcgcgacgtgccgaacgatccggtgttctcggcaccgccggcgaagacgatgtccagcgtcgaagccccgatgctgcagccatcgatgggccttgatccggaccgcttctcgctgctcaagaagccgctgcggtaa

SEQ ID NO: 3986 - DNA, 969 bp, BradyrhizobiumColbertium
atgcagcccgaaccgatcctcgatctcgctaatctcggccatatggagctgttgacgcccaagcctgatgagagcctcaaattcttcgtcgacgtcatgggcatgaccgtcagcgggcaaaagggcgagtcggtttacttgcgcggctgggacgattacgaacgctattcgctcaagctcacggcttcgaagacatcgggcatgggccacatggcgctgcgcgcacgcagccagcaggcgctggagcgtcgggtcgccgcgctcaagggctctggcttcgacatcggctggatcgacggcgacatggggcaggggccaaccttccgctgccgcgatcccgacggccatatcgtcgagctctactacgagaccgaatggtatcaggcaccgccggagctcaagcccgcgctgaagaaccaggcgcagcgctttccggcccgcggcgtcaacgtccgccggctcgaccatctcaactgccttgccgtcgacatcaaggccaaccgcgagttcttcgagaactatctcggctgccggctcaccgagcaaatcgtgctcaacgacggtcgtgaagccgcgatgtggctgaccatgtcgaacaagagctacgatttcgcctattcgctcgaccattccggcgtgcccggccgcttccaccacgtcacctacgcgctcgacagccgcgaagagatcttgcgcgccgccgatatctttctcgagaacggtgtgcacatcgagaccggtccgcacaagcacgcgatccagcagaccttcttcctctatgtctacgagcccggcggcaaccgtgtcgaggtcgccaatgccggtgcgcgtctcatcctcgcgcccgactggaagccgatcgtgtggaccgaagaggagcgcaagaagggccaggcctggggactgaagacgatcgaatcctttcacacccacggcacgccgccggtggaggtggagaagcacgcctga

SEQ ID NO: 3987 - DNA, 3525 bp, BradyrhizobiumColbertium
atggcctcccctgtttcgaacggagctgagcggccatcgggctcgctcgtcgtcgcccgtaccgtcgacgaggtcacgtccgagaccttcgtccgcatcactgcggatggttcggtcacggcctataatggccacgtcgatctcggcaccggcatccgtaccgcgcttggccagatcgtcgccgaagagctcgacgtctcctttgcgcgcgtcgtgatcgtgctcggcgacacgtcggtggtgccgaaccagggcgcgacgattgcgagcgaaaccatccagatcacggccgtccctctgcgcagggctgcagcgcaagcgcggcatttcctgatcgcacgcgcagcagaacgcctggagctgccggccgccgacctcaggatcgaagacggcctcgtgcgcggccgcgacaaccgcagcatcagctatggcgagctgatcggcgacgagacgatccggctcgagctggccgacgatgtgcaagtcaagccggccgacgattactccatcgtcggccagtcggtgccgcgcgtcgatctgcccgccaaggcgacgggcgagctgaccttcgtccacgacatccgagtgcccggcatgctccacgggcgtgtcgtgcgcccgccctatgcgggcgtcgacgccggcccgttcgtcggcaccagcttgctcgcggtcgacgaatcctcggtccgcggcattcctggcctcgtggccgtggtgcgcatcggcgatttcgtcggcgtcgtcgccgagcgcgaggagcaggccatccgcgcagcggagcagctcaaggtgagctggaagccgacgcccaccctgaccgatcttgccgacgtcgagaccgcgctccgcgccaatccgtcgactccgcgcacgctgatcgacaagggcgacgtcgaccaggcgatcgcgggcgcggccaagccgatgcagcgcacttacgtgtggccgtatcagatgcatgcgtcgatcggtccatcctgcgcggtcgcggatttccaggaaggcaatatccgggtctggtccggcacacagaacccgcatgtgcttcgcggcgaccttgcacttctgatcgagcggcccgagagcgagatcgaggtgatccggctggaggctgcgggctgctacggccgcaactgcgccgatgacgtcaccgccgacgcgctgttgctatcgcgcgcggtcggacggccggtgcgcgtgcaattgactcgggagcaggagcacgcctgggaacccaagggcaccgcgcagctcatcgacgtcaatggcggactggacgccggtggcggcattgccggttacgatctggccacgcgttacccctcaaacgctgcgccgaccttggcgctgctgctgacgggacgcatatcgccggaaccggcggtgcttcagatgggcgaccgcaccgcgatcccaccctacgactacgatcacatgcgtgtcgttgcccatgacatgccgccgatcgtgcgcgcctcctggattcgcggcgtgtccgcgctgccgaacaccttcgcccacgaatcctacatcgacgaggccgcaacggaggccggcgtcgatccgatcgaataccgcctgcgctatctcaaagacccgcgcgcgatcgatctcgtccatgcggtcgccgaacgtgcggggtggaaaccacgtccggtacgcgaggagaaggacggcgaggtcgtgcacgggcgcggctttgcctatgcgctctacgtgcacagcaagtttcccggttatggcgcggcgtggtcggcctgggtcgccgacgtcgcggtgaacaagaccaccggcgatgtcagcgtcacgcgcgtcgttgcggggcaggattccggcctgatgatcaatccggacggcgtgcgccaccagatccagggcaatgtcattcagtccaccagccgcgcgctgatggaggaagtgtcgttcgagcgcggcgcggtggcggcgcgggaatggggtgcctatccgatcatccccttccccgacgttcccaagatcgatgtcctgatgctgccgcgtcaggaccagccgccgctcggcgtcggcgaatccgcctcggtgccgagcgcggcggcgatcgcgaacgcgatattcgacgccaccggcgtacggtttcgcgagccgccgtttacgcccgagcgcatcttgaaagggctgcatggcgacaggccggcgacgccgcaggccctgcccgcaccggccgcgccgccaccgtctcggatctggacaaatcccttcgccaagcgcgccggcgtcttcgctgcggttgcggccctgtgcaccgctgcgatcgggattggcgcagcactgcttccgggacgagccatcgcaccgatctcgcgaccggatgcatcggtctattccgcggcaacgattgcgcgcggccagcagcttgctgcgctcggcaactgcgcggagtgccacaccagccttggcggagcggtcaacgctggcggccgcgcactggagacgcccttcggcacgatctacgcaaccaacatcacacccgacgtcgagaccggcatcggcgcgtggtcctatcccgccttcgaacgcgcgatgcgcgacggattgcatcgcgacgggcgccagctctatcccgcctttccctacacgcattttgcgaagacaagcgacgccgacatgcaggcactctacgcctacttgatggctcagccttcggtgcgcgcgacgccccccgcaaacgcgctcaaattcccgttcaatctccgtccgctgctggcaggctggaatgcgctgtttcatcggacgcgcgagttcaagcccgatcccgcgaagtcggaagcctggaatcgcggcgcttatctgatcgaaggtctcggccattgcagcgcctgccattcgccccgcaacgcgctcggcgccgagcagcgcgaggcctatctcgccggcggttttgccgagggctgggaagcgccgcccctgacctcgctctcgcatgcgccgatcccgtggagcgaggatgagctctttgcttatttgcgcaccggccattcgcgctatcacggcgtcgcggccggccccatggcgccgatcgtgaaggatctcaaagccctgcccgaccaggacatccgtgcgatggccgtctatctcaactcgttcaacgatagggccatggggacccaggacgcacttgccgcgaagctcgagagcgggacgcaggtcgccgtcgccgcatcccccggcgcgcgcctctaccagggtgcgtgcgcggtctgccacgaagtcggcggtctgccgctgttcggcaccaggccttcgctcgcgctcaacagcaatctgcacagcagaacggcggacaatctcgtgcaagtcatcctgcacggcattgtcgagcccgtctccagcgacctcggctacatgccggcgttcaggaacagcatgagcgacacgcaggtggaggagctcgtcacgttcctgcgccggcagtttgcacccgacaaaccggcgtggaccaacgtgcgcgagacgatcgcgcgcctccgatcatcggcacattag

SEQ ID NO: 3988 - DNA, 483 bp, BradyrhizobiumColbertium
atgacgcaggcatcgatccgcctcaccgtgaacggcaggatccacgaggtcacggcagagcgccagacgccgctgctctatgtgttgcgcaacgagctcgcgctgaatggcccgaagtacggttgcggcctcggcgaatgcggcacctgtactgtcctgatcgacggcgcggcggcgcgctcctgtgtgatcccggtgagcggctgtgaaggccgcgacatcgtgacgctcgaaggcctcggcacccgcgagagacccgacctcgtgcagcaggccttcatcgacgagcaggctgcgcaatgcggctactgtctcaacggcatgatcatgaccaccaaggcgctgctcgccatcaacccgcggccgaccgagcaggaggcgctggcggcgctacgctacaatctttgccgttgcggcacccatgtcgaaatcctgcgcgcggtgatgcgcgcatcgggccagatcgtcgaggccgcggactga

SEQ ID NO: 3989 - DNA, 1473 bp, BradyrhizobiumColbertium
gtgtccgcctccgacatggtgacagaaacgacgagcgccgtcatcgacaagatccgctgcgatgcgtgtccggtgatgtgctatatcaagccgggcgcggcgggggcttgcgaccgctatgccaaccacgacggcaagctcgtccgcgtcgatccgcacgtcatcctggagcgcaccgtctcgcatggcggcaagctggtcccgttcagccgcaccgaggactgggacggcaagatcgtccacgaaccctcgaccttcgtcacagcgatcggcgcgggaacgacctatcccgactacaagccggcgccgttcatcgtttccgcagaggtcgacggcgtcgacatggtgactgtggttaccgagggcatcttctcctattgcggtgtcaaggtgaagatcgacaccgaccgctatctcgggccggagactgcgactgtgcgcgcgcaaggggaggcggtcggccacgtcaccaccagcgaatacggctcgcagatgctgtcgctcggcggcgtgcatcatctcaccggcggctccaagaaggaaggtcgcatcacctgcgacacgctgatggatctcgccaattgcaaggcggtcgagctcaccatcgacggcggcgccacggtggtggtgcaggccgggcagcccccgatcgtcaacggcgtgaaagaagagcgtatgcgcgtcggctgcggctctgcgacgatcggcatgttcgcaaagcagtggcacggcaaggtcgacgaggtcgtcgtggtcgacgaccacatcaccggcgtgctcagcgagcatcaggccggcaagctgctcgacatcgccgataccggcatcaagatgaagggccggcgttcgacgcccggccgctatttccaggtcgccgatcccggcacgggttggggcggcaccgacatatccgacccgctctcgatcctcgggccgtttgatcccaaggaagcaaagcccggcctgaccatgctgatggtctccaccacgggtgagcattcgtcctactacgtgctcgacgatgccttgaggccggtcgagaccgagatgccggccgacctgaagttttcggtcgagcgcatccaggagaattgcgagccggcgctgtgcaccgtgctgttcatggccggcgcgggcggctcgctgcgcgcgggtgtcaccgacaatccggtgcggctgacccgttcggtgaaggatgcgctgacgcgagtcaccagcggcggcgcaccggtttatgtctggcccggcggcggcatcacctacatggtcgatgtgacgcagatgccttcaggcgcgttcggctatgtgccgacaccggccctggtcgcgccgatcgagttcacgctgaagctgtccgactatgccgcgctcggcggacacatggactatgtgaagccgcttgccgaggtgcagaacggcgacgatatccgccagttgccctggcatcatccgattccggggcgccggacatga

SEQ ID NO: 3990 - DNA, 897 bp, BradyrhizobiumColbertium
atgatgagacgcccgcaaatcgcattgctgtctgatggccggcggctgcatttgcaggatggaccgatcgatctgatcgcggaggcgaggggagctgcaggcgaggtgcgctccgcctatgaggccgcggtgcaccggttcaccggactgctggacgagctctgcgccgagttggcggatttgcggatggctgcggcggatcggacgtcgctgcagggcgtcgtcgcgcgtcgcatgcactccgctgtggcgccctatgccgctgattgcttcatcacgccgatggcggcagttgccggcagcgtggcggaggagattctggccgcaatgctgcgtgctgcgacgcttgatcgcgcctatgtcaacaatggcggcgacatcgcgcttcatctcggcggcggtgagtctttttcggtcggctttatggatcggcctgatcgcgatggcgtgatgcggacgatgcggatcgaggcggatgatccggtgcgcggcatcgcgaccagcggacgccggggccgcagcttttcgctcgggatcgccgacgcggtgacggtgctggcggcgacggcgtcgcgggccgatgcggctgcgacggtgatcgccaatgccgttgacctccccgggcatcgcgccgtcatccgcaggcctgcgaacgagcttcagcccgacagcgatctgggcccgcgcctcgtcacccgcgacgttggtgagttgtcgcacgatgacgtcgccgtcgcgctcgaatctggcgcggaatgtgcacgacaattgttcgatcgcggactgatcgagggtgccgtgctgcagctttgtggtgatatgcttgtcatcggaccgaaagacattgaacggcagggatcgctcccgcgtcagccggagaatgcggttcatgtctga

SEQ ID NO: 3991 - DNA, 585 bp, BradyrhizobiumColbertium
atgagcgcgatcatccgcaagatcgtcaccgtcgtcgaagagacgcagatggagatgggccggcaagtctcgccgccgacgcggcgtgcggctgcgatcgccgtgatcgagaatccatttgccggaaagtacgtcgaggatctctcgccgctgatcgccatcggcgaggagctcggagagctcctgtcgaagcgcgcggtggccgcgctcggtatcgacggcgccaaggcacagagctacggcaaggcggctgccgtcggcgagaatggcgagctggagcatgccgccgcgatcctccaccccaagatgggcgcgccggtacgcaaagtgctgggcaagggtgcggcgctgattccctcgtcgaagaagcgcagcggcccgggtacgacgctggacatcccgctggggcacaaggacgcagccttcgtccgcagccatttcgacggcatggaggtacagatcaacgatgcgccgcgcgccaacgagatcatggtcgcggttgcggtcaccgacagcggccgtccgctgccgcgcgtcggcgggctgacggtcgcggagatcaagggcgaagacggtctgagatag

SEQ ID NO: 3992 - DNA, 1203 bp, BradyrhizobiumColbertium
atgcgagcaagaaatatcatcgtcggcgcggctttcgcgtttctggcgggcggcatggctcattcggccctggcgcaggacatcaagatcggcgagatcaacagctattcgctgctgccggcgttcaccgagccctatcgcaagggttggcagctcgcggtcgaggaagtcaacgcggccggcgggatcaacggcaagaagctcgtcgtcatctccaaggatgacggcggcaagccggccgatgcgcagaccgcggccaacgagctcgtctcgagcgaaggtgtcgcgatgctcgccggaacgttcctgtcgaatatcggcctcgccgtcagcgacttcgccaaccagaagaaagtgttcttcctcgcggccgagccgctgacggacgcgatcacctggtccaagggcaacaagtacaccttccgcctgcgtccatccaactacatgcaggcggcgatgctggtggaggcggctgcgaagctgccggccaaacgctgggccacgatcgcgccgaactacgaatacggccagtcggcggtcgcggtgttcaagaagctgatgtcggagaagcgcccggacattcagtgggtcgacgagcaatggccgccgcagggcaagatcgacgccggcccggtggtgcaggcggttgccgccgccaatcccgaagcgatcctcaacgtcaccttcggcgcggatctcgtcaagttcgtgcgcgaaggcaacacccgcggcctcttcaaggggcgcgaggtcgtctccttcctgaccggcgagcccgaatatctcgacccgctcaaggacgagacgcccgagggctggatcgtcaccggctatccctggtactcgatcaagacgccggagcatgatgcgttcctgaaggcgtaccaggccaagtacaacgactatccgcgcctcggctcgatcgtcggctatcagacgatcaaggcggcagcggcgatcctcgccaaggcgggctcgaccgatccggagaaaatgatcgccgcggcggaggggctgtcgatgccctcgccgttcggcgagatcacgttccgcaagatcgatcatcagtcgaccctcggcgcctttgtcggcaagacggcgctgaaggacggcaagggcgtgatggtggattcggcctacaagaagggcggggactatctgcccagcgatgccgaagtcgcgaagctgcgtccgaaggattga

SEQ ID NO: 3993 - DNA, 1890 bp, BradyrhizobiumColbertium
atggccttttacgtcgtacagtttctgaccggtctcgccagcgcagcgtcgctgtttctggtggcctcgggcctgtcgatcatcttcggcgtgacgcgcatcgtgaacttcgcgcatggcgccttctatatgatcggcgcctacatcgccttctcgctcactgaacggctttccggcgcgttcggcttctggggcgggatcctcctcgcggcgctcgcggtggcggtgatcggcgtcatcgtcgagatggtgctgctccgccgcatctaccatgcgccggagctgtttcagctgctcgcgacattcggcctgactctgatggtggaggatctcgtcgtcctgatctggggacctgacgatctcgtcggccgccgcgcgcccggcttcagaggcgcgatcgatttcttcggacagaacgtcccgacctacgacctgttcctgatcgtgctcggaccggtcgtgctcggcattctctggcttctgttccagcgcacgcgctggggtgtgctggtgcgggcggcaacgcaggaccgcgacatggttgccgcgctcggcgtcaaccaaaaatggctgttcacgtcggtgtttgccgtcggcgttttcctcgcagccctcggcggcgcgctccagatcccgcgcgatgccgtgcatcacgccatggacctgcgcatcatcgtcgaggtgttcgtcgtggtcgtgatcggcgggctcggcagcatcgtcggcgccttcgttgcggcggtgctggtctccgagctcaatgccttcggcatcctgatctttccgaaaatatcgatcattctcgttttcctggtcatggcggtggtgctgatcgttcgcccctggggcctgttcggcaagccggaggcggccgcgcgcaagacgccgggcctcaccgtcaatccctggcggccgctgacgtcgaacgagaggttgatggcgcttgctgcgctcgtcgttgcggcgaccctgcctctgttcgccggcaattatctgctgacggtcggctcggagatcgcgatcttcgtgatcttcgccgtcagcctgcatttcctgatgtcggtcggcggcctcgcgtccttcggccacgccgcctatttcgggctcggcgcctacggcatcgcgttcctggcaaaaatggcgggactgccgatgatcgtgtgcctgttgctcggcccgctgctcggctgcatgggcgccgccgtattcggcttcttcgccgtgcagctctccggcgtctatttcgccatgctgacgctcgctttcgctcagatcgtgtggtcgatcgcctttcagtgggtggaggtgaccggcggtgacaacggcattctgggcctctggccctcgagctgggcggcgagcccgtcgcatttctactggctggcgctcggtgttgcagcgctggtgacggtcgcgctgcgggcgatggtgttctcgccgttcggctatgcgcttcgtgccacgcgcgactcgctgctgcgcagtgaggccataggcatagatgccaagcgcatccagtggaccgccttcgtgatcgcaggcacgacggccggcatcggcggcgcattgttcgcctacctcaaagggagcgtcttcccggacaatctcggcatctcgctgtcggtcgatgcgctggtcatggtgctgctcggcggcgtcgagacggtgtcgggcgcggtgatcggcgccatcgtctacaaggccttgaacatctggctggtgagccagaccgatctgtcgaagctcgtgctcggcggcttcatcgtgctgatcgtcgtcgtcttccccaagggcatcgtcggcatgctggagatgctggcgcagcgccgcaggaaagcatcgccgccggggtctcccttgctcgccaagccgatcgagtctgccgaatga

SEQ ID NO: 3994 - DNA, 792 bp, BradyrhizobiumColbertium
atgaacgttgcacccccacttctcgccgtcgagggcctcaccaaatcctacggaggcatccatgccgtgcgcggcgtctcgttctcgctgcgtgccggcgagatcctggctctgatcgggccgaacggtgcgggcaagagcacctgtttcgatatgctcaacggccagaacatcccggatagcggccatgtccgcctgttcggcgaggagatcacgggacggaagccgcgcgaggtctggcggctcggcgtcgggcgcacctttcagatcactgcgactttcgccaccatgaccgtgcgcgagaacgtgcaggtcgcactgatctcgcacgggaagcagctgttcaatctgttcggctcggcgccgaagttcgaccgcggcgaggccggccgtctgctcgagctggtcggcatgggcggctatgcggaccgaccctgcggcgagcttgcctatggcgatctcaagcggctcgaactcgcggtggcgctcgccaaccagccgaagctgctgctgatggacgaacccacggccggcatggcgccgcgcgagcgcgtcgatctgatgcggctgaccgcgagcatcgcgcgggaaaaatcgatcggcgtgctcttcaccgagcatgacatggacgtggtgttcgagcatgccgaccgcatcatcgtgctcaatcggggtacgttgattgccgaaggcacgccggcggaggtgcgtggcaatccccaggtgcaggccgtgtatctcggcgaggggctcgtctacgacgcccgccaccgcgagggagcttcggcatga

SEQ ID NO: 3995 - DNA, 705 bp, BradyrhizobiumColbertium
atgaagctgacggtgcaagacctcaacagtcattacggtccggcccatattctgttcgacgtcggcttcgaagtcggcgagggggaggtggtggcgctgctcggtcgcaacggcgccggcaagtcgacgacgtttcgttcgatcgtgggcctcgtcgcgcagcgctccggccgcatcacgttcgaaggcaaggatgtctcggcgaagccgacacatgagatcgtgcgcgagggcctcggctatgttccggaggagcggcggatcttcacggacctgaccgtcgaggagaatctcgaggtcggccgccagccgaggcggcccaacgcgccgcattggacccgcgagaagctgttcgcgctgtttccgaatctcggtgagatgaagaaccgtccgggtggccgcatgagcggcggcgagcagcagatgctcaccatcgcgcggaccctgatgggcaatccctcgctggtgctgctggacgagccctcggagggcctgtcgccgaagatcgtggagcagatggtcgatgccatcctgaccatgaagaaggagggcgtcagcatcgtcgtctccgagcagaacctgcatttcgcgcggctgatttccgatcgcgcctacatcatcgagcgcggccgcatctgcttcggcggcaccatggccgagctcgacgcgcgtccggatatccgcgacgcgcatctgtcgttgtga

SEQ ID NO: 3996 - DNA, 456 bp, BradyrhizobiumColbertium
atggcgagaagcgtcacggcgaagaagagtgtcaagccggcaagaccgccttacgtgctggacgaacaggtcggcttcatcctgcgccaggtctggcagcgccacagctcgatcttcgcccgcgacatcggcaccaacctcacgccaacgcaatgggcggcgttgtcgaaactggcagagaccgggccgtgctcgcagaaccagctcggccgtctcacggcgatggatgtcgcgaccatcaagggtgtgatcgatcgcctgacggcacgtggtctcaccgagaccagccaggatccggacgacgggcggcgcttgctcgtgagcctgacccgcgccggtcagcagcttgccgaaaagttggccccgaatgccctcgcgatcagccgcgagaccttggcgccgcttgagcccaaggagcgcgatacgctgatggcgctcttgaacaagctgcgttga

SEQ ID NO: 3997 - DNA, 390 bp, BradyrhizobiumColbertium
atgagagcggcgaattggcttgcgatggccttgtgtctcggtgcgtctctagcaggcgcatgcggtcctgtccttgcagctcaagcctatgaagggttctgggcatcgaccaagaaggactgccgtgatgacgacagcccgaaccgcatgagcatcgaaggcggcaaccgcctctattggtacgagacgcgatgcctcgccagtcggatcacggccgacggaaagctgagctggaagatgcggctcgcctgtgaaggcgagggcgagaagtttcgctccagtccccgggtctcgatcgcggcggatggcagactggtgatggacaatggaccggtcgggcgcgccaagcgccagacctatgtgcgttgcgagttgcccaaacggcgctga

SEQ ID NO: 3998 - DNA, 1197 bp, BradyrhizobiumColbertium
atggcgcatgacgccccccaggccaccggaccctcgaagctggtgatccgaaatatcggcctgatcctgtccggcgctttggaaaagccgatcctggacggcgacaccatcgtggccgagaacggcaagatcaccgccatcggccgctacaaggacgtcaatacggaaggcgccaccaccatcgtcgatgcccagggcaccacggtcgcgccaggcctgatcgacagccacgtccaccccgtggcgggcgactggacgccgcggcagaaccagatcaactggatcgacagctacctccatggcggcgtcaccaccatgatctccgccggcgaagtgcatatgcccggccgtccccgcgacgtcgtcggcctcaaagcgatggccgtgttcgcccagcgcgcgttctggaccctgcgtcctggcggcgtgaaggtgcacgccggcgcgccggtgatcgaatgcgagatggttgaggaagatttcaaggagatggccgccaacggcgtcaagctgctcggcgaggtcggcctgggcggcgtcaaggacggcccgacggcacgcaagatggtcggctgggcgcgcaaatacggcatccagagcaccattcacaccggcggcccatcgatccccggctccggcctgatcgataaggacgtggtcctggaggccgacactgacgtggtcgggcacatcaatggcggtcacaccgccctgcccgacgaccagatccgctgcatctgcgagggctgcaagcgcggactcgagctcgtgcacaacggcaacgagcgctcggcgctgttcacgctgcgcaccgcgcgcgagatgggcgacctgcaccgcgtcatcctcggcaccgacgcgcccgccggctcgggcgtgcagccgctcggcatcttgcgcatggtctcgatgctgtcctcgctgggcgaactgccggccgagatcgcgttctgccttgccaccggcaacaccgcgcggatgcggcagctcgattgcggcctcattgaagtcggccgctccgccgacttcgtcatcatggacaaggcgcagcactcgcccggcaagaacatcctggagagcgtgcagctcggcgacctgcccggcatcggcatgaccatcatcgacggcatcgtgcgcacccagcgcagccgcaacacgccgccggccggcaaggtgcctgaggtggtcgcgaagtaa

SEQ ID NO: 3999 - DNA, 774 bp, BradyrhizobiumColbertium
atgagcaatttcaaccaggaaagcgttctgagcgtccaccactggaccgacacgcttttctccttcaagaccacccgcagcccgaccttccgcttccgcaacggcgaattcaccatgatcgggctcaaggtcggcgagaagccgctgctgcgggcctacagcgtcgccagcgccaattacgaggagacgctggagttcttctcgatcaaggtcccggacggaccgctgacctcacggctccagcatctgaaggaaggggacgagatcatcgtcagccgcaaggcgacgggcacgctggtgatcgataatctggaggaggggcggaacctctacctgatcggcaccggcaccggccttgccccgttcctgagcgtgatcaaggaccccgagacctacgagcggttcgagaaggtcgtgctgctgcacggctgccggcacgtcaaggagctcgcctatggcgagatgatcaccgagacgctgccgaaggacgaattgatcggcgagtacatccgcaaccagctgatctactatccgaccgtgacccgcgatccgttccgcaaccgcggccgcatcaccgacctcatcacgtcaggcaagctgttcgacgatatcggcctgccggtgctggaagcagcccgggatcgcgtcatgatctgcggcagcccggcactggtggcggacacgcgcgtgcttctcggcgaacgcggttttgtcgagggcaatcacggtgaaccggcccagttcgtggtcgagaaggctttcgccgagcgctga

SEQ ID NO: 4000 - DNA, 324 bp, BradyrhizobiumColbertium
atggttgcggacagcgacagcaacatcgcctggcaccgggtccagttgaagaagaaccgcgccgagttgaaggcgctggagaccgcgcgcttcacgatgggcgagatcgcctcgtcgaagcgcaatggccagacccagaagtcgatcgcagaactcaagcgcaagatcttgcagtccgagcgcgtggtcgccgatcacgacaagcgcacgcgccgtccgttggcgaccgacctgcaaagcctcagcaatggcagctggagccattgggacgcctacacgcaacagcagcgcaagaccggccagcgctctccggggcgcggctag

SEQ ID NO: 4001 - DNA, 1215 bp, BradyrhizobiumColbertium
gtgcgcatcgatttcaccagcgaggcctaccttcgcgagccgcccaaggcgattgcgaagctgcgcatgtccggccccgtggtcgcgacacgatttcctctcatcggcgacgtctggatctccacgacccacgatgccacggcgcaaatcctgaaggacagcgcgaccttcacgttgagaagggaagatggcgacgtcgcgggcctgcgctggtggatgccgagatacgtcaggaccatcgccaacaacatgctgacgatggacgagccggatcacaagcggctgcgcagcatcgtggacgaggcctttcgccggcgcgcgatcgtcgccatggagccgcgcattcgcgccatcgccgacacgctcgcggacgagctgttcgcagctggaagcccggccgatctcgtgcagcgctacgcacgcatcctgccgctcgcggtgatctcggagctgctgggcctgcctctggccgaccgtccgaagttcatcgcctgggccaacgcgatgtcctcgctgacgaacgtcttcggcttcttccgcctgttgttcgcgttccgcaagatgcgggcctatctcgaacggcaattgcagatcgcgcgcgcggagggtggcgagggcctgatcgccgagctgattcaggtggagcgcgaaggcggccagatctcgccggacgaaatggtctcgatggtgtttctgttgctcgcggcgggatcggaaaccacgacgcatctcatcagcggttccgcttacgaactgctgaggaattccgggctgcgcgactggctggagcaggactggagccgcatcgggctcgccgtggaggagttcctgcgcttcgtctcgccggtgcaattctcgaagccgcgctacgtgcgacgagacgtcgagatagagggcgtgcggctgaagaggggcgatcgcgtcatggtgatgctggctgctgcgaacatggatccggccatgcatgagcgcccggagaggctggatctcgaacgcaagccgaaccgtcacatctcgttcggaacgggaatccatttctgcctcggccatcagctcgcgcgcatagagaccgcctgcgcgctggaagctctgttcgtgcgctggccgaaacttggtctggccgtcgatcccgccggggtccgctggcgcaagcgaccgggcttgcgcgccgttgcgatgcttcccgtcacggccgagagccgcggaacaaggtaa

SEQ ID NO: 4002 - DNA, 186 bp, BradyrhizobiumColbertium
atggccagcaagatgccacctgttccgccggacaatcagagccgaaagggaactggcgacagcaagcagatgtccgccgatcagctgccgcagggtcagcaacgcgcccaaaatccggaccagcaaggacaacagggcaacatccagcagaacacgaccaatcaaggctatcagcaagatcgctga

SEQ ID NO: 4003 - DNA, 228 bp, BradyrhizobiumColbertium
atgaccaataagcaacccaagctgtatgcgccgagcgagaaggacctgcgcgagaatcccatgatcgggggatcgaagggcgccacgatggcaggcgcctcggccgaggacctcgaggacgcccttggcgccaacacgatcgaaggggacgtcgagaacgacgtcaacgccgccggcggcatcgacaaggacgtcgcgcgcagcggctcccatcgacgccgacgctga

SEQ ID NO: 4004 - DNA, 264 bp, BradyrhizobiumColbertium
atgcaaggcaacaagacgcacgaacagcaattgcgcattcttgaacggaagagcgatgtgcccgatcagcgcgagcttgaccaggccatcggccgcaatccccgggatgactccgttcatcatgccaaccggcaggcacggcaaagcgagtttcccgtgagtcgcggcggtctcaaccaggaaagcgaccacaataagcacaacgatcccggtcaaagcggccacaagccgccaagaccgacgacggcgcaagagaagcactga

SEQ ID NO: 4005 - DNA, 201 bp, BradyrhizobiumColbertium
atgcacggcaagggcgacggcacgggcgcgctgaccgacgtgccgaaggagatgatcggcgacaacatggtcctgtccaaccgcgacaagaagcagcattcggacattcgcggcatggacggcaagaccatccagaccgagcaatatcaggaccattctgcgaaccggctcgacgatgagccggggaccgaccagacctga

SEQ ID NO: 4006 - DNA, 1179 bp, BradyrhizobiumColbertium
atgtcctcgctgggggcgatcgtcacgcaagcgatcgttcatcattatggccgcgatgcgtttctgcagcggctgtcgcatccgttctggttccagtcgttcggagccgtgatgggcatggactggcattcctcgggcatcacgacctccgtgatcggcgcactgaagcgtggcctcgggccgcttcaggacgaactcgggatttatgtctgcggcggccggggccagcattcgcgcaagacaccggacgaactgatgcaactcggcaaccgcgtcggattcgacggcgcgaagctgacccgcgccagccgcctggtggcaaaggtcgacagcgccgcggtgcaggacggctttgacctttacctgcacggcttcttcgtgaccgccgacggcaaatggaccgtggtgcagcagggcatgaacggcgacaagcggcaggcgcgccggtatcactggcattccgaggcgctgaagagctttgtcgatacgccgcacagcgcgatcgacggtccgcagcaaggtgagatcgtcaatctcaccgaccaccgcgccgacatctcgcgcgccgcgcagctcgatctcttgggtggtctcggccccgatcgcatcgtctccgaattcgagcggctcatcgggaccgagccgaagccggcacaggccacgctgccgcatctgatcatgcctgcgcatcatgacgtccggcccaaggacgtgttcgcgcgccgcctgcacggcacgctcgcggcagccgccgagcgcggcccggtcgattttccggaactgctgctgacgcccggcgtgggtgcgcgcaccgtgcgttcgctcgcgatggtcgccgaggtcgtgcatggcgcgccctatcgcttcaaggatccggcgcgtttctcgctcgcccatggcggcaaggaccggcatccctaccccgtcccgatcaaggtctatgacgagaccatccgggtgctgaagcgcgcgatccagaacgcgaggctcgggcgcgaggaggagatccaggcgatcaagcgcctggacgatcaggcgcggcggctggagcgcaccgcgcaggggccgtcggttgacgctttcatcgtcggcgaacgcgcggtctcgccggatctcgacggccgttcggtgttcggctgggagcgcgatcttgcggccacgaaaaagcggaccggctga

SEQ ID NO: 4007 - DNA, 138 bp, BradyrhizobiumColbertium
gtggagaggaagatcggcgctgccggtacgtcgagtcatggacggctcaaactagcgcctcggcgacggttgcgccagtggaatgctgcgttgcacgaaacaggggagcgaagccagccactaggcgttgaacgctga

SEQ ID NO: 4008 - DNA, 1125 bp, BradyrhizobiumColbertium
gtggccgacatcgacacgatgttcggctggataccgtcatggttcgtcggtctcagcctggttgtcggcgcagttttgctcgccctggtcgcctatcgggtggccagatggctgctcaagcgcgccttcggaacccgtcttccgatcctgagcgtattcatcgatcgtacggccggaccggcgcaaatggcactctgcttggccgccgtcgcactcgtgttgccacttgcgccgcttgacgatgcgatccgcaccccgctgacgcgcctgttcgttgtggccttcatcgcgctgatcggctggatctcgatccggatcgtggacatgagcgcggcgcgctatctgcagaactttcgcgttgtcaccgagaacttcatcgcacgcaagcatgtgacgcaggttcgcgtgttcaagcgtgtcaccgacaccatcattgtcgtgatcaccgtgtccactgcgctgatgacgttcgactcggtaaggcagtatggcgtcagcctgttcgcttccgccggcgccgccggtatcatcgtcggtcttgccgcgcggccgctgctgagcaatctgatcgcaggcttgcagatcgcaatcacccagccgatccgcatcgaagacgccgtgatcatcgagaacgagtggggatgggttgaggacatcgcctcgacctacgtcgtgatccggctgtgggactggcgccgtatggtggtgccgctgtcctatttcatcgagaagccgttccagaactggacccgcgacactgcctccctgatcggcgtcatcgcgctccatgtcgattaccgtgccgacgtggcgcgcatccggcagtggctggaagaggtggtaaagaaatccaagctgtgggacggcgaggtggtcaatctccaggtcgtcgacgcagacgcgcggacaatcgagcttcgcgcgctggtcagcgcgcgcaacgcgccgcaatcgtgggacctgcgctgcgagatcagggaaaagctcgtggccttcatccgcgacgagatgccggaagcgctgccgcgcgagcgcgcgatcctgatcccgtcaggcgatgatgatgccgactatctgcggcgccccgcgcctccggagaccatgcgggcgaggccggataattaa

SEQ ID NO: 4009 - DNA, 711 bp, BradyrhizobiumColbertium
atgatgcgcaagcccaccagcaaggaaacgtcccgcaagccgaacatgcgcgaggcgatcctcgttgcggcggaggagctgttcgccaccaacggattcaatgccgtgtcggtgcgcgacatcgcgcaagccgccggcgccaatcccggcagcgtcacctatcatttcaagaccaaggacggcctgctgctggagatctaccgacgccattgcgcgccgatgaatctgcgccgttctgaactgcttgccgccgcgaagcgcgtgcgcgatctccaggaccggctggaggcgatcgtgcgcgcctatgtggtgccggccttcacctcgggcagcgatctcgccggcggaggggcgcggttcacacggctgcgcgctgtgatgtcggcggaaggcaacgaggtcgcgcgaaagatcatcgcgcagacctttgacgacacgagtcatgccttcatcgacgcagtccacgagagcctgccgcacattccgcgcaccgacatcgtctggcgcagccatttcctgctcggcgcgctctattattcgctggtgacgccggagcgcgtctcgcgcctgtcgcgcggcgaggctgacgggagtgatgccgcgagtgccatcgagcaattggtgcaggccagcgttgcggcgttccaggcgccgtctctggatcaagctgccccggcgcggcggcggccggccgtcgccaacaagacctga

SEQ ID NO: 4010 - DNA, 885 bp, BradyrhizobiumColbertium
atgacgatgatgtacacgccgaccattccgccgcccgatccgaacacgcgcacgccgaaattcggactgccgaagctgtcctgcgacgcgcattgccacatcttcggacccggcaccaaatatccttacgcgccggaccgctcctacacgccgccggacgcgccactggaggatttccgagcgctgcacgccaagctcggcgtcgagcgtgctgtcatcgtcaatgccaccgtgcatgggaccgacaacagggtcgcgctcgacgccgtcgcacggagcgacggcgcctaccgcgcggtcgccaacatcgacgacaccattacggaacgcgggctccgcgagctgcacgagggcggcttccgcggctgccgcttcaatttcgtccgtcatctcggcagcgtccccgagaggggcgtgttcgatcgcgtcatcgccatggccgcaccgctcggctggcacgtcgacctgcacttcgatgcgatcgacctgccggaatatgccgacatgctggcaaggctgccgctccgctacaccatcgaccatatgggccgggtgcaggcatccgaggggctcggccaagttccgttcaggaccttgatcgagctgatgcagcgcgacgagaaatgctggatcaagatctgcggcgcggagcgggtgtcctcggccggtccgccgttcaccgatgcggtgccgttcgcgcgcaagatcatcgagaccgcgcctgatcgcgtcatctggggcacggactggccgcatcccaacgtcaaggccatgccgaatgatggcgacctcgtcgatctgattccgatgtttgcgccggagccggagcttcagcagaagatcctcgtcgacaatccagcgcgcttgttcgagttcaaggcgtga

SEQ ID NO: 4011 - DNA, 714 bp, BradyrhizobiumColbertium
atgaagacaggactcgtgatcacggcccatcccggcgatttcgtctggcgcgccggcggcgccatcgcgctgcatgcgaagaagggctatcgcatgaagatcgtgtgcctgtccttcggtgaacgcggcgagagccagttcgcgtggaaggagaagggtgcgacgctggactcggtcaaggcgggccgcaaggacgaggcggagcgtgccgcaaagctgctgggtgccgagatcgagttcttcgactgcggcgactatccgctcaggctgacggaagcgcatttcgatcgcatggtcgacatctaccgcgagctcaatcccagcttcgtgctgacgcacgcgctggaggacccctacaacttcgatcatccgaacgcagcgcatttcgcgcaggaaacgcgcgtggtcgcgcaggccatgggccacaagcccggtgcgcaatacaaatattcggcgccgccggtgttcctgttcgagccgcaccagccggagcaatgcaattacaagccggatctgctcctcaagatcgacgaggtctggaaggagaaatatgaagcgttccagattctcgccgcgcaaaagcatctctggggctattacgagcgcgtcgcgctcaatcgtggcattcagggcagccgcaacaccggtgtgcccatgacgtacggcgaggcctatcagcggctgtttccgacggtggcggaggagctcgcatga

SEQ ID NO: 4012 - DNA, 684 bp, BradyrhizobiumColbertium
atgaagcctgtcgtcgttcgcaacatcaaacgggccgatcccgccggcatggcggaatacggcgtctcgacggtgcatgaggcctacgagcgtctcggcctgatgaagccgtatttgcgccccgtctggccgggcgcggcgatcgcggggcccgccgtcacggtgctggcgcagcccggcgacaactggatgatccatgttgccgtcgagcagtgcagaaaaggcgacatcctcgtcgtcggctgcaccaccgacaacaccgacggaatgttcggcgagctgctggcgacctcgctcagggcgcggggcgtgcaggggctgatcatcgatgccggctgccgcgatgtcagagcattgcacgagatgcgctttcccgtgtggtcgcgcgcagtctcggccaaggggacggtgaaggcgacgctcggctcggtcaacgtccccgtggtttgcgccggtgtgagcgtcgaccccggcgacatcgtcgtggccgatgacgatggcgtggtggtggtcccgaagcgctatgcggccgaagtcgccgagaaggccgggaagcgcaacgcggaggagggacgcaagcgcaagcggctcgcctcgggcgaactcggcctcgacatgtacaacatgcgcgaagcactggagaaagctgggctcgtctatgtcgacaattccggggacgtctga

SEQ ID NO: 4013 - DNA, 870 bp, BradyrhizobiumColbertium
atggatcgtctcaagctgaaggccgtgctcggcggtcatgcccacgtcaaggcggcgaaaagcggcgcgcttcgttccgacctgttcgatctcgagttcatcgagtacacgccgaccaacacggcgttcaagccgatggtgcgcgagcaggccttcgacgtctgcgagatggcgatcgtcacctatctgatggcgaaggcgcacggcaaggcgctggtgctgttgccggcgaccatgctgggccgctttcagcattcctacgcgctctataatccggcgcaggggacgctcgggccgtctgccctcgaaggcaagcgcgtcggaatccgctcgttcacgaccacgacgggcgcctggatcaggggcatcctcgccaacgactacggcgtcaacctcgacaatatccgctgggtgaccttcgaggatccgcatgtcgctgaatatgtcgacaccgccgagcgcgcgccgaaggacaagaagatcctgcagatgctgctcgatggcgagctcgacgccgtgctcggcgaaacctctgatgatccgaggttgaaggcgttgttccctgatccagctgcggaggcggcgaaatggtacgcccgccgcggagtcgtgccggtcaaccatctcgtggtcgtgaccgaagggctggcgaaatcgcgcccggacgtcgttgccggcgtctatgacctgctcaagcggagcaaggaacagacggggcctgccgcgactccggacctcattccgttcgggatcgaggcgaacagacagccattggagctgatcatcgactatgcattccagcaggcgctgatcccgcgccgctatgcggtcgaggagctcttcgacgagacgattcgaggaatgaactga

SEQ ID NO: 4014 - DNA, 315 bp, BradyrhizobiumColbertium
atgttcagcgcattccgcagcatcgatcattccgcccagattcgaacgcccaccgatgcggcggagaagcggctcgacggcatcggccatgttctctcggatctcgacatcgcggcaatcaagacgcaggacgacgtgaaccgtgcgctctggacgctcgatgccgccagcaaatgcgttcgcgccgtgctggcggaattccgcacgcagcccgccaccgagcaactcgtccgcaagtcccgcaatctgatcgacctgatcgagcgcgctcgcgacgaggtcgtcagctttcaggcccgcgcgatcttgagctga

SEQ ID NO: 4015 - DNA, 1242 bp, BradyrhizobiumColbertium
atgaccgcccaagcccccttcgacctgatctttcgcaacgcgctgttgcgatcatccgccgcccccgccgacatcggggtgaagagcggacgcattgccgcaatcgcgccaaggcttgcctgcgaagcggtcgaggtcgacctcggcgggcacctcacgctgcccggtttcgtggacacccatatccatctcgacaaggcctgcctgctcggccgctgcgggcacgatcacggcagcgtctcggaagcgatccgtgccgttgccgggatgaagaagaatttcacggtcgacgacgtctacgcgcggggcgcaaaggtgctcgaacgcgccatcgtgcacggtacgacgcgcatgcgcacgcatgtcgagatcgacccgcgcatcggcttgcgcggcttcgaggcggtcaaggcgctcaaggacgcctacgcctgggcgatcgccctggaactctgcgtctttccgcaggagggcctgaccaacgatcccggagccgaggagctgctgatccaggcgctgcgcaacggcggcgaggccatcggcggctgtccctacatggacaccgagccgcatgcgcatctcgcgcgcatcttcgatctggctgaggaattcgacgttgacgtcgatctccatctcgacttcgatctcgacccctcctggtggcatctcgacgaggtctgccgccagaccgagcggcgcaactatgggggacgcgtggcgatcggtcatgcgacaaagctctccgcattgccgcccgagcgcatgaaggctgccgccgtgcaactggcgagggccggagtggctgtcaccgtgctgcccgcgaccgatctctatctgatggggcgcgaggccacccacaacgcgccacgcggattgacgctcgctcacaagctcgcagccgacggcgtcgtgtgctcggtcgcgaccaacaacgtgctcaatcccttcacgccgttcggagatgcctcgctgctgcggatggcaaacttctacgccaacgttgcacacgcctccgtaagcgatttcgacatctgccttgatctcgtgaccgagctgccggcgcggctgatgaacctccgtgattacggtatcgaggtcggcaatcccgccgatctcatcgtgctcgacacaacggacggccgcttcgctatcgccgagctgcccgatatcctgatgggcttcaagagcggccggcagacatttgcgcggcagcggcccaccctcttgagcccgaagaactga

SEQ ID NO: 4016 - DNA, 417 bp, BradyrhizobiumColbertium
atgtccgttgccgcgaacaccgaacgcccgatgaccgatgccgagatcgtcgaagcctatctcacggcgtcgatgatcccggatcccgacgccgccgcggcctacatgaaacccggcacgttgatcacgttcaccggcggacgcgagttcgatcatccgcgcgggccgaccggcttcaatgcgaagcgctaccgctgggtcaagaagaagatggagcgcttcgacgtctgcccgggcgcgaacgagaccgtcgtctacagcatcggcacgctctatggcgagtggatggacggcacgccgttcgagggcaaccgctacgtcgatcgcttcgtcgtccggggcgggcagatcgtcaagatggacgtctggaacgacagcgccgagcgcatcctcgttcagcgcgggatcgaggcttag

SEQ ID NO: 4017 - DNA, 759 bp, BradyrhizobiumColbertium
atgcccgcgcgcgcgagcagcaagacttccgaagcgtcggacaaggtcagcgtgatctgccgcgcgctcaggcgcgcgatcatcgagcaggcgctcgagcccggcgcaaagctgcccgaggatgcactcggcgagcgcttcggcgtcagccgcaccatcgcccgccatgcgctgggccaacttgccgcggaaggtctcgtcgagcttcgccgcaaccggatcgcggtggtggcgacgccgagctggcaggaggcgcgcgatgccttcgacatccgcatcgagctcgagcggctcgtcgtgcgtcagctcgcgggcaagctgaccagggcgcagatcgctgagctgaatgcccatgtcgacgccgaggatcgcgcgcgcggcggcacggatgcagtgtcgatccggctcgccaccgaattccacatcctgctcgcgcacatgacgaacagcccgatcctggtgcgctatgtcagcgaggtcgcctatcgctgctgcctgacgctgtcgctctacagccggccgcattcgaccgaatgcgccatcaatgagcatcgcgccatcatcgcggcgctggccaagggtgacgaagccaaggtgatggaattgatgcatcaccacctcgattccgtggccaatcgcgcgctggttgctcccactcctcagcggggccgtgatctgctcgatatcctggcgccctatgccgacgaggtgacgagcgatcgcgtcgtcaagctgccgaaaatcgcgcgaaggggctaa

SEQ ID NO: 4018 - DNA, 777 bp, BradyrhizobiumColbertium
gtgaccttcgggcgcggtgaccgcgccgtgcccgccctgtcgaagaccacgttgaagatcgccgacggcgagtttgtcgcactggttggcccctcaggatgcggcaaatcgaccattctccgtctcgtcagcggtctggtgcagccgagcagcggcgtcgtcatcgttggcggtcgcgaagtcgcggcgcgtgcggtgcgggtcggcatggcctttcagaacccgaccatgctgccgtggatgacgatcgagcggaacatcatgctgccgctgaagatcgtcgagccgttccgctcgaacttccgcaggcttcgcaagaccgcgttccgcgacaaggccaacgcgctgctggagcaggtcggcctcaagggcttcggcggccgttatccctggcagctttccggcggcatgctccagcgcgccaatctctgccgcgcgctgatccatgagccgcgcatgctgctgctggacgagcccttcggcgcgctcgaccagttcacccgcgaagagctgtgggcaatccttcagaacctctggatgacgcacaagccgaccgtgcttctggtgacgcacgacctgcgcgaggcgggctttcttgccagccgcatctgcgtgatgagcgcgcgtcccggccgcatcctcgacgacagccgcgtcgatttcgcgcggccgcgtacggtcgcgatgacgttcgaaccggatttcgtcgcactgaaccagaagctgcgtgccttcatcgaggatgcgcgcagcgcggcccagcagggagcaggctga

SEQ ID NO: 4019 - DNA, 777 bp, BradyrhizobiumColbertium
atgttcgggatcgatgtcaggcagaaggcgtggtcggctgggctgatcgtgctgttcttcgtcgcctgggagctgttttgcctgatgaccggcatgtccgatctcgtgctgccgcgcccctcgcaggtgttcacgacgttgatcgatcgtttccccgtgctgtggccgcacatcgtgcagacgctcgccacgacgatgttcggcttcgtcctcggagtcgcgctcggcgtcgccctcggcgcgatcatcggcgtctcgaagaccgcctacgacacctgctatccgctgctgatcggcttctcgtcgatccccaaggtcgccgtggtgccgatcttcgtgctctggttcggctccggcacggtcccggcggtgctgaccgcgctgtcgatctgcttcttcccgatcgtcgtcaacatcgcgaccggccttgccacgaccgagcccgagctcgaggacgtgttgaaggcactcggcgccagcaagttcgacattctctggaatgtcggcctgcccaggaccatgccgtttttcttcgcgtcgctgaaggtcgcgatctcctatgccttcgtgggcgccgtgctgtcggagacggtcgcctccaaccgtggcatcggcaacgtcatgatgaccgcgtcctccaatttcaacgtgccgctggtgttcgccggcttgttcgtgctcgccgggctcggcgtcgccctctacgtcgtgttctccctgatcgaagggcaggtcaccggctgggccacgcgcaagaacgacgtgattgccacctga

SEQ ID NO: 4020 - DNA, 1026 bp, BradyrhizobiumColbertium
atgttgagaaaagcaactgccgcgctgctgggattggcgctgtccacgggggcggtgatggcccaggagaccacgatcaagttcacgctgggctggaagacccagggcagcgacgccgccttcttctacgccaaggacaacggcttcttcaaagaggaaggcctcaatgtcgtcatcgaccagggcgaaggctctggcgccaccgtgacgcgcatcatgtccggcgcctatgacgccggcttcggcgacgtcaacgccatcatccagaacgcctccaccaagccgcaggaggcgcccgtcatggtttacatgatgtggaatcagccgccgttcgcgatcgttgccaagaagagcagcggcatcaacaccatcaaggatttcgaaggccgcacgctcggcggcgcgcagggcacgccgaccacgcgcctcctgccggtattcacgcgcaagaacggcctcgacggcgagaagatcaagatctccaacatggcgccgaacctgcaggagccgatgctgatcaagggcgacatcgacgcggccctggtcttcaacatcaccagctatttcaacctggtgctcaatcgccaggatccggacaaggacttcaaatggttctcgttcggcgagtatggcctcgatctctattccaacggcgtgatggtgtcccggaagctgatcacctcgaacccgaaggcggtcgcgggcctcgtgcgcgccatcaacaaaggtgcgatcgcgatcgccaaggaccagaatgcggggatgaaggcggcgctgaactacgacaacctcatcaacgccgacgtcgagaaacgccggctgcaatattcgttcgaaaaactgattgtctcgccggagatgaaggagatcggcatcggcgacatcaaggacgatcgcatgacgcgcgccatcggcatcgtggtcgagggttaccagctggcccgcgccccgacgccagcggaagtattctcgcgcgagttcctgccgccgcgcgccgagcgggagctggtatacacggccaactga

SEQ ID NO: 4021 - DNA, 1434 bp, BradyrhizobiumColbertium
atggccacggagatttcggcaacgagcctgttccgtggctctgatcgcgacatcggcgagaacgtcgtgctgcggcacgatggcggcgtcatcaccgagatcgtcgaaggcgcagggcgggatcctcgatctttcctcatccctgccttcgtcaacgcccatgatcatgcccgtgccaccgcgtcgtccttcggtgcggtcggcatgcctttggaaagctggatcctgcgtaccgcgctgggcacgcccgtcgatccctatctcactgcagcttccgctctggcccgctccgcaaaggccggctgcgcggcaatgatggtgcattacacccgcccgagtgggacgatgccgttggtcgacgaggccaaggccatcgcgaaggccgcgtccgatgtcggcatccgcatcgcgtttgcgctggccgtgcgtgaccagaacccgatcgtctatggcgatgccgagccagtgctctcgggtctgacgcgcgacgaccgcaagaccatcgacgatctgttcgtccgcccgccggtctcgccgaaagcatatatcgagctgaccgacgccattgccgcagccatcggcagcccgatggtggacgttcagctcggtcctgccggcgtgcaatggtgctcgaagccgctgctggaggcggtggccgagaattcggcgcgtaccggccgccgcatccacatgcacctgctggaaaccgtgtaccagcgtgcctgggccgaccaacactttccggacatggtgcgctggctacgcgacattggctttctctcggagcggctgacgctggcgcactgcatccacgcccggccggacgagctggagatgatcgcgtcctctggggcgcgcatcgtcaccaatttcagctcgaacatgcatctgcgctcggggctcgcgccgattgcggctgcgcatgaatgcggttgcgccatcgcagtgggcgtcgacgggctggcgctcgacgaagacgacgacatcttgcgggagatgcggctggtgcagatggtccatggcggactgggtttcaaggcgacatggacacccgccgagctgttctcgatcgcgatccgcaatggacgtcgcgcgactggcgcccccggcaatggcgagctcgtcgtcggcaaccctgccgattatgtcgtgatcgatctcgatcggctggatcgagaccagatcatgccggtcgatccgatggcgctgctgttcgcacgaggcaatgcgtccctggtgaaggacgtcgtcgtcgcaggcaaggccatcgtaagggaggggacctgcaccggcgtcgacctgccggccatcgagcgggaattccgggacctgtaccgcgccaatgtcggcaagctcacgaactttcagcggatgtggccgcggctgtccgagcggctgggcggctggttcgaacagcagttgacgtgccagtga

SEQ ID NO: 4022 - DNA, 1212 bp, BradyrhizobiumColbertium
atgctctacccgatgtcgcccaaagtcgtcgagctcaagcgcaagctcgagagcttcatggaccggcacatctatccgaacgaggaacgcttctatcgcgaggcggaagagctgggaccgtggaaggtctatcccgtggtcgaggagctgaagccgctggcgcgcgccgaggggctctggaacctgttcctgccggagtcgagccatggcgcgggcctcaccaatctcgaatatgccccgctctgcgaggtcatgggccgctcgcacctcgcgcccgaagtcttcaactgctcggcgccggacaccggcaacatggaggtgctggagcgctacggtaccgagaaggacaaggaacgctggctgaagccgctgctcgctggcgagatccgctcctgcttcgccatgaccgagcctgcggtcgcctcatccgatgcgaccaatatcgagagctcgatcgtgcgcgacggcgaccattacgtcatcaacgggcgcaaatggtacacgaccaacgcgaccgacccgcgctgcaagatctgcatcttcatgggcaagaccgatcccgacaatccggaccggcacaagcagcaatccatgatcctggtgccgttggagacgcccggaatcgaggtgaagcgtcccctgcccgtgttcggcttctacggcgtgcccgaccgcgcctccgaagtcgtcttcaccaatgtgcgcgtgcccaaggagaacatgctgctcggcgagggccgcggcttcgagatcgcacagggccgcctcgggcccggccgcatccatcactgcatgcggctgatcggccttgccgaacgcacgctggagaagatgtgccgccgcgtgcgcagccgtgtcgccttcggcaagccggtctccgagcagacggtgacgcaggagcgcatcgcggaggcccgcatcatgatcgagcaggcgcggctgctgacactgaatgcagcccatgcgatggacacggtcggcaacaaggtggcgaaggccgagatcgcgatgatcaaggtcgccgtgcccaacatggcctgccagatcatcgactgggcgatccaggcgcatggcggcggcggcacctcaaacgacttcggcctgacgcaggcctatgccaccgcgcggttgctgcggcttgccgacggtcccgacgaggtccaccggaatcagatcgcacggctcgagctgaagaaatactcgaacgcctga

SEQ ID NO: 4023 - DNA, 228 bp, BradyrhizobiumColbertium
atggcggagctcatcttcgaacgccttgcgggcgcggacatcgcgtacgcgcgcaacgatcaaccgggcgtgctggaccatcagatcgatcgaaaagatggcgcggcctacttcttctttggtcgtggccatgagctggaacgcccagcgagcggcatccttggcttccggggggatacctacgtcggtcgacagaccatctcgcaatcttacgatgttcgacattga

SEQ ID NO: 4024 - DNA, 573 bp, BradyrhizobiumColbertium
ttgctcaccggcagcgtggtcccgggaaagcttgaattcgagatcgcttcgcttgcgggcgtcgcaatgttctccgcgctgcagcgcctgatcggagtggttgtccagcaactcgacgatcagaattcgatgatgtctccgcctgccttgcgggagctcgaggaagcaatcatcgtgcaattgatctatgccgccaggcacaatttcagcgccgcgctggagcgggagtttcgcgacaccgactctgcggcggttcgccgtgtggaagactatatcgaggcaaactggaattcacaggtcacgatcgaagacctggttgcggtggcaggggtaagtgcaagaacgcttttcagaacattcgagcgggcgcgggggcgctccccgatggcccatgtaaagatgatccgtctcgagcgtgcacgcctcctcttgagcgggcccgatcaccagacgtcagtgacgggcatcgcgttcgcatgcggcttttccaatcttgggcaatttgcccgggactaccaagttacctttggcgagttgccatctgtcacccttcggaagtcgaaggcaagatag

SEQ ID NO: 4025 - DNA, 375 bp, BradyrhizobiumColbertium
atgtccttcggaaacaatgcagggccgatccggctcaactatgacggattgggaaccgctcgtcgtgaccccgttgccgcgcagcggcatctgaagacgggtgtagtcaatttccgggaaatgcgccgttacggaggtaccgcagcatgcgaagccgagcgcgatgtccgtcagttggacgaagttggcgtgaacctccaggaccgatggatttcgcagctccaacaagcttccgccatagaccttggtgagcgcacgctcgaactcggcgggttgccgcgtgcgaattcttggatggcggtccaacggatgctttcgcggtcccgcagcgacggcttcgcgatcggaaagaaggggcaaggctttcagcactaa

SEQ ID NO: 4026 - DNA, 681 bp, BradyrhizobiumColbertium
ttgatcgacgcagtcgatttggcgcgtgacgaacgatcgattcgtaacgcaatcaaaaactttactgcttcatctggattcgatcgctatgcctacattcacgtccacgcagatgatgttactgcgttcaccgattatccggtgggatggcagaacctctattttgaaagacattacgcaaccatcgaccccgttgtcacgacggcaaaacggggcatgcggatgttcgcctggtcggcagaggatcacaatgtccgtaagagttcgcgcgaaatcaagcaattctactcggaggcaatcgactttggcattcgctccggtatttccattccgatccggacaagctatgggcggacggcgatgattacactcgcatcggaccgtcagaagatagaggccccagcatgggatccgatgcaagccgcactagcgcttagttacgtccatactcacctgagcttggcgtccgtttcgttaaagactggtgatgtaacattgtcgacgcaagaagcgacgtcgctcagttggtcctctcacggcaagtccatgaacgtgattgcggagctactcggcatcagaccgcgaaccgttcagttctacctggataatgcgcgcgacaaactcggcgcgagtacgcttcaacaagccgtccgcattgcaatggagaagaagctcatatag

SEQ ID NO: 4027 - DNA, 210 bp, BradyrhizobiumColbertium
ttgattgcccatcccaaattcgggcattgcctcgtctatgtggtgcagcaactacccggccggaaccttgggcacgtaacccagacgatcgaccattttgttcaagacaagcagacgcgcgcggtgttctgtatcggcatgttgatggacacgttgaagctctgcccggcgctccggacaacagttgttatcgacctccgcggcgactag

SEQ ID NO: 4028 - DNA, 135 bp, BradyrhizobiumColbertium
atggcccattctgccgaaaaggtgttcgatatctcgatcgagcttggttccgggcgtttcatcgtcgttgttcgatgccacgattttcacatgcgtttggtccgcggtacgcccccgctgacgataatcccttga

SEQ ID NO: 4029 - DNA, 204 bp, BradyrhizobiumColbertium
gtgttcgatcagcccgaccccggtgccctcccaccacaaaaaggtgcgtcagacggccgcaaccagcctgtcaaagcggacgacgcgcagaagcctgcgagcgccgcggacagcgctgagctaccgggcaagccacccgacgatcccaacaaggccggcatccgcatcgatctgacgggcatcggcgtcggcaagccgaaatag

SEQ ID NO: 4030 - DNA, 339 bp, BradyrhizobiumColbertium
atggcctggattctcgccgtcgagcactttggaatcgattgggcgagaccggccgttgccgcgccccgcaccgacacgctgaccgccacattccccatctgcggcagcgcacgccgcgtgacgtgcgtggtcgatggcgacacgttctggctggatagtgtgaagatcagggttgcagatatcgacgcgccggaactgcgcccaccgtgctgtgaaacagagcgggcgagaggcgaaagtgcaaaataccggctgcaggaacttctgaattcgggggcgttctccctcgtcagcggagtcagggacgaagatcggtatggccgcaagttgaggaggtga

SEQ ID NO: 4031 - DNA, 402 bp, BradyrhizobiumColbertium
atgccaaaccgcatcccgcttgaccctaaactgccgaaaaccttcgacacgacgccgaacgaggcgcgaagcaaagcgcaactcgatcaatggtgggatcgtccctatggcatcaccttgcctgacggccgcattgaagtgcggtgcctgaatggcggcgcatgggatcgttcgacccatctcggggtggcggagaattacgacgcagcttgtgctttggccgaggagaaacaagccgaatggctgaagttccgtgaacgaccttgcacctgtctcgacgtcggtcagatcctggtgatccggcagccccagcgaccagacgaagcgccgcagcaattggcggctttccctacggtggaggaagcaacagaatatctgcgcgttaattttcccggcgcatag

SEQ ID NO: 4032 - DNA, 1350 bp, BradyrhizobiumColbertium
ttgccatcgcggatcgcggactacgttgcgtcggatgcttcggttcgtgtggttgacgcttttgtcgatggactggagctttccgggctcggcttcgtccgggctgttgcggcgtcgacggggcggcccggttatgaccctcgcgatctgttgaagctctatgtctggggctatttcaacgaggtccgctcgtcgcggcggctggagcggtcgtgccggcgcgatgtcgaggctatgtggctgctgcgccggctcgcccccgacttcaagacgattgccgatttccgccgcgacaacggccccgccatcatcggggcgtgccgggctttcgtgcttgtgtgccgggatgccggcctgtttgcggcccgtctcgtggcgctggacggctcgaagttccgcgccgccgccagcccaaagaaggtgatcggccgccgggagatcgccgaggagcaagcccgtctcgacagtaggatcgccgcctacctttccggtttggacgaggctgacacgcgcgaggccgacgatgagccgggtgcggttcccgccgcgctcgctgcccttcgcgtcaggcgcgccgaactcgcccgaatggctggcaagctggagacacaagagcgcgacatgcttgtcgaaggcgaggaagatgcccgtccgatgcggggaggcagcggccacaagccgccctgctacaacgtacagaccgccgtcgacgccgacacgggcctgatcgtgcatcacgatgtcaccgacgagccgaccgaccgccgccaacttcatccgatggccagcgccacgagggagagcctcgacctcgacaccctgacggtcgtggccgacaagggcttcgacaacggcgagcatgccagcgcctgcgagcgggacggcatcgtcgcctgcgtgccctcgcagcgctcgatcaacaaccagggcgacggcaccctgttcgaccgcaccgccttcatctatgagccggaggcggacacgttcacctgcccggcgggccggacgctggtgcgcaagcagcttcatcgcaagaagcgcaatgtcacctacgcctcgcagggttgttccggctgcgtcctgaagccacgctgcaccacagccgagcggcgttttgtcaaacgccatctcgatgacgacgcgctcaaccggatggatgcccgcgccacgcccgagatgatgaaagccaggcgatgtgccgtcgagcatcccttcggcacgatcaagcgaatgacggcaggcggacggttcctaaccagaaacctgaaaggaaccagaaccgaaatggccctttccgtcctcgcctacaacatcctccgcgccatcaacatcaaaaccgccgcagcctga

SEQ ID NO: 4033 - DNA, 1014 bp, BradyrhizobiumColbertium
gtgccagaggcggccgaggctctggttctcgatctctatgaccgtctgcccgctgtgcgcatcaccgatctgctgctggaggtcgacgatgcaaccggcttcacggacgccttcacaaacgtgcgcaccggttcaccatgcaaggatcgcatcgggttgttgaacgtgttgttggccgagggcctgaaccttggactgagcaagatggccgaggccaccaacacccacgactacttgcagctgtcgcgcttgtctcgctggcacatcgaaagcgacgccatcaaccgggcgcttgccatggtgattgaagcgcaatcgcgtttacccatggccaggttctggggtgccggcgtcactgcgtccagtgacgggcaatttttccccgccgcgcggcagggcgaggcgatgaatcttatcaacgccaaatacggttctgagccgggcttaaaggcctatacgcatatctccgatcagtttggacccttcgcaacgcaaaacatccccgccaccgtgagtgaggcgccttacatcctcgacgggctcttgatgaatgaaacaggccgcaacatcaaagagcagtatgccgacaccggcggcttcaccgaccatgtctttgccgtcacctccctgctggcctttaggttcattccacgcatccgcgacttgccctcgaagcggctctatctcttcgaacccgccgcagcgtccaaagagctgcgcggcctgatcggcggcaaaataagggagggcctcatcgtccaaaactggccggatatcctgcgggccgtggccacgatggcggcgggcatcatgccgcccagtcagttgctcaagaaatttgcggcctatggcagggctgaacctgctggccgccatcatcatctactggaacaccaagcacctcgggcaggctgtcacacggcgccaacacgtcggattagacagtccatccgatctcctggggcacatctcgcctctcggatgggcacacatcctcctcacaggcgagtataa

SEQ ID NO: 4034 - DNA, 294 bp, BradyrhizobiumColbertium
atggtcgtgttcctgctgtcgctgaccggtattccgccgctcttcggctttgtcggcaaggtgctgctgttcggagccgcgatcgaggcgggctatctttggctggcggtgatcgggatccttaacagcgtgctggcgctggcggtctatctgcgcatcgtggtgccgatgtatcaggcgcgcgatggcgaagcggttcgggcagaggtcgcgctgccgttgttggttgtgctaggtgcgaccgcgttggtcacggcgctgatggggctgttcgcgggagtgtttcccgggtga

SEQ ID NO: 4035 - DNA, 129 bp, BradyrhizobiumColbertium
atgcccgatctggaccggggcgagatgctggccatcgtgccgctgcttgtcctcatcatcctgatcggggtggcgccgtcttggttgctgaacatgatcgacgtgacgatgcgggcgctgcaactctga

SEQ ID NO: 4036 - DNA, 501 bp, BradyrhizobiumColbertium
atgatcctcgggcttgccgccgcgctgagcggcctggtgctgggctggttcatccaacctgcccgcctgatggggccggttctgccgatggcgcagcgcggctttgccgtcgcgggcggtatggacgggctggtgctgcgcccgtcgctggcttttgccgccgcctgtgaaggattcgaacggcgtctgctggcgtcgcaacttggccttgtgcggatcttgagccttggcaccgcatccagtgccgagcgttcagacaaacggctttatgccgcgacccttcaggtgggccggatgaacctgcgccttggcgacggcgccgaaaacaccgacacccatggcatcgacgggctgatcttcggccttgtcgcccggacaatcgccgccggccgccgcctgcgcctgctgcaaagcgggctgatccaccgcgaactcgccctgacagtcatgggcattgccgtcatcgcggcggtgctgctgatcttaccgatgtcctcctga

SEQ ID NO: 4037 - DNA, 1392 bp, BradyrhizobiumColbertium
atgacgatgctggcactcaccctcctcgcgccgcttctggcggggcttgtggcgctggcgctgcgccgcgcacccgaagcgattgcgcttgcgggcgtcggcctcgggttcctcgcggcgatggcggttctagcgggtgcgattgcgggcaatgcggtgcagatggtcctgccgggcctgccgcaaatgccgctgcggctggtcgcgacgccgctgacggcgatcgtttcggccatggtggcgacggtggcggcttttgtggtggtctatgccgtgggttacatgcgcagcgaccccgaaaggccgcgctttttcggcatcctgctgctgtttgtcgcggcgatgcaggcgctggtgctggcgggcgactggatcaccgtgctggccgcgtgggaactgatcggcttttccagctatctgctgatcggcttctggcatggccgcgacggcgtgcccaatgccgcgatacgggcgtttctgtacacccgcagcgccgatctgggcctttatctggggatttttgtgctgatcggctgggccggcacctcggaaatctcggctacattggcgattagcggcacgcccgcactggtcgccgggttgctgttgctgatcggcgcgatgggcaagtcggcgcaggtgccgttgcaggactggttgcagcgcgccatggccggcccgacgccggtctccgctttgctgcattccgcgactctggtggcggcgggggcgatcctgctgatccgcgtggcgccgatgctgccgtcgggtgcgcttctggccgttggcctggtgggcggcataacggcggttgtcaccgggctgatcgcgctggccgagcgggacctgaagcggctgctggcggcctcgacctccagccagtacgggctgatgttgttggccattggcgcgggtgtgccggcggcggcgctgctgcacctgattgcccacgcggcgatcaagagcacgctgtttctgggcgcgggcgtgttccagcatgatcgcgacggcaccgatatggaggcggtcgcgggcgcgggccggacgcgcccgctgatccttgctgccttcggcattgccgcactggcgctggcgggtattccgccgctggccgggttcttttccaaggacgcgatcatcgccgccgctctggccgctccgggtgcgatctggctggcgcccctagcgctggcgggtacagttttgaccggcgcctatatggcgcgcgcactgcgggtgttgtggggcggcgaggcacagccggtttccggcaagggcatgggctggatgtctgcgggcatggcggtgctgacggcgctggcggcgggggtttgggttgccttcgcgccgctgggaaatcttctgggggccgagctgccgacggaaggttag

SEQ ID NO: 4038 - DNA, 504 bp, BradyrhizobiumColbertium
atgatctttctggcgttcttcggcggcgcggcgatgtggttcggcgtcgtggtctttcgcacccattcgatggtgcgctcggcgttggctctgctgttctcgcagaccgcgatcggggcgatgttcctggtcatgcaggccgagtttctgggcgtgttgcagatcatgatgatggccacggaaatgagcgtgatggcgattttcatggtgatgttcatgatggatccgggtggcctgggcaagatggacatgacccaccagaaacgcctgtcgctctgggccgggggcattgggctgctggccgccttgctgctggtctggctgccagattggggtccggtcgccctgtcggtgcccggcgcgcatgaacaggccgccgatctggggcgcgaattgctgggccggtcgatgttcattttccagtcggcggggctgaccatcctcacggcgatgatcgcggccacgatggtggccattgtccccaacgcggagcagcgcaaatga

SEQ ID NO: 4039 - DNA, 507 bp, BradyrhizobiumColbertium
atgctgatcgtgatgccgatcaccgccgtcgccatgcgggcggagtcgctctcgacggttgagatcgtcgcctcgcaggcgcagctctggaacgtgctgtaccagccgatggggtttgtcctgttcgtcgtggcggcgatggggctggcctggctgccgccgctggacctgcccgatgctaccggcgaattggccggcggggtcgaggcagaatataccggcgtgcggctggcggtgctgcggctggcgcggatggtcattatcctggcgctggcgggggcgacggtgaccttctatttgggcggctggctgggcccgtggctgcccgcctgggcctggagcgcgatcaagatcctggccgtggctgcggctatgctgagtgtcggacgctacatgccgcgcatccgcgaggcgcgctatctggcgctgagctggaagctagggatctcgctggcgctggccaatgtctttgtcgtgggcgtgatcgccctggtggtgccgatatga

SEQ ID NO: 4040 - DNA, 486 bp, BradyrhizobiumColbertium
atgatgccgattaaggtctttatttcacacaaaaaagaggacacggagcaagctggcgccattgcggcacatcttaccgccaatggcctcttcgtctacctggacgtcatcgacgcgcaactgggaaagagtgggccggatctcgctgactacatccgggcccaaatggaaaagtgcacccagttgctggcggtcatcagtgcgcaaacccaagcctcctggtgggtgccgtgggaaatcggggtcgcgaccgagaaagagcgatttctggcctcgttcgtttccggcaacgccacggtgccggaatttctgcagaaatggccttacctccgcacaagggcggaccttgacgcctatgtccgagaatcaaaacgcgcagaactgctggtcgaaaatcgcgtccaaaagggcgatcgattgacggcccgcgcgcaaggcttccgatcgtttcatacgtcattgaaggcttctctcgggcagccttga

SEQ ID NO: 4041 - DNA, 327 bp, BradyrhizobiumColbertium
atggctgccacgaaagttgtttttgttgcctttgcaatcgaggacgtgaagcaacgcgatttgctgaaggggcagtctcttcatccgcgcgctccgtacgagttcatcgatatgtcggtgaaggagacgtacgacagcggctggaaagacaaggtgcggacgcgcattcgccgatccgatggcgtcatcgtcctcgtcagcaagaactcgacctcctcgaccgggcagaagtgggaaatcgcctgcgcgaaggaagagggcaagaagattcgtggaatctgggcctacagcgatgaccgcacggagattcagggcgtgtcgacctga

SEQ ID NO: 4042 - DNA, 996 bp, BradyrhizobiumColbertium
atgcgcaaggctcttatcgttggcgtcgattactatcacgacctcaccccgctcagcggatgtgtgagtgatgcagatgcggtagccggcgttctggcccgaaatgctgacggaacaacgaatttcacgacaccgaaggtgctgaccgccaccggcgctcacaacctgatcacccggcgggcgctgcgagacgccatcgaggcactgttcgcagacccttccgagatcgctctcctgtatttcgccggccatgggtacgtcgacacgaccggcggctacctttgtgcaagcgattgccgggacggcgatgacggactggcgctcagtgatgtgatgacgttcgcgaaggcatcgaaagcggcgaacaagatcatcatcctggatagctgccatggcggaatcgcgggcaaccaggccggcaaaggcggtctcgcggagatcggcgagggcatgacgcttctgaccgcgtcgaccgagaaccaatactcatacgagggcgggaacggggcgccgggcgtgttcaccaacctgcttgtcgatgcattgaacggggcggcggccaatctggttggcgatgtcacgcccggcagcgtatacgcccatatcgaccaatcgctgggaccatggggtggtcagcgtcccgtcttcaagaccaacgtccggtcgtttgtgtcgttgcgcaaggccacaccgccgattgctctcgaagagcttctgcagctcgccatccacttcccgcaaccgggattcaagttccagcttgatccgtcctatgagccggaaagatcacaggaaaagcgcgacgatccagcgatcccgccgcccgacccgataaggaatgccatcttcaaggtgctccagaactatgtcagagtgaatctggttcggcccgtcgatgcgccccacatgtggcatgcagcgatggagagcaagtcgtgcgagctgacagttctgggcgagcattatcgtcgattggtagcagacaagctcatctga

SEQ ID NO: 4043 - DNA, 300 bp, BradyrhizobiumColbertium
atgtccgacaagcaatttactgtatccttcgcctcgttgatcgaagagcttgccgcgcttgagcatcggcgttgggcgcactggcagcgctatgttcatgaaaaaggcgagcgccgccccgacggttcagtggtcttgccggcagagcttgttgctcggtgggaacgcctgatcaacaccccgtacgaagagctcacaaacgaagaaaaggacagcgaccgcgagcaggtgcagaaatatctgccgatcctgaagcgttggctgcagcgcgttcgcggagaaaacgaaggtaatgcctga

SEQ ID NO: 4044 - DNA, 1380 bp, BradyrhizobiumColbertium
atgcctgaatcattcaagtgcttccgtgacccgctcctttccctgtatcaatcggccgtcactgaaattgccaagaaaatcgacaagggagcggccgcggctccccggagccgtgccgggctgcagcgatccatggtcagcactctccccggtatcgcggcggacatcgccgagcgggaatatagtcgcgcgacgggaggtgtggcgcctgcttccccagcagggccctctgcacgagaactgtcgaagtccggcattgctgaggtctgtgccgaatgggggtggcgctacatgaaagcgctggcggcctccgatgccaacgccatccagcaactcgagaacgagttcaccgccgggacttgcgatcccgcatggttcagcaccctggtggaatacaggcgctttttcgagaacggcaagcgtaagcccattccttacgtcccggcgcccgctgtcggtccgaagacgatcgagatcaaggccaactcacgtatcgcgttgatgggagactggggcacgggagccatacctgccatcgaggtcttgcagcgcatcgccgatgagcatcccgatatactcttgcatctcggcgacatctactactcgggcacagccgcggaatgtcaatcgaacttcatcgatccgatcgactccattctccgcaaggacaaggcgttgccggtgttttcgctgtcaggcaaccacgatatgtactgtggaggcgtgggtttctacgacctcataacgaagctgaaccctgcgcccttcacgcagccagccagtttcttctgtctgcgatcagcggacgagaaatggcaattgctcgccatggataccggtttgcacgatgacaatccggccgctgtcgctggcgcactcacttaccttgaagaagatgagctggactggcactgcgaccgcatcagggaattctccggccggaccatcctgctgtctcatcaccagttgttctctgctttctctcccattggggccgccgatccgcagggtaagcggtctgcagtcaatcccttgctgctcaaagcttttcagcagatgacagcaacaaaggcgattgccgcctggttctgggggcatgagcacactctcagcatctaccagccatttgccgggctggagcgaggccgttgcgtgggccacggcgctgtccctgtctccgtcattgacgagatctacaaaccggtctccggtcttacagagacaccagctttgattgatcagtcgcggctcgcgacgcgaggaggcgtttacaatcacggctacgcgcttctaagcctcgaagccgatctatgcagagccgagtattatcaatcgacggctaaaggccgcgaactgatgtacagcgaatcatttcgttag

SEQ ID NO: 4045 - DNA, 390 bp, BradyrhizobiumColbertium
gtgatcgggtttatcgaagccatgttcgaactgctcgttcaggggcacgacatggtgcgcctgcgcgattggttcgaatcccccgcaaacaaagcaggcttgtcggcgtcctggttgaaattccaaacgggcagcagcgatccaagcacgcttttgcgcagagcgctcggcgaccaacttgcgctgcaccgtgccaatactagccgcaagcatggcgcgctgagatggattcaggagctggttcgcccgcgatatccactcctcaaatgtttcgccctcaaggaagggaaagttggacgaaacttcgagcttaagtccctcgacaagggccgccgtgttgacccgctgcatatcggttctcccgggccgatgatacagagccgccgctga

SEQ ID NO: 4046 - DNA, 315 bp, BradyrhizobiumColbertium
ttgccgaagagacgggacgccatcctggacggcacggcccccagttgggaaaatcacatcagcgcatttcccgagagcatcccgccatcactgcccaccgaatttcgccgcgccaggaacattgcgctcgcgcatgctgggatcaagcgaccgaagctcaacatgtcggatttctacgatcggttccataagttcctgcacatcttttacaaggatgcgcagagttggtggggccgagaggcagacgaatttcctgatctggaagagatcacgacgttctcgctgatgatctcgcaaaagccgccgaccagctag

SEQ ID NO: 4047 - DNA, 1446 bp, BradyrhizobiumColbertium
atgacaacagcagccaccacgatccggccaggaaccatgcacgagatcatctgtccccactgtgacaaggccttcaaggtcgatgagtccggttacgcggatatcctgaagcaggtccgtgacgcggatttcgctgagcagctccacgaacggctggagctggccgagcgcgacaagcagagcgccgttgaattggccaaggcccaggtaagcagcgatctgcagaagacaacggctgctaaagacgctgaaatccaggacttgaagtccaagcttgaggggagtggcgttgcccagaagctcgcggttgctgaagcgctcagcgccgtcgaaaaggagcgggacaggctcgcgaacgcgctggccgagtccgagcgcgaaaagaaggcggcctcggagcttgctgacgcgctcctggcgagcgagcagcacaagattgctgctgccaaggaaaaagaaatccaggagctgaaggccaagcttcaggccgtcgagcttgagaagaagctcgccgtgactgaagcggtcggtgcgatcgagaaagagcgcgatgagctgaagaacggcatcaagcaggtgcagcttgaaaagcaactctccgagcagtcgctcaaggacaagtacgaaacccagatcaaggatcgcgatgacgcgatcgagcgtctcaaggatatgaaggcccgcctctcgaccaagatggtcggtgagaccttggagcagcactgcgagaccgagttcaaccgggtgcgctcgatggcgtttccgcgggcgtatttcgagaaagacaacgacgcgcggactggcagcaaaggcgattacatcttccgggattccgacgatgccggcacagagatcatctcgatcatgtttgagatgaagaacgagagtgacaaaaccgccacgaaaggcaagaacgaagacttcctcaaggagctcgaccgggaccggaccgagaagggctgcgaatatgccatcctggtctcgttgcttgaaccggacaacgagctctacaatgctggcatcgtcgatgtctttcaccgctactcgaaaatgtatgtcatccggccgcagttcttcctgccgatgattacgctcctgaggaatgcggccatcagttcgctgaagtacaagaccgagcttgcgctcgtgaaagcgcagaatgtcgacatcacccagtttgaaagccagctcgaaacgttcaaggcagcattctcaaagaactatgatcttgcttcgcggcacttccagacggcaatcgccgagatcgataagtcgatcgaccacctgcagaagaccaaggatgccttgatcggtgcggatcgcaacctgcgccttgccaatgacaaggcacaggacgtgacgatcaagaagctgacccggggcaatccgacgatggcggcgaaattcgcggagcttaagagcccgcctgccgaagccgcggagtga

SEQ ID NO: 4048 - DNA, 312 bp, BradyrhizobiumColbertium
atgaagccgaacgtgagcgtcgaaatcgattccctgacgcttctgatgcaatgcgtgagcgaagggatgggtgccacgatcaagccgatgtccgcattgcacgaggccgacgagacgttgggcaagtggcgcgccctttccatcagcgacgctcccatcacgcgaacgaactatctttattcgctatcggcagaactgatgacagatgccgcccgggcggttctaggagagacgcgggaagttgcccgcgaattgatcgaaggccgaaagtggaaaggcgtccaattgatcgagcgacgagaggccgcgtga

SEQ ID NO: 4049 - DNA, 252 bp, BradyrhizobiumColbertium
atgatgatagagggccagcccgttttccgtcgggacgacgccgcgcgaggagcgctgaagcagcggtttcccgacttcgtcttcaagcttggcgacctgctggctcagcgccggttgggcgacgaaaaggcagcgggatgctttggagagacttccactttcaacgatctgagcgaaatagcgaagctgacgaaggtccatggaagcctcatccccgaggcgccgcgagttggctatacggcgcgcttatag

SEQ ID NO: 4050 - DNA, 1455 bp, BradyrhizobiumColbertium
gtggtaaccatcggcgcgcagcgactgtcgaccagggaattacccgcctgcaggctcctgatcgccgggaaatggcagtctggcgcgagcgaagtggacgtccttgacaagtttcacaatcgtcctgcgatggtggcgcaacttccaagtgccgaacaggttggcgtgtgtgtggaggctgcattttcggctttcaaggccaatgcgctctctccttatgagcgaggcgccattcttgatcgtgcagcggcaaggctcgaggcgcgtgcagaccagctcgtcgaggtgctgcgtcaggaggcgggatttcctcggcgcgatgcgctgggcgaggtgcagcgatgtgccgcgacgttccggctctccgctgaggaggcgcgacgcctctcgggtgacatgattccgctggagtcggccgcagggcaggtaggtcggatcggatttacgctcagaatgcctcttggtgtggtttgcgcgatcacgccgttcaatgcacccctgaataccgttgcgcacaaagtctgcccggcgctcgcggccggcaatgccgtaattctgaaaccgtcgctccatacgccgatgacatcctgcattatggcggagtgcctgctggaggcaggcctgccgcccggtctgctgtctgtcctccacggcgatgcggaggtcgcgcaatggttgatcaacgaaaagaatattcatttctacgcgttcaccggcagcacgcaggtcggtcgcgcgatacagcagcgcgtcggtctgcgccgaacccagatggagctgggctccatcgcgcactgcattctttgcaatgatgccgatctgaatgtcgccttgccgaaggtcataaacgcgagctatcgcaaggcaggtcaagtctgtacgtcgatccaggtgctgctcatcgacagatcgctcgtggacaaggtcgagcaccgtctggcggaactcgtcgccgcgctgccgttcggcgacccggcgaacgaaaataccgtggtgggtccggtcatcagcgaagcggctgcggttcgagttgaatcctggatcgtacaagccgtgaagagcggcgcgcgccttctggtcggcggcggtcgcagcggctcggttgttcatccggcgctgttggccgacgtctcgaaggcaacaccgctgggctgtcaggaggttttcggacctgtcctgacggtcgcgccgttcgactcgttcgacgaggcgatcgagcgagtcaacgcgaccccttacggtctcgcgaccggaatcttcacgcagcatatcgggaatgcactcgaggcggcgcggaagctccaggtcggaggcgtacacatcaacgaaactcccagctcccgcgtcgatctcatgccctatggtggctcgaaggatagcggttttggccgggaaggcccgtattatgcgatccgggagatgagcgaagagcgcatggtcacgatcctggcctga

SEQ ID NO: 4051 - DNA, 1791 bp, BradyrhizobiumColbertium
atgagcaagatgaagggtggcgaggtcatcgccgagtatctcgtcaagcagaaggtgccgttcattttcggcgtctgcggccatggcaatgtaggcattctcgatgcgctttaccaggtgcgggacaagatcagcctgatttcgccgcggcacgagcaggcggcgggccatatggctgacgcttactttcgcgtcaagcacagtccggtcgcgacgttgacgtcaacaggtccgggctcggcgaatatcgtgatgccgctgatcacagccctgtcggactcatcggcgttcatggcaatcacggcaaacgtgccgacgtcgcaggccaatcgtggacccttccaggagctctacgcgcacaatcaggccgactttgctcaggtcatgcggccggtggtcaagcggacgttccagcccacgcgcgtcgacatgctgcccctggcgttgcgccagggcttcgacacgatggtgaccggcaggccaggccccgtgaacttggatattccatacaatgtcttccaggaggaggatgacgtcgaactgccggcgccgtcacacgtgcacggcgggcatcgccccaatgccagccccgcggatattgcgaaggcgctcgacctgctgagcgcttccaggaaaccggttttctttgtcgggcaagggacgacgctgtccgaagccagccccgagatcacggcgcttcagcagaaatacggcatcccggttatcacgtctccgaatggcatgggtctcgtgccctccggcgacccgctgacgctgggctttatcgggcgcaacggtgcctatccggccaatcaggccggtcgttttgccgatctcgtgatctgcatcggaacgcgcttcgacgaccgctcgtcatcgtcatggcacccgggctattcctggaatttcccggagaccaagcttatccaggccgacatcgatcccgcggagctcgggcgcaactatccgccgacgctcggcgtcatcgccgatgccaagaccttcgcggcgcaactgctcgacgggatggccgagcggaaggacattcggcgggagaacttcgagccgtggcgcgccgaggttgccggttggcaggccgaatgggacgcgttcgtccgtcctcacttcaaggacgtgacgacgccgatccggccggaatatgtggtcgacgcgctgaccgacatcctgcccgacgatgtgatcctgtcgctagattccggcgtgcatcacaattggttcatgcagttctggaagccccgccgggcgcagagcatgctcaatagctggggctattcgtcgatgggcttcggcgtgtgcggcgttctcggtgcgcacctggcggcgcccgaccgcacctgtgttgcggtcgtcggcgatggcggcttcatgatggcgccccatgtggttgcgaccgcggtcgagtattcgctgccctgcatctggatcgtgtggaacaacttcgcctggggtgcgatccgcgacattcaatatggaatgttcggaggcagggagctcgggaccgccttctacaagggcaatcaggggcccggcggcgaacgatacaatccggacttcgcagcgtgggcgcgtgcctgcggcgccgatggctacacggtcaccaggagcgaggatctgcgcggtgtcgtggaaacggcgatcaagaatcgccgaccttgcgtcatcgatctgcatgtcgatgccgaggtgcgtccaccgtccacggggacgtggcaattgccgcccgtgccgtacaaggagccggtcttcggtaaaccgcagcggctgatctga

SEQ ID NO: 4052 - DNA, 1236 bp, BradyrhizobiumColbertium
atgggttggatggatagtgcttgccggaagctgcttgcccgtttgacgactgcagcaatcgccagcctcgcggctgcaactggtgccagcgctcagacggatgatccaatcaggatcggcatgatttattcgaagcagggacccggctcgtcgatcggccagttcctggagcgcggcagcgaattggccgtcgaacaggccggcggcaaggtgctcggccgcaagatcgaggtcatctggctcgatgaatcggacccgcaaggctcccagcagaacatgcagcggctcgtggacgaaaataaggtcgtcgccgtcgtgggcggcaactacagttcgaatgcgctcgccatgatgagcgtggccaatcgcgcgaagattccgctcatcctgccgggagcagccgcgagcgaaatcacgggcaagagctgcagccgctacgtcttccgtacccaggcgacagtcccggtgcagacgagcggtctgatgccctacatcgcatcgatcgggaagaaagtctatttcctgacagcctcatatgcgttcggtcaggacatactgcgatcgtcgcgagccttgctgggcaagaccgggctgaccgaagcgggctccgacgaggtgccgatcaacacggctgactactcatcctacatcctcaagatacggcaagccaagccggacgcgatcatcggcggccttgtcggcggcgacttctccaccttcctcaagcagtggaatgagatggggatgaaggagaaaatcccgtacggcgccatagcggtgaccgatacggatttctgggacgtcggcccgcaggcctccagcggcatctacatcaagccctggtactataacaatcccaagaacacggcagccgagaaggcgatgaccgaagcgttccagaagaagtacggccagccgccgtcggacaagacttggtcggggtggattgcgatgcgcgcgctgctggagtcgatcgaggctgcgaagtcgaccaaagctcaggacatcattgtcgctctagagaaatggaaaaacacggaaggattgctgccgtactacttccgcgaatgggaccatcagatggtccggcctgccgtcatcgtgcaggtcaagaagaacatcaccgacaagtgggatttcttcgaggtcctgaaggacacctccgctacggcggaagagaccgaaaaagccttcgggaccaaggaagagatcggctgcaacatgccggcgctctga

SEQ ID NO: 4053 - DNA, 870 bp, BradyrhizobiumColbertium
atgaccgacatcatcatttcgcaagtcgccaacggcctcgtcctgggctttctctacgtcctgatcgcggtcggcctgtcgatcacgttcgggcttcttggcgtcatcaatttcgcgcatggcgctttcttcgcgctgggcgcttacgtgtcctggcaactctttcgttggttcggatggggagctgtcgccctggctccgatcgtcgttgctgccataggcatggcgacggagttcctgctgatacgtcggctttacgggcgcgagcctcttctgagcctcatcgtgacgttcgcactggccttgttgatcgaggctctcattcgcgcaacctggggcgcggacggcaaaccattcaacccgccgccgccgctcgcgggcatcgtcgagctgggaccattgctgatcacaaaataccgggtggcggttctggccgcgacgtcgacggcattgctcggcctctgggctttcctgtcctggacgccttatgggcggattctgcgtgccggaagtcgcgatcccgagatggttgagctgctcggcatcaagctgccccgcgtccttacggcggtattcggcctgggctgcgggcttgccgcgatcgcggggctgcttgcagccccgctctggaccgtctctccgtcgatggcggcgaatgcagttatgcccgcatttgtaattgttgcaattggtgggcttgggtcgttgcggggcgccgtggtggcggggctcgccgttggtgtcgtgaccgctctgaccatccagttctggccggcggcgtcgacggcctcgatgtacgtgctgatgttcgcgatcatgcttctgcgccctcgcggcttgttcggtgaacgctgggagcgcttcgaatga

SEQ ID NO: 4054 - DNA, 2574 bp, BradyrhizobiumColbertium
atgaaaggggcgttgctcgggcgtgtgtcgcgccatcccattgcgatcattgccgccgtattgcttgttgcctcggccattgcgcttggcatcggcatgccggttgcaagagtgactcagattgcgatctacactctttatgcggccggggtgaacttcctgatcgggtatctgggcttggtcccgttcggcgcatcgttcttcttcgggactgcaggttacgccgtggcgctgatcggaacgcgtcttctcggcgggaacgaactgggcgacgttctggtcgcagccggtttttcgatgctgctggcgctgacggtcggtgcggtcatcctccgccggcgaggcctctacttttcactgctcacgctcgcctgctcacagatcgccttcgagatcgcgttcaagtggacggacgtcactggtggagagaacggtatccaggatgtcgcgcggcccctgtttacctcggcgctcgagtttcactggttcgcgctcgtcgtcgtcctcggcatgttgtggctgttgtggcggatcgctcatagcccgtttggccggatgatgcaggcgctgcgcgacaacgaggagcgtgtcgccagtctgggctacaacacgtatcagacgaaactcgtcgccctcgtcatcgctggcggggcgatcgggatcgccggcggtctgatggtgctattgctgcagggagcttacgccaacaatctgagctggcagcacgccggcgatccggtgttaatggcggctctgggcggagttcatcacttcctcggacctctctggggttcgatcattttcattgtactcgaagatcgcctcagcgccctgaccgagaactggtggctgttctttgcgcccattatcatcgcattcgctctgttgtcgcatgaaggcgtgcaaggcatcttccagcgtcttgtcaggcgcgaccgctggacgctgacgcgcgacggcatttcaccgcgtcccgcgaagatcgtgccgtatacgccggccgccgcgaaagggtcaggcgacgggggcgcgccgatccttcaggtccgaaacctttccaagcgcttcggcaacatcgtcacccagaacgacatctcgctggagatgagccggacgggtctacactccctgatcggaccgaatggcgcgggcaagaccaccttcttcaatctcctgaccggccgctacaagccggactccggcgagatcctgttcgagggcgggtcgatcaacagcctgccgccctacaagcgggcgcggctggggattgcgcggtcgttccagatcctcagcgtgtttcccaatctgacggccttcgaaaacgtgcgggtcgcggtgcaggcctccaacaggacctatttcagcctgtgggccgacgcacatgcctcggagagcgtcaatgcgcgggtctggggcctcctggaggccgtcggcctgaccgaacgagcggctgaactctgcgtctcgctgtctcacggcgaaaagcgcctcctcgaaatcgcggtctcgctcgcgatcgacgccaagctgctgctgctggacgaacccttggcgggtctggcggaatccgatcgtcgcatcgtcggcgaactcatccgccgtctggcgcaatcccatgccgtccttctgatcgagcatgacattgatcgggtcctggcaatgtcggaccgcattacggttctgcatcagggccgtctgattgccgacggcaagccggcggaggtcgcacggcatccggaagtggtcgccgcctatctcggcgatgcccatccggtgcaggagagcgggcaagttgtggttcttccgacgaggaagggcggcgcggctgtgccggccgaccaggccccgctcctcgagctcaagggaataagcgctggctatggcggcagcaccgtgctcgagaacgtcgatctggccgttcacaagggcgaggtcgtcgccctgctcgggcgtaacggcgtcggcaagaccacgctgctgcgcgcggttacgggtgttctgcacccgtcggaaggacaaatgtcgtttgaaggccgcgatatatcgaagctgcggcccagcgacatcaacagactcggcatctcgctggtggccgaggggcggcggctgtttccgaacctgacagtacaggagaatctcaggcttgccgcgcggccggggggcgcgtcgatggaggagatattcgacctgttcccgaaggtcggagctcgaatccgttcgcgcggtgaaaccctctccggcggtgagcagcagatggttgcgattgcgcgcgccctgatggtgccgtccaggctcatcctgcttgacgagccgttcgaaggcttggcgcccgccgtggtccaggaagtgcgcgacgccgttggacgactgtcgacgagggcgagcatggtcatcgtcgagcaccatgcggagagcgtcctcgcgatggctgaccgtgcctatgtgctcgtgaatggtcgtgtagcctacggtggtgccgcaagcaccttggcgatggacaaggcgcagtgcgagcggctgctcggcgttgtccaggccgatgaggtggggcagcgcacccctgcgacaatgtga

SEQ ID NO: 4055 - DNA, 423 bp, BradyrhizobiumColbertium
atgactatcgtggcgcccgccccaaacgcatttgcggatgcggaaaagaaaaaatacgcggtgactcgcaacctcgccgaactgcagtggatccagtatccgggccacttcaaccaggctctgtcgaaggcgatcgtcacgcccgaaaccacgggtagccggttcttcgatcaccgcatttcgacctacgaggcaggtgcgcatgtggaatcccatgtccacaaggtgcaggagcaaatctaccacgtgcttgccggcgaaggcgtgctggtcgtggacggcgagcgtcgcgtggtgcgttccaacgacgtgaccttcatcccgccgggcgtcgtgcatgagttccacaacacgggcatcgaccctctggtgttcctcgtgatcacgagcccgccgaccgacgaagagccggagccgcgttga

SEQ ID NO: 4056 - DNA, 954 bp, BradyrhizobiumColbertium
gtgagcaagaagattctcgttacgggtggctgcggctggctcggtggcgccatcgtcagggcgctgctcgaccggggtgatacggtcgttgccgcggatatcgcggtttcgcccgcaatgaccgcgcttgccgcgagcaattcccggctgtcggccgaggcggtcgactttggcgagtggcatcaggtcgtgcggttgttcgaaaagcatccggtcgatgcggtagtgcacacggcagcgatcgtgggcgtcgtctttgcagcggacgccccgatcaagacgctgcgcgtcaacgtcgaaggttcgatcaacgtcttcgaggcgatgaggctgcgcaaggttcggcgtgtcgtgcatatctcgacggaagagacctacggcgatttccaggcacccaggatcgacgaggaccatccgcagaagccggccagcgtctatggtctcaccaagctggcagcagagcattacggtcgggtctattcacgcgaccacggccttgagtgcatcaacgtacgcacgtgctgggtttacggtccgcacctgccgcgcctgcgattgccgcgcaccttcatcgaggcggcactccggggcgagccctatcatcagacggagggtgcaaatctggccgtcgatcaggttttcatcgacgacacggtcgacggcaccctgctcgcgctcgacaaggagaagcatcgtttcgatgcctacaacatcgcaacgggcgaggctccgacgctccgggacaccgcagatgcggtcaatgaggcgatcccgggggcccgcattacggtcggcgacagcggtgtctatcgccatggcggcgtggtcccgaccgccgtcaagggggcgctcgacatcagccgtgcgcgcgccgagctcggctatgagccgaaatacgacatcaagaagggcatcgcggcgacgatcgccgcgacccgggcaagcttacggtaa

SEQ ID NO: 4057 - DNA, 711 bp, BradyrhizobiumColbertium
atgaccaagccttcacccgtagttctgattttcggtggctcgcgcggcatcggcgccgcctgctgtagtgcgttcgagaacgcgggctggcaggtggccagcacctatgcggcggacgcgcccgcaaagccggtcgggcgtgcatacaaggtcgatatccgcgatgccaagggtgtggccgatgtctttgagcgcgtgaccgcggatttcggcgtcgcgccgattgctgtcgtggccaatgccggcatcaaccggccgccgcgtccgatggcggacttccccttggcggattttcaggagctcgtcgacgtcaacatcgtcggcgcgttcaatgtgctgtccgaggccgcgcggcgcgtgccgaagggcggctcgatcgtggcattgaccacatcgatgaccggtttgggaattcccgggggaggcccctataccgcaacgaaagcggcggtcgagagtctcgtgcggtcgatgtcgaaggaactggcgggccgcgaagtccgcgtcaacgcagtcgctccggggccggtcgatactgacctgttccgcgcgggaaagacggaagaagccaagcaaagatcggcggcaatgagcccgctgaaccgcattggccgcgcggaagagattgccgaggtggtgctgttcgcgtcctcgcagaacgcctcgtggatcacggggcagatcatccggcccaacggcggcatgatatga

SEQ ID NO: 4058 - DNA, 1695 bp, BradyrhizobiumColbertium
gtggccgatgcctgggacgccatcgtcatcggcgcgggagcggctggtctgaccgcggcctgtacggcggccgctgcgggaaaatccgtgctcgtgctcgagcaggcggatgtcgtggggggcacgaccgcgatttcgggcggcatggtctggctaccggtcaaccacaagatggccgaagccgggcagcccgacagtatcgaggctgcgcggacctatctatcggttaccgtgcccggcaagaggcgggataagctcgagacctttctggcgcgggccgacgacgcgctgcgggatctggaggcgacgacgtcgcttcgattccagcccgtgccgacctatccggattactatccggacctgccgggcggaacggcgggtggacgcgttctcgaacctgtgccgttcgacggcaggcagttgggccgtgcattcgggctcgtgcgggaccctctgccggagttcacgctgttcggcggcatgatggtcagccgcaaggacattccacactttcgccgcgcgatgaagtcgctgccgtcgaccctgcgcgtcacgcggcttctgttggactacttcctccagcgcctcaaggcgcgccgtggcacgtcgttgtatctcggcaatgcattggtcgcgcgcctgcttcggtccgcactcgatctcaaggtggagatacggaccggcgtcggcgtcgaaagccttgagctcggaccggacggccgtgtctcgctggtcgttgcacaggatgcgcagggacgatcgaccaggctcgtggcccgccgcggcatcattctcgccaccggcggcatctcgcatcagcccgagatccgtcgcaactatgtccccgaagctgcgggaacgctgactgcaacggtcaaatccggtccgcagccgcggggagccgtcctcgccagtgccttgggtgccagcctgtcgtcatcgacaagggaaggggcgttctgggttccggcctctacctttgtccgcgcggacggcagcgcaggcgtctttcctcacacggtcaccgaccgcgccaaacccggcctgatcgccgtcgactgcaatggccagcggttcgtcaacgaggctctgtcctaccacgagttcgttcgtgcgcaactctcgcacgccaacagtgcgattccagcctggctgatctgcgactgcggcttcctctggaaatacggtctcggcaagatcaagccgttttcgacatcgatcaaaggcgatatcgcgtctggctatctcatcgaggctgcatcccttgcggacctcgccaagcagatcggcgtgccggtcgcggccctggatgagactgtgcgcaatttcaatgtcggggcagagaagggggaggatccggagtttggtcgcggcggtgatgtctaccagcgctcgctcggggacgccgacgtgaaaccaaatccgtgcgtcggaccgatcaagcaggcaccgttctatgccgtcaaggtcgtgccggccgatttgggcatgtcggcgggcatcgtgacggatgcctcgacacgggttctcagaccggacgggacggccataccgggcctctacgcctgcggtaacgacatggcgtcagtcatggagggggcctacccgggaccgggaattacgctgggtccggctctggtgttcggatggatcgccggcaaagaagcggtcaaggcacaccaggatgcgcgttag

SEQ ID NO: 4059 - DNA, 1749 bp, BradyrhizobiumColbertium
atgaacccaacggccggcaagacatccgcaactggagaacaaatggcttcgactactgctgatacctatagcccctcgcgcgacgatttcgccgcgatgctcgacgagtccttcgcaggcggcaacctgcaggaaagctccgtcatcaagggcaaggtggttgcaattgaaaaggacatggccgtcatcgacgtcggcctgaagaccgagggccgtgtcgcgctgcgcgaattttccggccccggccgtgaaagcgacctcaaggtcggcgacgaggtggaagtgttcctcgatcgcatcgagaacgccctcggcgaggccgtgctgtcgcgcgacaaggcgcgccgcgaagagagctggggcaagctggagaaggctttccagaataacgagaaggtcaacggcgtcatcttcaaccaggtcaagggcggcttcaccgtcgacctcgacggtgccgtggcgttcctgccgcgctcgcaggtcgacatccgtccgatccgcgacgttgcgccgctgatgaacaattcgcagccgttccagatcctcaagatggaccgccgccgcggcaacatcgtcgtctcccgccgcacggtgctggaagagacgcgcgccgagcagcgccaggaactggtgcagaacctcgaagagggtcaggtcatcgacggcgtggtcaagaacatcaccgattacggtgcgttcgtcgacctcggcggcatcgacggtctgctccacgtgaccgatatcgcgtggcgccgcgtcaaccatccgaccgaggtgctctcaatcggccagaccgtgaaggtcaagatcatcaagatcaaccacgagacgcaccgcatctcgctgggcatgaagcagctgctggacgatccgtggcagggcatcgaagccaagtacccgctgggtgcccgcttcaccggccgcgtcaccaacatcaccgactacggtgcgttcgtcgagctcgagccaggcatcgagggcctgatccacgtctccgagatgtcgtggaccaagaagaacatgcaccccggcaagatcgtgtcgacctcgcaggaagtcgatgtgcaggtgctggaagtcgattccgtcaagcgccgcatctcgctcggcctcaagcagaccatgcgcaacccctgggaggtcttcgtcgaaagtcacccgaccggttcggtggtcgagggcgaggtcaagaacaagaccgagttcggtctgttcctgggtctcgaaggcgacgtcgacggcatggtccacctctccgacctcgactggaagcttccgggcgagcaggtgatcgacaactacaagaagggcgacatggtgaaggccgtggtgctcgacgtggacgtcgagaaggagcgcatctcgctcggcatcaagcagctcgaaggcgaccccttcgccgagccgggcgatgtcaagaagggtgcggtcgtgacctgcgaagtgctcgaagtgaaggaaagcggtatcgaggtgaagatcgccggtaccgacttcaccaccttcatcaagcgctccgagctcgcgcgtgaccgcaacgaccagcgcgccgagcgcttcgccgtcggcgagaaggtcgatgcccgcgtgatccagttcgacaagaaggcccgcaaggtccaggtgtcgatcaaggcgctcgaagtcgccgaagagaaggaagccatcgcgcagtacggctcctccgattcgggtgcgacgctcggcgacatcctgggcaccgcgctcaagaaccgcgacagcaagtaa

SEQ ID NO: 4060 - DNA, 639 bp, BradyrhizobiumColbertium
atgatcattgccatcgacgggccggcagcctcgggcaaggggacgctcggcaagcgactcgcccagcattacggctatcgtcatctcgataccggcgtgatctaccgcgcggtggcttatgccttgatgcagtccgggcacgctctcaatgacgaggcggctgcggtgcaggctgctttgcagctcgatcccgaaaagttcggcaatcccgccctgaagacccagaaagccggcgagggcgcctcgatcgtctccgcgattccgcgcgtccgcgaggtgctggtcaatttccagcggcaattcgctgccgatccgccgggggcggtactggacggccgtgacattggaaccgtgatctgtccccatgccgacgtgaagatattcgtcgtcgccgaccccaaggtccgggctcgccgccggaccatggaagccagggccaggggcgaggaggcggacgaggccgccgtgctcgccgacatcatccagcgcgacgagcgcgacaagaaccggccgatcgcgcctttgaaaccggccccggatgcttacttgctagacaactcccaactggatatagaaggcggtgtccgggccgccatcgacattatcgaggccgtccgagcgggccggtcgcgggggtaa

SEQ ID NO: 4061 - DNA, 1269 bp, BradyrhizobiumColbertium
gtgcccggggacaagtcgatctcccaccgggccctcatccttggcgcgctcgcggtcggcgagaccaggatttcaggcctcctcgagggcgaggacgtcctcaacacggcgaaatccatgcagtcgctgggcgccagggtcgagcgaaccggcgatttcgcctggaaggtgaacggcgtgggcgttggcggcttcgcccagcccaaggcggcgctggatttcggcaactccggcactggctgccgcctggtcatgggcgccgtcgcgggctgcccgatttcggcggttttcgatggcgacgcctcactgcgcagccgcccgatgcgccggatcctcgatcctctcgaaaagatgggcgccaaggtcatcgccggcggcgagggtggccgtctgccgctgaccctccagggcgcgcgcgatccgctgccgatcgtgtacaagaccccggtcgcttcggcccagatcaaatcggccgtgctgctggcgggcctggccgcgccgggtaccaccacggtggtcgagaccgaggccagccgcgaccacaccgaactgatgctgaagcattttggtgccgatatcacctcaacgcgggaaggtccgcacggccgccgcatcacgctggtgggtcagcccgagctgtatggcgccagcgtcgttgtgccggccgatccctcctcggccgcctttccggtcgtcgcggcgctgatcgtcgagggatccgatgtcgtgctgccggacgtgatgaccaatccgctgcgcaccggcctgttcaccacgctgcgcgaaatgggcgcgtcgatcgaggagagtgaggtgcgcggcgatgccggcgagcccatggcgcgcttgcgcgtgcgtgcgtcgaaattgcgcggcgtcgaggtgccgccggagcgcgcgccgtcgatgatcgacgaatatctggtgctggcggtggcggcgtccttcgccgaaggcacgacgatcatgcgcggcctgcaggagctgcgcgtcaaggaatccgaccgcctggaagccaccgccgacatgctccgcgtcaacggcgtcaaggtcgaggttgccggcgacgatctgatcgtggaaggccgcggccacgttccaggcggcggcgttgtcgcgacccacatggaccatcgcatcgccatgtccgcgctggtgatgggctgtgcctccgatcggccggtgagcgtcgacgacaccgccttcatcgccaccagtttcccggacttcattccgatgatgcgttcgctaggggccgagttttcatga

SEQ ID NO: 4062 - DNA, 408 bp, BradyrhizobiumColbertium
gtggccaagtccgaactcggaaccaaacgtatttgcccgaccacgggcaagaagttctatgacctcaacaagaatccggtgatctcgccctataccggcgaggtggtgccgatcgccccgatcgcacccgcacgctcgtcccgcggcgccgaggcccgcaacatggcccaggacaccacgcccgagccggccgaggccgaagagttggtgtcgctcgaggaagccgatgccgaggagaacacgggcaaggtcaaggccatcgtgcccgaatccgaggacgacatcgaggtcgacgagaccctcgacgacgacgatgacgacgattcgaccttcattgccgacgaggaagagggcgatgaggacgtgaccgacatcattggtgatgtcggaggtgatgaagagacttga

SEQ ID NO: 4063 - DNA, 73 bp, BradyrhizobiumColbertium
ggggccatagctcagctgggagagcgcttgcatggcatgcaagaggtcggcggttcgatcccccctggctcca

SEQ ID NO: 4064 - DNA, 462 bp, BradyrhizobiumColbertium
atggcccggaagcattcggcagcggacgccccgctgcggctcgacaaccagatctgcttcgcggtttattccgccgcgcacgccttcaaccgcgtctacaagccgctcctcgaccggctcggcctgacctatccgcaatatctggtcatgctcgtgctgtgggaacgcgacgacgtgccggtcaaggagatcggcgaaaggctgtttctggattcgggcacgctgacgccgctgctcaagcggctcgaggccgcccatctcgtcaagcgcacccgctcgcgcgaggacgaacgacaggtgctgatctccctgaccccgcagggccaggcgctgaaggaaaaggcgcgggccgtgccgcagtcgattttggcggcgtcgaattgctcggtgtcggagctggtggcgatgaaggacgagatcgtcgcgctgcgggacaggctgaatgcggtgatcgaggagtag

SEQ ID NO: 4065 - DNA, 426 bp, BradyrhizobiumColbertium
atgtccgtgaacgtcctctacaagaccagtgccaaggccaccggcggccgcgacggccatgccgcgaccctcgacggcgcgctcgacgtcaagctgacgacgccgaaggagctcggcggcggtggcggcgccggcaacaatcccgagcagcttttcgcggcgggctatgccgcctgcttcatcggcgcaatgaagttcgtggcttcgcagggcggccccaaggttccggccgatgcctcggtcacctctacggtcggcatcggcccgcgctccgaaggcggtttcggcctcgacatcgacctcgccgtctcgctgccgggtcttgcccgcgccgaggccgaggcactggttcagaaggcgcaccaggtgtgcccttactccaatgccacgcgcggcaacgtcgacgttcgcctgacggtcgtctga

SEQ ID NO: 4066 - DNA, 1221 bp, BradyrhizobiumColbertium
atgagttctgaagccgcgggttctgaagccgccccaggtgccatgagcggactgcgcgtcatcgatctcacgcgcgtgctcggcggaccgtactgtacccagatcctcgctgaccacggcgccgacgtgatcaaggtcgagccgcccgcaggcgacgaggtgcgcgactggggccctcccttccacgaggaggacgcggcctatttcatcggcatcaaccgcaacaagcgctcgatcggcctcgacctcgcctccgagggcggccgtgccgtgctgctgaagatgctggagaccgccgacgtcctgatcgagaatttcaagccgggcacgctggagaagtggggcatcggcaacgagaccttgcgcgacaaattcccgcgcctcgtgcattgccggatctgcggcttcggcgccgacggcccgcgcggcggcaatccgggctatgacgccatcatccaggccatgaccggcatgatcgccgcgaccggctcgcccgagagcggtccgatgcggattggcgtgcccttggtcgacatcggcaccgggctctatgcggcgatcggcatcctgatggcgctgtcggaacgtcagcgctcgggcaagggccagttcctggagacgacgctgtacgagaccggccttgccatcatgcatccgcacaccgcgaactatttcatgcatgggaagccgccgagcctcaccggcaacgagcacccgaaccttgtgccttacgcgatcttcccgaccaagaccgacaacatcttcatcggcgtcggaaatgatggcaccttccgcaagctctgcaaggagatcggcaagccggagctgggcaccgatccgcgctttgcgcgcaacaaggaccgcatcgccaaccgggaggcgctgcgtgccgagcttgccgcggtgttcagccagcacgaggccgagccgctgtgcgatcgcctgctcgctgcgggcctgcccgcaggtcccgtccagaagatcgaccaggcgttgaccaatccgcacacgatctaccgcggcgatattatcgagaaggactggtacaagggcgttgcctcgccgatccggctcgaccgctcaaagccgagcctgcgccgcctgccgcccaagttcagccagcactcccgggaggtgctgggcgagttcggctactccaaggccgagatcgacgcgatggtggccaagggcacggtctgcggccccgagcgcaagcgttga

SEQ ID NO: 4067 - DNA, 1317 bp, BradyrhizobiumColbertium
atggctcttcgacattttggtgcggctgctgctgttgcactcacggttggtttcggcgcctcgccggcactcgccgtgaccgaaatccagtggtggcacgcgatgaccggcgccaacaacgacgtcatcgtcaagctcgccaacgacttcaacgcctcgcagggcgatttcaaggtgatcccgacctacaagggcaactacgccgacacgatgaacgccggcatcgccgcgttccgtgccggcaatgcgccgcacatcatgcaggtgttcgaggtcggcaccgccaccatgatggccgcgaccggcgccgtgaagccggtctacaagctgatggccgagaccggcgagaagttcgatcccaaggcctatctgcccgcgatcaccggctattattcgacctcgaagggcgagatgctgtccttccccttcaactcgtcgtcgacggtgatgtgggtcaatctcgacgcgctgaagaaggccaatgtcgagatcccgaagacctggcccgaagtgttcgacgcggccaagaagctgaaggcggccggccacgcgacgtgcggcttctccaactcctgggtcacctgggtcaatctcgagcagctctccgcctggcacaacgtgccgctgtcgaccaaagccaacggcctcgacggcttcgataccgtgctctcgttcaacggaccgctccaggtcaagcatctggagaacctcgtcgagctccagaaggacaagacctacgactatgccggccggaccaacaccggcgaaggccgcttcacgtcgggcgaatgccccctctacctgacctcgtcggcgttcttcggcaacgtcaaggcgcaggccaagttcgccttcaccgcggtgccgatgccctactatcccgacgtgaagggcgcaccgcagaattcgatcatcggcggcgcctcgctctggatcatgggtggcaagtcggccgaggagtacaagggtgtagcgaagttcctgaccttcctgtccgatacggatcgccaggtctatatccacaaatcgtcgggctatctgccgatcaccaaggcggcctatgagaaggccaaggcggaaggcttctacaaggatcagccttatctcgagaccccgctgctcgagctgaccaacaaggagccgaccgagaactcgcgcggcctgcgcctcggcaacatggtgcagctccgcgacgtctggtcggaagagatcgagcaggccctggccggcaagaagaccgccaagcaggcgctggattcggccgtggagcgcggcaacaccatgctgcgccagttcgaaaagaccgccgtcaagtaa

SEQ ID NO: 4068 - DNA, 882 bp, BradyrhizobiumColbertium
atgcaaaagcaagccattttccagtcgaagctattgccctacgcgctggttgcaccgcagctcgcgatcgtcctggttttcttctactggccggccttgcaggcgatgatccagtcgttcctgctccaggatgccttcggcctttcgaccagcttcgtctggttcgaaaattacatcgatctgttcaaggagcccgcctatttcgaggcgatcctgcgcaccttcttcttctcgtttgcgatcgcggtgtcgtcgctgtcttttgcgctgctgctcgcggtgatggcggacaagccgctgcgcggctcgatgctctaccgcacactcctgatctggccctatgcggtggctccgccggtcgtcggcgtgctctggatcttcatgctgcatccctcgctcggcgtgctctcgcgctatctgcgcgcgctcggcgtcgactggaatccgctgctcgacggcgaccaggccgcagcgctgatcatcctcgccgccgcctggaagcagatctcctacaatttcctgttcttcctcgccggcctgcagagcatccccaaaagcgtgctcgaagccgccgcgatcgacggcgcccggccgatgcggcggttctggaccgtgacgttcccgctgctgtcgccgaccatcttcttcctcctggtcgtcaacatcgtctacgccttcttcgacacgttcggcatcatcgacaccatgacccgcggcggtcccggcaagtcgacggagacgctggtctacaaggtctataccgacggcctgctcggcggaaacctcggcagctcggctgcgcaatcggtgatcctgatgatcatggtcatcgtgctgaccggaatccagttccgcttcgtcgaacgcaaggtgacctactga

SEQ ID NO: 4069 - DNA, 849 bp, BradyrhizobiumColbertium
atggtcgaggaagaaggcttccggcgctacatcgcccacatcatcctctggatcgggatcgcgatcgtcgccttcccggtctatctcgcaatcatcgcgtcgtcccaggacaacgcggtgatcgcgaacggccagatgtcgctgctgcccggcggtcatttcttcgagacctactaccagacgatcttcgtcggcacgagcggctcgacccgcgagccggtcggcaacatgatgctgaactcgctggtgatggcgctcctgatcgcgatcggcaagatcgcgatctcgatcatctcggcctatgcgatcgtgtatttccgctttccgttccggatggcgatcttctggctgatcttcatcacgctgatgctgccggtcgaggtgcgcatctatccgacctacaagatcgtcgccgatctgcacatgctcgacagctatgccggcctgtcgctcccgctgatcgcatccgccaccgcgacgctgctgttccgccagttcttcatgaccgtgccggacgaattgctggaggcctcgcgcatcgacggcgcaggccccttccgcttcttctgggatacgctgctgccgctgtcgcgcaccaacatggcggcgctgttcgtgatcctgttcatcctcggctggaatcaatatctctggccgctgctgatcacgacgcgcgacgacatgcagacgatccagatcggcatccgcaagatgatcaccaccaccgacgcgctgaccgaatggccgatcgtgatggcaaccgccgtgctggccatgctgccgccggtgttcgtcgtcgtcgtcatgcagaagctgttcgtgcgcggcctggtcgagactgaaaagtga

SEQ ID NO: 4070 - DNA, 819 bp, BradyrhizobiumColbertium
atgagcgtctacaacaacatggcctatggcctgcgcaaccgcggcatggccgaagccgagatcaagacccgcgtcgaggaagccgcgcgcgtgctcgagctctccgcgatgctggaccgcaagccgcgccagctctccggcggtcagcgccagcgcgtcgccatgggtcgcgccatcgtgcgccagccgaaggtattcctgttcgacgagccgctctccaacctcgacgccaagctgcgcatcgcgatgcgcgtcgagatccgcagactgcagcgccgactcaacaccacgtcgatctacgtcacccatgaccagctcgaggcgatgacgctcgccgacattctcgtcgtgatgaacggggggcaggtcgagcaggtcggtaatcccctggcgatctacgaaaagccggcgaccaccttcgtcgcctccttcatcggcgcaccgccgatgaacttgatgtcgacgcgtcccgaggagatccggtcgcagctggcgggcagcgcggcggccgacgccggcgtcctcggcatccgcccggaggatttcgtcatcaccgaccagaccccggacggcggcgtcgcgctgccgctcaccgtggaagcgatcgagcgcgtcggcgcggaaaccttcgtctacggctcccgtgagcaggaggagaagcacgtcgccgccacccccggcgagctgccgcccggcgagatcatcgtccgcattcccggaaccgaagcccccgcgatcggcgcgaggatccgcgtcgccgcacgaccggcgaagctgcatctgttcagcggcgacgggcgcaagcggctcgaggcctga

SEQ ID NO: 4071 - DNA, 426 bp, BradyrhizobiumColbertium
atgtctcgtgttccaacgctctccagccccttcctgctgggcttcgacgagatcgagcgcgtgctcgaccgcgtcgtcaaaggcgccgacggctaccctccctacaatatcgagaggtgtgaccgcacggacggccagcccgagcgtttgcgcatcacgctggcggttgccggattcacccgcgaccaactcgatgtaaccattgaggaaaaccagctcgtgatccgcgggcggcagcaggacgacaagacccggcaatacatccatcgcggcatcgccgcgcgccacttccagcgcaccttcgtgctggcggaagggatgctggtgctgggtgcggatctgaagaacgggttgttgtcgatcgatctggcccggcctgagccggagaggatcgttaagacaatcgctatcaatgagcacgaataa

SEQ ID NO: 4072 - DNA, 273 bp, BradyrhizobiumColbertium
atgagtgaaggtcacgttgcgttcgaatacgaagccaagaacgtctctccggagacgctggcaactctgggcgaaggccatatcgcctatgtgaagcagatccgctccgaagacgtgccgggcctgtttccggaggcgccgaaaatcgcgccgggcctcaagctgttcgcgcttcatgccgccgacggcacgccgatcatgctgaccgacagccgcgaagccgcggtcgccaacgcctggagcaacgagctgcaagccgtcagcgtgcactga

SEQ ID NO: 4073 - DNA, 462 bp, BradyrhizobiumColbertium
atgccgattaccgatctggtcgcacccgaggcgattctcccggcattgaaggtcaacagcaagaagcaggccctgcaggagctcgccgccaaggccgccgagctgaccgggcagaacgagcgctccgtgttcgaggtgttgctgcaacgggagaagctcggcacgaccgcggtcggctatggcgtcgccattccgcacggcaagctgcccaagctggaaaagatcttcggcctgttcgcgcgcctcgatcgcccgatcgatttcgaggcgatggacggccagccggtcgatctcgtcttcctgctgctcgcgcccgaaggcgccggcgccgatcatttgaaggcgctcgcccgcatcgcccgcctcttgcgcgaccaggacatcgccaagaagctccgcgcctcgcgcgatgcccaggcgatctattcggtgctggcgctgccgccggcgacggcggcctga

SEQ ID NO: 4074 - DNA, 606 bp, BradyrhizobiumColbertium
atgactctccgggtttcgggaaagagcatcagcgtcggcgaggccctgcgcggccgcgttgccgagcgcaccgaagaggtgctgcgcaaatatttcgacggcaattattccggccacatcacgctcagcaaggacggcttcggctttcgcaccgattgcgcgctgcatctcgattccggaattacgctggaagctgattcgaacgcgccggatgcctatgccagtgccgaccaggcgctggtgatgatcgagaggcggctgcgtcgctacaagaaccgcctcaaggaccgctccgcccgcaaggcccatgccgcctccgaggcgatggctgcactcgacgccaccagctatgtgctggaagcgcccggagaggacgaggaggaagtcaccggctacagccccgtcatcatcgccgagcaaaccacctcgctgaagcggctctcggtcagcgaggcagtgatggaactcgacctcagcggagctccgtgcctggtattccagcatggttcgtccggccgggtgaacatcatttaccgccgcgcggacggcaatgtcggctggattgatccgccggaagccaaggtcgacggcaagtcggacggttag

SEQ ID NO: 4075 - DNA, 1638 bp, BradyrhizobiumColbertium
atggccctcacgcagagattagagttccggcagtcgcagtcgctggtcatgacgccgcagctgatgcaggcgatcaagctgctgcaattgtccaatctcgatctcacgacctttgtggaagaggagcttgagcgcaatccgctgctggaacgggccagtgacgagggcccggcgggcgagtccccggccgaggtcggaagttacggcgattccgagggtggccagggggatggccacggcgacggtccgggcgaggacggattcggcggcagcggcgacggtttcgagcccggccaggaagaatggatgagcaaggatctcggcacccgcgccgagatcgagcagaccctggataccggtctggacaacgtcttctccgaggagcctgccgaggctgcggcccgcaccgcccaggacgccgcgccgaccacctataccgaatggggtggcggcgcctctggtgacgaagattacaatctcgaagcctttgtcgcggccgagacaaccttgtcggaccatctcgccgagcagctgtcggtcgccttcgccgcacccgcccagcgcatgatcggccaatacctgatcgacctcgtcgacgaggccggctacctgccgcccgatctcggccaggccgccgagcggctcggcgcgtcgcaacaggacgtcgaagccgtcctcgcggtgctgcagaaattcgatccgcccggcgtctgcgcgcgttctttgagtgaatgcctggcgatccagctccgcgagctcgaccgctacgacccggcgatgcaggctctcgtcgagcatctcgatctcctcgccaagcgcgacattgcgtccttgcgcaagctgtgcggcgtcgacgacgaggacatcgccgacatgatcggcgaaatccgccgtctcaatcccaagcccggcatgaagttcggctcggcgcgcctgcagaccatggtgcccgacgtctatgtccgtccgggccccgacggcggctggcatgtcgagctcaacagcgacacgttgccgcgcgtgctggtcaaccagacctactattccgagctgtcgaagaagatcggcaaggatggcgacaagtcctatttcaccgacgcgctccagaacgcgacctggctcgtgcgcgcgctcgaccaacgcgcccgcaccatcctgaaagtcgcaaccgagatcgtgcggcagcaggacggcttcttcacccatggcgtggctcacttgcggccgctcaatctgaaggccgtcgccgacgccatccagatgcatgaatccacggtgtcgcgcgtgaccgccaacaagtacatggcgaccaaccgcggcacgttcgagctgaaatatttcttcacggcctcgatcgcctcggccgatggcggcgaggcgcattcggccgaagccgtgcgtcaccatatcaagcagctgatcgattccgaggagccctcggcgatcttgtcggatgacaccatcgtggaacgcttgcgcgcctcgggcattgatattgcccgccgcacggtcgcgaagtaccgcgaagccatgcgcataccctcctcggtgcaacgccgccgcgacaagcagagcgctcttggtaacgtcctctccaccgcattgtctgatcgctcccgcaacaccgagccggcctga

SEQ ID NO: 4076 - DNA, 996 bp, BradyrhizobiumColbertium
atggtcgatctcttcagcatgttccgtcggcgccccgccaagcgcggccggccaggatttgcgcgccaggacatcaccgcgctcggtgacagcgtcggtggcctcgtgcccagtcctgtccgcgacgcaccgccgatcgcccgggaccagccgatgcgcgcgcccgatccgttccagggtgactatcaggtcgagccgccgcgcccgcaggctgttcaccccctgagaagcgccgccgcgtccaatggcggcggtcctcagctgctgaagcggccgggcttcctggccgtgcatggcgtgaaaaagtccttcggcagccgtcaggtcgtgcgcggcgtcagtatttatgtgcggcgcggcgaagcggtcggcctgctcgggccgaacggcgccggcaagaccaccgtgttctacatgatcaccgggctgatcaaggccgaccacggcgcgatcgagctcgacggccacgacgtcaccaagctgccgatgtatcagcgtgcgcggctcggaatcgggtatctgccgcaggaagcctcgatcttccgcggcctcaccgtcgagcagaacatccgcgccgtgctcgaagtggtggagccctcgcgcaagaagcgcgagcagcagctcgattcgctgctcgacgagttcaacatcacccgcctgcgcaaatcgccttcgatcgcgctgtcgggcggcgagcggcgccgcgtcgagatcgcacgcgcgctggcgacgcggccgaactacatgctgctcgacgagcccttcgccggcatcgacccgatcgcggtcggcgacatccaggatctggtccgccacctcaccaatcgcggcatcggcgtgctcatcaccgaccacaacgtccgcgagacgctcggtctcaccgatcgcgcctatatcgtctatgccggggaaatcttgaccgagggaaccccggatgagatcgtcgcggatccggacgttcgccgtctttaccttggcgaggaattccgcctctag

SEQ ID NO: 4077 - DNA, 720 bp, BradyrhizobiumColbertium
atgaccaggattctttcgcgtggcgccggcaagcggtgcggcatctctggcgcagccgcgctcgccgccggcctcgcgctgctcgtcaccggtgcggccgtcgcgcagagcacgatgcagggcgtgcccaatgcgatgcagggcttttcgcagaaccgcgatcagccgatccagatcgaggcggcctcgctcgagatgcgcgacaagaagaaggaggcgaccttcgccggcaatgtgaaggtggtgcagggcgacaccacgatgacctcgaagacgctcgtggtgttctacgattccggcggtggcgaaaagccggccgcgccgcagcccgcggcgaagggcgcgaaatcggctccgatgcaatcggcgacgccgggacccggaggcagctcctcgatcaagcggctggaggcacgcggcaatgtcgtggtcacccagaaggatcaggtggtgacgggcgagaccgccgtgttcgacaccaggaccaacctcatcaccatgctcggtggcgtggtcttgacgcaatgcaagaacgtgctgcgcggtgaccgcctgatggtcgacatgacgaccggcgtctcgcgtgtggaatccgacagcggccgggttcaggcgctgctgccgcagggcggcggcagcgattgcggcccagcggggcagagtgccaaacccggcgcggcgccgcctctgcaattgcccggtgcaagtaaacaaaagtaa

SEQ ID NO: 4078 - DNA, 735 bp, BradyrhizobiumColbertium
gtgaattcggcccagaatccgacctacgacgccgcgctcgcggcgaagtttgccagcgcggcgcgccacagccgcctggtgcggatcctgcgcgtggccgtgccgggggcggtgctgctgtccatggcggtcattgtcggcgtgtcgatcttcaacccgttccgcatgctgatgccgaagctgccgctcgattccgggaacctggtggtctcgggcaccaagatcacgatggaatcgccgcatctggccggcttcacgccggaccagcggccctacgagctctgggccaagaccgcgacccaggacatcaccgacccggatcatgtcgatctctccgatgtgcgcgcaaaggtgctgatggaggaccaatccaccctgttgctcgatgcccgcaccggccgcttcgacaacaagcagcagcagctcgagctgcgcaaggacatcttcctgcgcacctcggccggctatgaggcgcggctgaactccgcctttgtcgacatgggcaagggcacggtctcctcggacgagcgtgtcgacgtcaagctcaccaacggcacactgaccgcagacaggctgcgcatcaccgaaggcggcgaactcatccgcttcgagggcaatgtggtgatgcatctggaaaagctggatgatcctgccgccgcacagcctgcgcctgcagaccctcccccgccggcaaagccacgtacgcctcagaacaaggccgccagttcaagatga

SEQ ID NO: 4079 - DNA, 615 bp, BradyrhizobiumColbertium
atgaccgtacgcctgcaccgcggcgacttgcccgacctgtcccgctacaccggagcggtggcgatcgacaccgagaccatggggctgaacccgcatcgcgaccggctctgcgtggtgcagctctcgcccggcgacggcagcgccgacgtggtgcagatccccaaggggcacaccgacgcgccgaacctgaaggcgctgctcgccgatccggcggtgaccaagatcttccacttcgcgcggttcgacgtcgcggtgctttaccagaccttcggcgtcatgaccgggccgatctattgcaccaagatcgcctcccgcctgacccgcacctataccgaccgccatggtctcaaggatctcgtgcgcgaggtcctcaacatcgacctttccaagcagcagcagtccagcgactggggttccgacaacctgaccgagccgcagctcgcctatgccgcctccgacgtgctgcatctgcatggcttgcgcgagcggctcgacaccatgctggtccgggaaggccgtagcaagctcgcccaggcctgtttcgacttcctgccgacccgggcattgctcgacctccagggctggtcggaagaggacatcttcgcgcattcctga

SEQ ID NO: 4080 - DNA, 1323 bp, BradyrhizobiumColbertium
atggagcagcctgcccggcactacgatcctggcgtgtccgagccggcagcaagcccggcggcggaccggacgctcgtcatcgatctcgaaggcgccctgctgcgttccgagctgctgatggaggcgctgttgtccagtcccggacgcatgctggcccgcttcggcgccggcggacgcgccggcatggcggcgctcacggatgtcctggcgcgggccgagatcgactatgcccatctgccctatgattccgacgtgctgaaccgggcgctggcggcgcgggcgcggggtgagaagatctatctcgtcgcggatcgctttgccggtcatgccgccggcatcgcgacgcatctcggctttgacggcatcgtcacgccggccgagctcgctgcgggcggcctgccgttcgaccgcgccgcgatcgagcggatcgaacgtcgcggcaccccgaggcccggcctcaagacctgggcgaaggcgctgcgcgtctaccaatacgccaagaacacgctggtattcgtgccggtcatcaccgcgcatcagctgaacttccagacgctcggctacgcgctgctcgcttttctggcgttctcggcctgcgcgtcgggcgcctatctgatgaacgatctgctcgatctcgccgcggaccggcagcatccgaccaagcgccatcgcgcgctcgccgccggcgaattgccgatctcgtcggcgctggcggcgatccccgtgttgtggttgcttgcggtcggagctagcctctgcatctcgcccctcttcctcgctgtgctcggcgcctatctcgccaccacgatcgcctattcgctcgtgctcaagcgcaagatgctggtcgacatcgtcaccctcgccgctctctacacgctccgcatcgtcgccggcgccgtcggtgtcggcgtggtgctgtcggaatggctcctgatcttctcgctgttcgtgttcacctcgctggcgctgatcaagcgcttcagcgaactcagcatgcgcgagagcgcagggctcgccgatccctccaatcgagactacaggatcaccgatttgcacgtcatcgccgcgatggcggcggcgagtgcgatgaacgcggtgacggtgttctcactctatgtctcctcgtctgcggtgacgccgctctacagccgtccctggatgctgtggctgctcaccccgctgctgctgtactggttcggccgcgccctgatgatggcgcatcgccgcgagatgccggacgatccgatcctgtacgcgttccgggatgggcccagccgcatcgcggttgcggcgatgatctgcatcatgctcgccgcgatctga

SEQ ID NO: 4081 - DNA, 1272 bp, BradyrhizobiumColbertium
atgaccgaacagacgctcgcagcgcccgtcgacgatccacagcaacgccagcgcggcttctcgcgctaccagatgctgctcatcgcgctgctcgcgttcacgcagttcacgatcattctcgacttcatcatcatgtcgccgctcggcgcgatcctgatgcccgcactcgacatcacggcggggcagttcggcgtcgcggtatcggcctacgcgttcagtgcgggactctcgggcattctcgccgccggctttgccgatcgcttcgatcgcaagcgcctcttgctgttcttctatgtcggcttcacgctcggaacggcgctatgcgccgccgcgcagaactatcacgtgctactgctcggccggatcgtgaccggattgttcggcggcgtgatcggcgcggtcgtgctggccatcatcaccgacctgttcccgctgcatcagcgcggccgcgtgatgggtttcatccagacggcgtttgccgcgagccaggtgctcggcattcccgccgggctgtttctcgccaattactggaactggcatgtctgcttcgttgcgatcgtcgcgctgtcgatcgcggcaatcgccatcatcgccttcgccatggagccggtcgacgcgcatctgaagctgaagcaggacagaaacccgttccaccatctggtcgcgaccatcggtcagccgcgctatacgctcgccttcctcgtcacgacgctgctggcgacgggcggttacatgctgatgccgttctccagcgcctataccgtgcacaatctcggcatcgacatcgcgcatctgccgacgatctatctcgtctccgggctgttcagcatcgtcacgggaccgctggtcggccgcgccagcgacgccttcggcaagtatccgaccttcgtgttcggatgcgcgatgaccgtggtcatggtgctgatctacacaaacctcggccacgtctcgctcgcgactgcgattctagtcaacgtcctgatgttcgtcggcatcttctcgcgcatgatcccgtcgcaggcggtgatgtccgcgatccccgatgcgagccagcgcggctcgttcagcgcggcgagcgcctcgctccagcagctctccgggggtatcggcgcggtgctcgccggcgcaatcatcgcgcaagcgcccgatggcgcgctgatccatttcgaccggatcggctacgtcgtcgtcgcgacgacgatcatcacgctggtggcgatgtatttcgtgcagaaggccgtggcggagcagacggggaaactggtggtgtaa

SEQ ID NO: 4082 - DNA, 297 bp, BradyrhizobiumColbertium
gtggtcggtccgcagaccgccgggaacggagtcgtcgcgatagatgcgcacaccattcggagtgacgtagactggcaccacggcctggcccggccgaacgacgacatgttgcgacttgtgatgccctcgtgcggcggccttcgcggaaacgcacggaccgatgaggaggcaaaggcccaagacgctcgatcccaagacactcgatcccaagacgcaccatccagagacgccgcgcattgcacctactccgatgaatcagccgagctcccaaccggcagcacgggttgcatcagctaa

SEQ ID NO: 4083 - DNA, 84 bp, BradyrhizobiumColbertium
gcccaggtggtggaattggtagacgcgctggcttcaggtgccagtggcttaacggccgtgaaggttcgagtcctttcctgggca

SEQ ID NO: 4084 - DNA, 864 bp, BradyrhizobiumColbertium
gtggcggtccggcggccggaactcgccgggcatctccagccgctcggccgcgtcgggcagatccacagcgtacaggcgaatctgcgctatccggcctcggtccaggccgcgctgcgtgattcgcatgtcgcgatcaatctcgtcggcgtcctcaccgagggcggcgcgcaaaccttcgacgccgtccaggccaggggtgccgagaccgttgccaaggcggccgccgccgctggggcacagctggtgcatgtttcagcaatcggcgccgatgccgaatcgccctcgcgctacgccagggccaaggcggccggcgagaccgcggccctggccgcggtgccgtcggcgacgatcttccgtccctccgtgatattcggccccgaggaccagttcaccaaccgctttgccgcgcttgcccggatgtcgccggtgctgccgctgatcggcggcgaaacgaagatgcagccggtctatgtcggcgacgtcgccaccgcgattgcggacgccgtcgacggcaagaccaaggcgggcggcacctacgagctcggcgggccggaagtgctgaccatgcgcgagatcatccagaccatccttgagatcaccgatcgcgagcgaatgctgatcccgctgccgttcggcctcgcccggttcaaggcggccttcctgcaattcgcgccgggcgctttcaagctgacgccggaccaggtcacgctgctcgagcgcgacaatgtcgtctcggaggcggcgaaggcggccggcctgacgctggaaggcctcggcatcaccccggattcgctggaagcaatcgccccgcaatatctctggcgtttccgcgcagccggtcaattccagcgcaagagcgcgtaa

SEQ ID NO: 4085 - DNA, 741 bp, BradyrhizobiumColbertium
atgacgtcacgcaagactgtattggtgctcggtggctcctccgacatcggccgcgccgccgcgcgcgcctttgccaaggcgggatacgatgtggtgctcgccggccgcgacgtcgccgcgctcgatccggatgccgccgatctgcgcgcgcgctacgatatcgacgtcggtctcgccaggttcgacgtgctcgacacggcttcattcgacgcctttgccgggtccctttcggcgctgcccgacgtcgtgatttccatcgtcggcctgctcggcgtgcagcagaatgccgagagcgatctcgcccacgccaccgcgatcatgcgctccaactacgaggggccgtcgctgatcctcggcctgttcgcggagaagttcttggcacgcgggagcggtacgctcgtcggcgtgtcctcggtcgcgggcgatcgcggccgtgcctcgaactatgtctatggatcggccaaggccggcttctccgccttcctgtccggcctgcgcgcccgctccagccgtggcggcgttcacgtggtcacggtgaagcccggcttcgtccgcaccaggatgaccgaaggcatgaagctgatcggcccgctcaccgtcgaggcgagcgtggtgggcgatgcaattcttcaggcggtcgagagaaagaccgacgtcgtctatgtcagcggcaaatggcgcctcgtgatgctgatcatcaagacgctgccggaagcggtgttcaagaagctgaagttctga

SEQ ID NO: 4086 - DNA, 1326 bp, BradyrhizobiumColbertium
atgaccctcgtcagcggctggggccgtttcccggtcgtcgatagcgaagtgctgcgtccgcgttcgttcggagcggtcggcgaggccgtctcggccggcagcatcgcgcgcggcaatggccgcgcctacggcgatgccgcgatcggcgccctcaggaccgtgacgatgacgggcttcgaccgggtcaggtcgttcgatccggcgagcgggcgcatccgcctggaggccggcgtgctgctctcggacctgatcgacaccttcggcccgcgcggtttcctgcccttcgtcgtgcccggcacgcgtttcgtgtcgatcggcggcgccatcgcggccgacgtgcacggcaagaaccatcattgcgaaggcggcttcggccgctatgtcgacagcatcctgctgcgcacgggacagggcgagaccatcgaagcctcgcgcgagcagaattccgatgcgttcttcgccaccatcggcggcatgggactgaccggaatcatcctcgaagcgacgttgcggctgcggcaggtcgaaacggggtggatctgggagcgcgtgatttcggcatccgatctcgacgccgcgatgcgcgcgctcgagatgagcgattctgcgacctattcggtggcgtggattgattgcgccgcgcgtgggcgtgatctcggccgctcgctgatctatctcggcgagcaggcggcaagggacgaactccctgccggcgccgccgcgtttcccgtcgacaaagatcccggccttggtgtgcccgtcgacctgccctcgatgacgctgaaccgcttcagcatccgcgccttcaacgagctgtactaccgcatgggcgcgcggcgcgccggcggcggccgcgtggtttcgctctatccctatttctttccgctcgacagtctcaaggactggaatcgcatctatggcaagcgcggcttcctgcagcatcaatgcgtcgttcccgaaaccggtgcgcgcgatgtgctcggcgacctcctcgatcgagtcgcgcgacgcggcgatgcctcgttcctggcggtgctgaagaggctcggccagggcgacggcatcctgtcgtttccgctgcccggctatacgctggcgctggatttcccgttgaggggcgacatcctgaattttctcgacgagatcgatcgtctcgtcgtcgccgccggcggacgtctctacctcgccaaggatgcgcgccagtcgcgtgcgacgttcgcggcgggctatcccgctctgtcgcgcttcaacgccattcgcaaatcgctcgatcccgctggcaatatccgctcgaaattgtcgcaacgtctcttcgatgaggtctag

SEQ ID NO: 4087 - DNA, 786 bp, BradyrhizobiumColbertium
gtgatcctcggcatcatagagggtgtgaccgagttccttcccgtatcttcgaccggtcacctcttgctggcggagcgcttctttcatctcggcgagggcgcgttctgggattcgtttacggttctgatccagctcggcgcgattctcgcgatcgtcggtctgtatttcaggaagctgtgggacgttgcgatcggtctgtttaccggcgacgcctatgcgcggcgcttcgtgatcggtgtgctggtggcgtttctgcccgccgtgatcgtcggccttgtcgccggcaagtacatcaagagcctgctgttcaatccgtgggtcatctgcttcacgctgatcgtcggcggcgccgtcctgctctgggtcgacaagctcgatctcaagccgcgcgagcatgacgccaccaagtttcctctgctgacgtatctctatatcggcatcgcgcagtgcgtggcgatgatccctggcgtgtcgcgctccggcgccagcatcgttgcggcaatgctgctcggggccgacaagcgcgcagcggcggagttctcgttcttccttgccatccccaccatgatcggcgccttcgcctacgacttctacaagagccgggccgagatgacgatggaccacatcaacatcgtcgcgatcggcttcgtggtgtcgttcatcaccgccatcatcgtggtgaagacgttcctgacctatgtcacccgccacggcttcgtggtgttcgcctggtggcgcgtcatcgtcggcacgctcggcctgatcgcgctggcgctgggacggtag

SEQ ID NO: 4088 - DNA, 693 bp, BradyrhizobiumColbertium
atgtttacgctgtatcatcatccgttctgtccgcattcgcgcttcgtccgcttgatcgcgggcgaatacgggttcgacctgaagctgatcgaagagcgcagctgggaacggcgcgaggcatttctgctgctcaatgcggccggcaccacgcccgtcgtggtggatgacgagcagccgccgatcccgggcgcggcgatcatcgccgaatatgtcgacgaggcctatggcgccgagatggggccaaagcgcctgatgccggaaacgcttgccgggcgcgtcgaggtgcgccggctgatggcctggttcaatgaaaagttcttcgaggaggtctcgcaccctctcgtcaccgagcgcatctacaagcgcttcatgagcgaggagaacggcggcggcccgccttcggccgacgtgatgcgcgcagcaaaagccaatgtgcgctatcatctggcctatatcggctggctggcacagacccgcaatttcctcgccggcgaccggctcacctacgcggatctcgccgccgcggcccatctttcggcgatcgactatctgggcgacgtgccatggagcgaggacgacgcagcaaaggcgtggtacgcgcgggtgaagtcccgcccgtcgttccgtccgctgctgagcgaatggctggcgggcgtgccggcgtcgcggacctacgtggacctggatttctga

SEQ ID NO: 4089 - DNA, 996 bp, BradyrhizobiumColbertium
atggactggctcgcagcccagcccgagcgccgcgtcgatccgcgcgggctgtggagcgacgtgcgcagcgtgatcatgctcggcgtcaattacggccccgaccgggatccgctggcggttctgaggcagcgcacgcgcgctgcgatctcggtctatgcgcagggcgacgactatcacgacctgatcaagaagcggctgaaggcgctggcgcgctggctggtcgcgaccgcacccagcgaggtgaaggtattcgtcgataccgccgccgtgatggagaagccgctcgcccaggccgcgcatctgggctggcagggcaagcacaccaatctggtctcgcgcgagttcggctcgtggctttttctcggcgcgatctacaccacgctcgagctgccgcgcgacgatgcggagatcgatcattgcggctcctgccgggcctgcctcgacatctgcccgacggcggcattccccgcgccatacaagctcgatgcgcggcgctgcatctcttacctcaccatcgagaacaaggggccgatcccgcgcgaattccgcaaagcgatcggcaatcgcatctatggttgcgatgattgtcttgccgcatgtccctggaacaagttcgcacgggaggggcgcgaggcgaagctcgcggcccgcgacgagttgcgcgcgcctgcgctcgccgaactggcacggctcgacgagggggcgtttcgcgcgctgttcacgaaatcaccggtcaagcgcatcggccgcgaccggttcttgcgtaacgtgctgattgcgaccggcaactcgggtgacgtgtccctggcggacgaggcgcgacgattgctggacgatgagaatccgctggtgcgcggggctgcggtgtgggcgctgcggcagctggtggcgcgggaggagttcgaggtgctgaggctgcacgctctcgaactcgagcacgacgagagcgttcgcgaggagtggcaagcagaaagcactgccggctcctcgccatga

SEQ ID NO: 4090 - DNA, 882 bp, BradyrhizobiumColbertium
gtggcaagcagaaagcactgccggctcctcgccatgaggatcgtggaccttgatttccccatccattcccgcaatctcgcacgcatgacaaacatgcctttcttcacccgcgacggcgacacattccatccgacggaagtcgccaatggtccctgggatccgacatcgctgcacgggcgcgtcatcatcgggctgctcggcttcgtcatcgaagagcgccattccggtcctgaattcgtgccggcgcggctcaccgtcgacatgtttcggctgccgaccatcgataagccgatcgaagtgacgacgcgcctggtccgcgacggactgcgaatacgcgtggtggaagcggaattcttttccggcggggtcggcatggcgcgcgcctcgtgccagttgctgcgcaagacacaaaatcccgaaggcaatgtctggtcgccgccgaactgggacgcgccgaagccggccgagattcccaagccaaccgatcccaggctcggcatgaacggcaaatgggcaacgcgccccatcatcggccatatgggctcgctcggaccgcgccggctctggatgagcgaggtgcgcgagctcgttgcgggcgtgccgatgaccccgttcgtccatgtcgcgaccggcgccgatttcgccagcccgtttgcgaatgcgggcgacaaggggctcggctacatcaacagcgacgtcacgatctatctgcaccgcctgccggtcactgaatggatcggcttcgaggtcgtgaaccaccacgccaccgatggcgtcgcgatcggcgaatgctggctctatgacgaacagggcccgatcggcacggccacggtcgccgcgctggcgcagcgcaagccgatggcaaatccgtcgaagcgataa

SEQ ID NO: 4091 - DNA, 468 bp, BradyrhizobiumColbertium
atgaccaccaccgccctgctgcgcgccttctgcgatgcggtcgagcagcgcaacggccgcgcctttgccgaactcttcaccgaggacggcgtctatcacgacgtcttctacggcgccttcgaaggccgcgagaagatcgccgcgatgatcgacgactggttctaccgcacggcgaccgacttccgctgggacatgcaccaccccgtcaccgacggcaccacgctctatgcgcgctacacgttcagctacaagtcaaccctgccggaggcgaacggcgcgcgcgcgatgttcgagggcgtggcgatcatgacgctgcgcgacggaaagattgcgagctatcacgaggtcgccaacaccgcgccggcgttcgtcgacttgaaattcgcaccggaacggattgcgaagatcgtggccaagcaaggcgccgaactgaaggcgcgccccgagatgcagcggcatctgggttag

SEQ ID NO: 4092 - DNA, 1044 bp, BradyrhizobiumColbertium
atgcgaggcattttggccacgcctgggcacgctgacgacatagacaccttgcttctgttccgcaagcgtcccaaacggccaatgtcggcatcgggctgcgtcgtggcggcacgcccggttcagttcaaaccgcatagccagagtaaacgttccatgacggatataattccagatgccgtgctcgacttcatcgatgtgggcgagggcccgtgcacacgcaggatcgccgtgcgcagtcggcgtggacaggggcccggactgttctggctcggcggcttcaagtcggacatgcagggtagcaaggccttggcgctggatgcctgggccagggatcacggccgcgccatggtccggttcgactattcgggccacggcgaatccggcggcgacttcgtcgatggaaccattggacgctggctcgaagatagcgttgcggtgttcgagcgcttctgcgagggcccgcaggtcctgatcggctcctccatgggcggctggatggcgctgctgctcgcgcgcgaaatcaagaaacgtcctgccaaggcgtcgctggccgggctcgtgctgatcgcgcctgcgcccgacttcaccgaggaactgatgtggaagacttttccgccggcggtgaagaaggagatcgagaccaagggcgtctggctgcggccgtcggaatacgacgacggctcgccctatccgatcacgcggaacctgatcgaggagggccgcaaccacctcgtgctcggcagcgccatcgatctcggttgccctgtccgcatcctgcaaggcgcaagggatccggacgtgccctggcagcacgctttcgcattgacgcaccgtctgcccgctgacgacgtcgtactgaccatgatccaggacggcgatcaccgcctctcccgcccgcaggatatcgcgcgcatccttgcggcggtggcggagatcgggggagataaacctcccgagcgaatgtgtttcgacgagcggagctgccctctcccaaaaggggagagggcacaaaaacacaaaaagaagcactgggaggcaagctaa

SEQ ID NO: 4093 - DNA, 606 bp, BradyrhizobiumColbertium
ttgcttgccggcaaacgcatcttccttcaagatagccgcttccttcacaactttggagaaccacccattcgccgtcctaataaagctccgcccgctgccagcaaagacgggccgcgcatcaatgatgatatccgcaatgcgcagatccagctgatcgaccagaccggtgagaacaagggcacggtcgagaccgtcctcgccatccggatggctcaggaagtcggcatggatctggtcgagatttcgccgaatgccagccctcccgtctgcaagatcatggactacgggaagtacaagtattccgctcaaaagaaagccgcggaagcccgcaagcggcagaagaccgtcgagatcaaggagatcaagctccgcccgatgatcgacgaccacgattacgacgtgaagatgcgcgcgatgcagcgattcttcgaagagggcgacaaggtcaagatcacgttgcgctatcgcggccgcgaaatggcgcatcaggagatcggcaccaagctgctggacaagatcaagaccgacgtcgccgagctcgccaaggtcgagcaggacgcgcggtttgaaggccgccaggtcgtcatggtgctcgcgccgcgctga

SEQ ID NO: 4094 - DNA, 405 bp, BradyrhizobiumColbertium
atggcccatttcccgcaatcgatctcctctttgccgacccttggccgcccgcgtcgcctggcgctgctcgccgtgcttgccgcggccgcgctgccgtcgaccgccgatgcccgtgtccgcggctatgacggcatctggaacgtcaccttcgccaccacgcggggaaattgcagctcgggctacagcgtccccttcacggtaaccggcagccgcgtctcgtccgccggcggcggccgcgtctcgggcagggtcaatcgttccggcgccgtcgccgtccaggtctcggtcggcgcctcccatgccagcggcggcggccgcctcggtggcatgaacggcacgggatcgtggaaaggcgtcatttccggcgaccagtgcagtggcatctggcaggcaacgcgcacgtag

SEQ ID NO: 4095 - DNA, 201 bp, BradyrhizobiumColbertium
atgcccaagctgaagaccaaatcgggcgctaaaaagcgcttcaaggtgactgccaccggcaaagtgatgcacgcccagcgcggcaagcgtcacggcatgatcaagcggacgaagaagcagatccgtcagctccgcggcacccgcgtgctgttcaagaccgacggcgacaacgtcaagaagtacttcttgccgaacgcctga

SEQ ID NO: 4096 - DNA, 360 bp, BradyrhizobiumColbertium
atgtctcgcgtcaaacgcggtgtgaccgcccacgccaagcacaagaaagtctacaaggccgccaagggtttctacggccgccgcaagaacaccatccgcgccgccaagccggccgtcgagaaggcgatgcaatatgccttccgtgaccgcaagcgcaagaagcggacgttccgcgcgctctggatccagcgcatcaacgcggcagtccgtccgttcggcctgacctacagccgatttatcgacggcatggccaagtccgggatcaccgtggaccgcaaggtgctgtcggatctcgcggttcgcgagcccgccgcgttccaggcgatcgccgagaaggccaaggccgcgttggcggcgtaa

SEQ ID NO: 4097 - DNA, 1083 bp, BradyrhizobiumColbertium
atgaccgatcttgtccaacttcaagcccagatcatcgccgacatcgccgcggccgccgacgaggcggcgttggaagccgtgcgcgtcgcagccctcggcaagaagggttcgatctccgcactgctcgccacgctcggcaagatgtcgccggacgagcgcaagacgcagggcgccgcgatcaaccaggccaaggacgaggtcaccacggcgctcgccgcacgccgcgacgtgctgaagtcggccgcgctcgacgcgcggctcgccgccgagactgtcgacgtcaccctgcccctgcgtgatgcgccggccgaggccggccgtatccatcctctgagccaggtctgggacgagctgaccacgatcttcgcggacatgggattctctgtcgccgaaggcccggatatcgagaccgacgactacaatttcaccaagctgaatttcccggaaggccatccggcgcgcgagatgcacgacacgttcttcttccatccgaaggaggacggctcgcgcatgctgctgcgaacccacacctcgccggtgcaggtgcgcaccatgctcagccagaagccgccgatccgcgtgatctgcccgggccgcacctaccgcatcgattcggacgcgacccacacgccgcaattccaccaggtcgaaggcctcgtcatcgacaagagctcgcatctcggccacctcaaatggatcctgcacgagttctgcaaggcgttcttcgaggtcgaccacatcaacatgcgcttccggccgtcgttcttcccgttcaccgagccgtcgctggaagtcgacatccagtgccgccgcgacaagggcgagatccgcttcggcgagggcgaggactggctcgagattctaggctgcggcatggtgcatccgaacgtgctgcgcgcctgcggcatcgatccggacgagtaccagggctttgcctggggcatgggcatcgaccgcatcgccatgctgaaatacggcatcgccgacctgcgccagctgttcgacagcgacgtccgctggctgggccactatggcttcaggccgctcgaagtgccgacgcttgccggagggctgagctcgtga

SEQ ID NO: 4098 - DNA, 456 bp, BradyrhizobiumColbertium
gtgagcgagcgtcaacgcagcaaggcgaagcagcttcgccgagcgatgtcgcacgatgaaacactgctgtggcgctacctgaaagccaatcgcatggatggtgtcggcatccggcggcaaacgccgatcggaaactacatcgctgactttgtgtgcttctcctctaagctcatcattgagctcgacggagaatcccacgatttcgaggagcgtcagaagaaggatgagcgtcgcgacgccttcttcgccgccgagggttttcaggttctgcgcttcaccaacgatcaggtgatgacgaacctcgagggagttgttgaggcaatccgccaggcagcttccgccggcgcccgcggctcacccccctcccttaccctcccccacaaggggggagagtacactgacatcgaccaagatcaattcttagacacagacaagagccaaggcgcacagccatga

SEQ ID NO: 4099 - DNA, 2409 bp, BradyrhizobiumColbertium
atgaaattcaccctctcctggctgaaagaccatctcgacaccgacgagcccctggaaaagctcgccgacaagctcaccatgatcggtctcgaggtggagaacatcgaggacaaggcgaaggcactgaagcctttcaccattgcgagagtgatctcggccgaacagcatccgaatgcggatcgcctgcggatctgcatggtcgacaccggcgacggcggcgcgccggtgcaggtggtgtgcggtgcgccgaatgcgcgcgcaggcctcgtcagcgtgttctcgccgcccggcacctacattcccggcaaggatatcacgctcggtgtcggcaccatccgcggcgtcgagagccgcggcatgctgtgctcggcggccgaattgcagatctccaatgaccatgacggcatcatggaattgccggcggatgcaccgatcggggccggctatgccgaatgggcggcgctcggcgatcccgtggtcgagatcaacctgacgccgaaccggcaggactgcaccggcgtgcacggcatcgcgcgcgacctcgccgccgccgacatgggcaagttcaaggaccccacgatcaagccgatcaagggcgaattcccctgcccggtgaaggtgacggtcgaggatgccaccttgtgtcccggcttcgcgctgcgcctcgtgcgcggcgtcaagaacggaccgtcgccggaatggctgcagaagcggctgaccgcgatcgggctgcgcccgatcaacgcgctggtcgacatcaccaacttcatgaccttcgaccgcgcgcggccgctgcatgtgttcgacgccaagaaggtgaagggcaatctcgtcgtgcgccgggcccgcgagggcgagagcctgctcgcgcttgacggccgcacctacaatctcgatccctcgatctgcgtgattgccgacgagcatggcgtcgagtcgctcgccggcatcatgggcggcgaggcctcgggctgcgacgaagacaccaccgacgtgctgatcgaatcggcgctgtggaacgagatcaacatcgcgcagaccggccgcaagctcggcatcaattccgacgcgcgctaccgtttcgagcggggcgtcgatccggccttcatggtgccggggatcgagctcgcgaccaagctggtgatggagatgtgcggcggcgcgccgtccgagaccgtcgtggtcggcaaggcctttggcgacgatcgcctgatcgaattcccgatcaccgaggtcaagcgcctgtcgggcatcgaggtgccgcaggccgagatgaagcgcatcctgacccatctcggtttcatgatggcgggccccggcccggtggtgaaggtcgcggttccgtcctggcgttccgacgtgcacggcaaggccgacatcgtcgaggagatcgtccgcatcttcggcgtcgacaaggtgccgatgacgccgttcgagcgcggcgatgacgcacgcaagccggtgctgaccccgctccagcttcgcacccgccgcgcgcggcgcgcgctcgcgagccgcggcatggtcgaggcggtgacgtggtcgttcatcgccaagcccgccgccgagctgttcggcggcggccagcgcgcgctcgaagtggccaacccgatcgcctcggatctctccgacatgcgtccgaccctgctcgccggcctgatcgcggcggcacaggccaatgccgatcgcggttttggcgatgtcgccctgttcgaggtcggccagctgttcaagggcgatcgcccgcaggaccagttcatggcggcgagcggcgtccgccgcggccttgcgtcgtccgaaggtctgggacggcattggtcgggttcggcgcaggctgacgtgttcgatgccaaggccgacgcgctggcggtgctggccgccagcggtgcgccgacgcaggcgcttcagatcgtggccggcggtcctggctggctgcacccgggccgctccggcacgatccagatcggaccgcagaacgtgctgggctatttcggcgagatgcatccgcgcgcgctggagacgctgggtgccgacgggccgctgatggtgttcgaggtgatcctcgaccgcattccagaggcgaagaagaagccgacccgcgccaagcccttgatcgagctgtcggcattccagcctgtatcacgcgactttgccttcatcgtcgaccgcagcgtgaaggcgggcgacatcgtgcgcgcggcgcagggcatcgacaagaagctgatcaccggcgtgaatgtcttcgacgtctacgagggcaagggcatcgatgagggcaagaagtcgattgcgatcgcggtcacgctgcagccgcgtgagaaaaccctcaccgaccaggagatcgaggccgtcggcgccaagatcgtggccgaggtcacgaagaagacgggcggcactctgagagcatga

SEQ ID NO: 4100 - DNA, 771 bp, BradyrhizobiumColbertium
atgagtctcgccgactttctcccgacggacgtcagcttcgccatcgcgatggcactttgcgccgtcgccttcgtttcgggcaccgcgcgcggcttctccggcttcggctcggcgctgatcttcatgccgctggcgagcagcatcgccgccccgcggctcgttgccgccctgctgctcgtgatcgattttgtcgcggcggcgccgctgctgcctgacgcctggcgcaaggcggaccgcaaggccacggcggtgatcgtgctcggcgcgctgattggcgtacccgtcggcacctatttcctcagcgtgctcgagcccgtcaccacgcgctggatcatctcctgtttcgtcgcagcgctcttgctcctgctgctgtcgggctggcgctatcgcggcaaggaccacgcctggctctcggtcggcatcggcggcctctccggcttctgcagcgggctcgcacagaccggcggcccgccgatcgtcggctattggctcggccgccccatcccaccgatcgtcgcgcgcgccaacatcgtgctgttcttcggcgcgtcggatttcttttccatggtcagctatgcggccaccggtctgatcagccgtgagtctctggtgctctccctgatcgtcggcccgatctatgcgcttggcgtcgccttcggcgcctcgctgttcggccgcgccagcgagaaagtgtttcgcggcatctgctacgccctgatcgccatggctgtgattgccgggctgccggtgctggacgggatcttgcggtaa

SEQ ID NO: 4101 - DNA, 1389 bp, BradyrhizobiumColbertium
atgacaatcacgcgccgcggtttccttgtcgcgtcagcgggttttgccgcgctgccggtcctgcgcgccaccgcagcgcccctgccgcgggaggccgacattgtcgtgatcggggcgggggctgcgggaattgccgcagcgcggcgtatcatggcgacgggccgcaaggtcgtggtgttggaagcggcatcccaagtcggcggccgctgcgtcaccgacagcacgacgttcgacacgccgttcgagcgcggtgcgcgctggatgtacaaccccgataccaatccgatgatccggctggctcgcagcgttgggctcgacgtgctgccggcgccatcgggccagaagatgcgtatcggccgccgcaacgcgcgcgcgggcgagaccgagcagttcctggcggcgctggtgcgcgccaaccgcgccatcgatgaggccgcgcgcgccaagctcgatacgtcctgcgcatcggtgctgccgaaggatctcggcgactgggccggcgcggccgagttcatgctgggcgcgagcttcgccggcaaggacctcaaggaactgtccgcgatcgacaagggccgcgcgcaggaccgcaacgccgcgatcgcctgccgccagggtctcggcacgctgatcacgaaacttggcgagcaggtgccggtggcgctggcaacgccggcgagccgcatcgcgtggagcagccgcgacgtcagcgtggagacacaagccggcaagatcggcgcgcgcgccgccatcgtcacagtctccaccaacgtgctgacatcgggtgcgatcaggttcgcacccgacatcccgaagcgcacgctggacgcggcatccaagctgggcctcggcagttacgatcgcatcgtgctgcaattgccgggcaatccgctcggcctctcgcgcgacgatatcctcgtcgagcaaagcaattcgacgcgcacggcgctgctgttcgcgaatatcggcggctcgtcgctgtgctcgatcgatgtcggcggctcgttcggccgcgatctctcccagcagggcgagagcgcgatggttgccttctcgaaggagtggatcacgaagttgttcggcagcgaggccgcggccgcggtgcagaagaccagcgccacgcgctggaatgcctcgccctatgtcatgggcgcgatgtcggcagcatcgcccggcggccagctctcgcgaaagatcctgagcgagcctgttggcaatgtgtttctcgccggcgaagccacccacgagaccttgtggggcacggtggatggcgcctgggaaagcggcgagcgcgccgctgaggcagccttgcgcaagatcggcgcgctgaagagcgagcccgccgatgtgccgacccagtcgacgaagaagcgcagagcgcctcgacggtga

SEQ ID NO: 4102 - DNA, 978 bp, BradyrhizobiumColbertium
atggggacggtcctggattcggtcggcaagctgattgccacgtacctctcgaaggaggtgccgggctatgagccgttcacgccgagcgaccccgagcatctgcgcggcgtcatcgagcccggcgacgttctgctggtcgagggcaacaaccgcatctccggcatcatcaagtatctgacgcagtcgacctggtcgcatgccgcgctctatgtcggccctgtcgcgggcgcggaggagccggacggcgagccgcatgtgctgatcgaggccaatatcggcgaaggcgtcacctccgcgccgctgtcgaaatacttcccctaccacacccgcgtctgccgcccggtcggcctgtcctatgaagaccgcaccacggtctgccgctatgcgatcaaccgcatcggcttcggctacgacaccaagaacatcgtcgacctgatgcgctacctgttcccgctgccggtaccgcaacgctggcggcggcgcatgatcgccatcggctcgggcgacccgaccaaaatcatctgctcggcgctgatcgcgcaggccttcgacgcggtgcgctatccgatcctgccgaagatcaccaaggccggcagccgctccgcccgccgcgagatcctgcacatccgcgattcgtcgctgtacatgccccgcgacttcgacatctcgccctatttcgaagtcgtcaaacccaccatcgtgcacgggttcgactacaccgccctgcactgggccgacaagcagaagccgctcgaggaggtagcgggctcgttcagtgtgtttccagaaacgttcgtggcgccgccgctcgttcctgaagcgagtgacgaagaggcgtcggctcaaattcccgctgaagaagtgagcgcgcagcttgcggagacgggcaccacgttttccgcgcatttcgtgcaactgagcgaacacgcgacctaccgcgcacggcgccgcggagacgtatgcgaggtcgcggcataa

SEQ ID NO: 4103 - DNA, 276 bp, BradyrhizobiumColbertium
atgcgcaaggacatcaaggcatctgtcggaaaacgtctcggccggatcgagggccaggttcgtggcctgtcgaaaatggtagaggaagaccgctattgcatcgacatcgtcacgcagatctcggcggtgcgcgccgcgctgcgtcgggtcgaggaggaaatcctgaaggatcacgtcgcccattgcgtcgagcacgccatcgcgagcggcgacaaggccgaccagcgcgagaagatcgcggagttgatggcggtgatcggacgggcggagcggtag

SEQ ID NO: 4104 - DNA, 2262 bp, BradyrhizobiumColbertium
atgacggtagatcctgcgacatccaagcaccggttcgagcatcacggtgagaccttccatttctgctcggccggatgccgcaccaagtttgccgccgatcccgccaaataccttgcgaaggagagggcgcccgagccggagatgcccgcgggcacgatctatacctgcccgatgcatcccgagatccgccaggtcggccctggcagctgcccgatctgcggcatggcactggagccggaagtcgcaagcctggagaccggccccaatccggaactcgccgacatgacgcggcggttctggatcggcggcctgctgtcgctgccgccggtggtgctggagatgggcggccatctggcgggcccccacagctggatcgatccgacgctgtcgaactggatccagctcgtgttcgcaacgccggtggtcctgtgggccggctggccgttcttcgtccgcggctggcagtcgctgctgacgcgcaacctcaacatgttcacgctgatcgcgatgggcacgggtgtcgcttacgtctacagcctcataggcaccctcgcgccgcaaatcttccccgccacgttccgcggccatgaaggcgcggtcgcggtctatttcgaggccgctgctgtcatcaccgtgctggtgctgctgggccaggtgctcgagctgcgcgcccgcgatgcgacgtcgggtgcgatcaaggcgctgctccagcttgcgccgaagaccgcccggcgtgtggacgcagatggcagcgagcatgaggtcgagatcgacacgctccatgccggtgagtccttgcgcgttcgtcccggagagaaggtgccggtcgatggcaccatcctggagggacgctcttcgctcgatgaatccctggtcacgggcgagtccatgcctgtcaccaaggagaccggcgccagggtcatcgccggcacgctgaatcaatcgggcagcttcatcatgcgtgccgacaaggtcggacgcgagacgctgctgtcgcagatcgtgcagatggttgcggacgcgcagcgctcgcgtgcgccgatccagcggttggccgaccaggtttccggctggttcgtgccgacggtcatcgtcgtcgcgctcgctgctttcggcgcctgggcctggttcggaccggagccgcggctggctttcggcctcgtcgccgcggtcagcgtgctgatcatcgcctgcccgtgcgcgctcggccttgccactcccatgtcgatcatggtcggcgtcggccgaggcgcgcaaggcggcgtgctgatcaagaatgccgaggcgctggagaggatggagaagatcgatacgctcgtggtcgacaagaccggcacgctgaccgagggcaagcccaaggtggtcgcgaccgtgccggcggccggcttcgcggaagacgacattcttcggctcgccgccagcgtcgagcgcgccagcgagcatcccctggcggacgccatcgtgcgcgcggcgaaggagaagcagatcagcattggccaagtcgagcaattcgattcgccgacgggcaaaggcgcgaccggaaaggtcgacggcaagaccatcgtgctcggcaatgcaaaatacctgacctcgatcggcatcgataccaaatcgctcgacgccgaggccgaacggctgcgtggtgacggcgcgaccgtgatcaatatggctgtggatggccggcttgccggcctgttcgcgatcgccgatccggtcaaggcctcgactccggaggcgctgaaggcgctcgcggccgaaggcatcaaggtcatcatgctgactggcgacaaccgcaccacggcacaagccgtggcccgccggctcggcattgccgaggtcgaagccgaggtgctgccggatcagaagagcgctgtggtcacgaagctgcagaaggccgggcgcagcgtcgcgatggccggcgacggcgtcaacgacgcaccggcgctggccgccgccgaggtcggcatcgccatgggcaccggcaccgacgtggcgatggagagcgccggcgtcaccctgctcaagggtgacctcaccggcatcgtgcgcgcgcgaaaactgtcgcaggcgacgatgagcaacatccgccagaacctgttcttcgccttcatctacaacgccgcaggcattccgatcgcagccggcgtgctctatcccgcctttggcctgctgctctccccgatcatcgccgccgcggcgatggcgttgtcctcggtgagcgtcgtcggcaatgcgctgcggcttcgtacgacgcggctgtag

SEQ ID NO: 4105 - DNA, 453 bp, BradyrhizobiumColbertium
atgcagcgaattacgatcaccatcgaggacgatctgttggcggagatcgacgccgcggcggaggcgcgcggctatcagaatcgctccgagatcatccgcgatctcgcccgcgccgggcttcagcaatccagcgaagacacggcacagaccggcccctgcgtcgccggcctcgtctatgtctacgaccatgccgcccgcgatctctcaaaacgcctggtgcaggaattccatggccatcacgacctcgcgctggcgacgctgcatgtccatctcgacgacaacaattgcatggagatgacggcgctgaaggggtcggcggacgaggtcaggcatttcgccgaccatatcatcgccgagcgcggcgtgcgctacggccgggtggtgatgattccgaccggggaagggaagccgacgaaggggcggaaacacgggcacggccatcggcatgagtag

SEQ ID NO: 4106 - DNA, 732 bp, BradyrhizobiumColbertium
atgctggatgccgccgtcaaggcgctgtcgcaaatgatctctccgccgatgcgctcgatcctgtggcgatcgatcgggctggcgctggtgttgatcaccgtgctggcgattggcttgcaacggctcctcagctggtttgcgacccatggcgcggtctggctggagggcctgcttggggcgggctggcattcttcgatcgaaatcctctcgtggatcgtctcgatcgcggcgggcttcggcgtcgtgttcggcggcgtcttcctgatgcccgcgatcacctcgctggtagcgagcctgttcgtcgacgatgtcgccgacatcgtcgagcgtgagcattaccccgctgagcggccgggcgtggccctgccgttcagccaggcgatcctcgaaggcatcaaaaccgcctttttgacgatcctgatctatctcgtagcgctgcctctggtgctgttcgcgggcgcgggttttctgatcttcttcctcgccgccgcctggctgctcggccgcgaatatttcgaactggcggccatgcgcttccgtccgccggaggaggccaaggcgatgcggcgcgacaacgccgcgacgatcttcacggccggcctgttcatcgccgccttcgtctcgatcccgatcgtcaatctggcgacgccgatcttcgggatggccttgatggtccacatgcacaagcgcctgtcaggcccgcggcccgagctgatcgagccggcgcggtag

SEQ ID NO: 4107 - DNA, 783 bp, BradyrhizobiumColbertium
gtgctcatcatccatcagtatatcccgatcatggcgaaaatcacccgcaagccggtcacgcgcaaagcggccgtgccgaagaaaaaggcaaaagcggtggtcgcgaagcccaacgcccccgccaggaagacgctgaaggcgataaggcgttggaccccggctgaggtccatgaggccttcagccgtttccgcaaggccaatccggagccgaagggcgagctcgaacacgttaatccgttcacgctcctggtcgccgtggtgctgtcggctcaagcgaccgatgccggcgtcaacaaggccacgcgcgccttgttcgaagtcgccgacaccccgcagaagatggtcgatctcggcgaggagcggctgcgcgagtatatcaagacgatcggcctctaccgcaccaaggccaagaacgtgattgcgctgtcggcaaagctgctcagcgagttcggtggccaagtgccgcgcacgcgcgcggagatcgagtcgctgcctggtgcaggacgcaagacggccaacgtcgtgctcaacatggcttttggggagcacaccatggcggtcgacacgcacgtcttccgcgtcgggaatcggaccggacttgcgccgggcaggacgccgctcgaggtcgagctcggactcgaaaaggtgatcccggccgagttcatgctgcatgcccatcattggttgatcctgcacggccgctatacttgcctcgcccgcaagccgcgctgcgaggtatgcctgatcaacgatctctgtcggtggccggagaagacggtgtga

SEQ ID NO: 4108 - DNA, 483 bp, BradyrhizobiumColbertium
gtgcaaatattctcggcgctgctgacgccgcaccgctcgctgaaccgcaccggctttctcgccgtgatgctgttcctgagcgtcgtcagtttcgtcaccggcctcgcttttttgatgatgggtgcgtggccggtgttcggcttcttcggccttgatgttctcgtgatctggtgggccttcaaggccaatttccgcgccgcgcgggcccgcgaggagatcgtggtgaccccttccgaattgcgggttcgccgtgtcagccaccgcggccaagtcgccgaatggacgttcaatccgctctgggtccggctcgaccaggaggtcgacgaggaatacggcatcgagcatctctatctggtttcgcgcggtcaccagatccagatcgcccgttttcttggtcctgaggaaaaagcaagcttttacaaaggcttggttgaggctctgaatgccgcgaggcgtggaccgacctataatccgatcacctga

SEQ ID NO: 4109 - DNA, 867 bp, BradyrhizobiumColbertium
ttggccaggccgggcacacagaacgccgcgttgcgcgattacgattcggtgcggcgggcgatcgccttcatctcggcgaactggcgcgcccagccgaccatcgaggcgatggcggatgcggccggggtcacgccggacgagctgcaccatctgttccgccgctgggcttcgatcacgccgaaggcgttcatgcaagcgctcacgctcgatcatgccaagaacctgctcagggactccgccagcattcttgacgcggcgctcgattccgggctgtccgggccgggccggctgcacgatctcttcgtcacccacgaagcgatgtcgccgggcgaatggaagaacggcggtgccggtttgacgctacgctacggcttccatccatcgccgttcggcaccgcgatcgtgatcgccacggatcgcgggttgtccggacttgccttcgccgatcacggcgaggagaagatcgcgctcgccgacatgacgcggcggtggcccaacgccacctatgtggaagatcacgacggcacggcgcagctcgcaacgcgcatcttcgacccaaagctgtggcggccggatcagccgctgcgcgttgtcctgatcggcaccgatttcgaggtgcgggtgtgggagacgcttctgaaaattccgatgggacgcgccgtgtcctattccgacatcgcctgcaacatcaagagcccgaaggcctcacgcgcggtcggcgccgcggtcggcaagaacccggtctcgttcgtcgtcccctgtcatcgcgcacttggcaagagcggcacgctcaccggctaccattggggcatcacccgcaagcaggcgatgctgggctgggaagccggccagctggggatgcagtga

SEQ ID NO: 4110 - DNA, 624 bp, BradyrhizobiumColbertium
atgagcgaacgtcttctcgtgctcgtgcgccacggccagagcgaatggaatctgaagaacctgttcacgggttggaaggaccccgacctcaccgagctcggcgtgaacgaagccaaggaagccggccgcaagctgaaggcgcagggtctcgtgttcgacgtcgccttcacctcggtcctgacgcgcgcgcagcacacgcttgatctcatcctcgacgagctcgggcagaagggactgccgatcaccaagaacctcgcgctcaacgaacgcgattacggcgatctctccggcctgaacaaggacgatgcgcgcaaaaaatggggcgaggagcaggtgctgatctggcgccgctcctacgacgtgccgccgcccggcggcgaaagcctgaaggatacgctcgcgcgcgcgctgccgtactacgtgcaggagatcctgcccggcgtgctcaatggcaagcgcacgctcgtcgccgcccacggcaattccctgcgcgcgctgatcatggtgctggagaagctttcgcccgaaggcatcctgaagcgcgagctcgccaccggcgtgccgatcatctatcggctcaatgcggattcgacggtcgcctcgaagctggatctggcggggtaa

SEQ ID NO: 4111 - DNA, 816 bp, BradyrhizobiumColbertium
atgtccgacatgcgcttgattgttgctggggccggcggccggatgggccgggcgctggtgcgggcgattgccgagagcaagggcgcggtgctggccggtgcgctggaagcgccgggctcggagctgctcggcaaggatgccggcgtgctcgcaggcctgccggccaacggcatcaagctgtccgccgatctctgggccatgtccagggaggccgacggtatcctcgacttcaccataccggcggcgacgatcgccaatgtcgcgatcgcggccgagcgcggcatcgtgcatgtcatcggcacgaccgggctgtccggctccgacaatgcggtgatcaagagcgtcacgaaccgcgcggtggtggtgcaatccggcaatatgagcctcggtgtcaacctgctcgctgcggtggtcaagcgcgtcgccaaggcgctcgatcagaacttcgacatcgagatcgtcgaaacacatcaccgcatgaaggtcgacgcgccctcgggcacggcgctgatgctcggccaggccgcagccagcggccgcggcgtcacgctcgacgaccattccgagcgtgggcgtgacggcatcaccggtgcccgcaggccgggcaatatcggtttcgcctccttgcgcggcggcaccgtggctggcgatcacagcgtcactttcctcggtccgttcgagcgcctgacgctgtcgcatcaggccgaggatcgcatgctgttcgcccatggcgcgctgaaggcggcgctgtgggcgcacggcaagcagccggggcactattccatggccgacgtgctcggcctgtccgacatctga

SEQ ID NO: 4112 - DNA, 312 bp, BradyrhizobiumColbertium
atggcaaagggctactggatcgggcgtgtcgacgtgagcaatgacgaaggctacaagccctacgcggtcgccaacggtccgatcttcaagaaatggggcggccgtttcgttgtccgcgccggcaagttcaccaccgtcgaaggcgccagccgcacccgtaacgtcgtgatcgaattcccggactacgagaccgcgctggcctgctacaactcgccggaataccaggccaacatcaaggtgcgccagccgcactcggtcgccgacctcatcatcatcgagggctatgacggcccgcagccgcaggacggctga

SEQ ID NO: 4113 - DNA, 711 bp, BradyrhizobiumColbertium
atgaggccagccgagatcgtccccaaggaccgcctgatcgttgcgctcgatctgccgagcgttgatgccgcggaggcgatgatcgcgaagctcggcgacagcgtctcgttctacaagatcggctatcagctcgcttatgccggcggcctgccgctgatcggcaagctcgccaacaggggcaagaaggtgtttgccgatctcaagatgcacgacatcggcaatacggtgacgcgcggcgtggagagcgtggccaagctgggcgccaccttcgtcaccgtgcacgcctatccgcagaccatgaagggcgccgtcgaaggccgcggcggcgccgccctgaagatcctcgccgtcacggtgctgacgtcctacaacgacgacgatttgcatgcggccggctatcggctcagcgtgtcggagctggtcgaggcacgcgcgcagcaggctcaggtgctcggcgtcgacggcctggtgtcctcgccagaggaggtcgggagcctgcgcaagatcgtcggtcaccagatgagcctcgtcacccccggcattcgtccggccggcgcagccagcggcgaccagaagcgcatcatgacaccgggccgtgcgatcactgcgggggcggattatctcgtcgtcgggcgcccggtggtggaagcggcggacccaaaggcggccgctgaagctatccaagaagagatcgccgaggcgctcggctaa

SEQ ID NO: 4114 - DNA, 618 bp, BradyrhizobiumColbertium
ttgcgcggcgtgctcgtttcgccgaacgcgtgggattggatgtcggctcccaagatcctgatcattcccggctcgctgcgcaccggctcgcacaatgcgaagcttgcagcggttgccgcctatgaattcgctcaggccggcgtcgacgtcacccgcatttcgctcgccgattttccgctgccgatctatgacggcgatcttcaagccaaatccggcgtgcccaagcacgccatcaatctcaagcgcatgatcggcgcccatcatggggtgctgttcgtcacgccggaatacaacgcctcggtgccgccgctactcaagaatgcgatcgactgggtcagccgcgtgcacgagctgcacgaggcgcgcggcgaggtgttccgcaaccgcgtcttcgcgctcgccggcgcgtcacagagccggcttggagcagcccgcgcgctccaggccttgcggctgatcctctcctcctgccaagccaacgtgattgccagccagctcacgctcgcctttgccgaccaggcctatgacgatatggacaggctgaagaacgagaacgatatcgccgcgctgaaggagcttgtgcgacaattgatcgacgtttcccaacgcatgatgtga

SEQ ID NO: 4115 - DNA, 600 bp, BradyrhizobiumColbertium
atgccattgccatcgtccgcgcgtgcgttgaagaagcctcgtcttgatgacgaggtgcgctttctcaggtcgtggatcgaaaagccgctgcacatgggcgcagtgatgccgtcgggcaagctgctggcgcggaccatggctcactacgtcgatgtcgactccgacgcaccggtcgtcgagctcggacccggtaccggcgccatcacctccgcgctgatcgagcgcggcgtggaccagaagcgtctcgtcctcgtcgaatacaatcccggcttttgcgcgctgctgcgcgaccgctacccgcaggccaaggttgtgcagggcgacgcctaccgcctgcgcgacacgctctggaacgtcttgagtgcgccggctggcgcggtcgtttcgggcctgccgctggtcacaaagccgatgctgacgcggttgcggctcatccgcgacgccttcgcggcgcttgcgcccggtgcgccgttcatccaatttacttatgcggtggtgccgcccatcccgaaatcgctgcccggcgtgtccacagaggcgtcggaacggatctggatgaaccttccgcccgcccgcgtctgggtgtatcgcaaggactaa

SEQ ID NO: 4116 - DNA, 1137 bp, BradyrhizobiumColbertium
atgtccacgtccaccaagcgctgctattacgagaccctggaagtcgaacgcgatgccgatgaaggcaagctgaaatcgtcgttccgcaagctggcgatgaaattccatcccgaccgcaatccgggggatgagaccagcgaggtcaagttcaaggaaatcaacgaggcctacgaggtcctgaaggacaaggacaagcgcgccgcctatgaccgctacggccatgccgcgttcgagcagggcggcggttttggcggcgctgcaggtttcggcgcgggcttcgcctcctctttctccgacattttcgaagacctgttcggcatggccggacagcgcggccgcggcggccgcgagcgcggggccgacctgcgctacaacatggaaatcacgctcgaggaagcctttggcggcaagactgcgcagatcgagattccagtctcggtcacctgcgaggcttgttcaggcaccggtgccaaggccggcaccaagccgaagacttgctcgacctgcggcggcgcgggccgcgtgcggcagtcgcagggcttcttcacgctggagcgtacgtgtcccggttgccaggggcgcggccagatgatcgaggatgcctgcccgtcctgcgcgggccaggggcgcgtcacgcgcgagcgtacgctgtcggtcaacattccccagggcgtcgaggacggcacgcggatcaggctcgccggcgagggcgaggccggcgtccgcggcggaccgcccggcgatctctacatcttcctctcgctggcccagcaccagttcttccagcgcgacggcgccgatctgcattgtcgtgtgccgatctcgatggtgaccgccgctctcggcggcgaattcgaggtgccgacgatcgagaagagcaagaccaaggtcaaggtgccgccaggaacccaatcgggtcgccgattccgcatcgcatcaaagggcatgccggtgctgcgctcgcgccagatgggcgacatgtacgttcaggtcgtggtcgagaccccgcagaacctcaccaagaagcagcaggaattgctggccgaattcgagaaactctcctccggcaatacgcagccggaatccgagggcttcttcgccaaggtcaaggatttcttcggtaatcgggcgaactga

SEQ ID NO: 4117 - DNA, 1902 bp, BradyrhizobiumColbertium
atgggaaaggtcattgggatcgacctcggcaccacgaattcgtgcgtcgccgtgatggatggcaagaacgccaaagtcatcgagaattccgaaggcatgcgcacgacgccgtcgatcgtcgccgtcaccgatgacggtgagcgcctcgtcggccagccggccaagcgccaggccgtcaccaatcccgagcgcaccttcttcgccgtgaagcgcctcatcggccgccgctacgacgacccgatggtcgagaaggacaagaagctcgtcccgtacaagatcgtgaaggcttccaacggcgatgcctgggtcgaggccgacggccagacctactcgccctcgcaggtctcggcgttcatcctgcagaagatgaaggagaccgcggaggcccatctcggccagaaggtcgaccaggccgtcatcaccgttcccgcctacttcaacgacgcccagcgccaggcgacgaaagacgccggcaagatcgcgggcctcgaagtgctgcgcatcatcaacgagccgaccgcggctgcgctcgcctatggcctggacaagaccaaggccggcacgatcgccgtctatgacctcggcggcggcaccttcgatatctccatcctcgagatcggcgacggcgtgttcgaggtgaagtcgaccaacggcgacaccttcctcggcggcgaagatttcgacatgcgcctcgtgggctatctcgccgatgaattccagaaggagcagggcatcaacctgcgcaacgacaagctcgccttgcagcgtctgaaggaagccgctgaaaaggccaagatcgagctgtcctcgacgacgcagaccgagatcaacctgcccttcatcaccgcggaccagaccggcccgaagcatctgacgatgaagctcacccgcgccaagttcgaggcgctggtcgatgacctcatccagaagaccgtcgagccctgccgcaaagcgctgaaggatgccggcgtcaccgccggtgagatcggcgaggtcgttctggtcggcggcatgtcgcgcatgccgaaggtccaggaggtcgtgaagcagctgttcggcaaggagccgcacaagggtgtcaacccggacgaggtcgtggcgatcggcgctgcgatccaggccggcgtgctccagggcgacgtcaaggacgttctgctgctcgacgtgaccccgctgtcgctgggcatcgagacgctgggcggcgtgttcacccgcatcatcgaccgcaacaccacgatcccgaccaagaagagccaggtgttctcgacggctgaagacaatcagaatgccgtcaccatccgcgtcttccagggcgagcgtgagatggcggccgacaacaagatgctcggccagttcgatctgatgggcattccgccggccccgcgcggcatgccgcagatcgaggtgaccttcgacatcgacgccaacggcatcgtcaacgtctcggccaaggacaaggccacgggcaaggagcagcagatccgcatccaggcctccggtggtctgtcggaagccgacatcgagaagatggtcaaggacgccgaggccaatgccgaggcggacaagaagcgccgcgaggccgtgaccgccaagaacgaggccgatggcctggtgcattcgaccgagaaggcgcttgccgagcacggttcgaaggtcgccgagagcgagcgccgcgccatcgaggacgccgtcagcgatctcaaggaagcgctgaagggcgacgacgccgaggcgatcaaggccaagacccagacgctggcccaggcttcgatgaagctcggcgaggccatgtacaagcagcaggccgaagccgacgccaagaaggatgcggcccaggacgacgtcgtcgacgcggaattcaccgaagtcgacgacgacaagaacaacaagaagtccgcttaa

SEQ ID NO: 4118 - DNA, 942 bp, BradyrhizobiumColbertium
atgaagctgatccgccccctcgccgcgctcgccctcctcgccgcaacagcgtttccggccttcgccgccgacgccgtcttcccgcccggcttgcgtctcggcatggtgccgttgatcgggctcagcacggccaagagctttccgggcttcgagagcgaggacggcagcgtcaaagtgctgatcaccgagttgccgccggcggcctatggcgaggtcgcgagcgccttcaactccggtcccgccggcgtcaatggcgtcaagcaggacaagatcgaaacgcccgcgggcctggcctatttcaccaccgagagtggtaaggccggcgatactccggtgaagcgctattcgatgatcgtgccgggcgccgggttctccggttatgtcgcggtgcaaattccggagaatgcgaccaagatctacacggatgaagcggtgcggcagatgttcgcgagcaccgtcacccgcaggcaggtctcggcggaagagcagatcgcgctgatgccgttcaagatcaccgatctggccgacttcaaggatatccggacgctcgcgccgggctcgagcatcatcctggccgacggcgatgagagcatcggttacgagtcgaagccgttcatgattctaggcgtgatcggcgcgaccccgcagcagcccgacgaccgcgcccgcttcgcgcaggaggcggcactgcagattcccggcgtgcgcgaatcgcgcatcaccatgtccgagccgatccgcatcaacggccagcagggcttcgagacccggatcgacggcgtcagcggcaaggacaagatccccgtgaccgtggtgcagtggatccgcttctcgagcggcggcgcctcgctgcgcatcatcgccagcgccccgcgcgagcagtggctgcccgccttcacccgattccgcgccgtgcgcgacgggattcagccgaagggctag

SEQ ID NO: 4119 - DNA, 618 bp, BradyrhizobiumColbertium
atgaccgagcaagaccggcaacctcaagacacgactgcagcgaccggcgagcccgtggtgtcgaaaccctacatcatgccggacgatcccgagcccggttcggtcgagacgttgcagaaggaagcggctgaagcgcgcgaccgcatgctgcggacgctggccgagatggaaaatctgcgcaagcgcaccagcaaggaagtcgccgacgcccgcctctacggcatcaccggctttgcccgcgacgtgctcgacatcgccgacaatctccagcgcgcgctcgatgccgtcccggcggaggcgcgcgccaatgccgatgccggcctgaaggggctgatcgaaggcgtcgagctcaccgagcgctcgctgcacagcgcgctcgagaagcacggtgtcaagaaactcgatccccaggggcagaagttcgatccgaatttccatcaggcgatgttcgaagtgcctgatgcctcggtgccgtcgggcaccgtcgtgcagatcatgcaggccggctacacgatcggcgagcgcgtgctgcgcccggcgctggtcggcgttgccaagggcggcgcgaaggcggcgcccgcggccaacaacaatgagtcgagcggcgcgccgaactga

SEQ ID NO: 4120 - DNA, 393 bp, BradyrhizobiumColbertium
gtgatctcggccggcatcgccagctggtccggcggcgagaacgaggatcgccagctcatcgtccgcggccatgccaatctgctcgaagatctgcacgcgctggaggacctggagcgggtgcgcctgctgttcgacgatctcgagaccaagcgcggcgtcatcgacctgctcggccgggccgaaaccgctgagggtgtgcgcatcttcatcggcagcgagaacaagctgttctcgctgtcgggatcgtccaccatcatctcgccctatcgggatgccgccggccacatcgtcggcgtcctcggcgtgattggcccgacgcgactgaattatgcccgcgtgatcccgaccgtggactacgccgcacggatcgtcagccgccttctggggggctga

SEQ ID NO: 4121 - DNA, 546 bp, BradyrhizobiumColbertium
atgcttcagccgcgcattggattttggcgtcaacacgacggctgcggcgcgggtcaggcccgacagccgcatcagggcctggtccagcgccgcctcgaccgactgcgcctcgccgacggaggagagctggctctggatcgactgccgctcggcctcgttgaggtcgccgacctgcatcagggcgtcgacgaagaagcgcagccccaattccgtcggcagccggccggcggaggtgtggggcgcatagatcaggccgagctgttccagatcggccatgacgttgcggaccgaggccggcgacagcggcatggcgatcaggcgggaaatattgcgcgagcccaccggctcgccggtcgcgagatagctttcgacaatttgacgaaagatgtcgcgggaacgctcgttgagctgggcaaggcctgcgcgcggcgcgatcagatggatcggatcgtgatgggccacagacggcaactcctctcaggtgctcgtaatttgtccatccggaccgcttctgacaagcgcggcgtttgcggcctccaggggtga

SEQ ID NO: 4122 - DNA, 714 bp, BradyrhizobiumColbertium
atgcggccaagccgccgtgcgcccgacgaactgcgccccgtgacgctggagcggggcgtggtcaaatatgcggaaggttcctgcctggtgaagttcggcgacacccatgtgctggtcaccgccacgctggaggaccgcctgccgccgtggctgaaaggccaggggcgcggctgggtcaccgccgaatacggcatgctgccgcgcgcgacctcggagcgcacccgccgcgaggcctccgccggcaagcaaagcggccgcacggtcgagatccagcgcctgatcggccgctcgcttcgcaccatcatcaatctcgaagcgctcggcgagcgccagatcacggtcgattgcgacgtgcttcaggccgacggcggcacccgcacggcctcgatcaccggcgcatgggtcgcgcttgccgactgcatcaactggatgaaggcgcgcaacatggtcaaggccaacgtgctgcgcgacaacgtcgccgcgatctcctgcggcatctacaacggcacgccggtgctcgatctcgactatgccgaggattcggaagccgagacggacgccaatttcgtgatgacgggcgatggccgcatcatcgaggtgcagggtaccgcggaacgcgaaccgttcacggaagccgagctcctggcgctcatggcgctggcccgcaagggcgtcgcgcgtctggtggacttgcagaaactggctgtggcgtag

SEQ ID NO: 4123 - DNA, 636 bp, BradyrhizobiumColbertium
atgcaccgccgaatcacggacaagctcgtcatcgcgacccacaatcccggcaagctcgccgagatgaaggagctgcttgcgccgtacggtatcgcggcggtatcggccggcgagctcggcctgaccgagcccgaagagaccggcaacgatttccgcagcaacgccgcgatcgccttgatcgcggcggcgcaggcaaccaagcttcccgccttcgccgatgattccggcatcgtcgtcgacgcgctcgacggcgcgcccggaatctacagcgcgcgctgggccggcccctccaaggatttcaacgcggcgatggcgcagatcgagcgcctgttgcaggagcgcggcgccaccacgccggacaagcgcacggcgcacttcgtttccgcgctctgcgtcgcctggcccgacgaccatctcgaagaggtcgaggcccgcgtcgacggaacgctgatctggccgccgcgcggaaatgccggatttggttatgacccgatgtttctgcccgatggtcacacgcgcacctttggcgagatgaccagaatcgaaaagcacggcctgccgccgctcggtctcggcctttcgcaccgcgcccgcgccttcgtcaaactggcggagatctgccttgagccgcgctag

SEQ ID NO: 4124 - DNA, 1215 bp, BradyrhizobiumColbertium
ttgagccgcgctagagcgttttcgagcgaagtggataccggttcgcgccaggaaaacgcgtcgaaacaaggatccgaggccttcggcgtctacgtgcactggccgttctgcctgtcgaagtgcccctattgcgacttcaacagccatgtccgccacgccgcgatcgacgaggcgaggttcgcctccgcttttgctcgcgagatcgcaacgaccgccgagcgtgcgcccggccgccaagtcacctcgatcttcctcggcggcggcacgccgtccttgatgcagcctgcaacggtcggcgcggtgctcgacgcgatcggcaagcactggaccgtcgccagcgacgtcgaagtgacgctggaggcgaacccgaccagcgtcgaggccacgcgcttcgcaggctatcgcagcgccggcgtcaatcgcgtgtcgctcggcgtccaggcactcgacgatgcctcgctgaaggcgctgggtcgcatgcacagcgcgcgagaggcgctggatgccgtcgccatcgcgcgccgctcgttcgaccgctattcgttcgacctgatctacgcccgccccgaccagacgccggcgatgtgggccgacgagctgcgtcttgcgatcgatgaagcggccgagcacctgtcgctctaccaattgacgatcgaggaaggcacgccgttcttcggcctgcacaaggccggtaaattgaagacgccggacgaggcggtcgcgcgcgcgctctacgacgtcacgcaggagacctgcgacaagctcggtctgccagcctacgagatctccaaccacgcccgccgaggcgccgagtgccggcacaatctggtctactggcgcggcgaggaatatgccggcatcggccccggcgcgcacggccgcctcgacatcgagggcgtgcggcacgccatcgccaccgagaagcgccccgaagcctggctgatgcgggtcgagaccggtggccatggcatcgtcaccgacgagctgctcaacagcgaggagcgcgccgacgaattcctgctgatggggttgcgcctcgctgaaggcatcgaccccgagcgctacaaggccctttcgggtcgcccgctcgaccccaagcgcatcgcgctgctgcgcgaggaaggcgcgatcacggtggacccgacgggccgcctgcgcgtgaccagcagcggattcccggtgctggatgcggtggtcgcggatctggcggcgtaa

SEQ ID NO: 4125 - DNA, 1152 bp, BradyrhizobiumColbertium
ttgctcggcgcgcccgtgctgtcggcctgcgccggcgtgcagcaaagcctcagccaattctccaatccgttctcgagttccgcgccgccggcccagccggcgggtccgcagcaacaggccacgaccgccggcaccggcggcgtgaaggtcggcctgatcctgccgctctcggcggccggcaatgccggcctcgccgcgcaatccatgcgcaacgccgccgagatggctctggccgagttccagaatccgaacatccagctcctgatcaaggacgacaatggcagcccccaaggcgcgcaagccggtgcgcagcaggcggtcgacgaaggcgccgagatcatcctggggccgctgtttgcacagtccgtgccggccgtggcgcaggtcgcgcgcacgcgcggcatttccgtcatcgccttctcgaccgattccagcatcgccggacgcggtgtctatctcctgagcttcctgccggagtccgacgtcaaccgcatcatcgaatattccgccagcatcggaaagcgatccgtcgccgtgctggtgcccgacaatgcctatggcaatgtcgtcgaggccgcggtgaaggcggcggtgccgcggcgcggcgggcgcatcgtcgcgttcgagagatatggcgccgaccgcgccaacccggcgcgcaccgtggcgcagcagcttggcagcgcggatgcgctgttcatcgccgacgacggcgatgccgtcgtgacggtggcggatgccatgacggcggcaggcgcaaacctgcgcaacatccagctgctcggtaccgggctgtgggacaatccgcgcgtctatgcgagcccggcgcttcagggcggcctctacgccgcgcccgacccggccggcttccgcgccttctcgggccgctaccgtaccaaatacggcgcagagccgatccgcaccgcgacgctcgcctatgatgcggtcgctctcgtcgccgcgctcgcgcgcacgcaaggcaccacgcgcttctcgtccgacgtgctcaccaatccttccggcttcgccggcatcgacggcctgttccgcttccgcgccgacggcacgaacgagcgcgggctcgcggtgatgaaggtgacgcaaggtggcggtgttgcggtcgcgggctcaccgaagagctttggggcgtga

SEQ ID NO: 4126 - DNA, 951 bp, BradyrhizobiumColbertium
atgcgcgcaaacccggctccgataaatacgtcagaagctcaggacgccgccccgcgcggtttctccatcgatgcccatcggctcacggcgtcgaaggccgcaccgggcctccacctggtcgcaacccccatcggcaatctcggcgacatcacgctgcgcgcgctgcagacgctcgccggcgtcgatgtcatcttctgcgaggacacccgcatcacgcggcgcctgacggagcgctacgccattgcggcccagctcaagcaatatcacgagcacaacgccgaagccgcgcgaccaaagattctggaagcgctcgcggctggcggctcggtcgcgctggtctccgacgcgggcacgccactaatttccgatcccggtttcaagctggtgcgcgaggtctgcgccgccggccatgcggtgcatgcgctgcccggcccgtcctcggtgctggcagccctgtcggtcgccgcgctgccgaccgatcgctttttcttcgagggcttcttgccggcgaaatccgccgcgcgccgcgctcgcctggccgagcttgcacgtatcgacgccacgctggtgatgttcgaatcgggcaatcggatgcaggccaccctgaccgacctcgccgagatcatgggcgagcgggaagccgcagtctgccgcgagctgacgaaattgcacgaagaggtcaggcgtgcgcctctggccgaattcgcgcggcaggccgacgcgcctgagacgcgcggcgaattcgtcctggtgatcggcccgcctgcagccgacgccgaggtgctggcatcggacgcactcgacgatctcttgcgcgagcagcttgccgctcacaccgtgaaggacgccgtggcgcacgcggtggcgctctcggggcggccgcgccgcgaggtctatgcccgcgcgctcgagctcgcgaaggatctgcgaggcggcgatggcgaagactga

SEQ ID NO: 4127 - DNA, 402 bp, BradyrhizobiumColbertium
atggcgaagactgagaacccccgggaaccaaaggtcgcctcgcccgagcgcgtcgccgcgtttcgcaccggcatctccgccgagagccgcgccgcggcctatctgatggccaagggctaccgcatcctcgccaagcgctaccgcaccccgcatggcgagatcgacatcgtggcgcgccgacgcaatttgatcgccttcgtcgaggtcaaggcgcgggcgagcctggacgacgccgcgttcgccgtgacgccccgccagcagcagcgcatcatcgacgccgcgcaaggctggctcgtggcgcatcccgagcatgccgaattcgaattgcgattcgacgccatgctgattgcgccgcgctcgcttccgcgccatgtgttggcggcattcgacgcctcgacctga

SEQ ID NO: 4128 - DNA, 945 bp, BradyrhizobiumColbertium
atgaagctcaacgtcgccgtccagatggaccccattgcccgcatcaacatcaagggcgattccacctttgcgctgcttctggaggcgcaaaagcgcggccatggcctgtcctattacacgcccgacaagctctcgatggtcggcgatgaactggtcgcaccggttcagctcctgaccgtgcgcgacgagcccggcaatcacttcactctcggagagcccaggcgcgaagcgctgaacggcttcgacgtggtgctgctgcgccaggacccgccgttcgacctcgcctacatcacctcgacgcatttcctggagcgcatccatccgaagacgctggtggtcaacgatcccgcctcggtgcgcaacgcgccggagaagctgttcgtgatgaattttccgcagctgatgccgccgacgctgatctcgcgcgacctcgacgagatcaatgcgtttcgcgacaggcacggtgccgtcgtgatgaagccgctgcacggacatggcggcgcggcggtgttccgcgtgatgccgcaggacatgaatttcggctcgctgttcgacatgttctcggtcactttcaaggagccctgggtgatccagcaattcatcccggaggtgaagcacggggacaagcgcatcatcctggtcgacggcgagttcgccggcgcggtgaaccgcgtgccggccactgacgacctgcgctccaacatggtacgcggtggggcggcacaggagaccgagcttacgccgcgcgaacgcgagatctgtgcgacgctcggcccggcgctgcgccagcgcggcctgttgttcgtcggcatcgacgtcatcaacggcaacctcaccgagatcaacgtgacctcaccgacgggcatccgcgccatcgcgcggctcggcggccccgacgtcgcagcgaagatctgggacgtgatcgagcacaagcgtaagaagtag

SEQ ID NO: 4129 - DNA, 816 bp, BradyrhizobiumColbertium
atgaataccgcacgcattgtcgttctcgtcattgcgctgggcgccggcggcgtcgctgcgtatctggcgagcggctaccagaacgcgcccgcgcctgtcctgtccgtcgccgagaagctgccgacggtcgaggtcctcgtcgcgaagaacgacatccagcttggccaagccgtcaagcccgacgacctgcaatggcaggcctggccggccgcgaccgcgagcagcgccttcatccgccgcgacagcaggcccgaagcgcagacccagatcgccggctcgatcgcacgcgtgcctctgatgcagggcgagccgatccgcgagcagaagctggtcagggccgagggctccggcttcatggccgcaattctgccgtccggaatgcgcgccgtttccaccgagatttccgccgaaaccggcgcaggcggcttcatccttccgaatgaccgcgtcgacatcgtgctgacccgccgcctgaagaatccggatggcgataacggtccgaccggcggcaacgacctcgttttgtccgaggtcatcctcaccaatatccgcgtgctcgcgatcgaccaggcgccgaaggaaaaggacggccagaacgccgtggtcggcaagaccgtcacgctcgagctccggcccgaccaggtcgccacgctctcggccgcacgccagggcgggacgctgacgctcgcgctgcgcagcatcgtcgatgccaacgcggtcgacggcacgcccgaggatcaggcgatcaggcgaacgggcggcgtgaacgtgatccgctacggcgtgcaggcacggcaactgacgtcacagaagtga

SEQ ID NO: 4130 - DNA, 1491 bp, BradyrhizobiumColbertium
atgcgcattcgggggaagcgcgcgcgctcgttcctggcggggacggtgttgatgctggggctgctcgcggcttccgatgtcgtcagagccgcggatgcgccggtcggcgaccaggcgccgatgcaggcgtcggaccttggcctgtcgccggtcgcgaccgtcgccccggcgaggacgcgcttcctgtcgctcggcgtcggcaaatccgtcgtcatcgacctgccgcgcgaggtcaaggacgtgctggtggccgatcccaagatcgccaacgcggtgattcgctcggcccagcgcgcctacatcatcggcggccaggtcggccagaccaacgtggtgttcttcactgccgacgggcagcaggtcgcctcctacgacatcgctgtgaagcgcgatctcaacggcatgcgcacggcgctgcgccagtccctgccaggcgtgcagatcgaaggcgtcggcgacagcgtgatgctgaccggctcggtgtcgagcccggtcgaggcccagcaggccggcgacgtcgctgcaaagctcgtcggcggctcggacaaggtcgtcaacaacatcgtcgtgcgcggccgcgaccaggtcatgctcaaggtcgtggtcggcgaagtccgccgcgatatcgtcaagcagctgggcgtcgatctcagcgccagcctcaacgccggcacggcggtggggaatttcaacaattccaacccgttctctgtcgctggcgggccgatcgtcggcagcaatggcctcggcctcgccggcgtttccaagggcgtcgccacggtcagtgccacgatgcgggcgatggaaagcgccggtgtcatgcgcacgctggccgaaccgagcctcaccgcgatctcgggcgaatccgcaaccttcatcgccggcggcgaattcccgattcccgcaggctattcctgtgacccggtcacccacgtctgtaccacccagatcagctacaagaagttcggcatctcgctcaacttcaccccggtcgtgctcagcgagggccgcatcagcctgcgcgtgatgaccgaggtctcggagctgtcgaatacgaactcgatcacgttgacgcaggcggtgtccgcgacatcgagcaactcgatcaccatcccttcgattcagacgcgccgcgccgagacgacgctggaaattccctcgggcggctcgatggcaatggccggcctgatccagcagcagaccaagcaggcgatcaacggcctgcccggcatcgaccaggtgccgatcatcggcgcgctgttccgcagccgggacttcgtcaacaacgagaccgagctgatggtgatcgtgacgccctatgtggtgcgcgcggtcgcccagaaggaattgtcgcgtcccgacgacggcttcgcaccggcatcggatgcgcagacggcgctgctcggccgcatgaaccgcctctatggcgtcgcgcgccgcgtcgatccgatcaacggcgcgcccgatgatttcggcttcatcatcgactga

SEQ ID NO: 4131 - DNA, 732 bp, BradyrhizobiumColbertium
atgatgacaacatcagccgatcgacgtcgcaaccgacggatcgcgctggcattgacggccctgtccgtcatgctcggcgcctgcaacaccacggagatcgtcacccagacggttccgaccgactatcgccagcgccacccgatcgcggtgcaggaaggcaagaagtcgatcgtgatcttcgtcggcaaggcgaggggcggcctctcggccgcacagcattcggacgtcgccggcattgcccgggaatggttgcacgaaggcaccggctcgatcgtcgtcgacgttcccgtcgacaccgccaattcgcgcgcggcggccgcgacctttcaggagatccggtccgtgctcacgtccgcgggcgtgccatcgcgtgccgtcgtccagcatccgtatcgccccgaggaccccgggctgctgcccaccatccgcttgagctattcgaagatcaaggcagtcgcgggcccctgcgggctctggcctgaagacatcggccccaacatcctcgaccccggctataacgagaaccggccctatttcaacctgggctgcgccagccagcgcaatctcgcagcgatgatcgacaatccggccgacctcgagcagccgcgcggcgagacgcccgcctataccgcacggcgcaacatcgccttcgagcgctaccgcaagggcacgccgatcgcgacgccctcacccgacgccgacaaggccaaactcagcgataccggcaaatga

SEQ ID NO: 4132 - DNA, 1287 bp, BradyrhizobiumColbertium
atgacaggcatccacgacgacgcggacgatccgcggcaccccgaggaacatatcgcaccggttccccgtatttcggtgcaagccttttgcgagaccgagcagacgctcgctgcggtgaccgcggcgggtcaggatcgccggcttgccaaggcccacctcaccgcgcaggagggcggcctcgccgcggcgatcgaggtctatgaatcgatgccgaccccgaacgtgatcgtcatcgaatccgacggcacgcgcgacatcctcgaggggctcgacgacctcgccggcgtctgcgatcccggcacgcgcgtggtggtgatcggcaaccccaacgacaccgcgccctatcgcgagctggtacgccgcggcgtcaacgattacgtggtcggaccggtcgagaccctcgatgtcgtccgctcgatctgcagcctgttctcggcctccgaggccatcatcaccggccgtgtgatcgcggtggtcggcgccaagggtggtgtcggtgcgtccaccgtcgcgcataatgtggcctggaccatcgcccgagacctttcgctcgattcagtcgtgatcgacctcgacctcgccttcggcaccgccggcctcgactacaaccaggatccggtgcagggcatcgccaacgcggtgctgtcgcaggaccggccggataccgcgctgatggagcggctgctcgccaaatgcaccgatcgtctcagcctcctggcagcgcccgccacgctcgaccgggtctacgatttcggcgccgaggcttttgacgcggtgttcgacacgctgcgcatgaccacgccctgcatcgtgctcgacgttccccatcaatggtccggctggacacggcgcgcgctggtcaacgccgacgacatcgtgatcgtggccgagcccgacctcgcgaacctgcgcaacaccaagaacatgctgagcgtgctgaaggcagcgcgccccaacgaccggccgccgctgtactgcctcaaccaggtcggcatgcccaagcgcgcggagatcgaggtcaaggcgttcgccaagaccatggagagccagccgatcgcggtgatcccgttcgactcgaaactgttctcgaccgcagccaacaacggccagatgatcgcggaggtcgccaagaaccatcgcaccactcttctgttccagaacatggcgaaccgtctcgccggccgcggcgaggtgaagaagccgaagcgctcgctgctcgagccgctgctgaaaaagctgaaaggcaggccggggcgtggatcagcgccacatcgcaaggcgtcgtaa

SEQ ID NO: 4133 - DNA, 774 bp, BradyrhizobiumColbertium
atgtccaagcgtccgtcccccgcccttgcttcggcgagattcctgcttcctgcgttcttggtccttgtcctcggcggctgccagaccaatggcatagaggatgtgaccggcgcgctcggcgccaaatcggaaacggccgccaggtccgacgccaagccggagctggacgcgttgcgcgagcgctatcgtgccaagccgagcgatcccggcgtcgcgctcgcctatggcaaggcgctgcgcgacaccggccagcgcgcgcaggccgtcgcggtgctggagcaggccgtgcttgcccatcccaacaacaaggcgctgctcgccggctatggccgcgcgctcgccgacagcggcaacttccagcgggccttcgacgtgctcggccgtgcgcatgcgcctgaggatccggactggcgaatcctgtcggcgcagggcgcagcgctcgatcagctcggccgcaacgaggaggcgcagcaatattacgccgcggcgttgaagatcgtgccggacgagccgaccgtgctgtccaatctcggcctatcctatatgctgcaaaacaatctggcgaaggccgaacaggtgctcggccgcgcctatcagcgcaatcagagcgatgtgcgggtccgcgccaatctcgcgctcgtgctgggattgcagggccgcgaggccgaggccgaaatcctcgtgaaagccgatctgccgccggaccaggcagcggccaaggtcaccgcgctgcggcagctgctggccaagaagcagcagcgggcggacaggtaa

SEQ ID NO: 4134 - DNA, 213 bp, BradyrhizobiumColbertium
gtgtgcagccggctcgccaagatccattttggcgcgggctcgctgccgcgggattgcacgatcacggatatttcggatggcggcgtgaaagtggtggcggaattcctggaagtgccgccgcagttcaccatcatcttcgcgcccgactattcccgccaatgccgcctgcgctggcgcatcggctgcgagttcggcgccgagttcgtcgattaa

SEQ ID NO: 4135 - DNA, 837 bp, BradyrhizobiumColbertium
atgcgctccatctctcgggtcacggacgtttccctgaacacggtcacgaagctcttggtcgatgccggcagcgcttgcgccgccttccatgacgccaccgttcgcaacgtgaagtccgagcgcatccaatgcgacgaaatctggagcttcgcctatgccaaggcgaagaacgtcgcgagcgccaaggccgctccgatcggctccggcgatgtgtggacgtggacggctattgatgccgactccaagctgatcctgacttggcttgtcggtgatcgcgacgcgagcgccgccaacgccttcattgccgaccttaagccccgcctcgcgaaccgcgtgcagctcactacggacggccacaaggcctacctccacgcggtcagccaggaattcggcccggatggcgtggactacggaatgctcgtgaagctgtacggcagcgatccgcagccgcagaagcgctacagcccggcgaagctgatcggcatcgataaggatttgatccttggttcgcccgacgtggcgcacatttccacgtcttacgtggagcgccagaacctcaccatgcgcatgtcaatgcgccgcttcactcgcctcacgaacgccttttcgaaaaaggtggagaaccactatcacgcgctctcgctctacttcgtgtggtataatttcgtgaaggcgcacaaatcacttaagggcgctacgcccgcgatggctgccggtctcgtttcagaccgcatgaccatgacggacatcgttcaactgatcgacttgcgcgaaggcccgccgaagaagcgcggcccctacaagaagcgggatcaagccgcagaaatttcaaactga

SEQ ID NO: 4136 - DNA, 88 bp, BradyrhizobiumColbertium
gccccggtagctcagtggagccgtgaaaagcctagagagcgccgagctgctaactcggaggacgttggttcgagtccaacccggggca

SEQ ID NO: 4137 - DNA, 222 bp, BradyrhizobiumColbertium
atgcccaagggtccaaaaggcgagaagcgccacgccgacaccgtacagaacgccatgctgatcggcaggatcgcgaccggcgaggtggaggacacccctagcaaggccccgaaccgggctaagggcggcgccgttggcggcaaagcccgggctggcgcgctttctcccgaacgtcggagcgagattggcaagaaagctgcgcaaaagcgttgggaatcgtaa

SEQ ID NO: 4138 - DNA, 1539 bp, BradyrhizobiumColbertium
atggttcagcgggtttccaccgtcgcctttgaggggatcgaggcccgcgcggtcgatgtgcaggttcaggtcgcccccggcctgccggcctttgccatcgtcggcctgccggacaaggcggtgtcggaggcgcgcgagcgggtgcgcgcggcgctgatcgcctcggggctggcactgccggcgcggcggatcatcgtcaatctggccccggccgacctgcccaaggaaggcagccattacgacctgccgatcgcgctcgggctgatggcggcgatcggcgccatcccgccggatgcgctggccggcttcaccgtgctcggcgagctcggtctcgacggctcgatcgcgccggtggccggcgttcttcccgcggcgatcggcgccaattcgcgcgaggaagggctgatctgccccgcggcctgcggctccgaggcggcgtgggcgagcccggacatccagatcatcgcggcgagttcgctgatccagatcgccaaccatttcaagggcacgcaggtgctgtcgcggccctcgccgaaggtgcacgaggccgccgcctccacgctcgacctgcgcgacatcaagggccaggagagtgccaagcgggcgctggagatcgcagccgccggcgggcatcatttgctcatgatcggcgcgccaggggccggcaagtcgatgctggcggcgcggctgccctcgatcctgccgccgctgtcgccgggcgagctgctcgaagtctccatgatcgcctccgtggccggcgagatcgagggcggcgcgctgacggccaggcggccgttccgctcgccgcatcattccgccagcatggccgcgctcaccggcggcggcatgcgcgccaagcccggcgagatctcgctggcgcatcagggcgtgctgttcctcgacgaattgccggagttcgatccgcgcgtgctggattcgctgcgccagccgctggagaacggcgaggtcgcggtgtcgcgcgccaatcaccgcgtgacctaccccgcccgcttcatgctggtcgccgcgatgaatccctgccgctgcggcaatgcgttcgagcccggctatgcctgcaagcgcggccgcatcgaccgctgcaccggcgactaccaggcgcgcatctccggtcccctgatggaccgcatcgacctgcgcatcgaggtgccggccgtgaccgcggccgacctgatcctgccgccgccggccgaaggatcagccgaggtcgccgcgcgcgtggcggcggcgcgcgacatccagctcgcgcgctatgcggacgcgggcctgccccacattcgcaccaatgccgaggcgcccgcctccgtgctggaggagatcgcaaggccggatgcgcaaggccaaaagctgctgcgcgacgccgccgaaaccatgcgcctgtcggcacgcggctatcaccgcgtgctgcgggtggcgcgcaccctggcggacctcgatcattccgacaagatcggccgactgcacctcgccgaagccttgtcctaccgcgcgctcgcggaggatgtgcggcagatggcttga

SEQ ID NO: 4139 - DNA, 465 bp, BradyrhizobiumColbertium
atgttgcgtttcaagttcctggcctcggtcgttcccctgttggccgctgcggtgttcgcccgcgcagagatcgggtcggtttcgcatccctgcatcgcgcttggcgaaacaacggtggagctcacgcccctgttctggactgctggcgtgcatgtcgccttcaccgacgatcccgcgcgagccacggtgcgggtccggatcaccgacgacgcggacacggcggacttcaccgtggtggacggccttggttccgagccggactcctgccaggccaatccgtcgacgcgactcgtctcgattgctgcccagcccgtcgatggcggccaggtgatctatctctccagcgaaggaccggcggattaccgcatctatgtgcgctcgaaaacgttctcgcagcgcgaggcggcggcactgatcgtcggcgcccgcggcggccagcgccatctccaggcggcctcgctgtaa

SEQ ID NO: 4140 - DNA, 2250 bp, BradyrhizobiumColbertium
atggcgatgggtcggacgttccggatcaaggtgcgcatgcgccgcttcaggcgccagcatcccaggctggccttcgcgatccgctccttcctgattttctcggcgacgttcggcggcgcttatggcttcgtgtccggcagccggtccgagaacgccggttacgatccgcacgcatttgcgatcggtgcgagcttcctgttcgcgctcgcctgcctcggccttgcgacgctgagcatacgtctgcgcttcgtcaacaaacggctgcgaacgctcgccgcccacaatgaggcgttgatcgaccgcaattgggagctgaaggaagcggaagaacgagcgcgcagcctgttcgagcagcagggcgatctcatcgtgctgcgcgataccagcggccgcatcacctttgccaacgaggcctattgcgcactcgcaggacaggcgcgcagcgcgttggtcggcacgcggttcgatttcgacgtgctggagcagggcgacagcgcgcgcgagagcaacggcacgcgcatccacgaccagaagatcgcgaccccgctcggcgcgcgctggatcgcctggcgcgagggctatgtccgcgccgatgccggacagcccgccgaactgcagagcgtggggcgcgacgtcaccgaccggaccgagagcgaacgcgcattgtccgacgcgcgcgaccaggccgatgcagccaaccgggccaaatcgcgcttcctcgcaatggcctcgcacgagatccgcacgcccctgaatggcatcatcggcatgggcggcctcctgctcgacaccaatctgacaccggagcaggcgacctatgccagggcggtgaagacctcgggcgaagccctgatggcgctgatcgaggaactgctcgactattccaagatcgaggccggcaagctcgacctcgaccaacgtcccttcggcctctcgagtttggtcgaggagatcaccgagctgctcgcgccccgcgcgcaggcgaagtccctcgagatcgcagcctatgtcgacgagcgcctcccgctggaggtggtcggcgacgccgcgcggctgcgccaggtgctgctcaacctcgcaggcaatgccatcaagttcaccgcaagcggcggcgttgcgctgatcgtcgagccaggcatctggccgaacgagatcagcttcctggtccgcgacaccggcatcggcatcgcagccgaggcccagcagcgcatcttccgcgagttcgagcaggccgacgagcgggtcgcccgcacctatggcggcaccgggctcgggctttccatcagcgagcgcatcgtcaagcgcatgggcggccggatcacgctcgaaagcgaaccgggcaagggctcgaccttcgaggtcgcggtgccgctgccgtcctcgcaggccaacgccgcgcagacggcttttcccagccccgacctctctggcaagtcaatcctcctcgtcgccgccggcatcgaggcatccttgatcgcgcggcggctcgagcgctggggcggccagacctgcatggttgcagatgcggcggtcgccgaggcattgctgccggaacgctcatggcatgcggtgctgatcgatcgcgagatcggtcctgccattgccgaccgtctgggtgaggcggcccgcgcgcatgctctgcagcgcctcgtgctgctgacgccgagctcgcgccacgacaagctgtcgccggcgttcaccggcttcctggtgaagccgctgcgcgcggcctcgcttgccgcacgcctcgccctgacggctgaggtcgcctcgcccgatctcgcgccggaaccgccggcgtcgtccgccggcatagcaccggcgaaaggcctggcgatcctcgtcgccgaagacaacgagatcaacgcattgctgatgcgctcgctgctgaccaagctcggccaccgcgtcgtcattgcgatcaacggcgagaccgcgctggaatcctggctcgctgcctcgtccgccggcacgccctacgatctcgtgctgatggacattcagatgccgcagctcgacggcatcgaggccacaaaacgcatccgggcccaggaggccgccaccggcggccaccaaacaccgatcctggcgctcaccgccaacacgctcgtggaggatcgctatgcctgcttcgaggccggcatgaacggattcctgatcaagccgctcgatcgcgaaaagctcgaggaggcgctggcggggctggcggcgtcccggccggtggcggtcccgagtccggcgggaacctga

SEQ ID NO: 4141 - DNA, 630 bp, BradyrhizobiumColbertium
atgaacgtgctttgccgcctcgcactcattgctctcttcgccggcatctcccaacacgccgcagccgatacgccggaactcatctcttccctcaagcaaggcggctacgtcctgatcttccggcacacggcgaccgacgacacccagaaggatgtctatcccttcaagttcgacgacatgagcgcccagcgtcagctcagcgacaagggcagggacatggcgcgccagatcggaacagctatcaaggacctcgcgatcccggtcggcgatgtctacaccagcaggctgaaccgcgcggtcgaggccggcaagctgatctcgggccgggaggtcaagccggtggatgcgctcacggacagcagcaacgccagcgcatccggaatggcaaacccgactggtaccaatgctaaggccgggcaggccgtgcgccagctcgtcgatgcaccgccgaagccaggcaccaacacattcctggtcacccacaagacgaacattgccgacgccttcggcaaggaggccggcaacgtgcaggaaggcgaagctttcgtctacaaggccagcgattccgggcccgccggctttgcgggacgcatcaagatcgtggattggaccgcgaagcccggccagtga

SEQ ID NO: 4142 - DNA, 1089 bp, BradyrhizobiumColbertium
atgacgagcgaccgaaaggctggcgaccacgtgagaacatcagaagaccgttcattcctcatcttgctggcggcgatctccgttgctttcgggtgggtgctctggccattctccggcgcattgctatgggccacgctgctggccatcattttcgctccgctttatcgacgcgtgctggaaaccctcccgggaagggacaatctcgcggcgttgttcacggtcatcgtcgtcatcgtgatggtcctgatacctgtggcgatcgtggtcgcttcgctcgtcgaccagggagcggagctgtatcagcgcatccaaagcggggagatcagtttcgctcatcccctgcagcagctgaaatccgcgctgccgggctgggctgcttccctgtcggatcgtctggtcggcattgatttttcggcccttagggaacgcctgtcgggtctggtcgtcccagccgggcaacagcttgccgggcatgcgctcaacatcggacagttgacggtggagttcgtcgcaagcctgctcgtgatgttgtatctgctgtttttcctgctgcgtgacggtgaagagctcaacgcacgcattcgcgacgcacttccgctccgcccaggccacaccaacgagattctcgatgccttcaccctcgcggttcgcggaacgatcaaggggatcgttctcgtcgccctcattcagggtgcgctgggcgggctcatcttctggctgctcgggttgactgcgccgctgctggccggcgcgctcatggcgctggtctcgctgctgcccgtgctcgggtccgccctggtctgggttccggtcgcgctctacctgctcgtgtcgggcgcagtcacgaagggtctcatcctgctcgctttcggcaccttcgtgattggccttgcggataattttctccgcccgatcctggtcggccagtcgatccagatgccgagctacgtcgttctgcttgccaccttgggcggccttgcgagtttcggcgcgaacggcttcgtcatcggcccgctcgtcgccgcgatgttcctgacggcgtggcacatctatgtcggctcgaaagtgccgcaggaggcccggaagtga

SEQ ID NO: 4143 - DNA, 345 bp, BradyrhizobiumColbertium
atggttgatcgtctcaggagcgctgcggggcagctggaagccccgacctgcccagactgccatgtggagatgaagtggttccgctcggaactgctcgcagacgagccaaccccggtcatcgcgcatctcttcgtgtgcccgcactgcaagcgcgcggcgcaggcagacaccatcttccgaggaagccaggcgccgcccgacaagctgtccgcgccccggtttatcgccaacgccacatcattccggatcgggcggatcccaaacccggctggtgccgagcgtccgttcgcgccgcggaatgacggtcacttccgggcctcctgcggcactttcgagccgacatag

SEQ ID NO: 4144 - DNA, 957 bp, BradyrhizobiumColbertium
atggatatccgcgcacccgagcagcagtataatccgtaccgcgtctacacgcgcgagcagtgggcgcgcttgcgcgatgatacgccgatgacgctggagccgggcgagttcgaccggctgcgctcgctgcacgatcgcctcgacctccaggaggtcgaggacatctatcttccgctgtcgcgcttgttgtcgatctatgtcgatgcgatgcagcgcctgtattacgcagagcgccagttcctcaacatccgcgaccgcaaggtgccctacatcatcggcgtcgccggctcggtcgcggtcggaaagtccaccaccgcccgcgtgctccaggcgctgctggcgcgctggtcgccgcgtccgaaggtcgagctgatcaccactgacggatttctctatcccaatgcggtgctggagcggcacggcatgatgcagaagaagggctttccggagagctacgatctgccgctgctgctcagcttcctctccgacatcaaggccgggcgccgccatgtgcgcgcgccggtctattcgcatctgacctatgacatcgtgcccaaccagtgggccgagatcgaccagcccgacatcctgatcgtcgagggcgtcaacgtgctgcaaaccggcaagctgccgcgtgacggcaaggcggtgcctgtcgtctccgacttcttcgacttctcggtctatatcgacgccgacgaagtggcgctgcggcaatggtacatcaagcgcttcctggccctgcgcgaccccgctttcaccgatccgaaatcctatttcaaccgctacgcgctgctgtcggacgaggaagccaccgccacagcgatcgcgatctgggagcgcaccaacctcgccaatctcgaggacaacatcctgccgacccgcccacgcgcgacgctgattctcaagaagggcgccgaccacacggtcgagagcgtggcgctcaggcggctgtaa

SEQ ID NO: 4145 - DNA, 324 bp, BradyrhizobiumColbertium
atgcagcgtttcacgattcatgatctggccgagaccatcgatgcccgcgcggcttccggcggcgaagcgtcctatacccgcaagctcctcgacaagggcgccgagcattgcgccaagaagttcggcgaggaagcagtcgaaactgtaatcgctgcagtcgaaaacgatcgcgcgcatctgatagctgaaagtgccgatctgctctatcatttccttgtgctgttgaaggcacgcggcataaagctggaggaggtcgaggccgcgctggagaagcggacctcgatgtcggggttggaagagaaagcgtcgcgcaagggcggctag

SEQ ID NO: 4146 - DNA, 774 bp, BradyrhizobiumColbertium
atgttcaaggtgcgcgtgatcccctgcctcgacgtcaaggacggccgcgtcgtcaagggcgtcaacttcgtcgatctcagggatgccggcgatcccgtcgaggccgcgatcgcctatgacgccgccggtgccgacgagctcaccttcctcgacatcacagcgacccatgagaaccgcggcatcatgctcgatgtggtccggcgcacggcggaagcctgcttcatgcccgtcacggtcggcggcggtgtgcgcgaggtcaacgacatcaagacgctgctgcgcgccggcgccgacaaggtttcgatcaacagcgcggcggtgtcgcgacgcgagttcgtcaaggaagccgccgagaaattcggcgagcagtgcgtggtggtcgcgatcgacgccaagcgcgtcaagcgccccggcggcgaccgctgggagatcttcacccatggcggccgcaactcgaccggcatcgacgcggtcgaatatgcccaggaagtggtctcgctcggcgccggcgagatcctgctcacgtcgatggatcgcgacggcaccaggcagggattcgacatcccgctgacccgggcgatcgccgacagcgttcccgttcccgtcattgcctctggcggcgtcggcaatctcgatcatctcgtcgacggtatccgcgacgggcacgccaccgcggtgctcgccgcctcgatcttccatttcggggaattcaccatccgcgaagccaaggagcacatggcgcgacggggactgccgatgcgcctcgatgcctga

SEQ ID NO: 4147 - DNA, 738 bp, BradyrhizobiumColbertium
atgatcctctttcccgcgattgatctcaagaacggccagtgcgtgcgtctcgagcaaggcgacatggcacgcgcgaccgtgttcaatctcaacccggccgcgcaggcgcagagcttcgtcgagcagggcttcgagtatctccacgtcgtcgatctcgacggcgccttcgccggcaagccggtgaacgcgcaagccgtcgaggcgatgctgaagacgatcaagattccggttcaactcggcggcggcatccgcgatctgaagaccgtcgaagcctggctcgacaagggcatcacccgcgtcatcatcggtaccgccgcggtgcgcgatccggagttggtgaagtctgcggcgaagaaatttcccggccgcgtcgcggtcgggctcgacgcgcgcgacgggaaggtcgcggtcgaaggctgggccgagacctctcaggtgacggtgctcgagatcgcgcagcggttcgaggacgccggcgtcgccgccatcatcttcaccgacatcgcgcgcgatggcctgctcaaggggctgaacctcgatgcgacaattgcgctggccgacgccatctccattcccgtgatcgcctccggcggtctcgcctcgatcgaagacgtgaaagccatgctgatgccgcgcgcgaaaaagctcgccggcgcgatcgccgggcgcgcgctctatgacggccggctcgatcccgccgccgccctcgctctgatccgcgacgcgcgcgccgcctag

SEQ ID NO: 4148 - DNA, 651 bp, BradyrhizobiumColbertium
atgagcgttgccatcatcgattacggttccggcaatctgcattccgccgcgaaggccttcgagcgcgccgcgcgcagcctggagaacccgcaaaaggtcttcgtcaccagcgatcccgatcaggcttacgaggccgaccgcctggtgctgccgggcgtcggcgccttcgccgattgccggcgggggctggatgccgtcaacggcatggtcgaggcgatcaacgaggcggtgcgcgtcaaggcgcggccgttcttcggcatctgcgtcggcatgcagctgatggcaagccgcggcaaggagcacgtcatcaccgaaggcctgaactggatcggcggcgacgtcgagaagatcaggccgcgggacgagagcctgaagatcccgcacatgggctggaatacgctggaggtgctgcaggagcatccggtcctgaacaagctgccgctcggcccgaagggccagcacgcttatttcgtgcattcctatcacctcaatgccgccagcgaggcggacgtgctcgcgcgcgccgattatggtgggcccgtgaccgccatcgtcggcaaggacacggccatcggtacgcaattccaccccgagaagagccagcggttcgggctggccctgatctcgaacttcctgcgatggaaaccgtga

SEQ ID NO: 4149 - DNA, 531 bp, BradyrhizobiumColbertium
atgcctgtctacacagttcatgctccctcccctggcggagccgatctgcgcgcgaccgacaagttcgtgttcgtgcgcgacggcttccatttctgggcgatgatcttcggcccgttctggctgctgtggaaccggctctggctggcgctgattggctgggtgcttttcaccgccgcgttcagcgcgggtctgtccagcctcgggatcggccgcagctcgatcgtctttgccaatctcgtggtcgcgctgctgatgggcttcgaggcatcgagcctgcgccgctggacgttgtcgcgcggcaagtggcggcagctcgatgtcgtgattgccgacaacggcgacaccgccgaacgccgcttcttcgagcgctggagccagaagcagcacggcatcgtcaacgaccaatgggccgtcgaccgcggcggcccgccgccgacccgcagcacgccgggtcagcaattctcgaacccgccgccgattccggccggcggcatcatcggattgtttccggaaccgggaggatcaagatga

SEQ ID NO: 4150 - DNA, 594 bp, BradyrhizobiumColbertium
atgcgcaccgcgacgatcaagcgcaagaccaaggaaaccgacatcgaggtcaccgtgaacctcgatggcaccggcgtggccaacatcgcgaccggcatcggctttttcgaccacatgctcgatctccttgcccgccattcccgcatcgacctcacggtcaaggcggtgggcgacctgcacattgatcatcaccataccaccgaagacaccggcatcgcgctcggccaggcggtcaagcaggcgctcggcaacatggcgggcatcacgcgctatgccggcgtgcacatgcccatggacgagacgctcacgcgcgtggtcatcgacatctcgggccgcccgttcctggtgttcaaggccgacttcccccgcgacaagatcggtgagttcgacaccgagctggtgcgcgagtggttccaggccttcgccatcaacgccggcgtgactctccacgtcgagaccctatatggcgataacagccaccatatcgccgagtcctgcttcaagggcctggcgcgggcgctgcgcaccgccgttgcgatcgatccgaaggcggcgggcgaaatcccgtccaccaagggctcgctcggcggctga

SEQ ID NO: 4151 - DNA, 561 bp, BradyrhizobiumColbertium
atgcaggcttcccagaacagctcgcccgtctggcacggcaccacgatcttgacggtccgcaagggcggcagggtggtggtcggaggcgacggccaggtctcgatcggccagaccgtcatcaagtccaacgccaagaaagtccgcaagctcggcaagggcgacgtcattggcggctttgccggcgccaccgccgacgccttcaccctgttcgagcggctggagtccaagctcgagcaatatccggggcaactgacccgggcggccgtggagctcgccaaggactggcgcaccgaccgttacctgcggcggctggaggcgatgatgatcgtcgccgacaaggacgtctccctggtgctgacgggcaccggcgacgtgctcgagcccgaggctggcgtgatggcgatcggctccggcggcaattacgcgctggccgcggctcgggccctgctcgacaccgacaaggacgccgagaccatcgtccgccgctccctcgacatcgccgccgacatctgcgtctacaccaaccggaatctgaccatcgagagcctggcaacggggtag

SEQ ID NO: 4152 - DNA, 483 bp, BradyrhizobiumColbertium
atgattcaaagctacaccttccgcccgatgaccttggccgacatgccgctgatccggcgctggctggacgcccagcatgtcgccgaatggtggcacgatccggagacgctcgaattcatcggcggcgacctcgatcaccccgacctcgcgcagttcatcgtcagccacaacgatcggcccttggcctatctgcagtgctaccagctcggcgaatggcacgtcagcttcggtccgcacccggctggcacgcgtggcctcgaccagttcatcggcgaggctgacatgctcggatgcggtcacggctccgctttcatccgcgccttcatcgaccatctcttcgcgcgcgacgtgccgcgcatcgtgatagacccgagtccgtccaatacacgcgcgattcgtgcctatgagaaagctggattcgtgccgaagcacgagatcgtcacgccggatggtcccgcgctcctgatgatccgggacccatga

SEQ ID NO: 4153 - DNA, 618 bp, BradyrhizobiumColbertium
atgacgctcgccgcaagccccgccgccaggaccgcatttccgccgctcgcctgggtcggcatcgcgctgctgctgctggcgctgcaggcctcgatcctgctcttgatgggacgcgtgccgatctgcacctgcggcaccatcaagctgtggcacggcgtggtgaacagctcggagaattcgcagcacgtcgcggactggtacacattctcgcacgtcctgcatggcttcctgttctacggcctgacctggctgctgttcgtgcggctgccgttcctgcccttgtcctggcccgtccggctgatcatcgccatgctgatcgagggagcctgggagatcgtcgagaactcacctttcatcatcgagcgctatcgcgccggcacgatctcgctggattattacggcgacagcatcgtcaattcggtctcggacaatctggccatgatcctggggttccttgccgcccgcgcgctgcctgccagtgcgaccgtcctgcttggacttgccttcgagatggtgctggcgctccacattcgcgacaatctgacgctcaacatcctgatgttggtccatccgatcgaggctgtgaagcaatggcaatccgggcccccgatcatctga

SEQ ID NO: 4154 - DNA, 1305 bp, BradyrhizobiumColbertium
atgacagacttctccccccgcgaaatcgtttccgaactcgaccgtttcatcgtcggccagggcgacgccaagcgcgccgtctcgatcgcgctgcgcaaccgctggcggcgccagcagctcaccggctcgcttcgcgaggaggtgctgccgaagaacatcctgatgatcgggccgaccggcgtcggcaagaccgagatcgcgcggcgactggccaagctcgcgaacgcaccgttcctgaaggtggaagcgaccaagttcaccgaggtcggctatgtcgggcgcgatgtcgagcagatcatccgcgatctcgtcgaggtcgcgatcgcgcaggtgcgcgagcgcaagcgcaaggacgtgcaggcgcgcgcccagcttgccgccgaggagcgcgtgctcgacgcgctggtcggcgccaacgcgagctccgccacgcgcgagtccttccgcaagaagctccgcgccggcgagctcaacgacaaggagatcgagatcgagacgcaatcgtccggcggcggcatgccgatgttcgagattccgggcatgccgggcgcgcagatgggcgccatctcgatcggcgacatcttcggcaagctcggcggccgcagcaagacacgacggctgacggtggaaagctcgcatgagatcctggtgaacgaggaatccgacaagctgctggacaccgagcagctcacgctggaggccatcagcgcggtcgagaacaacgggatcgtgttcctcgacgagatcgacaagatctgcgctcgcgacggccgcgtcggcggcgacgtctcgcgcgagggcgtgcaacgcgacctcctgccgctgatcgagggcaccacggtctcgaccaagcacggcgcggtcaagaccgaccacatcctgtttatcgcctccggcgccttccacgtcgcaaagccgtccgacctgttgccggaattgcaggggcgcctgccgatccgggtcgagctgcaggcgctgacccgcgacgacatgcgccgcatcctgaccgagcccgaggcctcgctgatcaagcaatatgtcgccttgatgcagacggaaggcgtgacgctcgacatcaccgacgccgcgatcgacgcgctcgccgacgtcgcggtcgccgtcaactccacggtcgagaacatcggggcgcggcggctgcagaccgtgatggagcgggtgctggacgagatctccttcaccgctccggaccgcagcggcgagacggtcaaggtggatgccgatttcgtgcagaggcacgtcggcgacctcgccaagaacgcggacctgagccggttcattttgtga

SEQ ID NO: 4155 - DNA, 1125 bp, BradyrhizobiumColbertium
gtgaccgtacccatcgtgcaaaatccgtggcggcttctgctcgcgattaacgcggcggtcatcgttggcgtcttcatccacaagatacagctgccaccttacgtcccctatatccacctcctcgttgactatcatttcggcttcatcaagcgcgcgctgatcggcgcagtggtcgcgctattcaccgacaaggtgccggtctggctggtgttcgcgctcggcggggcgacgtggctggtgacgctcgggctatatgccaagctgttccagaagaccttcggcttcaccgcaggaacgctgccgctgttcgtcttcaccgcgggctcgccgttctttttgaagaacttcatgcacaccctcggccatttcgacatctttggctgcgcgctggcgatcgtcctgctgctgatgccggcgggctcgctgctgttcgtggcgacggccgcgctgttctctatcgttctcgtcctgatccaccacattcatctcctgatgtatgtgccggcgatcgtcaccatcgtcgtgatcaggcattatctcgcctgcggctgcaatcgcaggaacgtcgcgttcggcgcgaccgcgctcgccgtcgcgtcagcactcttctttgcggcgcagttcctggggacaatgccggtccccgaagcggacttcgtcgggtatctgaaaacccggatggtcgatccgtcgcgaaccgacctgctgcagttcagctacatctggtaccagccactcgcgaaggagatcgccgacacgtggggccgcctgccgcacaacattctcggcgtgccggtgttcgccctgctgatctggctgcacacgccgctgtggcgctatcttgcgcgcctgatcggcgcgctcgcgagcgagacacaccgccgcctcgtcgtcgcggcgctgatcggcatcggcctcgcctatgtcgtgatgttcgcgatggtgttcgactattcgcgctggatctcgaactgggcggtctgcatgttcctgatcctgcatgcggtgaagatgctgccggcaaagcaggaagctgcgctgatcccggcggaggaccggaagacgagcatcttcggagtgatcatcacgctgatcccgcgcgtcggaatcatccggccgttctag

SEQ ID NO: 4156 - DNA, 591 bp, BradyrhizobiumColbertium
atgaaacggtcgtcccgtccgcccgcgctggagcctcgcccctcgccgcgtcgccgcgcgctgagcgaggaggatcgcgagctgtgggacctcgtggcaaagcaggtcaagccgctgaagaagcaccgcgctgcaaaggcgcatgccgcgccgcgcgccgaattgccgcccaccgcgcctgccaagcgatccgcgtcgtcgccacggtcggtcgccgcggccccggcgccgcgcctgccaaaaccgtctgtcccgccgcttgcgccgatcggcaagcgcgagcggacaaggctgtcgcgcggccgcagcgagatcgaggcgcggctcgatctgcacggcatgacgcagatgcgtgcccatcgcgccttgtccggctttctccaccgcgcccatcatgatggcctgaccttcgtgctcgtcatcaccggcaagggccgcagcggcggcgaaagcggcgtgctgcgccgtcaggtgccggaatggctcagcctgccggaattccgcgccttcgtcgtcggcttcgagcaagccgcgatcggccatggcggcgagggcgcgctgtatgtgcggatccggcgggcgaggatctag

SEQ ID NO: 4157 - DNA, 1542 bp, BradyrhizobiumColbertium
ttggcaccggaagcgcgaattaagatctttctgaagaccagcgcgacggcgctttgcgcaggtgctgtcgcgctgtcagcgttttcgctcggcgccgaggcggcgcgtcgccaccatcgcagccatcaccatcaccatcaccatcatcttccgcgaatgcccgccgctccgccgcgggccttgccctatccgcagctgcccctgccgttggagattcccggcgcgcaatatctgccgctggcctggacggacgtgaagggttgggacgacgataatcatctcgccgcctacaagaccttccgcgccagctgccgcccgatcaacgcgcagaacggcgcggccgagcccaaggccctgggcaactcgctcagcgagccttgccgggctgccaaaacgctcgacctcgccgacgacggcaaagcgaagaccttcttcgaggagaatttcgcaccggtacggatctcgcgcctcggcgagccggatggtttcgtcaccggctattacgagccggtgctggagggatcgcgcacccagaccgacgtctacaacgtgccggtctatcgccgtccatccaatctgttcgtgcgcggctacaagcaggattcgctcagcctgcccaacaagggcccggtctatcgcaagatcggccgccgcaagctggtgccgtactacgaccgcggcgagatcgaggacggcaagatcgccggccgcgggctggagattgcctggctgaaggacccgaccgatctcctgttcgcccagatccagggctcggcgcggatcaggttcgacgacggcagctcggttcggctcaattacgatgcctataacggttatccctacacggccgtcggccgcatcctgatcgagcgcggcatcatcccgaaagaggagatgtcgatgcagaagatcagggaatggatggcgcaaaaccctgacggcgccaaggagctgcgccgcgccaaccgcgcctacatcttcttccgcgaggtcaacctgtccgacaaggacgaggcggtgggcgcgcagggcattccgctgacggcgggacgctcgatcgcggtcgacaaggcgctgcacgtttacggcacgccgttcttcatcgagggcgagctgccgatcgagtccgaccgcgccaagaccccgttccgccggctgatgatcgcgcaggacactggctccgccatcatcgggcccgcgcgcgccgatctgtttttcggcgccggcgcggaagccggccgcatttccggccggctgcgccatcccatgcaattcgtgatgctggtgccgaagagcctcgatcctgccccgcgcgccgcgaagctgccggtcccggacccccggccctccgagaagattgcgaagctgtttccgcaaaccctcccggccaaggcggcaacgcctgcggccgccgggtcccaggacaagaacgaaacggttgccatcgccggtcccgtcccgctaccggtgccgcgtcccgccatcgagtcggctccagagccgcgccggcccgtgaagaatcgcccgcatcggcagcaatga

SEQ ID NO: 4158 - DNA, 708 bp, BradyrhizobiumColbertium
gtggacatctacaccatcatattcctggcgctggcagtctttatctttctgagactgcgtagcgtgctggggcagcgcaccggcaacgaacggccaccgttcgatcgtaccgccgcccgcaatgcgctggggggtgcccaggacaacaacgtcgtgaccatgccgggcaaggtgatcgatcaggccccgctggcgccaacggccgagccgaccccgcccgccgatcggtggaaggggctggccgagccgggtactgcgctggcacagggcctcgacgccatcgtcgagagggattccagcttcgatccgcgccatttcatctcgggtgcccgcggcgcctatgagatgatcgtgctggccttcgccaatggcgaccgccgcgcgctccgcgacctgctgtcgccggacgtctatgaaagcttcgacgccgcgatcaaggaacgcgagaagaacgagcagaagacggagacgcgcttcgtctctatcgacaaggccgagctcgtcggcgccgagatgcgcgaccgcactgcccagctcaccgtgcgcttcgtttcgcagatgatctcggccacccgcgacaaggccggcaacatcgtggacggcagcgccgacacggtcgccgacatcaccgacatctggactttcgcccgcgacacctcctctcgcgatccgaactggaagctggttggcaccggaagcgcgaattaa

SEQ ID NO: 4159 - DNA, 486 bp, BradyrhizobiumColbertium
atgaccaacggtaacggcacccctcccgaggcggcccaggctccccagctcaatgtgctggcgcaatacactaaggacctctcattcgaaaatcccaacgcgccgagctcgctccagcagcagaaccagccgccgcagatcaatatccagatcaacgtcagcgccaacaatctcagcgaacaggagttcgaggtgacgttgtcgatcgagggcaaggccgaggccgcggccaaggtgatgttctccttcgagctcgcctatgccggcgtgttccggatcgccaacgtgccgaaggagaacctgcacccgctggtcatgatcgagtgcccgcgcctcttgttcccgtttgcacgcgagatcatcgcgaccgcggtgcgggacggcgggttcccgccgctgatgctggacccggtcgacttcgtcggtctctatcgccagaacatggagcggcaaatggccgctcagggtcaagccggtcaggcctga

SEQ ID NO: 4160 - DNA, 723 bp, BradyrhizobiumColbertium
atgcgcgaaatcgtcctcgataccgaaaccaccggcctcgatccgctccgcggcgatcgcctggtcgaaatcggctgcgtcgagatcttcaaccgcatgccgacgggacagagcttccacgtctacatcaaccctgaacgggacatgccggcggaagccttcgcggtgcacggattatcgtccgaattcctggcgacgaagccgctattccacgagattgccgacgagtttctggagttcatcggcgacgcgccgctggtgatccacaacgcctcgttcgacatcgccttcatcaatgccgagcttgaccgcatcaagcgtgccgcaatcccgcgcgagcggctggtggacacgctgctgttggcgcggcgcaagcatcccggcgtgtccaaccggctcgacgatctctgctcgcgctatgcgatcgacaattcgcaccgcaccaagcacggtgcgctgctggacgccgagctgctggctgaagtctatgtcgatctggtcggggcgcggcagtcgcagctgctgctggctgcggaaggcgaggagatccgggtcgccagcgcgggcgatgcgccgcggcggcagcgtctggtgccgctcgcgccgcgcattacggaagccgagcgcgaagcccatcgggccttcatcgcaaccctcggcgacaaggcgatctggaacgagtacctgcccgctccagccgcggcggtcgccgctcaggcctga

SEQ ID NO: 4161 - DNA, 600 bp, BradyrhizobiumColbertium
atgcggattctcggactgaccggctcgatcgggatggggaaatcgaccaccgcgaaattattcgcagaggccggcgtccccgtctacgatgccgatgccgctgtccatcagctctatgagggcgaggcggcgcccgcgatcgaggccgctttccccggcaccaccgcgaacggcaaggtcgaccgacaaaaactgtcggcgcgcgtcgtccatgatcccgccgcgatcaagcagctcgagcagatcgttcatccgatgctgggtgcttccaggcagaaattcttcgccgatgccgagaccgccaacgcgccggtcgtggtgctggacatcccgctgctgttcgagaccggcggagagaagcgggtcgacgccgtcgtcgtggtctccacctcgcccgaactccagcgtcagcgggtgctcgcgcgcgggacgatggacgaggcaaagctggacgccatcatcgccaagcagatgccggacgccgagaagcgaaagcgcgccgatttcgtggtggatagctcacacggacttgaaccggtgcgggcgcagatcgcgcacatcctggcggaggtcgttaagatgccgcagcggcgagcctga

SEQ ID NO: 4162 - DNA, 609 bp, BradyrhizobiumColbertium
atgggtctgtggcgcggcacatctccgttgatcctggcctcgcagagcagcgctcgcaagatgctgctgggcaatgctggcctcgaattcaaggcgatcacggctgatatcgacgagcgcggcattcaagctgcgtccaggctgtcgaacccgcgcgagattggcctgctgctggcgggcgagaaagccaaggcggtttcggcgggtcatcccgggagctacgtgatcggcgccgatcagacgctggctcttggaacgcgtctcttcaacaagccttcgggccgcgcacaagcgctggcgcaattgcgcgatcttgccggaaagacccacgagctgaatgccgctgtggccgtcgcgcgtgacggcacgatcgttttcgaggatgtctcggtcgcccgcatgagcatgcgagagatgaccgatgccgagctttcggcttatctcgacgctgccggcgatgccgtcacgaccagtgttggggcgtatcagctcgaaagtctcggcatccacctgttcgaacggatcgagggcgatcatttcaccattctcggcctgccgctgctgtcgctgcttgcgttcctgcgccgcgaacggctagttgcggtgtga

SEQ ID NO: 4163 - DNA, 840 bp, BradyrhizobiumColbertium
gtgccgacctcgaacaattatttccatctgcatctggtctcggactccacgggagagacgctcatcaccgtggcgcgggcggttgcggcccagtacgccaacgtgacgccggtcgagcatgtttatccgctggtgcgcagccagaagcagctcgaccgcgtgctcgatgagatcgaggaggcgccggggatcgtcctgttcacgctgctcgagaaggatctggtctccaggctcgaggacaagtgcaaggagatcaatgttcccagcctgtcgatcatcggcccggtcatgcagctgttcgaagcctatctcggggccgcgaccaccggtcgtgtgggcgcccagcacgtcctcaatgcggaatatttcaagcggatcgacgctttgaattacacgatgatccatgacgatggtcagcatgtcgaaggtctcgacgaggccgacgtggtgttggtcggtgtgtcccgcacctcgaagacgccgacatcgatctatcttgccaatcgcggcattcgcactgccaacgtgcccctggttccaggcattccggtaccctcgcaactggaaacattgacgcgaccgctggtggtcagcctgcatgcgacgccggaacgcctgatccagatcaggcagaatcgcctgctttccatgggcgccgattccggcagcgacacttataccgacaagcagtcggttaccgaggaggtcgcgttcgcgcgcaagctgagtgccaagcacgactggccgttgctggatgtcacgcgccgctcgatcgaggagactgcggcggcgatcatgaagctctacagtgatcgccagcgcaaccggccctccgagtaa

SEQ ID NO: 4164 - DNA, 258 bp, BradyrhizobiumColbertium
gtggtttgtggatttctgtggagcttaacccctcgtaaaggggtgtgcgacaccaggggcgggacaacggccaattttcttcacaccgctgcccatcggaacaagttcggcgccctgccgagatggaagcgggattgcgcggacaactctcttgataagctgccgacaggcgggagcaaggtcttgagtccgaccggcttatcggaaatcgccggcgcgatccgggatatgtggatggatgtgaaaaagcacgcgtga

SEQ ID NO: 4165 - DNA, 435 bp, BradyrhizobiumColbertium
atgttcgaagacgtctatctctggatcaaggcgctgcacgtgatcgcggtcatcgcctggatggccggcatgctctatctgccgcggctgttcgtctaccattgcgaggccgagatcggctcgaagcagtcggagacgttcaagatcatggagcgtcggctgctgaaggcgatcatcaaccccgcgatgatcgtcacctggcttgccgggctctatctcgcctggtccggccattggttctcgttcggctggctgcacgtaaaactggcactggtcctcgcgctgtccgcggttcacggctttttttcgcgctggctgaaggatttcgccgccgaccgtcgcccgcgaagccagaaattctatcgaataatcaatgaggtgccgactgttctgatgattttcatcgtcatcatggtgatcgtgaagccgttctag

SEQ ID NO: 4166 - DNA, 1266 bp, BradyrhizobiumColbertium
atgcgggaaattaaacttcaggacctcaagtcgaagaccccggctgagcttgtctcgttcgcggaagagaatggggtcgagaacgccagcaccatgcgcaagcaggagctgctgttcgccatcctcaagcagctttcgctggccgagaccgatatcgtcggcgagggcgtcgtcgaggttctctccgacggtttcggcttcctccgctcgcccgacgcgaattatctgcccggcccggacgacatctacgtttcgccctcgcagatccgccgcttcggcctgcgcaccggcgacaccatcgaaggccatatccgcagcccgaaagagggcgagcgctatttcgcgctgctgaaggtcaacacgctcaacttcgaggacccggaaaaggccaagcacaaggtcaatttcgacaacctcacgccgctgtttccgaatcagcgttttcgcatggagatcgatgatcccacgaggaaagacctgtctgcccgcgtgatcgacatcgtcgcaccgatcggcaagggccagcgcgctctgatcgtggcgccgccgcgcaccggcaagaccgtgctgatgcagaacatcgcgcattcgatcacgcataaccatcccgagtgctatctgatcgtgctgctgatcgacgagcgtccggaagaagtcacggacatgcagcgctcggtgaagggcgaggtcgtgtcctcgaccttcgatgagccggcggtgcgtcacgtccaggtcgccgagatggtgatcgaaaaagcaaaacgcctggtcgagcatggccgcgacgtcgtgatcctgctcgattcgatcacgcgcctcggccgtgcctacaacaccgtggtgccgtcgtcgggcaaggtgctgaccggcggtgtcgatgccaacgcgctgcagcgcccgaagcgcttcttcggtgccgcccgtaacatcgaggagggcggctcgctgaccatcatcgcgaccgcgctggttgataccggcagccgcatggacgaagtcatcttcgaagagttcaagggcaccggcaactcggaactgatcctggaccgcaaggtctcggacaagcgcaccttcccggcgatcgatatctcgcgctccggcacccgcaaggaggaactcatcaccgatccgcaggtgctcaagaagatgtacgttctccgccgcatcctcaatccgatgggcacgatggacgcgatcgacttcctgctcgacaagctgcgctcgaccaagagcaattcggagttcttcgattccatgaacacctga

SEQ ID NO: 4167 - DNA, 1359 bp, BradyrhizobiumColbertium
atgcatccgcgtgaccagacgatctttgcgctctcatccgggcgggcgcccagcgcgatcgcggtggtacgcgtctcgggcgcacaagctggctcggtgttgacgacgcttgctggcaacccgccgccgccgcgacaggcgagccggaggttgcttcggggcggttcgggccagccgatcgacgatgccgtcgtgctctggtttccgggaccggcaagtgcgaccggcgaggatgtcgccgaatttcatgttcatggcggacgcgcggtgctcgcggcgctcctcggcgagatttgcaaaattccgaatacgagggcggctgagcctggagagttcacgcggcgcgccttcgagaacggaaagctcgatctgaccgaggccgagggcctcgatgacctcatccatgccgacaccgatcgccagcgccgccaggcgctgcgccagctgcagggcctcctcggcaatcgcgcgcgtgactggcgcgagcgcatcatcgaggcctcggcgctgatcgaggcgggcatcgatttttccgatgagggcgatgtgcccgccgagttgagggccccggcggtcaaggcgatcaaggcgctgcatgacgaaatcgcagaagtgcttgcggcgcagggacattctgaacgcttgcgcgaaggccttgtggttgccatcgccggcgagccgaatgtcggcaagtcgacgctgatcaaccagctcgcgcgtcgtgaggttgcgatcgtctcgccgtatgccggcacgacgcgcgacgtcatcgaggtgcagctcgacctcgacggctatcccgtcacggtgatcgataccgccggcatccgcgagaccgatgatcccgtcgagcaggaaggtgtgcgccgggcgcgggcgcgggccgcggacgccgatctcgtgctgtggctggtggagggggggcgagcgggcgatccggacgcgatgcgcccgcttcggagatccggcgccgatgatccgtcgtccggcggcgcggtctggatcgtccgcaacaagatcgatctcggcaggaaccaaggcgccatcgcaccgggtgagttcgctatctccgccagtcgaggcgacggcatcgccgagctggtcgaagccctcgtgaaattcgccgccagattcttcggaatgagcgagggcgcattggtcacccgggcgcgtcagcgcgatcttctgcagcaggcgctagacagcttgcaccgcagtctggaccttgtagaacacggcgaggagctcgcggccgaagagctgcgggccgccgcctttgccttgggccggctcttgggccgggtggatgtcgaagacgtccttggcgccatcttccagaagttctgtatcggaaagtag

SEQ ID NO: 4168 - DNA, 516 bp, BradyrhizobiumColbertium
atgcgttaccagagcggtcaaggcgcccatccgggccgaagcggccgcagcttcacagccggcgtggccgccgccaatcacgatgacgtcgaaacttgctcgctctgttcgcataggggacttctagctcaggggcggaaaagcgggaagcggaaactggaagcggctgtttcacgtgaaacacgagccacgcgggtggcggatgttttcgcgaaaacaaccccatgcacagtagagggagcctcgggaaacccggtgtttcacgtgaaacgaaagagggcgtcattgcgagcgcagcgaagcaatccggatcctccgatcctccgcaccgagaagctggactgctttctcgcaaaggctgcgcgcaatgacgagcatcgaggagtgaatggagcgctgccgatgccacctaggccagtcgatctcctcaagtcgattgcagaccacatcctcgtgtttcacgtgaaacagagccgccccggttggcaagatgacggcgttccacctagcacgtga

SEQ ID NO: 4169 - DNA, 1788 bp, BradyrhizobiumColbertium
ttgaccgctctggtaacgcatcgtttctccaccgttggcgcaatgtcctgcaatccggccatcggcggcttgggcaaggggcatctggtccgcgaagttgatgcgctcgatggtctgatgggccgtgtcggtgacgccggcggcatccagttcagggtgctcaaccgccggaagggtccggccgtccgcggtccccgggcccaggcggacagaaagctttatgcggctgccatgcaagccgccatcttggagaccgagggtctttccgtcattgagggggaagccgacgagctgattacggccgacggccgggtgaccggactgcgcctggctgatggccgcgagctccgggcaggggccgtcgtagtcaccacagggaccttcctccgcggtctgatccatctgggagaaaagaactggcccgcaggtcgggttggcgaggcgccggcgatgggtctttccggctcctttgagcgcgccggctttacactcggacgcctcaagaccgggacgccgccgcgcctcgacggcaccacgatcgactggtctgcagtcgagatgcagcccggagacgatccgccagagccgttctcggtgatgaccgaacggatcacgactccgcaaatccagtgtggcatcacccggaccacagccgtcacccacgaggtgatccgggccaatgtgcatcgatccccgatgtattccgggcagatcaagagctccggtccgcgctattgtccttcgatcgaggacaagatcgtccgctttggcgatcgggatggccatcagatcttcctggagccggaagggctcgacgacagcacggtctatcccaacggcatctcgacatcgcttcccgaggaagttcagctcgcgatcctcgccagcattcccggtctggagcgggtgaagatggtccgcccgggctatgccatcgagtacgaccacatcgatccccgcgagctcgatccgaccctgcagaccaagcggctgcgcggcctgttcctggccgggcagatcaatggcaccaccgggtacgaggaggccgccgggcagggcatcgtggccggcctgaatgcggccttgtccgccagtggggccgcactgacggtgttcgaccgggctgacggctatcttggcgtgatgatcgatgacctcgtcacccgcgggatcagtgagccctatcggatgttcacctccagggccgagtatcgtttgacgctacgggccgacaatgcggaccagcgtctgacagagaagggcatcgccttgggatgtgtcggcagggctcgaacccggcaccaccgcaccaagatggacgccctgaatgcggcccgagcactgtcgaagtctctgaccatcaccccgaacgaggcgatcaagcacggcctttcactcaatcgggacggccaacgccgctccgccttcgagctgatggcgtatcccgagatcggctggagccaagtccgcgcgatctggccggagctggccgcggttgatccggttatcgccacgcatctcgagatcgacgccaagtacgacgtctatctggagcgccagagtgccgacgttgaggccttccggcgcgacgaggggttggttctgtcggaggtcgattaccagatggtccccggtctctccaacgaggtccgtgggaagctggagaaggcgcgcccgttcacggtcggccaagctggccggatcgatggtatgacgccggcggcgctcggtatccttgcggcgtatctccgccgtgaagctcggaagaattccaaggcaatcgcatag

SEQ ID NO: 4170 - DNA, 774 bp, BradyrhizobiumColbertium
gtgaaacagcgcggaccgggtggggaacgaccgctctcgcggcggccaacggcaggcgagggcgccggtgggcacgctgagccaggaccgcccagaccgaagatcgagaaggccagcgccaacgatcgatcgctcgacgcgatcatcgcggccgacaaggtcgccgcgctcaagctcgcgcctgtttcacatgaaacagaggtccgcctcgatcgctacatcgcgctgctccgcgagtggcaatccaagaccaatctgatcgcgccttcgacactgccaaacctctggacacggcacatcgccgactcccttcagctcgtcgatctcgcgccgaccgcaagacgctgggccgacctcggcagcggcggcggttttccaggcgtggtcctagcctgtgtgatggcgggcaagccgggcgcgagcgtccacctcgtcgagcgaatcgcgaagaaggctgcctttttgcgcgaagcgatccgcgtcaccacatctccgggagtcgtacatctcgctgagatcggggataatgtggatagaatcaccggccccgtcgattgcgtcaccgcgcgtgcactggctccgctacatcaactcatcggctttgcggagcccctcatgcgcaaaggcgcaaaggcattgtttccgaaaggtcaagatgtagaggctgaattgaccgaagccactaaatattggagtatccagcccaagctgcatccaagccgaactggggacgggtggatcgtggagctgacgtccgccgaacggcaaggctga

SEQ ID NO: 4171 - DNA, 870 bp, BradyrhizobiumColbertium
atgagcgtgattgacgaaccaggccaagaacagtcggcccaggacaaggcagcggaggtcccgcacggccacccgcgcatccttgcgctggcgaatcaaaagggcggcgtgggaaagacaaccacagcgatcaatcttggcacggcgctcgctgcaatcggcgagcgcgtcctgatcgtcgacctcgatccccagggcaacgcctcgaccgggctcggcatcgaccgccgcaaccgctccctctcgacctatgacgtgctggtcggcgaagccgccttgcgcgaagcggtggtctcgaccgcggtgccgcggctgcacatcgcgccttcgaccatggacctctccggcctcgagctcgagcttggcaccacacccggccgcgccttcaagctgcgcgatgcgatcggcgcgctgaacaacaacgtctcgccggacgccgactacacctatgttctgatcgactgcccgccttcgctcaacctgctcaccgtcaacgcgatggctgcgtcggatgcgatcctggtgccgctgcaatgcgagttcttcgcgctcgaaggtctgtcgcaactcttgcagaccgttgagcaggtgcgctcgacgctcaacccgaacctgtcgatccacggcatcgtgctgaccatgttcgactcgcgcaacaacctctcgaaccaggtcgtcgccgatgtgcgccagttcatgggcgagaaggtctacaagaccatgatcccgcgcaacgtgcgcatctcggaggcgccgtcctacggcaagccggtgctggtctacgatctcaaatgcgtcggcagcgaagcttacctgcggcttgcgaccgaggtgatccagcgcgagcgcgagctgcgaacgacgcattga

SEQ ID NO: 4172 - DNA, 888 bp, BradyrhizobiumColbertium
atggccgacgaagcgcgttcgcgactgggccgaggtcttgcgagtctgatcggtgatgtcggcggcgaggctcagcatgtcgatcgtccgcgcgcgcagcgcaaggtgccgatcgaattcatcaagcccaacccgcgcaatccgcgccgtaccttttcggacaccgagctgaaggagctcagcgattcgatcaagcagcacggcgtgatccagccgatcgtggtgcgcccggtgaagggcgtgcatgaccgctacgagatcatcgccggcgagcggcgctggcgcgcctcgcagatggccggtctccatgaggtgccgatcgtccccgtcgatatcagcgacagcgatgcgctggagttcgcaatcatcgagaacgtgcagcgcgaggatctcaacccaatggaggaggcgcagggctatcacgcactcgccaacgagttcaaacgcagccaggaggacatcgccaaggtcgtcggcaagagccgcagccacgtcgccaacatgatgcggctgacgaagctgccggccgaggtgcaggccttcatcgcaaccggcgagctgaccgcgggtcacgcccgtgcgctgatcggcgtgccggatccgctcgcggccgccaagcgcatcgtcgaagagggcctcaacgttcgccaggccgaggcgctggcgcatgaagagggtgtgcccgagcgcaagccgcagaaggcgcgcgccagcggtggcaaggaaaaggatcctgacacgatcgatctggagaagcgcgtcagcgacgcgctcgggctcaaggtcaccgtcaaccaccgcgatcccggcggctccgtgcagatcaactaccgcaacctcgatcagctcgacgaggtgatgaagcggctggccaagggcgcgctgtag

SEQ ID NO: 4173 - DNA, 1044 bp, BradyrhizobiumColbertium
atgacgatctggaccatggtcgcattgcgcggaaaagagatcgacgctttcctcgcccgtcccgatgcgggccgccccatcatcctgctgtacggacccgatgccggcctcgtgcgcgagcgcgccgatgcgctgatcgcctcggccgtggacgatcccaacgatccgttttcgctggtcaagctcgatggcgacgagctctcggccgaaccctctcgcctcgtcgacgaggccatgacggtgccgctgttcggcggccgccgcgccatccgcgttcgcgccggttcgcgcagctttgccagcggaatcgagacgctggccgagatgagcgtgagggattgccgcatcgtgatcgaggccggcgagctccgtcccgaatcgccactgcgcaagacctgcgagaaggccaagaccgccgtggcgatcggctgctatcccgacaccgagcgcgatcttgcgaggctgatggaggacgaactccgcatcgccaatttgcgcatcgcgcaggatgcccgcgcggcgctgatgtcgttcctcggcggcgaccgccaggcctcgcgcaacgagttgcgcaagctgacgctctacgcccacggcaagggcgaggtgacgctggaggacgtgatggccgtggtcgccgacgcctccgagctgaagctcgacccgatcgtcgacggcgcctttgccggaaggcccgacatcgtcgaaagcgagttcgcaaaggccatgatcgccggcacctatcccggcgtgatcatctcggccgcacaacgccaggccgcgtggctgcacaagtctgcgctcgcgatcgccgacggtacgcctgcgtccgccgtgctcgacggcggcttcccgcgcctgcatttttcgcgaaagcccgcggtcgaaaccgcgctgcgcaatttcaccccagcccggcttgccgccatcatcgagcagctcgcaaccgctgcgctcgatacccgcaggcaatccacgctcgccgccgccatcgcccaacgcgcgctgatggcgatcgccgcgaatgcaaagcgccggggctag

SEQ ID NO: 4174 - DNA, 519 bp, BradyrhizobiumColbertium
ttgctggcggtcgccgccctggcggcgctgacggccggctgcttccagccgatgtacgccgagcggaacgacgggacccccggcctgcgcgagaagctgatgggggtcgagctgccccccatcaacaagcccaacgcgtcccgcgaagcccgcgtcggcgtcgagatccgcaacgcgctggccttcaagctttacggcacggcgaccggcatgccgccgacccaccggctggacatccgcttcaccaccacccgctcctcgctgatcgtcagcgccacgacgggactgccgaccagcgagaatctcggcatcgacgcccagtacaacctggtcgaagtcgtgaccggcaagtccgtcatgtccggctcgaccttctcgcgcgtgtcctacgacatgccgggatcttatcagcgcttctcgcgcacccgcgccgtgcgcgatgccgaagatcgcgccgccaacgagattgccgagaacatcacgacccgcctcgcctcgttcttcaccgcgggcacgtag

SEQ ID NO: 4175 - DNA, 2625 bp, BradyrhizobiumColbertium
atgacctccgaacgctataacgcccgcgacgccgaaccgcgctggcaacgcctctgggacgagcagaagatcttcgtctccaagaacgatgatccgcggccgaaatattacgtgcttgagatgttcccctatccctccgggcgcatccatatcggtcacgtccggaattacacgctgggcgacgtgctcgcccgcttcatgcgcgccaagggcttcaacgtgctgcatccgatgggttgggatgccttcggcctgccggcggagaatgccgcgatcgagcgcaaggtggcgcccaaggcatggacctacgacaacatcgccgcgatgaagaagcagctccgctccatcgggctgtcgctggactggtccagggagatcgcgacctgcgatccctcctactacaagcaccagcagaagatgtttctggacttcctgcgcgcggggcttgccgagcgcgagaagcgcaaggtgaactgggaccccgtcgacatgaccgtgctcgccaacgagcaggtgatcgacggccggggctggcgttcgggcgccgtggtcgagcagcgcgagatgaaccagtgggtcttcaagatcacgaagtactcgcaggagctcttgagcgcgctggacgggctggaccgctggcccgacaaggtgcggctgatgcagcgcaactggatcggccgctccgagggcctgctgatccgtttcgcgctcgatgcagcgacgacgccggcaggcgagagcgagctgaagatcttcaccacgcgccccgacacgctgttcggtgcgaagttcatggcgatctcggccgatcatccgctggcgcaggccgcagccgcgaagaaccccgagcttgccgagttcatcgcggagatcaagaagatcggcaccgcgcaggagatcatcgataccgcggagaagcagggtttcgacaccggcatccgcgcggtgcacccgttcgatcccagctggaagctgccggtctatgtcgccaatttcgtgctgatggaatacggcaccggcgccatcttcggctgcccggcgcacgaccagcgcgacctcgacttcgtcaacaagtacgacctcggcaacacgcctgtcgtgtgccctgaaggccaggatcccaagtccttcgtcatcaccgacaccgcctatgacggtgacggccgcatgatcaattcgcgcttcctcgacggcatgaccatcgagcaggccaaggaagaggtggcgaggcgtctcgagacggagctgcgcggcaatgcgccggtgggcgagcggcaggtcaatttccgcctgcgcgactggggcatttcgcgccagcgctattggggctgcccgattcccgtcatccactgtccgaaatgcgacgtggtgccggtgcctgatgccgacctgccggtgaagctgcccgacgatgcgaccttcgacaagcccggcaacgcgctcgaccaccatccgacctggaagcacgtcacctgcctcaaatgcggcggcaaggcgcagcgcgagaccgacaccatggacaccttcgtggattcgtcctggtacttcgcccgcttcaccgatccctggaacgagaatgcgccgacgacgcccgcggtggccaaccggatgctgccggtcgaccagtatatcggcggcgtcgagcacgcgatcctgcatctgctctacagccgcttcttcacccgcgcgatgaaggcgaccgggcacatcgcgctcgacgagccgttcgccggcatgttcacgcaaggcatggtggtgcacgagacctaccagaaggccgacggctcctatgtgcagccggccgaggtcaaggtcgaggttggcggcaacgggcgccgcgcgacgctgctggccaccggcgaagacatccagatcggtccgatcgagaagatgtcgaagtcgaagaagaataccgtcgaccccgacgacatcatcgagacctacggcgccgacgtcgcccgctggttcatgctgtcggactcaccgcccgaccgcgacgtgatctggagcgacgagcgcgtccagggcgcctcgcgcttcgtgcagcggctgtggcgcctggtgaacgattgcgtcgcgctcgccaaggccgcgccggcggcccggccggccagcttcggtccggacgccaccgccttgcgcaaggccgcccatggtgcgctcgacaaggtcaccaccgggatcgagcggctgcacttcaacgtctgcctcgcccatatccgcgaattcaccaatgcattctccgaggtgctgcagcgccccggccagcccgccccggacctcgcctgggcgatcggtgaagccagccagatcctggtccagctgttctccccgatgatgccgcatctggccgaggagtgctggcaggttctcggccagaaggggctggtttcggaggccaattggcccaaaatcgaacgcgatctgctggttgaagacagcgtgaccctggtggtccaggtcaacggcaagaagcggggtgaggtcacagttgcaacactggcccagaatccggaaatcgaggctgccgttttggccctcgatgcggtaaagctggccctggacggcaagcccgtccgcaaggtgatcatcgtccccaagaggatcgtgaatgttgtcggctag

SEQ ID NO: 4176 - DNA, 1077 bp, BradyrhizobiumColbertium
ttgcggctcgacaagaccgcgataccgcaaatgtattccagcttcgacgatcccgattacgactatgccgcgtccatcgctggacgtgcgatgcggagcatggctgaacagcggattgcgccgacgccggccaattttgccgtctggttccagtatttcgcaggcggtcatgacgatttgcgcaacgccattgatctcctgatcgatcacaatcggcccttcgacgcccgaaccaacaaggatctgttcgagacctacgtcgcgaaccaggtgagcgccgcggtggtcgacacctcggagcggctccaggcgctcatgggggccgcgaaggagtttctggcgactgcgattgccgacaatcattcgcagatgcaggccatcagtgaggtggcggatcagggcagggccggcgtcgatccaaaactgctggtggcccagctcatgaacgagctggcgcgggccgccacacgcgcgacccggctcgaggcgggctttgcggagaagacgcgcgagctcgacgtgatccgcgactcactgtcgaggtccgagcagcgcgcccggactgacatgctgaccgggctggcgaaccggagggcactcgacgaattcctgcgcaaggcgcaggcgaccgctgaatggggcgagccgctctgcgtcctgatgctggacatcgaccacttcaagtccttcaacgacaatttcggccacggcgtcggcgaccaggtgctgcgcctgatggccaaggtgctgcgcgagaaggttcgcgagcaggatctgccggcccgctatggcggcgaggagctgatcgcggtgctgccggacgccgatctcgcggcttgtgccgagatcgccgaacgcatcaggcgcgcgatcgccgaagccacgatcacgcgtcgctcgaccggcgagatcctgcccagcatcagcgtgtccatcggcgcggcgcaataccgcgtcggcgaggcgatcagcgatctgatcgagcgttgcgatcgcgcgctctatctcgccaagagcagcgggcgcaaccgtgtggtgacggagatcgaggtcgagcgcgcgggagctgccggctag

SEQ ID NO: 4177 - DNA, 1704 bp, BradyrhizobiumColbertium
atggccagcgtcagtctcaaccgcaagcgagcgaaactcaagcaggttctcggaatccgggcgcggcttgcgttgctcgcggtgattctcgtggcgcctttgatgttcgaccgcatccgttcgctcgaggacacgcgtacgcgccagatcgcgcaggccgcggctgagttcaccacggtggcgaggcatagcgccgatgcgcaacgcgaggtgatctcgtccgtcgagaccatcctgaaatcggaggctttcatccgcgcctccgtcggcggcatcagcaagagctgcgacgtgctgcgcgcgagcctgccgtcgagcctcccgtggatacgcacgcttctgatcgccggccaggacggtcgcatccaatgcgccaccaacaacatgtatgtcggcctcgatctgagtgaccggccgtacttccagcaggcacagcaaaccggccgcttcatactgagcgacttcatcatgtcgcgaccggtgctgtcgccgacggtgatggcggtttatccagtctccgccttcagcggcgtccccgatgccgtcgtgctcgccaccgtcaacctcgactggatgtcgaaggtcatgagcaatctgggcggccgccccggcatcaccgccgtgctggtcgacagcgcgggcaccgtgctggccgccccggccgatcagcgcagcgcggtcggccggcccctcgacaacatgccgctgatgtccgcgatcgccgacaaggcgcttcggtccgatcaagacgagggctcgctgtctttcctcgctgccgatggctctcgccgggcagtcagctacatccgcattgcggggaccaatgctcgcctgatcaccagcatcgacgaggacaaggtgtccgctgccgtcagccgcgacatccgtaccgcctatctgcagttcgctttcgtcgtggtgttcgtcctgctcggcgcgctgatcgcggcggagaaactcgtcatcaagccgatcgagatgctcgtcgacatggccaaacgtctcggcgagggcgacctgtcggcgcgcgcggcccgcaacagactgccggccgaattcgtgccgctggcgcgcgcgttcaacgcgatggccgcgcagctgagccagcgcgaacgcgagctgatcgcaagcaacgatcgcctgaccgtgatggcctcgatcgacatgctctccggcctcgccaatcgccgcggcttccagagccggctcgacttcgaatggatgcgtgcgcagcaatatggcagcgagcttgcgttgctgatgatcgacgtcgatcacttcaagctgttcaacgacacctatggccatctcgaaggcgattcctgcctgaccaggctcggcgaatcactgtccggcattgccgctgacacgatgggcttcgcggcacgctatggcggcgaggaattctgcctgctgctgccgaacacggacgtcatgcgtgccgtcgaaatcggcgaacaggtgcgcgcggccgtgctgaaactctgcctcccgcacatcacctcgaaccacatgatcgtcacggtctcgatcggcgtcgccgcgacgaagcccaatgagagcttgcggccaggcgatctgatcgaagccgccgacgccgcgctctatgccgccaagcaccgcggtcgcaacaacgtcgtggagcacggtgtgcaggcgatcgagactggcacgaccgaggtgatatttgcggccagcgcctag

SEQ ID NO: 4178 - DNA, 690 bp, BradyrhizobiumColbertium
atgacggaagccaacaccgcgccggtaaccggccattcaccaaacgcgcttgccgcggtcgaagccgaaatcgcgcgcgcctgcaaggacgcggggcgcgaccgcgcatccgtgacgctgattgcggtttccaagacgttcgtcgcggatgcgattaccccggtcatcgccgccggacagcgcgtattcggcgagaatcgggtgcaagaggccaaaggcaagtggccggcgctgacgtctgtttaccccgatatcgtgctgcatctgatcgggccgctgcaatccaacaaggcgaaagaggcggtcgcgctgttcgacgcgatccattcggtcgatcgtccgagcatttgccaagcgttagccaaggaaatcgaatcccagaacaagcacccgcaactcttcgtccagatcaataccggcgaggagctgcagaaggccggcgtcgcacccgacgaagccgatgcattcctcgcgagttgccgggacacctacgggctgacaatctccggcctgatgtgcatccccccggtggatgagccgccggccgggcactttgctctcaccgccaagattgccgcacgcaatggattgaagaatctctcgatgggcatgagcgcggacttcgccaccgccatcatgttgggtgccacccatgtgcgggtgggaagcgcgatcttcgggcaccggtga

SEQ ID NO: 4179 - DNA, 786 bp, BradyrhizobiumColbertium
atgctcgacaaggatcagatcgacgccgcttcagagctcctggtcaggcattggcgcgacggcaccaagctcgacgcgctggagacgcggttgcggccgcagagtcgcgctgaaggctacgccatccaggccgcgctcgaacgacgatcgagcgggacattgttcggctggaagatcgcagccacgagcgaggccggccagaagcacatcaacgtcacggggccgctggctgggcgcatcatgagcgacaccgtgatcgccgacggcgggaccgcatcgatgaagggcaacgagatgcgcgtcggtgaacctgaattcgccttccgcatggggcgcgatctgccgccgcgcgcgacgccctacagcgccgacgaggtgctcgccgccgtcgagaccctgcatcccgcgatcgagattcccgattcgcgctttgccgatttcgtcagcgcgggcgaggcgcagctcatcgccgacaacgcctgcgcgcatctgttcgtgctgggcgcgccgaccattgcgaactggcgggcgatggatctcgttgcggaacggccgcagatcgcactgcgcggcgagcgccatatcggccacggcaggaacgtgctcggcgatccccgcattgcgcttgcctggcttgccaacgagctgcgcgggctcggcatcaccttgcgggcaggggaggtggtgacgacgggcacatgccacccgccgctgccgatccagggcggcgatcatttcgccgcggatttcggcgtgctgggaaaggtgtcggtggggttcgtgtag

SEQ ID NO: 4180 - DNA, 450 bp, BradyrhizobiumColbertium
ttgaccatcccggttgcgctggggcggggcggtattctcgccaacaagcgcgagggcgatggcggcaccccgagaggcagcttccgtcccaggcggctgtggtggcggggcgaccggcacagccgcccccagacattcctgccgacccggatgatcacagcggcggatgcctggtgcgaggatccaggcgaccgtcactacaaccagagcatccggctcggcgagggacagggcggtgaccggctcaagcgggccgaccatctctacgactttatcgtcgagatcgaccacaacacccggccgcgcgtcgccggccggggcagcgcggtgttcctgcacctggcgcgcgataatttcggcccgaccgcgggctgcgtctccatgacgaaatctgcgatgttgcaattgctgcggcgcttgggcccgcgaacgagaatcatcatcgggtga

SEQ ID NO: 4181 - DNA, 687 bp, BradyrhizobiumColbertium
atgcccaacgcccgcaagatcctgatcgtggatgacgataccgatctgcgcgacacgctggtggagcaattatcgctgcacgaagaattcgaagcctccgccgtggataccggcgcgaagggcgcgagcgccgcgaaggcgaattctcccgatctcgtcctgatggacgtcggcctgcccgacaccgatggccgcgaagtggtccgctccctgcgcaagggcggcttcaaggccccgatcatcatgctgaccgggcacgacaccgattccgatacgatcttggggctggaatccggcgccaacgactatgtggccaagcccttccgcttcgcggttctgttggcccgcatccgcgcgcagctccgccagcacgaagccagcgaggacgcggtgttctcggtcggcccctactccttccgtcccggctccaagatgctgaccgcggccaatgcgcgcaaggtccggctcaccgagaaggagaccgcgattctccgcttcctctaccgcgccggccagatgccggtgtcgcgtgagaccctgctccaggaggtctggggctataattccggcgtcaccacccacacgctggaaacccacatctaccgtctgcgccagaagatcgagaaggacgcggccaacccggaaatcctggtcaccgaagccggtggatacaagctggtgccgtga

SEQ ID NO: 4182 - DNA, 444 bp, BradyrhizobiumColbertium
atgtcaatcgacgacgacgtagcgcttctcgagcgtgtcccgacactgcgcctgttgggggacgcctcgttgcgcatgctggcgatcggctccgagcagcgcgacttcgtccgcggtgacgtcctcttcaatctcggcgatgacgccgatgccggcttcgtggtccagcgcggcgccttcagggtcgaagacggtgccggtgccgaaatgatcgccgggcccggcgcactgatcggcgagctcgcgctggtggtgccgatgaagcggccatcgagcgcaatcgcgctggagcacgcctccgtcatccgcatcgcacgcagcctgttccagcgcgtgctcgaaagcgaccctgccgctgcggttcgccttcgcgacgagttcgcggtgcgttcgagtcaaatcgcgagtgatatcctcatggccggtgcgaagctgacgtcctga

SEQ ID NO: 4183 - DNA, 816 bp, BradyrhizobiumColbertium
atgcgactttccctgaccacctggaacatcaattcggtgcggctgcgcatcgacctggtcgcgaagttcttgaagagcgcgcggccggaggtgctgtgcctgcaggagaccaagtgcatcgatgacgcctttccgctgaagcgattcaagcggctcggctatgagcacgtggcgctgaacgggcagaagggctatcacggcgttgccatcgtctcgaagatcccgttcgagacgaaggacatccgcaccttctgcgacaaggttgattcgcgtcacatctcggtgtcgttcggcgagaaggccggcatcgcaaagccgctggtgctgcataatttctacgtgcccgccggcggcgacattcccgatcccgcgctgaacgagaagttcgatcacaagcttcgtttcctcgacgagatgaaggcgtgcgagccgctgcatccgcgcggcgaggaccgtcacatcctggtcggcgacctcaacgttgccccgcacgagaacgacgtctggtcgcacaagcagcttctgaaggtcgtctcgcacacgcctgtcgaaaccgagaagctgaaggcggcactcgaggcgggcgaatgggtcgacgtcgcgcgggagcgcatcccgatgtcggagaaggtctataagtgggggagctaccgctcccccgactggaccgtcggcgaccgcggccgccggctcgaccacatctgggtctcgcgggcgctgaaggactcggtgcaggattttagaattctgcgtgatgcgcggagctgggatcggccgtcggaccatgtcccggtcacggtgacgctcgatctatga

SEQ ID NO: 4184 - DNA, 912 bp, BradyrhizobiumColbertium
gtgaggcgaggcgcctctgaacatcatttcacgcagaatcgatatctgcttttgcccgaaatcacgctaaaagggcgcccagcaatacaggacgaggcgttgatcagacatccggacattcgatacgctgccttcatcgctgcgcgaagcgcgcgcgtggccggcgtgcttctcgtcaccgccgcgatggtgaccggtgcatcgttcgcgcaaaccgtgccggtgccgaagcccgcaccgaaaggccgcgaaggtgctccagccggcggtgggccaaccgtcaccggcgcgatgcaaacgccgccgaacccggtcatccccgatccgcgtcgcaacgtgccgagcagcatcttccagaccttcgacgccaatcagaaggcgcaggccgccaaggtcagcgcctatctgtcgtcgcttcagacgctggtcgggaatttcgtccaggtcggccccgacggcagcaagacgcagggagaattctacatccagaagcccggcaaggtgcgcttcgaatatgacgcgccgagcccgatcgacatcgtcgcggacggatcctcgctcgtggtgcgcgaccgcaagctcgcgacccaggacgtctatccgctgtcgcagacgccgctgcgcttcctgctgtccgaccgtatcgacctgatgaaggacaccaacgtcgtcaacgtctcggccgacgacgtctatgtcagcgtcaccatcgaggagaagcaggcgctggtcggcaccagccggctgctcctgatgttcggcgccaaggacggccagctcaagcagtggaccgtcaccgacccgcagggctacgacaccacgatcgcggtctacaatctggactcgagcaagaagctcgaccccggcatgttcaagatcgatttcaccaattacggaccatcgccgggttga

SEQ ID NO: 4185 - DNA, 2472 bp, BradyrhizobiumColbertium
atgtcggcaatcgaacgtgtcattccactggtcgggcatctgccgccctcgatccgagaggggctggcgcgtcgcatgcgcgagctcaccgggctcggcctgatcgcgctggcaggcgtcgcctcggccgcgctgatgacatggtcggtgcaggatcccagcctcagccatgccacctcgcggccaatccggaacatcctcggctatgccggcgcgatcggcgccgatcttgccatgcagatcctcgggctcggcgcgatcatgctggtcctgaccgtcgcggtctggggctggcggatgatgacgcatcgcccgttcgaccgcgaggcgttgcggctcggttcctggattctctgcacggtgatcgcagcgggcttcgccagctgctggcggcatggcggcgcctggccgctgccgaccggactcggcggcgtggtcggcgacgcgctggtgcgcgcaccggcggtgatcttcgggccggccggcaccatctaccgcatcgtgctgggcacgatcctgttcgtcgcgatgacggcgaccttcctgatcgcctgcggtctcggcgcgcgcgagcgtgacgaagagctctcggcgatcgaggacgaggacaagccgctcgacgaagacgaggagagcgatcgtggctcggtgtcgctgggctggctgttccatgccctgatgagcaccaaggctcggctgggctggctgcttggcgccgcttaccgctcactggtatcgagtggaccgaagaccaaggccacgcagttcagccgccaggagcccaatctgggcggtggccgcgccgcgccttccatctcgccgcagtccgaagacgaggacaccgaggacgagcacgaagaggaggaaggcgaggaggaggaagaggagcagcccgccgcgcgcgccccgcgcaagaaggcggcgccgaagactgcggccaagaagtcctccgacaagttcgaccttccgtccgtctccatgctggccgctccgaaggccggcgatcgccagccgctcagcaaggccgagcttgaggccaattcccgttcgctcgaaggcgtgctgcaggatttcggcgtgcgcggcgagatcgtgaaggccaatccgggccccgtggtcacgctgtacgaactggagccggcgcccggcatcaagtcctcgcgcgtgatcgggcttgccgacgacatcgcccgctcgatgagcgcgctgtccgcgcgcgtcgccgtcgtgcccggccgcaacgcgatcggcatcgagctgccgaacgcgcatcgcgagaaggtctatctgcgcgaattgctcgtcgcaaaggaggcgaccgacacggtggcaaagctgccgctgtgcctcggcaagaccatcggcggcgaccccgtcatcatcgacctcgcgcgcacgccgcacatgctgatcgccggcaccaccggctcgggcaagtcggttgccatcaacaccatgatcctcagcctggtctaccggctgcgtccggaccagtgccggctgatcatggtcgatccgaagatgctcgagctctccgtctatgacggcattccccatctgctcacgcccgtcgtgaccgatccgaagaaggcggttgtcgcgctgaaatgggccgtgcgcgagatggaagagcgttacaagaacatggccaagctcggcgtccgcaacatcgacggctacaacacgcgcctgctcgaattgaaggccaagggcgaggagccgacacgcacggtgcataccggcttcgacaaggaaaccggcaaggcgatctacgaggaagagaagctctcgctcgacccgctgccctatatcgtcatcatcgtcgacgagatggccgacctgatgatggtcgccggcaaggacatcgaaggcgcggtgcagcgtctggcgcagatggcgcgcgccgccggcctgcacgtcatcctcgccacgcagcgcccgtcggtcgacgtcatcaccggcaccatcaaggcgaacttcccgacccgcatcgccttccaggtcacctccaagatcgacagccgcaccatcctcggcgagatgggcgccgagcagctgctcggtcagggcgacatgctctacatggcgggcggtggccgcatcagccgcgtgcacggaccgtttgcctctgacgaggaagtcgagaaggtggtgcgtcatctcaagacgcagggacagccggaatatctcgaggcggttacggccgaagagcccaccgaggacgaggatggcgccgtgttcgacgccaccggcatgggcggcgatggcggcggcgatctgttccagcaggcggttgccatcgtcaagcgcgatcgcaaggcttcgaccagctacatccagcgccgcctgcagatcggctacaaccgcgccgcatcgctgatggagcgcatggaactggagggcatcgtcggtcccgccaaccacgccggcaagcgcgagatcctggtcgaggaagaagacagccatatgtga

SEQ ID NO: 4186 - DNA, 1215 bp, BradyrhizobiumColbertium
atggtcatgaccgcttcatcccgtgcgccgcaggccagtggaagctccgacagcgaacgctcgcccttcgtccggctgaacgagctgctggcgccgcatcagcccggcaagcctttgatttcgctcgcggtcggcgaaccccagcatcccgtgcccgacttcgtcggcccggtcctggccaagcacatcgcagatttcggccgttaccccgcgaacaagggcaccgacccgttccgcaaggctgcaggcgcctggctgtcgtcgcgcttcaagctgccgcgaccgctcgacccagaggacgagattctcgtcctcaatggcagccgcgaaggcctgttcctcgctgcgatcgcggctgcgcgatatgtcggcccgcgtcccggcaagcccgccatcctgatgccgaacccgttctatccggtctatggcgcaggcgccctcgcagcggcttgcgagccggttcatctgccgaccacggtcgagaacggcttcctgcccgacctcgacgccatcgacgagacgacgctggcgcgcacggtcgcgatctacctggcctcgcccgcaaatccgcaaggctcggtcgccaagcctgactatttcaggcgcttgaagcagctcgccgaccgctacggcttcgtgattctcagcgacgagtgctattccgagatctacacgcgcgaggccccgggcagcgcgctggaatgcgccggccccgactacacccgcgtggtcgcgttccagtcgctgtcgaagcgctccaacctgccgggcctgcgcgtcggcttcgccgccggcgacaagaggttcatcggcatgttcctcgagctgcgtaacatcgcagcgccccaggtgccggtgccgctccagcacgtggcgaccgtcgcctatggcgacgaggcgcatgtggaggagaaccgcaggctctatcggatcaagttcgatctcgccgaccagatcatcggcaatcgttacggctaccgccggcccgacgccggcttctgcgtctggctcaacacatccgcagtcggcgacgacgtgtcggtgacgctgagactcttcaaggaagcaggcgtgcgcgtggtgcccggcagctatctggcccgcgttcagcccgacggcttcaatccaggtgcgggctacatccggctcgcgctggtgcaggacggcgagaccacggcgcaggcgctgcaccgcctggtcgagactctgggttag

SEQ ID NO: 4187 - DNA, 1449 bp, BradyrhizobiumColbertium
atgacgttcaagcgtccccatggcgcgggattggcggctctcgcagtcggcctgttcgctgcgaccgcggcctatgccgagccaacggtcaacaagggagacaacgcctggatgatgacatcgacagtgctggtgctgttgatgacgatccccggcctcgcgctgttctacggcggtctcgtccgttccaagaacatgctctccgtcctgatgcaggtgttctacaccgtctgcgtcgtcaccgtgatctgggccgtgtacggctacagcctgaccttcaccggcggctccgacttcattggcggcttctccaaggcgttcatgatgggcgtcacccccgagacgaaggctgcgaccttctcggtcgacaccaacatcacggagctcatctatgtgtgcttccagatgaccttcgcggcgatcacgcccgccctcatcgtcggcgccttcgccgagcgcatgaagttcgccgcgatcgcgctgttcgtccccctctgggtcacgctggtgtatttcccgatcgcgcacatggtctggtactggcagggtccggacctgatccaggatgcggccaaggcgctcgctgccgccactgacgcggcggcaaagaccgcggcgcaggccaagctcgacgagctcaatgccgacgccggctggatcttcaagatgggcgcgatcgacttcgcgggcggcaccgtggtgcacatcaacgccggcatcgcgggcctcgtcggcgctctcctgatcggcaagcgcgtcggttacggcaaggagctgatggccccgcactcgctgaccatgtcgatgatcggcgcctcgctgctctgggtcggctggttcggcttcaacgccggctccaacctcgaagccagcggcggcgctgcactcgccatgaccaactccttcgtcgccaccgcagccgccgcgctgtcgtggatgttcgcggagtggatcgtcaagggtcatccttccgtgctcggcgtcatttccggcgcggtcgcgggcctcgttgccgtcacccctgcagcgggcttctccgggatcatgggagcaatcgtgctcggcctcgtggccggcgtggtctgcctgttcttctgcaccgtcgtgaagaacgcgctcggctacgatgactcgctcgacgtgttcggcgtgcactgcgtcggcggcatcgtcggcgccatcggcaccggcattctcgtcaaccccgcgctcggcggcgccggcatcatcgactactcggccatcccgccgaaggtcgccgattacgacttcgccacgcagatgctcgcccagatcaaggccgtcgtcaccacgctggtgtggtcgggcatcggttcggcgatcctctacaaggtggtcgatgtgatcgtcggtctgcgcaccaacatcgagagtgagcgcgaaggcctcgacatcaccgagcacaccgagcgcgcctacaacatgtaa

SEQ ID NO: 4188 - DNA, 327 bp, BradyrhizobiumColbertium
atggcgatcatcaagccattcaagctggaagaagtccgtgacgccctgaccgccatcggcgttcacggtctcacggtgacggaagtcaagggatatggccgccagaagggccatacggaaatctatcgcggcgccgaatacgccgtgagctttctgcccaagatcaagatcgaggtcgctgtcgcatccgaccaggtcgacaagaccatcgacgccatcacgtccgcggcgaaaaccggacagatcggcgacggcaagatcttcgtcatcaacctcgaccatgcggtgcgcatccgcaccggcgaggccgatgccgcggccctttga

SEQ ID NO: 4189 - DNA, 1302 bp, BradyrhizobiumColbertium
atggcgggatatttgcgccgcgcagctgccatggctgcgggaatcggatttgcgtcggctgcaacatcgtcggcgtacgccgcaggctccgagatcaacaccgcggacaccgcctggatgatcgttgccacggcgctggtcctgatgatgacgatcccgggacttgcgctgttctactccggcatggtgcgcaagaagaacgtgcttgcgaccatggcgcagagcctcgccgcggtggcgctgatctccattctctgggtggcgttcggctattcgctatgcttcgtcggcgatggcccatggatcggcacgctcgatcgctggtttctcgccggcatgaccatggacagcgtcaatccggctgcgaagaccatcccggaatcgctgttcatgctgtaccagatgacctttgccatcatcacggtggcgctggtcgcgggctcggtggccgatcggatgcggttctccgcctatctcctgttctcggtcgcctggttcatcttcgtctacattccgctggcgcattgggtgtggggcggcggcttcctcgccagcatgggcgtcctggatttcgccggcggcctcgtggtgcatctgtcggccggcaccggcggcctggttgcggccaaggtgctgggacgccgtcacggctacggcaccgagaatctctcgccgttcgacctctcgctcgcggtgatgggcaccggcctgttgtgggtcggctggttcggcttcaacggcggctcggcgctggcggcgaactcacgcgcagtgatggcgatcaccgcgacccatcttgcggcctgcgccggcgcgctgacctgggccgtgatcgaatggtcgacgcggcgcaagccctcggtgctcggcatgatctccggcgcggtcgcgggcctcggcaccatcacgccagcctcgggcttcgtcgcgccctggcatggcatcgtcatcggcatcgtcgccggggcggtctgctattgggcctgcacctggctgaagcaccgcttcaactatgacgattcgctcgacgtgttcggcgtccacggcatcggcggcctgaccggcaccctgcttggcggcgtgttcgcgaccagcgccatcggcggcaccgccggcctgctggagggcaatcctcaacagctcctgatccagctctacggtgttgcggtcaccctcgtctggtcggcgggcgtcagtttcatcctgctcaagctcgtcggcctgttcgtgccgctgcgcgtatcccgtgagcaggagctcgaggggctggatatttcgcagcacggagaagcgctgcaatag

SEQ ID NO: 4190 - DNA, 339 bp, BradyrhizobiumColbertium
atgaaactcgtcgtcgcgatcatcaaacccttcaagctcgatgaggtccgccaggccctgaccgcaatcggcatccacggcatgaccgtgaccgaggtgaagggctacggccgccagaagggccacaccgagatctatcgcggcgccgaatatgtcgtgaatttcctgccgaagctccgcatcgagatcgcggtcgcctccgacctcgccgacaaggccgtcagcgtgatcaccgcgaccgcgcgcaccgggcagatcggcgacggcaagatcttcgtcacgccgatcgatcatgcgctgcgcatccgcaccggcgaaaccgacagcgacgcgctctag

SEQ ID NO: 4191 - DNA, 903 bp, BradyrhizobiumColbertium
atggcgagttggttctacgcatccgagggcaagcagcaggggccctttccggaagggcaattccgcgacctgatcgcccaaggggtcgtgcgcccggacaccctggtctggaccgaaggcatggccggctggcaaaaggccgccgaaatccccggcctgatcggaggcggcggcgccccgccgatgatgcctggcggcccgccgatgatgggctcgggcggttatgccggcgcgggcggctatggcggcccgggtggagcatcgctcgcggtcgatttcggcatcctcgagttcacctggcgtacgctcgcgctggtgatcggttcgttcttcatcatcccggtgccgtggctgttcgtctggtacacgcaatggatcgtgtcctgcgtgaaggtcccgggccggccgaatctcagcttcaccggcaatgcaatgacgctggtgccctggtttttcggcttcatcgttctggcgatcgcgatcggctatatcggcagcgaaatcctgagcaatctgctgttcatcgtgcagatcgttctctactggctcctgatcaaatggatgattgcgaacctcgcctccaacgggcagccgctgggcctgagcttcaccggctcgatctgggcctatatcggctggaatctgctgtttgcgatctccatcatcaccatcatcggctgggcctgggtggccgcggcgcagatgcgctggttctgccgcagcatcgaagggacccggcgcgagatcgtgttcaagggcagcggtctcgacattctctggcggggtatcgtggccgtgatcctgtgcagcctgatcatcccgatcccgtgggtgtatcgctggatcatgaactggttcgcctcgcaaaccgagctcgttgcgcgaggctccgttacagcgtga

SEQ ID NO: 4192 - DNA, 864 bp, BradyrhizobiumColbertium
atgtccaaaagcctgatcgacctcattgcgatcctcgagctcgagcagctcgaggtgaacctgttccgcggcaacagcccgaagacgagctggcagcgcgtgtttggcggtcaggtgatcgggcaggcgatggttgcggcctgccgcaccgtcgagggacggctgccgcattcgctgcattgctatttcatcctgccgggcgatccgcagatcccgatcatctaccaggtcgagcgcctgcgcgacggcaagagctattcgacacggcgcgtcaccgcgatccagcacggcaacgcgatcttctcgatcatggtgtccttccacaccgaggaagagagcgcgtttgatcatcaggatacgatgcccgacgtgccgccgccggagaagctgacggcggaggaggtggcgaagcagccgatgttcaaggaaatgccggagttcatccgccggtattatgaatccgatcgtccgatcgaattgcgtccggtcgagctgggacgctacttcggccagaagatcgacgatggccgcattcacgtctggatcaagacggcagcgacgctgccggacgatccggccctgcacatgtgcgcgctcgcctacgcctcggacttttcgctgctcgatgcgatcatggcgcgctacggccgcacgctgttcgacaagcgcatgatgccggcgagcctcgaccacgcgatgtggtttcaccgcccgttccgcgccgacgaatggctgctctacgcgcaggactcgccgagcgcgcgcggcggccgcggcctgacgcgcggctcgatcttcaagcccgacggcacgctggtcgcctccgtcgcgcaggagggttctgtgcgcgagcggaagtcctga

SEQ ID NO: 4193 - DNA, 192 bp, BradyrhizobiumColbertium
ttgctagcagacttgagctgggcgaaacagtgcggtgaaacaagggcggctagcccctcgttccgtcattccggggtcgcgacgcgcgaacccggaatccagaggttgtcagctcgggattccgggttcatcgctatcgcgatgccccggaatgacgagatctcgaaagcaccatcatgtccaaaagcctga

SEQ ID NO: 4194 - DNA, 1221 bp, BradyrhizobiumColbertium
atgtcggtacagggtagcattgtcatcggcggcggcgcatttgcgggcctggccttggccctggcattgcgccaggggctcgggcccgagatccccgtcatcgtcgccgaccccgcgcttggcgcacggccgagccgcgatcctcgcgccaccgcgatcgtggctgcctgccgccgcctgttcgaggtgatcggcgcctgggacgccgtcaggggcgaagcacagccgatcctcgacatggtcgtgactgattccaggctggaggacgccacccgtccggtgttcctgaacttcgccggcgacgtcgcgccgggcgagccctttgcacacatggtcgagaaccgccgcctgatcgatgcactggtggcacgcgcggaagccgagggcatcgatctccgcgccaccaccgttgcgtcctacgacgcgcgttccgaaggcatcgacgtgacgctcggcgacggcagcgtgatcgccgcgagcctcttggtcgccgccgacggcgcgcgctcgaagctgcgcgagcgcgcgggcatcgctacccatggctgggagtacgaccagtccggcatcgtcgtcaccgtcggccatgagcgcgatcacgagggccgcgccgaggagcacttcctgccggccggcccgttcgcgatcctgccgctttcgggcaggcgttcctcgctggtgtggaccgagcgccgggccgaagccgcgcgcatcgtcgcgctcagtgacgaggagtttcacgccgagctcgagcggcgtttcggcctgcatctcggcgaggtcaaggcgctcgacaagccgcgcgcgtttccgctgtcctatttcgttgcgcgctcctttatcgcagagcgcctcgcgctggtcggcgatgccgcccacgtcatccatccgatcgcgggccagggcctgaacatggggctgaaggacgtcgcagcgctggccgaagtggtggtcgatgctgcacggcttggcatggacatcggcggggcggacgtgctcgaacgctatcagcgctggcgtcgcttcgacacgatggcgatgggggttgccaccaactcgctgaacttcctgttctccaacgaatcgacgctgctgcgcacggtgcgcgacatcggtctcggcctcgtcgaccgtgccccgccgctgaagaatctcttcatccgccaggcagcggggctcacgggcgaggtgccgcggctgttgaagggcgaggctctgtga

SEQ ID NO: 4195 - DNA, 198 bp, BradyrhizobiumColbertium
atgaacgccgccaccgaacgtcccgaagccagcgtcgatcccaaattgctggagattctggtctgcccgctgaccaagggtccgctggagttcgattccgccaagcaggagctgatctcgcgcagcgccaagctggcctatcccatccgcgacggcatcccgatcatgctgccggaagaagcgcgcaagatcgattga

SEQ ID NO: 4196 - DNA, 678 bp, BradyrhizobiumColbertium
atgccaatcaacatcgaatatcgcgggcccgccgacctcccggagatcattccggtctttccgttgccgggcgcgctgctgctgccccgcggccagatgccgctcaacatcttcgagccgcgctatctcgcgatggtcgacgattccttccgcgacggacatcgcctgatcggcatgatccagcccgacgtggcgcacacgccgaagaattccgacaagccggcgctgtttcgggtcggctgcgtcggccgcatcacccagctcgccgagtccggcgacggccgctacatcctcgagctcaccggcgtgtcgcgcttcaaggtggtcgaggagctcgaggtgctcaccccctatcggcagtgcaaggtggatttcttcgccttcgtcgacgacttcaccgcgcggatgggcgaggacgacgtcgaccgcgaggcgctgctggcggtgctggctgacttcctcaaagccaacaatctcaaggtcgactgggaaggcgtcgaaagcgcgcccaacgaggcactcgtcaacgcgctggcgatgatgtcaccctatggcccggcggagaagcaggccatgctggaggcgcctgacctgaagacccgggccgagatccttatcgccgtcaccgagatggatctcgccaagaagcgcaccagcggcgatccgccgctgcagtga

SEQ ID NO: 4197 - DNA, 924 bp, BradyrhizobiumColbertium
gtgacgatcatcgaccagggtaacggagcggcgggcccggttgcggccgacctgatcaaggacaccaccacccaagccttcgtgaaggacgtgatcgaggaatcgaagcgccagccggtgctgatcgatttctgggcggagtggtgcggcccctgcaagcagctcacccccgtgctggaaaaggcggtgaaggcggccaagggcaaggtcaagctggtcaagatgaacatcgaccaccatccggcgatcccgggccagatgggcctccagtcgatccccgccgtgatcgccttcgtcaacggccagccggccgacggcttcatgggtgcggtgccggagagccaggtcaatgccttcatcgagcggctgaccaagggcgtcaccgcgccgggcgaggtcaacgtcgccgagatcgtgcaggaggccgaagcggtgctcgccgagggcgacgcggcggcagcggcgcagatctatgccgaggcgctgcagcacgagtcgaccaatatcgcggcacttgcgggcctcgcgaagtgctacgccgtctccggggcgatggagcaggccaagcagacgctggccatggtgccggaatccaagcgcaatgaccctgccgtgaaggcggtgcagaccgcgatcgatctcgccgagcaggcaaaatcgctcggaccggtcgccgagctggaacagaaagtcgccgcaaacccgctcgatcatcaggcccgattcgacctcgccaccgcgctcaacgcgcaaggcaatcgcgcggcggcgaccgagcagctgctcgagatcatcaagcgcgaccgcaaatggaacgatgatggcgcccgcaagcagctggtgcaattcttcgaggcctggggcggcacggatgatgcaaccgtcgagggacgcaagcgtttgtcgacgatcctattttcataa

SEQ ID NO: 4198 - DNA, 72 bp, BradyrhizobiumColbertium
gcgggtgtagctcagtggtagagcacgaccttgccaaggtcggggtcgagggttcgagccccttcgcccgct

SEQ ID NO: 4199 - DNA, 210 bp, BradyrhizobiumColbertium
gtgttcgtggatacgacgccgcgccacaagctggctgatctgaccaagttgcccaacttgaaccacatgaagtttgttgcgcacctaagtgtcgacaaatccgcgggcatggtcaaacctcacgcgcgcgacccggaacacattagcttttggatgtacgccagctacgagcccgagaaagcagtaatcaaaatcgaaccgctgtcatga

SEQ ID NO: 4200 - DNA, 144 bp, BradyrhizobiumColbertium
atgggtatagacaaggtcgatgagttgtatgcggtttgcgactccaacacgcttgtattcagcaaagtagttctttcgatctttcggcgcgcgaacgagctctacctctattacgccgagggccgagttcaggctgcggactaa

SEQ ID NO: 4201 - DNA, 2676 bp, BradyrhizobiumColbertium
gtgccgcccctcgctgatcccgagagtagtgcgtttgatcgtttcgaaatacccgcgaatgcgtggagcgctttctcactcacgcgtgaggatcgccagaacttgcaagaagatcaagtttctgcgctgcgaggtcattgggcaatcaacgctcctcgcttggcacctaggattgcccatcttggacgttggtttcaaagggtcgcagatcaaccggctgcaatctggtgggctgcgttccaacacggtctccatcccgacatacagcgccaaattgtgtatagcagtgagcgggcggaaccgacttcggcacccttagtcagaaaggcttggcgctatttgataaattcttggaggacccgcaatcgggacgcctctgatgagtattaccaatgggtagcccaagtaaaagctgagggatggactccggaagcggtccgtgctctcggagtaatccttcgtcccgttgtgaaagtcgataggcctttcaatagttcgccgcggcccccgaacgctgtagagcggctaggggacctgatgcacctggacgtgacatatcctgtgcacgacgaggggctcacgatacctgattcctttcttccagctgtgatcaagacgtttcgcgacaatctcgaattaggtgcggctctagaggaggagctgggcggatatggattgcacagcttgctctcgatcgagaaagaggaaggcgaggaaacttcggaacgcgagtataagcacggcatcaatagtcctcttttccgatatttcgatcttttgcaggccctgctaaaagtcgacgctctcgccgcaaaatccgagatcggctcatggagagggtcaactggcccgattgcagcgcacctgataatctggtctttgaacgacaaacggctcgttcctagaaacgaaatcgcggatgtacttagaatcgtttcgcgtgaagagttttggaacagcgcccaccagcgagacctattattggcgttgtcggcgcgctggagcgagatgcccacccgcacaaagcagagtatcgaacgacgaattttgcagggaaggaaaaggtggccgcgagaatcaggtaatgacttcaaagagagcagagcccatgcaattctcaatcggatacactatctccactctaaacaatgtgtcttcacctttgacatagatgccgtttcgcgaacgctccaagccgatgcgcctcagtggaagcccgagtgggcgaagggggccgcattctctatgggtatgcgcacaggttgggtaaagacagacacccgaagcgacgagctgcaagacaagccgctatctgagattctggacgttgccgcgtctctatcaggacgagcgcaagatcgatttttcgtcgagcgcgacccattcgctggactctgtgacacaaagcccgttcgtgctttcggagcactgaatgctgcattgagagatgggaaattcagggacgagttctggagagagtttctcaatcacacaagtagccgacaggaaaaagtacgcttttcagtattgatagcctgccgtctagctcgcctgccagatgaatcgctgagcaagatactgaacgccgcatccgattggatgctgcgcgttcacaagaacttgctgcccgaccaccgcgaaattttgaatgatctctggggccggctagtgcccctcttagcacgaccagatgccgagcgcgatcgagggggcgctcgcgcccaaagtgttgattgggccacggaggccctgaattcccctgtgggatatctcgcacagctacttttgacagattccgtcataggcaaactggatcgaaacgaccgaatgccagattggtggaagattcgtgctgacgagcttctttcgttgccaaaagatcatcgtcgtcatgccctcgcgattctctgtcacaatctcgtttggctgtttgcgcgggacgaagcctgggtaatcagctccttgcttccatgtattcagcgccaggatgctgacagcgatgctttctgggcaggtttcttttggggagccaggattccgcagccgcccttatttaagctgatcaagccagctctgctccgccttgcgcacaggcagtccgagacccggcgcaaacatgcggaaattctagccggaatgatattggcaggttggggcgccagagtagatgatggagatgcgcgagctgttagcgatgccgagctaacacacaccttgcaggaggccgatgacgaattccgtgagcagttgctttggcatttgcaaaattggacaaaacgagcagatgagaagtggcgagaagacgcttttaatttgctcaagcgcgtgtggccgaaacagatctcacttaagaccccaaggatttctgcgaagctggcggaactagcttttgcgcaaggcagccgatttccactcttcgttgactgcattcttccgttgctggttcctacggatcaggactacatcaaccttcccatagaacggcacgataacgagcgactggtggaaaagtaccccgaaagtgtgctgtccttgctcgatgccattctcggtgagaacgctagacattggccttacggcgtttccgatattcttgatcgagtcgaaaagtcgaagcctgagctgttggccgatgtccgaatgatcaaactaaaacgggtccgatcaactacataa

SEQ ID NO: 4202 - DNA, 507 bp, BradyrhizobiumColbertium
atgaggcatgtgcagtctacgatctcgagcctgatgcagttcgcctcgaacagcctcgatcccagggcgttcgctgcgctcggcgacacggtacaggagacgctcctcgctgcgctggacagcgtacttgttcaggaggagatggtgcgcgcgcgcccaagatcctttgagcagcatcgaaaagttgttgcacggcttgaagacctggtgcgcgcgcttccaagccagcctctctacagcgatgatcttgctggtggtgttggtgtttcggtgcgaaccctacagacggctgtgaacaccgtgcatggtatgagcttgcatcaataccttcggctcaaaaggctttggctggttcgttgtcagctgacaagcgggttttccggcctgtcggtgaagaccgtggctcagagtaacggcttctggcacatgggagagttttcgcaactgtacaaagacgcgtttggcgagacggcgcgagaaacgatcgcgcatgcgaacggcaagtaa

SEQ ID NO: 4203 - DNA, 132 bp, BradyrhizobiumColbertium
gtgaaatgcagaggagatcgggatcgtgaggccaataccgggggcgcccgcctcagcctcaacttgcctggcaaagcagcggtgcagaagcaggcggctaccaggaagcacaagggtggcgcgttcggctga

SEQ ID NO: 4204 - DNA, 1029 bp, BradyrhizobiumColbertium
ttgccgactggcgctgatgacctggcgctggtggccgcgctgacgcagaccttccccggctttaccttctcggtggcaagcgtcgacgatcattactggcgcgacacacgctctgtgatggacggcgatgggacgcgcgttgcgaactaccggccgtggatggaggccgagctcgcgaaggacaacggtaatatcgcagcgctctggaagcggttgcgcgagaccgattatcggatcaccgaatggtgcggcaacagcgttttcgctgttgcacctaccggccctggcgtggctgactacgtgcagattgctctaggtcgcgaggtcgaatggtgtgccgggccgatcgtcaatccgtcataccggccgtggggaaaggaagagttgttcgatccgtcatggattgctcacgaaggtctgacggaaagtaacgtggtgaccggtccgacctatcgcttactcaaacgtgcggggagcagtgtcgtccatcttcgcagcttcctggcgcggcgcgcgcgcctcgaacgggaaaaccgtgaagcgaagcgccaggaaatggagcgacggttagtacgcgaggtcacacgagaccgaacgatcgagacgccattccttcagctcgtgcccggctggttcgatcatgtgccgcgcgagaatcggtttttccaggactgggacgagtcgagcgccgccagcgagcgggtatacgcgcattgggcgctcgacatctacgattacgaccataagggcacccgcgagattggattcgtcacacgcccgcttcgcactcccgcggagaagctctgtgctggcgaggagtcggtccatattctcatggaccgcatcgatgccatcgaccgcgagatcggcgttccgttcggctggttcttcctcatgacgcacggaaactgggtcacgccggaggttggcgaagcaattgcgcagggcttgcgtgaacatcgcgtcgtcttacccgatcgtgatgcgcgcgtcttgctgcgctgggcggaccgctcatatggcttttga

SEQ ID NO: 4205 - DNA, 582 bp, BradyrhizobiumColbertium
ttgctgatatggtacccggaagtcgaaccgcgcgacggcagctatgtgcgaccagccgtccggatcgaatctggcgcaaaatctgcgctcgaccccaaccatcccgcgacaatccggccatatgtctccgacgacgttgataacctcgatctcgtctttaccggcgtcacgacgatcgacgctgaacgaaccttctgggacaaagtcgttattgcgcatgggttgcgtcgttggttcgagcgtcgcggcgagctgcggcaggaggggcagcgcgtgtcccggcatttctatgacctgcactgcctgttcggttcgaatgtgggaaagcgggctctcgcagatggcgcactaggagaagactgcgtgcgtcatgcgcggatgtttttcgaccgtcgcgattatgatcttgcttcggctctgacgggatcattcgcgctcgtgccgacggtggcgatggtcgaagcgcttcaacgtgactatgccaataccaaggcgatgatcttcggcgaagcgccggggttcgatgacatccttaagtcgatcgcggagatcgagcggatcgccaacaagttcgctccatag

SEQ ID NO: 4206 - DNA, 429 bp, BradyrhizobiumColbertium
atggctcgctccgtgaagacaccgcgacgcaagcccaggcttcggaccgaactgtccgagctcgatgagcggcggcttcaggaggccgtcgcgttgttcggattgccgaaggccgaggtggtccggcgcctgatccgcgcctccgtgcaggcaggtcctgcactgtcggccgagaacacgcgcgccgtcgtcgcactggcgagccaggtccgcatggtcggacgcaacctcgcgcaggtcctcaaggcgatccatcgcggccaggcggtcaggatcgaggacaccgagccggtgtggcgcggcctccatgatatcgtctcggcgatcaacgacgagctcaccgagatgacggtcgcctatggatcgaaactacggcgcgaagcgaagctgacgctgccggccgaccttgcagagagcgagcccgcatga

SEQ ID NO: 4207 - DNA, 276 bp, BradyrhizobiumColbertium
gtgccggcggtgccggccgcgatacgcagcaagaaagaggcttccggggaaagacaacgcgaagcgaagtcgcgcgggcgtgaccagaatccattcgaaccctatggcgagcgctcgtcctcgcgcccgtatgccctgcggctgcccgatgccatcgatctcgtcgttcggcagatggcggccgagcagcgcacgcatcccctgcgtatcgtcgacaagatcctctacgacggcctgaagcggctcggccgattgccaccaccggctggcgattga

SEQ ID NO: 4208 - DNA, 1194 bp, BradyrhizobiumColbertium
atgcaggagcttggccaaattccgttaagcccgttcgggagccgcgcgctctcgcccggcgtgctgaagatcaattccatggtgcgcgcgtgcgcggcgggcacgccggcgcagaaatggaaggtcttccgcgacatcagcgccgcgagagccgcgctcggtgtccccgatcgtgcgctcatcgtgctgaatgcgctgttgagttttcacccgtacgcggttctgacggcggggtcagccgacctcgtggtcttcccgtcgaaccgccatctgtcgctgcgctcgcatggcatggcggcgtcgacacttcgccggcatctcgccgcgctggtcgatcacggtttgatcctgcgccgggacagtccgaacgggaagcgcttcgcgcggaaatcagccgatggcgacgtcgagatcgcctacggcttcgacctcgcgccgattgtcgcgcgggcggccgagttcgatcggttggcgcgccgcatcgaggaagaggcgcgccttgcgcgcaatcttcgccaacgattcaccgttctgcgccgtgacgtcgtgaaaatgatcgccgccggcgtcgaggccggcatcgcgatcgattggccaggcacgcatggaaagtaccaagcgatcgtctcgcgcgttccgcgcacgccagcggcagaggcgctcgagccgattatcaacgaactccaggagctcgccaatgacatcctcgccgttctgaacgcgcacctttgtgagcccgcggccgcgccaccgccggcgccgagcgatgcggaggccgatgggaacgcatcgcctcgattgctcacttttcacccgacggcgtcgaccgaccctgatcacaaccgccggacagaccggccggagactatcccgctgcgggtcgtcctcgacgcctgcccggacatcatcgactatgcgcgcggcgagatccggtcttatcgcgagctcctgaccacggccgcgctcgtccggcctttgctcggcatcagcccgagtgcctgggaggaagccggacaggttatgggcgagatgcaggcgtcgatcgtcgtcgcggcgattctgcagcgcggcgtcgcgatcaagaatcccggaggctatttgcgcaatctcacgcgccgtgcagccgccggcgagttttccatctggccgatgcttctggcgctgtccgcgacccggctgaaaaaggcgacgtga

SEQ ID NO: 4209 - DNA, 333 bp, BradyrhizobiumColbertium
atgctgaacgagatgctcgctatccgactccagcaactcgaaatcgaaaatggcggcatggaagccttcttgcccaagaccgggcttgcgcgcgggacgtattacacgatcctgcgcggcatcgggaatccgaccttgaggacgatggagcgtattgcctcgagcctgaacatgacggtgttcgagctgctggggttcgaggtctccgacgccaagcgggcgctacagaagagcggcgtcgactacgacgagctcgcgtcggcaatcgcgaagaaaaaccgcgcagatcgaaccctcgcgcgccagacgcgctcgaagaagctgccgatctga

SEQ ID NO: 4210 - DNA, 318 bp, BradyrhizobiumColbertium
atgcaggcgtgcacggagattgccgaatacgccaagggcgggatttcgaactggcgtgactttttggcgaccgccgcggtggtccggccaatgctcgggattagtccaagcgcctgggaggaggcgcaaatcgtgatgggcgaggtccaagcggccgtcgtcgtggcctgcatcctcgagcgaagcgctgcaatcaattcggccgggggctatctgcgcggtttgaccaccagggcggcggccggcgaattttcgctcggcccgatcctgatggcccagatcaattcgaagctgcgcgaccagaaacgccgggcatga

SEQ ID NO: 4211 - DNA, 189 bp, BradyrhizobiumColbertium
atggagcggatcgccgccgggctgaacatgaccgtgttcgagctgctgggattcgaggtctccgacgccaagcgcgcgctgcagaagagcggcgtcgattacgacgagctcgcctccgcaatcgcgaagaagaaccgcgctgatcgagcagtcgcccgccaggcacgatcgaaaaagctgccgatttga

SEQ ID NO: 4212 - DNA, 1236 bp, BradyrhizobiumColbertium
atggaaccgtatcaatcaacgacgccctttgggcggcgatcgctgtcgcttgcccatgtggcaacgcagatcgtcgcctcgtcacggccacctgaaaaggtcgtgcacaagtggaaaattttcaagacgatctgcactgcgcgggcacggatcggcgtgtcagagcgatcgctgtccgtgcttaacgcccttctgacgtttcatcccgaaaccgccctcagtggcgaggacgacctcgtcgtctttccgtcgaaccagcagctcgcgctccgcgcccacggcatgccggcgtcgacgttaaggcgtcacctggcggccctggtcgacgcgggcctgatcattcgccgcgatagcccgaacggcaagcgatacgcccgcaagggcaggggaggcgaaatcgagctcgcattcggattcgagctttcgccgctcgtcgtgcgcgccgaagagttcgaaatcctcgcggctgaaatcgaagctgatgcccgtgccctgaagctcgtccgcgagcgcatcacgatttgccggcgcgacatcgccaagatgatcgcgacgggcattgaggagggcgtgccgacccgcagagcggggcaggggcctgccgactggcaggagatccacaagggcttccgcgcaatcatcgatgccatcccgaggaccgcgacctgtgccgagctcgagccgatcgctgagaccctctcgcaactcgccgatgacatcctcaatctgttgagaactcacatcaaagcagagattctaagcgccaatgagtcccattccgggcgtcacatacagaattcaaatccagactcccttattgatcttgaacctagccttcgagaaggcgggggggcgagggcggagccagagcaacaaacgccgaggatgccggaagggtcctatccccttgggatggtgatgcaggcatgcaccgagatttcggagtacgccaccggcggtatttcgaactggcgcgactttttggcgaccgccgcggtggttcggccgatgctagggatcagtcccagcgcctgggaggaggcgcagcgcgtcatgggtgaggtccaggccgcgattgttgtggcttgcatcctcgagcgaagcgccacgatcaattccgcgggtggatatctgcgcggtttgaccaccagggcggcggccggcgaattttcgctcggaccgatcctgatggcgcagatcaattcgaagctgcgcgacatgaagcgccgagcatga

SEQ ID NO: 4213 - DNA, 1020 bp, BradyrhizobiumColbertium
atggcacgaaaaatcagcttcgacttgccagagaatgaggagcgcatcccacaggaagcgccagcttcttcaaacgcgagcaaagtcaggcccctccttggactcgaccgcccactgaaacagcccggcgcgctcggcgctatctcgcagacgcttggcgggatgtctgagaaggtcaaacgcgccgatgaactcgagaagcgcctggttgaggggcagaccatcgtcgacctcgagccatcgctcgtcgatgactccttcgttcccgatcgcatggaggcgagccccgccgacgaggcggcatttcgagagctcatccgcgagcatggtcagaactcgccgatcctggtgcggccccacccagacaatccagatcgcttccaggtcgcgttcggacatcgccggctgcgtgctgcgcgggctctcggcatcaacgtgcgcgcggtcgtgcgtgcactctcagacgaagaactcgtcgttgcgcagggacaggaaaacagcggccgaaccgatctgacgtttatcgagcgcgcgcggtttgcagcacggcttgaagaacggaagttttcgcgcgagaccatcatggctgccctcaacgtagataaggccgcgctttcccgcctgatcgcgatagcaacgcgggtcccggccgaggtgatcgatgcgatcggcgctgcaccgagcttcggccgcgtgaggtggcaggagctcaccgacctcctcgacggcgacgacaatcggcgccgcgcggtcgcccacgtaaagacacccggcttttcggacctcgaaagcgataagcgcttcgagtcaatagctgccgccttgcgtgaagtcgcctccagagcgcgcgccgaaacatggtcggcccacgatggaacgcacgctgcaaaagtgatgcgaagcggaaagaaaacaactctgaccttcgacgatcgcgtcacaccccaattcggagacttcgtgcgcgagaggctccagagcctttacgacgagtacaagaaggcggacctcgatcgctga

SEQ ID NO: 4214 - DNA, 840 bp, BradyrhizobiumColbertium
atgaatttcaagggcggcagcggcaagaccacgacggccgcgcatctcgccgaatacctcgcctttcgaggctaccgggtcctcgccatcgacctcgatccgcaagccagtctctccgcgctgtttggcctgcaacccgaactcgatgtcgcggacaacgacacgatctacggggccatccggtacgacgaccagcgccgcgagatggctgagatcgtccgcgcgacatacattcccacgctgcatctcattcctggccagctcgaactcatggagttcgagcatgagacgccgaaggcattgatgacgcgcgagggtcgcgactcgatgtttttctcgcgtataggcgaagcgctggcacaggtaagtgacgcctacgacgtggtcgtgatcgactgcccgcctcagcttggatttctgacgctgtcggcgctatgcgccgcaacggccgtgcttatcacggtccacccgcagatgctcgacgtgatgtccatgtcgcagttcctcaacatgaccgccgggctgcttgacgttgtcgcaaatgccggcgcggccaccgaatacgattggatgcgctacctcgtcacccgatacgaaccaagcgacgggccacagacaaaactcgtcgggtggatgcgctcgatcctcggggggcgggttttgacgcatccgatggtgaaaagcacggcgatcgccgacgctggcctgacgaagcacacgctctacgaagtcgaccgccagcagttcacgcggcagacctatgaccgcgcagttgaatccctcgatttggtcaacggcgagatagaagccctgatcaagcaggtctggaagagggcttga

SEQ ID NO: 4215 - DNA, 615 bp, BradyrhizobiumColbertium
gtgacgagggacatcctcgatcgtcttctcgcgacctgccagaccgaccggctcgccgacacccgtgatctcgcgatcctgctgctggcattcgcctccggcggtcgccgcaggagcgaggtcgcacggctccgggtcgagcagctgagcgatgagccaggcgtgccgctcgacccgaacgaccgtaactcgccgctcttgccctgcgtctcgattcagctcgggcgaaccaaaacgggcgacgccgatgatgagggcagggtgttcctcgtagggccgccggtcgacgccctcagggaatggctcacgcgagccgatattcataaggggccgatctttcgcgcgatcgaccgctgggaagcattggaggaaagggcgctcacgccccagtccatcaatctcatcgtcaagcggcgctgtggcctggctgagctcgatccacgggagttcgcagcgcacggtttgcgggcgggctatctcacggaagcctcgcgacagggcatcgccctgcaggaggcaatgcagcagtcgcagcaccgctccgtccagcaggcggcgggatattacaatgaggccgagcgcgcgcagggcagggcggcgaggctcggcctctaa

SEQ ID NO: 4216 - DNA, 918 bp, BradyrhizobiumColbertium
gtgatccggtcggacggcacgcgcgtcggcgagctccggccctggatgatggccgagcttgccaaggacggtggcgatattcgcgcgctgtggacgcgcctgaaagagaccgacctgcagatcaccgagtggcgcggcaacagcgccttcgtcttcgcgccgaccgggacaggtgtggccgactacatccagatcgccctcggccgcgagatcgaatggcgcgccggtcctgtcgtcaatcccgattatcgtccctggggtgaggaagagctgttggacccctcgtggccccggcatgagggcctgcccgatacggatcgcctggcgggtccgatctaccgcctcctcgatcgcgccggcggtgccttcgtccatgtccgcagtttccttgatcgctgcgggcgtatcgaacgcgacaagcgcgaggcgaagcggcccgagctggagcgccgcgtcatccgcgaagtcggcccggacggcacccgcgagacgcccttcctccaggccgttccggactggttcgacttcgtgccgcgcgaacttaggttcttccgggattgggaggcctcgagcgcccggtcgcagctcgtcttcgcacactgggcactcgatgtccgcgactacacccacaagggtgagcgcgaggttggtttcatcccgcggccgctcaagattccccgcgagcgcttgcagatgacgcccgagacgtctgtccaccagctgatggaccggatcgaggcgatcgatcgggagctcgccctgcccttcggctggttcttcctgatgacccacggacactgggtcgagcccgatgtcggcctcgcgatcgcggacggcctcaaggcccagcgcgtgcgactgcccgacccggacgcagcggtgctgctgcgctggtccgaacgaacctacggtttctga

SEQ ID NO: 4217 - DNA, 642 bp, BradyrhizobiumColbertium
ttgaaggagggcctcggcgccaaggcttcgatgatcgtgcgggaagaagcctacgacacttccgagcccgcaatcgacgagcgggtcgtgaagctgaaggcggccggcgccgacatcttcatcagtttcaccagccagaaattcgccgcgcagggaatcaagaaggcggcggagatcaactggcatccgatgcacatcatctccaacgtctcggcatcggtcggaggcgtgctggagccggccggcgtcgagatttcgcaaggcatcctgtcggcgacgtacatgaaggacggctccgacccgcagtggaatgccgatgagggcatgaagaagttctacagtttcctcgcgcagtacgaacccaaggccaacaagctggatgccggcgtggtgtacggctatgccgccgcgcagaccatgatgaaggtcctgcagatgtgcggcgacgatctcacccgcgagaacgtcatgaggcaggccgcaagcctgaaggacttcgagcccgatacgctgctgcccggcatcaagatcaataccgcgccggacgacttcgccccgatcgagcagctgcagatgatgcggttcaagggccggaaatgggagctgttcggcgatgtcatctcgagcgagatcggccattga

SEQ ID NO: 4218 - DNA, 318 bp, BradyrhizobiumColbertium
atggtgctcgaggcctgccccgacatcgtcgactacgcgcgcggtgagatccgttcctatcgcgacctcctcaccacggctgcgatcgttcggccgatgctcgggatcagtcccagcgcctgggaggaggcgggcattacgatgggcgaaacacaggcagcgatcgtcgtctcggcgatcctgcagcgcggcgtcgcgatcaagaatcccggagggtatctacgcaatctcacccgacgcgcggccgccgggcagttttcgatgtggccgatgctgatggccttgtccgccggacggttgaagaaggcaacagcctga

SEQ ID NO: 4219 - DNA, 468 bp, BradyrhizobiumColbertium
atgcgattccaggatattgaggacgcgatcggcaagctcctggagctcgatgacgattggatcgaggacttctgccgtcggcgtgcgcggaacgcgcgcgacgatggtctgatattccccgtgcaatgcgagccagtcgatcgggagattcgcctcgattccggctgctatcattttcacgacgtcgcgccgcaggaccgtgaaacgttgccgacgattgcgcaggagccgcgcctcttcctcgatctggcgcgctatccggtcaaactcactcgcgcgcgcgatgatcggcccaagatcgaagccgtaagcgagttcgatgccgccatcgacggattttcgcgcgaagcgtttaccgttcgggctatcgcggcgcaggatcagaccatgatcgacaagggcggccaggtggcgccgaagcgtcgaggccgccatcccatgcgaacgcagcgaaagatatcggtttga

SEQ ID NO: 4220 - DNA, 738 bp, BradyrhizobiumColbertium
atgaattacagcgaatacattgtctacatcgacgaaagcggcgatcacggcctcaccaacatcaacccggatcacccggttttcgcgctcgccttttgcgtggtcgaaaaggccaaatacatcgaaaagatcgtgccggctttccagcggttcaaattcgacttctggggccatgacagcatagtgctgcacggtcatgaaatccgcaaggcgaccggcgatttcaacatcctgctaaatcctaacacgcgggcatcgttcatcgaccgggtaacccagctgatcggcgacgctgaattcacactcattgccgcggtcatcgacaaggctaagcacgtcaagaaatacagcgacccggcggacccctacagcattgccctgggcttctgcatggagcgcctgcagcgtttcctgatcgacaagggccaggcgaacgtccagacccatttgcaggtcgaatgccgtggcaagaccgaggatgcgaagctggagctggagtttcgcaggatctgcgacggtcaaaacgccgtcggcaagatgcagaacctcgaaatccgcttcatggacaagaagcacaactcgaccggcctacagttggctgaccttgtcgcacaccccattgggcgccacgtcatcaagccagatcagcccaaccgggcctatgatgccctgaagtccaaatttcgggcgagccctaacggcaagatcgagggctacggcttgaagattttcccctag

SEQ ID NO: 4221 - DNA, 1098 bp, BradyrhizobiumColbertium
gtgttcaatcatcgccattacgtgccaattttgaaatggaaaatgggagagtaccaggcgctcagccgcctggcggggccggtcaaggaccgcatcacccccctcctcgaaatccccccggtcgggttcgacttcgagacgcagcggaacaaggagagcgcagacgaccacctgggcgacttcggcaagcgcctgaaatccaagtggcaggcccggccctgctttgttgacttgaagcacctgcccgcggcgacccgatgcgctgggggacgccactgcgtcgaggttctgttcgagactgcccgcgccgaaggctgcgcggccatcccggtcgtcagtttcgcaaacgacgccgcattcctggcggccgtggccaccgtttcccggcaggaccggcgcggcgtctgcctgcgcctgtcccttcccgacttcgaccggcacaatctccaggccgacatcgagaacctgctgcgccccatggcggacggctatggcgaatgcgacctggtgatcgatctcggcacgccgacctatgtgccgatcgcgatcatggtgacgatcatgcagacgctgatggcccgggtccccatgctcaaccaatggcgcaccgtcaccatcgccggcacgtcctacccgaactcggtggcgaacatcgccgcgccgtaccagttgctgccgcgccatgaatggcaggcttatcgcgcgttcatcgcaaccatcggtcacgagacgcggataccgaccttcggggactacgccgtcgcccaccctgacctggtcgagctcgacatgcggatgattaagccgttcgcgaagctgcgctacaccatcaccgaccactggcatgtcgcccgcgggacgccggtacggacccacggcttcggccagtaccagcagatgtgcgcgacgctggttgccctgccttatttcagtggccgcgcgttctcggccggcgacgcctatatcgcggactgcgcggcaggcaccgtcacgacgggaaatctgtcgacgtgggtgtgggtgtcgacgaaccggcatctgacgaaggtggtcgatgacctcgccagcgcgcacgcgctttcagtcgctgccgaataa

SEQ ID NO: 4222 - DNA, 153 bp, BradyrhizobiumColbertium
gtgcaggtagccatttacgacggcgatatcgacccggcaggtgccatgacgcaggcccaactcgtcgagcaccaaagtgtcggcgtcgccgtgatgctctttcagcacctttcggtgcagagcctgtctgacatcccgatctcgcacgactaa

SEQ ID NO: 4223 - DNA, 201 bp, BradyrhizobiumColbertium
ttggacatgaccaagcgcgtgatttcagttcgactttcggacgaacgcctcaagcaactggatgaggtgtgcagccggctgggcatgaaccgctcgcaggtaatcgacgccgcgttgcggctggttccagaggtgatgtccggaaaggcagagctacactatgaccccgaacggtttaaacgatccgggcaaactgaataa

SEQ ID NO: 4224 - DNA, 825 bp, BradyrhizobiumColbertium
ttgcgcattctcttcgtgggtgatgtcgtcggccgcagcggccgcgaggccgtcgccgaatatctgcccggcatggtcaaggactggtcgctcgatctcgtcgtcgtcaatggcgagaattccgccggcggcttcggcatcacggaggcgatctaccaggaattcctcgaggccggcgccgatgcggtgacgctcggcaatcactcctgggaccagcgcgaggcactcgtcttcatcgagcgcgccgaccgtctcgtgcgtccggcgaattatccgcgcggcacgccgggccgcggcgccgccctggtcgagaccaagaacggcaagcacgccctcgtcgtcaacgcgctgggccgcgtcttcatgaccccgttcgacgatcccttcgccgcgctcgaacgcgagctcggcgcctgcccgctcggtgtcgccgccgacgccatcgtggtcgatttccattgcgaggcgagcagcgagaaacagggcatcggcttcttctgcgacggccgcgccagcctcgtcgtcggcacgcacacccatgtgccgaccgccgatcaccagatcctcgcaggcggcactgcctacatgaccgatgccggcatgaccggcgattacgattccatcatcggcatgcagaaggaagaaccgctgcgaaggttcacgtctggcattccgtcagcccgcttcgagccggccgcgggcgcggcaacgctcagcggcgtcgccgtggaaacggacgacgcgacggggctcgcgctcaagattgcaccggtgcgcatgggcggaaggctggagccggcaacgccgaaattctggttgagctga

SEQ ID NO: 4225 - DNA, 597 bp, BradyrhizobiumColbertium
atgtccgcttccaaagccgaactccgtgccaaagccctcgccagacgcgacgcgttgagcgagaagaagcgcgccgccgccgctgcgaagctcgccaggcgcgggctgccgttcgagctcttgcccggcagcatcgtctccggctattcgccgatccgcagcgagatcgatccgatgccgctcttgaagaagctcgcggagcaaggcgcgaagctggcgctgccttgcgtcaccgcgcgcggtcagtcgctgatcttccgcatcttccatccgagcgatcgcctaatgcttggcccgctcggcattcccgagccgtcccccgcggctgcggaagtcattcccgacatcatgctgacgcccctcgcggccttcgaccgcctgggccatcgcatcggttacggtgcgggacattacgatttcaccttcgcgcatatgcgcaaagccaagcacatcatcggcatcggcctggctttcgcggcgcaggagatcgaagcggttccggcactatcgcacgacgtggcgctggattatgtgctaacggaatcagacgtgttcgatttccggagttctgacgttgcgcattctcttcgtgggtga

SEQ ID NO: 4226 - DNA, 384 bp, BradyrhizobiumColbertium
atgagccacatcaacgtcaccatcaacggccggcagtaccgcatggcctgcgaggagggtcaggaggtgcggctgctcaagctcgccgaaaccctggagacgcgcatccagtcgctgcgcggaaaattcggcgagatcggcgatgcgcgcctcaccgtgatggcggcgctcaccgtgtgcgacgaattgatcgacaccagcaaccgcgtccgcaccctcgagcaggagctgaccgagctcagggacttccgcaacgccgccgtcgaacgcgccaggatgacccagaccgccgtggtcaacgcgctgaacgcagccgccgagcgcatcgagaagtcgacccaggtcctgaaccgcaccgtcggaggcggcatcgcgatcgggtga

SEQ ID NO: 4227 - DNA, 321 bp, BradyrhizobiumColbertium
atgaacgatcgcgtgtccaacagctctgccatgacggagtcctctgccgtcgagatcgagatcgcgacgcgcaggctcacggctgcgcttgatgcactcgaaagcgcagtggagcggcggcgcgatgccgatcgcgacgagaacgagcttgctgcgcggatccaggcgctcggcgcggatcgctcgcggcttgccgacgagctcgacggcgcgctggtgaaagcgcgcaagctcgagcgcaccaatcgcgagatttccgaccggctggattccgcaatcgtcacgatacgctcggtgctcgataccggagaggacggatga

SEQ ID NO: 4228 - DNA, 1986 bp, BradyrhizobiumColbertium
atgacgcaggtcgatcacacccgtatggccaacgcgatccgcggcctttcgatggatgctgtcgagaaggcaaaatcgggccatcccggcctgccgatgggtgccgccgacatcgccacggtgctgttcacgcagttcctgaagttcgacatcaatgctaccgactggccggaccgcgaccgcttcgtgctgtcggccggccatggctcgatgctgctctattcgctgctccatctcctcggcagccccgagatgacgatcgaccagctcaaggatttccgccagctgggatcgctgaccccgggccatcccgaacacggccacaccaagggcatcgagaccaccaccggtccgctcggccagggcatctcgaccgcggtcggcatggcgctcgcggagaagatgctcgccgccgagttcggcaagaagatcgtcgatcaccacacctacgtgctcgcctccgacggcgacctgatggaaggcgtgtcgcaggaagcgatcgcaatggccggccattggaagctcaacaagctgatcgtgctctacgacgacaacggcatctcgatcgacggcccgacctcgatcgccgattccgtcgaccaggtgaagcgcttcaagtcggcggggtgggccgcggagaagatcgacggccatgaccaggccgcgatcgccgacgccatcacacgcgcgaagaaatcgagcaagccgacgctgatcgcctgccgcaccaccatcggcttcggcgccccgaccaaggccggcacgtcgaaagtgcacggcgaggcgctcggcgccgacgagctcaagggcgccaaggagaagctcggcatctcgctggagccgttctcggtgcctgatgacgtgctgaaggcgtggcgcgcagcgggcagccgcggcgcggctgcacgccaggaatgggaagcgcggctcgccgagctcggcagccgcaagcgcgccgagttcgagcgccgcctgcgccatgagcggccagcttcgctcgccaaggccctgcgcgcctacaagaaggagctgctggaaaagccgatgacggcggcgacccgcaagtcctccgaagccgtgatcgaagtgattgccggcgccatgccgatggaattcctcgcgggctcggccgacctcaccggctccaacaacaacaaggcgaagtcggcgacggctttctccgcgaagacgccgaagggccgcttcatccattacggcatccgcgagcacggcatggccgcggcgatgaacggcatcttcctgcatggcggcttcgcgccgaacggcgcaaccttcctggtgttcaccgactatgcgcggcctgcgatgcgcctcgccgcgctgatgggcgccggcgtcgtctatgtgatgacgcacgattccatcggccttggcgaagacggcccgacccaccagccggtcgagcatctctccgcgcttcgcgccattccgaacatgcgcgtgttccgtccgtgcgatgcgatggaggtcgccgagtgctgggagctcgcgctcaaccgcgtggatggcccgaccgtgctggcgctgacgcggcagaacctgccgcagctgcgtacctccgcgcccaacgacaatccttgccagcacggcgcctacgagctggtcgcagcccagggcgaagccaaggcgacgctgttcgcgtccggttccgaagtggagatggcggtcgccgcccagaagcagcttgccgagcgcggcattccgacacgcgtggtttcagtgccctcgctcgagctcttgttagcgcaaccaaaggaacgccgtgatgcgatcatcggcaacgcgccgatcaaggtcgcgatcgaggccgccgtgcgctggggctgggacgccgtgatcggccaggatggcgaatttgtcggcatgcactccttcggagccagcgcgcctctcaacaagatcttccagcacttcggcattaccgccgaggctgcagttaacgctgtgctgaagcgcatttcctga

SEQ ID NO: 4229 - DNA, 1008 bp, BradyrhizobiumColbertium
atggcagtccgggtcggaattaacggttttggtcgcatcggccgcaacgtccttcgggccatcgccgagtcggggcgcaaggacatcgaggtcgtcggcatcaacgatctcggcccggtcgagaccaacgcgcatctgctccgtttcgacagcgtccatggccgcttccccggcaccgtcaccgtcgatggcgactcgatcaatctcggcagcggcaagatcaaagtgacctccgagcgcgatccctcgaagctgccgtggaaggatctcggcgtcgacatcgcgctggaatgcaccggcatcttcacctcgaaggacaaggcctccgcgcacctgaccgccggcgccaagcgcgtgctggtctccgcgcccgccgacggcgccgacgccaccatcgtctacggcgtcaaccacgagacgctgaccaaggatcacctggtcgtctccaacggctcctgcaccaccaactgtctcgctccggtcgccaaggtgctgaacgatctcgtcggcatcgagaccggcttcatgacgacgatccatgcctataccggcgatcagccgacgctggacacgctgcacaaggacctttaccgcggccgcgccgctgcgatgtcgatgatcccgacctcgaccggcgccgcgaaagcgatcggtctcgtgctgcccgagctgaagggcaagctcgacggcgtcgcgatccgcgtgccgaccccgaacgtctcggtggtcgacctcaagatcgtcgccaagcgcgccaccgacgccaaggaaatcaacgccgcgatgaagcgcgccagcgagcagcagctcaagggcatcctcggctacaccagcgcgccgaacgtctcgatcgacttcaaccacgatccgcactcctcgaccttccacgaggaccagaccaaggttcagaacggcacgctggtgcgggtgatgtcctggtacgacaacgagtggggcttctcgaaccgcatggcggacaccgccgtcgcgatggcgaaggtgatctga

SEQ ID NO: 4230 - DNA, 1197 bp, BradyrhizobiumColbertium
atgaccaacacattccgcaccctcgacgacgtcgacgtgacgggcaagcgcgtattgctgcgcgtcgacctcaacgtgcccatggagaacgggcgcgtcactgacgccacccggctcgaacgcgtcgcgccgaccatcacggagatcgccggcaagggcggcagggtcattctgctcgcgcatttcggccggccgaagggacgcgatgccaaggactcgctcaagccggtcgccgaagcgctggccagggtcgtgaagaagccggtcgccttcgccgaggattgcatcggcgagccggcggccaaggccgtcgccagcctgaaggacggcgacatcctgtgcctggaaaacacccgcttccacaaggaagaggaaaagaacgattccgccttcgtcgcggagctcgccaagctcggcgacatctgggtcaacgacgcgttctcggccgcacaccgcgcccacgcctcgaccgagggcctcggccacaagctgccggcctatgccggccgcacaatgcaggccgagctggacgcactggagaaagcgctgggatcgccgaccaagcccgtgatcgcgatcatcggcggcgcgaaagtctcgaccaagatcgacctcctggaaaatctcgtcaccaaggtcgacgcgctcgtgatcggcggcggcatggccaataccttcctgcacgcccagggcgtcgcggtcggcaagtcgctggccgagaaggacctggccgccaccgcgctgcgcatcatggagaaggcggacgccgccaattgcgccatcattctccccgtggatgctgtcgtcgcctatcacttcgcggccaacgcgccgtcgcatgcctatgggctcgatgcgatccccgccgacggcatgatcctcgatgtcggtccgcaatcgatcgcgcgcgtccacgcagcgatcgatgatgcggcaaccttggtgtggaacggaccgctcggggccttcgagatgcagccgttcgaccgcggcacggtcgcggccgccaagcacgccgccgagcgcaccaaggccaagaagctgatctcgatcgcgggcggcggtgacaccgtcgcggcgctcaaccaggcccatgtggccggtgacttcacctatgtgtcgaccgccggcggcgcgttcctcgaatggatggaaggcaagcccctgcccggcgtcgaagttctgcgcatcaagtaa

SEQ ID NO: 4231 - DNA, 1068 bp, BradyrhizobiumColbertium
atggctcggatcacgttacgtcaactgctcgaccacgcggcggagaacgattacggcgtaccggccttcaacatcaacaacatggagcaggcgctggccatcatggacgcggccaaccaggtcgatgcgcccgtcatcatccaggcctcgcgcggcgcgcgttcctacgccaacgacgtcatgctcaagcacatgatggacgcggtgaccgaaatctatccgcacattccggtctgcgtgcatctcgatcacggcaacgagccggcgacctgcatgaccgcgatccaggccggcttcacctccgtgatgatggacggctcgctgaaggccgacggcaagacccccggagactgggaatacaatgtcggcgtcaccaagacggtgaccgatatggcccatctcggcggcatctccgtggagggcgagctcggcgtgctcggctcgctcgagacgggcatgggcgacaaggaagacggccacggcgccgaaggcaagctcagccacgaccagctcctgaccaatcctgacgaagccgtgaagttcgtcagggagaccaaggtcgacgcgctcgcgatcgcgatggggacctcgcacggtgcctacaagttcacccgcaagcccgacggcgacatcctcgccatgaacgtgatcgaggagatccaccgcaagctgccgaacacgcatctggtcatgcacggctcctcctcggtgccgcaggagctccaggacatcatcaacgcctatggcggcaagatgaagccgacctggggcgtgcctgttgccgagatccagcgcggcatcaagaacggcgtgcgcaagatcaatatcgacaccgacaaccgcatggcgatgaccggccagatccggaaagtgctcaaggacagcccggaggagttcgatccgcgcaagtacctgaagcccgcgatggaagcgatgaccaagctgtgcaagcagcgcctgcaggaattcaacaccgcggggcaggcttcgaaaatcaagaaggttctgacgacggccgaaatggccaagcgctatgccaagggtgaactcgatccccgcgtcgcgtag

SEQ ID NO: 4232 - DNA, 1041 bp, BradyrhizobiumColbertium
atgaatctgactgagctcaacaagatcgcgaccgcgatggtcgcgcccggcaagggcatccttgccgccgacgaatcctccggcaccatcaagaagcgctttgatgcgatcggcgtggaatccaccgaagagaaccgccgcgactatcgcgagatgctgtttcgcgccaaggatgcgatgagccagtacatctccggcgtcatcctctatgacgaaaccatctggcagaacgccaaggacggcacgccgctggtgaagctgatcgagcagagcggtgccattcccggcatcaaggtcgacgagggcacgcaagccctgccgatgtgcccgggtgaaacagtcaccgtcgggctcgacaggctcgccgagcggctgaagaaatatcacgagcgcggcgcccgcttcgccaaatggcgcgcggtgatcgacatcggcagcggcactgacggccggggcatcccctcgatgaccgcgatcagcgtcaacgcccacgcgctggcgcgctatgcggcgctgtgccaggcggcgcagatcgtgccgatcgtcgagcccgaggtgctgatggatggcgaccacgacatcgagcgctgctatgaagtgacgcagcgcgtgctcaacaagaccttccaggagctgcgcgtgcagcgcgtcgcgctggaaggcatggtgctgaagccgaacatggcgatcgcaggaaagaaatgtccgaagcaggcctccgtcgaagaggtcgcggagaagacgatacggctgctcaaatcctgcgtgccggcggcggtgcccggaatcgccttcctgtccggcggccagtccgacgaggaggcgaccgcgcatctcaacgccatgcacaggctcggcccgctgccctgggggctgaccttctcctacggccgcgcgctgcaggcggcgccgcagaaggcctggtccggcaaggccgagaacgtcgccgcggggcagcgcgccttcagccatcgcgcacggatgaacggccttgcttccacgggcgaatggcaaagcagcctggaacagaaggcagcctag

SEQ ID NO: 4233 - DNA, 630 bp, BradyrhizobiumColbertium
gtggtcgatgatcccgctgcgctcgtcgccgagctgccgggcctgctcgcctcggccgacgtcgccgccgtgctgctgcggctgcaggagaccgaccagcgcaccatgatctcgcgggtcaaggcgctggcgccgccggtgcagaaggcgggcgcggcactcctcgtcgacggtcatccggacatcgtcgcgcgcggcggcgctgacggcgcgcatctcaccggccttgccgcgctggaagaggcggcgccctcgctcaagcccgatcgcatcgccggcgtcggcggcctcgccacgcgtcacgattccatgagcgcgggcgagatgggcgccgactacgtgctgttcggcgagcccgacgagaacggccagcggccgtcgtcccaggccatcgccgaacggctggactggtgggccgagctgttcgagccgccctgcgtcggctttgccgtttcgctggaggaggcctacgacttcgccgcgagcggcgccgatttcgtgctggtcgacttcatctggaccgatccgcgcgggcccaaggctgcgctgatcgaagtcgacgccgcgatcaagaaggcccacgcgacggcgaccgcgagccagaatcctgcaggccaggagcacggctag

SEQ ID NO: 4234 - DNA, 1065 bp, BradyrhizobiumColbertium
atgaagctcccctgcatcaccctgctggccacgctgctgctgacagcgcccgcggtcgcgcagcttcagatcgcgccgccggccacgacgccgagcgcaccggcggagaagcacaaggcaaaaccgcccgcgcccgccaagaagaaagaggcagcaccggcgccgaaaccttcggcctctccctcgcccaagccggccgcgaccgtgatccccgcgccgccgccagacgatcccaatgtcgacctcgtctacggcgcctatcagcgcggccagtacaagaccgccttcgagctcgccaccgcccgtgcgcaagccggcgatcccaaggccatgaccatgctcggcgagctctattccaacgccatgggcatccgccgcgactacgccaaggcggccgaatggtacaagcgcgccgccgatgccggcgaccgcgaggcgatgttcgcgctcgccatgctgcgcatctccggccgtggcggcacggtcgacaagaacgaggcggtcaggctgatggcctccgccgccaagctcggcgagcccaaggcggcctataatctcgcgttgctctacctcgacggccagaccttgccgcaggacgtccggcgctcggcggaactgctgcgtcaggccgccgatgccggcctgcccgaggcgcaatacgcgctggcgaccttctacaaggaaggcaccggcgttccaaaggatcctgaacgcgcggtgcggctgctccaggccgcatcactggccgacaacgtcgatgccgaggtcgaatatgccatcgccatgttcaacggcaccggcacgccgaagaaccagcccgcggccgtagccctgctccgcaaggcatcgcgccagggcagcgcgatcgcacagaaccgcctggcatgggtgctgatcaacggcgcgggcacacccgtggacaaggtcgagggcttcaaatggcacctggtggccaagaccgccggcaagggcgacccggagctcgacaagcaattgtccgatctgccggccgaggaacgggccaaggcggaggccgccgccaagaaatggctcgggaccaaatga

SEQ ID NO: 4235 - DNA, 2175 bp, BradyrhizobiumColbertium
gtggtcgaggcctcgatcaagaaggtgctgacgacgctggtggaagccgtggtgctggtgttcgtggtgatgttcctgttcctccagaacatccgctacaccattatcccgaccatcgtggtcccggtggcgctgctcggcgcctgtaccacgctgctgctcgccggctactccatcaacatgctctcgatgttcggcatggtgctcgcggtcggaattctcgtcgacgacgccatcgtcgtggtcgagaacgtcgagcgcatcatggccgaggaaggcctgccgccgaaggaagcgacacgcaaggcgatgtcgcagatcaccggcgccatcatcggcatcaccttggtgctgatggcggtgttcgtgcccatggcgttcttcccgggctcggtcggcatcatctaccgccagttctcagtcaccatggtcgccgcgatcggcttctcggccttcctcgcgctgtcgctgaccccggcgctctgtgcgaccctgctcaagcccgtcgccaagggacacgctcattcgagcaacttcgtattcggctggttcaaccgcgtgctggaagccacgcgatttcgctacgaggggacggtcggcttctcgctgaagcgcaccggccggctgatgctggtctatgccgcgctgctggtcggcctttcctgggccttcgtcagcctgcccggcggcttcctgccggtcgacgaccagggcttcatcaccaccgacgtgcaaacgccttcagattcgtcctacgcccgcaccgaggccgtgatcgagaaggtcgaaaaataccttgccgcgcggccgggcgtcaaagacgtcaccttcctcacgggcttcagcttctccggtcagggcatgaacaccgcgcaggccttcatcaccttgaaggattggtcggagcgcggaccgcaggattccgccgcggcgatcgtcaacgacgtcaaccgcgacctgggctcgtcgatccgcgacgccaagatcgcggcgctgcagccgccgccgatcgacaatctcggcaactcctccggcttctcgttccgcctgcaggaccgcggccagaagggctatccggccttgatgcgcgccgccgaccagctgatcgcggaggccaatgcgagcccggtgcttcagaaggtctatatcgagggcctgccagaggctggcgtggtcaatctcatggtcgaccgcgagaaggccggcgccttcggtgtcaccttcgaggacatcaacaacacgatctcgaccaatctgggctccaactacatcaacgacttcccgaaccgcggccgcatgcagcgcgtcgtggtgcaggccgacgcccgcgaccgcatgcggaccgaggacatcctcaactacaacgtcaagaacagccgtggccagctggtgccgttctcgtcctttgccacggtggaatgggcgcgcggtccgacgcagatcgccggcttcaactattatccggcggtgcgaatctccggcgaagccaggcccggcttcacctcgggcgacgcgatcgccgagatggagcaactggccgacaggcttccgcgcggtttcggctatgaatggaccggacaatcgctgcaggaaaaactgtcgggctcgcaggcgccgttcctgttggcactgtccgtgttcgtggtgttcctgtgcctcgcagcactctatgaaagctggaccatcccgctcgcggtgctgctcaccgtcccgctgggcatcgtcggcgcggtgaccgcggcgatgctgcggggcttgcccaacgacgtctacttcaccgtcggcctcatcaccatcatcggcctcgccgcgaaggacgcgatcctgatcatcgagttcgcgaaggatctgcggaaagaaggcaagccgctggtggaagccaccatcgaagcctgccgcctgcgcttccgcccgatcctgatgaccggcctcgccttcatctgcggcgtgctgccgatggcgattgcccacggcgccggcggcgccagccagcaggcgctcggaagcgtcgtgatgggcggcatgatcgccgtggtgatcctggcgctgttgatggtgccggtgttcttcgtctcggtgcagcgcgtgctgggcggggaccgggagccggcgacggccaatgaaggcaagaaggcctatggaggaccgccggcgcgggcgcacacgagccattga

SEQ ID NO: 4236 - DNA, 969 bp, BradyrhizobiumColbertium
atgccgagtttcttcatcgacaggcctattttcgcctgggtcgtcgcgctgttcatctgcttgatcggcgcgattgcggtgccgctgctgccgatcgcgcaatacccgatcatcgcgccgccatcgatctccatctcgaccagctatcccggcgcctcgccggaaaacctctacaacagcgtcacgcggctgatcgaagaggagctcaacggcgcatccggcatcctcaacttcgaatcgaccagcgactcgctcggacaggtcgagatcatcgccaatttccagccgggcaccgataccaacgacgcctcggtcgaggtgcagaaccgcatcaagcgcgtcgaggcgcgccttccgcgcgcggtgatgcagcagggcatcctgatcgaggaagcctccagcgcggtgcttcagatcatcacgctaagctcgaccgacggcagcctggacgaggtcggcctcggcgacttcatgattcgtaacgtgctgggtgagatccgccgcattcccggcgtcggccgcgccacgctgtactcgacggagcgctcccttcgcgtctgggtcgatccggccaagctcgtcggctatgggctgaccgccgatgacgtaaacaaggccatcgccgcgcagaacgcgcaggtggcctcgggcagcattggtgcggagccttcgacgtccaaccaacgcacttcggcgcttgtgctggtcaagggccaactctcctcgcccgacgagttcggcgccatcatcctgcgagccaatgccgacggctcgaccgtgcgcctgcgcgatgtcgcgcgcgtcgaggtcggcggcctcagctaccagttcaacacacgcctcaacggcaagccgaccgcgggtctgtcggtgctgatgtcgccgaccggcaatgcgctggcgaccgcgagcgcggtcgaagccaagatgaaggagctgtcgcgcttcttcccggccaacatcacctaa

SEQ ID NO: 4237 - DNA, 1197 bp, BradyrhizobiumColbertium
atgtcaggacttcgcgcgcgatcggcatgcgttgcattgatgctcgcggcccttacgccgctactcggtgcttgcgacgaatccagctccgccatttccgcagcccagccggtggcccccgatgtcagcgtggtcgtcgtcaagccgcagccgcggtccgtggtccgcgaactgccgggccgcatcgcaccgacgcgggtgtcggacgtgcggccgcgcgtgtccggcatcgtggttgcgcgtctgttccggcagggtagcgaggtaaaggcgggcgatccgctctatcgcatcgatccgcgccccttcgaggtcgaggtgatggccaatgaggccgcgcttgccaaggctgaggcggcattgatgcaggccaggcagcaggcacatcgcatcgcgaccctcaccaaggatcgcgctgctccggaagccgagaatgaaaaggcgatcgcagccgagcgccaggcccatgccgaagtcgagggccgcaaggctgaactcgcccgggcaaagctcaatctcgattatgcgaccgtgcgtgcgccgatcgacggcgtggtcggtgcggcgctggtcagcgagggtgcactcgccgtgcagaacgagaccaatctcgccacgatccagcagctcgatccgatctacgccgacttcacccaatcggtgaacgaactgaatcagctccgccgttccttcgagaccggcgacctcgagcgcatcgcctcggataccgccaaggtgcgcctggtgctcgacgacaacaccatctattcccttgagggcaagctgctgttttccgacgccaaggtcgacgcccacaccgggcaggtgacgttgcgcggcgagtttccgaaccccaaacgcgaattgctgccgggcatgtatgtccgtgtccgcatcgaacagggtctcgattccgatgcgattgcggtgccgcagcaggcggtccagcgcaacggcggcggtggcagcgaggtattcgtcgtcaaggacgataaccatatcgcggtacaggcggtgcgcacaggttcggtgcaggacggactctggttcgttaccgaaggcctgaaggccggcgacaaggtcgtggtcgaagggttccagaagttcgcagccggcgacaaggtgcagcctcagccctggtccgaggtgggcgcgaccgcggataaccggcacgcccagcagcaggtcacgcggtaa

SEQ ID NO: 4238 - DNA, 1050 bp, BradyrhizobiumColbertium
gtgactgcaagctcgacattctggggccgcatgagcgtcgtttccgcgatcatcgggactgccgaacgcgtgccgctaccggatgtggtgatgcgcgccgcgatccagcggctgtgctcccgcaccgccatgcgccttgccggccatgacgccgccgccgatgccgcctttgccggccggatgatgctgcggccgatcgccgagcaaccggaggccgggcgtaacgatgtgcccgtggccctctccgcggaggtgctcggcccgaaccggaagtactcctgcggcttctacaagaccactgcgaccaccctgcaggaagccgaggaggaggcgctgcgccagaccgtcgagcatgccggtctcgccgacgggcagaccatcctggagctcggctgcggctggggctccttgtcgctttggatggcccggcagtttccgcacgccaaggtgacggcggtagcgacctcgcaggcgcagcgcgcgtatgtcgaggagcaggcagagcagcgcggtttgctgaacctgcgtgtggttgcggcggacatgaacgtgttcgcgcccaacggccaattcgaccgcatcgtctcggtggagacgttcgagcggatgatgaactggcgtaagctgctgacgcgcttgcgctcatggctcgcgcccgacgggcgcttcttgatgcacatcgcaacccatcgcaccgggtccgatctgttcgaccggtccgatcgcgacggcgggatcgcgcagcatgtcttcacgggcgggctgatgccgagccatcatctcgtcaggcaattcgacgacatctttgcgatcgagaaggaatggtgctggagcggtacgcactatcagcgcaccgccaacgactggctcgccaatttcgatgcgcgtcgcggcgcgatcgaggtgtgcctgcgcagggtctatggcgaggagaccgcccggttgatgcgtcgctggcggtggttccttctcgcgacatcaggcttgttcggctatgctgggggaactgaatggggaatcagccactatcggatgaaagccgccgactga

SEQ ID NO: 4239 - DNA, 987 bp, BradyrhizobiumColbertium
atggatatcgagtacaccaagctgtcctcgcccagcgtcttcctggtgcggatgctggtcttcctggtgctctgcgcgctggtaagcgtggtgctctacaaacagattatccaggccttcttcgccaatcccgggctcaacgccctgatcggggccgtgctgttcatcggcatcgtgctggccttccgccaggtcatccggctctatcccgaggtctcctgggtcaacaatttccgcatcgccgatccgggccttgcgccggcccggcacccaaaactgctggcgccgatggcggccatcctcggcggcgagcgctctgggcggatgacgatcacccagaccacgatgcggcatctgctcgattccatcgcgacgcgcctggacgaggcccgcgacatctcgcggtacatgaccggcctcctggtcttcctcggcctgctcggcaccttctggggtctgatcgagacggtcggctcggtcggcaaggtcatcgacgggctcaaggtcgggggcgattccggggcgctgttcgacacgctgaaggagggcctcgccgccccgctcggcggcatgggcatctcgttctccagctccctgttcggacttgccggctcgctggtcctcggtttcctcgacctgcagtcgagccaggcgcagaaccgcttctacaccgacctcgaagactggcttgccaccaccgtgcgcgaatatggcggcagcgaggtgcctgccgcctccggcgggggcgtcgccagcggcgagctccaggccgcggtggagcggctgcgctcggtgctggaagaaggcagcggcagccgcggcaccacggcggcgatggcgagccttgccgaagcgatccaggcgctggtctcgcacatgcgcaccgagcagcagatgatccgcgaatgggccgacggtcagggcgagcagaaccgcgagatccggcgcctgctggagcggatcgcgcgccagcctgagaagagttag

SEQ ID NO: 4240 - DNA, 1029 bp, BradyrhizobiumColbertium
atggctcttgcccgcgcccgccgcagcgaaggcggcctcaattactggcccggcttcgtcgatgcgctgtcgacgctggttctatcgatcgtattcctgctgtccgtgttcctggtcgtgcagttcttcctgtcgcaggaggtcaccggcaaggacaaggcgctggagcagcttaatgccaagatcgcccagctcaacgagctgctctcgctcgagaagctgggcaagcttacgctcgacgaccaggtctcgcagctgaaagccggcctcgcctcggccgagagcgagcgcgaccgcatcaagggtctctacgatggcctcgccgccgccgggaacgacgcgcaaggcaagacggcggagctcggcaaggcgctggactcggagaaggcggtctcggcacgggcacttgcccagatcgaggtgctgaaccagcagatcagtgcgctcaggcggcaattggcggcgctggaagaagcgctcgatgcctccgagaagcgggacaaggaatcgcagaaccggatcgccgatctgggatcgcgcctcaacgtcgccctggcgcagcgcgtgcaggaattatcgcgctaccgctccgaattcttcggccgcctgcgtgccatcctcggcaaccgccccgacatccgtatcgttggcgaccgtttcgtgttccagtccgaagtcttcttcgacaccggacaggcgatgctgctgcccgagggccgcgccgagctcgacacgctggcggccgcgctgatcgagctcgacaagaagatcccgagcgagattccctgggtgctgcgagtcgacggccacaccgacgtgcggccggtgagcggcgcgaacttcaagtcgaactgggatctgtcggcggcccgctccatctcggtggtgcagtacctgatctcgctcggcgtgcccgcccagcgcctcgtcgcggccggcttcggcgaattccagccgctcgatcccggcaacagcgaggaagcctacaagcgcaaccgccgcatcgagctgaagctgacggagcggtag

SEQ ID NO: 4241 - DNA, 483 bp, BradyrhizobiumColbertium
atggatggccgggtcaagcccggccatgacgagtcaatcccgatgatccaactccgcccctatcgctctgaggacgaggccgccgcaatcgacctttggcatcgcacctggcagcaggcctacccgcagatcgactttgcggcgcggctcgaatggtggcgcgggcgctggcgcaaagacctggtgccgaaggccgcgatcgtggtggcagagcttgacggcgcgttgatcggtttcgtcaccatcgatggcgaaggctatctcgaccagctcgtggttgatcccgtccattggggaacagacgcggcaaggctgctggtggacgaggccaagcggctgtcagcttcaggggtcacgcttctcgtcaacaaggacaatgcccgcgccatccgcttctacgagcgcaacggctttgcccatgcaggcgacgatgtgaacccgacctcgggccggccggtgctgaagatggaatggaagccgtag

SEQ ID NO: 4242 - DNA, 1842 bp, BradyrhizobiumColbertium
gtggaacggcttgatgaccaatatgtcgatcggcccgaaatgaacgtcgcggacacgccatcgatcgaggatgagctgatcgagcagccggcgaagggacgcgcaaagctccggccgttgctggcgctcgcgccctatgtgagccgctatcgcggccgggcggcgctggccttcgtcgcgctcacggttgccgcgctgaccacgctgctggtgccgatcgcggtgcgccgcatgatcgatttcggcctgacgcccgagggcatcgagctgatcaacagctatttttcggtgatgctggcggtggtcgccgtgctcgcgctcgcgagcgcggcgcgctactacctcgtgatgacgatcggcgagcgcatcgtcgccgacctcaggcgcgacgtcttcggccatctgctgtcgctgtcgcccgccttcttcgattcggcgcgcagcggcgagctgatctcgcggctcactgccgacaccacccagctcaaatcggcggtcggcgcctccgtgtcgatcgcgctgcgcaacctcatgatgtttttgggcgccgccgcgatgatggtgatcacgagcccgaaactttctggtttcgtgctgctggccattcctctcatcgtgctgccgctggtcgccttcgggcgctgggtacgccgcctctcgcgcaatgcgcaggacaccctcgccgacgcctccgcctatgccggcgaactggtcggcgcgatccgaaccgtgcaggcctataccagcgagcaatttgcccagaagcgtttcggtggcgaggtggaacaggcctatgaggccgcgcgcacctcgacccaggcccgcgccgtgctcacggccatcatcatcttcatcgtgttcgcgagcgtggtcgcgatcctctggatcggctcgcatgacgtgctctccggcgcgatcacgccgggccggctcggtcagttcgtgctttacgcggtgttcgccgcggccggcctcggccagctcagcgaggtctggggcgaggtctcggcggcatcgggcgcggccgagcgcctgttcgagatcctgcacgtgaagcccgagatcaccgcgcccgcggcgccgcttgcgctgccggtgccggcgcgcggcgaggtcggtttcgagcaggtcagcttcgcctatccggcgcggcgcgacgtcaaggtgctcgatgccgtgtcgttcaccgtgcgccccggcgagaaggtcgcgatcgttggtccctcgggcgccggcaaaagcacgatctttcatctcttgctgcgcttctacgatccgcgcagcggaacgatctcgctcgacggcgtaccggtcaaatccgccgatccgcgcgatttccgcgcccgcatcgcgctggtgccgcaggaatccgtggtgttcgcggcaagtgcccgcgagaacattcgcttcggccggcccgatgcgaccgatgcggaggtcgagcgcgccgccgagctcgcgcacgccgccgagttcatccgccgcctgccggaaggtttcgagacggcgctcggcgagcgcggcgtgacgctgtccggcggccagcgtcagcgcatcgccatcgcccgcgccatcctgcgcgatgcgccgctcctgctgcttgatgaagccacctccgccctggacgccgaaagcgagacgctggtgcagaccgctctggaagagctgatgcgccaccgtaccacgctcgtcatcgcgcatcgccttgcaaccgtgctgtcctgcgaccgcatcctggtgatggaccagggcaagatcgtcgagcagggcacgcatgccgagctcgtcgctgcgaacgggctttatgcgaggctggcgaggctgcagttcgagggggcgtga

SEQ ID NO: 4243 - DNA, 171 bp, BradyrhizobiumColbertium
atgtcccttaggggcaaaccccgcttcaacaggccggcacagcttgttttgcctgatttcgtgaggtatagagccgcccaaatccgtcattcgctagccacccaagaaggcgccggagcgccgaggaattgccatgaaagccgagattcatccagattatcatacgattaa

SEQ ID NO: 4244 - DNA, 183 bp, BradyrhizobiumColbertium
atgaccgacggaaccgagtacctgacccgctcgacctggggcaaggaaggcgacacgctgaacctcgatatcgacccgaagtcgcacccggcctggaccggcggctccgcgcagatcatggaccgcggcggccgcgtctcgcgcttccagaagaagttttcgggctttctcaaaaaggactga

SEQ ID NO: 4245 - DNA, 510 bp, BradyrhizobiumColbertium
atggaacgtttgcaggccgacggcgctctcgttcaactcagcgagcggttcaccaactctgcagccttcggcaacctgttccgtgagggcatggacctcgtcgaggaaaccgctgcctatctcgacggcgccggccgcatcgaagccaaggcgctcgatcgcgccgtcagcctgacctacgcgacagagagcatgcgcctcaccacgcgtctgatgcaactcgcctcgtggctgctgctgcatcgcgccgtgaaggagggcgagatgacgctgagccaggccaaccgcgagaagaccaaggtcaagctcaccgccgccgatcccggtcccgccgacaccatcgagaagctgccctcccagctccaggacctgatccatcgctcgatgagcctgcagacccgcgtgcgccgcctcgacagcacgatccacaccccgccgaccgagcatgcagcgatcggcaaccctctggtgccgcaactcaacgcgctgaaggccgcgttcgagcggtag

SEQ ID NO: 4246 - DNA, 192 bp, BradyrhizobiumColbertium
atgccgatcgaagacgacgaccgcccgcgcaagaagatcagccatgaaatcggtcaagatctctcgctgttgtcagtcgaggaactgaccgaacgcgtcatgctgctcaagaccgagatcgcacgactggaagaagcggccgcaaagaagcgcgcctcacgcgatgcggcgaacagtattttcaagtcgtaa

SEQ ID NO: 4247 - DNA, 999 bp, BradyrhizobiumColbertium
atggacaagctgcccgcgcaaatgaccgtggtcgccatctccaagcccggcggaccggaggtgctggtgccggaacaacgggcgctgccgcagcccggtcccgacgaaatcctggtcaaggtcgaggctgccggcgtcaaccggcccgacgtggcgcagcgctccggtgcctatccgccgccgcccggcgccagcgacttgccaggcctggagattgcgggcgaagtggtcgcggtcggcagcaatgccaagcggcacaagatcggcgacaaggtgatgtcgctggtcgccggcggcggctatgcgcagtactgcatcgcccaggatgcccaggcgatgagcgtgccgccggcactgtccatcaaggaggccggcgcgctgccggaaaccctgatgacggtctggcacaacgtgttcgagcgcggcggcctcaaggccggcgagacgctgctgatccatggcggctcctccggcatcggcaccatggcgatccagcttgccaaggcattcggcgcgaaggtgttcgtcacggtgggatcgcaggacaagatcgacgcctgcctcaagctgggtgccgaccgcgccatcaattacaagaccgaggatttcgtcgccgtggtcaaggctgagaccaacaacgttggtgtcaacctgatcctcgacatggtcgccggcgactatgtcgatcgcaactatgatgctgcggcggtcgacggccgcatcgtccagatcgcgaccctcaacggcccgaaggtcagcgtcaacatcgccaaggtgatggtcaagcgcctgacccataccggctcgactctgcgcccccgtagtaatgcggacaaggcggcgatggtggctgcgatcgaagagaaagtgatgccgcttttgcgcgaaggccgcatcaagccggtcatggacagcactttcccgctggaaaaggcggcggatgctcaccggcgcatggagacgagcgcacatattggcaaaattgtgttggaggtctag

SEQ ID NO: 4248 - DNA, 2877 bp, BradyrhizobiumColbertium
ttgcgtctgatcaggtgcctcgcgcccatcgcgctgggcctcatgattcttgtcgccgcgtatcccgcgcgcgcgctcgacgccgtcagcgtccgtagcgacgcgcccgcgatcgacctcaccggcgtgctcgagcatcagcgcagcgatgccgaccgcatccaggtctccaccgcgcccggcaccgacggcatcgtccgccgcatcgaggtgcgcgcgcgcgaaggcgggcagaactgggtggtgttcgcgctcgccaacaacaccgacgaccagctcgaccgcctgatcgtcgcaccgcactatcgcatcgtctcctccgggctgctgtggcccgacctcggcctgtcgcgcatcgcgaccatcacgccctcgatcggcgatcggccggaacgtcaggaaagcgccaccgcggacgtgttccgcatcacgctcgaccccggcgccgtcgtcaccttcgtcgcggagctgcgcaccgacaagctgccacagctttatctgtgggagccggaagcctacaaggacaaggtcaactcgttcacgctctaccagggcatcgtgatcggcatctctggcttgctcgcgctggtgctgaccatcctgttcgtggtgaagggcagcatcatgttcccggccgccgcagcgctggcctgggcggtgctggtctatatcggcgtcgatttcggcttctggggcaaagtgctcgacatgtcgaacaacgccgagcgcatctggcgcgcggcgggcgaagcgatcctggcggcaacgctgctcgtgttcctgttcgcatatctcaatctcagccgctggcacgtgcgctattcgcacatcacgatcggctggctcgcctttctcggctcgctggtggcgctcgcgctgttcgatccggcggtggcctccggcatcgcgcgtatttcgctggtgctaatcgccttcgccggcttcgcgctgatcgtctatctctccacccacggcttcgaccgtgcggtgctcttgatcccgacctggttcctcctggtggtctgggtggccgccgccggcatgacggtggccggctccgtcaccaacgacatcgtcggcccggccctgctcggcggcctcgtgctgatcgtgatgctgatcggattcaccgtgatgcagcacgctttcgccggcggcggcgccaccaccggcatcgtctccgacatcgagcgccgggcgctggcgctggccggctccggcgatctgatctgggactgggacgtgtctgccgataaggtcttcaccagccccgagaccgaagccctgcttggactgaagcgcggcacgctcgaaggtcctgcagcctcatggctcgaggtgctgcatccgctcgaccaggaccgtttccgcgccgcgctcgacagcgtgctcgaccagcgccgcggccggctggtgcaggatttccgcctgcgcacgccggacggtcatttcatgtggttcgcactgaaggcccggcccgtggtcggctcggacggcgaggtctcgcgcgtcgtcggcacgctcaccgacgtcacggaattgcgcaacgccgaggagcgcctgctgcacgattccgtgcacgacaacctcaccggcctgcccaaccgcaagctgttcatggaccggttgggtgccgtcgccaacttcgccaagaccatgccgacgctgcggccgacgctgatggtgatcgacctcgaccgtttcaagcaggtcaacgattccgtcggcattgcggtcggcgattccattctgctgacgctggcccgccgcctcacccgcatcctgaagccgcaggacacgctggcccggatggccggcgaccagttcggcctgatcctgctctcggagcaggacccggcgcgcatcaccgccttcgccgagaccatccgcaagaccatccgcgcgccgatcgccttcaacgaccgggagatcttcctcaccgcctcgatcggcctcgcgctctccgatccccaggttcagctgacggacgagatcatcaaggacgccgagctggcgatgtatcattccaagcggatcggcggcgaccgcatcgacgtctacaagcccgcgatgcgcgcgcggaagaccgatcgcctgaccctggagagcgagctgcgccgggccatcgagcggcaggagatcaccatcctgtaccagccgatcgtgcggctggaggatcgctcgatcgccggcttcgaggccctggcgcgctgggatcatccgaagctcgggcgcatggcaccgtcggaattcatcaccatcgccgaagagaccggcctgatcgtcgacctcggcatgttcgtgctcgaccagaccgccaagcagctctcgatctggcaacgcgcgatgcgctcgcgcgacccgatcttcgcctcggtcaacgtctcttcgcggcaattgctgcgccacgacctgatccacgacatccgtaccgtgctgtcgcgctcctcggttgcgcgcggcacgctgaagctcgaattgacggaatcgctggtgatggagaatccggagcacgccgcgcagatgctgacgcgaatccgcgagctcggcacggggctgtcgctcgacgatttcggcaccggccattcctcgctggcctatctgcagcgcttcccgttcgacaccatcaagatcgaccagtccttcgtgcgcaccaccagccgcggcacccgcccggtgatcctgaaatcgatcatcgcgctcgcgcacgatcttggaatggacgtggtggcggaaggcgccgagaccgattccgacgccgtcgagctctaccagatgggctgcgaatacgcgcaaggtttcgcttttggcgagccgatggacgccgatgccgcgatgcgcctgctgacggaagtgcggctcgaagcggcgagctag

SEQ ID NO: 4249 - DNA, 249 bp, BradyrhizobiumColbertium
atgatcctgcgctggcttggtgggatccttggcgcagcgctgatcgggttgggcatgctgtcagcgctcgccttcgaattccgctattggcgttggcgcgactgcttcaacgaactcggccggtgctacgacccggtctcgcaggacgtctacctcgagcaagcggggttggtgtggggcggtcttgcggtggtctcgctgctgctggggcttggactgctgatgagtctgcggcgcagacagagctag

SEQ ID NO: 4250 - DNA, 261 bp, BradyrhizobiumColbertium
gtgaacgactatctcgcgttgcgcgactatctgctgcggcagaagcaggaggagtttgtgctgagcttcgagcagatcgaggagatcatcggcgcggcgctgccgcgcgcggcgcagcgcgcctcctggtgggacagcctgcgcagccccgacatccagatgccgcaacgcgaagcgtgccttgccgcgggcttcgtggcgacgcgcatgcccgatggcgagagcgtgaggttcaggaagcagaagtcgaagaagcggtga

SEQ ID NO: 4251 - DNA, 1497 bp, BradyrhizobiumColbertium
atgctgtctggatggcgcgacgtcatggcccgccagccgtggcggatttcagcgaaactgctgatcatatcgtccgtggtgacggtgatcggcttttccgccatttgcgtcaacgtcatgctcgacatgcgccggggcgaggaggcgctcgcccgccagacgctggagaacctcgcgaccaccatcgaatccgacgtgaaccggaacgtcgagatctacgacctgtcgctgaaggcggtcgccagcaacatgctgctgcccgagctcgcgactgtttccaagacgatccgccacctgatcctgttcgaccatgcgacgacggccaagcatttcggtgccattcaggtcttcgatgccgagggccggctgaccatcgacgcgtccacgctcgatcccctcgccgagaatcggagcgaggaggactatttcagggtgcatcgcgacaatccgggcgccgggctcttcatcagccgcccgatgctgtttcgcggtgcctactcgatcgtgctgagccgccgcatcagcgataccgacggcggctttctcggcgtcgtcgccggctcgatccgcttcagctacttccacgaattgttcgagcgtctgaacctcgaccctgaagacaccatcacggtgctcaagcgcgatcgcaccatcatgatgcggcggccgttcgatctcgacatcatcggcacgaacctgaacgaccgccgaacctggagagcggacaatctccgggccggcgactcctattcgggacagggcccggtcgatccgacgccgcggctctacgtccgcagcggcggcagcggaccgctgttcgtggtggcgggcaagcctctggccgcagtattcgaactctggcagaaagaagcctaccgcatcggcgcagttgtgctggcgctcgcgctgttcgtgctggcatcgacgctcgtgctcgcgcgcgagatcggcaggcgcgccgaggccgagcgaaagctcgaggagatggcgacgacggacgcactcaccggcctgaagaaccgccgcaagttcgattccgtcatcgacactgaatggcggcgcgcgatgcgccagaaggttccgatcgcgctgctgatgatcgatgccgatcacttcaaggcctacaacgacacgttcggccaccaggccggcgaccaggtgctggtcggcatcgccatctgcatttccgattcggtgagccgcgccggcgactgcgccgcgcgctacggcggcgaggaattcgccgtactgctgccgaacatgtcggccaccaacgccttcaaggtcgccgagaccatccgtctcaaggtgcagggctggtccgacgatcaggcaatgtcgaccgtctcctgcggtatcgcaagcctcgttcccgatgcgggtatggattggccggtcctggttgccgccgccgacaaggcgctctatgccgccaaggcgggcgggcgtaatcagtcggtggtggcgagcctgccgcagctgtcgctggtggcgtga

SEQ ID NO: 4252 - DNA, 876 bp, BradyrhizobiumColbertium
atgaagattcgcaaagccgtattcccagtcgccggcctcggcacccgcgtcctgcccgccaccaaggcaatgccgaaggaaatgctgaccatcgtcgacaagccgctgatccaatacgtctatgatgaggcgagggaggccggcatcgagcatttcgtcttcgtcacgggccgtaacaagaacgtcatcgaggaccatttcgaccggatgttcgagctcgacacgacgctggccgcgcgcggcaaaaaggcggagcaggacatcctggcccagaaccagcccgaagccggcgccgtcagcttcacccgccagcaggcgccgctcggcctcggccacgcggtctggtgcgcgcgcgacatcgtcggcaacgagccgttcgccgtcgtgctgccggacgagctcgtgctcaacacgcccggctgcctgaagcagatgatcgagatggcggcctcgctcggcgagaaatccaatctggtcgcggtcgaggcggtgcccgatcacctgacccatcaatatggcatctgcggcgtcggcaagcgcaacgggaagatgttcgaggtcgacggcatggtcgagaagccggccaagggcaccgcgccttccaatctctcgatcaccggccgctacatcctgcagccggagatcttcaagatcctggagacccaggagcgcggcgccggcggcgagatccaattgaccgacgcgatgatcgggcttgccaagtcgcagaagttctacggggtcgagttcgaaggcgagcgccacgattgcggttccaagcccggcttcctgcgcgccaacatcgcctacggcatgaagcgcccggaattgcgcgacgggctgatcgcggagatgaagaaatatctagggcagtag

SEQ ID NO: 4253 - DNA, 1377 bp, BradyrhizobiumColbertium
gtggcagcgcgggcaggctttgtggccggagcaacgatgatcgcggcggccttgctgctgccggccagcgcgcacgcccaggcgcagaacggcctgtccaatctgttcggcggcatcttctcggggcccaaccccgctccgtcacaagcagcgccgagccccggcggctcacagaccggaccgttgccttggagcggcgaggatggcgcctccggccacccgctgatgacggccgccgcgatccgcgaggcagccggcaatttcagcaattgcgtcgcggcgatgtggcccgatgctgcacggcgtggcatcacgcaggacaactttcagcgcttcaccgcggggctctcgcctgacctgcgcatcatggacctcatggactcgcagccggagttcaccaagtcgatctggaactatctcgacattctcgtgaacgacaaccgtctcgccaagggccgcgagatcctcgccacgtacaaggcgcagttcgacgcgaccgaaagggccaccggcgtcgaccgctacatcatcgcctcgatctggggaatcgagtccaattattcgacgcagatgggtgatcgcagcgtgctgcaatcgaccgcgacactcgcctgcgtcggccggcgccaagcctatttcaaggacgagttcctgtccgcgctggagatcctcaatcgcggcgatctcaggccggagcagctgcgcggctcctgggccggcgccttcggcccgacgcagttcatgccgaccgccttcaagcggttcgcggtggatggggatggcgacggcaggcgcgacgtcgtcgacaatcccgccgacctgattgcatcgaccgccaacaatctcaagaaggacggctggcagtcgggccaaacctggggctacgaggtcgtggtgccccggggcttcaactacatgctggccgaccgctccaaggcgatgccgatcgcgcactgggaaaagctcgggctcaagcgggcgacaggccagcccttcccacatccctcgcagaaggcttacctgctggcgccggccggcgcccaagggccgggcttcctgatgctgcagaactaccgcgtcatcatgaagtacaacccggccgaggcctatgcgctggcgatcggccatttcgccgaccgcttgcgcggcgggcaacccttcgtgcagccttggccccgccaggagcgggagctgtcgcgcaccgagcggctggaactgcagcagctcctggcgcagcgcggcttctacaagggcaccccggacgggcagttcggcggccagacccgtgaggcgttgcgccacttccaggcctcgatcggggcgcccgcggacggattcgcttcatccgacatgctggaccggctccgcgggcggtaa

SEQ ID NO: 4254 - DNA, 1728 bp, BradyrhizobiumColbertium
atgtcgaagaagtccctgttcaaggcgctgaccgagaccggcccgttgatcgcgctggggacggcgcttgcgatcctggtctcgatcgcagcgccagcctctgcgcaattcttcaacttcccgggcttcggcggaccgccgcagcgcgcggcgccaccgccgccgaggggcggcggaggtggtggcggctggttcggcggagatttcttcgcaccgttccaacagccgccgccgcaagcaccgcgccaggacttttcgcgcgcgccggcgccggccaagcgggacaccattcctgagaagaacgtgctggtgatcggcgacgccatggccgactggctcgcctatggcctggaagacgcctacgtcgagcagcccgacatgggcgtgatccgcaagcacaggacgaattcgggcctgatcaagtaccagccaaggggtgaaccctccgactgggcggccgcggcgaagggtatcctcgagaccgaaaggcctgatgtcattgtcgtcatgctcgggctcaacgaccgcgccgcaatccgcgagcccgcagccgacaaaccggacaaggccacggaaaaggataaagagaaggacaagaagcacgacagagcggcgcgcgccaagcagccggccaaacccggcgagacgaagccgggcgccgagagtgccgccaagccggacgacaagcctgccgatgccgatctgccgcaggacgacgccgacaatgccgatacgccggccgcagcgccggagaagacggcgcgcaaccccaacgggctctacgaattccgcgacgaccgctgggtcgaactctacggcaagaagatcgaggagctcgccaacatcctcaagtcgaaaggcgtgccggtgctctgggtcggcctgcctgcagttcgcggccccaagggcaccgcggacacgctgttcctgaattcgctctatcgcgaaggcgcggccaaggccgggatcacctatgtcgacgtgtgggacggctttgtcgacgaagcggggcgcttccttcagaagggcccggacttcgagggtcagatccgtcagctccgtagctcggacggcgtctatttcaccaaggccggcgcgcgcaagctcgcgcactttgtcgagcgtgagattacgcgcctgctcgcgggccgctccggcccgatcgcgctgccgagcgagccagccactcccgataccagcgccgagccgggcaagcccgcgccccggccgctggccgggccgatcgtgccgctggtcgcagcctcgatctcgaccgatcaattgcttggcggtcccgggacgcgtcccgctgccgtcgatgcgctcgctgcgaagaccatggtgaagggtgagccgcttgcggcgcctgccggccgcgctgacgattacgcctggccgcgccgggaagtcggccgggagcaggccaagggcgatgcgcccatggccgcaacgacgccggagggcggcccagctcagggtccgccgggagcggccgccgcggtcgcgccgccgaagctcgcgccgaaaaagccgccgatgccgccgcagcagccccagcagcagcctgcacaggcctcaccgtcatttcgggatttcttcggcttcggttctccgcaacctcccccgcgtcaattcgcgccgccgccgggactgcgcaatccagcgcaaagccctccgatcccgcgtccgcctggcaacgtcgggcgatcggcggagatgttccggtaa

SEQ ID NO: 4255 - DNA, 369 bp, BradyrhizobiumColbertium
atggacacggatcggattgttgggtcggccaaggaattcgccgggcgcgccgaaggcgcggtcggagacatggcaggcgatgcgaagacacaggcgtcgggcaaggcgcgggaagccgcgggcacggtgcagaatctctacggccaggccaaggatgccgtgcgtgatgccacggacaccgcggcgagctacgccaaggacgcttacgagaacagcggcgataccttccgcgacggctcgaaggctatcgcgcagaaggtgcaggacaatccgctcggcgcgctgctggttgccggcggcatcggcttcgcgctggcgctcctgatgtcgcggcccgcccgccgcccgccacagcgctggcgctattaa

SEQ ID NO: 4256 - DNA, 780 bp, BradyrhizobiumColbertium
atgtccgacttcaaagaactcagccggtctgtgaagggcctgaccgtactcgtcaccggcgcagccagcggcatggggcgcgcaaccgcgcgcgtgttcgccgccgagggcgcgaacgtcgccgtcaccgattacgacgagcaaggcgcgcatgcgctcgccagggaaatcgcggcgagcggtgcgtctgccagggcgtggaagctcgatgtcgccgacggcggcgagatcaagaaggtggtcggcgatatcgccgcgcatttcggcgcactcgatatcatcgtcaacaatgccggcatttccgtgcgtgtcgcgatcgacgacgaggcctatgaggacgcctgggccaggagcattgccgtcatgctgacggcgcatccgcgcatcatccgcgctgcactgccccacttgcgcaagtcgaaaagcccgcgcatcgtcaacattgcctcgaccgaggctctcggggccaccgcgctgcacagcccgtattcggcagcgaagggcggcgtcgcgagcctcacgcgctcgctcgccgtggagcttggccgcgagggcatcacggtcaactgcatttgtccaggcccgatccgcacggcgatcactgaccgcatctcggaggagcacaagaccatctacgccaagcgccgcaccgcgctcggccgttacggcgatcccgaggaagtcgcgcatatgacgctgaacctgtgcctgccggccgcgtccttcctcaccggcgcggtgataccggtcgacggtgggctgatggcgcggaatgcgtga

SEQ ID NO: 4257 - DNA, 738 bp, BradyrhizobiumColbertium
atggcaaacgagctcgatttctcaggcaagcaggtgctggtcatcggcggttccagcggcatcggcaacggcatcgcgcaggcctttcgcgcgaggggcgcgcaggtcgcggtctgcgggacgcgcgctcgcgcaacggaatattctgcggaggagggctccgatctcacgggccttgcctatgaccagctcgacgtcagcaatgccggcgcgatcgagacgttcaggccgcccttcgataagctcgatgtgctcgtgctcgcgcagggcgcggtgctctatcgccgcggcgagttcgagatggccggctttcgcaaggtggtcgaggtcaacctgatgagcctgatggcctgcgccactcgtttccattccatgttgcgggattccaagggttcgctgatcatcgtgtcctcgaccgcggcctatcattccaccatgggcaatcccgcctacaacgcctccaagaccggtgcggtcggattgacgcggacgttgggcgaagcctgggccgaagacggcatccgcgtcaacggcatcgccccggggctcgtcgacaccaagatgacgaaggtgacgaccgacaatccgaagcggctcgaaggtgcgctcgcgcgcatcccgctgcggcgattgggcacgccggccgacatggcgggcgcggcactgtttctggcttcgccgctgtcatcctacatcatcggccagacgctggtcgtcgatggcgggctcatcttgtaa

SEQ ID NO: 4258 - DNA, 798 bp, BradyrhizobiumColbertium
atgttcctggcgctgctgatgtcggccgcgtgggccgcgccggcaccgcagccggtggacattccgattgcgtccgggattctccatgcgcagctttacaagcccgagggcgcagggccgtttccgaccgtgatcgcgctgcatggttgcggcggcctcggcggccactccgatcccgtgttgccgcgctaccgggcgtgggccgagcgtctgctcaaggtcggcaatgccgtgctgctgcccgacagttacggctcgcgcgagctcgggccgcaatgtcgcgtcaaggaaatgcacgtcaaggcgcggcgcgaccgcgtcaccgacatcgcagcctcacgtgcctggctgatgaagcagagctgggtggcgcgcgaccgcgtcagcctgatcggatgggcgaacggggcaaacgcgctgctctgggccgtgcgtccgcagagcgcggcgcgcgatctcagtccggatttccgcgccgcggttgcgttctatccggattgccggatctcggcgggtttgggatggagcacgcgggtgccgacgcttgtgctgatcggggccgcagacgacgtgtcgccgccgccggcctgccgtcagatggtggatggcgcgcgcggccgcagcgccctcgcgcgcatcgtggtctatcccggcgccgatcacgatttcgaccgcgccagcatgccgcttcacgccggcagcagcgatgccgccgcgcccgagcgcggtcatctcggcatggatgccaaggcgcgcgcagcttcgcagaaggacgtcgcgcaatggctggcgcggtga

SEQ ID NO: 4259 - DNA, 225 bp, BradyrhizobiumColbertium
gtgctgaacaagttcggcccctcgggccatggcgaagcgcaggtgcagtatctcgacggcgatttccgcgtgatctcgccggggacgttcgtgcgctgcgcgatcaccgggacgcgaatcccgctcgacgagctgaagtactggagcgttgatttgcaggaggcctacgctacgcccgccgcggtgctgcagcggcactttcccggggcgcagaaacagtcgtga

SEQ ID NO: 4260 - DNA, 921 bp, BradyrhizobiumColbertium
atgctgcgccaaggcgtggacgccggcattcccgtgatctgcgtcggcaactaccatgtcggaggcgccggcaagacgccgacggtgcttgcgctgacgaagctgcttcgcgagctcggcgagacgcccgtggtgctcagccgcggctatggcgggcgcctggagggcccggtgatggtcgatggtgcacgacataccgcggccgaggtcggcgacgagcccctgatgatggcgcgcgacgtcgcggttgtcgtggcgcgcgatcgtctcgatggcgtcgcgctggcgaaatcgcgaggcgccaccgtgatcctgatggacgacggttttcagaacccgcgcctgctcaaggacgtctcgctgatcgtgatcgatagcgagcgcggcctcggtaacggcgaggtgtttcccgccggtcccttgcgtgcgccgctgaaggcccagctttcgcgcaccgatgcgctggtgctgatcggcggcggcaatgccgccaacgaggtcgccgcggaggttgcgaagcgcaacaagcccgagctgcgcgcccgcctgaagcccgatgcgacttcgctcgcgcagctgatcggcaagcgggtcttcgccttcgccggcatcggcgatcccgatcgcttcttccgcacccttcgcgccagcggcatcgatgtcgcccatacgcgcgcattcgccgaccaccacatgttctcgatcgacgagctcgctgcgctcgcggcggaggcgcggcgcgagcagctcacacttgtcacgacggagaaggatctggcgcgcttgcgcggcggcgcgggagtgcccgatgacatcgtgccattcgccgtccggctcgacttcgatgatccggccgcgctccggagattgatcagcgatcatctctacaaggcgcgcgaacgaaggttctcgaggccctga

SEQ ID NO: 4261 - DNA, 1317 bp, BradyrhizobiumColbertium
atgcctaagtcgcttcccattgcgctgccgatgacgctgcggatgtatcggcgcctggcaaccggcctggtcccgctcgcgcctgcgctgatcaagcggcggctgaagcagggcaaggaggatcccgcgcgcgtcggcgaacggcgggggctttcccgggacgtgcggccgcatggtccgctggtctggatccacggcgcgagcgtcggcgaggttctggccgcggcggcgctgatcgagcgactgcgcgatctcaatctgcgcatcctgctcacctcgggcacggtcacctcggcggcggtggtggcaaagcgctttccgcccgacgtcatccatcaatacgtgccgtacgattcgccgcgctatgtcgcgcgtttcctcgaccactggaaaccctccctggcgctgttcatcgaatccgacctgtggccgaacctgatcctcgcgggcgcggcgcgccgggtgcctatggtgctgatcaacggacggatgtcgccgcgatccttcccacgctggcggcgcatgcacggcaccatctcggcactgctgtcgcggttcgacatttgccttgcgcagtcgaagaccgatgccgagcgctttgccgcgctcggcggccgcgacgtcgtcaccacgggcaatctgaagctcgatgtgccggcgcccccggccgatcccgccaagctcgaacgcttggcggcgatgacgcgcgggcggccgatcatcgtcgctgcctcgacccatccgggcgaggacgagatgctggtcgccgcgcatcgcagcctctccggtttcttcccgcaacttctcaccgtgatcgtgccgcggcatccggaccgcggctcctcgattgcaggcctgatcacggcctcgggcctgaagcccagcctgcgatcgcgcgaggagctgccgacggccacgaccgacatctatgttgccgacacgatgggcgagctcggcctgttctatcgactctcgggagtcgtgttcatgggcggatcgctggtccgccatggcggccagaatccgatcgaggcgatcaagcttggcgccgcggtcgtgcatggtccgcacgtcttcaacttcagcgacgtatatgaagcgctcgacagcagtggcggggcgcggcaggccgacacgcaggaggccctggtcaagcagcttggcctgctgctgggcgagccgacggtgcgcgaaaaggtgcagcgcgcaggtggcaacgtggtcgagcagctcggcggtgcgctcgatcgcaccatgatcgcgcttgagccgtatctcctgcaattgcggatcgagatgggggcggccaatgcgtga

SEQ ID NO: 4262 - DNA, 351 bp, BradyrhizobiumColbertium
atggtgcggacgcttcaggccggttgtaatgtcgcgctgaccgccgatgtccccaagcgctcgcgcgtggcggggctcggcattattatgctggcaagggaatcggggcggccgatcatgcctttcgcgatggcgaccagccgcttcgtccggctgaagaactgggatcgcaccaccatcaatttgccgttcgggcggggcgcattggtcggcatcaaggaaatccatgttccaccggatgccgatgccgccacgatggaagcgttgcggcaggagctggaggacacgctgaacgaggcgacccggcgcgcctacgcgcagctcggccgcccgggaccggaagatgcctaa

SEQ ID NO: 4263 - DNA, 408 bp, BradyrhizobiumColbertium
ttgaaaaaactgcttcgcaatacgctgcgaagcagctggtttcagcgtgccgtcggggtcctggcggccgagtatctgcgtctggtctggcggaccaacaagttcacgatcgatccggctgatgtctatggacgcgtcgagccgcagctccccgccattttcgcgttctggcacggccagcatttcctcacgcccttcatcaagaaccaggacaaggcctcctatcgggccaaggtcctgatctcccgccatcgcgacggcgagttcaatgcgatcgccgccgaacggctcggcatcggcaccatccgcggctccggcgaccatggcggggcgttccatcgcaagggtggtgtggcgctttcaaggaaatggtgcggacgcttcaggccggttgtaatgtcgcgctga

SEQ ID NO: 4264 - DNA, 243 bp, BradyrhizobiumColbertium
atgccagatagcgccccgcaacaattgcttcatctcgtcatcggcggcgagctcgtcgatctcgagcacaacaccttcaagaatctggatgacgtcgatatcgtcggcctctatccgaactatgccgccgcccatgcggcctggcgcgccaaggcgcagagcacggtcgacaacgcgcagatgcgctacttcatcgtccacctgcatcggctgctcgacccgaatcaagaaccggcgcgttga

SEQ ID NO: 4265 - DNA, 819 bp, BradyrhizobiumColbertium
ttggcggacgttgacgcgcacgtactggacccgaagatcctgacgcgcgatgcggcgctgctgaaggacacggtgagggaagcgggcgcgctcgcgcactcgatgttccgcaccgagctgaggaggtggaccaagggcgcatcctcgccggtgtcggaggccgacatcgccgtcaacgacctgctcgaagcgcgccttcgcacggccactcccgactatggctggctgtccgaagagagcgctgacgacgctgcgcggctgtcgcggcggctgacatggatcgtcgatcccatcgacggcacgcgcaattatctggggggccatgacgaatggtgcgtcagcgtcgcgctggtggaggacgcctcgccggtgcttgccgcggtgttcgcaccggccagcgacgaattcttctttgcagtgcgcggccagggcacgacgctcaacgacgagccggtcagcgcgacggccggatccgaactcgacttcgcccgcgtcgctggcccgaagccgctggtcgagcggctgaagccgtcactcggcgacatcaagctgcatcggcgaatcggctcgctcgcgctacgtctgtgtcgggtcgcccatggcgcgctggatgcggcctttgcggggggcaacagccatgattgggaccttgcggcggccgatttgatcgtgcaggaagcggatggtagaatgagcgacctctccggagaacccatcctctataaccgccgggaagtggcgcacggggtgctggtggcagcgggacgcgatcgtcatgcgggcattgtcgcgcattttcgcaaccgtcccttggcctga

SEQ ID NO: 4266 - DNA, 1404 bp, BradyrhizobiumColbertium
gtgaactcttcaccaagctcgacgccttcgacccaaaaaacgtcgcaggccaatcgcgacctgttcgatcagtccgcactttccgatctcgcgcagcggctggtcgaggcggccaggcgcgccggtgcggatgcggccgatgcggtcgcggtgcggggcgtctcgcagggcgtcgaggttcgcgacggccgggtcgaggaatcggagcgatccgagggtgacgatgtcggtctgcgcgtgctggtcggccagcgccaggcggtggtctccaccaacgacgtcagcggcgatgccgtgaccaagctcgccgagcgtgcggtcgcgatggcgcgtgtcgcgcccgacgacaagtatgtcggcctcgccgatcccgcgctgctcgcgcgcgacttccctgacctcgacctgctcgatcccgatctgcccacgaccgccgagctcgagcgtcgcgcgctcgcggccgaagcggcggcgctcggcgtaaagggcgtaaccaagtctggcggcgcttccgcatccgccggcatcgggggcatggtgctcgtcacctccaccggcttccacggctcctatctgcgctccagccagggcatctcggccaccgccatatcaggcgagggcaccagcatggagcgcgactacgacttcacctcggcgccgcacggcgccgatctgctgtccccggaggtggtcggccgttccgccggcgagcgcaccgtggcgcgctacaatccgcgcaaggtcgagacctgcaaggtgcccgtggtgttcgatccgcgcgtcgcaggctcgctggtcggtcatctggtcggcgccatcaacggcgcttcgatcgcgcgcaagacgagcttcttgaaggacaagctcggccagcagttgttcgcgaagaacatccgcatcgtcgatgatccgctgcgccggcggggcctgcgctcgcagaccttcgatgccgaaggcgtcgcagtgaagagggcggcgctggtcgacgagggcgtgctgacgacctggctgctcgattgcgccaccgcacgcgaactcggtctcaccaccaccggtcacgcccatcgcggcgtttcctcctcgccctcgcccggtccgtacaatctgcatctcgagcctggcacgccgacgccggccgagctgatctccgacatcaagcagggcttctacgtcaccgacctgatcggttcaggcgtcaacggcgtcaccggcgactacagccggggcgcctccggcttctggatcaaaaacggcgagatcacctatcccgtcagcgaggtgacgatcgccggccatttgttcgagatcttcaagtcgatgcagcccgcgaacaatctcgagttccggtacggcatcaatgcgccgacggtgcgcatcgagggtttgacgcttggcggacgttga

SEQ ID NO: 4267 - DNA, 519 bp, BradyrhizobiumColbertium
gtgaggcgtcaaacagcaacatgcgggatcgctcccgccgggtcgagccgcttcctgcggctcgaccctctttcccttccggtccgcttcgatgcgcatgatccgcgcgccgacggatacaccaggcaaatcgagcttcatcgcgagcgtgtcgtgctgcgccgtgccgttcgcggcatgcagatggcgatcaacgtgcgcgtcgccgacttcaccggcgtcgcattgcgtggcaatgacgaagcgcggacgctcgtgctcgtgcatcgcgatccctcactgtccatcccgctgctggtcggcgccgatgctgacgagatcgccgaggcctgggcgatctggagcgagctcttcgcgctgccccagctcgacgaaggcgctcgcaagcccgcagcgcgccgccgccgcgccaacgcgatccgcgcccggcgcccgaaattcttgatgcgccggcgtgccggcatcgcccgcgagctgtccgttcatcgcggcgagcgcgagatcatcgcgcggaattga

SEQ ID NO: 4268 - DNA, 933 bp, BradyrhizobiumColbertium
atgagcgactcatccgcccgcgttgccgattccaccggcaactgggtcgatactatcgcgccgcactggtcgcggccctatctgcgcttgtcccgcttcgaccgtccgatcggctcctggcttctcttgatgccatgctggtggtcggcggcgctcgccgccggcatggcgcacgacgttcgcgacctgcctctcaccatcttgctgttcttcatcggcgccttcgtcatgcgcggggcgggctgcacgtggaacgacatcaccgaccgcgatctcgacgacaaggtcgagcgcacgcgctcgcgaccgctgccgtcggggcaggtgaccacgagacaggcgctggtcttcatggtcgcccaagccctgatcggcctcgtggtgttgctgcagttcaaccgctttgcgattctgaccggcatcgcctcgcttttgatcgtcgcgatctaccccttcatgaagcggatcacctggtggccgcagatcgtgcttggcctcgccttttcctggggcgccctgatggggttcgcggtcaccttcggacgcatcgacctgaccgcgctcgtgctctatgccggcgccatttcctgggtaatcggctacgacacgatctacgcacatcaggacgccgaggacgattcgctgatcggcatcaagtcgaccgcgcgccttttcggcgcgcatacgcatcaggcgctgatcctgttctatggtctcgcggtgatgctgatcggtgtcgcgctggcctctggagatgcaggctggccggcctggctcgggcttgccgccttcgccgtacatctggcatcgcagatcatgcgcttgaggatcgacgatcccgaactgtgcctgcgcctgttcaagtcgaaccgcgatgcaggtctgctgctgttcgcgggattgctggcggatgcggtcatgcaggccgcgtag

SEQ ID NO: 4269 - DNA, 663 bp, BradyrhizobiumColbertium
atgatccgtcatctgatggttccgatcatcgctgccctggtctccgtgggggcctccggcgcttatgcgcaaagcgcgttcccggcgccgctgcccaatcaggccgccgccaattccccgtttccccccgtcaacggttcggcaccgaccgcttcagtcggcgcggcgccgcaatcgtcctttcccgtgaacggcgccgccccaatcggcggccccggcgccttcagcgcggctccgccgacgcaggctggtcccggcgatgactgcatgaaggccttcgctcctctgcgcgaggaagccgagaagcgcggcaagctgatcaaggctgcgagcgaccgccgcgcaccgcccgacgaggcctgcaagctgatccgcaacttcagccaggctgaagtgaagatgatcaaatacatcgaggccaacgccgcgaagtgcggaatcccgccgcagatcggcgcgcagatgaaggacggccacaagaacaccgaggccatggcgaccaaggtctgcaacgttgcgcagcagatgcagcagcaacaggcgcgtcctgccgggccctcgctgagcgaggtgctgggctcgggctccgcgccggaagccaatgccagcaggaagggcggcagcaccttcgatacgctcaacggaaacgtcctgacccgatga

SEQ ID NO: 4270 - DNA, 756 bp, BradyrhizobiumColbertium
atgccctcccacgattttcgcgccccccgcctgttcgtcgacgcccccctcgtgcaggacgcccgggtgccgctcgaccgcgaccagagcaattatctgggcaacgtgctgcggcttgccgccggagccgcggtcctggccttcaacggccgcgacggcgaatggcaggccgccatcgagggccgcaagcggccggatgccctggtgatccttcagcagacccggccccaggaccgactcgccgacctcacctatgtctttgccccactcaagcatgcccgactggactacatggtgcagaaggccatcgagatgggggccgccgccctgcgaccagtcctgacccggtttacccaggcctcccgcgtcaataccgagcgcatgcgcgccaatgtcgtcgaggccgccgagcaatgcgggatcctcagcatcgccgccgttgccgagccggtcccgctggagcgcttcctaagccagcgcccggcgggtcgcttgctgatcttctgcgatgaggcggcggaggtccaagatcccgttcagagcctgcaaggcgcccgcgacgccgccgaaggtatcgacgtgctgatcggccccgaaggcggctttgccgaggaagagcgggccctgctgctgcggcagcccaagatcctgcggctggcgctgggcccgcggatcatgcgggccgacaccgccgcagtggccgccctggcgctggtgcaggcggtgctgggcgattggcgcggtggtagcggctag

SEQ ID NO: 4271 - DNA, 948 bp, BradyrhizobiumColbertium
atgtccttccagggactcaagccttcgtcgtccctcgagctcagggcgtatgacatcgaccatttcggcgagaccgagagatatgccggcgcgtccagcatgccgctgtcggtcgggacgacggccatcatgcgggcccggctcagcttgccgagcctgaccctgtctctggtaagaacctttccgcggatcattcgcggctatcaattgaccagtgccgccgccttcgtcgtgccgatggataacgtgacctcggcccgcatcaacggccaaccgatgggcagttctatcgtcattctgaagggtacctctgattgcgtggtgtatgagcctgagggccgcctgatggctgtcgtgtatttcgctccgccccagcgcgagccctgggcgcaactgactgatggctatcatctggtgaatccggcatcggaagtactcgtctcgctgcgccgtctgatctctgtcacgctggaaatcgcggctcatgacccggacttcctgaaccagccgatgtcgttgacggccgtcgagcagtccctgctcggcacgatggaagctgcgctttgcaccggcgtaagcggcggacctgtgtcgtccgcgacggagggctatcggcggatcgtcggggagatggaaaggctgatccggcaagatctgacggtctggcacaagacgaccgaactcgccaaccaggtcggcgtgtccgttcgcactctccagagcgcgacacgggccatctgcggcatgagcccgcaccgctatagccgaatcctgcgactctggtcggtgcgcaagcaactgcgcagcggtccggcgcggcgcagtgtgaaggcctgcgcgattgcacatggcttccggcatctgagcgagtttgcggcgagctacagggcagccttcggggaactgccgtccgagaccctgcaccgcgcgatgcgggaaacgatctag

SEQ ID NO: 4272 - DNA, 507 bp, BradyrhizobiumColbertium
atgcgcaatgcttcagacatcatccggacggtctcgcggcatacgctggcctatatgctgttctcgatgagcgagttgttccggcattacgacgagtttgatccgctggatcttcttatcgttcatgcggttctgaacgcgaatgtcatccatgtaatgaacgatcccgtcttggacgagaaattctccagcattcatgccgtcgagccggatgtgatcaagcagggggtctcgcgtgcggcactctcccgctttctcagccttccgctcgagacggttcgccgtcgcgtgacgggcctgaagaggcggaagattcttgaagagaccaaagccgggctgatcgtgaccgagcagaacgcattcaggtttggaaacaaccacgaactgcagaagaccaacatgctgctgctgatgaagctgcttcgcgacctcaagcgtgccggcatcaacgggccggatgatctgcgtgcctccaagagcgccacatcggcaaagaaggcaaagtaa

SEQ ID NO: 4273 - DNA, 330 bp, BradyrhizobiumColbertium
atgttcggcgtctctgtcgaaccgattgccgccatgactttggtgcgcgagcacgcatccaagcgtttcggcagtgcgatcggcctcaaggtggcgatgaaagagatggctatgaacgaagatgttctgttgagcgcgaggcagttcgaggcgctgcggctcatcaaaacgtttctccgactcacaaccccccgcaggaggcagagggtactcgaactcgccgagcaccttgcggaagaagccgaatccaccgcaacagggtcggcgtttgccgcgactgatgcatcatccgcggacccggccagagacgttcccgtcccgaccgaatga

SEQ ID NO: 4274 - DNA, 1149 bp, BradyrhizobiumColbertium
atgaccgcgactgccacctcaaatgctgccggctccgcctgggcggaaacgctgctcttgtcgttcgcgcaggccggctatgtcagggccgagccggcgatcctgcaaccggccgagctgttcctggacctctccggcgaggacatccgcaagagcctttatctcaccaccgacctctccggcgcagagctctgcctgcgcccggacctcaccatcccggttgcgcgcgactatctcgcctctggccgtgccggccagccggccgggttcagctatctcggcccggtgtttcgctaccgtagcggccagccctccgagttcctgcacgccggcatcgaatcgttcgcccgccaggaccgcgccgcggccgatgccgagatgcttgcgctggcgctggaggcgaccgccgccttcggcgtccgcgatgtggagatccgcaccggcgacgtcgcgctgttcaatgcgctgctcgacgcgctcgacctgtatccggtctggcgccgccgcctggtcaaggatttcaaccgcaaggtcagcctggagcaggatctggagcggctggcggccgcgaccacggcgacccgcagcgaataccagggcgtgctggcggcgctcgccggctccgaccgcaaggcggcactcgccttcgtcaccgatctgatgtcgatcgccggcaccaccaatgttggcggccgcaccacggccgagatcgccgatcgcttcctcgagcaatccacgctgaagggcggcgccctgccgcgcgaggcgatcgtcgtgctcaagcgcttcttgggcgtttcaggcaatcccgacgacgcgatcgccgagttgcgcgcgctgaccgcggatgcaaagctcgatctcgatgctgcgatcgaccagttcgagagccgcgtcggcttcatggccgcgcgtggcatcgacgtgaagcaaacgcgcttttcgacggcgttcgggcgcggcctcgattattacaccggcttcgagttcgagcttcatcacaggggcaacggcgccgagccgctcatcgccggcggccgctatgacgggctgatgacccagctcggctccgccgagccgattcccgccgtcggcttctcggtctgggttgacgcgctgacgaagatcggccgcaaggtgggagcttaa

SEQ ID NO: 4275 - DNA, 978 bp, BradyrhizobiumColbertium
atgagcgcgccattcgttctggccgttccttccaagggccgtttgcaggagaacgccgaggcctttttcgcccgtgcgggactcaagctgtcgaaggccggcggcgcccgcgactaccgcggcacgattgcgggcctcgacaatgtcgaggtcgcctatctctccgcgagcgaaatcgcatcgcaattgtcgcgcggcttcgcgcatctcggggtcaccggcgaggatctggtgcgcgagaccatcgccgatgccgacaggcgcgtgtcgctgatcgaggggctcggcttcggctatgccgacgtggtcgtcgcggtgccgcaggcctggatcgacgtccgcaccatggccgacctcgatgacgtcaccaccggcttccgcgagcagcatcacatgcggatgcgggtcgcgaccaagttcgtcaatctgacccgtacgttcttccagacccacggcatcaccgattaccgcatcgtcgaaagcgcgggcgcgaccgaaggcgcaccggcggctggcagcgccgagctgatcgtcgatatcaccacgaccggcgcgacgctcgccgccaacggcttgcgggtgctcgacgacggcgtgatcctgcgcagccaggccaatctcgtggcgtcgaaggatgccgactggtcgccgcaggcgcgagagacagcccgtgtcatcctcgatcacatcgcagcgcgggcgcgggccaacaagtaccgcgaggtccggacccgcttccggcagtgcgatgccgccctgctgggcgaggcccacagccggttcggcgtcgaagctccttttggcggaccgacttcgtcagggatgctgacgctgcactgcccaccagggcagctttatgcgctggcgaccttcctgcgggagcatggcgccgagaccgtctcggtgggatcgctcgactacgtgttcgaccgggagaacccgctgttcgcgaagctcgaggcgtttctgggacgttga

SEQ ID NO: 4276 - DNA, 1062 bp, BradyrhizobiumColbertium
atgacgctgggctctgacgtttccggcatgacgaccaccgcagcgagcgccgcagcgaaggggctgtcgatcgtcatccccgtctacaacgaggcggcgggtctatcggccttgcatcagcgcatctgcgatctcgccaagaccctgcggcaacgctatcgcctctcctgcgaggtcgtctatgtcgacgatggcagcaaggatgcgacgctggcgatcgcgcgatcgttgcccgcggacgcgatcgatgtccaggtggtgtcgctgtcgcgcaatttcggcaaggaggccgcgttgatggcgggcctcgaccatgcccggctcggtgccgtcatgttcatggacggtgacggccagcacccgccggcactggtcgagcagctggtgcggcactggatcgacgacggctatgacgtcgtctacaccgccaaggcgcatcgcgacaacgagcctttcttgcggcgggtcgcggtgcacggcttctacgcgctgatcaattggggtgctcgccagaagattcccgaggacgccggcgatttccgcctgctgtcgccgcgcgcggtcgctgcgctcaggcagctgccggagcgcaaccgtttcttcaagggcctcgccagctggatcggcttccgccagatccgcgtagactatgaacccgcggcgcgcgcccatggcgtcaccaccttcaacgccgcaagcctgctcggcctctcgatcgagggcctgacctcgttctcggtggcaccgctgcgcttcgccagcctgttcggcgtcattctcgccggaggtgccttcctgttcggcctttcgatcctctgggaggtgctcacgaccggcaagcaggtgcccggctatccctcgctcgtgatcggcctgatgaccatcggcggcgtgcagctcatcatgatcggcatcgtcggcgaatatatcggcaagatcctctccgagctgaaggcgcggccgatctacttcgtcgccgaacacagcgaaaagcactccgaggccgacaaggcccaggacgcctcaagccgggacgcggcgagcaggacggcggccgaatga

SEQ ID NO: 4277 - DNA, 846 bp, BradyrhizobiumColbertium
atgagcgcggccgcggacctgcggcggatctggctctgcgcggacgattacggcatcagcccgggcgtcaatcgcggcatccgtgacctgatcgaacgcggccgcctcaacgcaacctcggtgatgatggtggggccggcgatcgcacgcagcgacgtcgaagcgcttcaatccgcggccgagaccagcccgcgctgtgcgatcgggttgcatgtgacgctgtcggcgccgttccggccattgacgatgcacttccgtccgctcgacggcgacatgttcatgccgttcccgaagctgctgcgcgcgggcctcctgcggcggctcgaccgcgaattcgtccgcaacgaggtcaagtcgcagctggcagccttcatggacgcgttcgggcgcgcacccgatttcgtcgacggtcaccagcacgtgcagctctacccgcaggtgcgcgacggctttgtcgatgcggtcgttgaggctgtgccgaacgcctgggtgcgtcagggcggccgcgatctaccgctcaggcagcggctggcgtcccccaaggctctggtgctcgacagtctcagcgcgcaattccgccgccgcgccggcaacgcaggcctcagcttcaatcccggcttcgccggcgcctatgattttacgcgcgccgccgatttcggcgcgctgatgcggcagttcctggaaggcctccccgacggcggtctcgtgatgtgccatcccgggttcgtcgatgacgtcctcgccagcctcgacccgatgacggacgtgcgtgaacgcgaacatgcctatctcgccggcgacgccttcccgcgcctgctggcggacagcaaggtgacattgggatga

SEQ ID NO: 4278 - DNA, 810 bp, BradyrhizobiumColbertium
atgacgccgcaggaacgccagctcgtcgacgacctttttgaccggctttcaaagctggaaaatgcaccgcgcgatcccgatgcggtcgccgcgatctccgatggcctgcgcaaggctcccggcgccgtctatgcgctggtgcagaccacgctgctgcaggacgaagcgctcaagcgcgcgcataatcgcatccaggagctcgaatccgctcaggcgccggaccctgcccagtccggcggcttcctcgacaccatgcgcgatacgctgttcggcggggcaccctcacgtggctcggtgccgaacgtgccgccgcgcgagcagcgcccgacatggaatagcggccaggcgatgcagcaggcccagccgggctacggcgcgccttatggccaaggtccgggacaaggttttggcgccccgcccgcgggcggtggcggcggctcgttcctaggtacggcggcggcggccgcggccggcgtcgtcggcggctcgctgctgctctccagcatccgcggcatgatgggtggatcgcatcaacagggctttggcgacagcaatgctctcggcgaccgcagcgctggtgggagcccctggggcggcggcggcgaccagtccggcggatcgctggcgcgcgatgccggcctcaatgacatcggctcgaaccgcgattcccgccagggcttgttcgatcaggcgtcgaacgacgatcggcacaacgacaacaaccagagctacgacgatcacgacgacaacatggacatggccgacgacggcgatttcggcgacgacgacggcggcagcgattacgcgtga

SEQ ID NO: 4279 - DNA, 828 bp, BradyrhizobiumColbertium
atgttcaaaaaaatgtctgtcgcgctgctcggcagcgcttgtaccttcattgccggcgtgaacgaagccggcgccttcgacaacagcgtgccgaacgatccgcctgcggtgctctacgcgccgcgggtgccgccagcgccggtgcgcgtcgcttcaaattcgaacctgggcggcggcttcatcgagtttctgttcggcgacggccccggacgcggtccggcttacgcgcccgagcgaccggtatatcagcagcagccggcttactacgatcagcgccgcctgccgccgatgggcgagccgcagatgcagggtgaatatcagcaaggcgcaattcagcaaggcgcgctgcagcaggacgccgtcgacccgcggcagcgtccgttcgatccgaaattcgagaaacaacttgttgactataacggcaaggaaagtcccggcacgatcgtggtcgacacgccgaacaagttcctctacctcgtcgagggcaacggcagggcgatgcgctacggcatcggcgtcggccgtcctggcttcacctggtccggcgtgaaatcgattacggccaagcgcgaatggccggcatggacgccgccggccgaaatgctcgcgcgccggcccgatctgcccaggcacatggaaggcggcccggacaatccgctcggcgcccgcgcgatgtatctcggctcgacgctctatcgcattcacggctccaacgagccctggaccatcggcaccaacgtctcctccggctgcatccgcatgcgcaacgaggacgtcatcgacctctacggccgcgtcagtgtcggcaccaaggtcgtggtgttgtga

SEQ ID NO: 4280 - DNA, 786 bp, BradyrhizobiumColbertium
atggctgttcaccgcaagcgttttcgtgtcgaggatatcgttgctggcgagatgcccgttctagacgtgactgaagaggtactcccgatgcatagcgagatcatggccgagctgcgtgcgatccgcgcacagatggcgaagggcctcgccgcggctccgctgtccggcagcgcagccatggcggcgatcgacgcctcgacggctcacgagctcgccgaagcgcgtgccatgctcgacacctaccgagcgcagatcgagcagtgcgagaagctgaaggtcgagctcgacctcatccacgacgccatcgatcgcaccaagcgcgaaatcgcaacgttgcacggcaagagcttcgacggcggggagatggccaaggtcaatggcgagctcggcgcggtggtcggcggcaccgagcaggcgacccagcagatcctcgaggccgcggaatcgatcgaccaggccgccagcgcgatgtccaaggtcgactcggccgatcagcagaagcggctcgccgacgacatccaggaacgcgtcatctcgatcttcgaagcctgcaacttccaggacctgaccggccagcgcatcagcaaggtcatgaacaccatgaagttcatcgagcagcacatcaatgcgatgatggacatctggggcggcgtcgacgcgatcaaggcccatgtgcctgcgcaggtcgacaaccgcagcgacgacgagaagctgctcaatggcccgaagctcgccggcgacgtcggccacgcctcgcaggacgacatcgacgcgctgttcgactga

SEQ ID NO: 4281 - DNA, 522 bp, BradyrhizobiumColbertium
atgatcagttcggctcacgcgcgcacggttgccaatctggccgccgcctcttgtctggcgctgctgctgggagcctgcggcggcggcttcaacctgccgtccttgacgtcctccccgccgccgcccgaagccgagcccggcgtggctccggaaatgcccgccaccatccgcgccgacgagatcgtcggccgctggggcctcgcctcgttccagaaccccgccgaccgtgctcgcacagaagccgccgcgcgcgcccaatgcaagaacccctacgtgatcaccgccggctcctccggcggcgtcatcatgcatctcgccgaccaggcgacgccgcaggaactgcggctcaagggctctccgagcggcaagaactacatcggtcccgccggtccgacccccggcgaccaggaccgcgagatcatctccttcgacggccgcgtcctgatcacccgcttcatcgacaaggacgccgccacccgctacggcaacatggtctacgtccgctgcgcgccccgggcgtga

SEQ ID NO: 4282 - DNA, 297 bp, BradyrhizobiumColbertium
atggctaaatccaaatttcgtccgctgcatgaccgtgtcgtggtcaaacgtatcgacgccgaggaaaagaccaagggcggcatcatcattcccgacactgccaaggaaaagccctcccagggcgaaatcgtcgccgtcggccccggcggccgggacgagactggcaagctgatcccgatcgacctcaaggtcggcgaccgcgtgctgttcggcaagtggtcgggcaccgaggtcaagatcgacaacgaagagctcctgatcatgaaggagtcggacatcatgggcgtgctggcctag

SEQ ID NO: 4283 - DNA, 258 bp, BradyrhizobiumColbertium
atgcggggcgcgccgaacgacttctcgatgacgacgttgcggcccttcgggccgagcgtcaccttgacggcgttggcgagaatgtcgacgccgcgcagcatgcgatcgcgcgcgtctccggagaatttgacgtctttggcagccatctctcaatccctcgtgttcgtgatgtgtcttgccgcttcttcttcgtcattgccgggcttgacccggcaatccatcatgttgcgaaacgtgctggacgcccgggtcgtctag

SEQ ID NO: 4284 - DNA, 1302 bp, BradyrhizobiumColbertium
atgaacccgatggacctcaagcgcggcatcgactccgccgtcgccgccgtgatcaaggacatcgagaagcgcgccaagccggtcgcctcctcttccgaggtcgcccaggtcggcaccatttcggccaacggcgatgccgccatcggcaagatgatcgcccaggccatgcagaaggtcggcaacgagggcgtcatcaccgtcgaggagaacaagtcgctcgagaccgaggtggacatcgtcgagggcatgaagttcgaccgcggctatctctcaccctacttcgtcaccaaccccgagaagatgaccgccgagttcgaggacgcctacatcctcctgcatgagaagaagctctcgggcctccaggccatgctgcccgtgctcgaagcggtggtgcagtcgggcaagccgctcgtcatcatcgccgaggacgtcgagggcgaggcgctggccaccctggtcgtcaaccgcctgcgtggcggcctcaaggtcgccgccgtcaaggcgccgggcttcggcgaccgccgcaaggccatgctggaggacatcgcgatcctcaccggcggccagctgatctccgaggagctcggcatcaagctcgagaacgtcacggtgaagatgctcggccgcgccaagaaggtggtgatcgacaaggagaacaccacgatcgtcaacggcgccggcaagaagcccgacatcgaggcccgggtcggccagatcaaggcccagatcgaggagaccacctcggactacgaccgcgagaagctccaggagcgcctcgccaagctcgccggcggcgtcgcggtgatccgcgtcggcggcgccaccgagatcgaggtcaaggagaagaaggaccgcgtcgaggacgcgctcaacgccacccgcgccgcggtgcaggaaggcatcgtccccggcggcggcgtcgcgctgctccgcgccaagaaggccgtgggccgtctcaccaacgccaatgacgacgtccaggccggcatcaacatcgtgctgaaggcgctggaagccccgatccgccagatctccgagaacgccggcgtggagggctcgatcgtcgtcggcaagatcctggagaacaagtccgagactttcggcttcgacgcccagaacgaggactatgtcgacatggtcgagaagggcatcatcgatcccgccaaggtggttcgcaccgcgctgcaggacgcctcctccgtggccggcctcttggtgaccaccgaagccatggtcgccgaaacgccgaagaaggacgcgccgcccgccatgcccgccggcggcgggatgggtggcttctaa

SEQ ID NO: 4285 - DNA, 1212 bp, BradyrhizobiumColbertium
atgcgtgcgcttctggtttgttcgacggccgtcgtggcggccctgctcgccgtttggccggatcgggcccctgcccagatgaagctgtcgccgaaggcgacagcaccgggcggaaccgagacgcgctatttcacctcgatcgacggactgatggacggcaatgccgacgtgatcctgaaagagacgcgccagggcaagaatgtcaccgcggcggtgctcgatgtctgttacccgatcgccaggaattccgaccgcaaggaccgcttcgtcgtcaatctccaggtcgcggggcagacgttgaccggaacgacgcagagccttggcgagaagtcgccggtcagcgtcaagctgacgcgcaagcagtccggcgacacgtttgaattccgcggccagatctcgatcggccaggccgtgaccgaggtcacatcgcccgacaattccgacctcagcgaaagggaattcctggacaaccagacctccgacgacggcatcacctcccagccgaaggacttcacggacgtttctccggaagcgattgcggtcagggtcaagctcgacgctgcgacggacttcctgaagagcctgaagggccaggaggtcgaggtgacgctggcgagcctcagcgtcggctgcgatgcactgcgcgcgggcgagcagaccatcaacatgtcggtcgatccagagcgtgcgggcgcgctgctggccaagttcaaggcgatgccgggcgtcacggcggcaggttggaccgcgggcatgaccgagatggaccggaccatccgcttccccgcggcggactggcgcgagggcgacaagatcaacaaagccaggcttgcgactgcggtggccaacgtgctgagcaggacactcgccgcaaagccggtctcgcaggacttcgatcccgcaacgggcaagctcaagctggtgttcaagcggcccaatcaggattttccggcgctcgagctcaccgacacgatcgaggtcgcagggctcgtatcgccggacaagccgggctccaccgacaagctcatgctctggatcggcagtcccgccaccacgactgccgacgagagcggcggcgccaaactcaatctgtccgacgacgcgagcctggacgaagaaggcgatcttcccgaggacaacgggtcgatcgaggcgcttgcccgggagctgaagggccagcactgggacgcggacaagtcggtgtggaagtga

SEQ ID NO: 4286 - DNA, 138 bp, BradyrhizobiumColbertium
gtgtttgtcgaccttgcggcggcggcgaacttcgactcgcatctgctgctccccggaccctttgcgacgggatatgcggtcttcagccggcctggtcaggacaagcggatcttgtcgcccgtgctcttgaccgcatga

SEQ ID NO: 4287 - DNA, 1164 bp, BradyrhizobiumColbertium
atgatcgcaacagaacgccctcccgaaaagatcgtccacaaatggaagatcttccacgccatctgcacggcccggccgcgccttggcgtgtcggagcgggcgctgtcggtgctaaacgcgctcctgaccttccatcctgagaccgcgctcacaggagaggatgacctgatcgtcttcccgtcaaacaatcagctcagtcgccgggcgcacggcatgccggcgtcgacgctgcggcgtcatctcgctgtcctggtcgacgcgggactgatcgttcggcgcgacagcccaaatggcaagcgttatgcgcggaaggacgatgccggcgaaatcgagctcgccttcggcttcgatctgtcgccgctcgtcgtgcgctcggaagagttcgagagcctggcggccgacatcgaagccgaagcccgcgcgctcaagctcgtgcgtgagcggatcacactgtgccggcgcgacatcgcgaagatgattgcaactggcatcgaggaaggcgttccaacgcgaagggcagggcaggggcctgcggattggcaggaggtgcatgccgccttccgcgcaatggtcgctcagattccgcgcaccgcgacgcgccaggagctcgagccgatcgccgacgagctgtcgcaactcgctgacgacgtgctcaatcttttggaagcgcacatcaaatccaagaatccgagcgccaatgagtcccattctgagcgccacatacagaattcaaataccgatgccttaattgatcttgaacctagccttcaagaaggctggacggcgggagctgagcctaaacctcaaccatcgcgagtcgccgagggttcgtatccattgggaatgatcctcggtgcatgcccggacatcgtcgattatgcgaagggtgggatttcgaactggcgcgatttcctcgccaccgcggccgttgttcgatcaatgctggggatcagcccgagcgcctgggaggaggcgcaaaccgtcctgggtgaaatgcaagcggcggtcgtcgtcgcctgcatcctgcagcgtggcaccacgatcagatcagctggcggctacttgcgcgggctgacgcggaaagcggaggtcggagagttttctcttggtccgatcctgatgtcgcagatcaactcccagcgccacgaaaagcgacgagcgtga

SEQ ID NO: 4288 - DNA, 948 bp, BradyrhizobiumColbertium
atgcccggtgccttgccgcgggtctcgtcgggctcggtccgctcgttgaaagacaccttttctggagtcgagaaagagaacgaggagcttcgcgaaaggattgcctccggagcgatgatccttgaaatcgacccctcgcttatcgatccgtcgccgctagccgaccggtttcgcgaccaggatgatagttcgttcgaggcgctcaagcagtcgatcgcacagcgtggtcaagaggtgcccattctcgttcgggagcatcctgaagcgaaagggcgctaccagagtgcatatggtcaccgccgcgtccgcgctacgcgcgaactaggcatctcggtcaaagcgatcctgcgagcgctgtcagatgaagcgctcgtcgtggcgcaagggctcgagaacgcaccacgcgaagatctgagtttcattgagcgcgccaccttcgcgatgcatatcgaagatgccgggcatagccggtcaatcgtgcaagatgcgttgtcgatcgatcgagcggaggcctcgaaacttcttgccgtggcccggtcagttccaaccgatgttgttcaagcaatcgggaaggctccgaaagttggccgcggccgctggcagtcattcgccgacctggttaaggatgccgccgcgctcaaacgtgtcagagcggcgatcgctgaaccgaaatttgcagaacgagaaaccgacgcccggtttcttgcagcatatacagcggcgagccgtgcatcctccgcggggacgtcgaagccatcggaagagaagccagtcttttccgcatccggcgacaagatcgcgcacgtgcgtcacgccgagcgcgaattgaagcttaccctcgacaagaatgtctcggcgacattcgctgcatttcttgtcgaccaactcccgacgctgttcgacgccttttccaaaacgagcggcggtcaggaagctagcgaggcctga

SEQ ID NO: 4289 - DNA, 1215 bp, BradyrhizobiumColbertium
atggcgatcttagcggaagattcggtgacgatgagcgagactgcgtctgcgcggatctctcggcatgccggcattctttccggtcagctgcgatcgctcgcgacgacgcttttcccgccttcagcgagcaaatcgctccggtcgttcacctcaggggaggttgcgcgaattgcaggcgtatccgacgggtaccttcgacaactttctctcgacggacttggaccgaccccgacgacgggaatcggtggccgccgatcttatactctggctcagatccatgagttgcgcgggtatctggccacagcgcgtccgcgggaagcattggaatttctcccgcgccggcgcccaggcgacaagctccagatcatcaccgtcgcgaacttcaaaggtggctccgccaagacgacgacagcgctgtatctgtcgcaatacctcgcccttgccggctttcgggtcctggcgatcgatctcgatccgcaagcttcgctgtcagcaatgttcgggtaccaacccgagtttgacattggggcgaatgaaacgctgtacggtgccatccgatatgacgaacaccgccggcccctgcgcgagatcatccggccgacctattttgacgggataggtctcgttccaggcaatctcgagcttatggagttcgagcacactacgcctcgagcaatggtcgagcggcgtgaacgcggacacgacctattctttcgccgcgtcgccagcgccatcgaccaagttgcagacgactacgacgtcgtcgtcatcgactgcccaccccagcttggttacttgaccatgggcgcgctgaacgcggcgaccgcgatgctcgtcaccatccatcctcagatggtcgatgtcgcatccatgagccaatttctcctcatgacgtcggacctcatgtccgtcatcgaggaagcgggtgggcgcctcgatcacgatttcatccggtatgtcatcacgcgtcacgatcctaatgacgtgcccgaagctcaaatcgtggccctccttcgcacccttttcggatcggatgtgctccaggccacagtgtggaaatcgaccgcgatcgccaatgcaggtctcaccaagcaatcactgtacgaactggagcgtggcgccgtagggcggggcgcctacgaccgggcattggaatcggtcgacgcggtcaatgccgaaatcgcgcaacttcttaagaaggtgtggggtcgatga

SEQ ID NO: 4290 - DNA, 486 bp, BradyrhizobiumColbertium
atggagaagctcgtaaatgcgcacggaggctgtagatttctatggttagcattctgtgaatgccatcctccggccttccgggcgcattttcccatcaagaccatgccatcatctggacggggctccggccgaaggacaacctcgtccaggctcctgaattcatcagcgcgcggatcgacaagggctggaaggcgcgcgtcggcggctggacggcacagattgttgtcagctgacaacatccatttacttggtaggcccaggctcttgttgtcagctgacaacagtctgtgcggcgtcccctatgggattacttcccctgcgatcgaaacgcctcgtccaggaagcgattcgctgcggcgcgctcgcctcgaactcgaaggttcgcgatggtatctggggcatctggtcgccaggcgtcgagattggatccggccccagggcgaggtcgaaccgctcacgaccgtgccggttaaggtgctagcctga

SEQ ID NO: 4291 - DNA, 246 bp, BradyrhizobiumColbertium
atggccttccatatcaagaatcccgagaccgacgcgctggcccgcagggtcgcggcgttaaagaaaatcggactgaccgaggccgtacatacggcgctcgcccatgaactcgaacgcgagcagggcaggccgtccttggtcgacctgggcgtccagttttgtcgcgatttgagggcgaagggcaacccgcagagcggcaagcctgctgacaaggcgttccgcgacggcctgtacgaggattcctga

SEQ ID NO: 4292 - DNA, 396 bp, BradyrhizobiumColbertium
atgttcatcgacgcttcggcgctcgccgcgatgctgacaaacgaagacgaggcgcgcgagttgctggcgcgcgtgcagcaaagcacaacccggttgacctcgccgctggccgtatgggaggcggcgattgccatcgcctgcgtgctcgatctgccgatcgccgcggcggccgaagcggtcgagagctatctcgcgctgatggaaatcaaaacggtgaacgtggcgcccgaaacagcccgcatcgcgctcgaagcatacgaccgctacggcaagggccgacacccggcacggctcaatttcggggactgtttcgcctacgcctgcgcccgaaatcttggcgaaccgttgatgttcaagggcgccgattttccgcagaccgacatcgaggcggcctga

SEQ ID NO: 4293 - DNA, 1200 bp, BradyrhizobiumColbertium
atgacggaagcgaaagccgtgttagcttccgtttcgctggttcccattaaggttatcaggaccttgctgcccacctacaaaatccccgatccgctgccctgggcccagctcgccgggccgctcgccgccgccgaggatgccgtggcccgcttcgacgagcggctggccaaaagcccaatccgcgacggcgcaatcagccggacacacttcaccgatgcctgcgccagtttgtggctggacggcgaacttgtccacctcgatgaccttgtgctccacgacgccggcatggacgttcgcactcccacccatgagctgactcgcgcccacgccgtgctgcgcgcccgtcggcgcatcgccgaggcgaagcccgaatgggcgctgtcggctccggggctctccagcctccgcgggcggggcgagcgagagcaggagacgagcaaccggaaggaaggtgagggaggttttgagatcgacgaggcccccgagcgggaggaggtaggtctcgaattgcccctcggtgtccgcgagaccgatccccatctggccgccgctttcgacgcggtcgacgcagcgaacgccagggcggagcgcaggcttgccgccgagactcggtttcggccggagcgggattctctcatctacgatcccgactgggatgaggaggaacgcctcgatcactggcgcgatgtggtcgaccagactcgcggtttgccgccgaccctggcgggggcgattgccgccgacgcctggggtgagatcgaaccactcgagcacacgccttggctcggccgcctgctcgccgcggcattgttgagggaccgcggcaaaacgcgatcgcatctgccgtgcctgcatgctgggctgaaaagcattccgcgtgagcgccggcggccacgcgacgccgcagcgcgtttggtcgtgcaactcgaggccatgacggccgccgccgagtctggccgcaaggatcacgaccgttggctgatgaccagaaacctgctcgcccgaaaactcgccggccgtcgcaccacttcaaaactgccggctctcctcgactacgtgctgacgaggccgatcgtctcggcgggcatgatcgcggcggaactcgggatcactccccgtgccgcccaaaacctggtcgccgagctcggcctgcgcgaggcgaccgggcggggacgctaccgggcgtggggcgtcctctag

SEQ ID NO: 4294 - DNA, 1194 bp, BradyrhizobiumColbertium
atgaatgagaaccttgctttatcgttcgttttgctcattatagagagaatgccccatagtgccgcccagacctcggaaattcgtacttcggaaagctccgcgccgcatgggagcccggcagcagccgtcgatctttcggccgccgacacgtcggccgagattcagggcggcctcccctcccctcttccggccgcagaatccggcctgccggtccatctcgagcggctcgccgaccgggcccgggactatgtcgaggcggcaagctctgccaacacccgccgcgcctacgcctccgattggcggcatttttccacctggtgccgccggcaggcggtcgaactgtttccgcctgacgcgcaggttgtcgggctttacatcacggcctgcgcctcgggcacggcgaccggcgataagaggccgaactcggtgtcgacgatcgagcgccggctgtcctcgctcgcctggaactatgcccagcgcggtcagccgctcgaccgccaggaccggcatatcgcgtccgttatggccggcatccgcaacacccacgccgcgccgccccggcagaaggaggcggtcttgcctgaggatctgatcgcgatgctggagacgctcgaccgcggcgcgttgcggggcttgcgtgaccgcgccatgctgctcctgggctttaccggcggcttgcgccgctccgagatcgttggcctggattgcggccgcgaccagaccgaggacggccgcggctgggtcgagattctcgacaagggcgtgctcgtcaccctgcgcggcaagaccggctggcgccaggttgagatcggccgcggctcggccgacgcaacctgtccagtcgtcgccttggcgacgtggctcaaatttgcccgcattggccatgggccgctgttccgccgcgttcggggcgaaggcaaggatgtgggaccggatcggctcaacgaccaagaggtggcgcgtctggtcaagcgggccgcgctcgccgccggcgttcgcggcgatttgccggaaggcgagcgggagcagaaatttgctggccattcgctccgtgcgggcctggcctcctcggccgaggttgaggagcgttatgtgcagaaacagctagggcacgcgtcggccgaaatgactcggcgttatcagcgccggcgggatcgtttccgcgtcaatttgaccaaagcagccgggctgtga

SEQ ID NO: 4295 - DNA, 942 bp, BradyrhizobiumColbertium
atggccgcgcgcgcgcgaatcacacacgatccaccgcctgtctttccggtctttccaggctgggcgcggttgccggcatccacgcaagccgttcaagatccggactttctcgccggggcggcgctcgccgccctgcatccaatcgcctgtcacgaacatctgctccgcatgctgtggcgtcagcgcctcgcacttagctgcgccgcggttctggcgcgccaggaggggcggacggaagacgaggcggcgctgcgcgatcattggtatcttcggcgcgaaaccgacgatcccggtccggccggccggatcctcaaagcatggcgctggctcggcgagagcagtgctatgccgccggacaactgggcggtcagtcttggcgcgctgctggcgcatcgcttcgacgacggcctactcgataccgtcgcttttgcgagggatcagatcaaagggcagggcagcgcggttgcagccgcggcagcggtggcagccaccagcctgcgctttcggccggactgccggccgctggcgctgtggctcgccgacgctgtccttgcccacaagctcggatggcgcgcgcccgtgccgctgctcgcggcccatctccagcgcggcgacctccgcctggcgacggcgcacgttgatggcgacagtccttggcgcacggcctgcgatctcgcctatgcacgtggtggcgccgtcgcggccgacctatacagcgatctctcgcggcgcgctgaaaagctcttgaaggtggcgccgcaactgcgcggcaaggacgccgatatgacggtggcgatcctgctcggcgaggatgcgcaggcggccaggaccggcaaggcggcaagcgaccggtcgagccggcggctgttcgagcgcctcatcgcccttggtggcgtgcgcgagctgaccggccggccgacgtttcgcctgtacggactttag

SEQ ID NO: 4296 - DNA, 705 bp, BradyrhizobiumColbertium
atgggatggcggccgcgatcaccggaggctcttgacgtcgagttggcggacctgccgccggacctgcgctggcgcacatgggtggggcgcgtcgaggcggtcatttttgcttcgccggagccggtgacccgtgaggtcctcgcccgcgtcgtcggccgcgactgcaatatcgatctcctgatcgacgacatccgcgacgaactgcgcggccgaccctatgagctggtctgcgtcgccggcggcttccagcaccgcacccgaaagaacttcgccgacgccatccgctttgcaacggggctcggcgccgagacgaaaccgctctcggactccgagaacctcatcctgatgtgcatcgcctacttccagccgatcacgcgcggcgaactcgggcagttgttcggcaaagaggtcagccgcgacaccatcggccacctgcgggcgctcggattcatcgccgccggtccccgcagcccgcaacccggcgcgccctacagctacgtcacgacgaagggttttctgtcgcactacggcttcgacaccttgcgcgacctgcccgacatggaggcgctcgaagacgccggtctgctcagcaaggacaagctgctggctggcaccatccccgtgcttgccgcagacgagaacgaggacatcgccggcgacgagggtggctcgggcgatgaagctgagatcatggacgatgggtag

SEQ ID NO: 4297 - DNA, 585 bp, BradyrhizobiumColbertium
atgcggagaataaaatgcgaaggctgcggccgtctggtcccgggcttcgcggttgtcgaatacggctcgatggaagtcggatacaaacggctttgccaccgctgcttcaatagcgaggccgccacggccgccggtctcaccgacttcgagcatgtggaatttgatccgatccgtctgaaagataccgacgggaaattccacgaattccacttcacgagattcctgttcggcacgggcgtcgctttgaacgcgttcgaactccgcaagggcgtcccggcgggctaccggttccaggtgattgcaggccccgaggaagaccctctcgccatgctcggccgactgatcgaaaaaatgcagcgcggccttgccgtaaaacatcttgaggacagcgaatacggtttgcagatcggacaagccggggtcgtccgaggctgcatcacgtgggacgacgggcaacacggacgtctgcctctccttgtcattgatggccgggagatttcctgggatgaattcggccgctgcctgatgaccttcgaaggattccaattcaaattcgaaattcgcgacaagagtgatgagctctga

SEQ ID NO: 4298 - DNA, 1053 bp, BradyrhizobiumColbertium
gtgagcgccgcggcgacctgcgcgaggtttgccgtcgagatccgcgaacgataccttgatattgcgcgggatcggtggcccatatccattgatccgaaacctgacgaactgctgtcgagttggctgcatcgtgttgggcaggccaacgggatctcgccgcgatcgttcgccggggtcttgggggttggtggcgcaatgtggtcggcccgcttcgatcttcggattccgcgtgccatcgccgttctgctcagtgaccggacggagatttcgccggaagcgctaacgacgatggcgatgtcggattgggtgttggcgccactcctgctgccgctgcgcgagaacgcgaacaggaaccgttcgacctggctgcaatattgtccgctgtgccttggcgaggacgaatcgccgtattttcgtcggcagtggcggctcgcgtcgcgcatttcctgtttcgtgcatggttgcggtcttcgggatcgatgccctgcctgccgcagcgcaattgccgtcttcgatcaaagggatcttgtcccgcagcatttctgcgtgcgttgtggtttcgatctgcggaccgctcggaaagtctcggtcaaaggcggggcgcggcggctggaacgggcgatcgcggatatctttcgggtggaactggccaggagcccgacgaccgagagttcaacggccgtccgcgatgtcgtttcgcgcgtgctgcgcgcatcggctgcgaccgacgatagcttggcaatgagtttgacgagcctggcgtcgatggcgcgcattcgctggtttgagcaacttgccggggagcctctcgattggctggtcgccgacaaggacgctgccgtcacacatcgacgttggtcgatcctggcggccggcggccaggatcgattggtcgcctgcttcgctgacttcctggacaagtgtcaggccaggccgagatcacggcgtttgatacggcgcggcgccggcggcattggtcttgccgatttgctggcggcctatcgacgtgtggctggcgatcggagttcatcaaagcttcatcgtgacctttga

SEQ ID NO: 4299 - DNA, 876 bp, BradyrhizobiumColbertium
gtggatcatctgctggagcacgttcgctcctatctcgaccgcagcttggacgaacggatcgcctatatccaggcgccgcgatggattgggcatcgggtggcgatgcaagcgcatgagcgacttgccgaactgttggctcgaccggctgcgttgcgaacccgaggactgatgctggtcggtccttatgccaacggcaagaccatgatggcggaacggttcgcggtcgagcatctgagggcggccgaacaacagcgagtctgggtcgtgcagacccgtgagggcgccggccttgcccatttctatggaagcatcctgcaggcgttgcgcgccccgaccagcaacaggcgggatgtcggccgcaaggccgaacagatcgattatctgttcgacaggctcaaacccagaatcctgatcttcgacgaattccacaatgtcctgcgcggccggacccgtgacgtcgaggcggttcttgcgtttctcagacggatcggtcgccagtttgacatctcaccggttctgatcggcgaggtcgccgtctacgacgtcatcaaccagaccagtgagatggcaagccggttcgatctgcacgcggcgccgcgctggcaatatgacgaggaattcctcacgttgctcgacagtctcgaagcggccttgccgctggcccgcagttccgatctttccgacgagaaactggcgcgcgagatctttcggctttcggagggactgatcggcgagatcgtggcggttgtcacggcagcggcaatcgctgcggtcaggtctggcgcggagcggatcacgaaatcggacctcgggcaattgtgctacgttccgctttcgcagcgccgccgggcgccggtgcgcgactacctgttgtga

SEQ ID NO: 4300 - DNA, 1611 bp, BradyrhizobiumColbertium
ttggacgccgacgaaacatggtcggcggcgcgccggaccgcgcgcgagctggaccgcgtgctggacggttccgggccacgacaggtggtcattgatcgggcggcggccgaactgcgcctctcgacccggcaggtctacaatctgctggcgcggtaccgggctgatcggagggtgacgtcgctcctacccgatggggaacggactcggaagaggcgccttcggcaggacattgaggagatcatcgcaacgacgctgcgcgagcaatggctcgtgctggaggctccgccgcttgctcccgtcgtggccgagatccgcgcgcgctgtgaagaggcggggctggctgcgccgtcctatgtcagtgtcgcccgccgggtaccggggttattcagtcccgaggaaatcgcaaggaaacgctcggccaacccgaagcatctgcatcggctgaaacctagaccgggctacatccatgcggcgcggccgctcgacgcctgccagatcgaccacacgccgaccgacatcaatttcgtggaggtcattgagggcagcggaacctttgtcggccgcgcctatctgacgattgtcaccgatgtggcgacgcggtgcattctcggattttgcctcacccttgagaaaccgtcggcgctgtcggtcgcgctatgcctggcgcaagcgatgtgtccgaaggaaggatggctcgccgcacgcggtatcccggatggctggccgatgttcggtcgcccgcggttgcttgtcaccgattccgccaaagagttcaaaggacatgccttccagcgtggatgcgaggactatggcattgatatccgctatcgcgaccgcggtcgcgtgcaccagggcggagtcgtcgagaggttgctcggaaagctcaacgccgttcttgcgacacagccgggatcgacaggacgatccgtggcggatcgcgacgaatatcccgcagagcggcgcgcgcgtctcagctttgctgatcttgagcgatgtatcacgctcgcagtgatcgaccataacctgcaggagaacgcaaagagggtgaaggtgccggccactgaatgggagcggcaggctcgcgatcttccccgcttcaacgatgatccgatgcggatcctgctggcgttcatgccccggacggagagacgcatttcgccgcagggtgtcagcatgtttgcgctcgattactattcgccgtggctgggcgcgctggtgccgcagcgtgaccggcttggcaagctcgaggtccgctacgaaccacgcgacatcagccacgtctacatcagggattcggagacgagggagtttcggtcggtggagcggcgtgacggaatgcttgcgccgatgacgcggtgggagcacgaagtcgaccgcatgcaccgccgcgcaacaaatgcgcggtcgaacgtcgacaaggtggcgctccgccgacggatcgcgggaatcgccaacgggccgaagccgtcgaaagccgaactgcgcaatgccgcgcgcagaatccacgcggcagaggcgcccaagccctatgatgccatgcgcccggcgacaccggcgcctgctgagcatcctgtgcgtcataagcgccgcctgccggtcgaggattggtga

SEQ ID NO: 4301 - DNA, 141 bp, BradyrhizobiumColbertium
gtgagtccgcgcaacccagccgtcgcggatcgggcttttggccagccgttcgtcgagccgggccagcgcatcctcggccgccgccagcggcccggcaatctgtgtcgcttttacctcccgatttcaaacaggaaaaagtga

SEQ ID NO: 4302 - DNA, 297 bp, BradyrhizobiumColbertium
gtgaaactcgtctggtcgcgcttcgcgttgtccgatcgcgacggcattttcagctacatcgaggccgagaatcctcgtgccgcggttcatgtcgacgaacagattgccaatgccgcgcggcgtctgctcgactttccggatagcggtcggccggggcgtgtcgctgggacgcgcgagttggtcattccgcgtacatcttatgtcgcggcgtacctggtcgacggcgataccgttcgcatcttgcgcgtgctccatggcgcgcagatgtggcccgacgaacttaccaacgacgattga

SEQ ID NO: 4303 - DNA, 309 bp, BradyrhizobiumColbertium
atggcttcgaatgccttggtccaaacccgcatcgatgcggacgtgaaggaaaaggccactgcggttctggaaaatatgggtctcacggtatccgacgccgtgcggatcctgctgacacgcacggccaatgaagggatgcttccgctggagctcgtgagcaacagccaagcttacgatagctggtttcgggagaaggtgcgccaggcgttggccgacacgcggcctgatatcgatgattccgaggtcgaagcgcatttcgcacaacgccgtaccgctgcgcttcgaaaggcaccggagcaggaacggtga

SEQ ID NO: 4304 - DNA, 147 bp, BradyrhizobiumColbertium
atgttctacaagtcgatgacgaccttcgccgatcatcgcctctggcaggacgtcgatcacgtccccgcccgcggcatgacgctctatgtaaagttccaggcggacatcgtcaccgagttcacggtcatgtcgttcaaggagaaatag

SEQ ID NO: 4305 - DNA, 429 bp, BradyrhizobiumColbertium
atggcggtatcgaagacggacttgccccaaacgatgatttctccggagaccggcgaaacgctgcgccgaggcgttcgtcccttcgtcgtcacctacaaaggcaagagcatcacggtcgagctaccgggctactatccggaggatggcgccgagggcgtgcatgtcggtgacgacatggctgtcaccgacgcagctctgcgcgggttgaaggaagaaattgatggcattccgtcccccggcacgatcaggcgggtgcgcgagaagctgaagctatcgcagcgcgaggcgggtggcttgctcaaagttggggagaacgccttcgacaaatatgagcgtggactggtcgagccgagcggtccgacgagccaattgttgcggctcctcgaccaacatccagagctgatcgaggaattgcgcgagcgtgcctaa

SEQ ID NO: 4306 - DNA, 252 bp, BradyrhizobiumColbertium
gtgacggtcacgccgctcggcgcaatctcccggctcgagcacgcgcttgatgatttcgagggcgagcgcgaccgctttcgccagcgtcttgccgatgcgcggcggcggcttgcctcataccagtcccgcgacggcggcgacttcgctttcggtggcgaactcgcggagaagcgccggcaactttcggagatcgagaaggcgcttgcggcggacatcgagggcgcaggcgagcccaaggcgctcgctgcttag

SEQ ID NO: 4307 - DNA, 288 bp, BradyrhizobiumColbertium
atgccgccgctgcgccttcggcttcgcggtgatcgcggccggttgaggagaccaacggacgccatcgagcggggatcggcctcgctcaccgatggagccgctcagatgtcgcacgatcttgccctcgcccaatccaacgcattcgaactggcccgcaccctgatggtcccggtcacgctttttcaggtcgacggcgaatacggcgtgatgcccagcgatgagctcgacgatgcggatgtcctcgtcgtttacgaatacgacccctacttggccggctcggctcattga

SEQ ID NO: 4308 - DNA, 1878 bp, BradyrhizobiumColbertium
atgacgtccgaggttcaagatcagacaggcacgtcttcctttcttgacgcgctccgctatgcccaaggccgcactccggaaggagccgccgtcatcctggcgataacagtagcgctctcgatctggcttgcgtctcgctatgccgaacaggccgactggattcggcacacgcttgaggtgcagtcccagatcttcaggatttggtcgagcctccaagatatcgaaatccggcagcgcaactttgtcctgaccggcgaggatcaggacttgaccccgttcgtggaggccgacaaacgcatcacgcggcagatcgacgatctcgcgcaatttgttgcggataatcccatccaggtatccgccatcaatgcgattcgaccgttggtaaccgatcgcatcgcatttgcccagaacactgtacaggtccgccagcgaggtgacgtcgagggcgctcgcaagcttgtatctgaggggcgcggcctgcagctgatggaggacttgcgcaaacgtttcgatggcatgcaggacgaggaaactggcctgctcgctgctcgaacagcggcgctccattccaccatcaactggttgctcgcggctatcgctttgggcattctaacaaccgtgtacgtcctgaccgcgtggatcacgacggcacggcgcaacgcacgcaaactggcgcaagccaatcagatcctccggaagacgatcgcagaacgcgaagccgccgagcagcagatacggcaaatgcagaagatggaggctatcggacaactgaccggcggcatcgcgcatgatttcaacaacatgttggcggttatcatcagcggaatttctctggcccgtcgccggttggcggcgggccgcgacggcgtcgacggatttctcgcgagttcggtcgagggtgcccaaaaagcagctgcgctggtggcccggctcttggctttctcgcgccaacaaaccctttctccccggccgatcgacgccaaccgtttcgtggcaggcatgtccgaattgatctcgcgcgccttgggcgaatcgattcgaatggaaacgatcttgggcggcggattatggaccacctatgccgatcattcgcagttggagaccgcgattctcaatctctccgtgaatgcaagagacgctatgccggaaggcgggcggctgacgctggaaaccgccaactgccacctcgacgaccgctactcgcgattacaccccggcgtgccgccgggccagtatgttttgattgccgtaacagacaccggcacgggaatgcccccggaggtcgctgccaaggcgttcgatcctttttatacgacaaaagaggttggcaagggcaccggacttggactctctcaggtctttggcttcgtcaagcaatctggcggccatgtgaagatctattccgagccaggtgagggtacgacaatcaaaatctatctgcctcggttcttgggacaggccgaggcagcgaaagagaccgtggagacgcaagagttcagagggacggaaaccatccttgttgttgaggatgatcccgccgttctcgacctcacggtcgccagtctacgagaacttggttatgaggtcttgcaggggcgcaacgccaaagacgggctgaatgtcttggccgcacatcaagacatcgcacttatggtgacggacatcgtgatgcccgacctcaatggtcgcaagctcgcggatcaagcgttgcaactcatgccagacttgaaaatattgttcatgacgggcttcaccaagaacgccgtcgtgcataatggcgtgctggacagcggcgttcacttcctggccaaacccttcaccatcgatgagctctccagaaaagtgcgcgaagcgatcgagacgacgacgaagcgttag

SEQ ID NO: 4309 - DNA, 981 bp, BradyrhizobiumColbertium
atggattacgtcaagttcggatcgaccggcctggaggtctcgcgcctcgtgctcggctgcatgagcttcggcgatgcgacgcgaggcacacacgcctggacgctcgacgaagaggggagtcgcgcgctgatccgccaggcgctcgaggcggggattaacttcctcgacaccgccaacagctattcaggcggcacgtccgaagagattgttggccgtgccatccgcgatttcgcgcgacgcgacgagatcgtgttggcgacaaaggtcttcaatcggatgcgtccggggcccaacggttccgggctttcgcgcagagcgatcttcaacgaaatcgacgccagcctgacgcggctcggcacggattatgtcgacctctatcaaatacaccgctgggacgatcgcacgccgatcgaggaaacgatggaggcgctccacgacgtggtgaaggctggcaaagcccgctacatcggtgcttcctcgatggcgagctggcagttcgcaaaggcgatctacactgcgcgcctccacggctggaccccgttcgtcagcatgcagaaccatttgaacctgctctaccgggaggaggagcgggagatgctgcccttctgccgcgatcaaggcgtggccgtgatcccgtggagtccgctcgcgcgcggccgcctggcgcgggcgtgggacgagagttcggcgcgtcaggaaacggatgtcttcggccgctcgctttattccgacgccgacccgcaaatcgtcgatgctgtcggcgcgatcgcggcggctcgcaatgtctcgcgtgcgctggtggcgctcgcctgggtgctgcaaaagcctggcgtcacggcgccgatcgtcggcgccaccaagccgcaacatctgacggacgcactagatgcacttccgctgcgcctgaccgaggaagaggtaaagacgctcgaggggccgtattcgccccgtcaagtcgtcggcttctcgttaccgcgctga

SEQ ID NO: 4310 - DNA, 1785 bp, BradyrhizobiumColbertium
ttgacgcgtaagcctgcggcggccgaggtctcggcagcggcgagcgacgtcgacgtcggcacacctgtggcaatgctctcggtgctgcgtttcgtcacgagctattggggcaggcgagccggcctgtttgtcaccggtgtctgcgcctcgttgctcgggacagcattcgatctggccttgccttgggcatcggccgcgcttgttgacgacatcgcggccgggcggagctcgggagacaatgtctggcgatcatgggcgattttcatcgcaatgttcctcggcttcgccctgtctcgcaatgtcggtcatcgtctatggattcccgttgccgcccgcaacatggaggaaatggccaacgagacctttgccaaggtccaggcgcttccatcctcgtggcacgcctcggccttcgctggaggcgtcgttcgtcgcattagtcgggcaatgtggggctatgacaatgtaaccgatgcgttgactattcgcgtcggcccggcgttgctggtgctcggcggtctggccgtcatgctcatgctgcgcagttttctggctggcatgatcgcgctcgctgcagtcgtccttttcaccgtgctgaatctgattctgaccgcgcgctacgttcgcccggccaaccagttctcgaacgaactcgacgcggcgatgaacgcaacgctggcggacgcattgtccgggaacgccgtcgtgaagagttttgcgtgcgaggctggcgagctggagagatttgctgccgacacggcgcgctggcgtgcatcggcgatgcgcacctggactcgatttgttgacctcggcatcatccagaatcttgtcctgcttgtcctgcaggccggaatgacgggaatgatggtggaagcctggcttgcgggcgcagcctctccgggggacgtcgccttcgccattacagccttcatcctgatgagcggatatttgcgcaatctcggcgacaatgtccgggagctgctgaaggggctggatgacacggccgacgcgctgcggtttgcgtgggcgagcggagagccgacgaatgacaccgctcctgacctcttggtcacgagaggcggcatcgaattccagggcgttggcttcgcctacgccgagacaggcagccctgtgttcacggatctcgacgtgtcgatcaagccgggagagagcgtggcgatcactggcgaaagtggctctggcaaatcgacgctcatcaagctcctgcaccgcctctatcccgtcggcgcggggcgcattctcattgacgggcaggatatcgccgaggtttccctgtcctcattacggcgcgctgtggcggtggcaccgcaagagccgatgctgttccatcgatcagttcgcgataacatcgcctatggtcgaccgggggcgacgctggaagagatccggcacgtcgcccgtatcgcctgcgccgacggcttcattgcgcgactgccggcgggatacgatacggtcgttggagagcgcggcgtcgcgctgtccggcggcgagaggcagcgggtggcgctcgcgcgcgccctccttgcgcaggcgcccattctcgtactcgacgaggcaacctcggcgctcgatagagataccgaggctgaggtcttgacgaaccttgcgtccgtcgccgatcgccagacacgcatcatcatcgctcaccgtccagcatcgatcgcaagcgctggccgcgtcctgaagatcatcgacggccggtcgacgacggacatggaccccgatacgtcaggccgacgcccgatcgcgctgagcggccgggtgtag

SEQ ID NO: 4311 - DNA, 957 bp, BradyrhizobiumColbertium
atgcttcgtcaggatcagttcgaagggttagccgttttcgtggctgtcgcacaggcgtcaggtttttcggctgcggcggtccgtcttggaatttcgccatctgcggtaagccaggccgtgcgcaatcttgaggaacgacttggcttcccgctcttcaatcggacaacccggagtgtcagcctgaccgaggctggccagcgttacttcgatcgcatcttgccttgcatcgaggagctgtcggcagccaccgaggagctggatgagaatgccgatcagccgtccggtctcttgcggctgaatgtaccccgcgccgcctacatgatcatcttgcagccagcgcttccggcgttccacgagcgctatccgaagatctccgtcgagatcgtcatcgagaacgcgctggtcgacattgtcggcaagggcttcgacgccggcatccggtttggcgatctgctggaaaaggacatgatcgcactgcggataggccccccgatcagcgcccatatgatcgcctcgcccgcctatctcaataagcgcggcatgccggatcatcctcgtgatcttcagaaccacgactgcatccaattccgacacgtcaccacgggccagatcgagcgctgggcattcgccaaggacggggagaccgtagagatggtgccgaacggccatctcatcatcaacgattccgaggcactggttcagagcgcgcttgatggcctcgggatcgcatacatgatcaacggctacatcgaacggttcctggagagaggtgaactcgtccgcgtgctggcggactggagccctcgcttcgacgatcttcacctctactaccctgaccggcgacgcgttcccgccaagctcagggtctttatcgacttcctgcggtcgatgcggatccagggtggctcgagcgctttgctacacccggccgctcagcgcgatcgggcgtcggcctga

SEQ ID NO: 4312 - DNA, 180 bp, BradyrhizobiumColbertium
gtggagcagaagggtaacggcttccaggcgaccgtaacgtttcccgacggcgtttcgatgagttcggcggagacatatccgtcgattgccgaagcgatggctgcggctgcccgaaaggttctggagacgcccgagcgcctcgcggcgctcgatcagtcaacggaagctggaaacagctaa

SEQ ID NO: 4313 - DNA, 1041 bp, BradyrhizobiumColbertium
atggatgcgttctatgcctcggtcgaacagcgcgacaatcccgaactcaggggaaagcccgttgccgtgggaggatcggccgcgcgcggcgtggtcgccgctgcaagttacgaggcccgcgcctttggcgtcagatcagcgctgccttccataaccgcgaagcgccgctgtccagacctgattttcgtgccgccgcgcttcgacgtttatcgcgccgtctccgcgcagatcagggagatctttgccgaacacacggatctgatcgagccgctctcgctcgatgaggcctatctcgatgtcagcgagaacaagcaggcgattccgatcgctacggagatcgcgatgcaaatccgcgctcgcatcaaggaggttacgggcctcaacgcctccgccggcgtttcctattgcaaattcctggcgaagatggcgagcgatctgaacaaacccaatggccaggccgtcatcacgccgcgtatggggccggcatttgtcgaagcgctcgccgtgaagaaattccatggcgtcggtcctgcgacggcggcgaagatggaacggctcggcattctgaccggagccgatctcaaagcgcaatcactgccgttcctgcggcagcacttcggcaaggctggcacatggtactacgcgattgcccgcgggatcgatgagcgacctgtccagccagaccggccgcgaaaatcgataggcgcagaggacaccttcacggatgacattttcgacctcgccgcggcgcgcgcggaggtccctccgctcgccgcaaaggtctggagacattgcgaagcgaagaacctgcgcggcagaaccgtaacgttgaaggtcaagttctccgactttcagcagatcacccgcagtcgcaccgtcagcaccgcagccgcttcggcctcggatatcgagaacatcgcgcagagcctgctcgaacccctttttccatcggagaaaggaattcgtttgataggggtaaccgtctcgtctttcgatgaagagcagacagtttcagacgagcaactccgcttgttgatttag

SEQ ID NO: 4314 - DNA, 843 bp, BradyrhizobiumColbertium
atgggcgttgaggtccgtgagcgacgtctgatcgagcatgacctgcggaatgcggtcgcgaacaacatgatgtcgttggtttatcaaccgcagcaggatattcaaagcggcaacattacgggattcgaagcgttgcttcgctggaagcacccaactcgaggcgagattagtcccgcaacgttcatccccatcgccgaagacaccggcgtaattctcccgatcggcgactgggtgctgcgaaccgcctgtgctgaagcggccggttgggcacgtccgctttcgatcgctgtcaacgtctccccggttcagctttacaacccagagttcgcgcaggacgtgcacagagtcctgctagagacaggcctttcgccgcgacggctagagatcgaaatcaccgagactgccctcattcgggatctcaatctcgcgctgtccacgttgcggcgtctaaaggcgctcggagttcgcattgcaatggacgactttgggaccggttactcttccctttcaaatttgcgggcgtttccgttcgacaagatcaagattgaccgttcttttatcaggtcggtcgatgccaatgatcaagccgcgaccatagtgcgcgcggtgctgggaatcggtcgcgggctcggcctgcccgtgctcgccgaaggcgtcgagacgaccagcgaactgcagttcctgaaggaagcgctttgcgatgaagtccaaggctacctgttgggacggcctaccgctatcgatgcttttcacaacattactcacggcgatgttgaggcattagtggttgattcgtcttccgccttccaaaccctgcaaaaaagacccgcctatctctcttaa

SEQ ID NO: 4315 - DNA, 708 bp, BradyrhizobiumColbertium
ttgccgatcggcggtcatcgctttgaaggcattttgccgccgatcgtgggcgcgccaacctttacgattcgtaaacgggcgtcacgcttgttcaatctcgaggattacgtctcgcaaggcgtcatgaccgccagccaattgggcgtcattcgcaatgccatatcctcccggctgaacatcgtcgtgtctggaggcaccgggtctggcaaaaccaccctcgcgaatgcggtaatcgcggcgatcgtccaggatgcccccgaacatcgtcttatcattctcgaagacaccgccgagatccagtgcgcagccgagaacgccgtcgcgctgcatacgagcgacactgtcgacatggcgcgcctgctcaagagcaccatgaggttgcggcccgatcgcatcatcgtcggagaggtacgcgacggcgctgcgctgacgctcctcaaagcctggaacacgggccaccccggcggcatcaccaccatccacgccaacagcgcggcatcggcgctgcgccgtcttgaacagctcacggccgaagtcagccagcagccgatgcgtgaagtcattggcgaggcggtcgacgtgattgtctcgatcgaacgaaccgatcgcgggcgccgggtccgtgacgttctgcatgtcgagagcttctcggccggccaataccagactcaatcctacacccggaaggaggcgcgccatgtcgcgtaa

SEQ ID NO: 4316 - DNA, 363 bp, BradyrhizobiumColbertium
atgctgatcgtgggcgctacgggcttggtgctcgcgctccttgtactcgaccctgcattcgcatcgagcagtggcggcaatctgccatgggagagcccgctgcaacagatccagcaatcgatcacaggccccgtggccggctttatcgcgctcgcggctgttgcggtcgccggcggcatgctgatcttcggcggcgaactcaacgatttcgcacggcggctgatgtatgtcgtgctggttgccggcattctgcttggcgcaacacagatcgtcgcactgttcggctcgagcggggcatcgatcggcgaggtcaccggcgcggcgccgaccgccggcagggcagaggacctcggcaatggctga

SEQ ID NO: 4317 - DNA, 249 bp, BradyrhizobiumColbertium
atggccgagccgcaactctccgttcgcagtgctagggcacgcgatctcgctcatcgcctggcgcgtcgggaaaaccggtcgatcgcggacgtggtcgagcgcgcgttggaggcgtacgcggagcgcgtcgccggacgtgagccgccgacggctttttacgcccggctgaaggcagatgctgatgccgacatcgacctcgaggcggtcattcgcgaagggcgacgcccgcacgcgggacctgagctttga

SEQ ID NO: 4318 - DNA, 1326 bp, BradyrhizobiumColbertium
atgacggaatatctatcaacgacgccctttgggcggcggccgatgacgcttgccatgatttcaagccaactggccgcgaacgaccgaaccaatgcagggattgttcacaaatggcacgtcttccagcacatcaaggaagcgcgccaggcgctcggcgctaccgatcgcgcgctcacgatcctgcatgctttgctgtcatttcatcctgagatcgcgcttgagcctgacagcgaactgattgtgtggccatccaacgagcagctaatggcccgggccaacggcatgccaccgacgaccttgcgaaggcatctcgccgtcctggtcgactgtggtcttatcattcgccgggacagcccgaacgggaagcgttacgctcgtaaaggacggggcggagagatcgagcaggcctacggcttcgatctagcgccgatggtcgctcgcgcagaggaatacaaatcgctcgccgaggctgttcaggccgagaagaaggccttccgggtggtcaaggaacgcctcacgcttctgcggagggacatcgtcaagatgatcgaggcgggcctgcaggaggacgtgcccgcggactggaagcggttccagcgaaactaccaggagatcgtaggtcagattcctcggaccgccgcccggcagcttctcgaaagcatcgttggaaggttggaggagctttggcgggagatccgggagctgttggaaactttcgcaaaaacacagaatccggacgccaatgagtcccatttcggacgccacatacagaattcaaacccagaccttccatctgaatctgaaagtagctcagcgaaaaaggacgaagcgggcggcaagacctcgaccgtcgacaacctccggagcctaccgaagcgcgagcttcctctcggtattgtcctcgatgcctgtccaaacatgcgctggttggtgaaagggggcgaaatccggcactggcgggatttgatcgccgccgcggaaattgcgcggccgatgctggggatcagtccaagcgcgtggcgcgaggcacgtgaggtcctgggggatcagcaggctgcgataacgctggcggcgatccaccaaaaatccgaccagatcagcagcgccggcggctatcttcgcagcctgactgatcgggccagggacggaaagttctcggtttggccaatgatcatggctctgttgcgtgcaaaactggacgccgcgaagccgtcggtcgcccaaagcgagggtgattccgcggattttgagccgcaaaagccgcagcgtgggttgcagcccagcgaccagttgcgagcaatccttgccaaacggccaaaaccgtga

SEQ ID NO: 4319 - DNA, 1305 bp, BradyrhizobiumColbertium
atgctccgcattggcgatattctgaaatcgagcaagttcctcaccaccgatatcggcgatgcgtcgcttgcacagcaagttcgacgcgcctttgtcgtggtgctctggcggctacgggcgatggtcagggcatatggcgagcccaagccgcttggcgctgatccgctccaggcgcttacgatcctcgcagccgatctcaaaaggcgcgccgcgcagctttccgccgatacgcagagcgacgactacaagagactgaaatccgaataccttgaactcaaggagcgcgccgctcttgcgccgctgctcccggacatcaaggcgcacatcgcgcgcctcaaggaaatcgagtcgatcaacactgcgctgaagtcgattgccaagaaaccaatcaccgacaagaacaaggaactctcggatcgcatggtaacggacgctctgcgcggtcgctttgcgcgtgagattggaaaactcaaactgtcccgaatgccggttgagctacgcaaggagaaagaccggcaggcggtatcgtattttcgcgttgcgttggtggagaacccgaccgccaaggtcggcgagatattcagtgaaggcgagcaccgctgcgtcgcgctcgctgcgttccttgccgagttggtcacggcgcagcgttattccggtatcgttttcgatgatccaatgtcatcgctcgaccacattcaccggaacgcggttgcgtcgcggctggtggaggaggcggaacaccgccaggtcattgtgttcacacacgaccttgtgttcctatacgaacttcgccgcgaggcagagaaggcgaaccggccaatcgcatttcgcaatgtcaggcgtcggcaggataagcctggccacatcgagaacgagttgccggataaggcgaagtcgggccttgagatgtgcaatgcgctgcgatcctcgctcaaatcggcaaaaccgacctttgataagctgacagatactcagcgcactacgttctgcaaggggactatcggtcaactgcgcgatgcttgggagcaggccatttccgattacgtccgcccagtgctcgaaaggttcgacaacaaagtaaaaccgacctcgatcttcaaactcggcattctcaccgaggacgacgtgaagtccgtaatggaagcccaaagtaggctatctgaggacctccattcctcggcacaagcgttgaaccctgaggccttatcgcttgatgacctgcttagcgaggttaaggccctggaagaatggattcagtccatccgtgatcgccaaaagaatgcggtaaaacccgcgcttaattag

SEQ ID NO: 4320 - DNA, 177 bp, BradyrhizobiumColbertium
atgctggtcatgcgcgcagttggaaaagttctctggggtggcgcggccattgcggttccacttgcaatgtatggcgccgcaatggcgagcactcaagctggcatcgctcagtttatcccgttgggcgctgttggcattggccttctgctgatgggcgctttgttgcacgcccgctga

SEQ ID NO: 4321 - DNA, 1134 bp, BradyrhizobiumColbertium
atgagtgccaacccgattgccagccttgcgatcggcatggcctcgttgttcggcctgctgctcggcggtctgcttgcctttacgacgatccgggcaatcgaccgaccgctcgctcatgccaacgaggttctcggtgcgatcgcacaggggaagttcgacagccgggtgttcgtcgagcgagatgatgaagtcggaacggcgctacgcaatatccaggcacttcaagcgaagctggggttcgacctggagtccaagcgagacatggaggagcgtgccgccgtgcagcgaaaagccgacatgcacaagcttgccggcgacttcgaggccgccgtcggcgatatcatcgataccgtggcgtctgccgcgaccgagctggaggccgctgccggaacgctgacccacaccgcggattccacccaacaactctccgtttccgtggcagcggcctccgaggaggcttcgaccaacgttcagtcggtcgcttctgcgaccgaggaactgtcgtcttccgtgaacgagataagccgccaggtgcaggaatccgcgcgtgttgcgcaggaggctgtcgctcaggccaacaagacaaacgagcgggtcagtgcgctgtctcagtcagcgggccggatcggcgatgtggtggaattgatcaacaacatcgccggtcaaaccaacctgttggccttgaacgccacgatcgaggcggcacgcgccggcgaggcaggccgcggctttgccgtcgtagccgcggaagtgaaagcgcttgcggaacagacggcaaaggcgaccggcgagattggccatcaaatcgatggcattcagacggcaaccgaagaatcggttcgcgcgatcaaggaaatcaccgacaccatagcgcggctgtcggaaatctcgtcgactatcgcggcggccgtggaggagcaaggtgcagcaacgaaggaaatttcccgcaacgtgcagcaggcggcgcatggcactcaggaggtgtcctccaacatcaccgacgttcagcgcggcgctagcgaaaccggctccgcgtcatcgcaggtgctttccgcggcgcaatccatgtctggagacagcaatcgcctcaagctcgaagttagccgcttcctgaattcggtgagagcagcatag

SEQ ID NO: 4322 - DNA, 1071 bp, BradyrhizobiumColbertium
atgactgatgccctgaagccatccgaacaggcccgaattgcgctcgtgaccggcggctccggcttcgtcggcggccgcctgatctcgcaccttctcagccacggctggcaggtgcgggcgctggcccgaagcgcttcgagcgaggcgcaggtcaaagcgctgggagcgacgccggtgcggggtgcgctcgacaacgagcaggcgctgcgaatggcgatgcaaggctgcgaaatcgtgtttcacgccgccgcgcacttcaagctttggggcaagcgcgagcttttcgaccggaccaacgtcgagggcacgcgcgtggtcgtgaacgcggcggcggcgacggccagcgtgcgccgcgtggtcgcggtcagcgcagcggcggtggtcatgggtgatcccgagccgatgtcgaatgccgacgagagccttccgctgcaagtccgcgccttctcgccctacgcctcatcgaaagctgagggcgagcgtgtcttgctggccgcgagcggcgtccgcccgggcctggagacgatcgcgctgcggccgccctttgtctggggaggcaacatgccgaccctcgatcacatggtgcagacggtaaaggccggccggtggcaatgggtcgctggcggcacgcaggccatctcgagctgtcacgtcgacaatctgtgctccgcgctgatactcgccgcggatcggggtcgtggcggggaggcgtacttcgtcgcagattcggagcagagcacgctcaagagcttcatctcgtcgctgctcgccacccgcggggtgagcccgccagacaagtccgtcccgttcgccatggcctggaccatggccggcctcatgggcgcagcgtggcgcatcctgcgcctcggcggcgagccgccgatcacgcgccagatgctgcgccttatcggcaagccgttcacgatcagcacagccaaggcgcaggccgagctgggctacgcgccgcaaatcacgatgacggagggacttgccgcgatgcggcagggcgaagccagcctcgccagtctggccggccatcgcggcgacctgcgtgcagtcgccgtctcctga

SEQ ID NO: 4323 - DNA, 618 bp, BradyrhizobiumColbertium
atgccttcaagtccttcttccgacgacaattcgttccgagagcagattctcgaaaccgcgcgagcccaggtgcgtcggcatggcgaggcaaagacgaacgtggtcgacatcgcgcgcgcgctcggcacgtcgcacaccacgatctatcgccacttccgctccaaggccgacatcttcgacgccctcgtcgttgaaatgatgcgcgacgaggaagagatggcgagacagttcgtcgaggcgcgaggatccttcgcggaacgcctggagggcatggtgctggcgctgcacgcccgcaagcgcgaacggttcacggccgacgcggaggtctatggcctgtaccgccggatcgtggaggagcggcctgagatcatcgcggcgtatgcgaaagcgatgacgtctctggtcggccgcatcctgaccgacgcaaaaaagcgcggcgaaatccgggttgatgacgtcgaggccgcggccggcgtcgtgcgggacgcggtgaccgtgttcgtccatcccgtccacgtggcagccgccgtcgcggccaatctccccagcgagaagatggcccgcaacgtcgtgcgcacgatttgcgccggattcaaagcgggtgccaaactgacgtga

SEQ ID NO: 4324 - DNA, 546 bp, BradyrhizobiumColbertium
atgcagcttattttcatctatgggcaagtcgcctcgggcaaactgactatcgcgcgccatcttgcctcccggacagggattgcgctgtttcacaatcacctcgtcgtcgacgcagttggctcggtgtttccgttcggcacggaggcattctcgcgtttgcgcgaacagttctggatggccgtgttcgaggaagctgccaaggagaagcgatcgttgatattcacattcgcccccgagccaacggtggctggggacttcccggtccgggtaaaagaactcgtggagcggaatggcggcgaggtcatcttcgtggcactgcacctggaacaggcagagcaagagcgacgcctggtcgatgacaatcgtgccgcattcggcaagatgcgggacctgtcgctactgcgcgcacttcgaccgcagttcgacgcctgcatggtatcgatgcctcagcctgcagtcaccctcgatgtaaataatctgaagccatctcagagtgccgaggctatctcacgcctgatctcggtaaatcccgagcgagagacctga

SEQ ID NO: 4325 - DNA, 189 bp, BradyrhizobiumColbertium
atggatgacgaacgaaaatcatcaagggcggggcaacaggccgccgaaggcttgcgtgaagcagcgtccaaggaagaagcgaagaacgagagcaggatggggcacgatctggccaagggggctgatcgtttcgaagagcgctcgaaaagctccgatggaaaaagcgcagaagagaagcaagaaggatga

SEQ ID NO: 4326 - DNA, 765 bp, BradyrhizobiumColbertium
atgactgaaaagccgcagccgggcgcgcccgccctggaaaaagggctggaccttctggaggcattggcgggcgctgcgcgcggaatgagccagaagcagcttgccgaacgcgtcgggcgctccgtcagcgagatcttccggatgctggtggcgctggagcggcgcggctatgtcgcgcgcgacccggcgaccggcgaatacaccttgacgctgaagctgttccggatcgcctcgcaattcccgccgaccgagcggctgctgaaggcggcgctgccggtgatggagcagctggcgtcgcgcgtgcaattgtcctgtcacctcacggtgctgcacggcgagcagttcatggtgatcgcccggatcgagccggaatggctgatgggctggtcggtcaaggtcggcgcggtgtttccgctcacccagcaatacgcctccgcgaaggtgctggcggccttccagctcgagggccggcgcgaggagcttgcgcaggtcatcgcgaccaatgaccggatcagcacgaaaaaggcgcttgccgcgctcgaccgcatttcggcggagggaggaaacttctccaatgacgacggctatacgcgcatcctggcctatagctgcccgatcgtcgaagcctcaggccgcgcggtggccgcgatgaccgtcccgctggtgcggcaggatcaaatccccgctagcgaggccggcaccatcgccgccgagctgcgcaatgcggccaggatcgtctccgagaagatcggcggcgtgtcctga

SEQ ID NO: 4327 - DNA, 459 bp, BradyrhizobiumColbertium
ttgctgacagatcatgtcgaggcgttgcgcgcggcgtttcgcgaaacgcgtcagcgccatccgttcacgatcgatgccatcgtgattttgcctgaccaccttcacacggtgtggacgctaccagaaggtgatgccgattttgcgatgcgctggcagctgatcaagtccaccttttcgcgcggcctggcgcacaatgaaaggatatcccaaagccgcttggccaaacgtgaacggggcatttggcagcgcagatattgggagcataccattcgtgacgacgtcgatttcgcgcggcatgtcgactatgttcacatcaatccggtcaagcacgggctcgtcaaccgggtgcgtgactgggcgccctcgtcgtttcatcgccacgtcaggcttggcaattatccggtcgattgggccagcgatcaattggatcacggccgcgactacggtgagcggggataa

SEQ ID NO: 4328 - DNA, 513 bp, BradyrhizobiumColbertium
atgaaggaagagcatgcatttgaccaaaaagcgctgatcgagatcgtcagcgccaagccgcagaacttcgcgtggttcctgggcgctggtgcatcacggtctgctggcctccccagcgccaccgatctcctttgggacctcaagcgccattattattgccgcgaggaaaatcaggaaattacgcgccaagacatccagaacgacgctgtccgtcaccgtatccaatcgttcatggagtctcgcggatttcctgccgaatgggccgacaacgaatacgaagcgtactttgagaagctgttcggcaaagaagtccttgaggtcggcgttgaacacgaaccgcttgtttcggtgcgccgtggcgttcgtgacaatcgaaaagtccctcttaaagccgtgtgccagtcggcactgacttcgggagcgggattgttccaactcaacatgaatgtccaaaagaagatcagccaactttgtctgaatcatcttcaggcgcggcttgggggccgtgattaa

SEQ ID NO: 4329 - DNA, 1284 bp, BradyrhizobiumColbertium
atgcatattctcctgctcggttccggcggccgcgaacatgccctggcgtggaagatcgcagcctctcccctggtgaccaaattctggtgcgcgcccggcaatgccggcatcgccagggaggcggagtgcgtggcgctcgatgtcgccgaccatgccgcggtgatcgacttctgccggcagaacaaggtcgagctcgtcgtggtcgggccggaaacgccgctggcggccggcatcgtcgacgatctcgcagctagcggcatcaaggcgttcggcccgagccgggcggcggcgcagctcgaaagctccaaggggttcaccaaggcgctgtgcaccgagttcggcattcccacaggcgcctacaagcgtttcaccaatgccgatgacgcgcgcgcctatgtgcagagccagggcgcgccgatcgtggtcaaggccgacggcctcgccgccggcaagggcgtcgtcgtcgccaagaccgtgcgcgaggcggaggatgccatcgccatgatgttcgagggcgccttcggcgaggccggcgctgaggtcgtgatcgaggagtttctgccgggccgcgagatcagcttctttgcgctgtgcgacggcgagacggcgattccgctcgcctccgcccaggaccacaagcgcgtgttcgaccacgacgtcggcccgaacaccggcggcatgggcgcctattcgccgacgccgctggtcacgcctgccgtccacgacgcgatcatggcgaagatcatcctgccgacggtcgcaggcatgaagcagcgcggcacgccgttccgcggcgtgctctatgccgggatcatgctgacgacgcagggcccgaaattgttcgagttcaacgtccgcttcggcgatcccgagtgccaggtcttgatgctgcgcatgatgagcgacatcgtgccggccttcctggccgcctgcgacgggcagctgaagaatttcgacctgcgctggcatccggattccgcgctcaccgtggtgatggccgcgaagggttatcccggcgactaccggaagggcacccgcatcgccgggctggaggaggccgccaaggtcgagaccgtcgagatcttccacgccggcacggtggcgaaggacggcgccatcctcgccaatggcggccgcgtcctcaacgtctgcgcgctgggcaagaccgtgaccgaggcgcaagcccgcgcctaccaggccgtcgaccgcatcgactggccggacggcttctgccgccgcgacatcggctggcaggcggtggaggcggagaaggcccagggctag

SEQ ID NO: 4330 - DNA, 903 bp, BradyrhizobiumColbertium
atgtccgacctcgtcgacctctatccgggcttcgccgccgaatggatcgatacctccttcggccgcatcttcgcccgtgtcggcggcaagggcccgccgctgctgctgctgcacggcttctccgagacgcacgtgatgtggcaccgggtggcgcccgacctcgcggaagccttcacgctgatcatcgccgatctgccgggctatggctggtccgacatgcccaccagcgatgcgctgcacatgccctacagcaagcgcgcgatggcgcgagccatggtcgaggcgatggagcgcctcggccatgtgcatttcggtctcgccggccacgaccgcggcggccgcgtcgcctaccgcctggcgctcgaccatcccggccggctgtcgaagctcgccgtgctcgatatcctgccgacctacgattactgggagcggatgaaccgcgcctcagcgctgaagatctaccactggaccttcctggcgcagcccgctccgctgccggagacgctgatcgcgagcaatggcgaattcttcctgcgcttcaagatggcgagccagaccaggtcgaagacgctggacgcgatcgatccgcgcgcgctcgagcactacatcgccccgttccgcgatccttcccgggtgcacgcgatgtgcgaggactaccgcgccggcgcctatttcgactacgacctcgacaaggccgatttcgaggccggcaagaagatcaccattccgatgctggcgctgtggggcaatgccggcatcgctcaggcggccgcgaccccgctcgacacctggaagcaatgggccaccaacgtcgacggcatgccggtggattcagggcacttcctcaccgaggagaatccgcaggtgaccgcgaaggcgctgctggagttcttctcaggctaa

SEQ ID NO: 4331 - DNA, 429 bp, BradyrhizobiumColbertium
atggatttggcgcttcaggcggctgaaaatgccggtcaatcgggcgaagttccgatcggatgcgtggtggtccgcaaccaggaggtgatcgccaccggggccaaccggacgctgacggaccatgatccgaccgcccatgccgagatcgtcgcactgcgcgaggccgcgaaaaagatcggcagcgaacgtctcgtcgactgcgacctctacgtgacgctggagccctgcaccatgtgtgcgggcgcgatctcctttgcaagggtgaggcgcctctattacggcgcggcggacccgaagggtggcgcggtggaatcgggcgtccggttcttcgcttcgccgacctgccatcacgtgccggacgtctattccggcgtcggcgagagcgaggccgcgcggctgctcaaggagttctttcgcgagcggcggtag

SEQ ID NO: 4332 - DNA, 1989 bp, BradyrhizobiumColbertium
atgcctcgcgacagcgacaaagacaacgattcccgcggccggcgaggccccgccaaaggccgcagcggcaagccgcgcgggcctgagaagaaattcgccaagcgcggcttcgagggcaagggcgatcgcgacagccgtccgccgccgcgaggcgaccgtgacagccgcccgttccgccgccgcgaggagggcgatgccccgcgccgcgatttcagcgaccgtccccgcgtcaagcgcgacgaccgcggcggtgagggccgcggcgagcgcagcttcaagccgcgcggcgaccgcccgttttccgatcgcggctcgcgcgatggcgagaagcggccgttcaagccccgcggtgaccgtccgtcccatagccgcgacgaccgcccgccgcgcagccgggatcgcgacgatgcgcgtccggccgggcgctccagcgagcggaagttcggcgacaagcggccctatgcgccgcgcggcgatcgtcccgaacggaagttcgacggcgagcggaagttttcgcgtggcggcgatcgcggtgatcgtccgcgcgatcgtggcgagcgcggcgattccaagccgtggcagaagcgcgatgaccggccgcatggagatcgcccgcgcaagagcttcggcagggacttcggcggccgtgaccgcggcgaggagaagccctggcgtcagcgccccgaccgcccggacggtggtcgcggcgaagaccgtccgcgcttctccaagcgtcgtgacgagggggatgatcgcccgcgcttctcgcgcccgcgtgaggagcgttccggcgacgatcgtccgcacttcaagcgtccgcgcgaaggacggccggaaggccgcacggactggcaggagcatccgcgcaacgaaggtcgttttcgcgacaggccgcggcgcgacaacgaggacgacggcaggattttcgagaagcgccccgctttcggcggccgcggcgcctatcgcgagcgtgatcgcgacttcgagggtcggccgcggcgcgaagacgcgccgaagccgaagaaggccggagagcgcatcgccaaggcgctggcccgcgcgggtcttgcctcgcgccgcgacgccgaggaaatggtcacgcagggccgcgtcaccgtcaacggccgtgtcatcaactcgccggcgctcgacatcacgaagaacgatgtcgtcatggtcgacggcaagccgttgccggagcgcgagcgcacgcggctgttcctctatcacaagccgcgcgggctgatgaccacgcatgacgaccctgaggggcgtccgaccgtgttcgagaatctgcccgagggcctgccgcgcctcatcagcgtcggccggctcgacttcaacaccgaaggcctgctgctgctcaccaacgatggagggctcgcccgcacgctcgagctgcccgacaccggctggctgcgccgctaccgcgtccgcgctcatggcgacgtcacgcaggcgcagctcgacgagctcaagaacggcatagagatcgagggcgtcaagtacggtccgatcgaggcgacgctggagcgcgaccagggtgccaatgtctggctggtgttcgcaatccgtgaaggcaagaaccgcgaggtgcgcaatgtctgtgcccatctcgggctcgaggtaaaccgcctgatccgcgtctcctacggcccgttccagctcggcgagatccccgagggccaggtcgaggaggtccgctcccgggtgctgcgcgagcagctcggcgacaaggtgatcgagaagtcgggtgccgagttcgatgtgccggcgaaaccagccacacgcgaggacgatggatcgaagaagcccgccagcaagcgcgcggtgatcaacgaccgcaagggccgccgcgtgctggtgcagcgcaccggcagcgaggaggcgcgcgagcgcaacgagatggaagcgggcggctatggcccgccgcgccgtcccaagcgcggctaccacggcaagcgcgacctgaccccgcgggaggattga

SEQ ID NO: 4333 - DNA, 558 bp, BradyrhizobiumColbertium
ttgcgcgtcgtcggcggtcgtttgaaggggcgcaatctcgcctcgccgtcctcgcgcgacatccgccccacggcggaccggctgcgcgagtccgtgttcaacattctcgtgcacgcctatgacaatccgatcgaggatgcgcgcgtgctcgatctcttcgccggcacgggcgccctcggcatcgaggcggcctcgcgcggcgcgaggttcacgctgttcgtggacaatggcgccgaggcccgtgcactgctgcgtaacaatgtcgaggcgctcggcctcggcggcgtcaccaaggtctaccgccgcgatgcgacggatctcggccctgcgcatcccgtcgagccgttctcgctggtcttcctcgatccgccctatgggaaggggtttgcggaaaaggcgcttgcgagcttgcgcgatggcggctggctcacgccgggcgcgttgttggtggtggaagagtcgaaggccgcgcaggtcgtgccgccggagggctttgaggagttggagcggcgggcgtacgacgacacggaattcgtgttcttgcgcaggacgggttag

SEQ ID NO: 4334 - DNA, 1815 bp, BradyrhizobiumColbertium
atgcccgtccgccagcttccagaacaggtcgtcaaccgcatcgccgcgggcgaggtggtcgagcgccctgcgagcgtggtcaaggaactggtcgagaacgccatcgatgccggcgcgagccgcatcgacgtcttcaccgacggcggcgggcggcggcggatcggcatcaccgacgacggcagcggcatgaccgcgaaggatctcgcccttgccgtggagcgccacgccacctccaagctcgacgacgaggatctgctgcagatccgcacccttgggtttcgcggcgaggcgctgccgtcgataggctcggtggcgcggctgtccatcaccacccgacatgccagcgaaccgcacgcctgggcgctgaccgtcgagggtggcacaaagtccgagatcatgcccgcggccctggcccacggcacgcgggtcgaggttggcgacctcttctatgcgacgccagcgcggctgaagttcttgaagaccgaccgcaccgaggccgaagccattcgcgaggtggtgcggcgcctcgccatggcgcggcccgacatcgccttcacgctcgcgggcgaagaacgcgcgccggtgacctgggccgccgccctgcccggcaccgcgggacggctgacgcggctcggcgacattctgggcgcggaattccgcagccacgccatcgaggtccatgccgagcgcgagggcgtggtcgtcgccggctatgccgcagcgccggcgctcacgaaggccaacgcgctcgggcaatatctcttcgtcaacggccgccccgtgcgcgacaagctgatccttggcgcggtgcgtgcggcctattccgactatctgccgcgcgatcgccatccggtgctggcgctgttcgtcacgctcgatccgcgcgaggtcgatgccaacgtgcatccggccaagaccgaggtacgcttccgcaacgcgggcctcgtgcgcgcgctcatcgtgcacggattgaaggaggccctcgcgcgcgagggccggcggaccgccgccaacagcggcgagagcgcattgtcatcgttccggcccgccttcacgccgcagcgtccggcgagctgggactggcgggcctcgccatcagctcccgtcgcgccgttaccatcattcgaaggtgccgcagcgccggccttcgctgaacgcgcgcaggcggccttcgatgtcggtgcacccagcgcggacgtgcggatcgagccgcagcccgccggcgatctcgtcgaccgcccgctgggagcggcacgcacgcagatccacgagacctacatcgtctcgcagacccgtgacggcctgatcatcgtcgatcagcatgccgcgcatgagcgcatcgtctacgagcggctcaaagcctcgctggccgcgaacggcgttcagcggcagatcctcctgatccccgagatcgtcgagatggacgaggcgaccgtggagcgcctgctcgagcgcagcgcggagctggcatccttcggcctcgcgatcgaatccttcggccccggcgcagttgcggtgcgcgagacaccgtcgctgctcggcaagaccaatgccggcggcctcctgcgcgatctctccgagcacatggccgaatgggacgaggcgcttcctctggaacgtcgtctgatgcacgtcgccgccaccatggcctgccacggctcggtacgcgccggccgcaggctgcggccggaagagatgaacgccctgctgcgcgagatggaggacaccccgaactccggccaatgcaatcacggccggccgacctatgtggagctgaagctgagcgacgtggagaagctgttcgggcggaggtga

SEQ ID NO: 4335 - DNA, 417 bp, BradyrhizobiumColbertium
atgctgcggatatcccgcaatctcgtcatcgacgaggacgatatcgagatcggctttgtccgcgcctccggcccgggcgggcagaacgtcaacaaggtcgcgacatcggcgcagctgcgcttcgatacacgcaagctgaccttgccggaggatgcggcgatccgcctcgcccgcctcgccggccagcgtatgaccaaggacggcgtcatcgtcatccaggcgcagcgcttccgcacccaggagcgcaaccggcaggacgccatcgaccgtctcaccgagatgctgcgcgaggcgatgatcaggccgacgccgcggcgcgcgacgcggccgaccttcgcctccaagcagcgccggctcgaaggcaagaagcgccggagtgacgtcaaggccggacgcggccgtagcttcgaagactag

SEQ ID NO: 4336 - DNA, 1392 bp, BradyrhizobiumColbertium
gtgacccatcacttccttcgcgcaagatgcttccgaggcacaagacacgccgcgcactccttcgtcatcggcgcggcgcttgcgctggcggcggtctcgccgtcgcaggctgccgcaaagatccagcacctgatctcgccgggcggcatcgaagcctggttcgtgcaggacgcaaccgtgccgctgatcgccatggaatattccttcgccggcggctcggcgcaggaccccaaggacaagccgggcgttgccaatctggtcggctctctcctcgacgaaggctcaggcgatctcgattccaagacattccgtgaacggctcgaccgacgcgccatcgagctctccttcaacgccacccgcgacaccctccggggcagcctgcgcatgctgcgcgacaacaaggacgaggccttcgacctgctcaggagcgcgctcacgtcaccgcatttcaacccggcggatgtcgaacgcatccgctcgcaggtcatttcgggcctgcgtcgcgagaccaccaatcccacctcgctggcaagccgcaagttcctggaggtcgccttcggcgatcatccctacagccggcagaccaacggcaacctcgacagtgtgccgaccatcaccgtcgccgatatgaaggattatgtcggtcgggtgatcgccaaggatgggctgaagatcgccgtggtcggcgatgtcgatccggcgaccctcggcaagttgctcgaccacacgttcggtagcctgcccgccaaggccaatctgacgccggtccccgacgtcgaggccgccaatccgccgcaacgcgccttcgtcacgcttgatgtgcctcagaccgtgatcaccttcggcggcccgggcgtgaaacgcagcgatcccaacttcatggcggcctatgtcgtcaatcacattctcggcggcggcggactgtcctcccggctctatcgcgaggtccgcgaaaagcgtggactggcctattcggtgttcgaatcgctgctttggatggagcattcggccatcttcatcggcaataccggcacgcgcgccgaccgcgccggcgacaccatcgatgccatcgagaaagaggtgcgccgcatcgccgaggaaggcccgacccagaaggagctggacgaggccaaatcctacctgaagggctcgcagatgctggcgctcgacacctcgtccaagctggcgcaggcgctgctgcaatatcagcaggacaagctgccgatcgactatatcgagaagcgcaacgccatcgtcgacgcggtgacgctggacgacgccaaggcggccgccaagcgcctgtggggccaaggtctcctgaccgtcgtggtcggccgcaccccgcaggccgctgtgcaaccggcggcagcaccgacgacgaagtcgaactga

SEQ ID NO: 4337 - DNA, 729 bp, BradyrhizobiumColbertium
gtgatcgccggtgacgtcgacgctgccgagatccgtccgctggtcgagcgcaatttcggttccatcccggcgcagcccgcgatcccggcgcgacgtgttcgtccgcaggaaccggaccccacggcgccgcgcaccgtcacgctggccgacccgcgagtcgagcagccgaacatgcggcgctattatctcgtgccgtcggcgaccacggctgcagccggggaaagcgcggctctcgacgtgctcgcgcagctgatcggcagcggcagcaattcctatctctaccgcgcgctcgtcgtcgacaagcccctggcggtctcggccagcgccagctattcgagcatctcgctcgacccaacccagttcgcgatctccgctgcgccgaaacccggcgtcagcttcgcagaggtggagcaggcggtcgacgatgtcatcgccagcgttgcgcagaacccgatccgcgctgaggatctggaaagggtcaagacccagctcattgccgaggcgatctacgcccaggacaaccaggcggtgctggcgcgttggtacggcggcgcgctgaccacgggcctttcgatcgaggatatcaggagctggcccgatcgcatccgcgccgtcactgccgagcaggtccgagccgttgcgcagaaatggctcgagaagaagcgctcggtgacgggctatctgatcaaggacaccgccaccgccaagcgcgaggagaagcgttcgtga

SEQ ID NO: 4338 - DNA, 294 bp, BradyrhizobiumColbertium
atgcgcggcttccagggcggtcgcccctcgatctacaccatgacggacgcgatcaggggcgtagcgacgcccgcactgatcatctgcggcgacgaggacgatccgtgcgtcgggccgagcctgttcctgaagaagcacctgcccgcggccggcctcgcgatgtttccgaaatctggccacgtcctcaacctggaagagcccgcactgttcaacgagagcgtggcgcggttcgtcacgctggtggaagccggtcgttggccggcgcgcgatccgcggtcgctggcggcgcactag

SEQ ID NO: 4339 - DNA, 657 bp, BradyrhizobiumColbertium
gtgcaggaagtgctgccgctgaacggcgtgacgagcggggcggccggtcagtatcgcgtcgatcatctgctggtggccgagatggtcaagccggggtcgaaggtgctcgatgtcggctgcggcgagggcgatctgcttcaactgctggagacccgcggcatcgacggccgcggcatcgagctgtcgcgcgagggcgtcaaccgctgcgtcgccaaggggctcgcggtggtgcagggcgatgccgacaccgatctcgtgaattatcccgatgacgccttcgactacgtgatcctgtcgcagacgctgcaggcgacgcggcagccgcgtgtcgtgctggagaatctcctgcgcatcggccgccgcgccatcgtgtcgttcccgaatttcggcttctggaagatgcgactccagctgctgatcgggggccacatgccacgcaccgagaacttgccggcgacatggtacgacaccgccaacatccatttctgcacgatcaaggatttcgtcgagctttgcgacgagatcaacgtcaagatggaacgctccgtcgcgctcgatctctatggccggcccgtgccgctgaacctgccttggtgggtgtggaacatgttcggcgagcaggcggtgttcttgctgagcaggggcgccgggaaatag

SEQ ID NO: 4340 - DNA, 1146 bp, BradyrhizobiumColbertium
gtggatcatccaagctcgcaggtcgcgcatttcggcgccgagcagccgctgcggctcgattgcggcgtcgatctcaccccgttccagatcgcctatcagacctatggtgagctcaacgccgatcgctccaacgccgtgctgatctgccatgcgctgaccggcgatcaacatgtcgccaatgtgcatcccgtcaccggcaagccgggctggtgggagacgctggtgggcccgggacggcccatcgatcccaagcactacttcatcatctgctccaacgtgatcggcggctgcatgggctcgaccgggccggcctcgatcaatcccgtcaccggcaaggtctggggcctggattttcccgtcatcaccattcccgacatggtccgcgcgcaggcgatgctgatcgacaggctcggcatcgagacgctgtttgccgtcgtcggcggctcgatgggcggcatgcaggtgctgcaatggaccgcggcctatcccgcccgcgtgttctccgcgctggcaattgcatgctcgacgcgtcactcggcgcagaatatcgccttccacgagctcggccgccaggcggtgatggccgaccccgactggcacggcggcggctatgcagatcgcggcatccatccgcatcgcgggctcgccgtggcgcggatggcggcgcacatcacctatctctcggacgcggcgctgcatcgcaagttcggccggcgcatgcaggatcgagatctgccgaccttctcgttcgacgccgacttccaggtcgagtcctatctgcgttaccagggctcgtccttcgtcgagcgtttcgatgccaactcctacctctacctgacgcgtgcgatggactatttcgacatcgccgccgatcacggcggcgtgctggcgaaggcgtttgcgggcatcaagacgcgtttctgcgtggtgtccttcaccagcgactggctgttcccgacttcggaatcgcgcgcgctggtgcacgcgttgaacgcttccagcgcgcgggtgtcgtttgccgagatcgagaccgatcgtggccacgacgccttcctgctcgacgttcccgagttcttcgacatctcgcgcgcgttcctgcagtccgccgggaaggcccgcgggctcacgggcagaaaggacggctag

SEQ ID NO: 4341 - DNA, 123 bp, BradyrhizobiumColbertium
atgcgaccgttcgtcggcgctgatcgcaggactgggtaccgacttgacgccaaccatcatcgacctcgtttgcgactgccctcagaccgccgctggaatcaggccatgaaaaacccggcctga

SEQ ID NO: 4342 - DNA, 846 bp, BradyrhizobiumColbertium
atgtcccaacgtccgcccgcgccaccctcgcttcaggaactgcgcaaggagatcgatgcgatcgacgagagcatgcatcgcttgctgatgcagcgcggcgacatcatcgaccgcctgatccaggtcaagcagacacaggaggtcggctcggcgtttcggcctgcgcgcgaggccgacatgatgcgccacctcgtgcagcgccatcgcggcatcctgccgctcgacacggtcgagagcatctggcgcgtcatcatctcgaccttcacttacgtgcaggcgccgttctcggtgcatgccgatatctcggcgagcgagccggcgatgcgcgattccgcgcgcttccatttcggttttaccgtgccttacgtcgcgcatttcagcgcgcaggccgcagtcgaagcggcagcaaagtccaagggcgatctggcgctggtctcggcgacgtcgagccgcacgccgtggtggctggagttggaagccgatggcgcgccgaaaatcatcgcgcggctgccattcgtcgaacgcgcggaccatccggccgccttgccggtgtttacgatctcgcgggtcgccgacagcgcgctggttacggaggtcgagaccttcagcgtgcgcgtctccgggtggaacgccgaggtcgcacgggccctgtcgccgctggcggagatcgtggcggtgccggacacggccttcgacggcgcggcgctgctggtctcggtcacgagcgcaaccagcatcgacaaaattaaggctgccctgatcgaggcgggggcgtcggtgcgctccacggccctcgtcggcagccacgcaacgcgctatacggtgcccccgaccggcacgaaatag

SEQ ID NO: 4343 - DNA, 1098 bp, BradyrhizobiumColbertium
atgtcccgccccgtgccgaatcccggcattctcgatattgcaccctacacccccggcaagagcccggtgccggagccgggccgcaaggtgttcaagctctccgcgaacgagacgccattcgggccctcgcccaaggcgatcgaagcgttcaagcgcgtggcggatcatctcgaggactacccggaaggcacctcgcgcgtgctgcgcgaggcgatcggccgctctttcgggctcgatcccaaccgcatcatctgcggcgccggttcggacgagatcctcaacctgctcgcccacacctatctcagccacggcgacgaggcgatctccaccacgcacggcttcctggtctacccgatcgcgaccatggccgtcggcgccaagaacgtggtggcgcaggagagcaacctcaccgccgacgtcgacgccatcctgaaggccgtgacgccgcggacaaagctggtctggctcgccaatcccaacaatccgaccggcacctatcttccgttcgacgaggtcaaacggctgcgcgccggcctgccctcgcacgtgttgctggtgctcgacgccgcctattgcgactacgtctcgcgcaacgactacgagatggggatcgagctcgtcgccaccaccgagaacacagtggtgacgcacaccttctccaagatccacgggctcgctgcgctgcgcatcggctggatgttcgggcccgagcacatcatcgatgccgtcaaccgcatccgcggtcccttcaacgtgtcgacaccggcgatgtacgccgccgtcgccgcgatcgaggacaccgcgcaccaggcgatgtcgaagcagttcaccgagacctggcgcaactggctcaccgaggaaatcggcaagctcggactgaaggtaacgccaagcgtcgccaatttcgtgctgatccatttcccgaccgacaagggcaggaccgccgatgacgcggacgctttcctgaccaggcgcggtctcgtcctgcgtgcgctgaagaactacggacttccgcatgcgctgcgcatgacgataggtaccgaagaggccaaccgcctcgtcgtcgagggcttgcgcgacttcatggccggcaaatga

SEQ ID NO: 4344 - DNA, 933 bp, BradyrhizobiumColbertium
atgagcgaacaggcgcacttccagcgcgtcgcactgatcggcttcggcctgatcggcggctcgatcgcgcgcgctgcgaagctccagggcctggcttccgagatcgtcaccaccgcacgctcggagaagacccgcgcgcgcgtcgccgagctcggcatcgtcgatcaggtggtggcgaccaatgcggaggcggtgaaggatgccgatctcgtcatcctctgcattccggtcggcgcctgcggagctgtggcgcaggagatcgccgcgcatctgaagccgggcgcgatcgtctccgatgtcggctcggtcaagggcgcggttgtccgcgacatggtcccgcatctgccgaaaggcattcatttcgtgccggcgcatccggttgcgggcaccgagcattccggcccggattcgggtttcgccgagctgttcatcaatcgttggtgcatcctgaccccgccggaagataccgatgcggcggccacggagcatctgcgggcgttctgggcggcgatgggcgccaaggtcgagatcatgacgccggatcatcacgatctcgtgctcgcgatcaccagccatctgccgcatctgatcgcctacaccatcgtcggcaccgccgacgagctggcgcaggtgacggaatccgaggtgatcaaattctccgccggcggcttccgcgatttcacccgcatcgccgcgtccgacccgacgatgtggcgcgacgtcttcctcgccaacaaggaggccgtgctggagatgctgggcaccttcaccgaggatctcgcaaaactcacccgcgcgatacggcgcggcgatggcgaggcgctgttcgaccacttcacccgcacccgcgccatccgccgcggcatcgtcgagatcggccaggactcggcggcgcccgactttggtcgcctggctgcgctcaagaagccgtag

SEQ ID NO: 4345 - DNA, 1185 bp, BradyrhizobiumColbertium
atgtccaatatgaccgttgccacaggccgccgctcccgttggggccttttcatcgcccccgtctttgtcctgatcctcgccgttgcgtggagcggcttctggttctatgcggcgtcgcaggccgaaatcgccgccgacgcctggcgcgcgcaggaggccaagtccggccgcatctatgattgcgccaagcgctcgatcgcgggcttcccgttccgcttcgaggtgcaatgctccggcgccagcgtcgccctggtgtcgcagaacgcgagcaagacaccgttcacggcgaagctcgacaacatcctggtcgtggcccaggtctacgaccccaagcgcgtcatcgcggaattctccgcgccggccacgctgaccgacggcatcacgcagaacaccttcgcggtgaactggagcaaggggcgcgccagcgtggctggcctgccggccgtgccggaccgtgcctccatcgtgttcgacgaccccagcctcaatcggctcgacggcagcgtccaggtgccgcttgcgcgcgccaggcaggtcgagctgcacggacgtctcgcggagggatcaaagcccgatcatcccgtgatcgagaccgtgcttcacgtcgcgcagggcagcattcagggcgtgcacccgctgttagccgagccgttcgaagccgacacccgcgccaagatcaccggcctctccgacctcacgccaaagccctggccgcagcgctttcgcgagatccaggccgccggcggccatatcgagatcgtgcagtcgcgcatccagcagggcgagatgatcgcggtcgcggccggcaagctcggcctctcgcccaatggccggctcgacggcgaattgcagatgaccgtcacaggcctcgagcgcgtgatcccggcgctcggcatcgagaagatgctggaggagggcgtgccgcaggcgacgctggatcgactcgcgccgggcgtgaagtcgcaggacctcaacaatctctttggagcgctcgaccgcgccgttcccggcctcggcaaggtcatcaagcagaacgccaatgcgggcgttgcggccggcatcaattcgatcggcacagagagcacgctggaaggcaagaaggcgcgaagtttcccgctgaaattcgtcgacggcgccgtgctgctcggcccggtgaaggtcggccagattccgccgctgtattga

SEQ ID NO: 4346 - DNA, 630 bp, BradyrhizobiumColbertium
atggttctggtagccgtgcccgaaatgtcggaaatcaccgtcccctccgtcaccaccgccaagggcgacctctgggtgttcggctacggttcgctgatgtggcggccgggcttcgagttcgaggaacgcgtcccggcacggctggtcggcgagcatcgcgcgctctgcgtctattccttcgtgcatcgcggtacgccagaaaagccgggtctggtccttggactcgaccgcggcggcgcctgccgcggcatcgcctttcgtgtcgccgagaagaaccgcgccgacgttgtcgcctatttgcgcgcacgcgagcaggtcacgtcggtctatcgagaggtgatgcgttcggtgtggctggagaacgatgcgcgccagcgtgtctcggcgctcgcctacgtcgtcgaccgcggccatgtgcaatatgccggccggctgtcgctggccgagcagcaccgtcatgtgctccagggccatgggcagtccggcgccaaccgcgattacctcacggcaacggtaaaggcgatcgaggcggaaggctttcgcgacgcccagctgcaccagcttgcattgatgctgcatggtgatgcgctgcacgtgccggccccgaccggagatcgcgaaagccgctag

SEQ ID NO: 4347 - DNA, 774 bp, BradyrhizobiumColbertium
atgtttctgatatttctccgctcgctcgtattcaacgtgctgttctacgccgtgctggtgtgtcttgcgatcgtggcgctgccgaccttcgcattgccgccgcgagccatgctcacggtggcggaatggtgggccaagacgacgctgttcctgatgcgcgtggtctgcaacatcaaggtggaattccggggtgtcgagaagattccgaagggaccgctgctgatcgtggccaagcatcagtcgttctgggagaccttcgtgctgccgggtttcttccaccggcccatcttcatcctcaaacgccagctcatgcagatcccggtgttcggtcaattcctggtcaagaccgggatgatcgcgatcgaccgcaatgccggcgtgaaggcgctgctcgacatgacgcggcgggcgcgcgaggcggtgcgcagcggaaagcagctcgtgatctttccggaaggcacgcgccgtgctcccggggcggcgcccgactacaagaccggctttgcgcagatctattcgtcctgcggcgtgccgtgccttccgatcgcgctgaactccggtctgttctggccgcgccgcaccttcatgcgctatcctggaaccctggtggtggagtttctcgacccgctgccggcggggctgccgaaggacgagtttctttcgcgcgtgcagacggcgatcgaggacgcgaccggccgtctcgtcgaagccggccgcaaggagcaggagcaattgattggctccgcgccaagctacgcgccgaccggtggctag

SEQ ID NO: 4348 - DNA, 705 bp, BradyrhizobiumColbertium
atgacctcgccgaccgacgatcgatcgccgaaactgccgcgcggctggctgcgcgcggccatcgtgtcgacgatcgcgcttgccttcgtcgccgcggccgcaggcttccttgcattcctgtcgcaattgcgcggcgtggagacggtgcccgaccgcaaggcggacgggatcgtggtgttgaccggcggctcctcgcgggtatcggacgcgatggagctgctcgctgccggctacggcaggcggctcctgatctccggcgtgcatccgacttcgacggcgagcgacatctcccggaccctgccggagaaccagtcattcatgacctgttgcgtcgatctcgaccgtaccgcgctcacgacccgcggcaacgcagcggaggcgcgccgctgggccgaggggcgccggttcagatcgctgatcgtggtcacctccaactatcatatgccgcgcgcgctggtggaattttcacatgcgatgccacagacgacgctgatcccgttcgccgtggtcggcgaaaaatggcgcgaggagccgtggtggacgtcgggctcgacgctccggctgcttctgtcggaatatgtcaaatacatcgcggccgagctcagggtgcggctggaggatctcgggattgacctttggcccgagatatcggagcagcctgcaggtcagcagccgaagcggcccgccaccgcacaggccaattga

SEQ ID NO: 4349 - DNA, 969 bp, BradyrhizobiumColbertium
atgagtaggaccgacgagcgcggcgtcctggtcgacctcgggcaggagcgtccgcagcttccggccaaggcgcgcaacatgtcgccgatcgtcccgcgcgcctcgatccacggccgcgcgctggtcgccgtcgtcgccatcatgagcttcctcgcctcgatggccacgggcacggtgctgctggtgagtgcctcggccgccgaatggcagtccgacgtcgcgagcgagatcaccatccaggttcgtccgcaggccggtcgtgaccttgatcgtgacaccgcagccgtgaccgaggcaatgcgcacgcaagccggcatagtcgaggtcaagccgttcaccagggaagagagcggcaggctgctcgagccctggctcggcaccggcctgtcgatggacgatctgccggtgccgcgcatgatcatcgcgcgcgtgcagccgggcacgccactcgatctcggcgccttgcgcgcgctcgtgacacaggttgcgccgggtgccagcgtcgacgatcaccgggcctggatcgagcgcatgcgctcgatgaccaacgcgaccgtgctggccggcctcggcatcctcgcgcttgtcatcatcgccaccatcatatcggtctcgttcgcaacccgcggcgccatggcggcgaaccgtccgatcgtcgaagtcctgcatttcgtcggcgccggcgatcgctacattgccaatcacttcctgcgtcatttcctcaggctgggcctcgaaggcggtctgatcggcggcggcgcggccatgctggtgttcggcttctccgagtccgtcgcgggctggttctccggtacccccgtcggcgaccagttcgccgcgctgctcggcaccttctcgctgcggccatccggctacatcgtgctcgccgtccaggccgtgctgatcggcgccatcaccgcggcggccgcacgccagactctgtttgcgacgttgaatgatgttgattga

SEQ ID NO: 4350 - DNA, 660 bp, BradyrhizobiumColbertium
ttggttcggttcgaaaatgtcggattgcgttatggcctggggccggagatcctgcgcgatctcagcttccagattccggcgcattccttccagtttctcaccggaccgtccggcgccggcaagacctccctgctgcgcctgttgtttctgtcgcatcggccgacgcggggcctcgtcaaccttttcggccacgatatctcgcaactgggcaaggacgagatcgcggatttgcgcaagcgcatcggcatcgtgctccaggatttccgcctgctcgatcacatgacgacctatgagaacgtcgcgctgccgttccgcgtcatgggccgcagcgagtcgagttaccgcaaggaggtgatcgacctgttgcgctgggtcggcctcggcgatcgcatggacgcgctgccgccgatcctgtcgggcggcgagaagcagcgcgcggcgatcgcccgcgccgtgatctcgcggccgcagctgctgcttgcggacgagccgaccggcagcgtcgacccgacgctcggacgccgcctgctgcggctgttcatcgagctcaacaagtcaggcaccgccgtcatcatcgctacccacgacatcggcctgatggatcaatacgaagcacgacggttggtgctgcaccagggacggctgcacgtctatgagtag

SEQ ID NO: 4351 - DNA, 855 bp, BradyrhizobiumColbertium
atgacatcctacgcgatcaagcttgcgagcctgggggcgaacggacgggccgtccgctgttcccgctgcaaagagacctggatcgctcatcccgaggacgcggtcgaggaggcctccgttccggccatggccgcggccggccgagccgacgagcagtccgatctcgccgagcaatggaactcctatgccagggacgacggcgtcgctgatgcgccggtcgttgacagtccctcgattgccagcgactggccggacgaagcggccagggaagccgaggacgaatggtcagcggcggctcggcaggccgaggcggaggtcgtcggcgcgcagcatcaatcctggttctccggcctgttccgccgccgcggcgcacgggtaagtcgcccggttgctaccgcggctccgcccaggtcctattttggcctgccgaccgcctgcgccgcgatgggcgcactggtgctggcgctggtgatctggcgcggcgacgtggtgcggctgctgccgcagacggcggcgttctacaagatggtcggcctcgaggtgaacctgcggagcctcgccttcaaggacgtcaagctctccagcgagaccgtagacggtaagcaggtgctggtcatcgagggcgtgatcgtcggccagggtaagaagccgctcgatatcccacgcttgcgctttgccgtgcgcgacgcgcaaggcgcggagatctacgcctggaatacggtactggaacagaccgtgctgcggcccggcgagcgcgccttcttccgctcgcgcctcgcctcgcccccgccggagggccgcaacatcgacgttcgcttcttcaaccggcgcgacattgccggcggcagcgtataa

SEQ ID NO: 4352 - DNA, 375 bp, BradyrhizobiumColbertium
atgccgaaaatcttgatcgccgacgacgaggactcgatgcgcacgcttgtggcgcgcgccatcgcgatggacggccacgagaccgtcaccgcccaggacggcgccgaggcgctggagatcctgacccgcgaacacggcgctttcgacctgctgctcaccgacatccagatgccggtcatggacggcatcgcgctggcgctctccgccgcgcgcgatttccccgatctgacgattttgctgatgaccggctttgccgaccagcgcgagcgcgcctcgaacctgaatgcgctggtccatgatgtcgtgaccaagccgttctcggtcgcggatattcgcacggcggttgccgatgcgctggcagtgaagaagagatag

SEQ ID NO: 4353 - DNA, 2661 bp, BradyrhizobiumColbertium
ttgaacggcgtcacccccgacccgtcagacccgatccgcaacagtgatgcgctgtcgcggctgaagctggcgcaggccctcgaccgggctacttatgccatcgcgtgggagcgtgcctggcccaatgtggcgcgcctcctgaccgtcgtcggcctgtttctggtggtgtcctgggccggcctctggctggcggtgccgttcctggcccgggccattggcctggggctcttcgccgccgtcgcacttgccgccctgttcccgttgagtcgcttccgctggccgagccgcgaggaagcgctcgcccggctcgatcgtggctccggcatccgtcaccgcccggccaccacgctcacggacacgctgacctcgcaggatccggtcgcgcaggcgctgtggcaggcgcagcgcgagcgtacgctggcctccctcaagcgcatccacgccggtctgccgcacccgcggctcgcgcttcacgacccctgggcgctgcgggcgctggtcatggtgatgctggttgcgaccttcttcgccgccggtgacgagcgtgcgatgcggcttggcgccgccttcaactggaatggggtgctggcgccgaccaatgttcgcgtcgacgcctgggtcacgccgccgctctataccggcaagccgccggttatcctgtcggccgccaacaaggaggccgcggcgctgcccgccagcggtcctctcgccgttcccgccggctcgaccctgatcgtgcgctcgtccggcggtagcctcgatgtcgccgtctcgggcggcctcaaggaggtggctcccaccgaggctagcccccaggggaccaacgaaaggcattttgccatttccggcgacggcactgcacatgtccgcgcgccctccggacagccgcaatgggcctttgcggcaacgccagaccgtgcgccgacgatcgcgctcgccaaggacccggagcgccaggcgcgcggcgcactccagctctcctacaagatcgaggacgattacggcgtcaccggcgccgaggcgaaatttgccctgcgttcgaccgatgccccggacgacaccaaggaccccgccaaggatgcgccgaaggctgccggcgacggcgacaccaggacggctgcgcgtccgctgttccagccaccgcgattcccgctcgcgctgccgaatgcgcggacccgcaacgctgtcggacagtcggtgaaggatctcagcgaggatccctatgccggcgccgaggtcgcgctgaccctcacggccaaggacgaggccggcaatgaggccacaagcgaggcattcaatatgcgcctgcccgaacggctcttcacgaagccggtggcacgtgcactgatcgagcagcgccgcattctcgcgctcgacgccaacaagaactccgacgtgtatgcggcgctcgacgccctgatgattgcgccggaaatgtttacgccggagcccggacaatatctcggcctgcacagcgtggcccggcagctcgaggccgcgcgcaccgacgatgccctgcgcgaggtcgtggcgagcctgtgggcgcttgcggtgacgatcgaggacggcaagatctccgacgtcgagaaggccctgcgcgcagctcaggatgcgctgaagcaggccttggagcgcggcgcgagcgatgaagagatcaagaagctcacgcaggatctgcgtcaggcgctgaacgatttcatgcgccagcttgccgagcagctccgcaacaacaatgatccgcagcagctggcgcggccgctcgaccctaataccaaggtcctgcggcagcaggatctgcagaacatgatcgaccggatggagcgtctgtcgcggtccggcgacaaggatgccgccaagcagctgctcgaccagctccagcagatgctggagggcctccagatggcgcagccggggcaagccggcgagagcgacatggagcaggcgctcaacgagctcggcgatatgatccgcaagcagcagcaattgcgcgacaagactttcaagcagggccaggattcccggcgcgaacgctcgcgcggcaagcagcaacagggcgatcagtccatgtccgagctgcagcaggaccagcaggggctgcgcgatcggctgaagaagttgcaggacgagcttgccaagcgcggccttgggcagaagggagagaaggggcagaaagggcagcagggacagaagggccagcaaggcgaccagggccagccgggtcagaacggcgatcaggacggcgaccagggcgatgacgacggcggtctggatgccgccgacggtgccatgggcgatgcgggatcaaagctcggcgagggcaacgccgacggcgccgtggattcgcagggcaaggcgctcgacgcgatgcgcaagggtgcgcagaagatggccgaggccatgcagcagggcgatggcgacggccagggcgatggccccggacagcgcgccgggcgccagcagagcggcggcaaccagaccgatccgctcggccgtccgctgcacgggcgcgaatatggcgacgattacacggtcaagattcccggcgagatcgacacccagcgtgttcgccgcattctcgaagagctccgccgccgtctcggcgatccctcgcgcccgcagatcgagctcgattacatcgagcggctgctgaaggagttttga

SEQ ID NO: 4354 - DNA, 384 bp, BradyrhizobiumColbertium
atggacaagaagatgcacgacaagggcctggaagtccgcaaagcggtgctgggcgaggcctatgtcaacaacgccctgaaaaacgtcgacgatttcaatcgcccgttccaggagatgctcaacgaatattgctggggcacggtatggggccgcgaggagctgccgcgcaagacccgcagcatgcttaacatcgcgatgatcgcgatcctcaaccgccagcacgagtttcgggcgcatttgaagggcgccctgaccaatggcgtgacgcgcgacgagattcgcgagatcctgatgcaggtcgcgatctacggcggcatgccggccgcagtcgacagctttcggatcgcgcgcgaggtgttcgcggagatcgacggcaaggcgtaa

SEQ ID NO: 4355 - DNA, 909 bp, BradyrhizobiumColbertium
atggacatcggattcatcgggcttggaaacatgggcttcccgatggcgcggcggctgatcgaggcgggacacaggctcgtcgttttcgatacgcgtaaggagatcatggacaagctcgtggtgcgcggcgccacgccggcgacttcgccaaaggacgtcgccgatcaggtcgagacggtcatggcgagcctgccctcgctgcaggcttcgctcgaggtcgcgacgggcgcaaacggcgtgatcgagggcagacgcgccaagcgcttcgtcgatctgtcgaccgtcggctcggcgatggctgcgaagattcacggcctgctcgccaagcgcaacatcgtgcagatcgactgtcccgtctccggcggcgtcggcggcgccgagaagggcacgcttgcggtgatggtgtcggggcctagggccgagttcgagctgttgaagcctgcgctcgacgtcatcggaaaggtcttcttcatcggcgagaagcccggcgcggcgcagaccatgaagctcgccaacaatttcctgtcagcgaccgcgatcgtggcgacctcggaagcggtggtgatgggcgtgaaggccggcctcgatcccgcagtgatgatcgacgtcatcaatgcgggctcgggcatgaataccgcgagccgcgataaattcccgcgcgcggtgctgccgcgcacgttcgatttcggcttcgccaccggattgatggtgaaggacgtgcgcctggcgctggaggagatgaagcagctcggcctgtcgatggaggttgcggacgcagtcgggcggctatgggagacggtgatcagcacggaaggcgccgagtccgatttcaccgcggcgatcaagccgatcgagaagaaggcgggggtggtggtgggtggagcgaagggtggattggcaggaaaatag

SEQ ID NO: 4356 - DNA, 1266 bp, BradyrhizobiumColbertium
atgaaccatttcgattatcgcaacggcgtgctgcacgccgaggcggtgaatctgtccgagctggccgcgaccgtcggcacgccgttctattgctattcgactgcaacgctcgagcggcactaccgcgtcttcgcggacgccttcgccggcgagaaggtgctggtctgctacgccatgaaggcgaactcgaaccagtcggtgctgcgcacgctggccaagctcggcgccggtgctgacgtcgtctccggcggcgagctgaagcgcgcactggccgccggcattcccgccagcaagatcgtcttctccggcgtcggcaagacggaagaggagctgcgcgcagcgctcgctgccgacatcctttgtctcaacgtcgaatcggagcccgagctcgaattgttgtcgcgcctggcgacagagacgggcaagaccgcccggatctcgctgcgcgtcaaccccgacgtcgatgccggcacgcatgcaaaaatctccaccggcaagtccgagaacaagttcggcatcccgatcgtgcatgcccgcgaggtctacgcgcgcgccgcgaagctcccgggcatcgaggtgaccggggccgacgtgcatatcggcagccagatcaccgacctttccggcatggagaccgcgttccgcatcctctccgaattcgtgcagacgctgcgcgccgatggccacaacatcagccacgtcgatttcggcggcggcctcggcattccctatgacatggacggcgaggtgccgccggcgcccgatgcctatgccgccatggtcaagcgcgtcagccacaatctcggttgcacgctgatgttcgagccgggccgcatgatcgtcggcaacgccggcatcctggtcacgaaggtcatttatgtgaagcacggcgacggcaagaatttcgtcatcatcgacgcagccatgaacgatttgatccgcccgacgctgtatgaggcctatcacgacatcctgccggtgaagcagcccgcgaagggtgccgccaccatcaaggcggacgtcgtcggtcccgtctgcgaaaccggcgactatctcgccctcgatcgcacgctgccgacgccgaaggcgggcgatctcctcgccatcatgaccgcaggcgcctacggtgcggtgcaggccggtacatacaacaccaggccgctggtgcccgaggtgctggtgaagggcgaccaatatgccgtggtgcgcccgcgcgtcgaggtcgagcagctgatcgcgatggacaagcctgcgccgtggctgtga

SEQ ID NO: 4357 - DNA, 285 bp, BradyrhizobiumColbertium
gtgacgtcaaagtttcgcccggccggctcggggtgggccatcattgtcttgagcctgacggcgctcgcgctcgccggctgcggccgcaagggcccgctggacttgccgccgaccgcgtcaaccgccggcggtgccgcaccgaccgataccgagaccgaagcccagaggacgccgagcgtgttcaacccaacctacggtgcggatgccgcacccgcggcaggcaggggcaggaagaaaccgttcattctcgacccgctcctggacgaacctcccggcaagagataa

SEQ ID NO: 4358 - DNA, 1398 bp, BradyrhizobiumColbertium
atgagcaacaagatgtggggcggccgattctcggaacgtcccgacgagatcatggaagagatcaacgtctccatcgacgtcgatcgtcacctgttcgcccaggacattgccgcgtccaaggcccacgccgcgatgctggccgaccagggcatcatcacggcctctgatgcgaaaaatatcggcaagggtctagacacgatcttgtcagagatcggcaagggcggcttcgagttcaagcgcgcgctcgaggacattcacatgaacgtcgagagccgcctgtcggagctgatcggtccggcggccgggaggctgcacaccgcgcgctcgcgcaacgaccaggtcgcgactgatttccgcctgttcgtccgcgacgtcatcgacgagaccgatgcggcgctggccgcgttccagcaggcgctggtcgagcgcgcgctggagcatgccgcgaccgtcatgcccggtttcacgcatctgcagaccgcgcagcccgtgaccttcggccaccatttgctcgcctatgtcgagatggccgcgcgcgaccgcggccggttccaggatgcgcgcaagcggctcaatgaatccccgctcggcgcggccgcgctggccggcacctcgttcccgatcgatcgccacgccaccgcgaaggcgcttctgttcgaccggccgatggcgaactcgctcgacgcggtctccgaccgcgacttcgtgctggagacgttgtcggcggccgcgatttgcgccgtgcacatgtcgcgctttgccgaggagatcgtgatctggacctcgcctttggtcggcctgatccgactcagcgacaagttcacgaccggctcctcgatcatgccgcagaagcgcaacccggatgctgccgagctggtgcgcgccaagaccggccgcgtcatcggcgcgctcaatggcctcctgatcgtcatgaagggcctgccgctcgcctatcaaaaggacatgcaggaggacaagcagggcgccatggaagggttcgccgcgctgtcgctggcgatccgcgccatgaccggcatggtccacgacctcgtgcccgacgaagccaagatgaaggcggccgcaggcgagggctacgccaccgcgaccgacctcgccgactggctggtgcggaccttgaagatgccgttccgcgaggcccatcacgtcaccggccgcatcgtcgccaaggccgccgagggcggcgtcgccctgcacgaactgccgctcaaggagatgcaggcgatcgagccaagaatcaccaaggatgtcctcggtgtgctctcggtcgaatcctcggtgaagagccgcaccagctttggcggcactgcgccgaagaacgtggcggctcaggccaaggcctgggcgaagcggctggaaaaagagcgaaaacggggctga

SEQ ID NO: 4359 - DNA, 666 bp, BradyrhizobiumColbertium
atgctcgacaagacgccctcggccacgcgccggatccccctcatcgtcgccgccgtgacggtcgtgggcctggccggcttcgccgcactgtacgggttcggcctgagccgggtgccttccggcgacccgacctgcaagccggcggtggcgacggcgcaaaagatcgcccccctcgcccacggcgagttggcggcgctgaccatggcgagcgccccgttgaagctgcccgacctcgccttcgaggacgccgacggcaagccgaaaaaactgtccgactttcgcggcaagacgctgctggtgaacctctgggccacgtggtgcgtgccctgtcgcaaggagatgccggcgctggacgagctccagggcaagctgtcgggcccgaatttcgaggtggtggcgatcaacatcgacacccgcgacccggataagcccaagacgttcctgaaagaggccaatcttgtcaggctcgcctatttcagcgaccaaaaagccaaggttttccaggatcttaaggctgtgggccgggcgctgggcatgccgacctcggtgctggtcgatccccaaggctgcgagatcgcgacgatcgcggggccggcggaatgggcgagcgaagacgcgctcaagctgatccgggccgctaccggcaaggccgccgcgtcgctctag

SEQ ID NO: 4360 - DNA, 180 bp, BradyrhizobiumColbertium
atggtcagcaccatgctggccgctcagcaaggtgcgctgcagtcgaacatcgcggcgacgctgaccaagcagaacatggacatggagaaatccaccgtcctgaccctgatgggtgccgggcagccctcgcttgccaatgtcggtcctggcgtgggcggcaatctcaacgtcaccgcctga

SEQ ID NO: 4361 - DNA, 909 bp, BradyrhizobiumColbertium
atgcgcgccgttccggtggatgacattatggcggcagagatcaagaaggtcggcgtgatcggcgcgggtcagatgggcaatggcatcgcgcatgtcgcggcgctcgccggcttcgacgtgatgctcaacgacgtttcggccgaccgcctcaagtccggcatggccaccatcaacggcaatctggcgcgccaggtctccaagaaggtcgtcaccgaggaggccaagaccaaggcgctggcgcgcatctcgcccgcggagaagctcgacgacctcgccgattgcgacctcgtcatcgaaaccgcggtcgagaaggaagaggtcaagcgcaagatcttccacgagctctgcgccgtgttgaaaccggaggcgatcatcgcctccgacacgtcgtcgatctcgatcacgcggctggccgccgccaccgaccggcccgagcgcttcatcggcattcacttcatgaatccggtgccgttgatggagttggtcgagctgatccgcggcatcgctactgacgactccaccttcgagaccgccaaggaattcgtcggcaagctcggcaagcaggtcgcggtctccgaggatttccccgccttcatcgtcaaccgcatcctgctgccgatgatcaacgaggcgatctacacgctgtacgaaggcgtcggcaatgtcgaggcgatcgacgccgccatgaagctcggggcgcaccatcccatgggcccgctggagcttgccgacttcatcggtctcgatacctgcctctccatcatgcaggtgctgcatgaggggctggccgactccaagtaccgcccgtgcccgttgctggtgaagtacgtcgaggccggctggctcggccgcaagacccagcgcggcttctacgattaccgcggcgccaagccggttccgactcgttga

SEQ ID NO: 4362 - DNA, 945 bp, BradyrhizobiumColbertium
atgacgacgcttctgattgccgaacacgacaacgcgtcgctcaaggacgctaccaacaaggctctcaccgcagctgccgcgctcggcgcggacgtcgaggtgctggtcgccgggcagaatgccaaggccgcggccgatgccgccgcgaagcttgccggcgtgaagaaggtgttgctcgccgatggcgacctctacgcgcacgacctggccgagccgctggctgcgctggtcgtatcgctggcgtccggctacgacgcgatcgtcgcgccggcgacctcgcgcttcaagaacgtgatgccgcgcattgccgccctgcttgacgtcatgcaggtctcggagatcatcaaggtggtcgcgcccgacacattcgagcggccgatctatgccggcaacgccatccagaccgtgaagtcgaaggatgccaagaaggtgatcacggtgcggacctccaccttcgccgcagcgggcgaaggcggcagtgcgccggtcgagaacgttgcggcggcggccgatcccggcctgtcgactttcgtcggtgaggaggtcgccaagagcgatcgtcccgagctgacctcggccaagatcatcgtctccggtggccgcgcgatgcaaagccgcgagaacttcgccaagtacatcgagccgctcgccgacaagctcggcgctggcgtcggtgcctcgcgcgccgcggtcgacgccggctatgcgccgaacgactgggaggtcggccagaccggcaaggtcgtggctcccgagctctatgtcgccgtcggcatttccggcgccattcagcatctggccggcatgaaggattccaaggtgatcgtcgcgatcaacaaggatgaggacgcgccgatcttccaggtcgccgattacggcttggttgcagatctctaccaggcggttccggagctgacggccgaactcggcaagctcggcaagtaa

SEQ ID NO: 4363 - DNA, 750 bp, BradyrhizobiumColbertium
atgaaggtcttagtgccggtaaagcgggtggtcgattacaacgtcaaggtccgcgtcaagggcgatggatcgggcgttgaactcgccaacgtcaaaatgtccatgaatccgttcgacgagatcgcggtcgaggaagcgctgcgcctgaaggaagccggcaaggccactgaggttgtggtggtctcgatcggaccggcgcaggcgtcggagacgatccgcaccggcctcgccatgggtgccgaccgaggcatcctggtgaaggccgagggcaatgtcgagccgctcgctgtcgccaagatcctgaagaaggtcgcggaagaagagcaaccgggcctgatcatcctcggcaagcaggcgatcgacgatgactcgaaccagaccggacagatgctggccgcgctgctcggctggtcgcaggcgacgttcgcctccaagctcgaggtcgaagggtccgacttcaaggtcacccgcgaagtcgacggcggcctgcagaccgtgaagctgaaggggcccgcgatcgtcaccaccgatcttcgcctcaacgagccacgctacgcttcgctgcccaacatcatgaaggccaagaagaagccgatcgcggagaagaccgtggccgattacggcgtcgacgtcgcagcgcgtctcgagattctcaagacgacggagccggccggccgcaaggcaggcgtcaaggtcaaggacgtcgccgagctcgtgtcgaaactcaagaacgaagccggggtgctctga

SEQ ID NO: 4364 - DNA, 573 bp, BradyrhizobiumColbertium
atggtcgtattgaaccgcatctacacgaagaccggcgacgacggcacgacggcgctgggaaccggtgagcgccgccccaaatacgatctgcgcatcgaggcctatggcaccgttgacgagaccaatgccgtaatcggcgtggtcaggctccacacccgggacatgcccgaactcgatgcgatgctcggccgcatccagaatgatctgttcgatctcggtgccgatctcgccgtgcccgaacgggaggggaaagccgagcggctgcgggtggtggcgagccaggtcgaacggctcgagcgcgacatcgacaagctcaacgacaagctcgcgccgctgacctccttcgtgcttccgggtggcacgcccgccgctgcccatctgcatgtggcccgaacgatatgccgccgggcggaacgtgtgatcgtggaactggcggctcggccagccgagacggttaacgcggctggcattcactatatgaatcgcctgtccgacttcctgttcgtggccagccgtgctgccaacggcaatggcgccggcgacgtgctctgggttcccggccagaaccgctga

SEQ ID NO: 4365 - DNA, 195 bp, BradyrhizobiumColbertium
atggcatctctcctgagtactttcatcctgccggcggcagccggcgccgtggcgttggtgttgctgctcgggctcatcaacatgatgcgtggcggctcgcctaacacctcgcagaagctgatgcgctggcgcgtactgcttcagttcgtggcgatcatcatcgcgatggccgcggtctgggcgatgggacgctga

SEQ ID NO: 4366 - DNA, 894 bp, BradyrhizobiumColbertium
atgaaagcgatccgctacatctacgctgtggtgatggacgcgttctacacgttcctcgccgatgacggctgggcgatcgcaagccacatcgcgctgtcgacgctgatggcgctgttcccgttcctgatcgtgctgacctcgctcgccggcttcttcggctccaaggagcttgccgatcaggccgccagcctgatgcttcaggtctggcccaagcaggtcgccgattccatctcgggcgaggtccatgacgtgctcaccactacccgcaccggacttctgaccatcggcgcggcgctgtcggtctatttcgcttccaatggcgtcgaggcgctgcgggtggcgctcaaccgtgcctacgcggtggtggagatgcggagctggtattggctgcggctggaatccattgcctacacgctcatcgcagccttcactgcgctcgcgatggcgttcctgatcgtgctcggtccgctgatcatcgaggccgcacggcgccacattccactgttcgtcgaatcgaacgaaagcattctcacctggctgcgctacggcatcaccatcagcgcgctggtgttggcgctgttcatcctgcacgcttggctgccggcggggagacgcagcttcctccagatcatgccgggcatcatcttcaccgtggtggcgtcgctgatctccggcatcgtcttcggacagtatctggcgcgcttcgccaacaattacgtgacgatgtatgcgggcctcgcctcggtgatcatcgcgctggtgttcctgtatttcatcgccgcgatcttcgtttacggcggcgagctcaacgccgcgatcatcaagtctcggcttcctcacggcgtgtcgcttcaagcagcgcagtcgctaaagcccggggagacacaggcttga

SEQ ID NO: 4367 - DNA, 915 bp, BradyrhizobiumColbertium
atggatggccgggtcaagcccggccatgacgagattcatctgatggcacaacccgttttccgatttgcccccagccccaatggcctcctgcatctcggccacgcctattccgcgctgctcaactttgatcgcgcgcaagagaccggcgggcggatgttgctgcggatcgaggacatcgatgcgacacgctgccggccggactatgagacggcgatctacgaggatctcgactggctcggaattgcctgggagacgccggtgcgacggcagtcggagcatctcgccgactatcgtgctgcgttggaaaagctgtctgcgcttggtctcgtctatcccgccttcgaaagccgcgccgagatcgcaaggctcatcgccgcgcgcgaggtggaagggccatggccgcgcgatcccgacggtgcgccgctttatcccggcgccgccagatcactgtcggccgacgagcggtcgcagttgatcgcctcgggcgcgccgtatgcgctgcggctcgacatgcctgccgcctgccgccgtgccgcccgtctgagttggaatgaactcggcgaggggccggccggcgagtacggcatcgtcgcggcgcggccggaggcgtggggcgacgtgatcctggcccgcaaggagacgccgaccagctaccatctgtcggtggtggtcgacgacgcgctccagggcgtcagcgagatcgtgcggggccgggacctgttttacgccaccgcggtgcaccgcttgctccaggtcctgctcggcctgccggagcccgcctaccgccatcaccggctgattcgcgatgaggcgggccggaagctgtcgaaatcgagccggtcgaccggtttgcgtgccttgcgcgcggccggagtcacgcccgctcgcatccgccagctgatgggattagattaa

SEQ ID NO: 4368 - DNA, 696 bp, BradyrhizobiumColbertium
atggatgcacgggtcaagcccgcgcagcacgagccaaacaccatgaccatccatctcgaaacccagtccgatctcgaagaggccgtccacgcgctgatcaagcgcgatccgcggctgaagccgattctggagatcgcaggcatgccggcgctgcggcggcgcgagccgggctttaccgggctcgcgcacatcgtctgcgggcagcagctttccaccgcgagcgccgcggcgatctggggacgtctttcggccgccttcgatccgtttgatcacgatgccgtgcgacgggcccgcaccgaccggctgggacggctcggcctctccgccgccaagatcaagacgctcaaacatctcgcccgcgagatcgccgccgagcggctgaacctcgacgtgctcgcggaggaagatgccgatgccgcccatcacacgctgatcgcgctgcccggcatcggcccctggaccgccgacgtctacctgctgttctgcctgggccatggcgatgcctggccggccggcgacctcgccgtgcaggagggcatccggatcgggctaggcctcaaggcgcgaccgacggagaagcagatggcaccgctcgccgaaccctggcgcccgctgcgcggtgcggcggcgcatctgtggtggagctattaccgcgccgtgaagaagcgagagggcgtgctggcgggatcaggctag

SEQ ID NO: 4369 - DNA, 888 bp, BradyrhizobiumColbertium
atggactgggacctttgcaagacctttgtcgcagtcgccgacaccggcagcttcaccgctgccgcgcgccggctgcacaccagccatcctacggtcagccgcaagatcgcggccctcgaagcccagctcggcacgcgattggtggcgcgcgccgcagatggcctggcgctgaccgcggatggaaggaccttgcgcgagcacgccgaggcgatggcggccgcggcgctacgggctgagaccgcggtggcggcgggagggcacagggcgcgcggcatcgtcaagctgtcgatcggcgcgacgctggcctcgcactggctgatgccgcggttgccgaccttcctgcgtgcgcacgatcatatccagctcgagatcatcactcatccgtttccggcaagcgtacgccggcgtgaggccgacgtggtgctgcggccagtcgacagtggagaggagaatctggtcggccgcaagatcggccgtctcggcaccggcttctatgcctcgcgcgactatgccgccggccggtccctgccggagcgccgcggcgattggaaggagcacagcgtcatcggcttcgccgaccaagcatccaatgtgcagctcgcgcgctggagcgatgtcgtcacgcaacaggcgagggtggtgatgcgctgctcgtcccagggggacatgctggcggcggttcgtgccggaattggcatctccgcgctgtcatgcttcgtcgctgaaacctattcggatctcgtgcgcgtcgctccgcagaagctcgcgagtatcgccgatctctggctgctggcccatcccgacctcgtggagctcccggcggtgcgcgccgtggtcgatttcgtcgccgaatgcgcccgggccgaccgcgccaggctgcgcggctag

SEQ ID NO: 4370 - DNA, 975 bp, BradyrhizobiumColbertium
atggcgctgcccactctcttgaaggattcgctggaactgcccgtcgtcggctctcccctcttcatcgtttccgggccggagctggtgatcgcccagtgcaaggcgggcgtcgtcggctcctttcctgcactcaatgcccgcccagtcgagaagctcgacgagtggctgagccgcatcgaggacgagctcggggaatacagatcgcgcaatcccggcaagaaggtcgccccctacgccgtcaaccagatctgccatgcctccaacgatcgactgatgaaggacatggagatctgcgtgaagcacaaggcgccgatcatcatcacctcgctgcggccgccggcggagattgttgaagccgcgcattcttatggcgggctggtgttccacgacgtcatcaacgtcaagcatgcgcggaaagccgccgagcagggcgtagacggcctgatcctggtctgcgccggtgcgggcggacacgccggcacgctgtcgcccttcgcattggtgcgcgaagtcaagcagtggtttggtggagcgatcctgctgtcgggcgcgatcagttacggcttcggcatcgcctccgcgctgacgctcggcgccgacctcgcctatatgggcacgcgtttcatcgcgacccaggaagccaatgcggacgacgcctacaagtccgcgctgacgcggcacgccgcgcacgacatcgtctacaccaacctgttcaccggcgtgcacggcaattacctgggcccctcaatcgcggccgcagggctggacccggacaatcttcccgctgccgacaaatcgaagatgaatttcggctccggcggcaacatgaaatcgaaagcgtggcgcgacatctggggatcaggccagggtatcggccagatcgtggatgccccgccggtcgccgagctcgtcgagcgcatgaagggggaattcgaccaggcgcggcgcgatttcctgatgcgcgtgagcgcctga

SEQ ID NO: 4371 - DNA, 1185 bp, BradyrhizobiumColbertium
atgaagcaggcagccgcactgatcggactatcgttgctgacacttggcgcgagcggcgcccatgccgaaggcgccggcgagatccgcatcgggcagaccctgccttatagcggccctgcctccggcttcggcacgatcgggcggacgcaagaagccttcttcgagaagatcaatgccgagggcggcatcaacggtcgcaaggtcaagttcatcacgctggacgatgcctactctccgcccaagacggtcgagcagacccgcaagctggtggagcaggacgaagtgctgatgatgttcggctcgctcggcaccgccaccaacagcgccgtgcagcgctatctcaacggcaagaaggtgccccagctgttcgtgctctccggcgcgacgaaatgggccgatccgcagaaatatccgtggaccatgcccggcatggccgcctacgaatccgagggcgtggtctatgccaagcacgtgctgcgcaccaagccgggcgccaagatcgccatcctgtcccagaacgacgatttcggccgcgactatgtggcaggcttcaagcgcgcgctcggcgacaaggccaacagcatgatcgtggccgaagcgacatacgagaccagcgcgccgacgatcagctcgcagctatcggccttgaaggcttcgggcgccgacgtgctgttcggggtcgtgctcggaaagttcacctcgcagatgatcaagggcgtagccgagctcggctggaaacccgaactgttcttcgtgccgacctcggcctcgtcgatctcgttcctggagccggctgggctcgacaacgcggtcggcctgatctcgtccagcaatcaaaaggacacgatggatccgcaatgggccgacgatcctggcgtgaaggaatacttcgcgttcatgaagcaatacatgcccgccgccgacctctccaactccaactatgcggccggctatcattatgcgaccctgctcatgaccgtactcaaggcctgcaaggatgacttcagccgcgacaacatcatgcgccaggcagcctcgctcaaggacgtccagctgccgttgctgctaccgggcataacggttgcgaccgggcccgacgattatcttcctttccagcagctgaggctccggcgcttcaatggcaagagctgggtgggattcggcgacgtgctggatgaccgctga

SEQ ID NO: 4372 - DNA, 1554 bp, BradyrhizobiumColbertium
atgatcatcagcggcgaccgccggattagctacagcgaaatccaggcacgcatcagacgcgccgccagcgggtttcgcgcgcttggccttgccgagggcgcacctgtcgcaatgatgctgcgtaacgatttcgccctgttcgaggtggtggcagcttcggccgccctggggagcccggtggtgccgatcaactggcatctcaaggccgaagaggtccgatacattttggccgatagcggcgcaaacatcctggtttgccacgccgacctgctgccgcaaatccgctccggcctgccaccagacttccgcctcctcgtggtcgagaccccgcccgaactcaaggctacgttcgccgtgcccgcggcgctggcgcaggtcccgtccggaatgaccgattgggatcgctggcgggaggatcacccggaatcacaggagccgccgaggcgagctgccgcaatgatctatacgtccggtaccaccggcatgccgaagggcgtgcgccggatgccgatgcagccggatcaggccgccgcatcagaacgcgtcggcgcgatcacatacggcatcaagccgcgcgagggccaggtcgtgctgatcaacgggcccatgtaccactcggccccgcactcctatggcatgatggcgttccgcaacggctgcacgatcgtcctgcagccgcggttcgaggcagaggaactgctggctctgatcgagcgccaccgtgtgacgcatatccacatggtaccgaccatgttcgtccggctgttgcgccttcctgacacagtcaggcggcgctacgacctgtcgtcgctgcgcttcgtcgtgcacggcgccgcgcccggcccgcccgaggtgaagaaggcgatgatcgattggtggggacccgtcatcaacgaatatttcggctcgaccgagaccgggattccggtctggcactcggccgaggaagcgttgaagaagcccggcacggtcggccgggcaatcgagggcggcatcatcaggatcttccgcgacgacggcagccagtgcggcgctggcgaagtcggcgagatctacatgcgccagagggcggtgcccgactttgattatcacggtaaggcgcaagcccgggcggaagcagggcgcgacggtctggtcagtgtcggcgacgtcggctatctcgacgaggacggctatctgttcctgtgcgaccgcaagcgcgacatggtgatatcaggcggggtcaacatctaccccgccgagatcgagaacgtgctgatcgggatgcatggggtgcgcgactgcgccgtgttcggcatcccggatgcggaatatggcgaacggctgtgcgcctgcatcgagccggaaaggggcgtgcagctctcagctgccgcggtgcaggcctttctgcgcgagcggctggccaacttcaaggtgcccaaggaagtccagttcctggatgcgatgccgcgcgaggcaaccgggaagatcttcaagcgcaagctgcgcgatccctattgggcggactggaaaccggacgggcctgagccggcggccccgaaatcccgggcttga

SEQ ID NO: 4373 - DNA, 1773 bp, BradyrhizobiumColbertium
atgctggacaagaccaaggatatttacgtctccgcacagtcctggctcgatgaattcgagcgcgccctgggcaagcctgatgccgccctgaagcgcctcttccttgcagacggcttctggcgcgacgtactggcgctgagctggaacctgcagacgatcgcgggcgccgatccgatcacgcgggaattggccgcgcgcgcgcccaaggccgcgccgaccaatttcaggatcgctccgaaccgcgcgccgccacgctgggttacccgcgccggcaccaataccatcgaagcgatcttcgatttcgagaccgcaatcggccgcggcagcggcatcgtgcggctcgtcccggaccctgccgacggcgaccgcctgaaggcatggacgctgctgaccgccctcgatgaattgaaaggctacgaggaacagctcggcacctcccggccgcgcggtcaggcctattcccgcgatttccgcgggccgaactggctcgatctccgcaacgcctcgcgcgactacgccgaccgcgacccggccgtgctggtggttggcggcggccaggctgggcttgcgatagcggcgcggctgaagcaattgaaggtcgacacgctgatcgtcgatcgcgaggcgcggatcggggacaattggcgcaagcgctatcacgcgctcaccctgcacaaccaggtgcaggtcaatcatctcccctacatgccgttcccgccgaactggccgacctacatcccgaaggacaagctcgccaactggttcgaagcttacgtcgatgccatggagctgaacttctggaccggcaccgagttcgaaggcggcgcgtacgaggaggcgaagggccactggaccgtgaggctgcgccgtgccgatggcagccgacgcaccatgcatccgcgccatgtgatcatggcgaccggcgtcagcggcatcgccaatattccggacattccgacgctttccaatttcaagggcacgctggtgcattcgagccgctacgaagacggtgagaactggaccggcaagcgcgccatcgtcatcggcaccggcaacagcggccacgacatcgcgcaggacctgtattccagcggcgccgaagtgacgctggtccagcgctcgccgacactcgttaccaacatcgagccctcagcgcagctcgcttacgccacctacaacgagggtacgctcgaggacaatgatctgatcgcggcgtcgatgccgacgccgctggcgaagaagacgcacgtgatgctgaccgagcagtcgaaggagctcgacaaggagctgctcgagtgcctcgcccgcgtcggcttcaagctcgacttcggcgaggctgggaccggctggcagttcaaatacctcacccgcggcggcgggtattatttcaacgtcggctgctcgaacctgatcctcgagggcaagatcaggctcaagcagttctccgatatcgacagcttcgttgccgagggcgcccggatgaaggacggctcgaccattgcggccgacctcatcgtgctttcgaccggctacaagccgcaggaatatctggtgagaaagctgttcggcgatggtgtcgccgaccgtgtcggcccgatctggggcttcggcgacggcttcgagctgcgcaacatgtatgcgcgcacgaagcaacccggcctctggttcatcgccggcagcctcgcacaatgccgcatcaattcgaaatacctcgcgctccagatcaaggccatcgaggaagggattttggggcgtgaggagggcacggcttaa

SEQ ID NO: 4374 - DNA, 975 bp, BradyrhizobiumColbertium
atgcccgccattctcggcgccggcgagcaccgctaccgcgttgtcgaagacttcgccaagctcccggacggctggcagctcacggacgtcgcctcggtcgccgttgacagcaaggaccgcatctacgtcttcaaccgcggcgcacacccgatggtggtgctggatcgcgagggaaactttttgcgcagttggggcgaaggcctgttctcccgcgcgcacggactgcacatcgatgccgacgaccatctctattgcaccgacgacggcgatcacaccgtgcgaaaatgcactgcggaaggaaaggtgttgctcacgatcggcatcccggcaaagccggcgccgttcatgagcggcgagccgttccaccgctgcacccacactgcgctctcgccgaagggcgagatctacgtctccgacggttacggcaacgcccgcgtgcacaagttcacgccggacggcaagctgataaaaagctggggcgagccgggcaccgatcccggccagttcaatatcgtgcacaatatcgccacagacgccgacggctgggtctatgtcgccgaccgcgagaaccatcgcgtgcaagtgttcaacggcgagggcaagtacgagacgcagtggaacaatctgcatcggccctgtgcgctgtgctgctacggcggcaggagtcccaccttcgtgatcggcgaactcggccccggcctttccatcaaccgcaatgtacccaatctcggcccccgactgtcgatcgtggacgccaagggaaatcgcatcgcacggttgggcggcgaggaaggtccgggccttgccagcggcaagttcctggcaccgcatggcatcgcactggactccaagggcgacatttatgtcggcgaggtcggcgtcaccaactggcagtccagctttccggacgagaagatgccggccgcggtgcgcacgacgcggtgcctgcagaagctggagcgggtacgggagtag

SEQ ID NO: 4375 - DNA, 525 bp, BradyrhizobiumColbertium
gtgttggtgctgaatgcggacttccggccgctgagttactacccactgtcgttgtggtcgtggcaggacgcgatcaaggcggtgttcctcgaccgcgtcaacatcgtcgcgcattacgatcaggcggtccacagtcccacgctgcagatgcagcttcccagcgtcgtctcgctcaaatcattcgtcaagccgaccactcatccggccttcacccgtttcaacgtcttcctgcgcgatcgtttcgcctgccaatattgcggctcgccagaagacctcaccttcgatcacatcatcccgcgcagcaaaggcggccagaccacctgggagaacgtggtcgcggcatgctcgccgtgcaatctgcgcaagggcaacctgacgccggcgcaagcaaagatgtttccgcgccagagcgcgttcgcgccgaccgtgcaccagctccaccgcaacggccggttgtttccgccgaactatctgcacgacagctggctcgactatctctactgggatacggagctcgatccgtag

SEQ ID NO: 4376 - DNA, 882 bp, BradyrhizobiumColbertium
atggacacggcacggcgcgacaggacgatcggctcactctgcctgggcgtgacggcatgcggctgggcactgaactggccgctgatgaagcttctgctccagcaatggccgccgctgttcgcgcgcggccttgcgggcgtttgcgcctcgctcattctcgccgccctcgtgctgagccggaaggagtccttcgccgttccgcgcgaagccgtcccgcggcttctgtttgcgaccttcaccaacgtcttcgcctggatggggctcggcacggtcgcgatgaaatatgtgagcgtgagcgagggcgctctgctcgcctacaccatgccgatctgggcgatgctgttcgcctggccggtgctcaacacgcggccggcgccccgggacattttcgggctcgtcctcggcgttgccggcgtcacgctgctcctgagcggcaacggccttgcgttcagcgccgacaagctgctgggcatcgtgctcgcgctgctctgcgccatcctcttcgccctcggcaacgtgctcaaccgcaagccgctgccgatgccgccgctggtcgtcgttgtctggcaggtcgggctcggctgcgccacgatgctgatcctcggcgtcgtgttcgagcatcccgatatcaccgcgattaccccgctgggactcggctgcttcgcctacatgacgctggtgccgatgggcctctgctacgtcacctggttcgagacgctgcgccgtctgccaccgaccacggcctcgaccggcatgctgatcgtgccggtgatcggcgtgatctccgccgccatcattctgggcgagccgctgggctatcgcgaatggacggcgatggcgctcacgctcggcggcgtgacgctcgctctgcagcggggataa

SEQ ID NO: 4377 - DNA, 222 bp, BradyrhizobiumColbertium
atgcccgcagccgagaaagaccacgtttacaagattctggacctggtcggatcgtccgagacctcgatcgaggacgcgatcaagaacgcgatcggccgcgcctcgaagaccgttcgcgaaatgaagtggttcgaggtggtgcagacgcgcggtcacatcgagaacggtacggtcggccactttcaagtcaccttgcgcgtcggcttcacgctggaggagtga

SEQ ID NO: 4378 - DNA, 981 bp, BradyrhizobiumColbertium
atggggaccggcgtcaacgcgcagctgcgcctcaaggccttgcatcacctcgacgtgccgtggctgccgtcgcagatcgagcagcgcgagggccgcatcgtgcgccagggcaaccagcacgacgaggtcgatatcttcgcctatgcgaccgagggctcgctcgatgcgcagatgtggcagaacaacgagcgcaaggcccgcttcatcgccgcggctctttccggcgacacttcgatccgcaggctcgaggacatgggcgagagccaggccaaccagttcgcgatggccaaggcgatcgcgtcgggtgacccgcggctgatgcagaaggccgggctcgaggccgacatcgcgcggctcgaacgcctgcgcgccgcccatatcgatgatcagcacgcggtgaggcgccagattcgcgacgccgaacgcgacattgaatattcgacgcgccgcatcggcgaaattgcgcaggatatcgcgcgccgccgtccgaccgccggcgacgccttcaccatgacggtgacgggtgacacacacggcgagcgcaagctcgcaggccgcgcgctcctgaaggaaatcctgacgctggtccagctccagcaagaaggcgaaagcgcgatcgcatcgatcggcggcttcgacgtcgaatattgcggcgaacgcttcgggcgcgacggctaccgctacaccacgatgttgcagcgaaccggcgctgactacgagatcgagcttcccgtgacggtgacgccgctcggcgccatcgctcgcctcgagaacgcgctcgacgatttcgagggcgaacgcgaacgcatgtcgcagcgccttgccgatgcccggcggcggttggcgtcctatgcatcgcgcgacggcggtgaattcgccttcgcaagcgagctcgccgacaagcgccggcagctcgcagaggtcgagaaggctctggcggaggacgacggacgcggcggcgagatggcggcggccgcctga

SEQ ID NO: 4379 - DNA, 1305 bp, BradyrhizobiumColbertium
gtggcgcttgcgcttcccgtgcgccagatcaagaagctgcgtctgctcgccaacgtcctgccggccatgctcgatcacatggccaagggagacatgccgaacgagcagcagctgcgcacgatcgcggcggcctcgctcgacgagcagaaggaggtctggaagaagcacaagccgtcgaagggcgatccgcaggtctcctggtggagcgtggcgcaggggctgcagaagacccgcatgtttgcgcgtcatgcgagcttcggcgacgatctcgcccaggcttacggcatccagtgggtcgaggacctattcgcaccggccgacgaggacagccgctacaccacgaatgtcgagggcttcctcggcgcgcagcaggaatggatgacggcgaacctgcccaagaagggcgtcatcgccgaaaccacgaattggggcgaggtgaagctgccgccgaaggccgagcgcgtctacggcaagccgaccaagtccgattgcaccgcgatgtacctcgaccgcgagggtcgcgtgcagagcgtgcattaccgcatgcccgaagccaagaagccgaaaggcggcaaggacgccggcggcgccgacaacgctccggacgacgtcggtgacgtgtcgaagccgcgtcccgacgtgacgcgcaagggcgtcgagatgatcggcgactaccgaaccgacgcgctacgcgaagcgctcggccgcgcgccgatcgaggacgatgcgctgatggcgctgctgatcctcgccttcgccggccagaacgtctcggtgacgacgggcagcggcggtgtctattacggacaccgccggctggcgaagaatgcggcggtgctgttcgacgccgacggcaagctcgccttcgacatggacacgctgcgcgttgcggcccgcaccatgctggtcgacgttttctcgtgccgggaaaacgccaccaacagcggcatcgtcgcgcgcatcgccggcgagatgatcggcgccgacgcattcctgccgaacatgggcacggaggatttcctctcgtgcctgtcgcggccggcgctcgaaggctcgtgcaacgacacgccggtcctgccgcgccagcgcgtgaaggacacgcgcgccgcactcgtcgagcactacaaggaggggcatttcgtccatccctccgcactcttcgcccccgatccggcgaagctctccgactggctgtcctcgcgcgcggcgacggctgacgaagacgaggccgatgaggatatcgccgacatcggcgagggtggtttcgaggaggacgccgaggccttccgcgaagcggccgagtag

SEQ ID NO: 4380 - DNA, 477 bp, BradyrhizobiumColbertium
atgtccgcgcacacaatcttcgacaacgcaccgatcgggtccatcgtcgcctggtccgacggaacgccgcagccgccggcgcgcttcaacaagaagctggccgcctggcagaccagcaacagtcgtggtcggctgatccgcaagcagcgagcacgcggcgtcggcaacctctcgctctcggcatgcttcaccttgcacgaggccgatcatggcgccggcggggtcattgcgatccgcatccatcggacgttctcgctcgactcctcgttgacgttcaccatcgtcgaacgcccggcgatcggattggtccgcgtcttcgatcgtgctggcgacgacgccgaactggtctatctcgcaacacatgagaccgacgcccgcgagtggctgacgcggcacggctatccgcgcgccgtgctccatgaggtgacggccgacgaggtcggcgccgacatcgtcgaagggaggaccgcggcatga

SEQ ID NO: 4381 - DNA, 807 bp, BradyrhizobiumColbertium
atgcctgtcgcgctcgtcggcgacacggcgttcgccatggcgatggcacgcgacgatcggcactatctcgtcaccgcgtggcggctctcgcgagcgatggacgaatggacgcgcgccgatttctacggacactccggcgagctcgccgatgaggcggcgtttcgcgcgcgcgtgctcgaaaacgccgaacatcagcgcgagcgcaagatgctcggccgtgtcgaggaatattcgcgtgcccatacgccgtggggcacctcgcagggtgcaacaatctacgccgagggtgtcacgtcgcattcgactgccgggcatggcggcttcaaactctcggccgagcgaaaccgcaaggtccatcgcatgctgcgctctgccggcggatggtacgaagaagatgccgagtgggcgatcgtcgcgatcacctttccgcatctcttcaccgccttcgagcgacgctgcgccgagcgcacgatcaaggacagctggcccgacgcctgggagacgatcttcggcacgatcctcatgccgggcgaatcgcacgagaaggatcgccgggccttcgaagcggcccatgtccacgactggatcgtgatctcggcgatcacgtcgaagcacgttgtgggcttcgccgaggttatcgcaacgccgggcggcaagcgcggcgttgggaccgaggaacgccgcttcctcgtcccctcggatgaatatcgggtcggccgcttcggcttcgtgatcgatcccgctcgccacgacgtctatggcggcgagtccgactttatcggctggcagccagggagggcggcatga

SEQ ID NO: 4382 - DNA, 411 bp, BradyrhizobiumColbertium
atgaccccttccgatcttctccaccgcatggaggaggcgcagcgacagacgcagcgccagctcgacataatcgatcggcagatcacgcggaggatgaccgcgctgatcccgtcgctagggcgcaagcagtccggttatcgtcgcggcaagccgccggatccgggtgcctttctcgagcgatatcgcgcgacgctggcagcgctcacggcggaacgccaaccggaaatcgacgccttggctcgaaagttcgcgcggcaggtccatgcgatcgaggcgctgcgtcagcgccttggtatcgaagacgggcgatcctctgcccgccacgagcgcatcgacacgacgatgcaccatcatgatgccgggccggcatcggcgctgtggccggaaacgagctcgtcgatctcacgatga

SEQ ID NO: 4383 - DNA, 813 bp, BradyrhizobiumColbertium
gtgccgcgccgcgttgcggccggagctgccgatctcggcacggcgggcccgcgcgccgcgcgagggctgaaggccctgcttgcgcgcaaacccgctctgctcgatccagccgccccggaccctgaagcgcccgtcattccgccggtttcggtcgatcgcacccgaagggaggaccggcaggagccgatccgggccttcaggcgaaccgaaggaaaggaagttctcatgaccaaggccgctcgcacccaacgtcagcccgcgaaggtcgtccagctccgcaagagcaccacgctcgaaatggtcaggctcgcctgccccgacgccgcccaggcgacgctcatctccgagagcttcggtctccccgttctcgacagcgacgggatccgcgaacttcatcagcgcatgatcgtcgagacggccgacagcctcagcgaaggcctcggcgagagagcgatgcagattcatctgcagcggatcgtcggcgcctatgtcggctccgcgcacggcgccggtcagttctacagccgcgcggtgaccgaagcccgcgacgcgacggccaaggcatccaacgacctgcgtgacgaagacctcgacggtcccgttggtttcgacagcacagcgcaacgcaaacgcgagttcgccgctgacatggccttgcagtcgcacgccctgcgcatggcggccgagggcgccgtcgctgcttacgagcacgtcgtcggcgagcgctggaagccgttcgagcgccaggtcgaaaatccaggccacacgctcgatcgcaaggccgccgcgatgcagctggccgcctttggctga

SEQ ID NO: 4384 - DNA, 876 bp, BradyrhizobiumColbertium
atggaccgccgtaacggggtcgcgatgggcgcgacctccaaacggaggttcaggaaaatgactgagaaaatggaaggctcacgcgccgacgtgtacgcgcgcatcaccgatcgcatcgtcgcggatctcgaaaagggtgtccggccctggatccagccatggagcgccggccacgcgggacggcgcatcacgcggccgctgcgccacaacggcgaaccctacagcggcatgaacgtgctgctgctctggtcggaagcgctcgcgcggggtttcacctcgccaacctggatgacgttcaaacaggcgatcgagcttgatgctcacgtccgcaagggcgagtcaggtgcgaccgtcatctatgcgagccggttcacccggactgagaccgacggcaatggcggcgaggtcgaacgcgacatcccgtttctgaagacctattcggtcttcaatgtcgagcagatcgccggattgcctgaccacttctatcggcagccggcgccgacgatcgatccgatccagcggatcgatcatgccgatcgcttcttcgccaataccggctcggtgatccggcatggcggcgcgcgggccttttacgcgccgtcgaccgatcacatccagatgccgccgttcgagtcgtttcgcgacgccgcgtcgtacgtggcggtgctgagccacgagcacgtccattggacggcggattcgcgtcgcgtcgggcgcgaccttagccgctatgcgaaggatcgcagcgaacgcgcgcgcgaagagctcgtcgccgaaatcgggtcggcgctgatgtgcgccgacctcggcatcgtccccgagctcgaaccgaggcccgaccacgcgagctacgtggaatcgtggctgaccttatga

SEQ ID NO: 4385 - DNA, 1005 bp, BradyrhizobiumColbertium
atgaccaggaacaatcacttcccacacctgatgcgcgcgttcttctacgaatggctggtcgagcagcgcaatgcctccatccatacggtgcggtcgtatcgcgatgcctggcggctcttcctccggttcgttgcaaaacgcgcagggaagaaggtggcgatgatcacactggccgatctgaccgccagagaggtcatcgcgttcctcggtcacgccgaacacgagcgcggcggcacgatcggcacgcgcaactgccggcttgcagcgatacgcagcttcttcaacttcgttgcgaccagggatcccggttcgatcgcccaatgcgtcgaaatcctcaatatcccgataaaacgagcaccggtatcggaaccctgttatctggacccgatggaagtgacggcgatcctggcgcagcctgatcgttcgacactcgaaggcatgcgcgatcacgccttgctctcgttcctctacaacagcggcgcgcgaatacaggaagcgctcgatctgtgccccgatgcaatcaggttcgacagtccgagctgcgtgcgcctgaccggcaagggtcgaaaagaacgtatctgcccgctctggccggaaaccatgatgttgttgaggaaattgctcgaacggcagccgcgggcgccagaccagcggctgttcgtcaaccgatatggtcaaccgctcagcgcgtcgggggtccggttcaaacttgccgcctatgttaaggcggcagccgagaccacgccaacgctacgcgacaagcatgtgactcctcacgccttccggcacgcaaccgccgtgcatctcatatcggcgggcgtcgacgtcacggtcatccgtagctggctcggtcacgtgagcctcgatacgacgaaccactacgccagggccaacctcgaaacaaagcgcaaggcattggaaaaggtcggcgcgcccgaagcacccagccgccagccctcatggaaacgcgataccagcgttctcgcctggctcgacatgctctga

SEQ ID NO: 4386 - DNA, 1365 bp, BradyrhizobiumColbertium
atgacgatctggcctgatccggagcgcaagctgatcgcgcggtacatcgcaggcctcgacctgcgcaccaagaacagccccatctactacaggcaggcgctcaatatcttccaggatgtcgccgaacgccacgccaagctcgacaaggacatgctggtggcctggctgcatgtgtctcccgggcggtgggccacgacgacacggctgcatcgaacccggattatcgaccggttcctcgatcaccttgaggagatcggagcgatcgaacgcaatcccgtcgccgcgctgcgtgaagcttgcaatatcaaacaatgcatgccggtgtggcgggcgctggcttccagcgatccggacagcgcacttgccgaactataccagcccaggccgttcggcagcgtgctgggcaaaatgatggccgagcacgtcacgctgatgcgcaaccggggttacaaatacactgcacaagcggtgcggctgtggaggctcgaccgcttccttcagttgaacccggagcttcaggatcagccacttgaggtgatgctcgaacactggtccgcagctaaaaccacgcgcaatcatccgaacgagtgcgaaaaactgaagcgggtcctcgcgaaaatcctgcgccataaggatccatcactcccgccccgccgacctgaccccagcccggaaaaggaagtggcgaggcattggcgaaaaccgcacatctacacacccgccgatgtgcggcgcatgctcgacatcgcccgctcttacccttcacctcgagcgccgcttcgcccgtcgagcatctacaccatgctgttgctttcctattgcgcgggtctgcggcgaagcgaactggcccgcctggatcttggtgacgtggacttccagggcggcacgatcacgatccgccagaccaagttccacaagaccaggatactgccgcttcccgacagcgtgttggacgagcttcgatcatacacccaagcgcgccgccgcgccggcggatcccttgatccgcgctctggcctgttctggcacgaacagcgtggtgaccgctatacgaaggaggctgtcgcctggcttcttgttgacgtcatccgccgtgccgggctgaagccgcccagagggcgaacaggacctcgcctgcacgacctgcggcactccatggtcgtgaaccggatcctcgaatggtacgaggcgggcatcaatccgcaggatcgcctgccattcctcgcaacctatctcggtcatcgcgacatcaactcgaccctggtctacatcacggttacgcaggacctgctgcatcacgccaatgaacggttccgcgtgctgggagtgccatgcctcaacatcggaccggaggggcgggcatga

SEQ ID NO: 4387 - DNA, 1233 bp, BradyrhizobiumColbertium
atgttgaatgtcgataacgagctcatcgccgagctccgaattgtactcaccaagcaacgatacagccctgtggtgatcgggaactactgcgcctatgcgcgagggttcgtcgaataccttgcgcagcagaacattgaggtcacggatgtgaccgaggcgcaggtggctcagtacctgcaacacgcgattgcgatgttcggccaacgccacggtcggacgccggcgcgggattggcactccattccgcgctctgggatccatgcattgctgcggctcgcacagggtcaatggccatccgcgccgaaagcgacctgcgcggccgacacactgcgctttgccatctgcgacgggtacgagacctggctgcgcgaagaacgaggtcttgctgcggccagcatcgacgcgctgatgtgggagggccggaactttctggtctggcagttcgatcggcacggtcccgacagcctgatgacgatgaccgtgagcgacatcgaccgttacatggacacgcgcagccctcatcagacgcgccggtccgtgaaggatgtggcggagcgccttcgctcgatgctgcgctatctccatcggacagggcgcgtcgccatcgatttatcgccgcatgtcatcgcccctttgctctatgcctatgaaggtgtgccgtcgatccttacgcccgatcaggtcgccgcggttttgcaggcctcgggggaggacaagacgccagtgggtttgcgggatcatgccatcctgcaattgcttgcgacctatggtctgagatcgggcgaaatctgcaatcttcggatcgaggatatcgactggcgggcggaatcgatccgcatcaggcatactaagacccaagcatgctcgttcttgccattgatggcgccggtgggtgaagcggtgctcgcctatctgcaggcggggcggccggtgactgacgcccgcgaaatcttcgtccgcacacgcgcgccttatcgcaagcttggtttgctggccagcatggtgcggcagcggcttgcggccgccggggtcactccgagtggcaagaacggctcccatatcttccgccacgcacgtgcggtcgaaatgctgcgcgccgccgtgccccggaaagtgatcggcgatctgctcgggcatcgctctaccgaatccacggccccctatctgaagcttgctaccgaggacctccgggccatcgcgctcgaagtgccgggacgggagatgccgtcatga

SEQ ID NO: 4388 - DNA, 126 bp, BradyrhizobiumColbertium
gtgcagaaacgcggcggcgcgctgcgcatgtgcggcggcctggaaaaccgctcgcttgtcgccctgcaggacctgcagttatccgcagcagcccataatgagaaggaaagcggctgcaccgcctga

SEQ ID NO: 4389 - DNA, 183 bp, BradyrhizobiumColbertium
atgaacgtccgctcgggacgtcgcgccgatttcgccgttgtcacgactgtccaccgcaacggaaatcagaaaagcagtcttgggctgctacgacgggaagcgaagtcgttgcgcccggccttggaggagaagaaacagcgcgtgctccttcttcccattccatttttgggggcggctggctga

SEQ ID NO: 4390 - DNA, 138 bp, BradyrhizobiumColbertium
gtgacgttggtgcataccgtccgtcgtcaacgccaggcacataaccctgcggtcgacggccgacggtcgcttctcgacgaagccgctctcgacaagacgatctacgaggcgaaccgtgccggcgtgcgacagacgtag

SEQ ID NO: 4391 - DNA, 279 bp, BradyrhizobiumColbertium
atgtgcctggcgttgacgacggacggtatgcaccaacgtcacaagctgctggctttgcgaagcgccgcgttggcaactctgtttgatcaagtgacggcagaagatctagctgcattcgaacgcgttgctgaaacgattgccggctcgctgcccgagaacgcgctcactgcgctgacaacatgccgattctgcgacgagcgtcactgcaccgattgcccaatggaggtcttcgggacgctcgaacctgccggtggcccggtcaccggcctccgaagctga

SEQ ID NO: 4392 - DNA, 522 bp, BradyrhizobiumColbertium
atggccattcaaacaaaccggtttcgcctgcaaattgccgaaagaggagttggttcgctctctcttctggcactgctcagatgggctttggtcgtcatctttctatggttcgggggaatgaaattcaccgcctatgaagcagaaggcattgcaccgttcatcgcgcacagccctttgatgagttggctacacattctgtttggcatccggggggcgagctacgtcatcggcgtccttgagctatcaaccgccgccgccctcatcgccggtgccatcaacccggtcttttctgccctgggggcagcgatgtctacgataacctatctcattacgataaccttcttcataagcacgcccggagtagcagagccaacggccgggggatttccagcgatctcagctgcgcccggccagtttctactgaaggatctcgtcctgcttgctgcatcgttgtgcctcctcagcgcatcggtgcaaggtccgtggctcaaagccgaaaactctcaaaacggaaacttgtga

SEQ ID NO: 4393 - DNA, 483 bp, BradyrhizobiumColbertium
ttgaaaggctggctgctcgacaccaacgtcgtctctgccctgatcaacccccgtggtgccccctcggtgaagacctgggcatcggcgcaggacgaggaaacattctatatcagcgtcctgacgctcgccgaatatgacaagggcattcataatcttccggcggatcatgaagatcgcccacgttatatcgcatcgagagatgcccttgcggaacggttcggaccaagagtgctttccctcgacgatgacagcgtcaggcgctggggacgtctatccggcgaagtgaagcggacgagcggacatccgccgccggtgatcgacgccctgctcgccgcgagcgccattgaacacgatctttatctcgtcacgcggaatgtgaaggatacgaagccgacgggggcaaccgtctacgatccgtggaacgacgacatgaagatgttcccgttgagcccacgagttggacggcgaccaccggcaacctga

SEQ ID NO: 4394 - DNA, 303 bp, BradyrhizobiumColbertium
atggccaaacgcgcagaagtgacgaaaacgaaacgacctgtaaggcgaaggcttgcaggacgatggaagctggaggatgccaaggcccgcttcagcgaggtggtgcggcacgctcgcgaggaagggccgcagcgcgtgagcgtgcgcgggcatgacgcggttgtcgtgatgagcgtggaagaatttgagcgcctgacgcccggcaaaccgcgcgcaccgttcgtcgagttcatggagagcctgcatcttggcgggctcgatctcgaccgtgaggccgatcggggccgggacgtcgagctttga

SEQ ID NO: 4395 - DNA, 642 bp, BradyrhizobiumColbertium
atgcgaacagaagctcttgtcaagacgctgtcggaagatttgaagccggtgcgtccccgaagtttcaggcgcgatgctgtcatcctgggcgtcgtggcaatcctggagttcgcggcctttgccggggcaggcttcatgcgcccggatctctcgcacgcgatgcatatgccgtccttttggtggaagttggcgagcatgggggcaatcgcgatttcaggcgcagccgttgcattgttctcgtctgaccccacgaaatcaccgaaagccggccttcgatggcttgcgatcgcggtcgcgctaatcttcgcctccggatggttgatagatgccctggaaggcggtttttctgagcttgtgaggcgactcgactggcagatgggccttcaatgcacctggaagatggtgaccctctccgtaccgttggttgtcgcgttgggtgttctcattcagcgcggcgcgcccacggatcggttcgggacatcgttggcggcggcactgggatcggccgggtggggcgcctttattttcgtctttgcctgtccctcggatgacgtcctttatatcgcggtttggtattctgtcggttgcgcgatcgtgacggttattggcaggttgatactggcgaggctggttcgctggtag

SEQ ID NO: 4396 - DNA, 2100 bp, BradyrhizobiumColbertium
atggctgacgtggtcgaccggcctcaagccgcaccggctgagaagagccggccgatcgacacgccctctatatggcatgcgggcgagatggcgcttcaggagacggtcggcgttcgacgcgccatggaacgtcagggcgcccaggttattcgcgaccatctgatcgatcagcatcgacttttttttccgctgctgccgtcgatcatcatcggagccgtcgatgaaaacggtgatgtctggtcgacgatgagagaaggcccggcaggcttcctgtccgtggccgacaacaagacccttgagatcgccgcgacggtagacgtttcggatcccgccgaagcgggactttcggatggatgttccgtcggtctgttgggtattcagctggggacacgccggcgcaacaggctgaacggcgtcgtacgcggtcgtggcgcaaatggctttagcgtcggtgtgcgagaaagctacggaaactgtccgcagtatatccagttgcgcaactattcgttcgaacctgcgcctgcgagccgtccttcgcgccaggagtcagccgagctcagcgacgttcaccgtgcgatgatcgccgccgccgatacattctttgtcgcctcctatgtcgatcgcgatggctcccggcacgttgatgtctctcaccggggcggcaaaccgggctttgtgcgcgtcaacaaagacggctcgctcacaatccccgatttcgccgggaatctgtacttcaacacgcttggcaatatcctggtgagtggtcgcgccggcttgtgtttcccagacttcgagtccggatcactcctgcagatcaccggaaaagcggaagtgttgctggactcccctgagatcgcgctgttccagggggccgaacggttgtggcgcgtctatcccgagcgcgtcgtctatcgcgccggcgcgctggcgttgcggtggacgaaggtagagggcggcgaatctcccaatagcttgatgacggggagctgggatgaggtgcgagaccagcaggcagcatcgaaggaagcttcctcttggaggcggttccgcgttgctcgtcgggttcgggagagcacgaccgttagctcgtttttcctggagcctgccgatggcgaggttctgcttcgtcacaaggcaggtcagtatttgccgattagggtacacatcggcgaccaggatgcccccgccattcgcaactataccatttcggctgcgccgtctgatggctgttatcggatcagcgtgaagcgcgagggtgcgatctcgtctttcctgcatgaccgttgtgacgtcggcacgattatcgaggcacgcgccccggaaggtagtttcggtctgcgtccggcgggaaagagaccatcggtgttggtagcggccggtatcggaattacgccgatgatcgccatgctgcgccatcgcctgtttgagcgacagaggacgagatctgcgaaacagacgtggcttttttattcgtctcgttcggtaagcgagcagcctttcgatcgcgagcttcacgcgatcgcgacgaactcgactgactggctgcgcgttgttcggcttctttccaacacccaaggcgccatggcggctcgagactatgagttgggaggacgactgacggcggaggtgataaaagacgctttgccgtcgttgaactgtgacttttacctgtgtggaccgccaggctttatgcaggacatgtatgacgggctgcgtgcattcggcgtgtcggacgatcaattgttcgctgaggcctttggaccggccgcgttccgtcgacatggtacggaagcgcttccgccgcttccgagcgcttcgacgaagccggtgagcgtggtattctccaaaagcgggacagaagcactttgggagccggaatcgggcacgttgttggagctcgcagagcgcgccggtttgacgcccgatttcagttgtcggtccggatcttgcggcacatgcagggcaatggtcagccaaggtgaggtgacctacgagaaccgcccgggctatgagacacgggatcaggaagctctcttatgttgcgcttttccggccgagcgtccggccgacgatcgtcgaccgctggtcattgagctgtga

SEQ ID NO: 4397 - DNA, 621 bp, BradyrhizobiumColbertium
gtgaagctttactacctgtcgttatccggtcattcgcatcgcgcccgcttgttcctttcgatccttggcgccgatgtcgagcagatcgagcttggtggcggagatctgcgcacggccgagtttctgcgcatgaatccattcggacaggtgcccgtgcttgtcgatggcgatgccgtcattgcggattccaacgcaatcctggtgtatctcgccaagaagttcgacaggaaggactggttgccggagagcgctgtggaagccgcggccgttcagaaatggctttctgttgcggccaacgagattgcgaacgggccttgtgcggcgcgtttgatcaccgtgttcaaggcatcgttcgacccggaggacacgatcgccaaagcgcacaaggtgctgcggcttgttgagcaggcgttagctgggcgggattggatcgccgcgaaaggaccgacgatcgcggacatcgcgctgtacagctacacatcgcatgcccccgaggggaatgtggatctgtcggattactcgaatatccggtcatggctggcccgagttgaggcgctccccggcttccttccgtttgcggaaacgccggtcggccttagagcgagtgcggccaatggctga

SEQ ID NO: 4398 - DNA, 1011 bp, BradyrhizobiumColbertium
atggatcgaatcgaggcaatgacactgctagtcgccaccgtggaaaaaggcagcctgtctgccgccggaagggcgctcggcgttccactggcgaccgtcagcaggaaggtgtcggacctcgaagcccacctaagaacaaaacttctcaaccgttcaaaccggcgcctgacactcacggacgccggcgaagcgtacgtcgccgcgagcaaacgtattctccagcagatcaatgaagcagagcgcgccgcggccggcgaatacatcgcgccacggggagacctcgtcgtcacggcgcccattgtgtttggacggctgcacatggtgccaccaatcgcggcatttctcgaagcctatccagaggtcgacgtgcgcttggcacttgccgaccgggtcacaaatcttatggaagagcacatcgatgcggccctgcgcatcagtctcctccccgacagcacgcttctggcgacaaaggttggtgaaatacggcgcgtcgtatgcggcagcccagcctatttcgataagcacgggactcccgcaaagcccgccgacctaagtgagctttcatgcatcactttcgagggacaatccaacccgcaatcatggaatttcgggactgcaaaggcgcccgtagtggtgcccgtccattccaggcttattgcgacgacggcggaagcttcgatcgacgcagctaaactcggagccggcgtaacgcgagtgctgtcttatcaagtcgaagatgccgttcgtaaaggcgagctcgtcactattctggaagatttcgaaccacccccaattcctgtcagtctcgtctaccgcggcggagggatgattcctctcaagcttcgcgcgttccttgactttatgaccccacgattgcgggcgagtctctctcaggccaaatcacggagtgcaaagccacaggggcgcccggaggagaacgaagctgacacagcaccggcggccagcactgggccgcgcaaatcacgaaaggcggccgaccagtcggcttaa

SEQ ID NO: 4399 - DNA, 465 bp, BradyrhizobiumColbertium
atgacccgacccccacttcccccgttttccagagagagcgctgtcgaaaaagtccgccttgccgaagacggctggaacgggaggaatcccgaaaaggtctcgctcgcctacacgcaggacacggtttggcgaaaccgcgcggaattcgtgaatggacgaagcgaggtcgttgccttcctcacacgcaagtgggcaaaagagctcgattaccggctgatcaaagagctctgggcgttttccgagaaccgcatcgccgttcgctacgcctatgaatggcatgacgacagcggaaactggtttcgcagctatggaaacgagaactgggagttcgcgccggatggtttgatgcatcggcgtttcgcatgcatcaatgacttgccgatcgccgaagccgatcgcaagtttcactggccgttgggtcgccggccggacgatcatccctcccttagcgaactgggactgtag

SEQ ID NO: 4400 - DNA, 792 bp, BradyrhizobiumColbertium
atgccgttagtccgcaatgccgacgccgtcctgcactatgacgtcgttggagaaggtgaacccctcctcatcctgcctgggctggccatggatatcggtccgtggcggccgctggcgtcaatgctggtcggcttcaagatcgtgcttatcgacaatcgagatgccggcggaagctctacgaccgcacagcaatacgctctgtcggatatgtcggcagacgttcgtgccgttctcgacgatcttggtctcgagcaagtcagcatccttggtcattcgctcggcgggcagattgcgcaagagttcgcgctgcgcgacccgaaccgcgtgcgcaagctgatcctcgcgaacagctgggcgcggacagatcaatatctggcgaacaaattcgaaacctggcggatattgaagaggcatctccctgatgcccacttccgtgaggtcatgacctttaatctgagccatcccgacgtgctcgcgagtgctccgcttcacgcgatcacggcgcttacgaacccgctctttcacgatcaatccgcagatgcattctgtagaggcgcgaacgctgcaagtcaggctgacacgctcgatcgccttaccggtctggtgagcccgaccttggtgatttcaggcgagcgtgacgtcgtcttgcctgccccctattccgacgaactgaccaatgcaattcccaaagccacgagaattcgtcttgagacggctggccacgcggccccttgggaagcatcggagatcttcgtgaatgaggttcggagctttctgaaacgacctgcttga

SEQ ID NO: 4401 - DNA, 627 bp, BradyrhizobiumColbertium
ttggcgggactcggcgtcaaggtcgcactggccgcccgcagcactgcgaaattaaaacagctggatgatgagattggcgcaaaggtcttctcggcggacgcttctgaccgagcctctgtcgaggcattgtttcgcgacgtggacgccacgatcggagagcccgacgtggttgtgttcaatgccagcgcgcgggcgcctgggccagtcgcagaaatcgatcctgtcgcagtggagaaggcgcttgctatcagcgcttacggcgggtttctcgcggtccaccatgcggcgcgacgcatggtgaagcatggcaagggagccattcttctcacaggggcatccgccagcgtgaagggctttccacgctcctcggcatttgcgatgggcaagtttgctctacgcggattggcccagagcgccgcgcgtgaactggggccgatgggcatccacgttgcgcattttgtcatcgatggagctgttcgatccgcgtcgcgttcggatccgcaggacaatcccgatagtacactgtcggccgacgcgatcgcgcaaacctacatcgacatccttcgccagcatcgcagtgcctggtcattcgaagtcgaggtacgcccctgggtcgagaaattctaa

SEQ ID NO: 4402 - DNA, 552 bp, BradyrhizobiumColbertium
atgtcccgcatcgccatccccgcctccgtcgacgccgctcccgccgcttctcggcccttcctcgacgccgtgaacaagcagctcggcagcgtccccaacctgttccgccttgtggcgaccagcccggcctcgctcgagggttacctcggcctgttcggcgcgctcggaaagggccagctgccggctccgactcgcgaacggatcgcccttgccgtcgcccagatcaacggttgcgactactgcctgtcggctcacacctacctcggcaagaatctcgccaagctcgacgacgccgagatcaccgccaaccgcaatggcgcctccaacgatcccaaggctgacgctgcggtgaagttcgcggcaaccgtgacgcgcgagcgtggccacgtgaacgacgcagcgctgcagagcgttcgtgcggccggatacgacgacgctcagatccttgagatcgtgcttcacgtcgctctcaacacgctgacgaactacgtcaacgaagtcgcaaagaccgacgtcgacttcccggtcgttcacgcacgcgacgccgcctga

SEQ ID NO: 4403 - DNA, 306 bp, BradyrhizobiumColbertium
atgtccgcaaagtccacaatcagttcgctgattatcgccggcgccgtttcgagcgcgctggcctcgatcgccatggcagcgccgctgaccaaggccgaagagcaggccgccgtctctgcccacaaggtgaagtgctacggcgtcgccctgaagggtcagaacgactgcgccgctggtcccggcaccacctgccagggaacgtccaacgtcgatttccagggcaacgcctggaagttcgtgcagggcggcacctgcgagtcgatcgccgtcccgggtggcaagcacggttcgctgaagccgatctga

SEQ ID NO: 4404 - DNA, 924 bp, BradyrhizobiumColbertium
atgacctcgaataataatcagaacgccgaaaacgtggcgagcgctctccgctttccaaaccattcaatcgccggacaggctgggacgagcttcaagcacgagcaccttccggcgatcatggccgacggaaagcccaagggcttttttgaagtccatgccgaaaactacatgggagccggtgggccgccgcaccgggcgcttgaagcgatccgacaggataatcctgtatcgcttcatggcgtgtgcatgtcgatcggtgggccgcagccgctcgatcgcgaacatctgggacgattcagatcgctcgtggaacgctatcaaccggcgctcgtgtctgagcatttggcctggtcgacgcatgaaaatacattcttcaacgacttgctccccttgccgtacaccaacgaaacgctttcgagggtttgcgagcatatcgatgaagtgcagcaggcaatcgggcggccgatccttcttgagaatccatcgacctacgtaacgttccgcgaatccacgatgagcgaaactgatttcatccgcaccatagcgcggagaaccggttgtgggcttctcctcgacgtcaacaacgtcttcgtgtcggcgaccaatcacgggttctccgcgctcgactacctctcggactttccgcttgccaaagtcggcgagatccacctcgccggccacgcggagcaagcggacgacgagggcgagcgtcttctcatcgacagccacgacggccccgtcgccgatgcagtgtggaagctctacgaaatcgtcattcaaaaatgcgggccggttccgacgctcatcgagtgggacagcaacattcccgattggccagtgctcaaggcggaggcgacagccgcccagcagatcctggatcggtacatcggattctcttctctggataagagccatgcagcttag

SEQ ID NO: 4405 - DNA, 807 bp, BradyrhizobiumColbertium
atgcagcttagccatcttccccggcaggacatgcggcagcgtcaaacctacgccgacgccttctcccctgccctcatcgatccggatcaccaaacgcctgatgtcgtcgcgggtcccaacggcaaggcggcggtcaagcgctacaacgtttatcgcaacaacgtcaccgtcagtctgatcgactcgcttgccgcgatctatcctgccgtgcagcgtatcaccggtatcgagttctttcgggccatggcccggtttcatgttcgcgcgacgccgccgacttcgcctctcctgttcgaatacgggcgcgactttccggccttcatagagagctatgaatacgcgcaggcaatgccctggcttgccgacacggcgcgcatcgaacgagcgtggctagatgcctatcacgccgctgacgcggtcccgcttgctcccgagcgcctggcggctgtgcctcctgagcgccttgcggatctgacatttgtctcgcacccggccacacaggtcgtgagatctcgctacgcggcgctgacgatattctcggcaaaccgcggcacagaatcgaccggccagatcgatccgacgcaatcggaagacgctctgatcacgcgcgcggaaaacgatgtcgaagtcagacaccttcccgaaggcggcgcggtgtttctgactgcgctgctggccgggcagtcactcggccacgctgcagccgctgcgctcgaagaggtccccgacttcgaccttggtgcgagcatctctggcgtgttggccgccggcgcatttatcgctgcagaattcggagaagaatcatga

SEQ ID NO: 4406 - DNA, 540 bp, BradyrhizobiumColbertium
atgactgtcttagatcaatccgccgcctctcgcggcaagttaagaggcgtggcggacatcgtcgatcgcgccagtatgctagtgcaaaccgttgcgcagccgtccttggcgcagttgttgttgcgcgttgccatcgccgtgccgttttggaaatccggcatccttaagtgggacggcttcctgcagctgagcgacacggccgttaccttgttcagcgatgagttcatgctgcatcttccgggtgggccctacccgttcccggcaccaacgctgatggcgttcctgtcgggctgcggcgagatcaccttcccggtcttgctggtcctcggattcggcacccgatttgcggcgctgggtctgctcttcatgaccgtgatcgttgaactgacagtgccggatgggtggccgatccatatcacctgggctgctatggcgctcgccattatggcttggggaccgggccgcatttcagtcgactatgcgatccggcgtttcctcggcttgccgacgacctttcggcgagactcaaggcccgcttga

SEQ ID NO: 4407 - DNA, 882 bp, BradyrhizobiumColbertium
atgacgacaccaacaattctgatcaccggcgcgaccggccggacagggcgtttcgccgtggaattcttgagaaaggacggcgcgcatgtgcgggccttggcccatcacgatggtccgaaggccgatcagctcagggcgctcggtgcggaagtggtgatcggcgatctcctcagcctcaacgacgtcacgagcgccctcgatggaatccagagcgcatacttctgctatccgatcgtgccgcgcctgatcgacgcgacgagcttttttgccgttgctgcagccgagaagggcgtgaaggcgattgtgaacatgtcccaaatttcagcgcgacgagacgcgaacagccacgctgctcaggagcattgggtggcggagcgaatcttcgattggtccggaacgccgaccactcatctcagaccgacattttttgcggagtggctgacgatcatgctggatcctaccgtgcttcggtcaacgggagccgtcaaaatgccgatgggtgatggtcgccacgcgccgattgcggcggaggatcagggacgtttgatcgccgccattttgcagaatcccgcgccacacgcgggtaagacctataccctgcacggccccgtccagatgaatcattatgagattgcagcggcgatggggaaggcccttggccgcgatctgcattatgaacccatcacatttgatgaattcgctgagggccggctcgcatcaattcgtgcaaatcctcacgtcgtccagcatctgcgagaggtgactctcgactatcagaacgggatattcgaaggcgaggacggaatcattcgggaagtgacgggtgtcgcgccaatgactgtcgagacattcgtcgagaagaaccgggcccatttcgcgtaa

SEQ ID NO: 4408 - DNA, 504 bp, BradyrhizobiumColbertium
ttgaagggaaagaagaccgagctcgcgccggcacagtgcgcggtggcgcgcgctctcgatgttgtcggcgactggtggtcccttctgatcgtccgggaggcgctattcggacgaaaccggttttccgaatttcaaaagaacatcggattggcgaagaacattctgtcagtccgcctcaagaagctggtccagtacgatgtattggtgatggagccggacactgaagcggcgacgtcacatcgctatatcctgaccgagcgaggacatcggcttgcattggttatcgctgcgctgtggcagtggggcgaggagaactgctttcagtccgaagggtttgacctcggactggcggacagggaaaccggcgagcttctggcgaagctggagctgaagaccttgagcggacgctcgctcgatggtggccggcttgagctcgcagtgaggacacgcaccgacgcagagaagctcaaagtgatggctttgaaagactcagcgcccgcttag

SEQ ID NO: 4409 - DNA, 228 bp, BradyrhizobiumColbertium
gtgcttgaggagacatcgcaccatatcgcaatcgggctcgaatacctgccggccatcgctcgccgtctctatcactcgcgcgaactcggtgaaccgtttgatttcctgacctggtttgaatttgcaccagagcatgcagcttctttcgagcggctggtgtcacggctgcgcgaatcggcggaatggcgatatgtcgatcgtgaagtcgacattcggctgagccgatga

SEQ ID NO: 4410 - DNA, 684 bp, BradyrhizobiumColbertium
atgacaggagattcacccatcatcttcgcgcaagcgaatggcactgccgtacgttatgtcgcctacgagccctcagcgccaaaatcccaaggcatccttgtcctaaaggaatcgccgattgcacgactggaggatctgaagggaaagcgcatcgcggttcaacgcggttcaaattgtcacttcctgacggtcgccgcgctgaagcgcgcgcaactcaaactgtccgatgtcaagttcgaatacatgattgctccagacggcagggtggcgctggaggggcgcaatgtggatgcttatgcggtttgggatcccctgatgaccgcgacaatcgccgggggagctagacagctgatcgacggcactgatcttagcaataatcgcttttattatagtgccaccccagagcttggcgagaatagagcccttctcacagccttagtggaggagattggagcggccggacaatggatcaacaacaatcggagagaagctgccagcatcctttcgcccgcgacgggtctatcgacagcgatatgggtgcaggcgctcgaacactcaacgttcggtgccaaatggatcgagcaggaaccgctggtggagcaacagcggatagctgattccttcgtggaaataggtctgctaccgaagcctgtgcgtgtttcagatatagcgctgctaagctga

SEQ ID NO: 4411 - DNA, 885 bp, BradyrhizobiumColbertium
atggcagccacagtcgaccgcatttcggggggccggctcgacgtcaatgtcgtatctggagggagcccgcccgaacttgctgctgacggcgtttttgccacgcacgacgagcgataccaactgaccggagaattcatcgatatttggtgccgtctgctcgcgggtgagacggtcacaatgaaaggcaagcatctcgaggtacgtgatgcacggctgctcttccccgctgttcaacgtcctcatccacgtctcttcaacggagggtcgtcagcggcgtcacacagctttaccgcggagaagtgcgacgtctatatgacgtggggtgaaccgcctcggatggcagaggagaaaatccgggacgtccagcgccgcgctgccgcgtatggccgaaagctacaagttggaatgcgactccatgttgttgtgcgggaaactgaatccaaggcctgggaagcagccgatgatctgatcaaatatctggatgacgagactattgcgcgagcgcaggctgcgtttgcagcgcaagattccgttggacagcagcgcatgacttccctgcacgggggccggcgagatcagcttgtcgtgtcgccgaatctctgggcaggggttggcctagtacgtggaggagccggaacagcgattgtcggtgacccgaaaaccgttgctgccaggctcgtcgaatatcaacagatcggagtcgatacctttattctctcgggttacccccacctcgaagaggcgtatcggtttgcggagctcgtcttccctttgctgcctctgaagccacccgagtcgcaagtcgccattgggcgagacggcggcaattcgcttcgcgaaccggttggcgaggtgatcgcgcacgtcgcattcccgggtcgttaa

SEQ ID NO: 4412 - DNA, 3276 bp, BradyrhizobiumColbertium
atggtttttgcacgggatcttcggatgagcggaccgcgctacgccgaattgcaggtgacgtcgcatttttcgtttctgcgcggcgcgagcagttgcgaggagctgttcgcgcaagctgcgatcatgggaatcgaggcgctcgggattgtcgaccgcaattcgcttgccggggtggtgcgggccttcgaggcagcgaagacgaccggcatccgcctcgtcgtcggttgccggctcgatcttgctgacggtatgtcgctgcttgtctatccgaccgaccgccccgcctatgcccgtctctgccgtctcctttcgcttggaaaggccagggcgggcaaagcgaaatgccacatcgaatggccagatctcgcggcatacgcgcagggactgatcgcggtcctcgtgccggacaacgccgacgagacctgcgccatgcaacttcgccggctgcgcgacgtctttggcgatcgcgcctatatggcgctgaccctgcgcagacgtcccaatgatcagcttcgcctttgggagctcgcgaacatggcgactgcggcgcgcgtcgcgaccgtcgtcaccaacgatgttctgtttgaccaaccttcgcgccagatcctgcaggatatcgtcacggcgatccgtcacaacgtcaccatcgacgagctcggccatcgccgcgagcgttttgccgatcgctacctcaaacctccggcggagatgcaccgtctgttcgggcgctatccggaagcgctcgcccgcacggtcgagatcatggaccgctccacgttccggcttgacgagctcgcctaccaatatcccgaggaacgctccgatccgtcgctgtcaccgcaacagacgctggagaagctgacctgggagggtgcggccgaacgctatcccgaaggcctgccatcgaaggtccggcgcaacctcgagcacgaattgcggctgatcgagaagcttaaatatgcgccttactttctcacggtgaacagcatcgtgaggtttgcgcggtcaaaagggattctctgtcagggcaggggctccgcggcgaacagctcggtctgttacgtgcttggcgtgacgtcgatcgatcctgatcgtaacgacttgctgttcgagcgcttcgtctctgaagagcgtcgcgagccgccggatatcgacgtcgatttcgagcatgaaaggagagaggaggttatccagtgggtctatgagacctacggacgcgagcgcgcggcgctttgctcgaccgtgatccgctaccgagccaagggcgcgatccgcgacgtcggcaaggccatgggcctgccggaggacctgaccaagacgctatcctcgcaggtttggggctggtcagagggcgtcgaggcgaagcacgccgagagcgtcaatctcaacatgggagaccgccgcctgcggctggcgctggagctcgcacaccagttggtcggcacgccgcgacatctttcgcagcacccgggcggattcgtcttgacccgcgaccgcctggacgagttggtgccgatcgagccggcggcgatggaggatcgtcaggtcatcgaatgggacaaggatgacgtggacgcgctcaagatgatgaaagtcgacgtcttggcgctcggcatgctctcctgcatgcgccgtgccttcgatcttctcgccgggcacaaggacatccggctcgatctcgcgacgatcccgcccgaagatccgcgaacctatgcaatgatcagaagggccgacaccctcggtactttccagattgagagtcgcgcccagatggcgatgctgccgcggatcaaaccgcgcaccttctacgatcttgtcatcgaggtcgccatcgtgagaccgggtccgattcaaggcgatatggtgcatccttatctgcgccggcgcgaaggaaaggaggatgtcgtctatccgaaacccgagctggaggctgtgctcggcaagacgctcggggtgccgctgtttcaagagcaagcgatgcgcgtcgcgatcgaatgcgccggcttcacggcaggcgaagccgaccagcttcgccgcgcaatggccacgttcaagcacacgggcggcgtctcgcaattcggccagaagctgatccagggcatggtcgacaacggctatgagcgcgactttgccgaacgcacattccggcaactcgaaggcttcggctcctacggcttccccgaaagccatgccgcaagctttgcactgatcgcttatgcttcctcatggatgaaatgctggcatccggacgttttctgctgcgcgctgttgaatgcgcagcccatgggattttatgcgccggcgcagatcgtccgggatgcacaggcgcatggcgtcgaaattttgcccgtttgtgtcaacgagtcgcgatgggattgcacgctcgagccgcgcgacgccgacgatggccggctggcagtccgtctcggtctcagaatggtcaagggcctcggcaacgccgaggctgctcgcctggtcgcatgccgtgcgggtctgccctatgcgtcagtcgacgatctctggcgccgcgccgccattcccgccgctgccctcgtggagctggcggaggccgacgccttccggccgtggattggtcttgcccgccgcgaggcgctctgggcgatcagggcgctgcgtgacgagcctctgcctctgttcgcggccgctgcggcgcgcgaggccgcgcccgttcccgagcaggacgagcccgtcgtttcgctccggcccatgacggccggcagcgaggtggtcgaggactatagccatgtcgggctgacgctgcgccagcatccgatctcctttctccgggaggacctcgcgcgtcggcgcgtcagaacctgcgcggaggccattgcgtcgcgcgatcggaaatgggttgacgtcgcgggcctcgtgcttgtgcgccaacggccgggctcggccaagggcgtcatgtttatgacgatcgaggacgagacaggtgtcgccaacgtggtcatttgggaaaagatattcgagaaattccgccgcaccgtgcttggtgccggcatgatcggcatcagaggacagattcagcgcgaaggcgaggtcgtgcatgtcgtggcgcgcgatctgtttgacctttcggccgagcttgccagcatcggcgcgcgggacacgggtttcccgctcccgcatgggcgcggcgacgagtttcatcgcggctcacccgcgcccgatccgcgcgagccagccaatctcgcacatcgccctggccactttagtgacctgacggtgaagacacgcaattttcggtag

SEQ ID NO: 4413 - DNA, 1080 bp, BradyrhizobiumColbertium
atgactcagatccggttctgcaaatcctcagacggcgtccgtatcgcttatactcagggcggccaaggtccggcgatgatcgaggtagcgacttggctcaatcatgtggaatacgattggaagagcccaatctggaatgcgcgacttgccgagctgacaaggaactacacgcttacgcgctatgatggtcgcggctgcggactctccgaacaaaatcccccgcacctgacattcgatgatcttgttgccgacctcgaggcggtcgtcgacgcgtcagggctgaagcgattcatactcctcggctgctgccagggagcgccggtggcgatggcttacgcggcacgtcatccggagcgcgtgagccacttggttctttatggcgcctatgcacgcggaaagctcactcacaatccgttgccgcaggacgttgacgaagccgagacgatgctcaagctggtcgaactcgggtgggggcgtgacaatccggcgttccgccaggtgttttctgccctcctgatacccgatagcaggccggagcaatacagctggttcatggatatgcagcgcatgacgatctcgccacaaaacgtggtgcatctgatgcggacgcataaccgcatcgatgttagcgacatgctgtccgatatccgcagtccgacgcttgtcatgcacgcgcgcaatgacaggcgagtgccgttcgccgacggccatacggtcgcccattcaatcccgaatgccgaattcgtgcccttggaaagcaataaccatcttctgctcgaacatcagcctgcgtggcgtcagttccttgacgagacggcacgatttgtccgcgctgatcggcgcgcggaatccggagaaaccccgtttctcgagctgactgcacgcgaacgcgaggtgctcgacctgatcgcccgcggtttaggcaatttgcagatcgctaagtcgttgacgctgagcgagaaaaccgtccgcaatcacatcaacagcattttcggcaagctcggcacgctaaaccgcgcgcaggcgatcgtccgtgcgcgcgaggcggggcttggatctcggggcttctccaggaactga

SEQ ID NO: 4414 - DNA, 807 bp, BradyrhizobiumColbertium
atgaccgtgacaaaaaccgcacctgctggatctgcttcggtgcaaggggacttgtggggctcgcgtccccgtgactatgccgaggtacaggagccgacgttccttcccctttatgagagcgtgctggcgcgtccggaagtcgcgaaggctgggtcaatcctcgatattgggtgtggagctgggctcgcagcgcaggttttctcaagagcaatcggccgtgttgcaggcgtcgatgctactgcgcccttcatcgagattgcgctgcgtcgcgtccccggtggagagttccacgtcgtcgaaatggaagccctcccctacgaggacgactctttcgacgtcgtgacaggcttcaacgcatttcagtatgccgcttcaccggtgaacgccctgcgtgaggcgcgacgcgtcgtgaagaccaacggcatcatcatcatcgcagtctggggcttgccggagacctgcgaggctgccgggcacctgaaggctttgggatcgctgatgccgccaccaccccacggcgctccaggcccgtttgcgctctcggatgaaagcaagctcaaaacgctcgcgagcgaagcgggcctgacaccgggcgtagtcgtggatgtctcatgtccctggatttatcccgatttggagaccgcactcaggggcatgctgtccgcgggaccagccgagcgcgcggtccgggcctccagctttgaacgcgcccgcgacgcagtcgccgctgcgatcgagcgctaccgcactgcgtccagcggctatcgtctgaacaacacgttccgatacctagtcgctcgctcatag

SEQ ID NO: 4415 - DNA, 1326 bp, BradyrhizobiumColbertium
atgtccgacatagatttgcccccgacgcattacgcgctttcaggtgaggtcagtattgcctaccaggtgatgggcaacggagcgatcgacatcatcatggtccctggcctgttttcgcacgtcgagttcatgcatgagctcccaggctacacggcgttcttgcggcggctatcccgatttgcccggattgtgagcttcgacaaacgaggccaggggttgtcggacagaatgtccggcgcgccctcactcgagcaacgcatggacgatgtccgcgccgtcatggacgagattggatcccgctgcgccattattttcggcttctctgagggttgtcctatgagcattttgttcgcggcaacctatcccgaccgggtctcgcaccttattctcgtgggagggttttcccgcgctgcggatcggatgtctgacgacttgtggcagcctcgtttggaacagatcatcaagtcgttcggtagcggagccatgatcaaaacggtcatcccgagtcaattgcacagcgccgccgccgttagccagttcgctaagctagagcggttatccagcagtcccggcgcgttgcggacgctcttggcactcaaccggcagatcgacgtctcctcgatcctccccacattgcagatccccactttagtggtgcaccgcaaaacagatgctcaggtccccgtcgccctgggtcgaaaactgggtcagaaaattccgggggcaaagtacgtcgaatatgccgagggcgatcactgttactggctcggtgaagttgaggcgctctatggagacattgaggagtttgttaccggccgacgggaagctgcatcaatggacctggagcgagtattggcgaccgtgcttttcacggacatcgtcggttcgacccggaatgccgccgagatgggcgaccaaacgtggcgtcgattgctggattgtcacgatgaattggcgaagcagatggtcgcaaagcatcgcggcactttgatcaagaacactggcgatggtattctcgcgacattcgacggacctggtcgggcagttcgatgcgcgattgccgtcgtgtccgcttcaaagagaatcggtttaacattgcgcgccggccttcacactggcgagatcgaaatcagagggcgggatgtcggcggtattgccgtgcacgtcgcggctcgcgtcatggccaattccaaagctgatgaggtacttgtttcaagagtcgtgaccgatctcgtggccggagcaggtttgaaattctccgatcgcgggtcgcacgagcttaagggcattccggaccggtgggatctctttgctgcaagcatctag

SEQ ID NO: 4416 - DNA, 120 bp, BradyrhizobiumColbertium
ttgatcctcttgcgcgcagcaaacctggcccttcagggccgggtcgaggcgcgtctttggttctcgatatattgcttcacgatcgcgagcggggcgcctccacaaaaggccgcgaagtag

SEQ ID NO: 4417 - DNA, 1398 bp, BradyrhizobiumColbertium
atgcgcaccaacggcatcggcagggcaatgggcatcatcgaggtcaaggtaccggatcttgccgatccgtcaaatctcgatcactgcggaatggcgatcctcgtgtcgccgagggtggcgctcacctgcgcgcacgttgtgaacgcggcgataccgcggaaaccggaagccgaggatcggccctcccccgacatccggatcacgctgttcttccccatggtgccgggcggacagatccggcttgcgcgggtcgtgcgatggaggaagatgggtcgatatccactcgacgacatggcgctgttggaattggacgagcccgcgccggcggccgctggcgtcgcggtgctcgcctcaatcgccgaacgaggccggtcaggaatcctaagtctgttcggcgtgcgctccgggtatgccgtaggcgaacacgtcgaggcgagattcctgggccaatcgacggcggcgtggcggcagatcacggtcgcccaaggaaagccgttggagcccggcttcagcggcgccggaatctgggatgaagctcatcaggccacgatcggcatggccgtcaggcggcagggtgcgggcgaagtcgcgtatttcctgccggcggaggccctcattgagttcgccggcgacatcccgcacgaagtacgcgatcttccatcgaacttctcctccacgttcacgatcgccgcgacgctgttcttcgccgccgtactggtccactttttggcggatcgcatcagacagtttcctcgtttcctctcgctcggtttcggcaacgaaatcctggccgcgttctggggcctgcatctgaccgcattcctcatgccccttatgctttggtacctcctatcgttcgccaaggcgtatcgcgagcacccttggtggatgcgcgttccgcaattcggcttcctcggaaccccgccgcgtccatcgtcgtcacgtttcgcggccgtggcgacgctggtcctgctggtagccataccgctgtacctgaacgggcatttcctgcgccgtttgcacagcaacgaaatgaaggtgtacatcgaagcgagggcacagggttacgaccccgagcaactcgtggccgcgggcgaaagctgcggcaagggtcgcgcggccggctattgcacgcatccgggggccggcctctattcgctcgtgccgcccggcgcgccgggcaagggcggctatctcgagaactactatcagatcggcgacctggaccgtgccgtaccaggctccgtgacgttttttccgatcgtgcagccgctcgtcttgtggctgctcaccgcgctttgcgtcggactatccgcgctcctcgtacggcgagtgatcagaccggagcgaaggctggacgatgtgccggcgtcgccggtcatttgcaataatccttga

SEQ ID NO: 4418 - DNA, 1146 bp, BradyrhizobiumColbertium
ttgcgcgtcggcgtcgagcacgccgtcgttcgggatgggttgcgcgacaagcgggagatcgaaaccgtggcgccgcccatgcccatgtccctgatcgagcctctttcgtgcgaacccgcggccgttgaggatcttctgctgaagagccggcaggcgggtgtcgcttggggtctcggagccatgggagtggatccggacaagttcgacggtgccggcgtttcgatcgcggtgatcgacaccggcatacagcgatcacatcccgccttcgcccacattccgcaagaagccatcctggaagccgacttcaccggcaagccgggcggcgacaagggcgcgggcaaggcggccgacggccgcggccacggcacccattgcgccgcgaccatttgcggcgggaccgtcgatggcatccgcataggcgtcgctccgaagatcgacagactgctgatcgccaaggcgatcgggggagaccgcggttcagccgctctcatcgaggccctcgattgggcagtcgcggaaaaggtcgatgtgatctcgatgtcgctcggcttcgatttcgtgggctatcgtgacgccctgatcggcaagaaggtccatgagaagaccgcgacgtcgatggcgctgacagctttccgcgacaacatcagggttttcgatgcctggatggagacactccggaccaggcgcaagcagggttacgatccgctggtgattgcggcctgcggcaacgagagcgggcggccgggctacatcgtggagaaggccagtccgtccgaagccgaaagcgtgatcgcggtcggagccatcggcgaagatttcgccgtcgctccgttctccaacatccatccgaaattcgtcggtccgggcgtcgacatattgtcggcgggaatccgccagaatctcacggtgatgagcggcaccagcatggcgtgcccgcatattgcaggcttggcggctctctattggcaagctgcgcgcacgtcgggatcggtggccgactctgcgcgcgtcctgcggatgatggaaaacagcgccgagcggaacttcgcgccgtttcagtcgcagccgctcgccgacgtcggcatgggaatgccccgcgcaccggagcggccccaaccgtcggtccgctcgcgtggtccctcatag

SEQ ID NO: 4419 - DNA, 1080 bp, BradyrhizobiumColbertium
ttggcgggtccgacgcatctgacggtcgaggatttggacgacggggacgtggcggagatcggccgcgacccgcgggctaacgtctcgccggtgatgccgacgaagctcgtgagaccgctcgacctaggggatgacgacgctgacgacgtatggggcatcgctgccgtgggggccgacaagtgcggctacaccgggaaaggtgtgcggattgccgtgctcgacaccgggatcgaggaaaagcaccccgcattccgcggagttcatttcacgacgtgcgactttacggggaccggcatcgacgaccgtgaaggacacgggacgcactgcgcgggtaccatattcgggcgggagatttccggcaagcgcatcggggtcgcgccgggcgtcgagacggccttcatcggcaaggttctgcgcgacgacggcagcggcacctccgatatgatcttcacgggactgcgatgggcgatcgaacagaagtgcgatgtcatatcgctatcgctggggctggattttccgggccaagtcgactctcttgtcgccgatgggtggcccttggacctggccgcgtcgatggcgatcgaggactaccgcaagcactctgccatgttcgaagccctgatggggctggctcgcgtcaaggttagcttcggtggcagcccgttgatcgtcgcggccagcggcaacgagagcagacgcaaccagaatccgatgtaccggatggcgacgtcattgcccggcgtcgtgtcggatatttcggtcggcgccgtcgagagggcgagcagcttgttcagggtgggctatttttcgaacgcctatcccaccgtggtcgcgccgggcgtgaagatcgtctccgcggcgctcggaggcggcctcaagaccttgagcgggaccagcatggcatgccctcacgttgccggcgtggccgcgctgtgggccgaaaagctgcaccgtgatggcgagactgtaagcgcggaggtgctcttcagccacatcaccgcccgcgctcgtcgcgatgtcttcgcccccaagccggacgaagccgacgtcggccgcggcctggtcaccgcacctggctag

SEQ ID NO: 4420 - DNA, 639 bp, BradyrhizobiumColbertium
gtgagcgcgctcggccgagagaagatcatcgaacgtctccgcgcacgagatctggcagtcgcaccgcttctgtccgaccagatcggcgccgccagcatcgatctgcggatgggcaacgtcgtgctcatcgtgagagcccgcgggtcgtcccatgtcgaccccgccgcggccaagagcttggagcagatctcggcccacgcccgccagaccgatctggcgcaaaagcacgaaagatacgaactgcctttccgttcgcgcttcctgcttcatcccggaagcctggccttggttcccacgttggaatgggtcagccttcccaccgatctgatcggcgcagtgaccgcccgttcgacgtgggcccgcgagggcttgagcatcgcgaccgccaccctcatcgaacccggctaccaggggatcgtgaccctcgaactggctaatttgggagagatacctctggcgctgtaccccggtctgcagatcgcccagatcgccttttcgcacgtggacggagacgccctcaggccgaacaagagccagttcgacctgtcgttcgagccacgacaggggaccatcgccaatccatccgagttcgcctttcttcccgacggtccgcggtcgggacctagccaggtgcggtga

SEQ ID NO: 4421 - DNA, 1287 bp, BradyrhizobiumColbertium
gtgctgctcgcgctcaacgagacgctacgccacgactacggtcccgctagaagtctggactacttcaacgaatgcaagacgcggctcgccgcgatccagcagtcgatcaagaacaatccctccatgcggggcaaggacatcgccgacaacatgcggtcgttgagcgagatcggcagccgcatctcgctcatcgagcggtcccatctcggcgagttctcctggccgttcgccgagggtatccgggatatcgccgagaccctgttcgcggaggaacagctggacggctcgttcgtgaagccgatcatgcataccatcgccgagggcatggggtaccacatcgtggacgaagtacccgtcgccggttcccaacgcctggtcgtggtcgcctttccgcggcagttcaagcaccacgtcctgctccattcgctcttcggtcacgaactaggtcataccgccttccagtcgaccggaccgggtggcgtgctgcgttcacaggtgctgtccgcgctgaaggacaaaacgccgctgcaggacacgatacaagccacgcagtggatacggagcgcagccggtccgtcttcgacgtcctacagtttctccgagatatcgctgcacaactggtgcatcgaaatcgcgtgcgatctgttcgggctgatgctcttcggcccgtcgttcgccgcagcacatcgggccatcctagagccgctcaacagcagtcccggagatgccttcgttcagagcttcacgcatccgtccttcccggtccggcgaaggatcatctccagggcgatggaagcgctgggttggcatgccccaatttcggcgccctccgatggcgcgctgcacgaagcggagaccgctctgctgaactatgcgatcgacgatgcggacggccgctgggcagagttgttcgcaccggatcagatttcggagatagcggcgcgcctaaggaattcgttcggaagccacaccgagttcatcttcgatcgtcctgatcggaacatgctcgccgatctcgtccgccagctcaccctctgcagaccgccgatatcgtacgagatcgacgagcgcggaattgccagcaacgccagcgttccgatgaagcacggtctgtacgcgggatggtgcttctggttcggccgcgatcgcctgcaggcggatgtggccgcctccaatccgttgctccgcaagatgtcgttcctcgaaatcaacaggctctgcgagtatgccctgctgcagcaaagggccatcgagatgaccgatctggccggagccgagaagcagtga

SEQ ID NO: 4422 - DNA, 444 bp, BradyrhizobiumColbertium
atgccgatcatggctgcgcacgacgaaagagacgcgcgaggtcccgccaggctgatcgccgtcacggcgaagcaatgcatcgaggaggcgaaggcgacgagcaccgaggtccccgcgctcaacaacgtgttccgccttctagaagcataccgctcccatcgcttcgtcgggttcgagttcgaaccgcgttcttcaagaggtccggaggcgctgaccctcctgccctcatcggaccgccacgtgctggagcttcgtgacgccatcgggcaggcgatcgaggccgtctacggttccgccgataccgacgccgccatcaagtcggtcgaaggcgtgctgcgatcggtcgcatatcccgcgatgcagacgtcggacaaggaagagcgcgaccgggcctcgcgcttcctcggcgcgttcatcgaccatctctacccggcggctacttga

SEQ ID NO: 4423 - DNA, 513 bp, BradyrhizobiumColbertium
atgccgatttcccgaccggcgatcaacgccttcacgccgaagatggcgtccgccatcgtcggcatgagcgtgcacatgctcaactatctggcgcgcgagggatatctgcttccgacctatccccagtcgcgcagacgcaagccggccagagggagaccgcggtactattcgtatcgtgacctcgtgatcgccaagatcgtccagaggctgctcgatggtggcctggaactgagccgcctgaaggacggcatcaggaagctcgggcgacatccggcttggcaggcgtcgaaccagcagaagaccctgcggtcgctcgcgaccgacgggcataacctgtatctgctggacgatcaggggcggctgacggatatcacccgacagggtcagcttgcgtttctgttcgtcctcgatgtcgcctcggctcaggacgaggtcaggcggaaaatggacaaggagcagctcgggtctttcagccttgtgaaccgtccgatccgctttgcgagaccgacgtga

SEQ ID NO: 4424 - DNA, 126 bp, BradyrhizobiumColbertium
atgtggcctggcgggatcaagatctcggtctttgtcgtgccgtcgacatcgacgaactggaacgtgccgcgccgatcgagcacgccctcgatcagcggaacggtcgcgcgaggtcagcaatggtag

SEQ ID NO: 4425 - DNA, 192 bp, BradyrhizobiumColbertium
atgctggacgaagggcagttcatcacggatcccacgcgcggcatcaccgtcgaactgatcttcgcactgctgctccgaccagcgaggcatcgatccccaattggtggtcctgtccgcggtcatcggcaacctcaacagtttcgaccgctggctcgatctaccattgctgacctcgcgcgaccgttccgctga

SEQ ID NO: 4426 - DNA, 129 bp, BradyrhizobiumColbertium
atgaccgcggacaggaccaccaattggggatcgatgcctcgctggtcggagcagcagtgcgaagatcagttcgacggtgatgccgcgcgtgggatccgtgatgaactgcccttcgtccagcatgactag

SEQ ID NO: 4427 - DNA, 396 bp, BradyrhizobiumColbertium
atgcggatggagctcgcgccattcggtattcgcgttgtggttattgagcccggcgccatcaggaccgagtggggcgagacgcgtatcgcagtctgctggatcgttcggggacaggtgcctacgcgccctgggcccggcggcacggccggcttcctcgcgcgagcggatcgagctggcttcggatcgccacctggtgtcgtcgcggacgctattgtgaaggccgctaaagccaagcggccgcggactcgttacgcggttggtggcggggctccggtgatcttggggttgaggcgactgcttagcgatcgacagttcgacagcttgatgtggagtcagtcgcaagcggctcgaaacgatgccgttgcgaacgagttgcaggcgccgcagcacagctga

SEQ ID NO: 4428 - DNA, 129 bp, BradyrhizobiumColbertium
gtgcggcaggcctgtctccgcaacaagcttggagacaaccgcgttcagctcacgacgccggagcgtgtcgagcaggtcgcgcgcgaaaaactggaagcggtgcgcgaggccctaggcggccgcgtctaa

SEQ ID NO: 4429 - DNA, 561 bp, BradyrhizobiumColbertium
atgtgcgaatggaagggcggcgaggccaagtatttcgatctgtttgtcgatggcagcatcaaccgcgccgcggcgtggtcctatcctcaactgaccggaaacgtcgaggtgatcgcggggcgcgtggcgttctggaaggacgtgaccgtcggctggaatggcccggggcccgcgccaaccccgccgcgcatagaggccaagacaccgaatgtggcaaaggcgctcggcgcctctgatgtcatctggcgaccgtcgggccttcctgattttgcttttccgggtggtgcggcgacgttcgaaggctatttaatcccctcgcttcgcctcctcgtcgacgtactcgccacgccgccggagcacgatcgtgccgaacgcatcgcagacgcgcgggctagaggtgagaccgtttccgcctggaaccgagcgcatctcgacgatcgatatggctacatcgctgtctggggctccgccacgccgaacgcgcaagcgcttgaggttatcagtcaaggcggagtgctgctcgcgctcgacgacgagtcgatcgtgcttgggatgacgtaa

SEQ ID NO: 4430 - DNA, 126 bp, BradyrhizobiumColbertium
atgttcaaagctatttggaacagcgccgaattagcctgcagcgatgacgtgatcgaggtggaaggtcggctctatttcccaaccaaatcgctcaggcatgaccttctcgcggcagcacccgattga

SEQ ID NO: 4431 - DNA, 906 bp, BradyrhizobiumColbertium
ttggaccgcttcgacgccatccgcaccttgctggccgccgtggatggcgggagcctttccgccgcgtcgcggtcgctgggcatgccgctgccaacggtgagccggaaggtgtcggagctcgaaagccatctcggtacccagatggtcgtccggaccagtcgcaagcttttgctgaccgatgcgggccaggcctttgtcgaggcgagccgccgaatcctcgccgagctggacgaggcggagcgcgccgcctccggcgagtatcagacgccgcggggcgacctgctcgtcaccgcgccgatcgcgttcggcaagctgcacatcctgccggtggtgctcgaattccttcgcgcctatcccgaggtgaacgtgcgcctcgtgctggccgacacagttgtcgacctgatcgacaaccatgtcgatgtcgcggcgcggctcgggcgcctccccgatagcggcctcatcgccctgcgtgtcggagaggtgcgctggatcacggtcgccagccccgactacctggcacttcgcggcgagccagcagtccctatggatctcgccaaccatgattgcctggcttttgagggcctgcagaccttgcgcacttggaccttcgcggccggccccggcaatggcccggtcgcaatccggccgcggctgggtgtcaataccgccgatgcgctgattgaggcagccgcctcggggctcggcgtggcgcgcatgacttcctatcaggcggccggtgcgctccgtgaagggcgactggtggagatcctgcgcgcgtatgtcggcgagccaatgccggtccatctggtccataccggcccgccgctcttgccgttgaagctgcgcgcctttttggactttgcgacaccgaggctgcgcgaatctttgcggttgctaccgacatag

SEQ ID NO: 4432 - DNA, 552 bp, BradyrhizobiumColbertium
atgccccgcatcccgacccccgccgatgttaccgccgcgccggaagctgcgcagccgctgctgaacgccgtcaacgcccagctcggcgtcgtgccgaacatgttccgcctgatcgccaacagcccgcagacgctcgagggttttctcggcctgtcgggcgcgctcggcaagggcgggctgaccgtcgccacccgcaaccggatcgcgctcgccgtcgccgaggctaatggctgcggctattgcctgtcggcgcacagctatctcggcaagaacctcgccaagctcgacgacgccgagatgagcgccaaccgctcgggcgcgtcgaacgaccccaaggcggatgccgctgtccgcttcgccgtgaagctggtccgcgagcgcggccatgtcggcgaggccgatgtctcggcggtgaaggcggccggctacagcgacggtcaggtgctggagatcatcgcgcacgtcgcgctgaataccttcaccaactacgtcaacgaagcgctgaagaccgacatcgacttcccggccgtcgaggctcgcaaggccgcctga

SEQ ID NO: 4433 - DNA, 852 bp, BradyrhizobiumColbertium
atgaccacgtacaaattcgtcaccgttagcggccgccaagtcttctaccgcgaggccggcgatcccgcggcgcagaccatcgtgctgctgcacggctttcccaccagcagccacatgttccgcgacctgatcccgctgctcgccgatcgcttccatgtgatcgcgcccgactacatcggcttcggccagtcggacgcgccgtcggtcggcgatttcgattacagcttcgacaatctgaccgcccatgtcgcggggctgatcgagcagctagggctgacttcgtacatcctctacatgcaggattatggtggcccggtcggtttccgcctgttcacgcaaggacccgacaaggtcgccggcttcgtcatccagaacaccaacgcctacatggccggtatcggcgagatgcccgcgcagatcttcctgccgctgtgggacaagcgcgacgcgaacagcgaggccgccgcgcgcgggttcctcgccgccgagacgaccaagttccagtatcaggtcggcgcgaagaatgtcgacgcgatcagccccgacaactggacgcacgaccagacgctgctcgatcgccccggccatgacgcggcgcacctcaacctgctcgagaactacaagaccaacgttgcgctctacgacagctggcatgccgcgttccgccagcatcagccgaagacgctgatcgtgtggggcaagaacgacccgttcttcatccccgccggggccgcggcgtacctgaccgacctaccgcaggcgaggctggtctggctcgatgccggtcacttcgtcctcgatgagaacgcagccgaggtcgcggccgagatcaaggcgaccttcgccgcctga

SEQ ID NO: 4434 - DNA, 864 bp, BradyrhizobiumColbertium
atgtccaagaccattctgatcaccggcgccgcttccggcttcggccgcgacaccgccgagacgctcgccgccgccggccacattgtctacgcctcgatgcgcgacgtcggagggcgcaatgccgaagccgcggcaacgctgcgcggcaagggcatcaaggtcgtcgagctcgacgtcgccgacgacgcctcggtcgagcgcggcgtggcgcaggtgctggccgacaccggccatatcgacgtgctcgtcaacaatgctggactcgcctcggcgggcgtctcggaggccttcaccgccgaccaggcaaaggtgctgttcatcaccaacgtcgtcggcgtcatccgcaccaccaaggccgtgctgccggcgatgcgggcggccagggacggcctgatcgtcaacatcggctcgatcctgggtcgcgtgacctttcccttcttcggcatctatggcgcgaccaagttcgcggtcgaggcgctcagcgacagctatcgctacgaactatcgcagctcggcgtcgacgtcgcgctggtgcagccgagcgcctacccgaccaatatgtacgcctcgatccagcagcccgccgacgccgccgtgggcgaggcgtacggcgagattggtgcgattccgggcaagatgttcgagacgttcatggggctcttccagagccagaacgcgccgaacccgcacgacgtcgcggaggcgatcgccacgctggtcgcgacgccgcgcggcagccgcccggcgcgcacggtggttggccagtcgttcggcgccgatgccgtcaacgacgcgacggcaccggtgcagcacggcgttgtcgaggcgctcggcctcggctcgctggcgacgatcgccgcctga

SEQ ID NO: 4435 - DNA, 396 bp, BradyrhizobiumColbertium
atgaccgcaccgctcgatctcgtccgcgctttctattccgcaattgctggcggcgacgtccccggtattgtcgcgctgcttcatcccgacctcgaatggaccgaggccgagggctttccctattacagcggcacctggcgtcagccgggggacgtggtggaaaagctgctggtgccgctgatgcgcgactgggacgatttcgcggcggttgccgacgatttcatcgtcgagggcgatcgcgtggttagcatcggcgcctattcgggcgtggccaaggcgaccggtagggcgatgcgtgctgccttcgcgcatgtctggcgcgtcgccgacggcaagctgaagcgcttcgacatgtataccgacacgctgctcgtcgaccgggcgctgaagccgtga

SEQ ID NO: 4436 - DNA, 345 bp, BradyrhizobiumColbertium
atgtgcgaacatgtggtcagcgcgacgctggcacggttcggccggatcgacgcgctggtcaacatcgccggggcggtgccgcagggcgacctgttccaccccagcgacagcgactgggcggagggactgtcgctcaagttcgacgctgcccgccggctgacgctctatgcgtgggatgcgacctacgcttctgtgaccaccacccgcccgtcgggctacgtggcccgccccgattaccgcgtcgacttgctgcgccgtcccaaccgggtgacggcgagcgtcggcggccgcgagattgcgtccagcgaccgcgcgatcctggtcgacgaaaggatcatgcgctga

SEQ ID NO: 4437 - DNA, 150 bp, BradyrhizobiumColbertium
atgggcgcgccctccagcgacgtcgctttcacgccggccgtcaaggcagtccaagagcgtcgcggctcgcgtgatctctatcggccgatggaggagcgcggcggcttccgcaccgcgatcgacgagcggatgctggaggcgctgagctaa

SEQ ID NO: 4438 - DNA, 276 bp, BradyrhizobiumColbertium
atggactatgcccagcgtcggcgggtgaagatctgtggccgcgcgcgcgtcgtcgaaggcgacgtggcgctcaacgcgctgctgatgcccaaaggctacgaggcgcgggctgaggccacgatcctgttcgagatcgcggcctgggatctcaattgcccgcagcacatcccgcagaaattcgatgccgaggacgtcgccgttgcgctcggcgcgcgcgacgcgcggattgcggagcttgaagccgaactcgccagcctgaaaggacccaccgcatga

SEQ ID NO: 4439 - DNA, 447 bp, BradyrhizobiumColbertium
atgagccgtcgaccaccgccgcagttcaccgacgccaccgctgccgagaaggcgcggctcgccgaggacgcttggaacagccgcgatccgggacgggtagcgctcgcgtatacggaggacagccgctggcggaaccgcgccgagtttattacgggccgcgcagagatcaaagcattcctgcggcgcaaatgggcacgcgagctcgactaccgactgatcaaggaagtgtggacgcacgcgggcaaccgcatcgcggtgcgcttcgcctatgaatattgtgacgacagcggcagctggttccgcgcctatggcaacgcgaattgggagttcagcgcggatgggctgatggctcgggtattgccagcatcaacgagcatccgatcgccgaggtggaccgcatttttcggtggtcgctcggtcggcggcctgatgatcatcccggtctaa

SEQ ID NO: 4440 - DNA, 489 bp, BradyrhizobiumColbertium
gtggtgcggcaggtcttatcagtcgcccaatctggcgagctcgtcgatggcggcgtctgggccaacaaccccatcggcgttgcgtctgttgaagccattggaaagctcaactggcctgcggacaagctgaagattctgagcatcggcacgatcaacgacgtgaaggctccaccacggcggaaaggcaagctgcccatggtcacgtcgatggcgcgcctgttcatggcgggccagtctcacagcgcgatcggcacggccaagatcgtgaccggcgatgttcatcaacggcaagcgatctggcgaatcgaccacaccgcggccctcggccgctacacgctggacaacgccggtcgtattgccgagatgaagaaccgcggcttcaccgaggcccgcgaacaactcccgattctgcggcgccacttcttcgccgagcaggcgccagcgttcaggccgttccattctcaagccggcgagcgacggtgccgataa

SEQ ID NO: 4441 - DNA, 1230 bp, BradyrhizobiumColbertium
atgaccgacgttcgcacagcagatgtcggcatcgaattcctcgaacggctgctggaccggaccgagcgcaaccctgatcgctcaaggcccgcttccggagctccaaattacgacaagcttttgaccgcgcagcaattgagccgattccatgatcagatggtcgcggccgagaggttcggcgctatcgaggtgagatgggacaagagggaacggagccacctaatcgagcgcatcaccgtctgcgatcctgagctgctcgccaggcatctcggccgcccgacggctccgatgaccgcattgcgcgtgagggacgaattgcttccggtcgcggcgaccggagaaccgtgggtcaccaccctgttggacgacatgactgctaggtgggcccgcaacgaggcagcttaccgcctgacagccggccaaacagacgcggccaaggagttcttcgcgctgctggcgtctatctcgcgggaggaggctagaggattggacgcgcgcaccttctcaaacaaggcgacgaatgacacgaaggcgttcgatcggcacgcgtcgcggctcgctgccgttctcggcgtccgaatcggtcagccgggcgcggcggccgatgtggtctgggcgcacatcggactggagcgattcagtcatcctgtaaatctgagaggtcctgttgccgtggaaggggccggcgaacgcctggtcgacggccgcgccaagccgttcgcctcgatccatccggagatgatctcgcaattgtcggtgcttgagacgccaacggccatcctgacgatcgagaactacgcaagcttcaatcggcaagtccgcgagatcgaggacggcagcctggtcgtgtacaccgggggctttccggcggctggagtcgtcgacctcctggccaagatcctgacggtcgtgccggccgaggtgccgttcctccactggggtgacgtggacgccggcggcgtgcgcatcttcaggtatcttgaggaaaatctaccgcgcgggccgcggccccacctgatgaccaaggaactggccgagaaatcaggtcagccggcagatgcggactccagcctggcctcggtcgcaaggtccgacagtgcaatccgcgagctggcggactggttggcgttcgggtcgggcgtgcgccacctggagcaggaggctctagatcccgagtcgctctcgattacgactggtctgccttggtcaggtggccgggtcgagggctga

SEQ ID NO: 4442 - DNA, 3501 bp, BradyrhizobiumColbertium
gtgatcgagctccggcgcatcattctggtcgactggtacctgtttcgggcgcagcaggtcgacatgcgcggcatgacggccatcatcggcccgaacggcgccggaaaatcggcgatcatcgacgccgtccagaccgtgctctccggtgcgagcatggccagcatccggttcaatccgagcgctcagagcaacgtcaggagcaagcggaccttgcgcgactactgcctcggcgtggtctcgttggacgagaagggcgaacggtcggagccgacccggcagcatgcctacacctacatcgtcctggtcttcgaggatctggacgatggctcggcggtcagtctcggcgtgaccttctcggcggcggcctcaagaagtgacgaatcttgcgaggcacggttcatcgccaagggcgcggtgaccaaggaggacattctggtgtccgtcggggacgatgaagttgagacattgcactggcatgcggtgcgcaacgcgctacgggcacgtggtgtcgaggtcgacgacgcgttctcgagcgcgaccgatttcgtggcggaatcgctcagggccttgtcgccggcgggattcccgctcgacccgcgacgcttccaaaaggcgttccggaatgccctgctgctgaagcccgtggacaatcccacggattttgtccgcaactacgttctcgacgtgcagcccctccaggtcgacagactgcgtcgcggtatcgagcactggcgttcgctgacgcgccgcatcgaggaattgaaggcgcagagcgcaagcctagccgggattctccgcatcgtggcccgcgctatcgaaaacgagagggtcatcgtcgtcacaagttggcagattgcccgtttggagtgggaaaaattcaggcgggaagccaggcggcaggaaaaaggtctgacgcagctccggagcgccgcacgcgatgccgagatagaagcgacgggcgccgccgccaggcacgccatgcttgaagctgaccacaagacggtcgaactttccatcaggaccagcgatggcgagcaacttgcccagatgtacgagtcggaccggaatctgactctcggacagcggggcaatgcgatgttgccggtcaaagagatcgaaggtctcgtcggttcgatcaggaaagccgtcgatctcaatctgctcgttggccgggacgacctcctgcacgcgctgctggccgcggtagtcgtcgcccggggaagggcctcgctttctgaatgggacaaggcgcttccggaagactggaaggatagcgcgtcccacctggatgcggcccttatggcgatcgatcaggatcggttcgaggcggcccgaaagacattttccgatgctcacttccaagctcggcttgcgacgcagagtctgcagaatcggatcgacctgatcgacagcaacctgaagcggatggaccagggcttgagcccgatcggagcgggcacccgggacctcatcagacagctcgagtcccacggcatcgaagcgacgcctctgtgcgaagtcgtcgagatccgggatgacaagtggcggatggcggccgaggcggttcttggccgctcgcgcgaagcattgatcgtcgaaccgtcgcgggcagtgcgtgccctggagatcttccgcgagggtggcgagcactccttcagagacgccgaggtcatcaacacgaccaagactgacaacactcggccggctgaaaagggctctctggcgcagatcatctccacggacaaccgtcatgccagagccttcctaaactataggatcggccacctcatgctggtcgaggccatggacaggatggtggccgcggagaacgccgttactcccgacctcatgatgcagtccggccggacggtccggcgactacagaagccgcgctacctgaagctcgggcgcgccacgcaggaccagatgcgacagcaactccaggccgaacggcaacagttgctgcagcagcttgcggaatccgcgggtgcagtccggcggtcggaggatgaagctcgcctgttcgaaaccatgttcgcgcagtttcaggcgatccgcagcgccaatctgacctgtgtcgattgcggcgccgctttggttgccttcgatcgcaagctcgacgagatcgggaagaacatcgaggacgccaggcggaatcgcgacccaaagctcgtttccgaactggagcgcctcggcgccgaggtcaagatcgcgagtcgcctcaagaccgagaagcaggatgcatcgagccgcgctcagagcgctagagaccgagccgagggcgcatacgaagattacatccagaagaaccgcgacaccgcttgtgcgggcaggcgcgaccgtgcgcggcagatgcgtgaaggatttccgcaatcgacggccatgcgcgaatataggtctgcggtggccgcaatggccactgagacgatcccggatcgcatagccggcctgagcgcggacagggaggcccgttctacgggccggcgctccagtctgatgcgcgaaatgaccaacacgatgaacaagcactgtcaggacttccacgtcgttatgcccttcaccgccgaagaggcgacgctggcggccgtggaccagtgggcggcggccgataaggaacgcctcgatgcgcacgagttggtccagtacgaagagcagtgccggaatgccgcgaccgaaatgacctcggccttccgcgacgatctcctccatcggctcgatgacgcgttcatgggtatcaagaacaccctcaacgagctcaaccgccacttgaaggatcgtcagttccacgggcgggactactattcgttcaaggcgctcgatgcgcccacccacgtcgacctgatcgatctcgtgggggaatccagaaagcccgagttcaatctgccgctcttcggggaccgcagcgaggacgcgaacactcccatgatgcgcgccgtgcgccagatcgaggagatcctggcgaatccggaggcgcggacggaagagattgaggatccccgcaagtatttcaacttcgagctctacatccaggatgccaacggcaagatccgctcatcgctgacgagccgcgctgggacggggtccggcggggaagggcaattgccgttctacatcgccatcggtgcttcgctggccgccacgtaccagaaccggcgcacgggcgagagtgggctttcgctcgccatcttcgacgaggccttcaatcgcctggacaccaaggccatcggccagtgttcggagttcatgcgggacctggggctccaggtcatgctggctactccagacgagaagcgccacgtgttcatggaggtggtcgacaccgtggtgaacgtgaaccgtttaggtaatcaggtcatgatcgacacggagttcctgaccaacaaggctcgcgaggcgatcgttgccgccgatccgtaccgcaagggctttgacgccttcaagtcagatctgatcgcagccgagaaagctgcggccgtcccgcaggaccaggcggcggaatga

SEQ ID NO: 4443 - DNA, 1269 bp, BradyrhizobiumColbertium
gtgacgtatcgatttgtccatgccgcagacattcatctcgattcaccgctgcgctcgcttgcgctgcggcattccgagttggctgagctgatcggtaacgccacccggcgcgccttcgtccgggtgatcgatctgtgcctggacgagcaggtcgacgcgctgctgatcgccggcgatctctacgatggcgatcagacctcgatgaaaacggcccgcttcctggccgagcagctccggcgcctggaccaggctggcattcgtgtcttcatcatccgcggcaaccacgacgcgctgtcgaagatcaccaaggaattggtgctgccggattccgtgaagatcttcggcgggcgaggggaggctatcgcgatcgatcgcgcgcccggacgcgtccccgtcgtcgtccatggcctgagctttgctcaacctcatgccccggaaagcctcctggggcgctatcggccggtcgtggatggggcggtcaatattggcatcatgcacacgagcctcggcggcgctcccggccatgacctctacgccccgtgcagcccggccgatctacaggcgtcaggatttcattattgggcgctcggccacgttcacaagcgctcggcgaccgaaggcacctgcgcgatcgtgatgcccggcatgccgcaggggcgtgacatcaacgaagccgggccgaaatccgtgacgctcgtcaccatctcggacgatcgctcgatccatcttgaggagcgcgtcacaagtgtcgcgcagttcgaacgcgtgtccgtcgatgccacgggaatggacgattggcgcgagctggtgtccgcagtgacgcgcgcgctcgagaaccaacgggctgctgcccgggcagagcaccttgtcgctcgcgtgcgagtgactggtgcgacgccgctggcatggcgcattcgacgcgacggcgacttgctgaaaaccgaggccgatgaccgggcttcggtgatcggcagctgctgggtcgagcagctcgaaatcgcatgccgtcccggagaacagcggagcgagacatcgggcgacccgctcagggagctgcatcgcttgatcgaagacgacgtcctcgattccgcggcctttcagaatgaacttgcaggcatcgccgaagagatcagggctcagttgccgcaggaatgtcgcgacattttcggcaaggacgaggcgtctttccgggaggcggtcgcccagctggcgcgcgacggcgcagagggcgtcatggcacgtcttgaagctccgggcgaaggagcgtga

SEQ ID NO: 4444 - DNA, 1737 bp, BradyrhizobiumColbertium
gtggcagcgctgctgcgctatcgcccaagcgccgtgtcgttcatcgtccacgcaacgccgccggcggcccgctacatcaccttcgatattgcgaagcgaagcggcggtgtccgcaccatcgatgcgccgaacgaccgtctgaaagggctgcaacgcagcctttcgaaactgctttatgaatgcctgcgcgagatcgaagcaaaagatcctcgccgcaacaaactctcccatgcgtttcgtcccggcgcttcgatcatcagcaacgctaagacgcatcaccggcgtcgctacgtgctgaaccttgacctgaaggacttttttccggctttcaacttcggccgcgttcgcggcttctttctgaagagcgaacactttcgtcttgcggagccggtagcaacgcttttggctcagatcgcatgcaaggacggaaagctgccgcagggcagcccgtgctcgccggtcatcactgagttgatgacgcactttctcgatatccggctggtgaagctggcggcgaggcataaatgcacttacacgcgctacgcggatgacatcacaatctccacgaaccagcgcgagttcccatcggcgctagccgaattggacggggccgagtggaagctcggcgaggagcttgtgtcgcgcatcaatgacgccggctttgaggtgaatgacgccaagacgcgcatgcagcttcgcggaagtcggcagatggtgacagggcttaccgtcaacgagaaggccaatgtagcgcagacatactacaagcgggttcgcgcgacagcgcatcgcttcctgacaacgggggcatatgaactcaacggggtggcttgcaactccgtgccgcgcctggaaggcatgatcaatcacatctatcatgtgcgcgagcggcagatcgacattgcgatcgcgaacgaaggcaacaaagagaagcagcataagctgcacgccgagcgcacgaagatgaagaatgagtggccctcggcgatccgcgtcgtctactacgaactcattttcttcaaaagcttcatcaacccgccgcggccgttgatcatctgcgaagggccaaccgatcctgtgtacctgaagagcgccatccggcggcttgctgccgcgcacccacttcttgcgtcagtcgtgggaggcaagcctgagctgagggtgaattttttcaagtattctgatcaggcgcgtgacttccttcagctgcgagggggctccggcgatttgctgcgctttctgatttcctggaaggacgcctttaaccgctacgagtttcgcccggccgagcatccggtcatcgttctcatcgacaacgatgatggggcgaaagagattttcagctacctcaacaacaaaaagaactatggcctagatatcgcgtgggacaagcatgacctgtttttccatctccacggacccctctatctggtgaagacgccggcgctcggcgcgaacctcatgtcttgccccgaggatttctttgaacctgccgttctggcggaaaagctcgacggcaaatccttcaacaaggaaaacaagatcaatcccgcgaccgagtatggaaaagctgtgttcgcaacgcgggtcgtgaggccaagggccgggtcgatcaatttcgccggtttcaccccattgctcgaacggatcgaggccgtgatccgggactatgcggcacgaaaggccgcggcggcggctccagtgccagcgatcgcagccgccgctcccacgccgtga

SEQ ID NO: 4445 - DNA, 1149 bp, BradyrhizobiumColbertium
gtgattggccagaataggctggtcatcgcggcagccggctccggcaagaccacctacctcgtcgaagaggcacttaagattagggaccagcgggtcctgatcaccacctacaccgaatccaacgaggcggagatccgccagaaatttttcgacgtcgttggccatgttccgtcgaacgtggtgatcatgacctggttcagtctcttgattacccatggcgtgaagccgtttcagggtgctgtgtttgaatttctggtcaaaggcatggcattggtccaagcccagtcggccattcgctacaccaacagccggggcatcgcggtgacctggcccgaaggagacatcgcaaaccacttttttgatcggcgtggacaggtcttctcggacaagctgtccaagttggtgatccgatgcaacgagcagagcggcggcgcggtcgtcgacaggctgagccgggtgttccctcacgttttcatcgacgaagtccaggacctcgctggctatgatctcgacatcatcgaagcgctggcgcgaagcccggtccgcctgctgatggttggcgatcctcggcaggtgacctacctgacccataacgagcgccgcttcgcaaaatatgccgacggcggcatcgcagactttttacggtcgctgcccaaaaagctgaagatcgagattgacgaggtaagcctgaaccgatcgcaccgtaacagcgaggccatctgtgcggtgtcgtcacggctattccccgggtttgctgccactcaggcttgcgagtgtgcctcgtgccgtcgccctctgccggccagcgctggcgtattcatcttgaggatcgcagactatgatcattatctggcgaccgtcagacccgtgcagctgcgcgacaaggtcaccagcaggggcgtcgacccgtcgtcgcaggcggtgaactttggagaatccaagggacgtggattcgaccacgtcgtgatcctgccaacggatccgatgaagcaatggcttgccgatccggacagcaagctggcggcacaaagccgagcaaagttttatgttgcgctcacccgcgcgcgttacagcgtagctattgcgatggattggagatcggcctcgctgcccgcgggcttttcactctaccaagtgccagcaatctga

SEQ ID NO: 4446 - DNA, 1635 bp, BradyrhizobiumColbertium
atgaagatcgccaaggtaaagatcaccaacttcaagtgctatgaggagacgttttctctcgcgctcaacgatgccctgaacgtcatcgtcggcggcaacgagtccggaaagaccacgatcctggaggcgatccacttgggcttgaccgggatgctaaacggccgcccgctcaaaaacgatctgaccagctacctctttaatttggccgcgcagcagaagtacgtcgccagcctgaagaccgggtcacccttaccgccgccggcgatcaccattgagctgttcttctcgggagactcgagcgagttggccgagctcgagggcgacgggaattccgagaagattaaggcaagcggcgtgatatatcgcgtcgagttcgacgaggagaattacaagggtccctacgaagcgctcgtggcggccggggagctgacctccattcccgtagaatactatgctgcgaccatgcggtcgttcgcgcgcaaggggatcacctcgcgcaacattccgatcaagtccgcgctgattgattcatccagcgcccggcttcaaaacgggtccgacgtctatgtctcgcggatcatccgtgacgtgctggaggagaccgagcgcgcttcgatctcgcaggcgcaccgaaagctgaaggaggctttcgtcgaggacaagaacctgaagctgatcaacgatcggattactaaggccgccaaaattagtcagaagtccgtctccatctctgtcgatctgtcgtcccagaccgcctgggaaagcagtctgatgacctacatcgacttcatccctttccagtacatcggcaagggtgagcagtgcgtgatcaaaactaagctcgccctcagcaccaagaaaaacgccgaggccacggcaatcctgctggaggagccggaaaaccatctgtcgcacgctcggctcaacgaattgatcgctgacctaactgcccagcacggcgagaagcagatcatcatctcgacccacagcagcttcgtggccaacaagctcggcctcgaccatctgatcgtgctgcgcgagggcaaggtagtccggatttcggagctgcaggccagcgacttcttcaagaaacttgcagggtacgacaccttgcgcctggctttggccaagaaggcgatcctggtggaaggcgactccgacgaactggtggtccagcgggcctacatggacgccaatggcgggcgcttgcctattcaggacgggattgacgtcatctcggtcggtacggccttcctgcgcttcctcgagctagcgctggcgttgaaaatcccggcggccgtggtgaccgacaacgacggcgacaccgctgcagtgcagaagaagtacgccgcgttcgatggccaaccgtcgatcaggatttgcttcgaccccgacgtcgacacgggtgggctgacggtcaaagaaaagcccttcaattacaacacgcttgagccaaaaatcttgaaggcgaacggtcgagaagccttaaacaagatgctcgggaccgctgccaagacagacgatgaactccaccttcatatgcgcgccaacaaaaccgattgcgcactggccatcttcagttcgaaaacggcgattacctatcctgactacattacccgggcgatcgcgccgtga

SEQ ID NO: 4447 - DNA, 663 bp, BradyrhizobiumColbertium
atgggacggcgggcgcgcgcaaagacggatctcgacctcgacctcgcggacctgccgcctgaactgcgttggcgcgaatggatgggccgcgtcgaggcggtgatcttcgcctcgccggcgccggtgacgcgcgaggtgctgtcgcgcgtcgtcggccgcgattgcaatctcgacctaatcattgacgacatccaagacgagctgcgcggccggccctacgagctcgtttccgtcgccggcggctggcaataccgcacccgaaagaatttcggcgataccatccggacggcgatcggcggcggcgccgacaagtccctgtcgcaggccgagaacctgatcctcgcctgcatcgcctactaccagccgatcacccgcagcgagctgtcgcagttcttcggcaaggaggtcagtcgcgacaccatcggccacctgcgcggcctcggcttcatcgcggccggacctcgcagcccgcagccgggcgcgccctacacctatgtgacgaccaacggcttcctgtcgcacttcggcttcaacacgctacgcgacctgccggacatggaagcgcttgaggacgccggcctgctcagcaaggaaaagttgttggcgggggatattcccatcgctcccggcggactcgttgatgaggatgatcgcctagattga

SEQ ID NO: 4448 - DNA, 840 bp, BradyrhizobiumColbertium
atgttttcggccggcgccgcgctcgccgcgatccatccgatcgcgcgcagcgagcatccattgggatcattgtggcggcatcggctgtcgctgtcgaacgccgcggtgctggcccggcacggcggacgcaccgaggacgaggcggcgctgcgcgacgcctggtatctgcgccgcgacggtgacgatccgggcccgggcgggcgcatcctgaaagcctggcggcatctcggcgagcgcagcgccatggcgtcgaaagactggaccctgcggttgtcggcgctgttcgaggtgcgcttcagcgacgcgctcgaggatgtcgtcgcccaggccgacaagctgatgaccgggcaggggaatgccgtcgcggccgccgcagagattgcggcggccagcctgcgcttcgtgccgcaaagcgagccgcttgccctgtggctcgccgacatgatgctcgcccagcgcctgaaatggccgatggcggtgccgctgatcgcgagccagatccgccgcggcgatctgcgcgtggctgtgaaatccaacgtggcggatgaagcctggccgagggcctgcgcccaggcctatgcgcgtgcggctgcaagcgcggcggatctctatgtcgagctggcgcggcgcgccgatcgcctgctggcggcggcgccgaagctgcgcggcaaggacgccgacaccatggtggcgatcctgataatggaggatgcgcagcccgcgggcgccggcaagaccgcgagcgaccgcagcatgcgccgcctgttcgagcgcctggtggcgctcggcgccgtccgcgagctgaccggccggccgaccttccgattgtacgggctctga

SEQ ID NO: 4449 - DNA, 855 bp, BradyrhizobiumColbertium
atgtttccgcccgatccgcaggtggtcggcctctacatcaccgcatgtgcgtccggaaaggcaacaggcgacaagaagccgaactccgtgtcgacgatcgagcgccggctctcctcgctgacgtggaattatgcgcaacgcggccaggcgctggacaggaaggatcgccacatcgccacggtcatggccggcatccgcaacacccacgcctcccctccccttcagaaggaagccatcctcccggaagacctgatcgcgatgctggagaccttcgaccgcggcacgctacgcggtctgcgcgatcgcgccatgctgctgctgggctttgctggcggtctgcgccgctcagaaatcgtcggtctcgacgttgccagggatcagaccgaggacggacgcggttgggtcgaggctttcgacaagggcgttctggtgacgctacgcggcaaaaccggctggcgcgaggttgaggtcggtcgcggctcgtctgatgccacctgcccggtcgttgctctgcagacttggctgaaactcgctcgcatcgcccatggccccctgttccggcgcgtcaccggccaaggcaaggcggtgggctctgagcggctgaacgaccaggaggtggcacggctggtcaaacgcgtcgcattggccgctggcgtccggggcgacctgtcggaaggcgaacgggagcaaaagttcgcggggcattcgctgcgcgctggcctcgcgtcctcggccgaggtcgacgaacgctacgtgcagaaacagctcggccacgcatccgccgagatgactcgcaaataccagcgccggcgagatcgcttccgggtcaatctcaccaaggcgagcgggctgtag

SEQ ID NO: 4450 - DNA, 195 bp, BradyrhizobiumColbertium
atggtaagcgagcttgcctttgacggcttcccgaagtttatctggtccgtggacatggaaggtgaagtttatgaggccaagacggatcctatgaccacaggagtctatcacggctatcgcctcgaagaggaggacgatatgcgtgacaacgtgaaagcgatttggaagcagagatgccagccagctggacgatag

SEQ ID NO: 4451 - DNA, 192 bp, BradyrhizobiumColbertium
gtgaacctcatccagcgcaaaagaaatatcaggcgagcctcggcgatcgtcaattacggcctgatcaacgcctgcgatctcagcaagcttgcggctggaaattggcttttcgcccaaccgctcctgttcgcgcagcgcacgagccgccgatgcaccaactcggtaggctggtatctgcccaccgatacgtaa

SEQ ID NO: 4452 - DNA, 330 bp, BradyrhizobiumColbertium
gtgctgcaaattctgaggacgtcgaaccgcaacatcgaagggagcgcggcttcactcgcagaagccatcgctgaaattcgggattgcaggccgattctgcaatccatcgctcgacatctcgagtcggtcccgcggggtgtcgagcgcacgatcgatgccttgccgaccaatgaacgccggcgggcgatcgaggcgcagcgatccgcgagcgcgtttgcagctttctcaactgcgacaattgatcagcaggatcgcggcggtagacatgacatggccaatgtctcggacgcgcgcccatctcgtcactcacatggcgaagcggccatttga

SEQ ID NO: 4453 - DNA, 2097 bp, BradyrhizobiumColbertium
atgaatcttcgtatcggtacgatcctgccgctcatcatctccggactcacggtaatagccgtcgcttcctccggattggccgcctacaaagcattcaaccgccgacaagaggcccagaccttcctcgaggtgaaccaggtctcccggatgctgctgcggagcgccggtgattgggctgtcgagcgagggctcaccaatacccgactcagatcgcctgatgcggcgtcgagcgagtccctggcggagatcgtcaatgcacgcgcgactgccgaccaggcattccgggatgccgaacagcgcctgcgcgcctttcccgccatgaaggcggcggaacaaagcctcgacgaagcgcaagccgctttccagacctttgaaagtctccgcgcgcgggtgcaagacaatcttgctagacccgcatcaggacggatgccggatgtggtcgagagcttcatgccgaccatcacgagcctgatcgacgtggccgcgacccgattgcggctcacgctcgaaagcctcaccgcgccaccaacttcggcgctggcacaactggtaggcttacgccacatggccgctcaaatggcggaaaatgccggcagggaacgcggtttagtcggcggcatcattggggcacgcagtaagttcacagtcgataaccgacgaatcgcggccaccgcgcgcggtcagatcgaacttgcttggcagaccatcgcagcggttcggcagcgtcctgatctttcggcggaaatgatccaggcgatcgatggcgtggaaaagaactattttggcggatatagctccttgcgcgacgccgtcttcgccgcgggcgactccggcgagtacaaagtcgccgccagcgactatttcacccaggcgacggctgcggtccgatccattcttcggcttgctgatgcgatcggcaatgccgcggaccaggaagcagcaagagaggctgccgacagcacctcaaacctgatcgtcgacgggacgatcctgcttgccagcatcgttctcaccctgatcagtttctggatcgccttccgccggatcgtccggccactctccggattgacaggcgcgatggaagaacttgcgcgcggggatttcgccgtgatcttgccggggctcggtcggaaggatgaaattggcgaaatggcgcaagcggtcgaggcgttcaagatcaaggccgagtcaaaggcgcgcgaggaagcggaagccaagatcagacaagatcaggccgtcatgcagcaacgcaaggacgacatgatcaggctcgcggacgccttcgaatcggccgtaggcgagatcgtggaaaccgtttcttcggcctcgaccgagctcgaggccgccgcgggcgctctcacggcgaccgccggccacgctcaggaactgactacgatggtcgcggaagcgtcggaagaagcctgcaggaatgtgcagtcggtggcatctgcgaccgagcaactaaactcgtcggtggacgagattggccgccaggtacgggcatcggcacggctgaccagcgacaccgtcaaccaggcacgcgtgaccaatgatcgcgtcagtggcttgtccacggcagcggctcgcatcggcagcgtggtcgagttgatcagcacgatcgcgggtcagacgaatctgctcgccctgaacgccaccatcgaggccgcgcgcgccggcgaggccggccgcggctttgccgtggtcgcctccgaagtcaaggcactggccgagcagacggcaaaagcaaccgatgagatcagtcaacagatcagcagcatccaggacgccacgggcgaggcggtccgtgcgattcaggagatcagcggcaacatcgagaaactctcggggacatcgtcggtgatcgccgcggctgtggagcagcagggagccgcaactcaggaaatatcccgcaatatccaggaggcggcagagggcacccaccaagtgtcggtaacgatctctgacgtccggcatggggcgagcgagaccggttcggcttcgtcgcagttgctcgcggcggcgcaatcgttgtcgaccgatagcaatcgcctgaagctggaggtgaggaagtttctcgagacggtccgcgcagcgtag

SEQ ID NO: 4454 - DNA, 255 bp, BradyrhizobiumColbertium
atgacgttccctccgcagcatcggaccaagctgcactcgaccaacccgatcgagcgcctcaacggcgagatcaagcggcgcattgagatcatcagcatcttacccggtgaggacgccatcgtgcgcctgatcgacgcgatcctgcttgagcagaatgaggagtgggccgtccagcgcgcccgctacatgacgctggaaatcatcgcgccgttgagcgatgatcccaccgtcagccttccggcaatcgccagctga

SEQ ID NO: 4455 - DNA, 1629 bp, BradyrhizobiumColbertium
atgccgacccctttccggcccacgaaggccagcggcaacgagcagaacgtctactggatccggaagaaggtcccgaaacggtaccgcgccctggtcggcaagaccgaagtctggcggtccctgaagaccacggaccgacggaccgccaacgccaggatcgcggtcgcctccgtcgaactggagcgcgaatgggaacttctggcgctggaggcgaggcgaagaccgaaggcccccaaggtgggtttgtcgcatcaggacctgttcgcgatccagcgcgagacgcacgtccgaatccgcgacgcccacatcgccgagcccggcacgggattcgccgccctgagatggctcgccctcacggaaaacgatgatgatccgggagccgaagaggctctcgatcactgggcacgcgaggtcctgacccgtgaacttggagggtcgccggacgaggctcaggtcgaaaagctgaagccccttctcgccgaagcgaggaagggtgcctacggcgacgtcttccgcgcctcgaagggcgactacaaggagagcgcgaaactcggcgaactgcccaagacgaggacgaagcccaaggtagacatcatggaggccttcgagctctactgcagccagccacggatcaagggcggcctcgacgggccgacggccaagcgctggcggccggtcattgagcgtttcatcgaatggatcaagcaccgggacctcgcgcgggtgacgccgcaggacgcggtccgctggcgcgactacatgatctcccagggcatcgctcccaaggcggtccgcgacgtctggttggcggcgccccggtcggtggccacccacatgctcaatgcgctgcggctcgagatcaatccgtttgcggggatcaaggtcgagggcgtcaaggcctggaaggaggacgacgagagaggtttcgatccggagcaggcgctgaagattctgtcggcgaccgtcgcgacaccgtcgcacctgatgtccgccgagatgagggcggccaggcgttgggtcccctggatctgcgcctacaccggtgcacgagtcaacgaaatcacctcgcttttgccgtccgacgtccagcagattctcggccattggtgcttcgtgctgagacccgagatcacgaaaggcaagcggctgcgccgcgtgccggtccacaagcatctgctcgaccagaagttcatggtctacgtcgaagcacgccgcaagctcggcaagccgctgttctacgatcccgtccgcgcccgcggaggaaagggagccaatccccaatggcacaaggtcgccgagcggctgggagaatgggtgcgcgattcgctcaaaatcaccgacgtgcagcccaaccacggctggcgccacctctggcgcgagatcgtgcgcggcacgaagatgaagcccgagttgtgcgactacatgtgcggccacgaaagcaagagcggaaccggggctcggtacggcaaacgaaaggtgcctgtgcttgcgaaggagttggccctcttcccgagattcaaggtcccagccttgaatcggccgccgacgcctctcaagcggacgcggcgctcaccgcagcagatcgccgcgtacaaagccgaaagggcggctcggcgcacggcctcctga

SEQ ID NO: 4456 - DNA, 156 bp, BradyrhizobiumColbertium
atgaaccatctgtgtaccgacgttgtgtaccgtcggtcgtccggaaaaacgcgaaaagtcctttcagatcaaaaagacagccgatttacgggtgttttcgggactgctggcggagagggagggactctcccccgcgcgtgcgaaaatccccggtaa

SEQ ID NO: 4457 - DNA, 1278 bp, BradyrhizobiumColbertium
atggttcatgcgctcggcacgcccaaacgtcatccgcaaagcggaatctacctgttcaggaagcgcgttcccgaacggctgaaggacttcatcggcaagagcgagatcaagttctcgctgcagacgcgcgatcccgtcgtcgcgcggatccgcaacctcgaagagatggcgcggctcgcgcgcgcttggtcggaaatcggcgggtcggtcgtcgacggcacgcgacatgcggcaatctgcgtcgattgcaagacggcgggatccggggcagccgccgcggccgcgcttgccgccggcgcgctgccgcctccgtccgctccggccgcaacagccaccgcgaacacgccggtcgcactgcgcccgatcttcgaatcctacgccaaggaggccgaactcgcgccttcgaccgtgaagcgctggtcgccggtcctcgaccgcctgatcggccatcttggccacgacgacgccgcggcgatcacgcgggccgacatcgttgcgtggaaggacgcgctgctcgacggcgacatgtcgaacgtcaccgtccgcgacgtctacgtggccgcggtgaaggcgacgttgcagtacgccgtcgaccagggccggctcgccgaaaaccccgccgccggcgtcaaggtgcgcgtgcgcgaggcgccggtggagcgggacaagggcttcgacggcaaggaggccgagacgatcctgtcggcgacgctgcgcaagccctccgacaagatcagcgtcgagatggcggcggcgcggcgctgggtgccctggatctgcgcctacaccggcgcgcgggtcaacgagatcaccccgctgaccaggcgcgacttcgtcctgcgcgacggcatctggatgatccgcatccgggcggaaaacaacaaggggcgcaagtttcgggaggtgccgcttcatagccatctgatcgaacagggtctgctcgactacgtgaagacgcgcggctcgcggccactgttctacgacccgcgccgtagccgtggcggcaaggattccaatccccaccataagaaggtcggcgagcggttggcggaatgggtccgctcgctcggtatcgacgaccgcgtcgcccccaaccacggctggcgtcatcgcttctcgtcgatcgcgcgcgtggtcgcaatgccagaggacgtccgcaacattgtccagggccatgcgggcacaaaggtcgctgatcgctacggcgagacctggccgctcgtcgcgctgcgcgagatcgaaaagctgccgcggtacgcagtcgaaagggagacctaa

SEQ ID NO: 4458 - DNA, 399 bp, BradyrhizobiumColbertium
gtgcattattcgatagcgaagaaaaagcacctgccgccattcctcagcaaggcccactacggcatttcgtacaactatctctgcggctcgctcgtctgccgcgcgtatccgaatcacttcgtcggtgaccttgagatcgttatcgacgccagaaccaaggaactccaaaccaagaacaagttcgatggctatctagagacgaggctagtcggccattgcgcccatgagcattcgctttccatcacgcacggcgagtctcacctgtatcccggtctacaggcggtagactttctttcgtggagcctatttcgaaaatacgagcacggtgactcgcaatttgccgatctgatgaccaagaatcttgctcatcgcgacgactggcaatctaccaaaaaataa

SEQ ID NO: 4459 - DNA, 1563 bp, BradyrhizobiumColbertium
ttggatgctgccgccggcgcaggtagccgtcgtcaggataagcgcgaggagaagaagcgactcggccgcgacaaggccagggccgaggccgcttgggagaaatacgatcgtgaagtcgaagccagatgggcccagctcaggcaggggcggatccgcggtctctctctggtccagatccaggctttggcaggggacatctaccggcgctggctgaacggctaccatccagcacgcttccatgccggcatcagcgccggtgttgcgctaggactcatggaggaaatcgacggcgagcagcccaggcaggtcaccaagccgatcgacgatgatgcggcgctcgaaagcctccatggctaccatgtggatgccgtcttggctgcgcgaggtctgatagtgaactcgcacgcccgttggcatttgattcaagcggctcaacgcgccgccaaacacgcatgtcgcgccgctctaaagaagatcaatggtgatctccgccccgatccggacgagaatctctatccggcgtggcccgaccccgagacgacgaccctgtcgggtctttgcgcgtcctgggtacgcgcgcggccgacggccaagcccgacacacacgccgcgttcaaggcgtgcatcgacaaattcatcgccttcgtcggccacgatgaagtcgcgaaggtctcggcagacgacatacggggctggatcaggtacctgaaggaaaagcaagggctaagcgacgttcgcatcaaggacggctacttcgcggccataaagaccgtattcaactcggcgagaaaacacggactgatcagcacgaatccttgcgacacggtcaatcccgacggcgaaccgttgcctcgcacgcgggaaaaggatcttcgggacagcgaaatttacgcgatcctgaaggcgagtcttacgcccaacgcgcaggtctgcgaggacgtggcgaacacccgccgctgggttccgtggctgatcgcttatagcggcgcgagggttgccgagataacgcgattggaatcgaaacatatcatcttcgaagccggcgtatgggggatcgacatacaaagaagcaagaacggtcgtccgcgcatcgttcccgttcaccgccacctcatcgagcagggcttcctcgaattcgtccgctcgcgcgagggattgccgctcttcttcgggaaggagaagttgaaagaggcaaagcttacgatccacaagacgcgcgccgaagggctcgcggagtgggcgcgggaggtggccggcatcgagccgggtacggtggcgcccaatcacggctggcggcatcgcttcaaaaccgagtgtcgccgcgtggggatggaccgggaagtaaggctctatattcaagggcatgccttcaagatggaaggggagaaatatggtttcttcccgatcggcatcaccgcggcctggatggagttgtttccgagctacgtggttagcgggaaatcgctccacgtcgaacgtcccgccgggaacgacgtcatcgcgcgggccatcgcgctcctgcagcgggagcggactccactcgacaagccgaaggcggcttaa

SEQ ID NO: 4460 - DNA, 1677 bp, BradyrhizobiumColbertium
gtggatttggtctatctagatccaccgttcaattctaacgcgacctatagcctgctgttcaaggagcctacgggcgaggctgccaaggcgcaggcggaagcgtttagggacacttgggagtggagcgaggcggcggccgagtcctatgacgacgttatgcgcgcctccggtgatatcgcgctggcgctgaaaggcatgaagtcttacatcgggcaaaacgccgtgatggcgtacctagccatgatggcggcgcggctgttggagctacgcgatgttttgaaggatacagggtcgctttatcttcattgcgatccaacggcgagccactacctgaagatactcttagacgcgatattcgggcacgaaaatttccgcaacgaaatcgtttggaagaggacaggatcgcacaactctgcgaaacggttcggccctgttcatgacgtgatcttttattacacgaagtctgcggcagcgacttggaatacattgcggcaggattacaccgacgaatacaagaagaagttcggcaaggttgacgcggcaaccggtgaagcctttcaagacgtggcacttaccggtccaggtacgcgaacaggccctagtggcaccgcatggcgcggcttcaatccaacagagcagggccgacattggcaaccggcctcctatctctactcaaaatatgagcaggtcacaggaggcaaccttgctgatttcgatttcttagatcgcttggacgagctggatcgtgttggcctgatctactggcccaaaaatgatggctttccccgttataagcaatttttgtcggacgctcccggcgttcctctcaaggacgtttggaccgatattgacgccatcaattcgcaagcgcaggagcgactaggttatccgacgcagaaaccgctatcactacttgagcgcattatccgcgcatcatcgaatcccggcgatgttgttttggaccctttctgtggttgcggggccactgttgaggccgctgagagacttggccgtcaatggatcggcatcgatgtgacccactacgccatcaccctgattgaggcgcggcttcgcgcgaagcacgctgaagcaaaatttaaggtgtttggtcgacccgaggatttggcgggtgctcgcgatcttgcccgacgtgataagcatcaattccagtggtgggcagcttggcgcgtcggcgcgcaaacctaccgcgaagaaaagatgggcgccgaccgcggaattgatgggaacatactattcaagaatggcccttatggtgacgggcgcatcatcatctccgttaagggcggggaaaatgttggagttcaaatggtccgcgacctccgtggcgtaatcgaacgggaggaagccgaaatgggtatttttgtctgcttggcagaaccaaccgcagcaatgctcaaagaagctcgcgattccgggtatgtggcgaagtccgtgcatgggcgccttccgcgcatacagattttgacagttgaaaacatgctcgcggggcacatgccgaaaatgccaccgctgcctgtgcctgaaagaaagctcacgccttccctcaagcgcaaggacaaggatcagcttgaactgctgttgcccttcgccggcgagaagattgtcccggcaaaaggcgtcattgttgatcctcgatttgttggattagcgggctag

SEQ ID NO: 4461 - DNA, 609 bp, BradyrhizobiumColbertium
atgaactaccgactgacattatcccccgaggcggctgcggccaaggcggggttctcgaaagcaagcgcgtatcggatcgagggcgatttgcgcctgccatctcagaagaaggcgccgaggggccggcgacggtcagatccgctcgcgccctactgggacgctgagatcatcccgatcctgaaggctgcgcccggcatctgcgtgatcggcgtgctggacgaactgcgccgacggcatcccgacctcaacccgaacatccgacgcacgctggagcggcgccgcgtcggcagcatcgagcttgacgagatttggggctacgtcggcaagaagcagaagccgtcgagcgtcacgagatcggccacaagggcgatcagtacacgttcgttgcgcttggctccgcgccagtcgtgccattccagctaccgcactggcaagcgcgacagcgagaatacggacctgtttacgcaggacttgcgcgagcgcgtgcttggcgagccggagatcagcaccgatggcttcctgccgtaccagaacgccatccgcgatgccttccggggcaaggcccaccatggcgtgatcgtaaagacctacagcgtaacctgtctgtaa

SEQ ID NO: 4462 - DNA, 420 bp, BradyrhizobiumColbertium
atgaacttccaggttacggtcctgaagatcctggtggcctaccccgatggcttcgccgtcattgcagacctgaagagggacatggccatcctggcgaccagcggacgcgactgggcggaccggaccagacgcctcgcggcgcgggtcccgggtctcgacatctggtcacaagggctagttgagcgcataagcggcgggtggaggctgacttccaagggtcgggaggtgctcgagttcatggaagcccggccgtcgccggagacaatccaggtggctgcagccaacgagaccaccctgccggttgccgaacaaacgccggttcctctcctgcggcaaccctccgaccgcgccaagcgccggagagagcgctgcgaacgtcgtcgcgaggcccgcgaacgagccagggcaaacgcctcctag

SEQ ID NO: 4463 - DNA, 201 bp, BradyrhizobiumColbertium
atgttcgacacggcaacttccgcgcttttgcgcgcggtcctcgatgaagtatgcgaaagtgtctcggcccgcgagatcggcgcgcgcacgcaggtggcttcgaagattctcgaggctgccaccagaggcgaggtgtctcccgaacagcttcggcagcttggccgggaggccctgtcccacgcgcccacgatgtggcgctga

SEQ ID NO: 4464 - DNA, 585 bp, BradyrhizobiumColbertium
ttgggtcgactaatcgcgttcatcatggctcgcgaaaccggacggcaaaatctgcgcgtgatggatgcgctcagtatcgagcaaggcgaccgcatcctcgatgtcggttgtggacacggacgcagcctgaccgaattggccagccgcgcggcgaccggacgcatcgttggcgtgggtccctccgagctgatgggggagatcgcagcgcggcgtaactgcgcgcacgtggaggccgatcgtgtcagtgtagtccttgcgagcgtggagtccctgccgttccccgacgattccttcgacaaggtgctctgcgtccacgtgcgctacttctggaaggatctcgataggtgcctgagggagaccgctcgcgtcttaaagccaggcggctgtttgggattgtcgttccggaccaacgctgacttggccgctgttgcgtcgtttccgcccgagatctaccgctttccggcgctcgccgaagtcgcggcagctctcgaacgggcggatctcgatctcgccgcggcgagcgattccacgaacgagcctgtcctgctgctggcggagaaacgacgcgttcaagtcgccaaatga

SEQ ID NO: 4465 - DNA, 345 bp, BradyrhizobiumColbertium
atggagcatgtccaggctctccgtgatgcattctggcaggcgctgcaggatcgtttcggcgatcgcgtcgtgctcaatggccatgcgcatcgtttggccaacaccctcaacgtgtcattcgtcggcaagatcggcgcggatatcctggcacagctcggcgacgtcgcggcatcgacggggtcggcgtgccactcgggacggatcgagctctcgcccgttctcgccgcgatgggcgtgccggagaggatcggcaggggagcgatccgtttcagcttgggaaggaccaccacatcggacgagatcgaccatgtggtcacgcgtctggctgaaatcgtatcagcctga

SEQ ID NO: 4466 - DNA, 561 bp, BradyrhizobiumColbertium
gtgttcaccagcggcggcagcgaagcgaacaacctcgcaatcaagggcacgttcttcgcgccgaaccgccaaggggcgcacatcgtcacctcggccatcgagcatccggctgttctcgctccctgccgatttctcgagcggttcggcgcctcgactacccatgtcccggtggaccggacgggccgcgtcgatccggacaacgtgcgtcgcgctatcactccgcagacgacactgatcagcatcatgcatgccaacaacgagattggcaccatccaaccgatccaggagatcggcgagatcgcgcgggagcacggcatccctttccataccgacgcagcgcagtcggtcggcaagatctctaccaaggtaaccgaactcggcgtcgacctcttgtcgatcgctggtcacaagctttacgccccgaaaggcgtcggcgcgctctacgtgcgtggcggcctggaattggagccgttgatccacggcgccggtcatgagctgggccgccgtgccgggacggagagcgcgttgctcgccgttgggctcggggcagcggccgcgtag

SEQ ID NO: 4467 - DNA, 354 bp, BradyrhizobiumColbertium
gtgcagattctgctgatactgaatgatgcgccgtacggcaccgagcgcacctacaacggcttgcgcctggctctcgctctcgccaagagcgatccagagatcaccgtaacggtgttcttgatggccgacgcggtcgtggccgcgaagtcgggccagaagacgccggacggctactacaatgtagagcgcatgctgaagggcgttctcgcgggtaaaggacaagtcctgctttgcggcacctgcatggacgcccgcgggctcactgatgccgagatactcagtggcatgagacgcagcaccatggccgaactcgcgacggcgaccgtttccgccgacaaggtgttggtcttttga

SEQ ID NO: 4468 - DNA, 219 bp, BradyrhizobiumColbertium
atgatcttcggtccgttgttcatgatcctgtttctcgcggtcctggttgccctcgcggttagcctcgctcgctggctgggcgggccgtggccagggatatatccgccacaccaattgccacccgcccgtacaccgctcgatatcctcaaggagcgctttgcacgcggtgagatcgacaaggcggaattcgaggatcggcggcgcgttctcggcgagtga

SEQ ID NO: 4469 - DNA, 1290 bp, BradyrhizobiumColbertium
atgagcgaagcggcatccgctccacaaggctcgccttcggtcagattggggctgagggaaaactggccggaattcgctctgctcgtcctgatcaacgccttcgtgggcggaatggtcgggatcgagcgaaccgtcgtgccgctgatcggcgcggaggaattcaagatgggctcgacgacgcttgtcgtctcgttcatcgtcagcttcggcgtcgtgaaggcgtgcgccaatctcgtgtccggccagctagccgacgcctggggacgcaagtctgttctggtcctcggctggctcgttggcctgccagtgccgttcatgatcatttgggcgccgagctgggaatgggtgatcgccgccaacgccctcctcggcatcaatcagggccttgcctggtcgatgaccgtgatcatgaagatcgatctggtcggaccgaaatcgcgcggcctggcggtaggtctgaacgagttcgccggctacctcgcagtcggcgtgaccgcctatctcaccggatatcttgcgtcggagtacgggctacggccggcgccgatctacctcggtgtggcctatgccgtcctcggcgccgcgctctcgatcctgttggtacgcgacacccgcgagcacgtccggctggagaccgcggcgcatgctcgtcaagcatctccgctcagttttcgggagatcttcgttctcacatcgttcagggatcgcaacctgtttgccgcatcgcaggcggggctggtgaacaacctcaacgacggcatgagctggggcatcttcccgctgttcttcgcctcgttcggtctggccgtcgatcggatcggcatattgaaggcggtctatccggcgacgtggggcatcctccaggtcgccaccggtcccctgtccgaccgctggggccgcaagggcctgatcgtcggcggcatgtgggtgcaggccgcgggcttgttcctgaccggggcaactagtcatttcgaatggtggctcgccggcagcctgttgctcggacttggcacggccatggtgtatccaagcctgatcgccgccgtgtccgatgcctcgcatccgagctggcgcgcgcgctcgctcagcgtctatcgcttctggcgcgacctcggctatgcgatcggggcgctgtcggccggcatcatcgccgacctgttcggcatgtcctgggcgatcggagcgatcgccgccctgacgttcatttccggcgctgtcgtagcggtgttcatgcgggaaagggcgggctcggttgacctcgcgcaaaaagcgggccgaccggcggagtag

SEQ ID NO: 4470 - DNA, 741 bp, BradyrhizobiumColbertium
atgatccttcgccagttcttgcatagcgatcccgtcggcatctcctacctgttcggttgtggtggcaaggccacctgtgcagtggtcgaccccgtcggcgatatccagccctatctccaagctgccgacaacgccggcatgcgcattcacttcgtcatcgacacgcatgttcatgccgaccacctctcggcgggacgggcgctcgcggacgctgcgggggcgtcctacgtgctctcttcgaacgcgagtgtgtcgtttccgttcaaggcggttggcgacggcgacgccctgccgctcggcaacatcacggcaacggttctccatacaccgggtcacacgcccgagcatatctgcattctggtgacggaccggacacgcgccgacgagccatggttcgtgttgaccggccacactctgatggtcggagatctcggccgcaccgaactcgccgccagcgccgaagaaggcgccaaacaactgtttcgcagcgtgagtaagctgaaggacctgccggactatgtcgaagtgctgcccggcgcctatgcgggttcggtctgcggccgccggctgagcggcaagccctggtccacgatcggcttcgagaaacggcacaaccaggccttcatgatcgaggatgaagtcgagtttgtccggttcatggtcgccgagattccgccggcaccgccggaagccgcgaagatcagagccgccaattcaggcatcacggccgctgcggcctga

SEQ ID NO: 4471 - DNA, 669 bp, BradyrhizobiumColbertium
gtgtcaagtaccggaccgaaacacgcgatctatgagaaccttgccgaggtggcgcaggcgctgggccacgcgcatcggcttgagctgttggagcacctcgcccaaggggtgcgcagcgtcgaggagctgtcggcccgtgctcatctgacgttcgccaacacatcccgccatctgcagatcctcaggcgcgcgcgtctcgtcgagacggagcggcggggtaaacacgttctctatcgcttggccggcgaagcggaagtggtcgcgctgacgaaggcgctgggtcgggtcggcgagcggaatatcgctgagatcggccgagtcgtgaccgactacttccacgcccgcgatgcgctcgaacctgtctcgcgagatgatctggtcgcgagactgcacgacgatctcgtcacggtgctcgatgtccgccccggagacgagttcgctcttggccatctgccgggcgcgctcaacatcccgcttgccgaactggaacgacgcctcggcgaacttccgaaaggccgtgaggtgatcgcttactgccgtggtccctactgcgttttatctttcgaagcggttgcagcgctccggacgcgaggctattgcgtccgccggctcgaggacggctatcccgaatggaaagccgccggcctcccggtcgaatccctcgcgtga

SEQ ID NO: 4472 - DNA, 747 bp, BradyrhizobiumColbertium
gtgttccggcccgaagcgctgctgagggaggcccgccggcagaggcagttgccgctcgtcgcggtccccgaaatctgcgtgctcgatccggacggtgatgtcgtccgtcacctcaagcggaacggcgccgggcgcatccatgaaggatgggcctgctatcacacggagcttcttgctttcgatctcgacggcatcggcgaggtcggcatggtgggctgcgccgtcggcgcaccgttcgccgtgctggtcgccgagcaacttttcgcatccggctgccgcctgctcgttagcgtcacgtccgccggacaaatcaccccaaccggcccgacgccgtacttcgtcctgatcgaccgcgcgctgcgcgacgaggggacgagctatcattacctaccgggctcgatcttcgccgaagcacccgacgcgccgctgctcgcgcgggtcgagcaggcgggacgggctctgccaggcattacgctgcaccggggcgcaacgtggacgaccgatgcgccttaccgagaaaccgaggccgccatatcgcgtgcgcgggatctgggcacgcttgccgtcgagatggaagccgccgctctctatgccttcagcgcggcgagcggccgaccgatcgtctgcttcgcgcacgtcacgaatgctatggcacagacggaaggcgacttcgagaaaggcgaggccgacggcgcggaagcgacacttgctgtcgtcgccgccgctgcccgcggctggcggaagtag

SEQ ID NO: 4473 - DNA, 210 bp, BradyrhizobiumColbertium
atgacgctgtcggatcgcgtgaagtcgactatggaagtcgtgttggaagagacgtgccgggaacttccaaacggcggtgaccatgagatccggaaggtcattgctgaacagcttcttgcagctgccgaggctgggcacaccaccttggatgagctgcgggccgcagcgctgcgtgcattccccagcgcagcaaagatcactcgacaatag

SEQ ID NO: 4474 - DNA, 144 bp, BradyrhizobiumColbertium
atgaggaatgaacccgaggatgcagtcctccaagatggtgagttcgtgatcgagaacgtgaaggtgcagactttgcagatcggggatgtcgccgggctgatgaaaggagaggatttgtcgccttgcatctccaacgatttttga

SEQ ID NO: 4475 - DNA, 132 bp, BradyrhizobiumColbertium
gtgatcaaagaacttcgatcgaagggtctgctggaaatcgaacgaggagaaatcagcattctcgatctggaaggcctccggcaagtcgcggacttcaatccactctaccttcatttagacccagcactttga

SEQ ID NO: 4476 - DNA, 255 bp, BradyrhizobiumColbertium
atgctcggctcggacaaccggcctctccttgcctgcatcatgctgatcgcttgcgatctgctcgattctaaagcgttgccttctgaacgtcccgactatgtcattcggatcagcgccttccgctgcggcaagatcccgcaaggggggccattccactcggcagacgatgcggtcaacgccattgaacatggcgaaaccgcttcaggctatgccgcctcgaactcgcctgacgaatcagggacaaggggcatatga

SEQ ID NO: 4477 - DNA, 594 bp, BradyrhizobiumColbertium
atgagcgagcgggagggcgttgtcgtcggcatcagtggcgcctcaggcgctgcgatcggcatgcgcatcgtcgaacgtctagcggacaatacgcgctgcgctgtccacctcgtggtctcgccggcggccgaaagaacgctcgccgaggaggtgggcaccgaagctctggcccatcttcgcagcctcgcctttcgctgctatccgcatgacgagatcggagcctcgatcgccagcggctcgtgtccggttcgcggcatgatcgtggcgccctgctcaatccgcacgctctcggccatcgcctgtgggcagctcgacaatctcctcgtccgcgccgccgacgtgcagctcaaggagcggcgtcggctggtgctcttggtgcgcgaaagcccgctgcatctcgggcatcttcgcgcgatgacgcaggtgacggagatcggtgcgatcgtggcgccgccgctgccggccttctatctcaagccggcatcgcttgccgaggccgtcgatcagatcgcctgccgcgcgatcaatcttctggacctgccgggcgtgtcggcgccggcgcaggcatggacgggacaggcggcgcgtccctga

SEQ ID NO: 4478 - DNA, 1566 bp, BradyrhizobiumColbertium
atgaagatcatcccgggcatttgtcgttcttttggaggagttcacttgcagcgtgacctgccgcgctttcgggacctgtccgatttcctgcgcttcatcgaagcgagggggcagttgcgacgcattcgggagaaaatctcggtggtccacgagatcaccgagatccatcgccgcgtgctcagcgcgaatggccctgcactattgttcgaacagccggtcaaggccgacggcacgccttcggacattccgctcatcaccaacctgttcggcacggtcgagcgcgttgcttggggcatgggaatcgcacctcaccgcctcaacgagctcggcgcgctgatggccgagctgcgcgcgccgcgcccgccacggggattgcgggatgccttcgacaagatcccgctggcgcgggcggcgctcgcgacgcgccctcgcacacgcggagccgcggcggttcaagaacgcgccgccatgggcgccgatatcgatctcggcaaattgccggtccagatctgctggcccggagagccggcaccactgatcacctggccgctggtcatcaccgtgccgccgaactccgtggccgccgaccaggaggagaatgtcggcgtctaccggatgcaggtgctcgggcgcgaccgggccatcatccgctggctcgcccatcgcggcggggcgcgtcatcatcagcaatggaaagcggcaggccgcgacatgccggttgccgtagtgatcggcgccgatcccgcgaccattctggctgcggttctgccgctgccggagacgatgtccgagctgcgctttgccggcattttgcgcggcgagcggccgcgcctgacgccctgcctgacggtgccgatcgccgttccggccgcggccgaaatcgtgatcgagggattcgtgtcggcaaccgagaccgcgcccgaagggccctatggcgatcacaccggctactacaattccgtcgaggcgtttccggtgatgcgtgtcaccgcgctaacgacccggcagcagccgctctatctttcgaccttcacgggccggccgccggacgagccctcgcgaatcggcgaggcgctgaaccagctgttcgtgccgctggtccggcagcaattccccgagatcatcgactgctatttgccgccggaggcctgctcctaccggatcgcgatcgcatcgatcaaaaagcgctatcccggccaagcgcggcgactgatgctcggcctgtggtcgatgctgccgcaattcagttacacaaaactcctgatcatggtcgacgacgacattgatatcagggactggcgcgcagtgatgtgggccgtttcgactcgcagcgattcctcgcacgacctggtgacgatcagcgacacgccgatcgactatctcgactttgcctcgccaaagcccggcctcggcggcaagctcggcatcgatgcgacgacaaaaatcccgccggagacggatcgactctggggggagccgctcgcgatggatccgtccgtgatcgcacggatcgacgcgatgtgggagcacctcgggctcgctgcgccggcacgggagcccgcatga

SEQ ID NO: 4479 - DNA, 474 bp, BradyrhizobiumColbertium
atgcggccgctaccgctcaagccattgcagctcgcactcgccggcttcctgcaacgcatcctgcggcgcaacccggccatgttcgaccggctcggcgcgcacacgcacgcgcgtttcggcatcaagcccaccgatctgccgtttgccttcgtggtcgaagcgaggccaggcggcctgacggtcgtgcgcgacctgccacgggatcttgacgcacgtatctccgctacgctcgctaatctcttggccctgcttgagggcagggtcgacggcgatgcgctgatgttctcgcgcggcctcgtcattgagggcgatgttgaggctgttctcgcgctgcgcaacgcgattgacgacgcgcagctggacctcgtgaccgagctctcggctctgttcggaccgctcggcgcgccggcacgacgcgccctcgaaatggcgcgcggcggactattgcgtggatcccggaggcctgtccgataa

SEQ ID NO: 4480 - DNA, 978 bp, BradyrhizobiumColbertium
atggagctgatctgtcccgcgggcacaccggccgccttgaagagcgccatcgaggctggcgccgatgcggtctattgcgggttcaacgacgaaaccaatgcacgcaattttccgggcctgaatttcagccgcgatgagctgcgcaagggcatcgcgctcgcccacgggagcggcgccaggatactggtcgccatcaacaccttcccgcgcgctggaagcgtcgagctgtggcatggcgccgtggatgacgcggtgagcgcgggcgccgatgcgctgatcctcgccgatatcggcctgatggactacacggcgaggcgccatccgaaccagcgcctgcatgtctcggtgcaggcggcagccgcaaatccggacgcgatcgcatattacgtcgaaacctttggcgcgcggcgcgtggtgctgccgcgcgtattaagcgtgccggagatcggcgagattacccgcgcaagcccttgcgagaccgaggtcttcgtgttcggcgggctttgcgtcatggcggaaggacgctgctcgctctcgtcatatgccacgggcaattcgccgaacatgcaaggcgtctgctcgccgcccagccacgtcgcctacgaacagggcccgcaaggaacgacgtcgcggctgggcgggtttaccatcaaccggttcgaacctaccgagcccatcggctatccgacgctttgcaagggacgcttcacgaccgagcacggcaccggctatatctttgaggatccggtcagcctcgatgcgacggcgctgcttaagggtctgcgcgatgccggcgtcaccgcgctcaagatcgaggggcggcagcgcgggcgcgcctatgtcgaaagcgtcgtgcgccatttccgcgccgcgctcgaagcgctggaaagcggccgggaggccgagatcgccggcctcaaaccgttcaccgaaggccaggcgtcgacggtcggggcctatcgcaagacttggcgttag

SEQ ID NO: 4481 - DNA, 924 bp, BradyrhizobiumColbertium
atgcaactcagcctcggcccggtgttgtacaattgggcgcccaaccgctggcgcgacttctacttccgcatcgcagatgaagcgccggtggatgtcgtctccgtcggcgagatcgtctgctcgaagcgggcgccgttcttcgacgaccaccttccggccgtgatcgggcggctgcgtcgtgccggcaagcaggtgctgctcggatcgcttattctggtgtcgcagcgtcgtgagcgccgccagaccgaggagctcgccggaacggaagagggccttgtcgaggtgaacgatctgacctgcctgaaggcactgggcggccgagcgcatgcgatcgggcccttcgtcaacatctacaacgaggcgaccgcaagcttccatgctgcccagggcgcgacgcgcatctgtctgccgtcggaattgccactaccatctatcggcacgatcgcggcggcactgccggacgtcgccatcgaggtgtttgcattcggccgtgcaccgctggcgatctccgcgcgctgctatcacgcccgcatgcacaagcttgccaaggacaattgccgcttcgtctgcgagagggatccggacggccttgcactgaaaacgctggagcagcaggatttcctgaccgtgaacggggtccagacgctgtcttacacctgcacgaatctgcttggcgatatcggcgcgttgcgcactgctgccgtgagctcgctacgcctgtcgcctcagcactgcgacatgattgcggtcgcgcggacatttcgcgacgttgtggagggccgggacgacgcggaaaggggaacccggcgcctggccgaactctatccgaacgttcccttctccaatggtttcctccacggcgcggctggcgtttcgtatcagccgcactcagcatcagaagcgcgctttgtcaccgggacgtga

SEQ ID NO: 4482 - DNA, 165 bp, BradyrhizobiumColbertium
atggcgatgatttggacgaggacgagcgtatcaggcgcggcgatatcgacggccggaaacccaaaaccagcaaccatcagcgcctcggccgcaaacagccacgcggtcgcaaccgcgaagcagctcatggtctattccgagacgttgccgcccatcatcatctga

SEQ ID NO: 4483 - DNA, 300 bp, BradyrhizobiumColbertium
atgttcatgctgtcgccggacgtcgatccacgacgaagccgcgcaaccctctacgccagtgccggcacgcttggtcttgcgctggccggtggattggctgccatcgcggtgcaggcgcggctcgagggcgtgctgtcgctggcgggcgtctcttgtgtcgcgaccgtcgcgttgtacggccgcgatgtcgtcgctctctaccgcaaccgcaagcggcgcacgctggagctgaacacgaccatggcgctctatgcgctgggcggtctcgccggctcggtcccggacttgcgcctgcactga

SEQ ID NO: 4484 - DNA, 333 bp, BradyrhizobiumColbertium
atgctcgcaaaactctacaagatcgtcgcattcctcacctggctcgaaacctacgggccggtgacgggccgcgtgccgacccagcgagtgcaggatctcgtggtcggagcccgtgcggcgcgatactttgtcggctacttcgtctgggtctgggttgctacggtactcctgctcgcgggccgaacacagccgtatcgcatcgcgccgctcggcatgatggcggccacgatgggtatcgtgcacgagctgctgcgtgtgcgccggcttgctgacgtgacgaagagtgtgcggctgccgcagggcgcaaggctgccgaggctgctgcattcgtga

SEQ ID NO: 4485 - DNA, 138 bp, BradyrhizobiumColbertium
atggtccggatcttggccgcggccgaacaacttggccccggcgaaacgctcacggcattgatcggccgcgagcccgtgttcctgtttccgcagcttgagaagcgcggctacaactggcttggcaggcttcctgcctga

SEQ ID NO: 4486 - DNA, 150 bp, BradyrhizobiumColbertium
atgatgacggacgaaatcaagtctcggcatcgcgcccgtacattgatcgcgttggagggtggaatgatcagtcccggcgagagcggcgcggcgcgtatcggcatcctggtcgcgtccgatcgcgccagccgcggcgagtacgaagactag

SEQ ID NO: 4487 - DNA, 624 bp, BradyrhizobiumColbertium
atgcgggcaattgcgattgatgccaacgagcaaggcggatcccagtctctgcttgacgagatgcatcagttgcgggctcgcgtgttcgccggccgccttggctggcaggtgaacatcgagcacgggcgagagcgggacgaatacgacgcgcttgacccgacctacattcttgcgctgacagaccgcggccaagtcgcgggctgtgcgcgcctgcttccgaccacgggtccgacaatgctggcccggacgttccctcagttgctcgctggcggaacgctcgcagcctcgcccagaacggtcgagagctcccggttttgcgtcgacacgagcggcgagggcaggggcagccgattcctgcacgaagccacactgacgatgttcgcagggatcatcgagtggtcaatgtcgaacggctatgacgagatcgccaccgcaacggacgtgcgcttcgagcgcattctgcagcgggctgggtggccgatgacgcggctcggcggcgttgagctcatcggcgagaccatgagcgtcgccggcacgctcccggccaaccaggtgagcttcgaccgggtctatcctccaagctaccgctcggatctgacgcgcgtcagacgcgtcgccgcgtga

SEQ ID NO: 4488 - DNA, 1035 bp, BradyrhizobiumColbertium
gtgatcgagccattgcagcacgccctctggctcggtcggcttctggccgccgcgctgctgcgcgaacgcggcaagagccgcgcccaccttccctgcctgcacgatggcctgaaggcgatcccgcgcgagcggcgacggccgcgcgacgcggccggccgcctcggcgtccagctcgaggcgatcgcggccgcggcggacgccggcctcagagatcatgatcgctggctgaccgcccgcacgctgctcgcccgcaaactggctggccgccgatccacctcccggctgccggcgctgctcgactatgtgttgacccggccgatcgcctcggccggcatgattgccgctgaactgaagattacgccgcgagcggcgcaggacctggtcggcgagttggggctgcgaccggtcccacggctatacagatatatcggtccggggagcgaggcgatggcgttacttcacattccacttaatcaaattgaagaacaacatatccttgaactggtcgcgaccagggcgccggagacgaacatcattgagtacaagcgggagacatacggcaactccctgcgtgacgaccttgagttcttggcagacgtatcgtcactggcgaacacttccggtggcgacctcattattggtatcgccgcgacacaaggtatccccgaagcaccagtgccattcacaggcgacgttgacggcgagataaatcgtcttgaaagtcgcgcccgggccgggcttcaaccccgcatttctttagaatccagggccgttcccgttcagggcgggcatatcctcgttctgcgcgttgcccgcagctacaatccgccccatcgcatcatccgtgagaatagcaaccggttctgggctcgatcgacagccggcaaatacgaaccgaacgtcgaccaactgcgcgaactgttcacccttgcccctcggattgccgatcagacgagagagttcaggacgaaccgactcattcgcatcgcttcgggcgacgcgccggtcacactcatgctgtcgctttccatttaa

SEQ ID NO: 4489 - DNA, 462 bp, BradyrhizobiumColbertium
atgcggtggcttgaaccccgccgatatgcagttcgtctgcacatcgcggaccagctgcgaaaccgtcggccgggtccgcttcaggtaatatgctttgatcgtggtgaggattatctcttcccgcttatcgtccagtacgcggtgcccctgtggtcgcccacgtttacgatcgaccagagacaggatggtcccgccggcgcggaacagcttgatcaaccggtatgctgtcgcctgactaagattgagcgcagccgcgagttccgccacatctccggccgttgcgccgtcaggattgcgctccagaaagctgcggatcgcatccccccgtcggcacgcttcatcccaaagtacgtcctcaatctcgtctggaagtggatcgctcatagcaggctcgcgaggaaaaccatcgcaaacctcattctcacattaagtgacaaagtccaagttggattatcaaattaa

SEQ ID NO: 4490 - DNA, 1218 bp, BradyrhizobiumColbertium
gtggctcgccttgaggacatcgacctgcaacagcgtgccaggcgacgcggcgaacagaagatcgtcaaggcgacaacgcccgttcccgggacgttcggtgcctcccgccccctggagatggtccagatcgaccatacgaaggccgacgtcttcgttgttgacgaggagacccggcagccggtcggtcgaccgtggctgaccctggcgatggatgtgtgcagccggatggtcaccggtttctatctcaccatggacgcgccgtcccggctgtcgaccagtctgtgcctgttgcactccgtcttcgacaaatcggcatggttgagagaacgcgagatcactgagccttggcccgttgccgggctgccggacacggtgcatgtcgacaacggcgccgacttccgcagccgggcgttcaagcgcggatgccaagacgccggcatcgccattgagtggcggccaccgggtgagccccgcttcggcggtcacatcgagcgcctgatcggcacacagatgggaaggctgcacctgctcccagggaccacgttcagcaacgaacaggacctgggagactacgactcgaagcggcacgcggcactgacactgcatgaactcgagaggtatatcgcactcgacatcgtcggctcctatcatcattcgatccatggtggactgggccgcccgccgattgccgtctggcgagaccatgagggtgagattccacttcgactgccacaagatcgaatgcgcttctggctcaccttcctgcccgaacaggagcgaacactacggccgaccggcgttcatttgttcggcctgcgctactggtcggcggcactcagcgcagacgtcgggcgttccgaccggcgcctgcttgtcaaattcgatccacgcgacatggcgcgtatcttcgttcgacggccttcaggaaacttcgtggaagcccgctatgccgacttgacgttgccttcgatcaccctgcacgaggcggtgaccgcgcgacgcaccctgctggcgaaaggccgccgtgaagtcgacacccgcgcaattgtccgcaccgccatcgcacagcgggaattgctcgagacggccaccaggaagacggcagcggcacgacgcgggacaacttcttcaaaatcgaaggtggatgatcggggatggggctcgctccgcggtgtcgattccagcaaacctgtaccctttgttgaggatgcagattga

SEQ ID NO: 4491 - DNA, 882 bp, BradyrhizobiumColbertium
atgaacgacgaaatctcccatctcaccgctggagctgtcgcgctcctttccgaaagcgatgaacgccgtatcagagccatacggtcacgccgctgggtgctctacccacgcgccaagcaagcgctcgaccggctgagtgcgctccttgatcatccgcgaggcacgcgcatgccctcggtcgcgatctacggggacagtggcatgggcaagaccatgatcatgaagcggttccgagacaagcacccaccgagcttcaatcctctgacgggcacactgaagacaccggtcctggctatggagatgaccagccgcccgggcgagcgacgcttctacgccgaactgctcacccttctcggcgcgcctcaacggccgcgcgccgacattgcccagatggagcaggccgccttgcggattatggaagcgatcggcgtgcaggtgttggtgatcgacgaagtgcacaacatcctcgctggaacctaccgcgagcagcgtatcgtgctgaatacgctgcgcttcctcagcaaccgactccagatctcgctggtctgtttcggcgtcaacgaggcgcgcgaggctatcggtggcgacgttcagcttgcgcgccggttcgagcagttcacactgagccggtgggccgcgaacgaacagttcgagaacctggtggcgtcgatcctgcgcaatacgccgctgcgtcggccctcagttctcacggcgaaatcgctgcggcgaatgctgcagatcacagaaggcatcacagccaatatcttccacatgatcaacgttctcgccatcgaggctgtcgaaagcggccgcgagcacatcacagacgagatggtggagaactgggagcctgagttcgacgccgaggcggcattcgcatga

SEQ ID NO: 4492 - DNA, 318 bp, BradyrhizobiumColbertium
atgctcctgatactcggcaatgatatgatcgagatcggggatgattgcgccgagaactctgaaccgccaaaggtctttttcacgcggcggtggccacgttatccggcgcatcagcagaagccgggcgatttccgatggcgaagcccaggtgtgaatgccgcgttcggcttcatcgtcgagcaggttttgaccacgaagagccgcaacgcgatatcgctggaaaagggaggggagttcgcgctcgccggcaccccggggttggtttccacacagagggcacgtgatgcgccatccgagcagttggcttcgcaggattga

SEQ ID NO: 4493 - DNA, 324 bp, BradyrhizobiumColbertium
atgcgccggataacgtggccaccgccgcgtgaaaaagacctttggcggttcagagttctcggcgcaatcatccccgatctcgatcatatcattgccgagtatcaggagcatcttcccacacctgcaaagccgatcctgccgcttcacctgcggccggctctgctggcaggggtagctatcatcgagcgtgccggaccggagatgctccgaatgctgcgtagtcacatgatgggtgacaacagggtgagattcaccgacgccgccgagaacattatagcccgagctcgaaggtcgagggcctcttctcaaatgcagttaatttga

SEQ ID NO: 4494 - DNA, 156 bp, BradyrhizobiumColbertium
ttgaccgctggcccgcacgtaaagaccatcgacggcttcgacgatcccgccccggaacagttgcacatacgcacgttcaacattcgcggcgcgatcgccattcgacatcgcaagaaagccgtcgaagttgatcttaagcccctgggattgccttga

SEQ ID NO: 4495 - DNA, 306 bp, BradyrhizobiumColbertium
atgactgacatcgccgaccaagcgttcacgttcgacttggccatgaagctggcgcaggggcatatcctacacgatgaggagcgcagcgccttcatttttcccggcaacacgaccgtcaccaaggaccgaggccggctgagctgcacttgcgacgatttcttgaatcgtatcgcatgtcgacatatcgcggccgtggcgatcaaatttgatatgaacggtgcgggcaaggccgccgatctcgcgaaggttcatttggatggtcttcagcagcgactggcggcgttctggcaagccgtaccatattga

SEQ ID NO: 4496 - DNA, 414 bp, BradyrhizobiumColbertium
atgaaggccgggtggacggtcctgccgaacgtcatctttgaacgccagcgtgccctggggctggatgcgatcgacatcaacatcatcctgcacatcgcgtcctattggtggacggcagaaggcaagccgtttccgtccaagcgaaccatcgcagcggccatggacatcgaaccgcggaccgttcagcgcaggattgctgccatggaagcggctagactaatcaggcgggaagaacggcgcagctcagcaaacggtagccagaccaatgtctaccacctggacggcctgatcgcggccgccaagccatatgcgctcgaaaaaatccaggagcgtgatgaaaagattcaggcaaaggccgcaagggcaagcaggaagggcaagcccaagctttcggttgtgaagggaggggcctaa

SEQ ID NO: 4497 - DNA, 104 bp, BradyrhizobiumColbertium
cgcgccgtagctcaaccggatagagccctgccgttctttgaaatcctagctgacacttggagagtaggggcaggaggttgcaggttcaagccctgccggcgcgt

SEQ ID NO: 4498 - DNA, 912 bp, BradyrhizobiumColbertium
atgaaggccaacaaggcgaacgcgcaggtgctcttcccgttcttgatcgccgacgacttcctcggcgctgtagacaaactcgaatgcagatacgtcatcgactttcagccgcgcgatcttttgaaggccaaggcattcaagcaaccgtttgagcatctggagcagacggtgctccccgcacggaaggaagcggcaaagaaggagcgtgcacgaaataaggaagccttggacgacgatcccgaggcgaaggtcaacaagcaccacgaaaactttttaaagcgctggtggctgatgtcctacccgcgcgaagacctgatgcggaccctcgccccgctgtcgcgatacatcgtatgtgcacgggtcacacaccggccgatcttcgaatttgtttcgacggccattcatccgaatgatgcactgagcgtgttcgcgctggaagatgactactctttcggtatcctccagtcgggcatccattgggagtggttcatcaatcgctgctcaacgctgaaggcagactttcgctatacgtcggataccgtcttcgacagcttcccctggcctcagcagccgacaaccgaggcggttcgcctcgtcgccaagcgggcggtcgaggtgcggcgcttgcgatcacatctgcgggcgaagcatgagctttcactacgagagctatatcgggcgatcgaagggcccggagaacacgccctgaagaaagcacataaagcgctggacgacgccgtacgcgacgcttacggcatgtccaagaaggccgatgtgttggaagcactgctggagctgaacgaagctgtcgcctcggctgaagccgatggcaagccggtcgttgggcctggaatcccgccgtcagcaaagaagctgaaagacttggtcacgaccgacaaactcacggtgtag

SEQ ID NO: 4499 - DNA, 1293 bp, BradyrhizobiumColbertium
atggccaatgttgtcgtcgtcggcgcccagtggggcgacgaagggaagggcaagatcgtcgactggttgtcggagcaggcggatatcgtcgtccgcttccagggcggtcacaacgccggccacacgctggtgatcaacggcaagacgtacaagctcgcgctgctgccctccggcgtgttgcgcgaccagaagctgtcggtgatcggcaacggcgtggtgttcgatcccaccgccttcctcgacgaggtcaccaagctcagggcccagggcgtcgcggtctctccggacaatttgcgcgtcgccgagaacgtcacgctcatcctgccgctgcaccgcgagctcgatgctcaccgcgaatccgcgagcgccgcgaccgcgatcggcaccacccgccgcggcatcggacctgcctatgaagacaaggtcggccgccgtgccatccgtctgatggaccttgccgatctcgacacgcttccgcacaagatcgaccgcctcctggcgcaccacaatgcgctccgccgtggcctcaatctgccggaattcgacggaaaggagatcctgaaggaattgaccgcgctggcgccgcagctgttgccctacgccgagacggtgtggcggctgctcgacatcaagcggcgcgaaggcaagcgcatgttgttcgagggcgcgcaaggcgcgctgctcgacgtcgaccacggcacttatccttacgtcacctcgtccaacacggtggcggcgcaggccgcgaccggtgccggcctcgggccgggcgcggtcggctatgtgctcggcctgtgcaaggcctacacgacccgtgtcggccagggcccgttcccgaccgaacaggacaacgagatcggccgcaagatcggcgagcggggccgcgagttcggcaccaataccggccgtccgcgccgctgcggctggttcgatgccgtgctggtgcgtcaggcggtccggacctgcggcatcaacggtctggcgctgaccaagctggacattctcgacggcttcgacacgatcgaggtctgcaccggctacaagctcgatggcaaggagatcgaccatttcccggccggcgagggcgcccaaagccgggtcgagccgatctacgagaccatcgagggctggaaggagccgaccgccagcgcgcggtcctgggccgacctgccggcccaggccatcaaatatgtccgccggatcgaggaattggtgggatgccccgtcgcgctgctttccaccagcccggaacgcgaggatactatcctggtgcaaaatccgtttgaggcttaa

SEQ ID NO: 4500 - DNA, 933 bp, BradyrhizobiumColbertium
atgtccgccaccggccagagcacgggctccgaatcatcaggccatcactggatcgccaaccagccttacctgctgctcagcatcacagccctgtgctgggccggcaacgccatcgtcgggcggctcgccgccggccacattccgccggtcacgctatcctttttgcgctggttcttcgccttcctgctggtgctgccgtttgcctggaagcacctcgtgcaggactggccggccatccgcggcaagctcggcctgatggtcacgctctcgatcaccggaatcggcgccttcaacacgctgcaatattgggcgctggagcatacccaggcgctgaatacgctgctgctccagtcggccgcgccgctgctcgtggcgctgtggtcgctggccatcctcggcatccgcctcaccgcggcgcaggctttcggcgtgctgctgtcgatgtgcggcgtgctgacgatcctgctgcacggcgacttcaccacgctgtcgaacatcgagttcaacaagggcgacctcatcttcatcgtcgcgctcgtcatcttcgcactttactcggtgctgaccctgaagcggccgccgatgcacggactgtcgttcctcgccttcacgttcggggtcggtgccgcctgcctgattccgctggagatttgggaactgtccgcgcggcccgtgatgaagctcgacgggccgaacctgttgacgctgttctacgtcgccgtctttccgtcggcgctcgcctatctctgcttcaatcgcggcgtgcgcctgatcggggccaaccgcgctgcgccgttcttccacgtcgtgccggtgttcggctcggtcatggcgatggtgttcctcggcgagcacccgcagatcttccatttcgtcggcttcgcgctggtgttggcgggcgtgttcgtggcatcgcggaagcagacgacgtag

SEQ ID NO: 4501 - DNA, 390 bp, BradyrhizobiumColbertium
atgttgaacatcgaaggcctggagcggctcgatccgagtgcgccggtggtgatgctgaacctgatgcgcttccacgcgcgttcgcgcgatggcaatggctccggctgggacgcgtatctgcgctacagtgcgatcaccgtgccgatgatcagggcgcgcggcggcacgttgctctggaccggcgaagccaaaacggtcgccctcggtccgcacgcgggcaacgcgtgggatttcgttgcgctggtccattatccgtccgtctcggcctttctcgacatgatgacgtcggaagcctacgagcgtgaagccgatccgcatcgcgtcaacggctgcgccgagcacgtgatcatcgcgacgagcgaggcctacagcaagttcaaggtgaaatag

SEQ ID NO: 4502 - DNA, 975 bp, BradyrhizobiumColbertium
gtgtcacggcggcgatccggcgcaagctcgcatccaacgccaatgacgaccgcttcgcccgcgccaccggcctcgaatccggccaactggctcaacaaccagccctatctgctgctcagcctaacctcgctgttctgggccggcaacatcgtgctcgctcgccatgtcggcgcgcatgtgccgccgctgacggtgaccacgatccgctggtacggcgtgttcctgatcctgttgccgttcgcctggcagcatctgaagcgcgactggcctgccttgcgcaagagcctccccttgatgctgttcctgtcgctggtcggctttgccttcaacaacgcgatctcctactgggcaatgcagtacacggaggcgctgaacgcgctgctgatccagtcggcgggtcccctgttcgtggcgctgtggtcgctggtgctgttcggcgtgcggctgaccggggcgcagcttggcggcatcgcgatctcgctcttcggtgtgctgatcatcatcctgcgtggcgaccttgccgcgcttgcgagcatcagcttcaacaggggcgacatcatgttcgcctcctcgctggtggcgttcggcatctactccgccttcattccgcggcggccgaagattcatcagctctccttcctgtccttcaccacctgctgcggcgcgacgatgctgctgccgacggcgatctgggagacagcaagcggccacgtgctgcacttcgacgggaagacgctggcgacgctgggctacatcctgatctttccctccaccctcgcctaccttttcttcaataggggcgtggcgctgatcgggccgaaccgggcggcgccgttcttccatctggtgccggtgttcggctctgcgatggcgatcctgctgctgggtgaaaagctccagccgttccatctgatcggctacgcgctggtgctcgcgggcgtcgtgcttgcatcgcgccaaggctcggcgcggtga

SEQ ID NO: 4503 - DNA, 978 bp, BradyrhizobiumColbertium
atgatttcaacgttgattcgaaacctgcggacggtcggtgtggccgcactctgcctcgcagcggcatccacggcccaggccgacaattatcccagccggaatatcacgctggtcttgccgttcgcggccggcagcggcacggacacaacgacacggctgatctcgcagcacctgtcgcaagcgctcggcgtcggcatcgtcatcgagaacaaggcgggcgccaacggcatgcttgccgccacctatgtcgcgaaggccgcacccgacggctacacgctgctggtgacgaccaacaccacgcattcggccaatccctatctgctcaagagcctcacttacgatccggtcaaggatttcaccccgatcgcccgcaccggcgatttacccttcatgctggtcatcaatccggaagtgccggccaagaccgtcggtgagctggtggcctatggcaaggccaatccgggcaagctgagctacgcctcgggctcatcgtcggcgatcgtgtcgggcgcgaccttcgcgcacaatgcgggcctcgacctcctgcacgtcccctacaagagctcgccgccggcgctcaacgacgtcatgggcggccgcgtctcgatgatgttcgtggacatcctgaccggtctgccgcacgtcaacggcaacgccttgcgcgcgcttgccgtcaccaccaaggaccgctcgccgctggcgccgcacctgccctcgatgcaggaagctggcgtgccggatttcgacatctcgtcctggcagggctatttcggccctgccggcatgccgaaggagatcgtgacgcggctcaacaccgagatccggaagatcatcgagaacccggagatcaaggccaagctcgctacgctcggcatggacgccttctccggcacgccggagcagcttgaagcgttcgtgaaggatcaactcgtgctttgggagaagctgatcacgaacgcgaagatcgagaagcagtag

SEQ ID NO: 4504 - DNA, 1686 bp, BradyrhizobiumColbertium
gtgaaattgagcaatctgaagatcgccccgaagctcggcattcttgtcggcgtcaccttgttcggcctctgcgtctccggtgttctcgccggctacctgatgaaacaggaaatggtgaacgcacgcatcgaccaggccaagtcgatcgtcgacatgggtcgcaattacgcgatggcgctgaagaagcgggttgatgccggggaactgaccaaggatgccgcgctcgccgaccttcgccgctacggcaacgcgatgacctacgacaatggctccggctatctgttcggcacgtcctatgacggcatcacgcagcttgcgccagacccgaagcagatcggcatgaaccgcatggatgtcgtgaccaacgggcgcaagctgtccatggaactgatgaacggcgtcaaggccaacggctcgatcctgctgtactacgactacgtcaagcccggccagaaaacgctgatccgcaagatcggctacgcggtcgcggtgcctggcttcgacatgtatatcggcaccggcgcctatctcgacgatatcgacgccaagatgggcccggtctactggcttctcggctttgccatgctcggcatcatgatcgttgctggcagcgtcgcctggctgctcgggcgcagcatcagccggccgctcgcaatgctcggcgcccgcatgaaggacctcgctgacggcaagctcgacggtgacatccccggcgtcggccgcggcgatgaagtcggcgcgatggcggccaccgtccagatcttcaaggacaatgcggttcggatccgcgacctcgagaagaccgaggccgatgcccaggaacgcgccgcggcggaacgccgcaaggcgatggaagagatcgccaacgacttcgagcgcagcgtcaacggcatcgtccgctcggtctcctcggccgcggccggcatgcagacgacggcacagtcgatgaccgcgaccgccagcgacgcctcgtcgcgtgcggcgacggtcggtgcggcctcgcaaaaggcttccggcaacgtcggcaccgtcgcggcggccgccgaagagctgtcgagctcggttgcggaaatctcccgccaggtcacgcgttcgaccgaagttgcgagccgagccgtcaacgatgcggagcgcaccaacgccacggtgcaggagctctccactggcgccgagaagatcggcgaggtggtcaagctcattcactcgatcgcggcgcagaccaatctgctcgcgctcaacgccaccatcgaggcggcccgtgccggcgagtccggccgcggcttcgccgtcgtcgcctccgaggtcaaggcgcttgccaaccagaccgcgaagacgaccgaggagatttctgcgcaagttgctgcgatgcagacctcgaccagcgatgccgtcgccgcgatcggcggcatcacccagaccattgccgagatgagcgagatcaccgcgggcatttccgcatcgatcgaacagcagggggaggcgacccgcgagatcgcccgcaacatccagtcggtcgcggccggctcgagcgagatcaatgcccatatcggcagcgtgacctcggccgcggaagcgaccgggagcgctgctagcgacgtgctctcaaacgcccgcgaactggacaaccagtccggcgcgctgcgctcggcggttgacaacttcctcgccaaggtgcgggcggcgtaa

SEQ ID NO: 4505 - DNA, 1044 bp, BradyrhizobiumColbertium
atgccgaaatacagggtggtgacgccgaagggtgcgagcttcaccgtcgcgggcagcgattattcctacgagcgcgaggcgctcgatccgatcgatgccgagatcgttgaggcgcccgccgacgaggccgggttcatcgccgccgcgaaaaatgccgacgccatctacgccaagggcatcccgatcaccaagtcgatcatcgacgcgctcgaaagctgcaaggtcatcacgctcggctcggtcggcgtcgacagtgtggacgtcaaggccgccaccgcgcgcggcattcccgtcaccaacatcccggacaccttcatcgaggaggtcgccgaccacgccatgatgctgctgcttgcaggcttccgacgcctagtcgagcaggacaggatggtgcgtgacggccgttgggccgaaggccggccggcgctgctcaagatcccgaggctgatgggccagacgctcggcttcatctcgttcggccgcgtcgcgcgtgcggtcgcgaagcgtgccgcgccgttcggcctgcgcatgatggcctacgatcccttcatccaggaaacgctgatgtatgaccacggcgtcatcccggcgacgctgaacgaggtgctgtcgcaatccgactttgtctcgatgcacgcgcccgcgaggcccgaagtgcaccacatgctgaccgaaaagcacttccggcagatgaagaaaggctcgatcttcatcaacaccggacggggcgccaccgtggacgaggagagcctgatcaaggccctgcaagaggggtggatcgcccacgccgccctcgatgtgctggagaaggaaccgccttcgcacaacaaccccctgctcggcatggagaacgtgaccctgaccgcccacgtggcctcggcctcggcacggtttgacgaggcgcgcaagcgccgcgtgggctacgaattgtcactggtgcttcagggcatgtggccggtaagctgcgtcaatccgtcggtgctgcaaaacaccgcgctccgccgctggcaacctgtcagcatggaccgcggcccgaacagctag

SEQ ID NO: 4506 - DNA, 1350 bp, BradyrhizobiumColbertium
atgaggaacgacatcacccgtcgtgatgctctggcgctgggcctgtccgctgcaacgctcgcggccaccggtgctgcagcgcaaccagcgcaatcgacgatcaaggccgcggacgttgcggcaccgaagcgagagatcgagaaaggtgccaccctgcgcatgctgcgcccggtgcgcttcgtccaggccgacgaggacgtgttccgcgccaacgccgcaaaattcaccaaggagaccggcgtcgaggtcaaggtcgacttcgtcggctgggaagacatcaaccagcagaccgcggtgaccgccaattccggcgccggccccgacatcatcatcggtttctccgatgcaccgcacatctatatcgacaagctgatcgagctgaccgatgtcgccgactatgtcggcaagaagtatggaggctggctgccgctggcgcagcgctatggcaagaagaacaagagcaacgcctggatcggactgccgttcggcgccaccgcggggcccctgatctaccgcaagtcgatcctgcaatcggtcggcttcgacaaggtgccggaggaccatgccggaatcctcgatttgtgccagaagctgcacaaggccggcaaaccggccggcttcgcactgggtaacgccaagggcgacggcaacggcttcgcgaactgggcgctgtggtcgcacaacggctccctgctcgacgaggaaggcaacgtcgtcatcaacagcaaggagacgattgccgcgctgaactgggtcaagaagctgtacccgaccttcatcgccggaactccctcctggaatgacgtcagcaacaatcgcgcctattcctcgcaggagatctcgctgaccgccaatggcgtctcgctgtacttctcgctgaagaacgatccggcgaccaaggcgatcgccgacgacagcgagcatcagttgctgcccaagggccttgcgaagatctcgcccatggcaggtctgacgctgaacgccatggtgttcaagcacagccaatatcccaacgcggcgaaggccttcctgcaatacatgctggagaaggaccagtacgagccgtggctcaacgccaactccggctactggtcccagccgttggccgcctatgccgaggccgccgtgtggtcgcaggatcccaaggtgaaactgttcaaggacacgatgaacagcccctactacgacggctacaagggcccgatctcgacggcgacgggcgccgtcagcgcagactacgtgctgatccagatgttctcggccgttgccaccggcaccgccacgccggaggccgcggccgcagaagccgagcaacgctgcaagcggtacttccggcggcagaaccgttag

SEQ ID NO: 4507 - DNA, 900 bp, BradyrhizobiumColbertium
gtgcgattgttcgactacaagccgttcctgatcgtgatgtgcctcgcgcccgcgatcggattgctgacggtgttcctgacctatccgctcggtctcggcatctggctcgccttcaccgacaccacgatcggccgcagcggcatctatgtggggatcgaaaacttccaatacctgctcaccgactccctgtggtggaacgcggtgttctacagcgttctctacacggcggtcgcgacgttcgggaagttcgcgctcggcttctggctggcgctgctgctcaacaaccattttccgttcaagagcatcctgcgcgcgatcatcctgctgccctggatcgtgccgaccgtgctctcggcgctggcgttctggtggatctacgatccgcagttctcgatcatctcctacctgcttgtcgacgtgctgcattggcgcgacagcaacgtcgacttcctcggttcgccctggccggcgcgcttctcgctgatcgccgccaatatctggcgcggcattcccttcgtcgcgatctcgctgctggcaggactgcagaccatctcgccctcgctgtacgaggcggcgatgctcgacggcgccagcgcctggcagcgcttccgctacattacgtttccgatgatgatgccgatcctcgccatcgtcatgacgttctcgatcatcttcaccttcaccgacttccagctggtctatgccatcacgcgcggcggccccggcaactcgactcacctgctcgcaacactggctttccagcggggcatcgccggcggcgagctcggcgaaggtgcagcgatcgcggtgtccatgataccgttcctggtattcgcgacgctgttctcatatttcggcctcgcgcgccgcaaatggcagcagggagaaagcaatgactga

SEQ ID NO: 4508 - DNA, 900 bp, BradyrhizobiumColbertium
atgactgatagtgccgtccaaccggccgtcgcggacgcgaaggcggcgcccgataccatggcctgggattccgggctgcggcggctgatgatgatttatctgccgctcggctgcttcgtgttgattcttctgttcccgttctactggatggcgatcacgtcgttcaaaccgaacgcggagctgatgaactacaaggatcacaacccgttctggatctcctcgccgacgctggcgcacatcaagcatctgctgttcaacaccgcctatcctcactggctgtggacgacgatgctggtggcgatcggatcgaccacgctgtcgctggtcgcgagcacgctcgcggcctatgccattgaacgcttgcgcttccgcggcagtccctatgtcggcctcggcatctacctcgcctatctcgtgccgccgtcgatcctgttcatcccgcttgcgaccgtggtggtgcagttcggcttgttcgacagcccgatggctctgatcctggtctatccgaccttcctggtgccgttctgcacctggctcctgatcggctacttcaagtcgatcccctacgagctcgaggaatgcgcgctggtcgacggcgccacacggctgcagattctgcggcggatcacgctgccgctcgccgtgcccggattgatctcggccggcatcttctccttcacgctgtcctggaacgagttcatctatgcgctcgcgttcatccagagcggcgccaacaagaccgtgccggtcgcgatcctgaccgagctcgtcaccggcgacgtctaccaatggggcgcgctgatggcgggctcgctgctcggctcgctgccggtcgcgatcttctactcgctcttcgtggattactacgtgtcctcgctgaccggcgcggtgaaggagtag

SEQ ID NO: 4509 - DNA, 1356 bp, BradyrhizobiumColbertium
atgcgcgcgacctttctcagcaccgtcgcaacgatcattctcaccgccagctccgcgctggcgcagagcgaaggcgaattcccggccaagctcgccggccacgtggtgatgccggccgaaacgttcatcgatgcaccggctgacgcacccgccgaccttaaatccgcaggcaaatacaccagcggcaagcgggtcgaagcgctcggcaccgtgatgggcaagtcctatgagcggccgaccggcgtctcgctgcctttcaagggccagccgttgcagggccactccggcatcaagaccatgcccgacggcacgttctgggtgatcaccgacaacggcatgggcgcccgcgccaactcgccggattcgatgctctacctgaaccgctacaagatggattgggcgagcggcaagatcgagcggctggagaccatcttcctgcacgatcccgacaagaaggttccgttccgcatcctgcatgaggacacccagaagcgctatctcaccggctccgatttcgacaccgagggtttccagatcctcggcgataccttctggatcggcgacgagttcggtccgtacatcctgaaggcggacaagaccggcaagatcctcggcgtgttcgatacggttgccgacggcaagccggtgcgctcgccggacaattgggcggttggaacgccggccgcgccgggcgcgacctacaccaacgtcaatctccgtcgctccaagggctatgagggctttgcgtcctccaaggacggaaaattcctctacggcctgctcgaaggaccgctgtgggacggcgataaaaaggactgggagaaggtcgacggcagggaagcggcccgcattctcgaattcgacgtcgccgcccagaaattcactggtcgccattggcagtatgtgttcgagcagaacggcaacgccatcggcgacttcaacatgatcgatcaggcctccggcctcatcatcgaacgcgacaacggcgagggcacgtccgacaaggcctgcccgcaaggcaagcgcggcgagaattgctttcccgacctggccaagttcaagcgcatctacaagatcgagctcaccgacgccaatatcggcaagccggtgcgcaagatcggctatatcgacctgatgaagatcaaggatcccgacaagaaggcgaggaagccgctcaacgacggggtctacaccttcccgttcttcaccatcgagaacgtcgatcgcgtcgacggtacccacatcatcgtcggcaacgacaacaacctgccgttctcttccagccgcgaccccaacaaggccgacgacaacgagttcgtactgctcgaggtcgcggatttcctgaaggcgaagtaa

SEQ ID NO: 4510 - DNA, 831 bp, BradyrhizobiumColbertium
atggccgcgagcgccttcgtcctgcacgagccgcttggcgagcgcgagggcacgcgctgggggggctcggcggtcgtgatcgtcgtgctgcatgtggcagccgcgctgctcgccatgagctggctcaagtcgcagcccgagcagggcgtcagcctgcccgcgatcatgatcgacatgtcgccggtgacttcggctccgcagccgacgctggatgacgtcgcgccggggccggtgatgcaggaggcagatgcatcgccgcccgaagccgtgaagcagcaggctgtcgaggagaccatcgcgccgacgccgccgcaggaagcgccggaggtggtcgccccacccgagcagaagctggagccgaccccagcaaagcctgagcccgcaagaatcgtgcctgtcgaaaaacctgcgctcgagaagcctaaagtgatccgccgcgaggccaagaagccgtccaacgcaactccggcgccgcgtaccagcgcaccaccgcgcgccgagcgcgaggcgccgatggcttccgccatgagtgcgggtgcgacggcctccgcgatcgcatcctataatcaacgagtccgtgcgcatctgatgcgcttccatcaatatccgtcggccggaggcggccagcgcggtgtcgcaaggctcagcttcaccatcagccgcagcgggcaggtgacttcgagccgccttggcggctcatcgggcgtcgcggccttcgatgctcaggccatgtccatgctacgccatgccgcgccgttcccgccgtttccggatgagatcaggaacggctcgatgagctttgcgattccggtggaatttacggtgaggtag

SEQ ID NO: 4511 - DNA, 441 bp, BradyrhizobiumColbertium
atggccgtaaagctcggggcatcgaagctcggctcgcgcggggacaggagcgatctcgacctcagccacgagatcaacgtcacgccgttcatcgacgtgatgttggtgctgctgatcatcttcatggtggccgcaccgctcgcgaccgtcgatatcggcgtcgacctgccggcgaccgccgcccagcccgcgccgcggccggacaagccggtcttcgtcaccgtcaagccggacctttcgatcgccgtgggtgaggatttcgtggggcgcgacacgctcagtgcttcactcgatgccgccaccaagggccgcaaggacgagcgcatctatctgcgcgccgacaaggccgtctcctatggcgacctgatggaggtgatgaacagcctgcgcaatgccggctatctcaaggtcgctctcgtcggcctcgacggacgaagctga

SEQ ID NO: 4512 - DNA, 777 bp, BradyrhizobiumColbertium
atgcagagcattctcaggcttcggcacgtgatcctaaccatcgtgctggcgctcgcgccggcacctgccttcgccatcgacgaggcgctcttgccgcgcaatctgtcgccttggggcatgttcgtcggtgccgacatcgtcgtgaaggtcgtgatggtcgggctcgccatcgcctcgctggcgacatggacggtttggctggcgaagaccatcgagctgcgccgcaagggctcgctcgccttgcagcggacgcgcgcgctcgaaggcaacatgacgttggccgaggcgtccgcgcgggccggcgacgcgcgcgacgcggtcgcccagttgatccggtcctgcgccagggaagcggagctctccggtggcatccttgacgacggcctccaggagcgtgtggcactgcggctcgagcgggtggaggcagccatgtcgaggcagattgcgcgcggcaccggtgtgctcgcgaccatcggcgccgtcgcgccgttcgttggcctgttcggcaccgtctggggcatcatgaacgccttcatcggcatctccgagagccacaccaccagccttgcggtcgtcgcgcccggcattgcggaggcgctgcttgccaccgcgctcgggcttgtcgccgcgatcccggcggtcgtgatctacaatcacctcgtccgcggcattgccaattaccgtgccctgctcgcggacgcctcggcgcagctcatgcttctggtgagccgccagcgcgaccacggccatttccgtctggcgcgggcggcggagtag

SEQ ID NO: 4513 - DNA, 516 bp, BradyrhizobiumColbertium
atgctgagcaccgatctcgccgacctcaaggcgtatatggccgacaatcccggtgcggtgatcgaggatgtcgcgcgcgagcgcagcgtcaccccgcgcgcggtgatcgaagcgctgccgccctccatggtgcgcatgggaggcggcgaacatttcgccgccgtcatgcaggacatcgcacaatggggcgaggtcacgctgatcgttcacacggacgatgcgatcttcgagttcacaggtggaattccggcgggtgagatcggccgcggctatttcaacctgatgcagcccaagggcctgcacggccatctgcgccacgagcgctgcgcggccgtagccttcgtcgagcggccgttcatgggcaagacgtcggcattcgtggcgttcgtgaacgcggacggtggcatcatgttcaaggtcttcgtcggacgcgatgagacccgggcgctgcgggcggatcaattggtgcggtttcgccagcttgcggaccaaatcgcggcagcgcccgccgcgtga

SEQ ID NO: 4514 - DNA, 336 bp, BradyrhizobiumColbertium
atgttcatcgcaatgaatcgctttcaggtgaagcccggccaggaagccgctttcgagaccgtctggcggacccgggagtcctatctcggcggcatggcgggcttcgtcgaatttcatctgctcaaggggccggtcgccgaggaccacacgctctattcctcgcacacggtgtgggtcgacaaggcggctttcgaggcctggacgcgctcggaggaattccgccgcgcccatgcgcgcgccgacaacaagaccggcgaaagcctctatctcggccaccccaagttcgaggggttcaaggtcatcatgaccgagcgcaaggcgagcgcggctgcctga

SEQ ID NO: 4515 - DNA, 2295 bp, BradyrhizobiumColbertium
gtggtttcaattgcggcggtgatggcggagggcagtctcgcgcagactgcctctcggccagcggaagacgggtcgtcggaaaggccgaagcaggccaagcgcaagccgcaagtggcgcagcaggcaacgcccgaggtgatgaacgcccgcgctcaggtgggcgccgctgcgcccgttcaggtgctcgacaccatcacggttgccgcgaccaagaccaaggagcgcgcaatcgacgcgctggcgccggtcagctcgatttcgctcgaccagattcagggcatccagccgaaccggctgtcgggcatcttctatgccgtgccaggcgtgtcgttccaggagcgcggtgacgatcccgcgaccgtcgtcaacatccgcggcttgcaggacttcggccgcgtcgcggtcgtcgtcgacggcgcgcggcagaactaccagcgcaccggccataatgccaacggctccttcttcctcgatcctgaactgatcggcggcgtcgatgtggtgcgcggcccgaccgccaacatctatggctcgggtgcgatcggcggcttggtctcgttccgtaccaaggacatcaatgacgtgctgcgtcccggcgagcgctggggcgtcgatctctcgggctcttacggatcaaacaacaatcgcggcctgggctccgtgttcggcggcgtgcgcgcaacgccggacgtcgacatcttcggtggcgcggtctatcggacccaaggcaactacaaggacggcaacggcaccgagatcggcaacaccggcaatcaggtcgaatccgggttgatgaagctcaccgtgcggcccgccctcggccatgaggtgaagttcggcgccgtcttccaggactttcagtacgatgtcggccagttcaatcgcggcccggtcgcaacggcggcacagcgcgccctctatcagggctcgtcagtctatgcttccgacacgaagaactacaccggcactgttacgtggaactattcgctgcccagcgacaatctgttcgactggcacatgtcgctctacggcaatcgcgtcgacaacgaccagaccaagacctatcactactcgacctcgggcgcggcctattgcggcgccggaaatttcggcaacaacatctcgggctgtgtcggcgacacgcgcggctatgtgctcaacacctacggcatcgacgtcaacaataccacgcgcttcaacgtgggcgactggcgcaatgcggtcacttggggtgtcgatgcctttcaggacgacgtgatcacgaccgacagccgcggaaattccaacatcaccacgccgagcggcatccgtaccgtgtccggcggtttcatgcagttgaagcagaactacagcaactggttcgaagcggtgagcgcggtccgctacgaccgctatgacctggactccggcaatacgcacgccggtggtgaccgcttctcgccgaagattaccctcggcgtgacgccggttccgggcttccagccctatgtgagctacgccgagggctatcgtgctccgtcgatcaccgagacggtgatctccggcgcgcatgcgaccggtggcggacctgccttcttcccatgtcccgatggcaccgtcggcctgttctgcttcctgcccaacccgaacctgcgtccggaggtgggcaagaacaaggaggtcggcttcaacctgaagttcgacaacatcttcagcgccaacgactcgttccgcggcaagatcaatctgttccgcaacgacgtcagcgactacatcgatctcgtcgcttcggcgccgacgccggtgccgccgttcggctcgttcagccagtactaccagtaccagaacatcgccaacgcccgcatccagggcttcgaggcggagaccatgtatgatgccggaagctggttcattggtgttgccggtcactatatccagggcaagaacgtcgccaccaatatcggcctggccaccatcactccgcgcaaggtcgttacgaccggcggcgtacgcctgctcgatcgcacgctgatcctgacggcgcagtgggcttcgttcggcgccaacaacgatgtgccggccggctatctgccttcaacgggatacgaactggtcaacctgtacctgacctacaacgcgaccagggacatcgtgtttacggcctcgatcgacaatctcttgaaccagtactaccggccttacgccattccgggcagctcgaccgacggcacgtcgcagaacgacgtgctgtggtcaagcccgggaccgggcagagtctacaaggccggaatgaagatccactttggaggtgcgtaa

SEQ ID NO: 4516 - DNA, 126 bp, BradyrhizobiumColbertium
atgcgagggagccggatcgacagccgtgagctgtttgcggccgaacgcgagatcatcatcgcgcatggcgacgacagctatcgcctgcgcctcacgtcgcagaacaagctgatcctgacgaagtaa

SEQ ID NO: 4517 - DNA, 951 bp, BradyrhizobiumColbertium
atggcattttgtcgcacccttgcaagcgtcgcactttcctgcacgttcgcgctcgtgtccggtgcgcatgccgccggtatcatcgtgcatgatgcgcgcaatcgcgacatcgccgtcaacgacttcgcgcgcacggtctcgatcggtggcgccatcaccgagatcctctatgcgctcggattggagaaccggctggtcggtgtcgacaccacgagcctctatccgccggcggcgctgcacgacaaaccgaacgtcggctacatgcgccagatctccgcggagggcgtgctggggctcaaccccacgctgatcctggcaatccagggatcgggcccgcgcgagaccatggagatcctggaggcggcaaaggtgcctctggtgctggtgcccgagactttctccgaggacggcctgatcgagaagatcaagctggtcggccatgccatgggcgtcgacgagcgagccgaatgcctgagcgccgcggtcgcggccgatcttgcgcaactccgcgcgctgcgcgccaaggtgacgaagccggtccgcgtgatgttcgtgatgtcgctccagaacgggcgggcgatggttgccggccacaagactgcggccgacgagattatccagctcgccggcgctgccaacgccgtcgacgattacgacggttacaagatcatcggcgacgaggccatcgtggccgcaaagcccgacgtcgtgctgtcgatcgagcgcggcaaggattcgctccaggccgaagcaatctatgcccatcccggattcgcactgacgccggttgcggccaacaagagcttcgtcagcatggacgggctctatctgctcggcttcgggccgcggacggcagccgcggcacgcgatctctcggtcaaactctacccggcgttggcagaccggggcaccttcacgtcggctctgtcagccgcgaactgccgccaatga

SEQ ID NO: 4518 - DNA, 999 bp, BradyrhizobiumColbertium
gtggtgctgttgctcgccgcaatcgtcgcgctgacggtcggtgccgccggcatccccctctcccgcctgcctgccgcgctcgggattgccggcgagaacactgccatgaccgcccgcgaccagctcgtgctgtggtcgatccgcatcccccggatcgccgcgaccgcgatgatcggcggtctgctcgcggcggccggcgcgatcatgcaggggctgtttcgcaacccgcttgccgatccggccctggtcggcgtttccagcggcggcgcgctcgcggccgcaagcgcgatcgtcttcaccgattcgcgcttcggcgaggcggtgcgctttcttcagaccgagctgttgccgctcgcggccttcgcaggctcgctggcgaccaccgcaattctctacggcatctccagccgctcggggcggacctcgatcgcagtattcctgctcgccggcgtcgccatcaccgccatcgccaatgccggcatcggcctgctcgtcttcatcgccgacgatcgtcagctccgcgacatcacgttctggatgctcggctcgatgagcggcgcgacgtggaccaaggccgccgtgctcgcgccggtcctcgtcatcggactcgcagcttgcgccctcatcgcgcgcggtctcgatctgctggtgctcggcgaggccgacgcctttcacggcggggtcgacgtcgagcgtctgaagcggatctcgatcgtcatggtttccgccatgaccggcgttgccgtgtcgatcagcggcgtcatcggcttcgtcggcatcgtcgtgccgcacctgctccgcctcgtgatcgggccggcgcatcggctgctgctgccggcctcggtgctgctcggcgcggtcctcatggtcggcgccgacacgctggcgcgcaccatcgtggccccggccgagatgccgatcggtatcctgaccgcggccgtcggcgcgcccgtctttctcttcatcctgctgcgccagcgcgggctcaccgcgctatga

SEQ ID NO: 4519 - DNA, 816 bp, BradyrhizobiumColbertium
atgaccgtcgtaatcgaggcgcgacacctgagcaagcgcgccggccgggcgacgctgctcgatggcgccagcctgacggtggcagagggtgaaatggtcgccatcatcggcccgaacggggccggcaagtcgacgctgctgcggctgctttccggcgatctccgcccgagcgcaggcgaggtgcgcctgatgcagcgcgacatcggcagcttcacgccgcgcgagcttgccgcgcgacgcgcgatgctctctcaacacatcaacgtcaccttcccgttcacggtcgaggaggtcgtgctgatgggagcaggcgagcgcagccttcgtgatgctgcgccgctcgtcgacgccgcactggacgaagtcggcctcgcacatttccgcgaacggcaattgccgacgctgtcgggcggcgagcagcagcgcgcccatttcgcccgcgtgctggtgcaactcgcctgcggcgaggccgagcatgggcctgggctgctgctgctggacgagccgacctcaagcctcgatctgcgtcaccagatcgacctcgtcgaagcggcgcgccgccgcgcagccgccggcaccgccgtgatcgcgatcctgcacgatctcaatctcgcgatccgcttcgccgaccgcctcgtcgtgctggccggcggcaagctcgccgccgacgggccgcgcgcggagattgtcacacgcgagaccatccgggatatcttcgagatcgatgccgtcgtgcatcaggacggcggcggagtgcctttcgtgctgccgcaatcgatgcgggcggcgcctcacctctccctccgggagaggtga

SEQ ID NO: 4520 - DNA, 1680 bp, BradyrhizobiumColbertium
atgcgcatcaccgcaaaatggttggcaaccacgagcttggtcctcgtgacctttgccgtcgcatctggatcgtgggcggcgaacgtggataccaattcggcgatcgacacggtcaccgtctatcccgacggggccaccgtcacccgcgtcatttccttggatctcgtctccggtgactcgacgctggtcgtaagggattttccgctctcgctagatccgtcgtccctccgcgtcgaaggcgaggcgggtgccaagctcaccatcggcacgatcgatgcgcggccgccgaaggcggcgccgccggtcaatctgcccgaactcgacaagcgtatcgaagcgctgaaggaccagcgcgcggacctgcaaggcgcaatcgaatcggccgcagcgcgacgcaaattcgcgcagcatttcgccgaaacctctcccgccggacttggcgacaagggcgaggcgaggccgatcaccgagtggcgcgccgcctttgcggcggtcggggaggaggtcgcgatcgcggacaccaccatccgcgaggccacgcgaaaacagcgcgaactcgatcgtcagatcgcgcagctggaggccgagcgctcggccaagccgccaaacaagctggaagtgcgaatcgatgtcgcctcggccgccccgaccaaggcgacgctgcgcgtgacctacacggtgcgcagcgcacgctggacgccgctttacgatgcccggctcgacaccggagccaaggaccgtaagccgcagctcgaactggtgcgccgtgcggaggtcacgcagtcgaccggtgaggactggtccaacgtgacacttggcgtctccacggtccgcatcagccgcggcggcagtgctccggagctgaactcgctggttgcgcaatatccgcaagtccccaagccgctggcgctcggcacggcgtccgatctggcgcggccggctccgatgacgcgccaggcgcaatcgccgtcgatggccaagatcgccgaggcggccgagtcgcgcgagcgcgccgacgagcaacaggccgtcgccgagatcggcgatttccaggccaccttcaaaattccgggccgcgtcagcctcggcgccgccgagggcgccaagagcctccgtatcgcctcgatgaatgttcccgccgatctcgcagtgcgcgcggcaccggtgctcgacccgaccgccttcctcgaagccagcttcaagcagaccgatgacacgaccctgctgcccggcaaggtcgcgatctaccgcgacggcatcttcgtcggccgcggcaagatcacggcgtccgccagggacgacatcgtgcgcctcggcttcggcgccgacgagaaggtcaaaatccagcgggccgtgctcaagcgaaacgaaggctcggcaggtctcctggtgacgacgtcgaagaccgacgagcgctcgttcaggaccacgatccgcaatggccatgacttcccgatcaaggtggcgatcgaggatcagttgccggtcagcgagaacgaggacatcgtggtcgagatgctgccctcgagcactcagcccaccgcaaccaacatccgcgacaagcgcggtgtgctggaatggtcgttcgacgccaagcccggcgagatcaaggacatcaacttcgcttggcgcatccgctggccgaaagacaagagcgtggtcatcgtgccggcaggttag

SEQ ID NO: 4521 - DNA, 1212 bp, BradyrhizobiumColbertium
atggctggcgctcgatcccgcaattttgcgggctggccgctgtttgcgaacagctttaggccctttttcctgcttgccgccatccaggcagcgctgtcgatcctggcctggctgccgatgttctatggcgaattgtcggtgagttccgcattcgcgccgcgcgactggcacatccacgagatgctttatggcttcctgcccgccgtgatcaccggatttctgttcacggccatcccgaactggacagggcggctgccgatccagggtacgccattgggcgtgctgctggcggtctggctcgccgggcgtgtcgttgtgacggtgtcggcgaatacaggctggacatttgcgctgctcgtcgatgccgccttcctcgcattggtcgtcgccgccgcgacgcgcgagatcatcgcgggcggcaattggcgcaacctgccggtagtggggctggtgctcgctctgctcgcaggcaacatcgcctttcatgtcgaagcgcattacgcgggagcggccgacgtcagcatccgcgtcggcatcagcgtggtcgttctgttgatcgcgttgatcggcggccgcatcattccgagcttcacccgcaactggctggtcaagttcaatcccggccgcctgcccgtgccgttcggacgcttcgacggagcagtgatcggatgcagtgcgctcgcgctcatcacgtggatcgtggcgccattgaatgccgtcacgggcatcctgatggcactcgtcggcggactgcatgtggtgcggcttgcgcgctgggccggtgatcgcacctcccgcgagcggctgctcgtgatcctgcatgtcggctattccttcgtgccgttgggctttgtcctcaatgccatcgccggtttcggtgagctgccgccaagcgccggcatccacgcctggatggcgggtgcggcgggaaccatgacgctcgcggtgatgacccgcgcgagcctcggccataccggacaggccttgacggcttcgccggcaatccagggaatctatgctgcgatcgtgatcgcggctctgacccgggtcgctgccgtgatgtggcctgcgcacggcgatgcgctgctgcaaatcgctgcctgcggctggatcgttgcgttccttggcttcgcgattgccttcggtccgttgctggccggtcgtccccggcgcgctctggccgtcatgggcgtgccgtcgccggcacgctga

SEQ ID NO: 4522 - DNA, 711 bp, BradyrhizobiumColbertium
atggccaaggtcgacacatcgctggttgcgcatttgccgctgtttgccggagtgacgccggacgccctcgatgagatcctgcgtgaggcccgctcggcacgctatcccaagaacaccgccatcttcgagcagggcgccgacgcacagtccttcttcctgctgctgcacggccatgtccgtgcggccaagaccacgccgaccggcgagcagatcgtggtccgctatgtcgggcccggcgaaacgttcgggctcgcgatggcaatcggagccgcgcgttacccggcaacggcgatggcggtcgatgacagcgtggtgctgatctggccgacctcggcctggccgcgcctggtcgagcggtttccggcgctcgccgccaacacactccagaccgtcggtgcgcgcctgcaggaaagccacacccgcatcctggaaatgtcgaccaagcaggtcgagcaacgcgtcgcgcacgcgctgctccgtctcgccaagcaatccggcaagaaactcgaccatggcatcgagatcgactttccgatcagccgccaggacattgcgcagatgaccggcaccacgctgcacaccgtcagccgcatcctgagtggctgggagagccagggcctcgtcgaaagcgggcgtcagcgcatcatcctgcgcgagccgcacaagatcgtcgtgctggcggagcggagcgccgacagcggcgcggcctga

SEQ ID NO: 4523 - DNA, 198 bp, BradyrhizobiumColbertium
atgtccttcggatttgacgatctggtcgatgacatcatgcaaacggcgccgcacacgattcgcgtgtttctcgccttcaggatggcttgtgtcggctgtccgatcgcgaccttccacaccgtggatgacgcctgccgcgagcatggcatcgaccgcgaaaaattcctcgccgcattgagcgattgcgtgccggcgtga

SEQ ID NO: 4524 - DNA, 1353 bp, BradyrhizobiumColbertium
atgagagctgatcttgcggcgatctacggcgaggaacgtctcccgcgctacacgagctacccgaccgcaccgcactttacgtcggcgatcggtccggagacgtacgcccggtggttggcggagctgccggcgggggccagcgcgtcactttacctgcacgtgccgttctgccgggagatgtgctggtactgcggctgtcatacccagatcgtccgtcgtgacgagctcatcgtcggctatcagcggacgctgcttcgcgagatcgggcttgccgccgagaccatcggccgtcgcatcaaggtcgagcacattcatttcggcggcggcacgccgacgatcatggcaccggaggccttcgccgaactgatggcggtgatgcgccagaaattcttcgtgctgccttcggccgaaatcgcggtcgagatcgatccgcgtaccttgacggcggacatggtcgaggccatgcggctctcgggcgtcaaccgtgcgagcctgggcgtccagagcttcgatcccgtcgtgcagcgggcaatcaaccgggtgcagagcttcgagcagacggctgccgtggtcgagatgctccgccgcgccggcatcgagggaatcaatttcgacttgatctacgggttgccgcaccagacggtagcttcgtgtctggatacggtgcggcgcagcctcgcgctcgcgcccgaccgcttctctgtgttcggctatgctcacgtgcctgatttcaagaagcaccagcgcatgatcaacgcggccgtgctgcccgacggccttgcgcgccacgaccaggcctgcgcgatcgcgaatgcgctgaaggaggccggctacgtgcagatcgggctcgatcatttcgcgcgtcccggtgattccatggcggtggcgtacgagcagcggacgctgcggcgaaattttcagggctacaccaccgacacgagcgaaactctgctcggctttggcgcgagcgcgatcggacatctgccgcagggctatgtccagaacgaggtgcagatcggcgcctatgcgcagagcatcgccgctggccgcctcgccaccgcgaagggctacgggctcaccgacgacgaccggttgcgcgccgacatcatcgaacgcatcatgtgcgagttcagtgccgatctcggcgacatctgcgcgcgccatggcgcggagccaggcgcgatgctgaaatcggcggcgcgtctgaagccgctgatctccgacggcgtggtgaggctggacggcgacaggctcgctgtcgccaaggattcgcgcttcctggtgcgcagcgtcgctgctgcattcgacgcgcatctggatccgggaaagcagctgcatagccgcgcggtgtag

SEQ ID NO: 4525 - DNA, 201 bp, BradyrhizobiumColbertium
atgaggctttttgcactcgaactcattctctccctgctcgacgtccgcggtcatatcccgcgtttcgacgacttccgtccggctccggccacaccggccactgccggcatcgtgcgcgcgctggccgccgcgattgccgtcttcgccgtgttgtcgctggcgatctggggaacggtctggcttgccgtgcagctcatctaa

SEQ ID NO: 4526 - DNA, 1125 bp, BradyrhizobiumColbertium
atgttcacccgcagagccgcattgatcagcgccgccgccaccgccctgatgttggcggccccggctttcgccgcaagcgatctcaagttgccgcgccagaaggtcgagctggtcgctccgccgttcgtgcacgcgcacgagcaggccacgacgcagggtcccaagatcgtcgagttcaagatgacggtcgaggagaagaaggtcgtcatcgacgagaagggcaccaccttccaggccatgacgttcaacggctcgatgccgggaccgctgatggtcgtgcacgagggtgactacgtcgagctgacgctggtcaatcccgcgaccaacagcatgccgcacaacatcgacttccattccgcgaccggagcgctcggtggcggcgagctcacgctcatcaatcccggcgagcaggtcgtgctgcgctggaaggcgaccaagaccggcgtgttcgtctatcactgcgcaccgggcggcccgatgatcccctggcacgtcgtctccggcatgaacggtgccgtgatggtgctgccgcgcgacgggctgaacgacggcaagggccgagcgctgaaatacgacaaggtctactatatcggcgagcaggacatgtacgtgccgcgcgacgagaagggcaatttcaagtcctacgactcgccgggcgaagccttcaccgagaccgaagaggtgatgaagaagctgatcccgacccatgtcgtgttcaacggcaaggttggcgcgctcaccggcaagaatgcgctcaccgccaaggtcggcgagaacgtgctgatcgtgcattcgcaggccaatcgcgacagccgtccgcatctgatcggcggccatggcgattatgtctgggagaccggcaagttcggcaatgcacccgaggtcgggctcgagacctggttcatccgcggcggttcggcgggagctgcgctgtacaagttccagcagcccggcatctacgcctatgtcacgcataatctgatcgaggcggccgatctcggcgccaccgcgcacttcaaggtcgaaggcaagtggaacgacgatctgatgacccaggtgaaggcgccggcggagatcccgccgcagacacaaggcgccctgcagaccggtcgcaagatcaactga

SEQ ID NO: 4527 - DNA, 879 bp, BradyrhizobiumColbertium
atgctgatcgcattcaagctgaagctggtgcttgcctgcgcggccgggcttgcagggccgctcgccgttgcgcctctcatgtcggagatgaagacacacgccgcgcaagaagagccggcgattgtcgaggtcgccgcgggcagcttcctgtatcgcgaggccggcgacttcacgcgcggcgggcagcaggcagaagcgccgctgcgcacactccggttcgaccggccgctgcacatcatgcgcgagcaggtctcgtccgccgactttcagctctgcgtgcgggatggcgcatgccgcgctttgggccgcgacgtcgtcatcgcgccggatcgtcctgcggtccaggtgaactggtatgacgccgaagcctatgcgggctggttgtcgcgcaagaccggcaagcattatcgacttcccagcgacgaggaatgggcattcggcgccggcagccgcttcaaggacgacggcgtgccggtcgatgcaagcgatccgtcaaagcgctggatcagccgctacgagcgcgagtccgagcgcgacgcttccgacaccgccgcccatccgttcggcaagttcggcctgaacgagcacggcctcgaaggcgtctccggcaacgtctgggaatggacgtcgacctgcttcgtgcgctcgcgcgtcgacgaggccggcaacgcgatccgcccgaccgtgaactgcggggttcgtgtcgccgagggcgcccaccgcgcctatgtcaccgacttcgttcgcgatgcccgcgccggcggctgcgcccagggcgtgccgcccgccaatctcggcttccgcctggtccgcgagcagacgtcgtggctggtcagcgtgtcgaagcgcctgagcaaggcgtggccggcaagatcatag

SEQ ID NO: 4528 - DNA, 1029 bp, BradyrhizobiumColbertium
atgatcaatcttcgtgtcctcgccgcgtccgcggcggtgctgagcctgacctcggccttcgtgtcgaaagcagccgccgacaatggcgcggtcaacgtctatacctatcgcgagaccaagctgatccagccgctgttcgatgccttcagcaaggatacgggcatcaaggtcaatgtcgtctccgcaagctccggtctggagcagcgcatgaaggcggaaggcgccaacagtccggccgacgtgctgctgacggtggatatcggccgcatcgacgaggccgtccaggccggcgtcacccagccgatcaagtcggaagtggtcgataaggtcgtgccggcgcagtatcgtgatccggacggacactgggccggcatctccatgcgcgcgcgcgtgatctatgcctcgaaggatcgcgtcaagcaggacaagatcacctatgaggagcttgccgaccccaagtggaagggcaagatctgcatccgctcgggccagcacatctacaacaacgcgctgttcgcggcctacacggcaaagcacggcgaggccaagaccgaggaatggctgcggggcgtgaaagccaatctcgcgcaaaagccgtcgggcggcgatcgtgaagccgcgcgtgacgtcgccgcaggcaagtgcgatatcggcatcggcaacacctattactgggcgctgatgatgaacaacgatcccgagaagaagccgtgggcggaagcgacgcgcgtcattctgccgaccttcgaaggcggcggcacccacgtcaacctctcgggcgtgctgctcgccaagcacgcgcccaacaaggccaacgccatcaagctgatcgagtggctcgtcagcgagcaggcgcagcagatgtatgccgaccagaactacgaatatccggtccgcgccggcgtcgccgtcaactccaccatcgcgggctacggcaagctcggccccgatccgttgccgatcgcaaagatcgccgccaaccgcaaggctgcggcctcgctggtggacaaggtcggctttgacaactga

SEQ ID NO: 4529 - DNA, 1632 bp, BradyrhizobiumColbertium
gtgcacgccgcaaccgcaaccgccatcgcagtcgcagccgcgatcctggtcgcggcgcccgtgatctcgatcgtttcgctggctttgcagccggcgtccgatgtgtggcacgacctgatcaactacgtgttgccggccgccctcctcgacactgcccttctgctcatcggggtcggcgcgctcacacttctgatcggcgccggcactgcgtgggtgatgtcgcgccacgattttcccggccggggcatgctcctgtggctgatgccgctgccgctggcgattccgacgtatcttgcggcgtacgtctatgccgatctgttcgagccgctcggcctggtgcatcgcaccctggcgatctggctgccgctgggcgatgcgctcggccttctgcccaacctccgctcgctgccgggcgccatcttcgtgatcgggctcgtgctctacccttacgtctatctctcggcgcgtgcgacgttccaggttcagtcagccgaattcgcggaagcggcgacgacgctcggcgccggccgatggaccatcttgtggcgcgtttcactgcccatggcgcggccggcgctggcggtcggcgtggcgctggtcgcgctggaaacgctcaacgacatcggcgcgagcgaatatctcggcatccgcaccctgacggtctcgatcttcaccacctggctcaaccgcggcagccttgccggtgctgcgcaactcgcctgcctgatgcttgcgatcgtcgccggcctgatcgcgatggagcgctacggccgccgcaacgccaacatcgaattctcggccgaaagcccccatgtgaggcagcggaccccgctttcgggcgcaagagcgtggactgcgttcgcggtctgcctgctgccggcgctgatcggcttcatcgtgccgctgctctatctggcgcatcaggctcttggccgcggactgcttgcaaatttcgatccgctcctgtggcgccacaccttccattcgtttgcctttgcagcgctcgcgacggccatggcgctgatacttgcgctcgccacgaccattgcgcaccgctttcggccggatcctctgcgatatgtggcgatgagcatcgcgcagaccggatacgcgctgccgggcctcgtgattgccctcggcctgctgacccccgtactcgcggtcgataacgcgctgagcgcggtcgccacctggaccggattttcgctgcccgggctgttgctggtcggctcggggacggccgtcgtcatcgcctatacgatccgttttctggccgtcccggtcggcatgatcaaggccgggttcgacagcattccgcgcgactatgacgagagcgcgcgcacggtcggcgcaggccaggcggtcatgttgagacagatctatctgccgctgctccggcccgcgatgctcggcgccatcatcatcatgttcgtcgactgcctgaaggagctgccggcaacgctgctcttgcggcccctcaacgtcgaaacgctgtcgacgtcgatctaccagttcgcaagccgaggcaatttcgaggacggcgcgctggcggccctcctgatcatcgcggccagcatcggcccggttgcctggctgacccggttctccgaagtgccgagcggccccgcttga

SEQ ID NO: 4530 - DNA, 651 bp, BradyrhizobiumColbertium
atggcctggacccgtgaacagatggccgcgcgcgccgcaaaggaattgcgcgatggctactacgtcaatctcggcatcggcatcccgacgctggtctcgaactacattcccgacggcatggacgtttccttgcagagcgagaacggcatgctcggcatgggtccattcccctatgagggcgaagaggatcctgatctgatcaacgcgggcaagcagaccgtcagcgagctgccctcgacttcctatttctccagcgccgattccttcggcatgatccgcggcggccacatggatctctccatccttggcgcgatgcaggtggcccagaacggcgatctcgccaattggatgatccctggcaagatggtcaagggcatgggtggcgcgatggatctcgtcgccggcgtcaagcgcgtcatcgtggtgatggaacattcggccaaggacggtccgaagctgctgaagcagtgcaacctgccgctgacgggcgagcgcgtggtcgacatggtcgtgaccgatctcgccgtcttcaccatcgacaagcacggcagcggcggcatggcgctgatcgagctcgccgacggcgtttcgctcgacgaggtcaaggccaagaccgaagccgaattccgcgtcgcgctgaagaacacgtaa

SEQ ID NO: 4531 - DNA, 738 bp, BradyrhizobiumColbertium
atgaacaaggtctatcccgacgccaagtcggctcttgagggcattctcaaagacaacatgatgatcatgtcgggcggtttcggcctctgcggcattgccgaggagctgtcggacgcgatccgcgaatccggtgtcaagggcctgacggtggtctccaacaatgccggagtcgacggcatcggcctcagccgccttctcgaaacccgccagatcaagaagatgatctcgtcctacgtgggcgagaacaagctgttcgcccagcaattcctggccggcgagctggaactcgaattcaatccgcagggcacgctggccgagcgcatccgcgcaggcggcgccggcatcccggctttctacaccaagaccggcgtaggcacgctgatcgccgaaggcaaggaagtgaaggaattcgacggcgagaagtacctgatggagcgcggcctgttcgccgaccttgccatcgtgcacgcctggaagggcgacaccgccggcaacctcatctaccgcaagaccgcgcgcaactttaacccgatgatggcgacggccgcgaagatcaccgtggccgaggtcgagcatctggttccggccggcgaactcaatcccgaccacattcacacgccgggcatcttcgtgaagcgcatcgtcgaggtcggtacggccaagaagcgcatcgaattccgcaacacgcgcccgcgtccgacgacggcgccggcggctggcactggagttgaaatctga

SEQ ID NO: 4532 - DNA, 1929 bp, BradyrhizobiumColbertium
atggcccaaggaatgaagcgcctggggacgccgatcgcggcgctgctcggcatggcgctgatcgccctgatcgcgacctcctggctcatcaaccgcgacgcgctgcgcaaggcggtcgaagcgcagatccgcaacgtcaccgggctggagctcagcgtcgcaggcaccatcgacatctcggtgcttccggcaagctacatctccttccgtgacgtcggtctcaagggcggcggcaccagcacgccggcgcttcaggtcgacgtgctcaccgcaaacctgcggctgttgccgctattgctgcagcggttcgagatcgccgacctgacgctgttgcggccgcgcatccatgtcagcctcaagccggacggcgagagcaactggacgcccttcatccagaccatcgcgcgcaccatgaagcccggcgcggagaatcaggtctcgttctccgaaatccggattcaggacggcgtgctcgattacgtggacgtcgccacgcaagccaccgacaagctcgaggacatcgacctttcgttggcctggccctcgatctcgcgctcctttgctgcgaccgggcagttcgactggcgcggcgagcgcgtcgacggctcgatcagcttttccgatttcgtcgccgccctttccggcgaccggtccggcctgaaggcgcggatcgccagcccgccgctcaagctcgcctttgacggcagcgtcgccaatcgcaccagcccgatgatggaaggcacgctcaccgtcgacagcccttccctgcgcaacgcgctgcgctggaccggacagccgcaacccggcagcggcggcttcggccggttcgcgctgaaggcgcgcgccaatgtggtcggcccctcgatcgcgctcaccaacgtcaacgtcgagctcgacggcaatgccgccgagggcgtcatgacctacgccaataacggccggcagacgctgcaggcgacgctcgccgccgacgcgctcgacttcacgccttatatctccacgttccgcctgctcgcgagcggcgcacgcgactggaacaggcagctattcgatctcaacgggctctcgaccaccgacctcgacatgcgcctgtccgcggcaaagctgacggtcggaccgacgaagctcggccgcaccgcgatcggcgcgaatttgcgcaatggcacattggcgctctcggtcggcgaggcccaggtctatggcgggatcgccaaaggctcgttcggcatcgcgcggtccgatacggtcgccgacatcaaggcgcaattccagttcaccgacgtcgacctccaggcttgcgccaccgaactgttcggcctcaacaagctgtccggccgcgggaacatcaacgtctcgctcctcgcctccggctcgagcccattcggcctcgtgcagtcgctcgacggcagcgctaccatcaccggacatgatggcgcgatcgcgggcttcaacgccgaacagctcctgaagcggctggaacggcggcctctgtcgggcggcggcaatttccgcaacggctcgacgccttataacaatctcaccatcgcggtgaaattttccgacggtatcgccaccgccgaggacatccgcgtggaagggccggcgaccaggatcacgctcaccggcaccgcatcggtgccgacgcgcgaatacgacatgaagggcgtggccagcctcaacagcgcgtcggggttcgaactgcccttcgttgtgcagggtccttgggacgatccgctgattttccccgatccggaaagcctgatccgccgctcgccagcctccgcgccgctgctcgacatgctgaaggagcgcaaggcgggagacgccgtgcgctccgcaatcgagcgcatcaccggcagcggaaagcgccccgcgccagcggaatcgccaacggccgagaattccaaagagaacgccaagtccaactag

SEQ ID NO: 4533 - DNA, 1356 bp, BradyrhizobiumColbertium
ttggcggtcgctgcggtcgggctttttgccgccaccgcacccgcctttgcgcagcagaagacgatcacggtctggtggggcaagggtttctatcggtccgaagacgacgcgctgatcgaaacgatcaaaaagttcgaagccaagaccggaatcaaggtggaactgtcacagtacgcgatccaggacatgattccgaagacggtcgctgcgctcgacgccggtaccgtgcccgatgtcgcctattccgactcctatgacgttcaggcgcagggcaagtgggcctacgagggcaagctcgaggacctcacggacatcatggagccgatcaagggccggttcgtgcagaacacgctggacgcgtcgatcctctacaacgacgtcgccaagaagaaggcctattacggcttcccgctgaagcagcagagcatgcacgtccagatctggaacgacatgctggagaaggccggcttcaagcagagcgacatcccgaacgactgggcgggctactggacgttctggtgcgacaaggtgcagccggcgatccgcaaggccacgggccagcgcgtctacgccgtcggccagccgatgggcgtggaatccaccgactccttccagtcgttctacaccttcatggacgcctatcacgtcaagctggtcgacgacgacggcaagctgctggtcgacgacccgaaggtccgcgacggcctgatcaaggcgatgaaggactataccgacacctacatcaagggctgcacgccgccgtcctcgaccacatggaaggacccggacaacaacgtcgcgttccacaacaagaccatcgtgatgacccacaacttcacgatctccatcgcggctaaatggttcgaggactcgcagaaccaggcccttacccaggaacagcgcgacgccggcaagaaggcctatgagcaggacatcatcacggcgtccttcccgaaggcgcccgatggttcgaccatcaagtaccgctccgacgtcaagaccggactggtgttcaccgcggccaagaacaaggccgaggccaagcagttcatcagcttcctgctccaggaagagaacgtccgtccgtacatcgaaggcgcgctcggccgctggttcccggtgaccaaggaaagccaggaaagcccgttctggcaggccgacaagcaccgcaaggccgtctacgcgcagttcaagggcggcaccgcggcgttcgacttcaccaagaactggaagttcacgatcctcaacaatgagaacgtgtgggcgaaggcgatgaaccgcgtcgtcagcgagaaggttccggtcgacaaggcggtcgacgaactgattgcccgcatcaagcaggtcgcgggttaa

SEQ ID NO: 4534 - DNA, 873 bp, BradyrhizobiumColbertium
atggcgatcacgctctccggcgatcaggcaatgcccggcccgcccttgtcgtcgcggctgaccccggcgcaggtttggggcatcatccttctcgcgccctatctgctcgtcttccttgctttcgtcgtctatcccgtctgctacgggttgtggctggcgcgggccccttcgaattatgtggcgctctacaacgatccgatcttcgcgcgcgccgcggtcaacacgctgatcttcctggtcatcggcatcaacatcaagatgttgatcgcactgttcctgtccggcttcttcgcccagcagcgcacctggatcaaatggctctcggtgatcttcatcctgccctgggcggtgccgtcgatcccgaccatcctgtcggtgcgcttcatgctcaatcccgaatggggcatgatcaaccactacatcttctccttgaccggcgatgacggcccgaactggctgaacgatccgaccgtggcgctgaccatggcaatcgccgtgcatatctggaagtcgctgccgttctggacgctgatcctgatcaccggccggctcgcgatctcgcacgatctgttcgaggccgccgaggtggatggcgcgagctggtggcagaaattccgctatatcacctggccctcgatgcagacgctctacatcacctgcacgctgctctcgatgatctggacgctaggggatttcaacagcgtctatctgctcaccggcgggggacctgccgacctcacgcacgtgctggcgacgctcggcatccggtatctcaggctcgaccagctctcgctggcaatggcgtccatcgtctgcgcgatgccgttcgtcctgccgctcgtgtacttcatgatgaaacggttgtcgcgatga

SEQ ID NO: 4535 - DNA, 867 bp, BradyrhizobiumColbertium
atgaagctccccggcgtaagcgaattttcctggcgcgacgtcgcgaccgaagcgcggctgctgctgatcggaattcccgtcttcctgtggacgatgatcccgatctatcacatgttcctgttcgcgatctccccgaaggaggatgcgttctcgggcaagctgtggccggatcacccgacgctgcacaatttccagatcgtgttcaagcagcagcactacttcctgcgcgacttctacatccagttctggaattcgacggtgatcgccgtctccgtcggcgtgctgacgctggtgatcgcgacctcggcggcgttcgcgatctcgcgattgaaggtgccgggcggacgcaccgtgctgaaccttgcgctcttcacctatttcatccccgcggcgttcctcgccgtcccgatgtaccgcaccatgggcaattacggcctgctcaacaatcactggtcgctgatcctggcgatggtgacgatcgcgagcccctatgcgatctgggtgctgaaacaggcgtccgacaagctgccggtcgagcttgacgaggccgccgtgatggacggcgcgacgacgctgcagatcttccgcctggtctatttgccgctgatgatgccctcgctggtcgcgatcggcacctacgcggtgctgctggcgtggaacgagtacctctatgcgttcctgctgctctcgaacgaccgcgagatcaccctccccgtcgcgctcggcaactttctcgccgccgacgattcgccgtgggagctgctcatgaccaccggcttcatttacgcgctgccgccggccgcggtctactacgccttccgccgctacatggtgggcggcctcacggcaggcgcggtgaagtcgtag

SEQ ID NO: 4536 - DNA, 813 bp, BradyrhizobiumColbertium
atgcgcaaggcccctcgtctctcccgcttcaacatcgcctcgctggcgttgggtctggcattcctctatctgccgatcctcatcctcgtcatctattccttcaacgactcgcgtctggtgacggtgtggggcggctggtcgctgcgctggtatcacgagttcttcaatgatcgcgcgatgatcgaggcggcgtggatgagcctgcgggtcgcggtctcctcagcgacgattgccacactactcggcacgctcgctgccgtcgcgctgtcgcgcggcgagcgcttccgcggccgcacgctgttctccggaatgctctacgcgccgctggtgatgccggaggtgatcaccggactttcgctgctgctgctgttcgtcgcgctgaacgccgagcgcggcttctggaccgtgacgatcgcccataccacgttgacgatgtgcttcgtcaccgtggtcgtgcagtcccgcctcggctcgctcgatcgctcgctggaggaggcggcgatggacctcggctgcgacccggtgcgcgcggtcctatccgtgacgctgccgctgatcgcgcccgccatcgtcgccggctggatgctggcgttcacgctgtcgctggatgatctcgtgatcgcgagcttcaccacggggccgggctcggccaccttgccgatccggatctattcggaggtgcggctgggggtgaagcccgagatcaacgcgatctgcacgctggcgatcgccctgatcgcggtggtgatcgtgttggcttcgctcgcttccaaattgtcgagttcgcgtggcgagagcgcggcgccgctgtag

SEQ ID NO: 4537 - DNA, 915 bp, BradyrhizobiumColbertium
atgagctcgcgtcgcatcttcgcgcggccggcgcgctttgccgcaattgcgccgtacgtctggatggtgctgttcttcctggtgccgttcgccttcgtgctgaagatcagcctgtcgcagacggcgattgcgcagccgccctacgagccggttttcgacctgacggcaggatgggacgcgctcaccagcgcctttgccgcactttcgatcgacaatttcaagctgctcatctccgacgacatctacgtgttcgcctatgtgcgcagcctcaccgtcgccatcattgcgaccgcagcgttgctgctgatcggctatcccatcgcctatggcatggcgcgattgccgaagcgctggcaggccgtggcgatggtgctggtgatcgtgccgttctggacctcgttcctgatccgcatctatgcctggatcaacatcctccagcacgacggcctgctcaaccagatcctgctggcattgcatctggtcagtcagcccgtggtgtggctctccaccgataccgcgatgtatatcggcatcgtctattcctatctgccgttcatgatcctgccgctctacgccacgctcgccaagatggagccggcgctggaggaggcagccgccgatctcggcgcgccgccctggcaggtgttctggcttgtcaccttcccgctgtcgctgcccggtgtcggagccggcgtgctgctatgcgtcatccccatcgtcggcgaattcgtcatcccggatctcctcgccggctccaacgcgctgatgatcggtcagaccctttggctcgaattcttcaccaacaaggactggccggtcgcctctgctgccgcgatcgtgttgctggtgatgctgctggtgccgctgttgctgtacgagcggctgcagaagcagcagctcgaacaggggcgctga

SEQ ID NO: 4538 - DNA, 1173 bp, BradyrhizobiumColbertium
atggcggaagagttgtccggaacgaacattgcggctgaagcggctggcgcggatgcatttcccgcggcggagcaagggctgctgcgcatcgagggcgtggccaagacgttcggcacgttccgcgccgtcgatggtgtctcgctcgacatcaaggccggcgagttcttcgcgctgctcggtccgagcggatgcggcaagaccacgctgctccgtatgctcgccgggttcgagacgccggacgaggggcgcatccttctcgggggcaaggacatcgcacaggcgctgccgcacgaacgcccggtcaacatgatgttccagaactatgcgttgttcccgcatctgtcggtgcgcgacaacatcgccttcggcctgaagcgcgccggcatggcgcgcgccgacatcgcgacccgcgtcgccgagatggtcgcgctggtgaagctcgaggggctcgagaagcgcaagcccgaccagctctccggcggtcagcgccagcgcgtggcgctcgcccgcgccctggcgcgccggccgcagctcctgctgctcgacgagccgctcgcggcgctcgacaagaagctgcgggagaacacgcaagccgagctgatggagctgcagcggcggctcggcatgaccttcatcgtcgtcacgcacgaccaggaggaggcgatgacgatggcgagccggatcggcgtgatgaaggccggcaagctcgtccaggtcgcgaaaccccgcgaactctacgaggtgccgcgctcgcgctggatcgcggagttcgtcggcgacatcaacctgttcgacggcgagtcgaaattgcgcgacggtcatcgcctggtgattggcacgcgtgatgcgggtgcgctggtggtcgccgagccgcgcgagccggtcggcgcgggaaaattggcggtcgcgatccgccccgagaaggtcaagctctcgcgccggggccccgcgagcgaggccggtcatcaattggcgatcaaccggcttgacggcgtcattgccgacatctgctatctcggcggcaccaccacctacaaggtgaagctcgacagcggcggggtgctgcaggcttccgttgccaacaacgcgcgcctcgacgtcgatgcctacagcctgaaccagcatgtcgtcgcctggttcggccccgacgattgcatggtgctgacctcatga

SEQ ID NO: 4539 - DNA, 1476 bp, BradyrhizobiumColbertium
atggcagactacgatctcgcgatcatcggcggcggcctgaacggtgtcggcctcgcgcgcgatgcggccggccgcggcctgcgggttatcctgttcgagcaaggcgatctcggcggcgcggcatcgtcggcaacaccgcggctgatccacggcgacctctcggtgctggagcggcgcggcttctggcgggtgcaccgggcgctggccgagcggcggacctggctccgaatcgcgccgcatctggtccggccgatgcgtttcgtcatacctgcgcattcggaccagcgtccgccttggctgctgcgcgccggcctgttcctctatgacagcctcgccggccggggcggcctgcccggatcggcgaccctcgacatcacgcatcatccggtcggcaacgcgctgaagcgcccatttggcacggccttcgaatattcggactgcgtcgtcgacgattcccgccttgtcgtgctcacggcgctggacgccgccgagcgtggcgcgacgatccgggccggagcgcgctgcgtgcgtgccgattgtgccgacatctggcggctcgccgtggtcgatcgcggacatcgccgcaccatcacgacccgggcgctggccaacaccaccggcggctggacgtcgatggtcgcggagatggtcctgcgccagccgcagcccgccgcgacggccatgcagatgagccagatcatcgtgcccaggctgttcgattcagacaacgtctacgtcttccagaacggtgatggccgactgatcttcgcaagctcgtacgagcgggagttcacgctgatcggtacggtcacgcatgatttcaccggcgatcccgcaatcgttgcggtgtcccgggccgaaatcggctatctctgcgaagccgccagccgctacttccgcgcgcacatcgccccggccgacgtggttcggacggtttcgggcgtcaacatgaggccggtgtccgcgagccgaggtgacggcacgacgctgttccacgcgcgccggcgcaaggcgccgctgctcacgatgttcggcggcgacgtcaccacttcgcgcttgcgggcggaggaggcggtgaccaggctgacgccattctatccgatgtccccgccctggaccgccggcgctgcgctaccgggcggagatttcgcctgggatcgcttcgacaccgaggtcgagttcgcccgtgaccgctggcgctttctgtcggagccgcaggcccagcgcctcgttgccgcctatggctcgcgattgtcggcggtgctgggcgaggcaaggacacgcgacgaactggggccgaacttcggccctgaactgaccggcgccgaggtgcgctatctcatgacccgcgaatgggcgcgcttccctgaggacattctgtggcgtcgttccaagctcggcctgacaatgaccgcggcagaccgtgacgcgctggccgcattcatggcggggaacgattcatcccgaaccggttga

SEQ ID NO: 4540 - DNA, 2667 bp, BradyrhizobiumColbertium
gtgggcagcacgcttccgattgctgtgcaggcccttacttgcctggccggcgcggtcgcacctgcacgtgcctttgcgctatccgacagctttcccgctccgagcgatttcgccaagctcgagcccaacgtgatctgggaagcgctgatcgcagccatcgtcgtgtgctcgtttctcgccgcgatcgggctgtggatcctttcctcgctgcgccggagcaggcgtctgcagctgcggcgcaacgccttcatctcctccgccatgaacaatctcaaccagggcgtggtgatgacggatgcgcagcgccgcatcattttctgcaacgaccgctatctcgagatctacggtctgacgcggtccgatatccggcctaacatgaacggccacgacctgctcgaactgcgtcgcaggcgcggggtgctggatgccgcctccgacgacgagttctacgagaaggcagccagcgccaacggcttgatcaccgaactgccggacgggcgcgccatcctggtgaagttcttcgtgctgccgaacggcggctccgtggcgacgcatctcgacgtcagtgaacagcgcaagctatcccggcagctcgcctctaccacgcagttcctggaatcggtgctggaccatgtgccggcttgcgtggcagccaagaacatcgaggacggccgctacatcttcgccaataccgcctatgagcggttctggggtttttcacgggaccacgtcgtcggcaagaaggcgcgcgagctgttcgcgccggtctcggcggacagcatcgatgcggccgaccgggcggcgctcaactcgccggacgggcagttccgcaacgagttcgaggtcgagcggggcggggagcggcgcatggtcgcctccatccggatcgcggttcgcaacgaaggcaacaggccgggattcctgctgctggtgtttgaggacatcaccgaccgccgatcgctctctcaggaactggagagcaccaagaagttcctcgaactcgtggtggacaacatcccggttgcgctgatcgtggaacaggtcaaggatggccgctatctgctcgccaaccgcagcgcggagacgatcctcaaccgcaggcgcgaggaagcaaccggcctgacggcgtccgacattttcaatgcgaaggaagccaagctgatcatcgcgcgcgacgaggccgcgatcaagaagcgcgggatgatcaccgaggagcatccgatctcgaccaaggacggcctgcgcctgttcctgacccgccgcgccaccgtgctcagcgatgcaggcgagccgcaatatctgatcaagacccacgaggacgtcaccgaccgccggcagaccgagtcgcgcatggcgcacatggcctatcacgacggcctcaccgatctgccgaatcgtgccgccttcctgcaggcgctgatgcagatgatcgaggcctgcgagggtaccggcgaggagttcgccgtcctctgcgtcgacctcgatggcctcaaggaggtcaacgacgtcttcggccatgcgctcggcgacaagctcctgatcgaggtcgcccggcggctcgaggactccgcgcgcggcggcctggtggcgcgcctgtcaggcgacgagttcggcctgatcatcgacggcaagcagcccgaggcgggcctcgcactggcgcagcagattggcgaagccgtcgccaaggacttccaaatcgacggccggccggtccgcgccggcatcaccaccggcatctcggtcttcccgcacaacggcaccgatggcgcctcgctgctcgccaacgccggcgcggcgctgttccgcgccaagcagaagtcgcgcggcacgatcagtctctaccagccggagatggaccagcagatccgtgatcgccgcgtgctgcaccaggacctctcgatggcagtcaagaacggcgagctctcgctcgccttccagccgcagggggccgcgggccacagcgtcggcgagagcgagatcatgggcttcgaggcgctggcacgctggcagcacccggtgcgcggccaggtttcgcccgccgaattcatcccgatcgccgaggagagcggcctcatcgtcgagatgggcgaatggatcctgcgcgaggcctgccgcgaggcggcgtcctggccgaagccgctccaggtcgcggttaatttgtccccggcgcagttcatgcacggtgacgtggttggcctcgtccattcgatcctgctcgagaccggacttgcgcccggccggctcgagctcgagatcaccgagggggtgctgatcgaggatttcgatcgaggcctcgcgctgctgcgccgcctgaaggcgcttggcgtacgcatctccatggacgatttcggcagcggctactcgtcgctgagctaccttcaggcgttcccgttcgacaaaatcaagatcgaccgcgccttcatcatcaatctcggccgcaacccgcaatcggcggcgatcgtgcgcgccgtgatcgatctcggccacggcctcgacatgtcgatcatcgccgaaggcgtcgagaccgtcgatcagctcgccttcctcgccagggagggctgcgacggcgtgcagggctatctgctcggcaaaccgctgccgatcggaaaatatgccgggctcgtcggtcgcgccgacgcggtggagctcgcgctcaagaccggctag

SEQ ID NO: 4541 - DNA, 1104 bp, BradyrhizobiumColbertium
atggatagggtggactgtgtcgtcgtcggagccggcgtggtcggtctcgcggtggctcgaaagctcgcccagtccgggcgcgaggtgatcgtgctcgaggaagccgaggccatcggcaccatcacctcctcgcgcaacagtgaggtgatccatgccggcatctactaccgcgccgggagctggatggcgcgcatgtgcgtcgcgggcaagcacgcgctctaccgctactgcgccgagcgcggcatcccgcacagaaattgcggcaagctgattgtcgcgaccagccaaaaggaaaccgagaagctccaatcgatcaaggcgcatgccgaagccaacggtgtgctcgacatgcaactgctcacgggcgaggtcgcacgcgcgctggagccggcgctcgcctgcgacgctgcgctgctgtcgccgtcgaccggcatcatcgacagccacgcctacatgctctcgctgcgtggcgaagccgaggacgccggcgcggccttcgcgtttcacacgccgctgatccgcgccaaggctgccggcggcatcatcgaaatcgaggccggcggcgatgcgccgatgacgctccaatgcgaccttctcgtcaacgccgcaggactctcggcgacaacggtcgcacgcaacatcgacggcatgccgatggaccggatcccgccggcctatcttgccaagggaaactacttcagctgcaacgccaaggcgccgttctcgcgcctgatctatccggtgcccgaacccggcgggttaggggtgcacctgacgctggacatggccggccaggcgcgcttcgggcccgacgtcgaatggatcgaaacgatcaattacgaggtcgatccgtcccgcgccgagcgcttctatccggcgatccgcaagtactggcctactctgcccgatggggcgctgatgccgagctattcagggatccgaccaaagatcgtgccgcccgctgtggccagccaggacttcttgatgcagggcccgcccgatcacggtgtcgcaggcctgatcaatctgttcggcatcgaatcgccaggactgacgtcgtcgctcgcgatcgccgaccacgtcgccgaactcgcaaccgtctag

SEQ ID NO: 4542 - DNA, 180 bp, BradyrhizobiumColbertium
atgacaattcaggcacatctcgttgaattggaacggaagcacaaactgctcgaaaacgaattgcacgaagctctcgtgcacctttcaacggacgacctgcaaattgttgagttgaagcgccggaagttgatggtcaaggaccagatcgagcgtctgaagcacagcgatacgctccactag

SEQ ID NO: 4543 - DNA, 123 bp, BradyrhizobiumColbertium
gtggatgccctgtggaaattatcgtccttgcgcagcgtgatcgcaagcgatctgcggcttcgtccgccggtctcccgcaagatatttctgcaaggagccgcggaagttgcgcagccgcattga

SEQ ID NO: 4544 - DNA, 207 bp, BradyrhizobiumColbertium
atgaccaacgaagatgagcgtgagctcgaagccgagctcacccggttgcagcaggaacaccgagatctcgatgcggcgatcgatgcattgcatcaatcgcccgcccccgacctgttgcggttacagcggttgaagaagcgcaaactgttgttgcgcgaccgcatcgcgttcattgaagaccagatcacgcccgacatcatcgcctga

SEQ ID NO: 4545 - DNA, 219 bp, BradyrhizobiumColbertium
atgtcggcaacgccccttctcgacaacactcattacgaacaggcctgcgatcaggcgatcgcgatgtgcgacggcaatctacgcagcaccatcaaggcgctgatcatggccaatgaatatctggaaaccgagctggaggagttgcaggcggctgttgccgccggctgcattccggaaacctcgcgcagcaagatgcggagcaagagcagcgccgcttga

SEQ ID NO: 4546 - DNA, 252 bp, BradyrhizobiumColbertium
atgtcggatgtgacctattacgttgcaatgccctttttgatcgatgacgacggatcacccgtcgctggcgcggcggaagagtgtcagtcctcaacggcggcgctacgacgcgccgagattttggcgcgcggccccggccatatcggcgcaatcgcgttcagccgcagcggcgatcccatgaccggcgaatttggcgacgcgacgctgctgcgcaaattcggcaacgtgcccgaagatctcgcaaccctctaa

SEQ ID NO: 4547 - DNA, 630 bp, BradyrhizobiumColbertium
gtgaagccatcgcggcgcaacgccccggcggatgatgcagccaaggacaatctcagggcgacaatccgggacctgcggaccaagctcaaggaagcacagcgccgggtcgcggaactcgaagctgcggccgatacggatttcctgctcgagattcccaaccggcgcggcttcgagcgcgagctcgcgcgcgccatcgcctatatgaagcgctaccgcgccagcggggcgctgatcgtcctcgacgtcgatcggctgaagccgatcaacgactccttcgggcatgccgccggcgacgaggtgctcaaggcgattgtcgcgaccctgacgcggcagattcgtgcctccgacgtggttggccggctcggcggcgacgagttcgggctgctgctctggaatctcagcgaaactgacgccaaggcgaaggccgcggccttcgagcaggcgatcgacgaattgtcctttgtgtttcgtggacaatcggtggccgcgggcgcctccgccggcgtcgcgctgctcggcccgcacgccgacgcaggccgcgccctggaagaggccgatgccgcgatgtacgtgcgcaaggcgcgacgccggcatgagccgcgtatcaggcttgtcggtagcgagctttag

SEQ ID NO: 4548 - DNA, 120 bp, BradyrhizobiumColbertium
gtggatcggccggcgctggtcttccggcccgctttggccttcgcagcgctcgccctttttggtttcttcatgggcatcctgctcaatgaaggcttgcggggattcaccaagacaggatag

SEQ ID NO: 4549 - DNA, 489 bp, BradyrhizobiumColbertium
atgaccgcgccgatcgccatcatcatgggaagccagtcggactgggacacgatgcggcatgccgccgacacgctcgaggcgctcggcatcgccgccgacacccgcgtcgtctcggcgcatcgcacccccgaccggctgtttgctttcgccaagggcgccaaggccgcaggctacaaggtcatcatcgccggcgccggcggcgcggcacatctgcccggcatggccgcggcgctaaccgaactgccggtcttcggcgtgccggtcgaatccaagacgctcaagggtctcgattcgctctactcgatcgtgcagatgcccgcaggaatccccgtcggcaccctcgccatcggcaaagccggtgcgatcaacgccgcactgctggcagccgccgtgctggcgttgtcagacccggccttgtccgatcgccttgccgcctggcgcaaggcgcagactgacgccgtcgcggagcgcccggaggacaaggcgtga

SEQ ID NO: 4550 - DNA, 1089 bp, BradyrhizobiumColbertium
gtgaagctgaagcccggtgacaccgtcggtatccttggcggcggacaattggggcggatgctggccatggctgcggcgcggctcggcctgcgctgccaggtgttctcgcccgatccggactcgccggccttcgacgtcgtacttaacgcgacctgcgccgaatatgccgatgtcgaggcgctggagctgttcgcgagcgacgtcgacgtcatcacctacgagttcgagaacgtgccggccgcggccgcgatggtgctggacgcgcgccgcccggtgctgcccaaccgcaagatcctggagaccacccaggaccggctcgccgaaaaggattttgtcacgcacctcgggatcggaaccgcagcctatgccgacgttacctccgtctcctcgctgcgcgaggcgatcgccaggatcggccttcctgcggtgctgaaaacccgccggttcggctatgacggcaagggtcaggccatcatccgcgagggcgacgacatcgccaaggtgtggacgagcctcgccaccaaatcggcgattcttgaagccttcgtgccgtacgaacgcgagatctccgtgatcgctgcgcgttcggccacgggccaggtcgagtgcttcgacgtcaccgagaacgagcaccgcgaccacatcctgaagatatcgcgcgcgcccgcgccgatcccggatgcgctcgccgaggaggcgcgcagcatcgccggcaaaattgcaggcgcgctcgactatgtcggcgtgctcgctgtcgagatgttcgtgctcgccaatggcaccggaccgaaggtgctggtcaacgagatcgctccgcgcgtgcacaattccggacattggacgctggatggcgcctcagtctcgcagttcgagcagcacatccgcgccatcgccggctggccgctcggcaagcccgtgcgccatggcgacgtcgtcaccatgaccaacctgatcggcgacgagatcaacgattacgaaaaatggctgaccgtgccgggcgcgaccgtacacatctacggcaagggcgcgccgcgccccggccgcaagatgggccacgtcaccgaagtgcgtcccagcgcaagcaagtaa

SEQ ID NO: 4551 - DNA, 723 bp, BradyrhizobiumColbertium
atggatatcaagaaatatgctgccgagggcatcggcacgttctggctcactttcgcgggctgcggcagcgcggtgatcgccgccggcttcccgcaggtcggaatcggcctgatcggggtgtcgctggccttcgggctgagcgtcgtgaccatggcctatgccatcggccacatctcgggctgtcatctcaacccagccgtcacagtcggtctcgctgccggtggccgttttcccgcgggccaggttttgccatacgtcatcgcccaggtggccggcgcgatcgtggccgcctggctgctctatgtcatcgcgagcggggcgcccggattcgatgtcggcaagggcttcgcgtccaacggctatgacgcgcattcgcccggccagtacagcatggtcgtgtgcttcctcacggaagtggtgatgacgatgatgttcctgttcatcatcatgggcgccacccatggccgtgcacccgcgggtttcgcgccgctcgcgatcgggctcgcgttggtgatgatccatctcgtcagcattcccgtcaccaacacctcagtgaacccggcgcgcagtaccggcccggcactgttcgtcggcggctgggctctgtcgcagctctggctgttctggattgcaccattgatcggtggtgcgctcggcggggttgtctatcgctggctcagcgaggagcccaccggcatcgtcgcgggagtgaaggcggcctga

SEQ ID NO: 4552 - DNA, 297 bp, BradyrhizobiumColbertium
gtgcaggttctcgttcgcgataacaatgtcgatcaagccctcaaggcgctgaagaagaagatgcagcgcgagggcattttccgcgagatgaagctccgcggccattacgagaagccctccgagaagaaggcccgcgaaaaggccgaagccgtgcgccgcgcgcgcaagctggcccgcaagaagctgcagcgcgaaggcctgctgccgatgaagccgaagccggtgttcggcgctggcccgggcggtgatcgcggcggtcgtagcggcccgggggcaggtccgcgcggaccgcgctga

SEQ ID NO: 4553 - DNA, 564 bp, BradyrhizobiumColbertium
ttgtgcggctgctccttcgatctgggatcgctgctcccggagaaggacaagccgcaggaggcgcccaagacggccgcgcccgccgagagcgcggtgagcgcgggcaacgtcgccgaagctcaggctcacaccgcaaaggcccaatccctggcgaagtcaggcgagaccgcggcagcgctcgatgagttcaatcgggcggtcgggctcgacccctacaacgcgcaggcattctacggccgcgccctgatctatcagggcaagaaccagcacgacttcgccatcgccgatttcagcgctgcaagcgggctcaacccgcagaaggccgagccgctgctcggccgcgccatcagttatctcgcgctcggcaaggtcaaggaggccgcagccgatctggacgaagcctccgaggccgatccgcacaacgcccaggtctggaccacgcgcggacaggtctatgagcggctgggcgacaaggccaaggcggcggcgtcctacgccaaggcggtcgcgctccgcccgcgcgatgatgccgcccgcagcggccttgcccgcgttggcggctga

SEQ ID NO: 4554 - DNA, 921 bp, BradyrhizobiumColbertium
atgctgaaatacctcgccaagatttcgatggatattttcccctcggtgctcgcgacgatcatcggggcgtacatcgttaatcattacatcaacgccaagccggcggctgatgcgcccgcggcgatggttgcacccgccgacgccggccacaacggcaagcctgctgataccgccaacctccccgctcccggcgccaaggccaagggcatctccgagaagagcgtcacggacaaggcggccgccgatcatcagccggccgccgagcccaagggggccgagaaggctgcggagaaggcaccggacgtggcgccgacggagaccgggccgcgcgccaagccgtccgcccgtgaaaaggtgattgccaaatctgccccggcggttcccgctgctccgatggtcgaggccaattcggcaccggcggctgccgctccggccgcaacccctgatgccaacgatctcgtgcgtgctgcgatcgagcgcctgcgcaagtcgcctgagggcaggtccgaggccaagtcccctgagaccagaacgtctgaaaccaagccagccgagagaccggcggagcctgcggtgcgggaagccgtccgcacgccggaggccccgcgggtcgttagcatggagccggccacagtccgtccgctgccgccgccgatcacagtctcgacaccctcacctgagatctacggcaatggtggctccaatccaccctacacggcctcgatcagcaatgaggatccgaaccgggtgacgccgccggctgatattcccgtgccggtcatcgcaccgccgctcgacttgcgtgccgatgcgggggcctccatgccgcgaccgaagaagaccaatgtcgccgacgagatgctgtcgggcatgaagtcgatgttcaacgcggttctgccgaagagcgccacccccgactga

SEQ ID NO: 4555 - DNA, 183 bp, BradyrhizobiumColbertium
atggactatgtgatcgttcccgtcgtcgccggcgagatgacgatcgtgtcgcccaatggcgaacggggcaaggcgcagctctccgccggaaaatcctacttccgcaaggctggcgtccagcatgacgtacttaacgaaacctcaactgagatcgtgttccttgaaattgagctaaagccgtaa

SEQ ID NO: 4556 - DNA, 171 bp, BradyrhizobiumColbertium
ttgcgcgtgatgttccgcgatgtcgagataggtgccgcgtggcagcgaacctccaaggacaacaacaccgtctatcactcggtcaagctcgacgacccgtccttcccggcgccgatctacgccaacctcgtcgcagtcgatgacggctacgcgttggtctggtcgcgctga

SEQ ID NO: 4557 - DNA, 204 bp, BradyrhizobiumColbertium
gtggaaggcgtgttccaggccatcgccgatgcagccgcgagcggggccgaaacaagcatcgtcggcttcggcaagtttaaggtcaaggacacaccagcccgcgagggccgtaatccatcgaccggcgcgacgattgcgatcgcggcttcaaagaagctgacattcacgccggcgaaagccatcaaggaggccctcaacgcgtga

SEQ ID NO: 4558 - DNA, 138 bp, BradyrhizobiumColbertium
ttgccggtcgaggtgaaggtgccgatggtcgccattgtcgtgtccattcagttttccgggccgcccatcgcggcctcgatggctggcgacagaccggaggcgatcgacccgcaccccgaaggggccggcacgcagtag

SEQ ID NO: 4559 - DNA, 120 bp, BradyrhizobiumColbertium
atgtgtgccgcgagcggtgatcgggttgtttcgtcggtcaaggtttcgatggtcgccattgtcgttttcctcggccgtttcttctggcacacccacgtcgtcctcgattggcatgtctga

SEQ ID NO: 4560 - DNA, 276 bp, BradyrhizobiumColbertium
atgatcaccaccatccccaacagggtaaaatttcaaaaaagggctggactgtcaggatatgtcgcggaactcgggagctgtttcctctgcgcggatctcgggatctctcccgaactcgaaccgcgacctgatcatgcaagctacctcgcatcgtggttggaagttttgtcgagtgagaagcgctttatcttctcggctgctgcgcatgcgcaacgcgccgtcgcctatctgcacgaccagcagccgaaggccgctgaggtcgaagaggcagcatga

SEQ ID NO: 4561 - DNA, 906 bp, BradyrhizobiumColbertium
atgtcctatacatcgagttcggcggaccgcgccgatgtctatacccgcatcaccgccgagatcgtcgccgcgatcgaagctggcgccggcgaatggcgcatgccctggcatcacgacggcactgccatcacccgtcctcagaacgtctcgtcaggcaatcgataccgcggcgtcaacgtgctcgcactctggatcgctgcgcaagctcatggctatgccgacggcctctggggaacctatcggcaatggctggctatcggcgcgcaggtacgcaagggcgaacgaggaacgacggttgttctctggaagcaggcaaagccggccgccaacgacgatgcagatgatggtgacgatgacgttcgtcgccgcgtctttgcacgtgcattcacggtgttcaatgtcgcccaagtcgatggctacgaacctcaggtcatcgaggagcttccagagatcgatcgccttactcacgtcggcgagttcatcgatgcgctgaagatcccgatcatcaccggcaattacaatgcgcactaccgcatcgacatcgacacgatcttcatgccggactacgcggcattcacgagcccagccgcccatgccggcacgttaatacatgaagcagctcacgccactggcgcaaagcaccggctcgaccggaacttccaggaacggttcaagcgcgattggctgccgatcgaagaagccaccgccgaattgaccgcttccttcatcctggcggatttgggcgtcgcccatcatcccaggcccgatcacgccgcctacgtggcatcctggttgcgcctcctcaaggacgaccctcgcgccatcttcaccgccgccagcaaagcccagcaggcggctgactggatgcatgcccagcagcctcggaccgaggagatggcggcatga

SEQ ID NO: 4562 - DNA, 2166 bp, BradyrhizobiumColbertium
atgagcaaagttgccctcgctccgctcccacaggatctgcatgaccgtccggttcttgcttccgcggcgctgaagcagggcttcgatcggagctgcctgtcccgctatggcgatgcaagctgggatctcgggccggcggtatttcgcgagaacgcccgccgttgccatgtcaccgtacatttcggctcggtcgaagatatcggtacccgcgaagcaatccgggaactgctctatgcccggctcaacgtcgatctccctggtcatcgcaagaagctcccgcctgtctgtgttcggcagatattcaaccgagcgcgtcgcttcttcgagttcgtccgcggcgaactcagcgccgtcgatctctcgcggatcgatcagcaattgctcgaccgctacgcgcgccatctccagaccggttgcagccgacggcctgtcatcgtcggtcaccttctcgaggtgccggtcgacctctatgcttttcgcgatcatcttccctccggagggctgcggttccagccgtggagcggacgcgctccagcccgcgtcgctggttatcgtcacgtccgcgagaaccgcaccccacgaatgccggaagaagtcatcgccccactgttggcctggtcgatccgctacgtcaccgagtttgcgcccgatatcctcgccgctcgcgacgagcttgatcgattggagacccattgcgccaagcttgttcaatcagatcaggcccttgaccgcaaacagcgccgtgcccgacagcgccggcgtctcatggactactttgagcggcgacgacgtgaagagcgcggtgtgccgatctgggggaccgctcacaatggcgccactatgcggcttccagatacaggggacgtatcgcctcctgtcaactcgcacctgcttcatcttcatatcgggatcgatgcccgcgcagagtcgaggatgcatattcagcttgcgagtggagcgcccgatctgatcgatgcagccatacgccaactcggcgttgagactggcggcatggatacgtgcatctctcttctgcccgagacgggccttccgtggcgacctcgattcgacgccaagacgctcgcccaggaagaacggatgctgcaatcagcagcatatattctgtgtgcgtatctgaccggcatgcgcgactgcgaagttcaggcaatgcagcgtggatgccttgctatatcccgcagtgaagatggcctgatcatgcgccatcgcgtccggtcagttgcctacaaaggcaaatcgagccatggcgaagcagccgattgggtcacgatcgagcctgtcgccaaggccatcggtgtgctggaacgcctctcgttccaggccgcatcggcccgcggcctcacgacactctggccggtcctggccgctaaatccgtgtgcaaggatcacctctctgccgagatagtacgccagctcaatctttatcgcgatcacctcaatgaactgttcggcacgatcaacgagccggttattcccaacagttccgaaggcaagccttggcgaatcacaacacggcaatttcgccgaacgattgcatggcatatcgccaaccgtcccttcggtacgatcgccggcatgatccagtataagcatgcctccgtcgcggccttcgagggctatgccggctccagcaagtctggcttccgcgccgaggtcgagaaccagcgtgctcttgggcaactcgatgacctgctggtttacttcgatgagcggcaagttggttcgacgctttccggaccagcggcaccacgcatatcgaaggcgcttgatgctgcagcggtagaacttagcccccttccagtcataattgcagatcgcgcgcggcttcgcacgatgctcgccagtctcgcgcgcacattgcacgtcggcgtgctcgccgattgcttcttcgatcccgggaccgccctgtgcctgaagcaggcaaccaacgccgacaacaacaagatgccgctgaccgtgctttgccaaccgacacggtgtccaaacgcctgcatcaccgccaggcaccggccagcatgggcacgttccgcagacgaggcgagagctgtcctcaaagagaagcggttgtcttcgctacagcgctccgccctgcaacaggatctcgcacgcatcgaggctgtcctcgacgatatcgatcgcagcaactga

SEQ ID NO: 4563 - DNA, 1785 bp, BradyrhizobiumColbertium
atgagaggccggccgcgcaagggaacttcagttcgttttgtgcccgcagatggtgttgttccagctcatgccggtgaccaggtgatcggactgcgcttcaacattgaggcgcgtcatggcgggatcgtcgaggtcgatctcaccagcctgagcccgcgagcacttgcgatagcctttgccggcgctgttcgccgacaggctgaactcggcggggcgttgggagcgcgctgcaccatcatgcagcacattacagcatatcataagtttttcgcatacctgcgagcccattctcatgccacgaagccggctgatcttcgcgcgcaggatattgacggattcgaagcctcccttgaggccggcggcatgacgccgatccatcggcacacggtcctcgcgaaggcgattctggcgctgcgctctatcgatgccgatcaacccggccttctcgacgataagctccgccatcgcctgagctacaccagcgcgcaatccgcaggacggtcgcaaccccgcgacgcatatagtccgttcgtcgctcgtcagctacgtgacgcggctcgggccgatatcggcaaaatattccgacgtatcggccgtccgctcgacgaagccattgattccaacctccgcagcgcagtcgccgatgttgaagccaggattgccgctgaaggcaagatcgaccactcggacctcgccttcaaacgcctgtacttcatgcgcctgcgacggggcctgccggtttcgagcttttccgaagatgtccataaccgccatcatttgctcgcaaccgatctgccgccactgctgacgttcctatcattagagacagggctcgagatcgaatgctgcaagacgctgaccatcgattgtttgcagagcccagagtccgggacgatcgagatcagctacataaagcgtcgcgcgcgtggtgccgagcagaagcgtctgcgagttcgtgatggcggcctcggcacgcctggcggattgatccgcaagctgatcgaggtgacgagctttacaaggcgctttcttccggtcgagtctctctgggtctatcattataaagggcgaggacagctccggtccggcatcgatcacccgcatcagttggtggacaactgggtcgctggacacggcatcgtcgacgacgatcgccgtccgctacaccttgttctctcccggctgcgcaaaacacataaggcactctggtatctcaagaccgaagggcacatggcgcgctttgccgtcggccacacgccggagatcgccgctcgtcactatgcggatattccgtcactgcgccctttgcatgaagccaccgtcgccgaggcgttcacggatgttgtcgcgtccgcaggaccgatcgttctgtcacccgacagcgagtccctttggcgcgagggtgttgacgcccctgtgcagaacaataacattcccgcgctcctggatggagatcaggacgtctggctcgcggcgtgcgcgggctttcagaacagccccttcgccgaagcaggctcaccctgtccgcagccattctggggttgcctggaatgccgcaacgcggtcatcacggctcgcaagctgccagcgatcctcgcgtttctcgactttatcgagggcgagcgcgccgggctctctgcggccgactggagcatcaagttcggtcgcgcgcatgcgcgcatcacacaacaggttctgcccgtcttctctgaacgtttgatcgcccaagcgcgcagcgaggccacccaacaatctctctatcttccgcccgaggtgcggccatga

SEQ ID NO: 4564 - DNA, 1317 bp, BradyrhizobiumColbertium
atgatcctgcgggacggggcactctacgatcctgatctggatcgtttcttccgcgaccttcccctcaatggcgtccgctcacggcactcccttcgtgcgtatggctatgacgtcctggtctgggtccgctttctttcggaagcctgcggcaagtccgtatggcaaggtgatcgtcgcgacgtccttgcctatcatcgcgttcgtcgccggacggaggccggccaacgtatctccgcggcgtcctggaatcgagctgttgcctgtctcgatcggctctatcgttggggcgttcgcgaaggcttgctccctgaagcgccgttcacgcaccgctcggtttggaggcaaggatacggcggccggcgtgcgcagattacagcccgcaatgacgcctatgagccggctgctcgtcgagcagatgtcagctttgtcacgctcgatgactaccgggtattttgggacgtcggcctcagagggcttatgcctgatggcggagcgcggccgggagcgcgtgatcgcaacggcattcgcaatgcgttgttttccgacctcgttgtgacgacgggccttcggctggaggaagcctcctttctgtttgcatccgaccttgctgccgtcgatcggcgaacagctcgacaggtatggctcgatctgccggacgcgctgacgaagggcgatcgtggtcgccagattcttctttccggtcgactgcttgaacaggcgcgggcctacatcgcggttgaacgagctcacgccgtcactaagttccgacaacgctccggctggcgctcgtacgaacgcccgatcttcgttcacagggagcggtcagcttcccggttgcgactgctcgacgggagtgacgtcgttcttgatctgctgagccccgaagagcgcagcaggaccatcgtctgcgatgatgacggtacagcgggcgagcccgccgtgctgtggctcacggaagtcggattgccggttcaaccgaactcctgggaggtgatcttcgcccgggcatccgagcggtgcaggtctctcagcttttccgtcaacatcacgccgcaccagctccgccatacctttgccgtgcatatgctcgcgatgctgatccagcagcggattcgagatgcagcgttgcccgctggcccgatcgaaggatatcggcagatcctcggcgatccactccagcaagtgcaacggctgcttggccacgccagcctcgcaacgacctacatctatctcgatcacatcgcttcgcgcgccgataccgttgatgccgccgtcgaggagttactggcgctgcttccctcggagcgctcgttatga

SEQ ID NO: 4565 - DNA, 726 bp, BradyrhizobiumColbertium
atgaacaggaacggagaaaagacgcgaggcgacctgtacgcccgcatcacggaccgcattgtcgcggagctcgaacgcggcgtgcgcccctgggttcaaccttgggccaccgcgaatatggcaggccacatcacgcgaccgctgcgacacaacggccagccctatacgggcatcaatgtcgtgctgctttggtcagaagccgtcgcgcgcggcttcagctctccgatctggatgacgttcaagcaagccagcgaactcggcgcgcacgtccgtaagggcgagaccggcagcaccgtgggttatgcgagccgcttcaccaagacagagaccgacgctcacggcgacgaagtcgaaagggatatccccttcctgaaggcctataccgtgttttgcgtcgatcaaatcgatggcttgcccgagcattattacggtcggccggccgctgtcgcatcaacgatcgagcgtaacgcgagcgccgacgctttctttgccaataccggcgcgattgttcggcatggtggctcgctggcgttttacgcgccctcgtccgatcacattcagatgccgacgatcgaaagttttcgcgacaccgcctcctatgtcgccgtcagagcccatgagaccgtgcactggaccgctcccgctcaccgcgttaatcgcgatctcagccgttacagcaaggatcggagcgaacgcgcgcgcgaagagttgattgccttatcttga

SEQ ID NO: 4566 - DNA, 588 bp, BradyrhizobiumColbertium
atgaccaaacctgctcgttcctctcgcgccagcgcccgcgtcatcccgcttcgcaagggcacgactctcgaaatggtccggctcgcctgccccgactcggcacaggcacagcgcatctctgaaagcttcggccttgcgatcctggacagtgacggcatccgtgatctgcatgagcggctcatcatcgaaactgcggacgcgctcaaggacggcctgagtgaacgcgcaatgcagattcaccttcaaaggatcgtcggcgcttatgtcggctccgcgcacggcgccggccagttctacacccgcgcagttaccgaagcgcgagatgcgaccgccaagctcgccaacgacggccgcgatgaggacctcgatggtccggtcggcttcgatagccaggcacagcgcaagcgtgaattcgccgccgacatgggcgttcagtctcacgcccttcgcatggccgccgagggcgccgtcgctgcctatgaaaaagtggtcggcgagacctggaagcctttcgaacgtcctgtcgacaacacgaccgacaccgtcggccggaaggcggcgaaagctcagatgtcggcgttcgactaa

SEQ ID NO: 4567 - DNA, 414 bp, BradyrhizobiumColbertium
atgaaggcttcctccgaacgtctcgcccagctttcgcgcatggaagaggcacggcgccagacgcagcgccagctcgacatgatcgaccggcagatcatccgccgcatgacggcgctgattccgcagcttggccgcaagcggtccgcataccgtggcggcaagccgcccgaccccagcgctttcctcgaacgctatcgttcgaaccttgcggcgatcaccgcagagcgccagccggagatcgacgcgctgtcgcgcaagctcgcccggcaggatgtcgcgatcgagacgctgcgggcccgatgcgcgccggagtttcgacccgctcatgacgacccggagcgcgcacatcgcaaggacgaatgtcgcagctccgccgactgtcgtccgggcaagcgccatggtgctgcggcctag

SEQ ID NO: 4568 - DNA, 396 bp, BradyrhizobiumColbertium
gtggcgatcaccttcccgcatctcttcaccggctacgagcggcgctgcgccgagcgcacgatcaaggatagctggcccgatgcgtgggaggtgatcttcgggatcgtgctgcagcccggcgaatcccgtgagaaggatcggcgcgctttcgagaaggagcacaccgataattggatcgtcgtgtcggcgatcacgtccgatcagcagccgggctttgttgaagtcgtcgccacaccgggcggcagacgcggcgcggggacggaggagcgacgtttcctcatcccgtccgacgagtaccggattggccgcttcggctttgtcgtcgatgagacccgccacccggtctattccggcccgtcgagcttcatcggttggcagggaaggacgccgccatga

SEQ ID NO: 4569 - DNA, 477 bp, BradyrhizobiumColbertium
atgtccgcgcagttgatctacgacctcgtcccgctcggagcgatcatccggttttccgacggcacgccgcggccgccggagcggcaccgcaagaagctcgcggcctgggaacaccgcaacagcggcggcaggctgatccgcaagcaggcagaacaccgcgtcggcaacaccatcatcgccgccactatcacactgcacgccggcgactgtggcggcggcggcgttgtggtgcttcgcgtccaccggagcttctcggtcgacagcgacctgaggttcgtcgtaaccgaacgcccgaggatcggtgcggtccgcgtgctcaaccgacccggcgaggacgccgaactcgtctatctcggcagcagccgcgccgacgcggaatgctggctgcagagccacggctatccggatgcggttctcgacgaggtgaccgccgattcgcgggcagccgacgtcatggaggggaggacggccgtatga

SEQ ID NO: 4570 - DNA, 1686 bp, BradyrhizobiumColbertium
atgcaactcatcaagattgatccgcgtgcgctgaacgaaaatcccgatcgcatgcgccagacgaagtcgacgccgcaggccgacgccctactgctcgcgacgatcaaggccgtcggcatagtccagccacccgtcatcacgccccagaccggcggcggcaacggctatgtcatcaatgccggtcatcgccgcgtgaagcaggcgatcgccgccggcctcgaggagatcgacgtcctcgtcgatgaggcggcgaacgacaacggtgccatgcgctcgatgatcgagaacatcgcgcgcgaagcactcaatcccgtcgaccagtggcgtgcgatcgaacgtctcgtcgctctcggctggaccgaagaggcaatcggcgtcgcattgaccctgcccgtccggcagatcaggaagctccgcctgctcgccaacgtgctgccgatcatgctcgatcacatggccaagggcgacatgcccgacgagcgccagctccgcaccattgcctcggcgtcgcacgatgagcagaaggaggtttggaagaagcacaagccctccaaggcggatccgcaggtgtcgtgggggagcgtggcgcaggccctgaccaaggtccgcatgtacgctcgtcacgccagcttcggtgacgacctcgcccaggcctacggcatccagtggatcgaggacctgttcgcgccggcggacgaggatagccgctacaccacagatgtcgaagcgttcctgggcgcgcagcaggagtggatgacgaacaacttgccgaagcgcggcatcatcgccgagacgacgaactggggcgaggtcaagctgccgccgaaggcggagcgcgtctacggcaagccgtcgaagtcggattgcacggcgatgtatctcgaccgtgacggccgtgtgcagagcgtgcattaccgcatgcctgcggcgaagaagtcgaaggacaagggcgcggcggccggcactgacgctgccgatgagagcacagcggtctcgaagccgcgtcccgacgtgacgcgcaagggcgtcgagatcatcggcgacttccgaacggacgccctccatgaggcgctggcacgcgcgcccgtcgaggacgatgcgctgatggcgctgctgatcctcgcgttcgcgggccagaacgtctcggtcgattccggtagcggcggcacctattacggcaaccggcgcattgcgcgccatgccgcaacgctgttcgatcaggatggcaagctcgtcctcgacatggacacgctgcgcgtcgctgcgcgctcggtcctcattgaggttctctcgtgccgggaaaaccgcaccgacagcggcatcgttgcgcgcgtcgccggcgaggtggtcggcgcggacaacttcttgccgaacatgggcaccgacgacttcctgtcgtgcctgtcgcgcgccgcgctcgaaggctcgtgcaaggacacctcggttctcccgcgccagaaggtgaaggacacccgcgccgctttggtcgagcacttcaaggaaggccgccttgtccatccggcagcgctgttcgctccggacaaggtcaacttgctggcctggctggcgaagaacgccgtcgcggccgccgatgaggccgacgacgaggtcgaggagccggacgctggcgacgaggacgacggcgaagccttaggtgacgaagcgttccgtgaggcggctgaatag

SEQ ID NO: 4571 - DNA, 699 bp, BradyrhizobiumColbertium
atggccaaggcgatcgcgagcggcgaccagcggctgatgctaaaggccgggctcgaagccgacatcgcccggctcgagcgtctgcgcgcggcccatatcgacgaccagcacgccgtccgtcggcagatccgcgacgcggagcgcgacatcgcgttctgcacgagccgaatcgcggaggtcggcaaggatatcgagcgccttgttccgacggccggcgacgccttcgccgcgaccgtggccggcaagcgctatgtcgagcgcaaggaggccggccgcgcgctgatgaaggaaatcctgaccctcgtccagctccagcaggagggcgacaccatcatcgcctggatcggcgggttcgatctcgcgtactccggcgagcgttacggccgtgacggctatcgctacagcacctcgctgatccgcaccggcgccgggcatgagatcgagttgccggtcacggtgacgccgctcggtgcgatctcgcgccttgagcacgcgctcgacgattttgagggcgagcgggagcgctatcgccagcgtctcgccgacgcacgtcgccggctcgcctcgtaccggtcgcgcgaggacggcgaattcgcattcgcagccgatcttgccgagaagcgccggcagttggctgatgtcgagcaagcccttgcgacggatgtggagggcacgggcgggagcgcaatcgcagcatga

SEQ ID NO: 4572 - DNA, 1053 bp, BradyrhizobiumColbertium
atgggtgatgatgatcgcgtcccacgtcgcggtcgcggcgcgcgacaggaagcggtgccgcttgtccttggtgaagttggtctcatcggcgacgaggatgcgggcaccgggatagagcgccaggaactcgcgcgccgcctgcgccaggcagtgccccggaacgacaagcatggccttggcgatcagcccgagccggcgctgctccatgatcgcggccgccatcgtcatcgtcttgccggcgccgacggcgtgggcaagataggccgttcccgaggcgatgatgcgccagatgccgcgcttctgatgttcgtagagcacgaaggcgcccgaggcgcccggcaatttcagatgcgatccgtcgaaggcgcgcggcacgatgttgttgaagcggtcattgtagacccgcgccagccggtcggtccgatccggatcggaccagatccaattctgaaaggcggtcttgatcttcgagagcttctccttcgccgcctcggtgtcgacgacgttgaggacccgacgttcgctgtcgccgtctttgatggtgtcgaagatctgcgggacggaggagttgagcgcatcagagagaagctggccggcgtgccgccgttccgtgccccattccgacgtgccagcagccatccagccgagctgccgggcctccacggtccacgacgccagttccggcatgtggtgaatcctgatctccgcgcccatcgtttccttaacgaaggccacgatatctgcggcgggaatccacggcgcgccaaggcgcgcggtgatgtccgagggtcggaggtcggcaggctgcacctcctgcagcgccctgacgttgcgctcataggccggatcgagcgctgccgcggcctccgccgccgcaagcttcgaccggaccgcgccggacagataggcgtccgccgtctgccacgagccgtcggccggatcgcggaagatggcgccgccgaggtcggcgatgacgtggtccgcgtcgcggtgcacgagctccgcgatatggccgggatcgacatggccgcgctcgttgagtacgacggctag

SEQ ID NO: 4573 - DNA, 153 bp, BradyrhizobiumColbertium
ttgggcgcgcgccaccgtccgccggcgcgggctgcgacggacggcacggcgttgcgggagttgatgagcgggccggcgccaggccgggtgctgaaatgcgatgcccggcgcgaggccgggctgccgcggggcggggaggggaggtcaggctaa

SEQ ID NO: 4574 - DNA, 606 bp, BradyrhizobiumColbertium
atgcacacctcccccagcatccgcaaagtcttcgagggcgttgcgacgcgccacgagatgcaccgcttattcaaccgccatcgtggtgaccccgcgatggccgaaggtgtaggccagcatctcttcgctggagagtggtttgaggtcaacgagcgcgagcacgactacatgctcgagatcctgccaccgctgttcatgcgcgccgacatgttcgcgatgcgcgaattcatgacgggcagcgtcaccagcatcttcttcgcgcttgccatcgacggaaggcggcgctggttccatggctattgcgatctttccgatcggctgtcgccagagcggatgaaggcggcgatcatcgagcgcgagtcacggcccgtgcgcgcgatgacgcgcgacgagcggctcgagcacatctggtcgagcacgcatgacgattatcgcggctatgccggcgagcgctggccgcttgccatgcgcggccgccgcaccgtactcgtctataccggccagagcggcacggtcctgaagctgctcgatgacctcaccgaggcagagatcgcggccaagttgccggtgcagttccgccatctgccggcgacggtcgcggcttag

SEQ ID NO: 4575 - DNA, 468 bp, BradyrhizobiumColbertium
gtgaagcaggcggtcgccagcgaccggttgcgagagggtccccaaggcagcatgtgggcggcgcatatcgattctgctggagcgctcacaggctgggaggagcgtggaccggcatggcggggcttcgccacgaacggcggcaagaagctttttcgcttcgggccgggggagtccgagcggatctgtatcaccgaggcggccatcgatgccatgagcctcgccgcgatcgaggccctgcgccctgacaccctttatgtcagcaccggcggcggttggtcgcccgcgaccgatgacgccattcgcggcctcgccgagcgcgccagcgcttggctcgtggcagcaaccgacaacaatcggcaaggcgacatctacgccgaccgtgttcgcgtcgtcgcggcggatgcaagggcgcggtatgaccgattgcggccgtgcgcgggcgactggaatgaggatttaagggcctga

SEQ ID NO: 4576 - DNA, 285 bp, BradyrhizobiumColbertium
atgctcgctgtcgtcggaatctatcgcctgccggtaccggacgtctttgctgcgatcgttgccggaaagatcatcaaatacctggcttacgcgtacatcgccgttcgtttcccgaacgccattcgttccctcgccgaccacgccgttccatggagcaggttttccaccgctcgattgcagacctggctcgttgctggcaaggccacgattcgtagaatacgtgtctggacaacgacgacgacgcagaagcacggcatcagaaatggagaaggtaacattggctga

SEQ ID NO: 4577 - DNA, 1257 bp, BradyrhizobiumColbertium
ttggctgacgagatcagtggccgttcgtccgcttggaccctgcaaattgcgccgcagcgggtttgggaagcaatcaccgtcaggtccgtgctgccaaagtcacaacgcgacgtccgtttggacctgtttcgcggcttggcaaactggttgatctttcttgggcatattccggattcggtgctggcctggttcacgacgcgaaattacggctttagcgatggcgccgatcttttcgtgctgatctccgggtataccgcgaccttcgtcttcggcaagatgatgatggagcgcggctttgtcatcggcgcgaccaggctgttgcggcgggtctggcagctctatgtcgctcatctgctgatcttcatcttctaccttactgcggttcattaccttgcgcataagttcgacgatccgcacttgatggatcaattcaacgtggcgccattaatgaacttcccggtcgagactctctcgcaaggcctgatgctcaagttcaagccgctcaatctcgacgttctgccgctctacatcgtgctgatggcggccttcccgatcgtcctgtggttcatgttgcgatggcgcaacgcggtcatgatcggatcgatcgggttgtatctggcggcgcgccattacggctggaatttcgcctcctatcctgcgggcgcttggtatttcaacccatttgcatggcagctgctctttgttctcggcgcttggttggcgctcgggggagccacggcaacccgggtcctcctgcattcccgacttcttttcgtgctgagtatctgcttcgtcctgttcgcgcttgccctctcgctgggcgagcgaattcccgaactgcggccgttcattcctgacgccattgcggggctattcattccgaacgacaagaccaaccttgctccctaccgtgtgattcacttggggagcctggtgttcattgtcgtctcgctcattccgatcgattggccaggactgaaatggccgatcttcagaccgctgatcaggtgcggtcagcagtcgctgccggtgttttgcgttggcttgttcctctcgttcatcgcgcatttcatgctggcgttcggttcggaaggggtgctggctcaactcctgatgggcgcggcaggtctgtggatcatgacgatcatcgcctattatcggacatggtcgaaggacgtcgataagagcctatcttctggcggaaagttggcgaaaagcgaagccggtcgaagccgcgagccccgtgccgaaggataa

SEQ ID NO: 4578 - DNA, 414 bp, BradyrhizobiumColbertium
atgatcacttccgagctgacgttctccgaacaaacgcaagccgccattctgcatgggcttcattggacggcgtccgctattgagctgctcggagtggtggtgatcgtcggcggtgtagtcggtgcgacggtgtggtcgctgcgcgagatgcggcaccggcaatttgccgatgcgtttcgttcgtatcgtgctaacctcggccgcggcatcctgctcggtcttgagttcttgattgcggcggacatcatcggaatgatcgcgatcgtgccgtcgttcgatcggctcggcgtcctcgcgctgatcatcgtgatccgtacgttcctgagcttctcgcttcagatcgaaatcgagggccgcttaccgtggcagcggcacacgggtggggacgacgacgcggatcgcgccgggctctga

SEQ ID NO: 4579 - DNA, 282 bp, BradyrhizobiumColbertium
gtggtgctcggtgttggcctggtcgccgcggccgcgggcatcgcggcgccggcgatcacctactggacctcgatcgtggcaggtgagcaccagggcgagcaattgggccgatggaccgcggtcacgagcctcgcgcaagcgcttggttcggcagccgcgggactaatggtttcgcaaggctcggaccaaagcttttttgtgttttccgcgatcaccgcgctggtcggaacactgctcgcgctgccgctttccgggaggttgaccgcttcaaaaaccgactga

SEQ ID NO: 4580 - DNA, 1032 bp, BradyrhizobiumColbertium
atgaagaaagtgggtctggtcgcggcggtgcttgcgatcaatgcaggttcggctgtcgcggcggacatgtccgtgaaggcagccaaggcgccgcccccgcccgccttcgaggcgtgggatttcgccttcggcgctgcactcatgagcgactacgtgttccgcggcatcactcaatccaatcacaagccatcggtcgcggcctacttcgagccgcgctataacgtcaccaaggatgtgcaactgtatatcggcgccggcggcgcgagcatctcgttccccaaccgcgccgcagccgaaatagatatctatggcggcatccgtcccacttttggcatcttcgcttttgacttcggcgtctggggttatctttatcccggtggcacttgttacaacgccttcgcctttccgggctcgggaattcctggctcagaggcgggttgcgtagcaaacgccgaccctgtcaccctcggacttccgatcaatggcaatttcgccaaaaggaacgccagtttttatgagggttatgccaaagtcaacgtgaccctgaatgaccagtttcagatcggcgccaacaactactatacccccaatatgatgaacctcggcgcctggggcaactacgcctcgatcaccgccaagtggaccgctccaagctcgaccttcggcaccagcggtatcggcatgtacgtctctggtgaattcggacggcagtggctcggcacctcggatcggttctacggaacgcaaattccaggacaaatctatcagtttggtattccggagccgagctacaacacctggaacatcggggttggcttcacctataaggtttttaccctcgatctgcgctactccgacaccaatctctccaagggagcgtgcaacgcctacaccagcgacttcacagcgagcgtgaccagtccagccaatgtttcgctcatcaaccccggtgggtttggctccaactggtgtggcgccactggcatcgccaaactctcggctgacttgactgcaattacgaacctgaagtga

SEQ ID NO: 4581 - DNA, 288 bp, BradyrhizobiumColbertium
ttgatcacgccggagttccttgtcagcggtcgcgcacgatctccagttcatacgatcaggcgtcttcgccgcaataatttggatcaggcggaggccttcgcgcagttttttgcacgtcttcgcctgttgcattcttccaaaagttcgggcgcatcccaaacaaccgaaccatcttccgccaggatgaaaggatcaacaaccaacggatcaaaacccagccgagtggcctcttccatggccgcttcgttatttggaaaacggtcacaacgcagcagagcgagggagtag

SEQ ID NO: 4582 - DNA, 1560 bp, BradyrhizobiumColbertium
atgaaagcctacttcatcggcggcggaatcggatcgctcgccggcgccgccttcctgatccgcgacggcgcaatgtcaggcagcgagatcacgatctatgagaacctctcgacctttggcggcagtctggatggcgctcagcttccagatgggtcgtattcgttgcgcggcggccgcatgctgacgaccgaccactacgaatgcacgtgggatctgctttcaacgattccgtcgctcgagcacccgggccaaaccgtccgcgacgagacggtcgcattcaacctcaagcacagagcccattccaaggcacgactggtcgaccgtaaccgcttcaaggtcgacgtgtcgacgatgggctttaccatgcgcgatcgcgaagaactggtgcgcctggcgatggcctcggaagacgagctcggcaacagccgcatcacggactggctgtccccggcattcttccagacaaacttctggtacatgtggcaaacgacgttcgcctttcagccctggcacagcgcggtcgagctcaaacgctatctgcatcggttcatgaacgagtttccgcgcatcgagacgctcggcggtgtcaagcgaaccatctacaaccagtatgacgcgatcgttcgtcccgtggaagcatggctgaaggatcacggcgttcggttcgtcagcgacgggcgcgtgaccgacatcgacgttgcggacgaaggcggaaaggtccgggtgaaaggccttacgatcgaccggaaaggcgccaagctcgtcgcgacggtcgaagcccacgacctcgtgttctttcagaacggttcgatgaccgacgcatcaagcctcggctccatgacgagccctgccgaaccacggacgaaagccgacagcgaaggatgggtcctctgggagaagatcgccgccgggcggccggaattcggcaaccctgccgtgttcaacagttcgattcccgagtcctattgggcatcgttcacggtgacctgtcgcgaccggagctttttccaacagatggaggcattctccggcaacgccgccggcacgggggggctggtcacgttcaaggattccaattggctgatgtcgatcgtcctgtaccatcaaccgcacttcgtcggccaaccaagcgacgtggcggtattctggggctatgccctgcaccccgaccggatcggcaatttcgtagccaagccaatgtcggagtgtggaggagcggaaatcttgcgcgagctttgtggtcatctgaacttcgactatgcggtctttcgacgagcgacctgcattccctgccgaatgccgtacatcaccagcatgtttatgccgcggctcaggtccgatcgtccgctgcctgttccgccgacttccaagaacctggcgttcatcagccagttcgtcgaaattccggacgaggtggtcttcacggtcgagcattcggtgcgcgcagcccaaacggcggtctatcagctgctcggcatcgagcgtcccatcccgccgatcacgcgtcacgacaggtcgatcggtgttctgatccattcgctggagaaggcttttgcctga

SEQ ID NO: 4583 - DNA, 369 bp, BradyrhizobiumColbertium
atgcgcctctctcgaaccatcctggccctggtgaccgcgctgtcggtggcaatgctaccgatggcgggagctgccaattccggctcgatggcgcacgaggtcgcatcgcaagaaatggcagttgtgagctccgacgtgccggaagccatggacgactgctgtgcggaccagatcaaggccaacccttgcgaccagccgagcgatcagtgctcgctggccttctgcgcgtcgcagtcgggtaccatcgctgatgtcaccagttttccgtttgatttcccgatcgtgacgggaaatccgctccccattccggtggagcaggtcgtcgctttgcatagcggcagtccgccgttccgtcctccgcgcgtctga

SEQ ID NO: 4584 - DNA, 261 bp, BradyrhizobiumColbertium
gtggcggtgcgcctgaccaacagggcgacgggaaagccggtgccggacgcggtcatcatccgcacccgcgtcgacatggcgcctgacgggatggccgagatggaatcgccggtcagcccgttgccggcaaaggagcctggcgtctacgccttcaagaccgatttgccgatggccggtcgctaccagctcagcgtcgccgccaaggtgcagggcgaggcggagactgtgatcggcaaagtggtgatcaaggcgagcaagtaa

SEQ ID NO: 4585 - DNA, 1431 bp, BradyrhizobiumColbertium
atgaacaagcttgtgatcacgctcgcagccagcgttgggctcggggctgccggcttttggctaagccaacagccgcacatgcgggcgcaaacctatgtagccagcgcaatcgcagccgagaggtccgtgctctactaccgcgacccgagcagcgctccattctggtcggctggtcccaaaaaggacagccagggccgcgattatctgccggtctacgacgacgaagagccgtcgttggaccagcccgcgccgaagccgcaagcggcacaggcggggcggaaaatcctctactaccgcaatcccatgggacttccggatacctcgccggtgccgaagaccgacccgatggggatggcctatgtcccggtctacgaaggcgacgacgtagatgacggcctggtaaaactctcgacgggcaagatccagcgaaccggcgtgaagtcagaaccagccgagcgtcgcgcgattcggaccctggtgagggcacccggcaccattcaactcgacgagcggcgtgtctccgtgatcgcgatgcgcgcggagagcttcctgcaaaaagtcgccgatgtgacgaccggcacccgcgtcgcgaagggagagcaccttatggaggtctacagtcccgccgtcgcatcggccgcggcgcagtatatttcgaccatcgattcccctgtcaccaacggcatcggatcgtacgggcgcggctcacggcagcggcttaccaacctcgacgttccagagcctgcaatcgtcgcgatggagaagagccgcacagttcctgtcaccatccaatggtcggctccgcgcgacggcatcctgctggagcgcaacgccatcgagggcatgcgcgcgcaaccgggcgacgtgctatttcgtattgcggatatttcggtcgtgtgggctctggctgatgttgcggagcgcgacctcggcagcatcacggtcggtcagcccgttgcggtgcgcgcccgcagcttccccgggcgggaattcggcggcaagatcagcgtcatctatccgcaagtgaaccgcgaaacgcgaaccgcgcgggtccggatcgagctggccaacgccgacctcgcgttgctaccggacatgtatgtcgacgccgagatcggcaccgccactgggacggcggccgtcgccgtcccagacagctccgtgctcgataccggaagccgccaggccgtgttcatcgacaagggcgagggccgcttcgagccgcgcaccgtcaagctcggccgccgcggcgacggctatgtcgaggtgaaggagggcgtgagcgagggcgaggcgatcgtgacctcggccaacttcctgatcgattccgaaagcaacctgaaggccgcgctgaagggctttgcggaagccgccacgccggaggcgaccggagcttcaagcggggcgaaacacgtgggagggcaccaatga

SEQ ID NO: 4586 - DNA, 831 bp, BradyrhizobiumColbertium
ttgcagcgcctggttcatctcggcgatcaggccgtcaatggtgaggcccgtgcgccactcctccttcggcttgagattgacgacagtctcgaacatttcggtcggtgccggatcggtcgcggtcgacgcgcgtcctgccttgccgtagaccgaggcgacttccggaaacgagcggatgatccggtcctgcatctgcatcagttcggcggccttggtcaccgagatgcccggcagcgtcgtcggcatgtaaagcagcgtgccttcgttcagcgtcggcatgaattctgcgccgagctgtcgtgcgggccagatcgtcaccgccaggaccccgaccgcaagcaggatcacgagcaccttcgcgcgcagcaccgccttgatgaccggacggtagatccagatcaggtagcggttgatcgggttcttatgctccggaacgatccgtccccgaacgaagatcaccatcagcgccgggaccagcgtcaccgacagcaatgcggcggcggccatggcgaaggtcttggtgaaggccagcgggctgaacagccgtccctcctgcgattccagggtgaagatcggcatgaacgatacggtgatgatcaggagactgaagaacagcgccggccccacctccgatgccgcgtcgatcaggatctgaacgcgcgtctggcctggcctcgcccgctccaaatgcttgtgggcgttctcgatcatgacaatggccgcatcgaccatcgcgccgaccgcgatcgcgatgccgccgaggctcatgatgttggagcccaggcccaaaagcttcatcgcgccgaacgccatcaataccccgaccggtag

SEQ ID NO: 4587 - DNA, 1320 bp, BradyrhizobiumColbertium
atgaaccgagagctcgatctcgctggctttgaattgcatccgcagcgtggtgcggtgctggccgaggtgcatgctcgtccattcacccggctggtggccccggttacggtgctgcgcttcgcctttctcaacgagggcgagggcgccgcagccgatcggcagaagttcgtcctattctgtacatcgcacgggcaggcgacgcctgatgccggggccaaacaccatcaggtgacaatcgacgggatccagctccgctgggagcagcactcggaattcagcaccttcacctggatcctgagcaaccctggtgcgtcccctcgcgggttcggcgagattggcgacgaggccgccgcattgatccgatcgctccctcagtccggtcagttgctggttgcagtcaagctcgaggtcgaaccgacctcggtggcgctggagcgtgcccagcagcttttcgagagaggcagcctcgccatagccgcggtccgcagcgggccggccgtcgttgcatccgacttccgtacggacgagcagggcttcgtccgcattctcgtgtgcaatgacggtctgtcgccgggccgtctcggcgccctggtgcagcgcgtgctggagatcgagacctatcgcacgcttgcgctgctgggcttgcccgctgcgctcgagcttgcaccctccgtcgatcatatcggcaggcggctcgtcgaagtgctcgaggagatgcagcgcgctgaaggtctcaagctcaacaaccacctcctgggcgaactcaccgctctggccgcgtcgctggagaggggagcggccggcagctcgtttcgttttggggccagccgggcctactacgatatcgtgcaggcccgtctcgccgtcatcgaaggcggcgaggttgcgggctatccgacctggtcctccttcctcgcccgccgcatggcaccggcgatgcgcacctgcgcgacgatggaggatcggcaggccgacttgtcgatcaagctcgcgcgggcggccgatttgttgcgcacgcgcgtcgacgtcgagctcgaggagcagaatcgcgatctgctgcgctcgatgaatgaacgcacccggctgcaattgcggcttcagagcacggttgaaggcttgtcggtggcggccatcggatattacgtcgtcagcctgttcggttatgtcgccaagggcgcgcatgatggcggcctccatgtcgaaccctcgctcgcgaccgccatcttcgttccggtggctgtcgccgtgatctggatcgtcacccgcaatatccgcaggcggcacttgaaacacgacgagatgccgggcgtccacgactga

SEQ ID NO: 4588 - DNA, 1017 bp, BradyrhizobiumColbertium
atgcgcccatccgacggaatgaccaatgtgctctggctgcagggcgccagttgcggcggatgcaccatgtcgattctcgagagcggcgcctcgggctggttcgacgaactccggcagttcggcgtcaatctgctatggcatccgtccgttagcgaagagactggcgaggaagcgctcgaagtcctgcagtccgtgctcgacggcagggttcggctcgacctgcttcttctggaaggctcggtcgcccgcgggccgcatgataccggccgcttcaacatgctcgcgggcaccaatcgctccgtctacagctggatgctcgaccttgcgccgcgtgctgactatgtgatcgcagtcggaagctgcgcggcctatggcggggttccggccgcaggctcgaacccgaccgatgccgtcggcctgcagttcgagggatccgagagtggtggcgcgttgggcgcggcattccgctcgcggcttggtctgcccgtcatcaacgtcgcgggttgcgcgccgcacccgggctggatgatggaaaccatcttggcgctgaccaccaaggatcttgccgcaactgacctcgacggatatggacggccgaagttcatcgccaaccatctggcccatcatggctgttcgcggaacgagttctacgagttcaaggccagcgcggagacgatgtcggagcgcggctgcctgatggagcatctcggctgcaaggcgacgcaggcggtgggcgattgcaaccagcgctcctggaacgggggcggctcctgcaccaaaggcggctatgcctgcattgcctgcacatcgccgggtttcgaaggtgcacagaacttccttgagaccgccaagctcgcgggcattccggtcggactgcctaccgacatgccaaaggcttggtttgtcgcgctcgcggcattgtcgaaatcggcgacgccgcggcgggtaggttggaatgcgaccgccgatcacgtggtggtgccacccggcggctccgcggccaaacgatcatcatga

SEQ ID NO: 4589 - DNA, 1440 bp, BradyrhizobiumColbertium
atgacgcgcatcacgatcggcccattcaaccgtgtcgaaggcgacctcgaagtccgtctcgacgtcgagagcgggcgcgttgtgcgtgccgaggtgactgcaccgctttaccgtggtttcgagcagatcctcgaagggcggccgccgctcgatgcactggcgctggcgccgcggatctgcggcatttgctcggtttcgcaatcggtggccgcggcggcggccctgcgcgatgcgatggctatcgaggccgcgcccaatggactgcttgcgaccaatattgcgcatgctgcggagaacgcggccgaccacctgacccatttctatatcttcttcatgccggactttgcccgtgaggcctacgccgcgcatgattggcacgaggcgacgcgcgagcgcttcgccgccacccgcggcagcgcggcgcgcgacgctttgccggctcgggcgcgactgcttgagatcatgggcatcatcgccggaaaatggccgcatagcctcgcgttccagcctggcggaaccacgcgcgccatcgatctcggcgagcgcgtccggctgctgtccatcgcgacggccttccgtagctttctcgagcgtgtcgtgttcgcagatgcgctggagaatgtgctggcgattgcgaccgcggacgagctcgatcgctggcgcgacggccgtggcggcgattttgcccatttcctgcggcttgccgatcgtctcgcactcaccgggctcggcaagggcagcggcttgatgatgagctatggcgcctatcatggtcccgacggcgagctgtttccgcgcggcctgttcggcccgcgtgctgcgatcgagccgttgccattggcgcagatcaccgaagatgtctctcacgcgtggatgcgggaatcttccgccgatccggcccatagccgcacggtcccggacccggacaagccggcgggctacagctggtgcaaggcgccgcggctgtcgggacagcctatcgaggtcggcgccatcgcgcgccagaccgtggcggggcaggcgctgattaccgacctggtttcgatcagcggcaccaatgtgcgcaaccgcgtgatcgcgcggctgatcgagactgcgcggattgcgctcgcgatcgagcagtggacgcgcgcgctgcggctgtctgagccgttctgtcacggtgggcgggaagtcccgaacggcagctatgtcggcctcgtcgaggctgcgcgcggcagtcttgggcattggatggcggtacgcgacggcaagatcgagcgttaccagatcatcgcaccgacgacctggaatttttccccgcgcgattccttcgacattggtggtccgctggagcaggcgctggtcggcactgatgttggcgatgccggcgcgcgcgcggtcgcgatccagcatatcgtgcgttcgttcgatccctgcatggtgtgcactgcgcactga

SEQ ID NO: 4590 - DNA, 1092 bp, BradyrhizobiumColbertium
atgggcgcggcgacggaaacgttttacagcgtgatcaggcggcaaggcatcacgcgtcggagctttcacaaattctgcagcctgacggcaaccagcctcggcctcggaccgctggcggcgagccgtatcgccaacgcgcttgagaccaagccgcgcgtgcccgtgatctggatgcacggcctcgaatgcacctgctgttcggagagcttcatccgctccgcgcatccgctggtcaaggatgcggtgctgtcgatgatctcgctcgactacgacgacaccatcatggcggctgctggccaccaggccgaagccatcctcgaggagacccgcgccaagcacaaaggccagtacattctcgcggtggaaggcaatccgccgctgaacgaaggcgggatgttctgcatcgacggcggcaagccgttcgtcgagaagctgaagatgatggccgaggacgcgatggcgatcatcgcctggggcgcctgcgcctcctggggctgcgtgcaggcggcaaagcccaatccgacgcaggcgacgccgatcgacaaggtgatcaccaacaagccgatcatcaaggtgccgggatgccccccgatcgccgaggtgatgaccggcgtcgtcaccttcattaccaccttcggcaagctgcccgagctcgaccgccagggccggccgaagatgttctactcgcagcgtattcatgacaagtgctaccggcgcccgcattttgacgcggggcagttcgtcgaggagtgggacgacgaggccgcgcgcaaggggtactgcctctacaagatgggctgcaaggggccgaccacctacaacgcgtgctcgaccgtgcgctggaacggcggtgtctcgttcccgatccagtcgggccatggatgcattggctgctccgaggacggcttctgggacaagggctcgttctacgaccgtctcaccagcatcaagcagttcggcatcgagaagaacgccgaccagatcggcatggtggcggccggcgccgtcggcgccgcggtggcggcgcatgcggctgtgaccgctgtcaagcggctcgcgaccaagcgcgaagacgccgaccacaacagctga

SEQ ID NO: 4591 - DNA, 1791 bp, BradyrhizobiumColbertium
atgggtatccagactcccaacggcttcaatctcgacaattccggaaagcgcatcgtcgtggacccggtgacgcgtatcgagggtcacatgcgggtcgaggtcaatgtcgacgccgataacgtcatccgcaatgcggtttcgaccggcacgatgtggcgcggcatcgaagtgatcctgaagaaccgcgacccgcgcgacgcctgggcgttcaccgagcggatttgcggagtctgcaccggcacccacgcgctgacatcggtgcgcgcggtcgagaacgcgctcgggatcaccattccggagaacgccaattcgatccgcaatttgatgcagctggcgctgcaggtgcacgaccacgtcgttcatttctatcaccttcatgcgctggattgggtcgacgtggtctccgcgctctcggccgatccgcgcgcgacctcgacgctggcgcagtcgatttcgagctggcccctgtcgtcgccgggctacttcaaggatctgcagacccggctgaagaagttcgtcgagtccgggcagctcggaccgttcaagaacggctattggggcagcaaggcctacaagctgccgcccgaggccaatctgatggcggtggcgcactatctggaggcgctcgatttccagaaggagatcgtcaagattcacactgtcttcggcggcaaaaacccgcatccgaactggttagtcggcggcgtgccctgtccgatcaatgtcgacggcaccggcgcggtgggtgccatcaacatggagcggttgaacctgatctcgtcgatcatcgatcaactgatccagttcaacgagcaggtctatctgcccgacgtggcggcgatcggctcgttctacaaggattggctctatggcggcggcctttcgggtcagagcgtgctctcctacggagacgtgcccgagcatgccaatgactactccgacaagagcctgaaactgccgcgcggggccatcatcaacggcaatctgtccgaggtgtttccggtcgatcacgccaacccgaacgagatccaggagttcgtggtccactcctggtataaatatcccgatgaaacgaagggactgcatccctgggacggcatcaccgagccgaactacgtgctgggagccaatgcgaagggcaccaagaccgcgatcgagcagctcgacgagggcggaaagtattcctggatcaaggcgccgcgctggaagggacacgccatggaggtgggacccctcgcgcgctgggtcgtcggttacgcgcagaacaaggcggagttcaaggacccagtggacaagttcctgaaggatcttaatctgccgacgtcggcgctgttctcgacgctcggccgcactgcggcgcgtgcgctcgaatcggtctgggccgggcgccagatgcggtacttccaggacaagctgatcgccaacatcaaagccggcgacagttcgaccgcaaacgtcgacaagtggaagccggagagctggcccaaggaggccaagggcgtcggcttcaccgaggccccgcgtggcgcgctcgcgcactggatcaagatcaaggacaccaagatcgacaactaccagtgcgtggtgccgaccacctggaacggctcgccgcgcgatcccaagggaaacatcggtgctttcgaagcatcactcctgaacacgccgatggtcaatcccgagcagcccttggaaatcctgcgcacgatccattcattcgatccgtgtctcgcctgttcgacgcacgtcatgagcccggacggccaggaactcgccaagatcaaggtcaggtag

SEQ ID NO: 4592 - DNA, 744 bp, BradyrhizobiumColbertium
atgatggatgcaattgctcctgcttcggacggcaggcccgacctcgcggcgatcgcggccgacgcttccggagaacgtgcggtggggcggcccaccgtctatgtttacgaagcaccggtgcggatctgccactgggtgaacgcgttctcgattctggtgctgatggtgaccggttatttcatcggctcgccgctgccgacggtcgcaggcgaggcgtcggatcatttcgtcatgggctacatccgcttcgcccatttcgccgcgggacaggtgctcgcggtgttctttctcacgcgtatcctatgggccttcgtcggcaatcaccactcgcggcaaatcttctacattccggttcatcgcaagcagttttggaaggaagtgcttcacgagatccgctggtacgcgtttctggagcgcgagccgaagatgtatgttggtcacaacccgctggcgcagaccgcgatgttcacgggtttcacgctgttcgtggccttcatgatcgtcaccggctttgcactctattcggaagggatgggcatcgacagctggcagtacaagctgttcggctgggtgtttgcgatctggccgaacagccaggacgtccacacctggcatcacctcggcatgtgggcgttggtcgtgttcgtgacggtgcacatctacgcggcgatccgcgaggacatcatgtcgcgccagagcatcatctcctcgatgatatcgggcgaacggcaattccgcgattga

SEQ ID NO: 4593 - DNA, 579 bp, BradyrhizobiumColbertium
atgccgacatcctcgcaagacaaccgcattctggtgctcggcatcggcaatatcctgtgggccgacgagggctttggcgtgcgtacggtggaggagtttcaccgtcgctacgacgtgcctgacaacgtcaccattctcgacggcggcacgcagggtctctacctcgtgaactatctggaagaggccgaccgcctgatcgtgttcgatgccatcgactacggcctcgcgccgggccaattgaagctggtacgcgacgacgaggtgccgcgcttcaccggcgccaagaagatgagcctgcaccaaaccggcttccaggaggtgatcagcgcagctgatctgctcggcagatgcccgaaacacctcgtgttgatcggctgccagccgctcgacctcgaagattggggtgggccgctgacggcgcccgtgcggggccagatcgcgcccgcgatcgatcttgcctgtcagatcttggccgagtgggggggggaggtgcggccgcgccgcgaaccattgccggcatccgagcggctgctcggcaacgacatcgatcatctcaattatgagatgcggccggcctga

SEQ ID NO: 4594 - DNA, 297 bp, BradyrhizobiumColbertium
atgtgcctcggcctgccgatgacgattgtcgagaccgatgggatgtcggcgctgtgcgaatttcgtggcgagcagcgccgcgtctcgctgctgctgctttccagtccgccggtcggggcccacgtgctggtctacatcgataccgcaatccggctgctcgatgaggaagaggcccgcctgatcggggctgcaattgacggccttggcgccgcactcgatggcgaggattgcgaccgctttttcgccgacctgattggtcgcgagccgcaactgcctgcacaccttcggtcggagtaa

SEQ ID NO: 4595 - DNA, 435 bp, BradyrhizobiumColbertium
gtggggaagcaagatctggcgcggcacggcctgcctgaggtcgatgccgccacgatcgatccattcttgggtggagccgacggagccggtgcgatcgcagtgctgctgtcggcgggcgatcccaaccgtttcccggaggcgatcgacgtcgccgtggtgctgccggagttgatcggcgcgttcggcgatcggcttcgtggcgcggtcatcgcgcgcgatgccgagcgagcgctcggcgagcgtttcggcatacgcgtgcagcctacgctggtcttcgtcgccaagggcgagacgctggggctgatcgccaagatccaggactggtcggtctacatcgaccgcatcacgaaactgatagaccgcccgcgcgggcaaaacgccgccgtcgctgtcaccatcgttcctcagcaccgcgcacgaggtgtcacgctatga

SEQ ID NO: 4596 - DNA, 864 bp, BradyrhizobiumColbertium
atgaaggtcggcttctgggatgcgcctgacggcgccgagcaaccggtcagcgtgtttccgatcggcgaagaaagtctcaacgcgtcgcacggcagcctgacggcagccggcgctcttgcaaaacttgcaacgctcgacagcgcggaacttgccaagagctgtccgaacgcggtcgcgctgctctcgaaaatcgcggcggccgtcgcggcccagaaggcggatgcgccaacccagctgtttcgtctcgccaacctcaacgaactcgagagcaagctcgtggcggacgtgctcggcgagggggaggtcggcggggtcgtcgcgctgccggacggatcgctggcgcagatccaggaatcggtcctggccggcatctggcgcgtgcggctcgagaccgacgcgacctccgaatacctggagatcggtgccattccggagatcgtcagacgcgcggccgccgatttgacctccgccgatttcgagatcgggcaggcgccggagggggcaatgaacgtgctgccggtgcttgcggagatccgcgaacgcgcgctggcctggcggcccggcattcgctcgcagatcatcaatttcacgctgttgccgatgagcccggtcgatatgagcttcctgcaggatacgatccggaacggaccgatccagctcgtctcgcgcggctacggcacctgtcgggtgctatcgaccggcatccgtaatgtctggtcggtgcagttcttcaacgccatggacaccatcattctcgatacgctggaagtcggcggtgtgccgactgtcgcacttgcagcggacgaggatttcgaggattccgccgagcggctgcaggagatcatcgaggcctacttcaaatga

SEQ ID NO: 4597 - DNA, 210 bp, BradyrhizobiumColbertium
atgaccgctttcgagaattttggcgtgcgtcaggacgttgccgaagccacgcggctggaatgcggcatctgctggactgtctacgatccggccgacggcgacgaggtcgcgcagatcgcgcccggcacgccgtttgctgcgctgccggatgagtggcactgtccgaactgcgacgcgccgaagtcaaagttcatggcgatcgagtcatga

SEQ ID NO: 4598 - DNA, 507 bp, BradyrhizobiumColbertium
atgacggcgagcgcgccaagacctgacgtcgacgccgtggcgtggggcgagcttctggccgaaagctatcgtgagatcggcgagcgcgcgatgcgagatctgccgatctacaacgaagcgctcggcgtcgaggcggtcgggtttcgtcgcttcaacggcacgatcgtcggcgtcatggtcacgccgtggttcatgaatgtggtgatgccgccgagcgcagtgcgggacggcccggctgcgacgatgcgcatccgcttccccgcaggcgatatcgaattcaccctgagcgaggtcggacaggttggccggatcgcaagctgttcgctgttctcgccgatgttccagttcgcggacatggcggcggcgcgggcgacggcaaaagccgcgctcgccgaactgatgttgccggcggacagcgaggaggcggttcgtcgccgcgagcccgcgacaaccccgatcgatcggcgcaacttcctgcgcggtgctttgacggagcggcgcggatga

SEQ ID NO: 4599 - DNA, 1089 bp, BradyrhizobiumColbertium
atgagccttgctttccgcaacgagatcgacatcacggtgtggcttgccggcgccgagatcgccgacgtggcgatccagccgcgcagcaggccgccgctgacgcggctgtttgcgggaaagccggcccagtccctgcttccggtgctgccgcggctgttctcgctgtgctcggtcgcccaccagatggcgttcctgtcggcggtcgaagcggcgcaggggcaggaggtgaccgaagcgaccgcgcgccgtcgcgtcactccggtcgttgtcgaacggctgaccgaattgctgcgggggctgtttgttggaccgtttgcgctcaatggcaccagcgcagccgccgttcgtgccgtgctgcaggcaagcacggtcctcggcagcgcgagcgaagccgtgtcggatcctttgcggggtgaggtgctggcacagatcaaggctgcgctcgctgctctggggatgaccggcgaaggccaggcactcgcgccgggcagcgcgctcgccgcctatgtcgaacgaggcgggggtgagggattgtcgccgccggcggtcgagcaatcgtttctcacagcggcggatgatctcgaggtcgtgacgcgtctgctcgcggacggggcaacctattccgacgcgccggaactctgcggcagaattccggagaccggtgtctgggcgcgccgggcgcggcgcgaacccgtcccgccggccgcgggcacggccgcgcggctcaaggcgcgcatcgccgagatatcgcggctgtgcgcctggctcgagggcgttgatcgggatgcaggcgacggtgccatcgcgagctatcggctcggcgcaggcaagggcgcagcggcggtcgaatgcgcgcgtggccggctctatcacgccgtctcgcttgacgacggggatcgcatcgtcaggttcgagttcctggcgccgaccgagtggaattttcacgcccgcggaccgttggttcggagcctcaagggggcgatgctgtcggctggccggagggggcaggatacggtgcgcgcactgatcgggtcgttcgacccctgcgtcggtttcaacctcagcttccgtgagacgggccatgcatga

SEQ ID NO: 4600 - DNA, 342 bp, BradyrhizobiumColbertium
atgcatgagatggcgctgtgcgagggcatcatcggcatcgtcgaggaggaggcgcgcaagcgttgctttgccaaggtgaatgtcgtttgcctggagatcggcgcgctcagccatgtcgccccggaggcgatgaaattctgcttcgaggccgtcgcggcgcaaaccatcgcacgaggcgcaaggctggagatcgtcgaaacaccgggaagggcctggtgcatggcctgttcgaagagcgtcgagatcaagcagcgctacgagccgtgcccctcttgcggcggctatcaattgcaggtgacgggcggcgaagagatgcgggtaagggaactggaggtcgactga

SEQ ID NO: 4601 - DNA, 690 bp, BradyrhizobiumColbertium
atgagcagcgagcgcatcatccaggtcgaacgcgatattctcggcaagaacgaccggctcgccgccgagaaccgcgcgcgcttccgtgcggacgaagtgcttgtgttcaacctggtttccagccccggcgccgggaagacatcgcttctggtccgcgcggtctcggagttgaaggaaagcttcccgatcggtgtgatcgagggcgaccagcagacctccaacgatgccgaacgtatccgtgccaccggcgtgccggcgatccaggtcaacaccggaaagggctgtcatctcgatgccgccatggtcggccaggcctatgaccgtttgccgtggctgaacggcggcatcctgttcatcgagaatgtcggcaatctggtttgccccgcggcgttcgatctcggcgaggcctgcaagatcgtcgtgttttcgaccaccgagggcgaggacaagccgctgaaataccccgatatgttcgccgcggcctcattgatgctgatcaacaagatcgatctcgcgccggtgcttgatttcgaccttgccaagaccgtcgaatatgcgcgccgggtcaaccctgggatcgaggtgatgacggtatcggcgcgcacaggcgagggctttgcgacgttccatgcctggattcgcaagcgggctcgcgcgacgaagccggccgcaatgtcggcggcggagtga

SEQ ID NO: 4602 - DNA, 2256 bp, BradyrhizobiumColbertium
atgggtggcgaggtcacagcactgggcggccggcggctacgtctgcatgtgcgtggcgccgtgcaaggcgtcggatttcgcccctatgtctacggtctcgccgcgcgctatcgcctgggcggcttcgtcgccaatgatccccacggggtcgtcatagaggttgaaggcgagcgtgccgccgacttcgtcacggcgctaccgctcgaaaagcccccgctcgcccgaatcgacgaaatctcggtgcaccctgttggggcggtggcgagtacggagttctgtattcgcgcgagcgagcagggcagggtgtcgacgcgcatcgtcgccgatgccgctacctgcaaggaatgcctgcgcgagctgttcgacccgaccagccgcttctatcgttatccgttcatcaactgcacccattgcggcccgcgctataccatcgccgagcggctgccctatgaccgtccgaccacggccatgaagggctttgcgatgtgcagggcctgtgcggatgactacgtcgatcccaacagccgccgcttccatgccgaggcgattgcctgcgcgcagtgcggcccaaggctcagccatgagatcgcggacattgccgacgcaatcgctggcggcagtatcgtcgcgatcaaggggctcggcggctatcagcttctctgcgatgcccgcgacgaggacgtcgtacggcggctacggcagcgcaagcagcgcgaccggaagccctttgcggtcatggtcggatcggtggatgcggttgcggagatcgccgaggccgacattaccgagcttgcgttactgcagacgtcgccacggcccatcgtgctgatgacctcgcgccatcggctggcgccggcgatcgcgccgggcctgtcgcgtctcggcgttgtgctgccggtcgctccgctccatcacctgatcctcgatgcgctgaactcgacgcatccgcggaccggcgaggcgtgggcgatcgtcgccaccagcgccaatcccggcggcgagccgctcctgatcgacaatcgccaggccgaacggcgccttgccgacattgccgacctcatcgtcacccatgaccgcgacatcgtgagccgggccgacgattccgtggcggcggtggtcgcgggccggacgcaattcattcgccgtgcgcgcggctacgtccccgagccggttcgcctcgcctgttcggtgccggcgatcctcgcggtcggtggcgcattgaaatcgaccgtgacgatcacccgtggcaacgaggcgtttgtttcccagcacattggagacctcgacaccgcggaaggcatcggcttcttcgaggagacggtgcatcacctgctgtcgacgctggacgtcgagccggtggtcgtcgcccacgacctgcatccgaacatggcctcgactcgtttcgccgaggccatggggaagccgctgatcgcggtccagcaccaccacgctcatgcgggctccgtaatggcggaacatggcgtcgcagggccggcactggcgctggtgctcgatggcttcggtcgcggcagcgacgggggcagttggggcggcgagctccttgccagcgacggtgctcgcgtccggcggctcggacatctggcgccgatgaagatgccgggcggcgaccgcgccgcgcgcgaaccgtggcgcatgggcgccagcgcgctgcatggtctggggcgaggcgatgcgatcgcgacgaggttctgtgcacaacctcaggccgcgcgcctcagcgccatgctggaccagcctggggtgccgacgacgaccagcgccggccgcatgttcgacgcggcggcggggctgctgggcctctgcgagattcagagctatgagggcgaggctgcgatgaagctcgaggcgcatgtccgcacaccgcgcatcgccaaagacggctggatcatcgaaagcggcgtagtgtcgctgtctcccttgttcgcgcgcttggctgccgggacgatcgatcctgtcgaaggggccgagctgttccacggcacgcttgccgctgcctgcgtcgattggatcagccgtgcggcaggcgcgaccggcatcacgacggtcgccttgagcggcggctgcttcctcaacagggttctgtcggtggagatcgaacgcggctgcaaggcgatcggcctctcgccgctcctgccacgccagatgccgcccaatgacggggggctcagcctcggacaggcctggattgccgcgctaacattcctcgaacggcaaggcctggaaggaacagtctga

SEQ ID NO: 4603 - DNA, 237 bp, BradyrhizobiumColbertium
atgtgtcttgcgatacccgcagaggtcacaaagatcctgcccgatgagatggcgatcgtctcgatcgacggcgtgagcaaggaaatatcggtcgcgttgatcgaagaccttgccgtcggcgactacgtgatcatccacgtcggctacgccttgaccaagatcgatccggacgaagcgcggcgcaccctcgaattgttgtgtgagctgagcgctgaggcacacggagccgcgtcatga

SEQ ID NO: 4604 - DNA, 1143 bp, BradyrhizobiumColbertium
atgaagtatgcggatgagtttcgcgacaaagcgatcgcattgggacttgcgaagacgattgaagcggagaccgatccgggaaggccgtaccgtttcatggagttctgtggcggccatacgcatgcgatctcgcgctacggtctggaagacctgctgccgaagaacgtgcggatgatccatggccccggatgcccggtctgcgtgctgccggcagggcgcatcgacatggcgattcgtctcgcggagcgtccggaggtcatcctgtgcgtctacggcgatctgatgcgcgtcccgggctcgcagggcgcctcgctcctgaaagcgaaagcgcgcggcgccgacatccgcatggtctattccaccattgatgctgtcaggatcgcggaggagaatgctggaagcgagatcgtgttcttcgcgatcggattcgagaccacgacgccgcccaccgcggtcatgatccggctggccgagaagaagcagctcgagaacttcagcgtgttctgcaaccacgtgctgacgccgccggcgatgcagaacattctggagagtcccgacatccgcaagatcggccgcatcgagatcgacggcttcgtcgggcccgctcatgtctcgaccatcatcggcaccgcgccttacgagtttttcgcggaagagttcggaaagccggtggtgatcgcgggcttcgaaccgctcgacatgatgcaggccatcctgatgctggtgcgccaggtcaatgagaacaggcatgaggtcgagaaccagtatagccgagcggtcacgcgcgacggcaatctgcgcgccaaggaggaggtctccgacattttcgagctgcgcgaccagttcgagtggcgcgggctcgggcaggttccctatagcgggctgaagctgaagcgcacttacgcgaaatacgacgccgaggtccgcttcggcatgagcgagcttcgcgtcgatgacaatccggcgtgcgagtgcggggccattttgcgcggggtgaagaaaccggtcgactgcaagctgttcggcaccgtgtgcacgccggagacgccgatgggatcctgcatggtctcctcggaaggcgcttgcgccgcgcattggacctatggccgcttccgcgaccatcagcagaggcgggcatcatga

SEQ ID NO: 4605 - DNA, 1041 bp, BradyrhizobiumColbertium
atgagggcctatcagcgcaagctcgatatcaagaacgggtgcgtcgacctgtcccatggatcgggcggccgcgccatggcgcagctgatttcggggctgttccacgaggcgtttggcaatgaatggctggcgcgaggtaatgaccagtcggcattcgatgtcggcgacgggcgcatggtcatgacgaccgatggctatgttgtctcgcccctgtttttccctggcggagatatcggttcgcttgcggtgcacggcacggtcaacgacatcgccatggccggcgcaagaccgctttatctctcggcgagcttcatcatcgaagagggcttccgcttctgcgacctcaagacgatcgcggaatcgatgggcgaggcggcgcgcgtcgccggcgtccacatcatcactggcgacaccaaggtggtcgagcgcggcaaggcggacggtctgttcatctcgaccgccggcgtcggcgtcgtgcctgatgggctcgatctctcggcggagaacgcgcgcgtcggcgatcgtgtcctgatctcgggcaccttgggcgaccacggtgttgccatcatgtcgaagcggcagaatctgaccttcgagaccgagatcgtgtcggattcggcgccactgaacgatctcgtcgccgaaatggtcgaagccggcgggcgcggtatccggctgatgcgcgaccccacgcgcggcgggctcgccgccaccttgaatgagatcgcccaccagtccggcctcggctttcacctcatcgaggaacagatcccggtcaagccgggcgtggcggcagcctgtgaactgctggggctcgatccgctccatgtcgccaacgagggcaagctggtcgcgatcgttgcgcccgacgtcgccggcgcggtgctcgcggccatgcgcggacatcggctcggccgcgatgccgccgacatcggcgaagctgtcgcggacgatcatcatttcgtgcagatggcgacgagctttggcggcggccgtatcgtggactggctgtccggcgagcaattgccgcggatctgctga

SEQ ID NO: 4606 - DNA, 1701 bp, BradyrhizobiumColbertium
atgcgcatcctgctcctgtcgcattcgttcaacagcctgacgcagcgacttcatgtcgagttgcgcgagcgcggccacgagatctcggtcgagctcgacatccatcccgacgtcacgcgcgagagcgtggcgctctaccagccggacctggtgatcgcgccgttcctcaagcgggcgattcccgaagacgtctggcgcaacgtgcgctgcctggtggtgcaccctgggccgcccggtgatcgcgggccggcggcgctcgactgggccattctcgaaggcgcgaccgaatggggcgtcacggtgctccaggcggatcgtgagtttgacgccggcccggtctggaccttccgcgggtttcccatgcgccgcgcgaccaagtccagcatctatcgcagggaggtgacgacaggcgccgtcgaggcggtgctggaggccatcgatgcgatcgaagcgggaaggccgacgccgcagccgatgcacgtgggcgatccgcgcattcgcgtgcgcgggccctgccgccggtcggaccgagcgatagactggcagcacgacacgactgagaccgtgctgcggaagatcaacagcgccgacggcacgccgggcctcgtcgatagcctgttcctccaggacgtgcggctcttcgatgcccatgaagcgcgagagatctccggcgttcccggcacggtcgttgcacaatgcgacggtgctttagcccgcgcgacggtcgacggagcaatctggatcggccatgtacggcagcttgcaccgaagagcctcaagcgatctgcggcaaaggtgttcgccgagcaagccgcgcaacttccgcggcgacccggttgcggctatgctcccattcagtatcgcgagcgtggcgaggtcggcgaactgcagttctctttctacaatggcgccatggcgaccggcgactgcgaggcactgctggacgcctaccgggccgcgttggcgcggccgacaagagccctccttctgaccggcggctgtgactattggtcgaacggcattcatctggccgagatcgaggccgcagacagtgccgccgatgaatcctggcgcaacatcaatgccattgacgatcttgcacgcgcgatcatcgagacgacggatcggctggtcatatcggtcattcgtggcaatgcgggtgcggggggcgtgttcttgagcctggctgccgacgaggtctgggccagtgatcaggtcgtcctaaatccgcactacaaggacatgggcaatctcttcggctccgaatactggacctatctgttgccgcgtcgcgcgggcgcagagaattcggagcgaatcacgcagtgccggctgccggtgggtgtcgccgaggcgcagcgcctcggcatcgtcgatcgtgtgctcgtgagcggcgggtgcggacgcgaaagcctcgaggagcttgctgctgcagcagcttcggatcgaggctttgcggcgcgtctggccgacaagaagcggcgccgtgcggcagatgaggccgagaagtcgctgcaggcctatcgtgacgatgagttgcggcggatgaggctgaatttctacggctttgatccgagctaccacgtcgcccgctacaatttcatccacaaggtgccgaagtcgcgcacgccgctgaccatcgccggtcaccggtcgcggcgcgcagccggacggcccagaggcatggctgtgccctcatga

SEQ ID NO: 4607 - DNA, 1455 bp, BradyrhizobiumColbertium
atgagcattcagggaaccattctcgtcgttgacgatgaggtccgttcgcaggaggcgctgcggcgcgtcctccgggatgatttcgaggtgctttgcgccggcaatgcggccgacgccgagaagctgctggagggtgagatcgtccacgccattctctgcgaccagcgcatgcctcatgaatcgggcgtgagcttcctgaagcgcgtgcgtgagctctggcccgatccggtgcggatgatcatctccggctattcggactccgaggacatcattgcgggcctcaacgaggccggcatctatcaatacattacgaagccgtggcagccggatcggctggtcgacatcgtgaaggaagccgttcagctctatcgtctgcagaaggagacggaaacggctggcgtcgacgtcaaggcgacacccgggcacatcaagaaggttgtctcggtcaaacgcggggtagccaagcagctctatgatttcgatcgcatcgtgcattcgcccgacagtcccatgcacaaggtcatcgagctgggaaaacgcgccgcggactacgacatatcagtgctgatcacgggcgagtccggcactggaaaggagctgctcgcgcgcgccattcactacggctccgcccgcgctggcaaggccttcgtggtcgagaactgcggcgcattgcctgacgaactcctcgaaagcgaattgttcggctgcaagaagggcgccttcaccggcgcctatcaggaccggatcgggctgtttgaggtcgccgacggcgggaccatcttcctcgacgagatcggcgaaacctcgccggcgttccaggtgaaactgctgcgcgtcctgcaggagagcgaaatccgcccgctcggcgcacagcgggtacggaaggtcgacgtccgcgtggtggcggcgaccaaccgggatctcgaggccgaggtggacgcgggccgcttccggcgcgatctttattatcgcctggcggcgtttccggtgcacatgccggccttgcgcgagcgaccgatggatattccattgatcgcgcagggggtgctgtcgtcggtgaagacgtccttcaaccggccgggcctgcgatttgcggccgcggcgctcgatgcattcgctagttaccactggcctggcaacgtccgcgagctgcagaacgagatccagcgtatggcggtgctggcggatgcggatgaattgcaggctccttcgctgctgggtcggcgtaacggccggcagccgggcgccgcaatccacggccgattgaatgggtcggcgaccctgaaggacaaggtggaggatctggagaagtcggttatcatcggctgcctggaacgttacgaaggcaatatcagccgggtcgcgagcgagcttgggctctcgcgcgtcggtctcagaaacaagctgtccaggtacgatttgagaaaaaatggcaaaggcgacgcatcctcctga

SEQ ID NO: 4608 - DNA, 1368 bp, BradyrhizobiumColbertium
atggcaaaggcgacgcatcctcctgacgccggcgaaaccgaaccactgctcaagctgatcgccggtcgcggtgcgatcgagctcgaccatgagcgcgagggcgcctggatcgaggtcattcgcaagatggacgaggtctattccgacctcttgcgctatgaagtcgatctcgagcacaagaatgcggaactcgaggaggcgcaggcgttcgtcacgaacgtcatcgaatccgtctcggacatcctcatcgtctgcgatgcaagagggttggtgcagcaggtcaattcggcgtttcagcacacgctcggctgcagcgccgcggacatcgtcggaaagaacatcgctgatgtcatcgatgccccggacaaggccaagctggtcccgctcctgaagccgcgtagcgcctccgacgtcgtcgacggcgagctgcgattttctggcgcaggcggccgctccgatctgtttgcgatcaacggatcaccccgtcatgatcatcgcggccgattcatcggcgtggtgttgacggggcgtccgatcggcgagcttcgccgcgcctatgaggagctgcacaaggcgcatcatgaactgcagcgggcccagcggcagctggtcgagcaggagaagatggcgagccttggtcgcctcgttgcgggggtcgcgcacgagctgaacaacccgatcagcttcgtctatggcaacgtccatactttgatgcgctaccgcacggcgatcgtcacctatctcgatgcggtccacggcaaatccggagagggcgatctttcggctcaaaggcgaagcctgcgcattgacgagatcttggaagatttcggcccgctgatcgaaggcaccatggaaggggcgatccgcatcagcgagatcgtcaagaacctacgccgactctccttcagcaagcttggcgaagtcgagcgcgtcgacatcgagcggctgatcaacaccgcggtgctgtgggccgtgcgcaccaagcaggtgcgcatcgatctgcagatcgagatcgaaccggggctctggatttccggcaatgaggggcagctgcaccaggtgatcgtcaatctcgtggagaatgcgatcgacgcgatgcgcggcaccgagtcgccgcggctggtcgtctcggcggcgcgccagggcgacgaaatcctgttccggatatcggacaacggtccgggaatcgaccaggatcacatcggccacatcttcgagccgttcttcaccaccaagcgggtgggcgaggggacagggcttggcctctggatcagctatggcatcgtgcgtgagcacggcggcgagctgctcgctgggcatgagccggggggcggcgcaacattctccttcgccttgccggctgcgtag

SEQ ID NO: 4609 - DNA, 1065 bp, BradyrhizobiumColbertium
atgacgctccagacccgcatccatgcctctcgccggtcgccgacggcgctggttgccggcggtgccggcttcatcggatcgcatctctgcgatgcacttctgcaacgcggcaacacggtcatctgcgtcgacaacctgttcacggggaccaccgacaacatccggccgctgctcaatcacccgaacttccgcttcatcgagcatgatgtgcgcgaccccatcgagatcgagggcgatatcgaccgcatctacagcctggcctgcccggcctcaccccggcactatcagaccgatccagtcgggacgatgaagacatgcgtgctcggctcgatcaacctgctcgaactcgcgcggcagaagggcgccaggatccttcaggcctccaccagcgaggtctacggcgaccccgaagtgcatccgcaaccggaatcctacctcggcaacgtcaacccgatcgggcctcgggcctgctacgatgagggcaagcgcgcagccgagacgctgatgttcgactatcatcgccagcacgggaccgagatcaaggtcgcgcgcatcttcaacacctacggcccgcgcatgctcgagaacgacgggcgcgtcgtctccaacttcatcgtgcaggccttgcgcggagagccgatcacaatctacggccagggtacgcagacccgcagcttctgcttcgtcgatgatctcgtgcgaggccttcaactcctgatggagagccccgcctcggttacgggtccatgcaatctcggaaatccccacgaggtcaccatcgaggcgatcgctcgcaaagtgctggaatgcaccgaatcgacctccccgctacggttcgaagccttgcccaaggacgatcccaagcgccgcaagcccgtgatcgataccgcagagaagatcctcggatggcgcccgcgggtggctctgaaggacggccttcaagcgaccattgcctactttgcgctgcgtatcgcggcggagtcgcccgcacttgtgccagccatagcccaacgcaagatccgtcatgctgcacgcgaccgcctgaccatgtcccaacaatcgtga

SEQ ID NO: 4610 - DNA, 825 bp, BradyrhizobiumColbertium
gtgacgacacacgcgaggggcgtcaccgcattctacgatatcgacacgccagtcacgctggcaaggctcgagcagggcctcgactatctctcccccgcgatgattccgcgcttcgatctttatctgtccttcaccggtggtccggtgcccggcatgatcgagcagagctacggcagtccgctcgcgcgtgtcctttactgcagcgcggatccggaggtctacacgccgaagcaggcgcagccggaatgggcactcggctatctcggcacctacagcgaggaccggcagccggttctcgacgaattgctgcttgcgccggcgcgcacgctcgcctcggagcaattcgtcgtcgccggcgcgcagtatcccgcgaatatcgcctggcccgccaacgtctcccggatcgagcacctctcgccaaagcagcatccggcgttctacgccgcgcaacgcttcacgctgaacgccacccgcgcggacatgaaagcgctgggcttctcgccgagcgtccggctgttcgaagccgccgcctgcggcacgcccgtgatctcggatcgatgggccgggatcgagacgatattcgcgccgtcgaaggagatcctgctggcagccaaccctcgcgacgtcgtccagatcttgcgcgacatgcccgaggagcaacggcgcacgatcgctcgcaacgcacggcggcgggtcctcgccgaccacactcccgatcatcgcgcccggcaactggagacctattacgccgaggcatccgcgcggcggcgccgcaaggcagcaccgctcccggtcgttcgccccatgcaggtcgcccaactctga

SEQ ID NO: 4611 - DNA, 1089 bp, BradyrhizobiumColbertium
gtgaatatctgcttctttggatccagcctcgtctcatcctactggaacggcgccgccacctattaccgcggtatgctgaaggagatcgcggcgctcggccacgacgtcaccttctacgaacccgacgccttcgagcgccaggcgcatcgggatatcggtgacccggaatgggccagggtcgtcgtctatcccgcgaccccggacggctggcgccactcgctcgatgcagcggcgaaatcggcggacatgctggtcaaggcgagcggcgtcggcgtcttcgatctggagctggagaacgccgtcgcggagctgccgacgcggctgacgcggatctactgggacgtcgatgctcctgccacgctcgaagcgatggaaatcgatgcgcagcatcatctgcgtcgcgcaattccgtcctacgacatggtcctgacttatggcgggggcgatggggtcgtgtccgcctaccgatcgatgggcgcgcgggattgcgtaccgatctacaacgcgcttgatccagccacgcattttccggcaccgtccaatccgcgcttcgcctgcgatctcagcctgctggccaatcgcctgcctgatcgcgagaagcgcgtggagcatttcttcctcgacgttgcgcgccgcctgcccgagaggtccttcgtgctcggcggttccggctgggacgacaaggacgcgcccggcaatctgcgcaaagtcggtcatgtcggcaccgccgatcacaacgcgttcttcggctccgggctcgcgaccctcaacgtcaaccgcgacagcatggcgcgctatggcttttctccgccgacgcgcgtgttcgaagcgattggcgccggcgcttgcctgatcaccgatcaatgggccggcatcgatcacttccttgaacccgatcgcgaggtgctggttgccgctgacggagccgcggtcgcagagcacctcgccgcgctcgatccggagcgggcccgctcgatcgcccgccgcgcccgcgcgcgcatcctgagtcagcacacctaccggcaacgcgcccaccaattcaacgatctcttcgtcgcccgcagctcgcgaatcgaggcagcagaatga

SEQ ID NO: 4612 - DNA, 1131 bp, BradyrhizobiumColbertium
atgaaatgcgtcctgttctatcatgcgttcacctcgtgctggaacaacggcaatgcgcatttcctgcgtggctacgcgagggagctgcacgcgctcgggcacgaggtcgtcgtgttcgagcccattgacggctggagccggctgaacgccatgcgcgaaggcggcagtcatgcgatggaggagattcccaccctctttgccggaatagacatccgccgctacgacgccagcctggatctcgagcgggcgctggacggggccgatctcgtcatcgtgcatgaatggaatccgcccgatctcatcgcgcagatcggacgccgacgcgcgcaaggcgctcccttcacgttgctgttccacgacacccatcatcgcgccgtcagtgcgcccgaggagcttgcgcagttcgatctcgacggattcgacggcgtgctcgccttcggcgaggtgcttcggcagatctatctgaagcttggctgggccgaccgggccttcacctggcacgaggcagccgatgtcgcgctgtatcatccgctgccgcaagtcgagcgcgccgacgatctggtctggatcggcaattggggcgatggggagcgcagcgccgaactcaacgaattcctggtggggcccgtggcggaactgaagctccgcgcaagcctccatggcgtgcgctattcagatgacgcactcctcaccatcaggagcgcgggtatccgttatggcggctggctgccagcacactgggtcccgctcgccttcgccggcgcacacaccacgatccatgtgccgcgcgggccttacgtgcgcctgcttccgggcattccgaccattcgcgtgttcgaagcgctggcctgcggcattcccctggtttcggcaccctggtcggacgcagagggtctcttccccgatggcgcctatctcagtgttgccgatggcgcgcagatgacgcgtgcgcttcgttccctgcgcggggatcgggagatgtccgccgcgatggtgaatacgggacttgagacgatcagggagcgtcacacctgccgtcaccgggcggagcagcttgtcggcatcgtggccgacatccggggctcgggcctccagtcacagtcccagcatgatatcggagccgtcgcgtga

SEQ ID NO: 4613 - DNA, 1110 bp, BradyrhizobiumColbertium
atgagcccgggcgcggacatcaggatcatgatgacgaccgacacggttggtggcgtatggacttattcctgcgccctcgccggcagcctcgccgcggccggcgccgacgtcacgctcgtcacgctaggcccgcgcgctcgaatcgatcaacgccagatgctgcgtggcacgcgagtaaacctggtcgagacggacctcgcgctcgaatggcaagacccggaggggcaaaacgtttccgaagcacgacgggttctcactaaactcgaagccaggctgaagcctggcatcgtgcatctgaacagctttcgcgaagcgaccttcgcctggcatgctccgaccgtgctggtggcgcattcctgcgtaaattcctgggcgctcgcctgccacgatacgtcctggctcggcgagccgagatggcgccgctacagcgaacgcgtcgctgcagcgctcgacgcggcgcaggcctgggtgtgtccaagccaggccttccacgaggacatgacggcgatctatagcccccgatcacgcggcgcggtgatctggaatggaattacgcctcgtgatcccaccgggcgtaagcaggatttgatcttctcggccggccggttgtgggaccgcgccaagaatgttgaagctctcgccgccgctgcgcccgggctggactggccggtcgagatcgccggccccgttgacgcacggctgtcgacggctgtcacccggctcggcgagctgccgcacgaagccatggctgcgcgcttgcagcacgctgccatcttcgtcagtcccgccttgtatgagccgtttggcctcgccgtgctggaagcggcggccgcgggttgcgcgctggtcctctccgacatcccgacgttccgcgaattgtggcgcgaagccgccctgttcttcgatccgaccgaccgcgatgcgttgcatcaaaccctcgcagacctttgcgctgacgatgcggctcgggcacggctgcagcgcgccgcctatgaacaatccctgacctattcgctgatgcgcatgaccagcgcttatcttggtctctaccaggacctgatcgcatccagcgggaagaccgcgccgagccagatcgaggtgcgcgcatga

SEQ ID NO: 4614 - DNA, 1287 bp, BradyrhizobiumColbertium
atgacgcgggtggccctcatcaatccgaactgggattttaccggaagcatctactttggctgccggtcccctcacctgccgctcgaactcggcatctccgagcgtcacctgaaggcggccgggcacaagacgctgctgctcgatgcgcatatgttcgatctctcgctccacgagatcgaggccgagctgcgcgccttccgccccgaccagatcgtcatcaccaccgcgccgacatatctgttctggcgctgcgcgccgccggagctccgagtgccgcagcagctcgcattggctgtgcgggaccttgcgccgacgctgatcgcggtgggcccgcatggctccacgacgccgaaggcggccttcaagaaactcggcgtcgacatcgtcgtgatgggcgagtgcgagggatcgctgctgcgtctcgccaacggcgagcgggactttccgggcctctgcttcctggacggtcgctcgctccgggtcaacggcggcccacaggcggtggccttcagcgatcagcccgcactccattggccggacgagatgatccggcggcaccatcatcaccaccaccgcttcgaggccgagccgattgcgccgggcgctgaggtggaggcctcgcgcggctgcccttacaattgcacgttctgcgccaaggaaaatttccgcaacgcctaccgcaagcggccgccagccgtcgttctcgacgagatcgatcgtctgcgcacccacggaatcgagtacgtctacttcatcgacgagatctttcttcccaaccgggagctgctggaagggttgacagcccggggcctgaagttcggcgtgcagacgcgcatcgacctgtggaagcccgacatgctcgcgctgctcggccgcgccggctgcgtctcgatcgaagccggcatcgagagcctgaccgtggaagggcgcgcagcactcgccaagaactgcaagatgaccacggatcagctcgccgatcggctggtcgaggcccgccgccacgtgcccttcgtgcaggccaatctgatcgaggttccggaggatgacgatcccatcgtgcagcgctggcggcgcacgatgcaggatgccggcgtctgggccaacgatccggtgccgctctatccctatcccggctcgcctgactaccgcaagctctggggcgagcccgacgatttcgcgtgggagcgcgctcaccggcactatctcgcgatgttcgatcagttcagcgacgtgcagaacgatcgccccgccccgctcgacagcctcgaactccaggtggcctcatga

SEQ ID NO: 4615 - DNA, 1038 bp, BradyrhizobiumColbertium
gtgctggtcacgggcggctgcggcttcatcggctgcaatctcgctgaccgcctcgccgatcgcggtgatcgcgtgctggtgctggataatcttgcccgtgccggtgtgcgcgagaacgcgcaatggctgaaatcccgtcatggcgaccgtatcacaatcgccgttgccgacatccgcgacccgatcccggtcatcgacgccgtgcgcgaggcgcgcgccgtgctgcacctggcggctcaggtcgccgtcaccgacagcgtcagcgatcccgccgccgatttcgagatcaacgcgcgcggcacgctgaacgtgcttgaagccgttcgcctgcataacagcgcggcgccggtgatcttcgcctcgaccaacaaggtctatgggaggttgatcgaagacagcgagattgcgctccggggccgccgctacacgccggtcagcgatttgctcagcggcggcatctccgagagcgcaccgctggatttctacagtccttacggatgctccaagggcacggccgatcaatacgtccacgactattcaagagtgttcgggctccagaccgcggtaatgcgcatgagctgcatctacggaccgcggcagttcggcaccgaggaccagggctggatcgcgcatttcctgctcagcgctatccgcggcaacccgctgacgatctacggcgacggcaagcaggttcgcgacgcgctgcacgtctcggacgcggtgaacgcctggctcgcggcgctcgaccacatcgcgctggcccgcgggagggtcttcaatctcggtggcggtccggcgaatgcggtcagcctgctcgagctgatcgatcgcatcaccgaactgacgggtcgcaccgtcacatatcgcttcgccgactggcgaccgggcgatcagccctggtacgtgaccgatacgcaggcgctgaccgccgcgctcggctggacgccgcaagtgtcgctcgccgaaggcctgcgctcgctccacacctggctcgacagccgcttcggatcacaggatagaagcgaggccctggcatga

SEQ ID NO: 4616 - DNA, 1113 bp, BradyrhizobiumColbertium
atgacgcgagtattgattacgggaggcgcgggattcatcggctcgcacacggccgacgtgctgctcgcagccggctatgacgtgcgccttctcgacaatctctccccacaggttcacggcggcaaccgtcagcgacccgcctatctcgccgatgacgctgagctcgtcgtcggcgacgtcaccgatgctctcgccgtcgaacaggcattgcgcggcgctgacatggtgctgcatctcgcttctgccgtcggtgtcggccagagcatgtacgacatcgagccctatgtcaggaccaacgagcttggcaccgccgtgttgctgcaggcgcttgccaagcgtccggccgcacggctggtggtggcatcctcgatgagcatctacggcgagggcctctatcgtgacggcagcgggacagtcgtcgcctgcgacgaacggccgatcgagcagctgcgccaaggagagtgggaactacgggattccgcaggcgatccgctcgatcccatacccacgccggaaacgaagcagccgtccctgagctcgatctacgcgctgaacaagtatgcgcaggagcgcatgtgcctgatcaccggcaaggcctacgggtttccgaccgtgggcttgcgcttcttcaacgtattcggtccgcggcaagccctgtccaatccctataccggcgtgctggcgatcttcgccgctcggctgctgaacggccggccgccgctggtcttcgaggacggcatgcaacggcgcgacttcgtccacgtccacgacgtcgcccgcgcctgccgaatggcgctcgaagccgaccacagccaggacgtcttcaacgtcggctcggggcagagccgcaccattctctcggtcgccgaggatctggcccaggtgatgggacggcgtgatatcgcgcccgagatcacgcggaaatatcgcgccggcgacatccggcactgcttcgccgacatcggcaaggcacgcgacctgctcggcttcgagccgcatgtcgcgttcaaggacggccttgaagagctcgccgagtacctcgccgaccagatcgcggacgatcaggccgagcgggcgacccgtgagctggtgcaacgagggctggtcgcgtga

SEQ ID NO: 4617 - DNA, 1206 bp, BradyrhizobiumColbertium
atgcgtgccctgatcctggtgatggattccgtcggcatcggtgcggcgcccgatgccgacaattacggcgatgaaggcgccgataccgtgggtcacattgcggatgcgtgcatggccggcgatggcgacagcacgcaacgggaggggccgcttcgcctgcccaatctggtcgcgctcggcctcggtcaggcctgccgccttgccaccgggcgcgtcccgcctgggctcgacggtcggctcgaacatgcgcgctatggatgcgcgagcgaaatatccagaggcaaggacacgccctccgggcattgggagatcgccggcgtgcctgtcacgttcgagtggggctattttccaaaagttcgaccctgcttccctcgcgatctcgtcgagaacctttgcgagcgggccggattgcccggcatcctcggcgattgccacgcctccggcaccgacatcatcgccgaattcggcgagcgtcacatgcgaagcggtgagccgatctgctacacttcggccgacagcgtgttccagatcgcggcgcacgaggagacctttgggctcgatcggctttacgagctctgcacggttgcgaggcgactggtcgatcccctgaacatcggccgcgtcatcgcgcgtccgttcatcggatccaacgcacacaacttcaagcgcacctcgcaccggcgagatttcgccgtcccgccgcccgaacgaaccatcctcgatcttgccgaaagctgcggccgcgacatcgtgacgatcggcaagatcgacgacatcttcgcccatcgcggcacaggacggaacctgcgcggggacggcaatgccgaactgttcgatgccatgctcgacgggctggcaagccttgcagagggcgggctgctgttcgcaaacttcgtcgacttcgacacgctctacggccaccgtcgcgacgttgccggctatgcagcggcgctcgaagccttcgacgcccgccttcccgagttgctcggccgactgcgagacgacgatcttctgatcatcaccgctgatcacggctgcgatccgacctggagcggaaccgatcacacgcgcgagcaggtcccgatcctggcgtggacggcgcaatccatcgcaccgatcggccagcgagctggcttcgccgacattggcgcgagcgttgcgagacacctcgatctgccggcgcccgctcacggagcacacttctag

SEQ ID NO: 4618 - DNA, 948 bp, BradyrhizobiumColbertium
atgatcgaggccgccaagatctggaacgagcccaacaacaagtcgcattgggacatcctgatcgatccggactgggcgatgttcgcagatctcgcgctcgcggccggaaaggccatccgcagcgcgcatccgaccttgccgcgcgtgctcggcggcatttcgccgatcgatccctccttcatgcgcaacatgcaggcgcgcggcgtgctggatcacgtcgacgccgtcgccgtgcacggctttccgctcgactggaatctgtggcagatcggggaatggccggccaagatcgacgagatcaaggccgttacctcgctgccggtctgggtgaccgaggtcggcgtctcctccttcggtgccgaggaggtgcaggcctggggattgtcgcgcaccgccgagctcttgatcggccgggcgccgcgcattcactggtacagcctgtacgatctcccgtcagcctgggaggcgaccacccggcacaaggaggcggaaggatcgtcctactaccggcatttccacatggggctgctgcgcgaggatggaacaccgaaagccgcagcggagctgttcggccaatacgctgccgatatgggcctgtgccagtggtttcactacgaggaccatcgacttgaggacgccgtccgctggatgcgccgcctcggcgtgaggcacttgcggactggtctgtcatgggccgacagcttccgtcccaatgcgctcgactggttcgaccgccagatggacgcgctcgccgagttcgaggtcaccgtgaccttctgcttcacgccggagcaccgcggcctcgagcctcatcacaccagcccgccgcacgacgtgaacgaattcgccgagttctgcgcgcagatggtcgaccgctattgtgcgaaaaccggtctctcctcatcgctggctgcttcgctgctccgggagcccacatgcgtgccctga

SEQ ID NO: 4619 - DNA, 768 bp, BradyrhizobiumColbertium
atgacccgaggcgccctctcccgcgaggaaatccgccagcgcgtcgatgcgctggggccgtggtttcacaacctcgacctgaagggcgtgcccaccgcgccctcgcacttcctcggcgactatcccaacgtgaaatggcagcgcttctccggcatcattcccgatcgactcgaaggcaagaccgtgctcgacatcggctgcaatgccggcttctatgccatggagatgaagcggcgcggcgccgaacgcgtgcttggcctcgataccgacgaagaatatctggcccaggctcgtttcgccgccgaggtgaacgggctcaggatcgagtttcgccggatgtcggcctatgatgtcgggcagctccgcgagaagttcgatctcgtgatcttcatgggcgtgctctaccatctgcggcacccgctgctcgcactggacctgatccacgagcacgtcgccggcgatctcctgctgttccagtcgatgcagcgcggtgatggccgcatcgataccatcaaggagaactacgacttctggaccaccgaccagttcgactcctccggctaccccaagctgcacttcatcgagcacaaatatgccgacgaccccaccaattggtgggtgcccaatcgcgcctgtgtcgaggccatgttgcgcagcgcgggctttgccatcgcggcgcatccggaagaggaggtctatctttgcaagcggacggcgcggccgcaggccgatggtccggtctatccgtcgcgggaggcgaaccgatga

SEQ ID NO: 4620 - DNA, 801 bp, BradyrhizobiumColbertium
atgtggggcatcgttccggccgcgggccgcggcagccgtatccagcctctcgcgttctcgaaggaattgctaccggtcggcagccgccgtgacgacgggacggaccgcccctgtgccgtctcggaatatctgctggagcgcctcatcctcggcggcgccgacaagatctgcttcgtgatctcgccgggcaagtccgacattctcgagtacttcggcgaccattacggcaccgctgagctcgcctacgtcgtgcagcccgacgcatcgggcctgtgcgacgccgtcttcagggcacgcacggtcgtcgggcaacacgaggatgtcatggtcggcctgcctgacaccgtgtggtttcccaaggcggccctgcaatccctccccgaggccgacctctcgttcctgctgttcccggtcgaacaccccgaattcttcgacgcggtggtgctggatggcgaccgcgtgtcggagatccaggtcaagcagcccaatgcaacgtcccgctggatctggggcgcattcagaatgtcggcacgcggcttccgcgagctgcaggcgctgtggaacgcgcgcgaacgtcgcgacgaatatttcgggacgctggtcaacgcttatctttcggccggtggccgcggcatcggcgtcaaagccggcgaatcctatgtcgatgtcggcaccatcgacggctatcgcacggccatggccctgctcgccgagaccgccgagggccgttcgaagttgcgggcccgcgcgtcgtccgaaggcgtccgcccggtcccagcgaacaacggagcgattgcatga

SEQ ID NO: 4621 - DNA, 1104 bp, BradyrhizobiumColbertium
gtgaggatcgtcatcttcggcctgacaatctcctcgtcctggggcaatgggcacgccactttgtggcgcggcctctgcaagcatctcgcgcggtccggacacagcgtcgtcttcttcgagcgtgacgttccctactatgccggtgcccgagatctctacgagctgcccgggggcgagctccgcctatactccagttgggacgatgcgtggcagaacgccagcgccgatatccgtgaggccgacgtcgcgattgtgacctcctattgccccgatgcgattgcggcaaccgatctgatcctcaccgaaggtcgcgccgttcccgtcttctacgatctcgatactccggttacgctcgcaaagctcagggccggcgaagccgttccctatatcggaccgcgcggcctttcggatttcaacctggtgctcagtttcacgggcggacctaggatcacggaggaattccgtgaccggctcggcgcgcgcgacacccggccgctttacgggcacgtcgacaccgacgtccaccggccggtcgcaccccagccgcactatcgcgccgatttgtcctatctcggcacctattctgaagaccgccagcgaacgctcgagacgcttttcgtcgcgcctgcgcgggcgcgacgagatctccgcttcctgatcggcggggcgcagtatccaaacgattttccctggtcgcccaacatctatttcgtgcggcacctgccgccgtcggagcacgcgccgttctttgcctcatcgcggctgacgctcaatgtcacgcgccgcgccatggccgagatgggctggtgtccttccggccggctgttcgaggctgcggcctgcggcgcgccgctggtgagcgacgactggccaggaattgcggatttcttcgcgcccggagaggatatcctgatcgcaagcgacgaacaggacgtgctcgccgcgctcgcgatgacggatgccgagctccggcggatgtctctgcgcgcctacgagcgcaccatggaccagcatacgtccgacaagcgcgcgcgcgaactgatcgtgctgctggagcagatggcatcgaagcgcgtgtgccggcaacaacccgaggaggcctga

SEQ ID NO: 4622 - DNA, 597 bp, BradyrhizobiumColbertium
atggccagactcattcacctggtccggcacggtcatcatgccctgctcggccgatttctgtgcggccggatgaagggcatcgagctcgatgatatcggctgtggcgaaatggcgcgctgtgccgaagctgttgcaccccggccgacgctcattcaatccagcccgcagcggcgctgcatgcagtccgcctgcatcctggctgcgcactttgggctgccggtcgagatcgtccccgctctcgacgagctcgactatggggaatggaccggacgatcattcgacgatctggcgccggatccacgatggtcgcgctggaaccggcgacgcagcacgagccgaccacccggcggcgagagcatgcgctcgcttcagaatcgcacggtcgctcacctcgagcaactacgtagcgatggcagtcccgacattgtcgtcgccgtcagtcacgccgagccgatccgcgccgcgctgttatactattcgcggatgccactagacgattttctctcgatcgaaatcgattctgccagcatcagcacgctccgcgccgacggcggcggcatgaagatcatcgggatcaaccagcgggtgccggcgtga

SEQ ID NO: 4623 - DNA, 1101 bp, BradyrhizobiumColbertium
atgcattctcgtcttcaagacaggcgccgcgtgcgcgtcggactcgtcggcgtcggcaattgcgcgagttccttcgtccagggcctcacctactaccggaacgccaaatcgaacgagcccgtcccgggactgatgaacgcggatctcggcggctaccacatcagcgacatccagatcgcgtccgctttcgacgtcaacgccagcaaggtcggccgcgatgtcgccgacgcgatctttgcaccccccaacaatacgcaccgcttctccgacgtcgcgccaaccggcgtaatcgtgcagcgcggcccggtcctggacggcatcggacattatctcgcggacgacatcccgattgcggatgtgccggaggccgacgtatccgaagtgctggcgatgtcccgcaccgacgttctggtatcctatcttccggtgggctcgcaacgcgccagcgaatggtatgcggcgcgcgccatcgaagccggctgcggctatgtcaattgcattcccgtcttcatcgcctcaaatccggagtggcggcggcggttcgaggaggccggcctgcccatcgtgggcgacgacatcaaaagccaggtcggcgccaccatcctgcatcgcgtgctcgccaatctcttccgcgagcgcggcgtgcggctcgaccgtacctaccagcttaatgtcggcggcaataccgacttcaagaacatgctggaacgggagcgattggcctcgaagaagatctccaagacccaggccgtgaccagccagttcgacgttcccatggagcccgacaacatccatgtgggaccgagcgaccacgtgccctggctcaccgaccgcaagctcgccttcatccgcctggaaggcacgacgttcggcggcgttcccctgagcgccgaagtgaagctcgaggtctgggactctccgaattcggcaggcgtcgtgatcgacgcggtgcgctgcgccaagctcgcgatggaccgcggccaggccggagcgctgaccggcccttcgagctatttcatgaagtcgccgccgcagcaatttaccgacgaggaggccggacggcggacgcgcgccttcatcgatgacaaggcgtatgcgtga

SEQ ID NO: 4624 - DNA, 285 bp, BradyrhizobiumColbertium
atgactaaggcggaaaatagcgaagctcaccagaccaccgatcatggtgtaattcgtaaatgggccgaagagcgcggcgggaaacccgcaaccgtgaaggcgaccgaggaggatggccacgccggaatcctgcgcatcgatttcgatccgccggacgaagggctggatcgcatcagctgggacgagttcttcgacaagttcgacgaagccggaattgcgttcctgcaccaggacaagaccaaggacggtaagctcagccgattccataaattcgtgcgacactag

SEQ ID NO: 4625 - DNA, 921 bp, BradyrhizobiumColbertium
atggccagcgactgggttcaggcgatcagggcgggcgacttcgcgcgtgcctgggcgatcaacgatcgtgatttgctggaagttacgcccccgcccaagcataccggcccgcgtcatctccagcggatttggcgcggcgaagacctgaagaacaagcacgtactggtgcgttgctatcacggcctcggcgacacgatccagtttctgcgattcatcaggccgctccgccagattgctcgcagcgtcacgctgtggtgtcagcccgaacttcttccgctggtcgagagtgcgccgggcatcgaccgcgcgtttcccctccatgatggggtgcctgaagtcgatttcgaggtcgacatcgagatcatggaggtgccgcatgccatcagagcgcgacgggatcaggtcgaggtgggcgcttcctatttggcgctgcctccaactgtcgttccacctctccgggaagagcagaatcttgccgttggtctcgtctggaaagtcggagagtgggacaagcggcgtgaagtcccggccgcactgttgagtggtctcgccgtacccggggtgacgctgtattccgtccagcgtggcgcgagccccgaagagctcgccgcgatcggagcgctcgagatcagaacgccggacatcgcgaccctcggccatcgcttgcggcagctcgaccttcttgtttgtgtcgacaccatggttgcccatctagccggcgcactcggctgcgagacctgggtcttgctgcacgccgaatgcgactggcgctggcctcaatccggcgcgcactcgttctggtacccgagcctgcggttgtttcatcagaagaagccgggcgattggggcactgtcacttccgaagtgcgttgcgcgttgcgctcgcggcttgaagtgggtcaagcgcgtgtagcgaggtga

SEQ ID NO: 4626 - DNA, 1770 bp, BradyrhizobiumColbertium
atgcaagattccgataccacctcgtcgatgcccagcctgtcgcgggtgacagacgatatctggatcgtcgacgacaagccgatcagcgccgccggtctgcaactgcccgtgcgcatgaccgtcatccgtctgtcgaacggcgatctcgtgctgcattcgcccgtgaggcattcgccagctctgcgccaggagctggagcggctgggcacgatcaagtacctgctggcgccgaacatcgcgcactggatgtttgtccccggatggcaaagggagctgccgcaggccgcgactttcgcagcgcgcggccttggggcgcgcaagcaggttcgggctgccggcctccgcatcgatcgggagctgggagacacgacgccggaggaatggaccgccgagctcgaaaccgtgtcggtgaatgccccgatgttttcggaggtcgagctgttcgaccgacgaagccggacgctggtcctgacggatctcgtgcagaacctcgatgcccatcggctcagcgcgtcaaatgaagccgcggcgaacctgctcggcattgccaagccggacggcagggccccggtctatctgcggcttctgctgcgccttggtggtggcgcggcgcgggctgcagccgagcggctcgtgaggctggctccggaacgggtgatttttgcacatggcgactggttcgagacacaaggaacggcgcgcctgcgacgatccttgcgctggttgcttcccgagggcgtcttgggatccgagcaggggcagatgattggcacacgcgtcgtcatcaccggcgcctccagcggaatcggccgtgccgctgcgctggcgtttgcccgcaacggtgcaagcgtggtgctcgcggctcggcgcggcgaagtcctgatgcgccttgccggcgaatgtgaagcgctcggagcccgggcattggccgtgccgaccgacgttaccgatgcgcaggcggtggagcgtctggccagaacggcccaagacgcgttcggcggcatcgacgtctggatcaacaatgccggaacgggcgtgttcggcgcctatcaggatgcggatattgcgcttcatcgccgcacgatcgaggtcaatctgctcggcaccatgcatggcgcctacgcggtgcttcccatcttcctccgccagaatcgcggcgtgctgatcaacaacatctcgctgggcggctgggcgccgacgccctttgcggcagcctataccgccagcaagttcggcttgcgcggcttcaccgcgagcttgcgtcaggaactccgcacccatcccgatattcatgtctgcggcgtcttcccagccatcgtcgatacgccaggctttgtgcacggcgccaatacgtccggacgaaggctcgatcccggtccgttgctctatcaatccgaggacgtggccgagaccttcgtgcgccttgtccgcgcgcctcgtgacgaggtggcggtggggtggccggcgcgcgccggccagctggcctatgcggtcgcacccgggatcaccgagaacgtcctgggggctgtcttccgctggctgctgtcgcgtgcgcgtcccgcgccggtgagcgagggcaccttgatcgaagccggcccgcagggcacgtcgctggacggcggttggctggcgggaaagaaaatgctgcccgccggcgtggtcagcgcggggctcgtcgtgctcggcgtcgcggcttgtctggccctcgcggcatcgacggccgggcgcgcgtccgcatctcgcgcgaggctgcggcgccgccgcgcgtga

SEQ ID NO: 4627 - DNA, 186 bp, BradyrhizobiumColbertium
atgcaagacgtccaatggcatccgaccgatttcctcaccatcctcgttcgtgacgaggatatagaagtgacgccccttgagctcgggcctctccccgagcaggcgctttgcaatctcctcggcgacatccagggcgtcgatgtcatccggcaactcggcacctccttcgtctacaacggtttttga

SEQ ID NO: 4628 - DNA, 471 bp, BradyrhizobiumColbertium
atgacgctcaggatcggcgtgattgccgacacgcatggactgctgaggccggaggcggtgcactgcctcgccggtgtctcgcacatcattcatgcaggcgatatcggcagccaggctgtcatggacgggctttgccggatagcgccggtcaccgcgatcagaggaaatgtcgatcgggacgcgtgggctgaagcttttcccgagacgctgacgctgggcctgggcggccgccgcttctacgtcctgcacgatctcaagcaactctcgatcgatcctgctgaactcgggatcgacgtcgtagtatcgggccactcccaccgcgtgcggatcgagactgccgaagacgtgctctacctgaatccgggaagtgcagggaaacgacgcttcgcgctgccgatcacgctggcgacgctcgacatcgagcggagcggcccgctacggccggtcatccacgatctcgacaggacctga

SEQ ID NO: 4629 - DNA, 174 bp, BradyrhizobiumColbertium
atgtcaaagatgcctccagttcccgaagaacagcgaagcaacaagggacccggtgcagacccggccaccgaggtggaagaacgcgttccgggccgcgagaatttcgatacgcagggacgccacggcaacatcaagcagaacacgaccaatcagggctatcagcaggatcgatga

SEQ ID NO: 4630 - DNA, 162 bp, BradyrhizobiumColbertium
gtggggcgacccggcaacccggccggcggcgtcaatatcgggcgtatcgacggaacggtaacaccgggtccctcgctggacggggacgaccagatccgctcggagacgtcgcgggactccgatgtcggtcggaagatcaggagcatctgcaagggatgctga

SEQ ID NO: 4631 - DNA, 510 bp, BradyrhizobiumColbertium
atgcatgacaagagatcagacagcttcccgacttccgcgggcgtcctcctcgggcttggcctcggtgggttcttcgacggcatcgtctttcatcagttgctgcaatggcatcatatggtgagcggctggtatccgctcaattcgatcgagaacatcacactcaacacgacatgggacggcatctttcacagcgccacctacgtgttgctgctcgcaggtctctacctgatgtggcagcgggcgcgcgggagcgagctgcgctggtccagttggcagtgtctcggcgcgatcctgctcgggtggggcatcttcaatctggtcgagggcgtcatcgatcaccagatcctcaagctgcatcgggtgaatgagacggtgccggacgagcaacgcatcttctgggatatcggcttcctgctgtggggggctgcgatggtcatcatgggcgctgcgatggcgcgagcgggcaagcgggagggagcggatgcgggaggcagcctacaggctcgttag

SEQ ID NO: 4632 - DNA, 165 bp, BradyrhizobiumColbertium
atgcgggaggcagcctacaggctcgttagaagcacgccgccggtcctcgtttacacgatctttctgttgctgctggtcctcgccacagcgccggcgcttcgcgtcttcttgttcgggctgtccgtcgatgacctcctgcaattgcgctgctttgcgccggcctga

SEQ ID NO: 4633 - DNA, 783 bp, BradyrhizobiumColbertium
gtggagttcaggcttccgaagagctcgcgcatcgagcagggaaggctctggccaaagccgggcggcacgagcttgcgcgaatttcacgtctaccgctggaatcccgatgatggccgcaatccgcggctcgacacctacttcgtggatcagacagattgcgggccgatggtgctggacggcctgatctggatcaagaacaacatcgactcgaccctgacattcaggcgatcctgccgcgagggcgtctgcggctcctgctcgatgaacatcgccggtcagaacacgctcgcctgcaccaagtccatgaatgaggacattcaggagggcgagccgctccgcgtgctgcccctgccgcatcagcctgtggtgaaggacctggtgccggacctgaccaacttctatgcgcagctcgcgctcatcgagccatggctccagacggcatcccccacgccgcagaaggaatggcggcagagccatgaggatcgggcgaagctcgacggattgtatgaatgtatcctctgcgcgtgctgctcgacgtcatgcccgagctattggtggaattccgagcgcttcctggggccggccgcgctgattcaagcggcacgctggatcaacgacagccgggacgaagcgacgggcgatcgcctcgacatgctcgaggatcccttcagaatttaccgttgccacaccattctcaattgcgcgaaagcctgtccaaagggcctcaatcccggcgaagccatttcggcgctgcggctcaagatggtggagcggaagttctga

SEQ ID NO: 4634 - DNA, 438 bp, BradyrhizobiumColbertium
atgggaaagaaacagtttgccgcgttgccgtttcgtttggacaagtccgaactgcgggtgctgctgatcacgaccagacgcaagcgcaggtggagcgtcccgaagggatcgccgatgcgcaacaaggagccgcacctcaccgctgcactggaggcctacgaggaggccggcctgatcggcgtcatcgcaacccgggcagtcggcagcttcaagcatcgcaagggaaagggcgatcgcaagcggaccttgaacgtcgcggtctttccgatgcaggtgcacggccgcgagcgctggtggcccgagaaaggagagcgggaggcgatctgggtctcgccaaagagggcggcacgcatggtgcacaaggccgagcttcggcgcctgatcgcacggttcgcagcacagacggaggagggtgcatcctcgccgctggacggctga

SEQ ID NO: 4635 - DNA, 861 bp, BradyrhizobiumColbertium
atggagcaacgaaccacagggctcgcatccgagcaggaagcgcctcatgaagtcctggcggcggccatcaagcgacgccgcgcaatcctgttcgtcggcgccggtgtctcgatggcagtcggcttgccgtcctggcaatccctgatcgaccatctgctcgacgatcttggcctcgaacgcaatgtcatcgacgggatgcacggcggctatcagatgctcgcggagtattaccggctgaagcgtggcgcgatcgggccgctccgcagctggctggaccgaaactggcgcgtcgatcccgagagaattgcggcctcggagcttcaccggatgatcgtccagctcgactttccggtgatctacacgaccaactacgatcgcaatctcgaaaccgccttcgacgtcctcaggaagccgtacgcgaaaatcagcaacgccaaggagatcgcgagcgccgaccctggcgtcacccacatcatcaaattccacggcgacttcgacgatgacgcctcgctcgttctgaccgagaccgattttctcaatcggctctccttcaattctccgctcgacatccggtttcgcgccgatgccctcggcagcacgctgctcttcatcggatacagcatgtccgatcccaacatccgcctgctgctgcaccggatctggcagatctgggacgggtcccggcacaaccaggaccggccgaaatccttcgtattcgtcacgcagcgcaatccggtccaggaggccgtgctcgcgaactggggcatcaccaccattgctccgccggaaggcatcgctgcagacgagggcgtcaagcagctgcttggcgagatctgccggcatctcgaccatgacatctag

SEQ ID NO: 4636 - DNA, 981 bp, BradyrhizobiumColbertium
gtggcggcggcagagcgccctctcaccgccattaccttttccggcggcctcggtcttggcgcctatcacggcggtgtgttcgaggcgttcacctctcttacgttgccgctcgattgggtcaccggttcatcggcaggcgccatcaccgctgcactgatcgcgggcagcccgagcgccgaccggctgcgcaatctgcgcagctattggcacgcgccaagcaatccagccgcagcgccgaacgcaggccgccatacgttggcctggctgagctcgatcaatacgcgcgtgctaggtcattcgggcttcttccatccccgcctccctctcccggcatctcacttcggcggtctctacgatctcggccccacccgcgaacgcctccggcggttgatcgatttcgaacgtttgaacggcggcgatccgcgcatcacgatctgcgccacggacgtcgaaagtggcgatgcggtcttgttcgactccgcattggagcggatcgaaatggatcacatcctggccagttgcggattcgtcccggagttcgctccagtgcggatcgccgaccgctggctcggcgatggcgggttctcgctgaacgcgccattcgacccggtcctcgagaatgcgggcccgctccacctctatgtcatcgatttgtttccacgcgacggcaaggtccctgacgggctcgaggccgcagccgaacgcaagagcgacctgaccttcagcaaccagaccttccagcgccttggatatgccctggaagcccgtcagctgcgcgccgagcttcaggacctcgactatgacgacaaggtctatctcctgagctaccgccccggccgcgaggaagcaggtcctgaaaaatccttcgatctgtcggagacagccatggcgcaacgctggcgggcaggcttgctcgatatgcagcatgccggacgccttgctccggtcaagaacgggatctgcagcgtgcggcggccatag

SEQ ID NO: 4637 - DNA, 231 bp, BradyrhizobiumColbertium
atgaaacatcgcctgcttgccgtcgctctggtgatcgcgggtggcttcgcctcctcgaacgcggctttcgcgcaagatcgctactgcctgcagggtcgcatctggggctatccaggcaattgccagttcgccagctacgcccaatgcatggcgacagcatcgggaacgaacgcctattgcggcatcaatccccgctatgcccacgcacgccgttacaggggataccggtga

SEQ ID NO: 4638 - DNA, 1197 bp, BradyrhizobiumColbertium
atgccggaacaatctcccagcctcagaaacttcaccatcaatttcggtcctcagcatcccgccgctcacggggtgctgcggctcgtgctcgaactggacggagaggtcgtggagcgggtcgatccgcacatcggccttttgcaccgcggcaccgaaaagctgatcgaggcaaagacctatctccaggccattccctatttcgatcggctcgactatgtcgctcccctgacgcaggagcatgccttctgccttgccatcgaacggctgatcggaatcgaggtgccgcggcgcggccagctcatccgcgtgctctatcacgagatcagccgcatcctgtcgcacctcttgaacgtcaccacgcaggccatggatgtcggcgccttgacgccgccgctgtggggcttcgaagagcgtgagaagctcatggtgttctatgagcgagcctcgggcagccggatgcatgccaactattaccggccgggcggcgtccatcaggatcttccgcccaagctcatcgacgacatcgaggcctggtgcgatccatttctgaaggtcgtcgacgatctcgaccggctgctctcgctcaaccggattttcaagggccgcaacgtcgatatcggcagggtgacgctcgaacaggcctgggcctggggattctcgggcgtgatggtgcgtggttcgggggccgcctgggatttgcgcaaggcgcagccctatgactgctatgccgagatggacttcgatgttcccatcggcaggaacggcgattgctatgaccgctatctcattcgcatggaggagatgaggcagtcagtccgcatcatgaagcagtgcatcgagaagctgaagtcccctgacggcgggggcccggtgctcgtgcaggacaacaagatcgctccgcccaggcgcggcgaaatgaagcgttcgatggaagcgctgatccaccatttcaagctctacaccgaaggcttccacgttcctgccggcgagatctacgttgccgtcgaggcgcccaaaggcgaattcggcgtgtttctcgtctcggacgggaccaacagggcctacaagtgcaagatcaggtcccccggcttcgctcatctgcaagcgatggattttctctgtagggggcacttgctcgccgacgtctcggcgatcctgggctcgctggacatcgtgttcggcgaggtcgaccgctga

SEQ ID NO: 4639 - DNA, 2187 bp, BradyrhizobiumColbertium
ttgcgccgcacccggatcaccgagggcaggccattcccgctcggcgccacctgggacggcctcggcgtcaatttcgctctattttccgcccacgccaccacggtcgagctttgcctgttcgatgacgccggcgaaaccgagctcgagcgcatcgagctgcccgaatataccgacgaggtctggcacggctatctgccttccgcccgccccggcacagtctacggctatcgcgtccatggcccctatgagcccgacgcgggccaccgcttcaatcccaacaagctcgtgctcgatccctacgccaagcaactggtcggccagctccgatggggaccggagctgttcggctaccaactcgaccatgccgacaaggacctctcctacgacgaacgcgacagcgcgcccttgatgcagaaatgccgcgtcatcgaccccgccttcacctggggtacagcgcgcaagctggaggtgccgtgggagcgcacgatcgtctacgaaatgcacgtcaagggattcacccagctgcatccgctggtgccggaagccgagcgcggcacgttctcggggctggcacattcggaagtcccggcctacttgcgttcgctcggcatcaccagcgccgagctgctgccgatccatgccttcgtcgacgacagctatctggtcgagaaaggcctgcgcaattactggggatacaactccatcgccttcttcgcgccggatccgcgttacctcaaggcgacttcagccagcgaattcaaggccatggtcaaccagtttcatgcccatggcatcgaggtcattctcgacgtcgtctacaatcacacggcggaaggcaacgagctcggcccgaccttgtcgttcaagggcatcgacaatgccagctattaccgcctgctgccggaccagaagcgctattacatcaacgacaccggcaccggaaacaccgtcaacctgtcgcatcaacgcgtacttcagctcgtcgccgattccttgcgttattgggcgaccgagatgcgggtcgacggcttccgcttcgacctcgccaccatcctggcgcgcgaaccctatggcttcgatgaaggcggcgggttcctcgacgcctgccgccaggatcccgtgctctccagcgtcaagctgatcgccgagccctgggacatcggtcccggaggctaccaggtcggccagtttccccccggctgggccgagtggaacgacaagttcagagacaccgtgcgcgccttctggaagggcgacccgggcacgctggccgactttgccaagcgcgtgtcgggatccggcgacctcttcaacaagcgcgggcgccggccgtgggccagcgtcaatttcgtcacagcccacgacggcttcaatctgaacgacctcgtctcgtacaacgacaagcacaacgaggcgaacggcgaggacaatcgcgacggtcacagcaacaaccattcgtggaactgcggcgtcgaaggcccgaccgacgatccggagatcatcgcgctccgcgagcgccagaagcgaaacctgctcgcgacgatgctgctctcccatggcacgccgatgctgctcgccggtgacgagttcggacacacccagaacggaaacaacaacgcgtacgcccaggacaatgagacaacgtggctcaactggatgggcatcaccgccaacgggcgcagcctccgcgagttcacgcgcaagctgatcgccacccgcaaggcgtttccgatcctctaccgcagccgcttcctggtcgggtcacacaacgaggaactcgacgtcaaggacgtgacctggctgtcgccatccggcgaggagatgacgacggagcagtggcatgatggcaacgccaagtgctttgggatgctgctcgacggccgcgcgcaggagacgggagtcaagcgccgcggctccgatgcgaccatgctgctggtctataacgcgcaccatgacgtcgtgaacttcacgttgccggaggtcgcggacggacgcagctggctcggcctgatcgacaccaatcgccccgacgcaccgatggccgagttcgagttcgggcacgactatgcggtgacggcgcgttcgctcgtggtgtttggcctggcgaacgatagcatcgcaacccgacgcctccgccaaggcctcggcgcgctgctggacgtcgccgatacccctctggcggattga

SEQ ID NO: 4640 - DNA, 267 bp, BradyrhizobiumColbertium
atgcgccgctcgaaaccacaagcagtccgtaacaagctcgacctggccgaccgcgcccaggtacggctggtcaagaaacggcttgggctctcggatatggagcttgccgcaatcgtcgggcgcatcggcaattcgatttcggccatcagcaaggaggccgctcagaggccaaaagtgctgaacaagccttccgaagccgtgatcgccgcgacggtggccggcgaacaagcgaccaccgaactcgcggcggccgcgccgacatcttga

SEQ ID NO: 4641 - DNA, 1830 bp, BradyrhizobiumColbertium
ttggatcaaagactgggaacggccgagcaggggcggcgccatggtcctcagatcatcgatcatggtgtctcgttcaacttgtgggcgcccacggctcgatcggtcgagctgctcgaaattggccagccgccccgcaggatgccgcgcgatgagcacggctggtatcagctgctcagcgagaccgcgcgcgccggcacgcgctatcagttcaggatcaatgaggatctcgtcgttcccgatcccgcctcgttgttccagccggacgacgtcggcgcgccgagcgaggtgatcgatgccgcggcgttgcgcgatccggttctctacccgggtcgtccctgggcggaagccgtcatctacgagctgcatgtcggcacgttcagcgaagaggggacctatgccggcgtcgagcagaagctgccctatcttcgcgatctcggcatcaccgccatcgagctgatgccgctcaacgacgtcccgggccggcacaattggggctacgacggcgtgctcctgaacgcgccgaatgcgcgctatggccggccggaggatctcaagcggctgctgcgggccgcgcacgcactcgatatcatggtctatctcgacgtcgtctataaccatttcggaccgcagctgaactatctgcacctctatgcggagaacttctttaacgcgcgccacagcaccggctgggggccggccgtcaatctcgaaggagacgacggcgcgttcgtacgcggattcctggtcgagaatgccctgatgtggctgcgcgactacggcttcgacggattgcggttcgacgcggtccacgcattgaaggatgattccgagcgtcatttcctgatcgagctcgccgaaactcttcgcagtcagctggcgggccggcgcgtccatctcatgctggagaacgaggccaatcaggcgcacctgctcgagcgttcacacggacgagccaggtactacgacgcgcaatggggcgatgatttccacaatgcgctgcatgtgctgctcaccggcgaggacgaaggctattaccgggccttcgcagacaagccgctcgagcatctggcgcgatccctgaccgaagggtttgcctatcagggcgaagtctttccgctgcacgaggagccgcgcggtgaaccgagtgcgcatttgccgcccgaagcgaccatcttcttcgcccagaatcacgaccaggtcggcaaccgcgccttcggggagcggctgtcccggctggtcggcgcggagaagctggagcaggccctcgcgctggttctgctgagcccgcatatcccaatgctgttcatgggtgaggaagccgcggccgaaacgcccttcctgttcttcgcagactggacgggcgaagctgccgaactgacacgggaaggccggcgcaaggagttctcacatttcaaggcgttcgccacgcccgagacgcgcgcgaaaatcccggatccttgcgacgaaagaaccttccgcgcctccaagctggactggacgagcatcgatcaatccccggctggcgcaaggtttcgggcgctgacagcgcagttgttgatgatacggcgtgagaagatcgtgcccctcatcaagcggggggtcgtttcggcgcagcgagaactcttgggatcggattcccgcatgggaggtctggatgtacgctggcagacaggtcggggcgacgttctgcagattgtcgccaatttcgccgaccgagaactccctgtgccgccgctggtcgagggcgagagcctgtggcgattgcatcccctcgaagccaaagcacttatgcccggcgacctcattgtgaggattggccggaagggctga

SEQ ID NO: 4642 - DNA, 126 bp, BradyrhizobiumColbertium
atggggttgttttcggaatctttcgtttttgatccccgaagtgtgcatcggttgtccgaaaagatcatgcgcgaacaacggcccaaacgcgcgatggcgatttatgacgatatcgccgcgctttag

SEQ ID NO: 4643 - DNA, 996 bp, BradyrhizobiumColbertium
atgaacaagcacgctcgcgcgcacgcagtcaggccagagatcatggtcgaggacctcatgattccgagtgacacggtcgggatttcactccacctgcgcaacaagcggccggcagcgctgaagaccttctctgccgagagaaccatcctgataatgcacggcgcaacctattcgtcggagagccttttcgatacgccactctgcggcctctccttcctggatcatctcgccgggcacggctacgacgtgtttgcggtggacgtgcgcggctatggcggatcgactcgaccgccggagatggacgcgccgccggaggcgtccgagccgcttgtgcgcaccgaagtcggcgtacgcgacctggccagcgcagtcgaatacatcctgaaacaccgcggcatcacgcgcctcaatctggttgccatgtcctggggcgggtcggtggccggtgcctacaccgcggccaacaacgataaggtcgtcaagctcgcgctggtcgcaccactttggttgctgaagggtccggctccaatcgatgccggcgggcgcctcgggggctatcgcaacgtcccggttctggacttcagggagcgctggctttcggccgcgccggaagcagcccgatctcgcttgattccggctgacggcttcgaacgctgggccaacacctcgctcgccaccgacccgcagggcagttcgcaagcgcccccggtcatgcgcgcagtcaacggcccgatcctcgacattcgcgaatactgggccgccggcaaggccctctactccgctagcgacattcgcgtgcccgtgctcctggtccacgcggaatgggatcaggacgttcccatcgcctcggcgcaggatttcttcctgtcgctgaaacacacgccatatcggcgatgggtcgagatcggcgaaggcacgcacatggttctgctggagagaaaccgtatgcaggcgttcgacgcgatcagtcaatttctcggcgaagactatagctag

SEQ ID NO: 4644 - DNA, 936 bp, BradyrhizobiumColbertium
gtgacgcaagcgacgagcacctatcgccttggcgatgcaaccatcacacggatcgacgagttgcggcttgccgcattcaagttcgacgcgctttatccggacggcgagttgcaggcgctggagcgccatcgcgagcgcctggaggcgggctcgttcgatgctgcgaccggcaccttcattcagagcattcacagctggctggtcaggacacccgaccacacgatcctgatcgacacggccaccggcaatgacaagaaccggccagagatcccaccgctccaccggctcaatcagccgtttctggcgcggctggctgcagcgggcgtcaccccggagcaggtcaactacgttctgctcacccatgtgcatgccgatcacgtcggctggaacactcgtctcgtcgatgggcgctggactccgagcttcccaaaggcgacttacattttctccgggatcgagcaggcctacggcgaaagcctcgcgacaggtacggagccgaccggagcagcccgccctgatccggtccttggtccggcgctgcgcaagccggccgaccgtgtctatgacgacagcgtccgtccggtgatcgatgccggactggccagactcatcccggtggacggcgacgaggtcctcgaaggcatctcgttcattccgacgccaggccatagcatcgatcacgcatccatccgtctcgtgtctggcggcgagcaggcgcttttcgccggcgatgtgatgcatcaccccctacaggtgtatgagccctcgctcaattcctgcttctgcgagtttccggaagcagccttgcgctcgcgcgccttcgtgctggaggacgccgccgagcgtggcgcaaccatcttcaccacccattttgcgcagtcatctgccggccgcatcagccggaccggcgaacgctttatctggaagttcgtctaa

SEQ ID NO: 4645 - DNA, 945 bp, BradyrhizobiumColbertium
atgctggatgcggaacgcggtcggccccggccggctgacgacagtgatctggccgagatcgaccttggtctgttgctggcactggaggctctcctgcatgagcggaacgtgacgcgcgcggcctcccggctcaatatcgggcagcccgcgctatcggcgcggctgaatcggctgcggcaggtctttgccgatccgctgttcgtacccgcgacgtccgggcgcggcgtggtgccgacggcgagggcggtcgagctgcagacggagcttgcagctgtgctcggcaagctgcgtcgcatgctggaggggccggctgtgttcgaccccgcccgcagccagcgtaccttcgtcgttgccatccacgaaaatccagccgttacactggcgccgggcctggtggcgcgttttgccgcgaaggccgagagagcgcggctcgctctcgttcacccgacgcgcgatgtcgtggatcagctcgaaaggggggagatcgaccttctggtgacgggagctgacagagctcacggcgagctgatgcagcgccctctgttcgaggacagcttcctgtccgcacagcgtaaaggccatccccacggcaatggcctgcttgatctcgacagcttttgcgcgctcgaccatcttctgatctccgccgacgggggcggcttctcgggtctcgtcgacgatgcgctggccgcgctcggccgctcccgccgcgtcgccgtctcaatccagacctatgcactggcgccgatcatccttgcgcacagtgactgcatctgcacgcttcctcggcgctttctgatgcgcttcgcccatgagctcgacctgaggccgccgccgctggatctgccgcccgctcgcatcgtcgcgctgtggcatccgcgcaatcaagacgacaagggtcacgcctggcttcgcgagtgcttgtatcaggcggctgcggcttga

SEQ ID NO: 4646 - DNA, 396 bp, BradyrhizobiumColbertium
atgaaacgagcaatcatgattttggcaacggcggcgcttgcctcgaccttgaccgtcggtgcggccgcagcgcatggcggtggaggtggtcacggcggttttggcggtggcagccacagcttcggtggcggtggctttggtggcggccatatgggcttcggcggcggcgctcatttcggcggcatcggacatgccggcggctttggcgggggacggctcggcggcacgcattttgggatcggccacgtcgcctccggcggcttaggcttccgccagcatgcgttccaccgctatggccactatcgccccggctatggattctacggctactatccggattgctacgattggtacgagttgcaccccggcgttccgttgccgctgagctgcagctga

SEQ ID NO: 4647 - DNA, 246 bp, BradyrhizobiumColbertium
atgatcacgtccaaactcttgccgatgggtctgattgcggcggccttgatcggaggccccgtcatggcgcgcgaacaccatgccggcatgcggaaatccgcgatggaatcggacaccgtggcatcgagcgcaccgacctatcagggcggccacgcgtgcatgccagcgccgcgcatcggcgcgttcgcgacggcgccgtggactggcaacgacgtgccgtgcgagcctggcactggcgcgttctga

SEQ ID NO: 4648 - DNA, 171 bp, BradyrhizobiumColbertium
atggtcatgacaatggcaaggcgcattctcgtcctgttgacgcctttgtcggcaggtgcggccgcattcctgaatattaattcagttctgctcgcatcgccgcagcaccatctggtcatgcaacgcgtggccaatcgcaggcggtcgcggcaccgtgcgctcggagcgtga

SEQ ID NO: 4649 - DNA, 681 bp, BradyrhizobiumColbertium
atgacacggattctcctcatcgaggacgacactgaaaccgcggaggcgatcgtcgccgagcttgccgagcggagctttgaggtgcattgggcgccgaacggcgtcgaagggctcgaccgggcgcgtacctcgcatcccgatgccatgatcgttgatcgcatgctgcccggcatggacgggctgaccgtcatcgaggcgctgcgcaacgaccagatcaagacgccagtgttggttctaagcgcgctcggcgccgttgacgatcgcgtccgtggcttgcgcatgggcggcgacgattatcttacgaagccgttcgcgatcgtcgagctgatcgcgcggatcgaggccttgctgcgccgtccgatggacagccgcgaaaccatcctgctggccggcccgttggagctcgatctgatcgaacgaaccgcccgacgcggtgaacgcgaaatcgacctgctcccgcgcgaattccgcctgctcgaatacatgatgcgccggagcgatcaactgctgacgcgcgcgatgctgctcgaagaggtctggaactacaagttcgttcccgccaccactaatctgatcgacgtgcacatgggccggcttaggcacaaggtcgatgctcccggagaggtacagctcatccacaatgtccgtggttccggcttcatcctgcgcgcgcgtgaatag

SEQ ID NO: 4650 - DNA, 1566 bp, BradyrhizobiumColbertium
atggccatgcggcatattcagtttatccgctcgaacacgtttctctgggccctggcggtcgcggccaccctcgcgctgttcgtcgccggattgttcgcgttcgtctaccagaagctcgacaactacctgatcgcgcgctccgaccgcatgatcaccacgcagatcaacttcatgagcgatctgccgcacggtcgccgcgtccgcgcggtcgccgatcatctccagcaagactcccggcatgtgcactatgtcgggctgttcagtgccgccggcacgcgccttgccggcaacatcgatcgcgtgccaagcgggctcgcccttgacgggacggtgcaaggcgcgcggctcaatccgctggaggcggcggcgggccgaggccccatcgtgaggatcgtcggcaggcgcctcgatgacggcgacgttctggtggtagcaaggaacgttgacgagacacgcgagatatcgagcgtggtcgggcaagcgctcgcgctcggcgtgctgcctgccttctgtctctgcgtgctcgccggcgcgtggctgagcgcccgggcccagaagcgcgtcgaagtggtgaaccagcgggtgcaacgaatcgttgccggcgagctgcgcgagcggcttccggagggcaatgcggacgatccgttcgcgcgacttgccaggatcgtcaatagcatgctcgacgagatggagacgatgatcaacgcgctctccggcgttggaaacgatatcgcccacgatctcaggaccccgctcacccgggcaaggctggcgctggagcgcgggcgaacgcacgcagtcacgcttgagcagctgcaggaggtcacggacaaggcgatcgctggcattgaccagtcgcttgcgatcgtcaccgccctgttgcgcctggccgagatcgagaatagcagccgtaccgccggtttcggcaacgttgtgctggacgagatcctgcacgaggtgtgcgacgtctacgagccgattgccgaggacaaaggtgttgcgcttggcgtcgtcatcgatcgcagcgtgcaggtgtggggcgatcgggacctgttgttcgaggcaatcgccaacctcgcagacaatgccgtcaagttcgcaccacctggcggacaggtggagctcgaactcaaattggacgacgggcgggcgctcgtgcgcgtgagcgataccgggcccggcatcaacgagcaggagcgcgaagcggtgctgcggcgcttctaccgctccgacaagatccgcaacacgccgggcgtcgggctcgggttgagcctggtggccgcgatcatcaagctgcatggttttcgactgatcatcggtccggctcccggcgggcgaattgaaatcgtggccgacgccgcaagggaaggcaagacacgctgcattccgatctcggatctcaggtcacgcaagcgcgaagtggataggacgatccgcggtcgcctcgatgttgggacatgccggatgtctgaaacagaattcaggtgtgtgacatccagtttagtggccggcgcgaccgcaagcctcttaggatcagtcaaccgtttgggaatgtgggagcaatag

SEQ ID NO: 4651 - DNA, 987 bp, BradyrhizobiumColbertium
atgcagaccagtcacgaaatccagaggcatgattccgtcgccgcgccaagcctatccgcaccggtcccgttcctcagggcctacgcaatgtccatcaagcgctacgagcttctcgagcgtgatcaggagcaacagctcgcacggcgctggcaggagacgcgggacgagcgcgccgcgaatgcgctcgttacaagtcatctgcggatcgcggccagggtagcgcgtggctacaagggatacggcctgccgctggttgatctgatcgccgaagccaatctcggtctcgtcatcgctgcctctcgcttcgagcccgaccgcggcgcgcggttctccacctatgcggtgccgtggatcaaggcgaccatccacgcctacatcctacgctcctggtccctggtcaagatcggtacgacggcggcgcagaagaagctgttctttcggctgcgcggcgagatgcggaaagccatgggcggcgcgatggcgcggctgacgccagaggtcgccactgtcatcgccgacagactcgaggtgaccgcgcgcgaggtgatggagatggagtcgcgccttaacggcgacatgtcgctcaatgcgcgcgtcggcggcgaggagaatggtgccgagtgggaaacgctgctcgtcgatgacgcggtcgatgcggagacaatcttggccgatcgcgagcaaacggacaaccgaagcagcgccctgcgtgctgcgctgggcgcgctaaccgcgcgcgagcgccacgtcctggaatcgaggcggctggcggaccgccccgttacgctcgatcagctcggcctcgaactgtcgatctccagcgagcgcgtcaggcagatcgagatccgcgcctttgccaaggtcaggcgcgccgtcattctcgccgcgcgggatgcgacgcgccgagaagcgctgccgcccgcggcgcgcgatgcccggcttgacggcatcaggcgctcccggctgcgcgaactcgccgccccatga

SEQ ID NO: 4652 - DNA, 3183 bp, BradyrhizobiumColbertium
atgggtattgttcgtttcgcgctgcgatttccgcacacattctatgtgcttgcggcgctaatcctgttcctcggcggcatcgccatccggtcgatgccgaccgacgttttcccggagatccggatccccgtggtcacggtgatctggagctataccggtctctcgacgcccgagatggagcagcgtgtcagcacctatagccaatactcgatcagcgcaaatgtcagcggtatcaaaaacgtcgaggcgcagacgctcaacggcctgtcgatccagaagatctacttccagcccgacgtcaatctcgatctggcgatctcgcagatcgtgtcggcgaccaacgccatccgcgccctgatgccgcccggcattcagccgccgatcatcgttcagttcaacgcatctagcgtgccggtgctccagctcagcctggaatccaacagcctgaacgagcagcagctctatgacttcggcatctatcgggtccgccagcaactggcgcccgttcccggcgtgacactgccgacgcccgccggcggcaagtaccgtcagatcatggtcgacatcgacccgaacaagctcctatcgcgcgggctgaccccgctcgacatcgtcaatgccgtgaatacccagaatctcacgttgccgaccggcacggccaagatcggcgacacccaatacaccgttcggaccaatgcgacgccggcttcgatcgaggatctcaacatgatcccggtcaagttcgtcaacggggcgacgatttttctgaaagacgtggcccaggtccgtgatggctctcaggtgcagcagaacatcgtgcgcgaggacggccaccgcgccgtcctgctcagtgtgatcaagaacggcaatgcttccacgctcgccgtggtcaatggcgtgaagaaggctctggaatcgcttcgtgagtcggcgcctgcggggctcaagatcaaggagctgttcgatcagtcggtattcgtcacccattcggttagtggcgtgctgcgcgagggagcgatcgcggccggacttacggcgctgatgattctgatgttcctgggatcgtggcgatcgacgctcgtcgttctgatctccatcccgctcgcgatgctctcctcgttggtcgtcctgtacttcctcggcgagaccctgaacacgatgacactcggcgggcttgcgctcgcggtcggtatcctggtcgacgattccaccgtgacgatcgagaacacttaccggctctggaccgaggatggcatgcctttgccggacgcgacgctgcacggggcggccgagatcgcgatgcctactctggtttccacgctggcgatcagctgtgtcttcacttcggtcgtgttcctagagggacctgccaaatacctgttcactccgcttggtcttgccgttgtgttcgcgatgctggcgtcctatgggctgtcgcggacgctgacgccgatcaccatcggcctgctcttgaagagcgagcggcgccacggcaagggtgaagccccgtcaggtattttcgcgcgcgcctcggctgcgttcgagcgcggcttcgatcggttgcgcaatggctattccgaacttttgctgaccttgctgcagcggcgcgccatcgcgcctgtcgtcgccgtcctggtgctggcgctcggggccaccatgttcgtctatgtcggacgcgacttctatcccctgatcgacggcggccagatacagcttcacgttcgcgcgcccgcgggcactcgcatcgagaagaccgaagcgatcttccaggcggtcgaggacaagattcgcgaggtgattccggagcgggaccgttcgctgatcgtcgacaatatcgggcttccggcgcgcgcctacaacctcgcattcacggacggctcgacgatagggggcaatgacggcaccatcctcgtgtcgttgaaggatggacatcagccgaccgcggattacgtcagcaagctgcgccaggtgctgccatcggcattccccgaggacaccttctatttccaggcggccgatatcgttacgcagatcctgaacttcgggcttcccgcgcaaattgacgttcgcacggtcggctatggcgccaacaatctggccgtggcaaaggagcttcagaagagcctgtccacgatcccgggcgtcgtcgatgctcacctccagcaggaggtcgatgctccagcgttctacgccgacatcgaccggaccagggccgcgcagctcggcctcaatgccagcacggttgcgaccaacatcaatgtcagcctcagctcgtccgcgcaggtctcgccgaatttctggaccgacccggcgtcgggtatcccatattaccttgccgtgcaaacacccgagtacagggccaattcgctgaatgcgctggggaatacgccggtgtcggcttcgcctgcggcaagcgggcagacggtaccgggcctgctcagcaatgtcgcgaccttcaagcgtggcacggttcccaccaattcgaatcaggccaacgtccagccggtgttcgacatttatgcgagcgtgcagggacgcgatctcggtagcgtcgcggccgacatcaacaaggtcacgtccgcgctgcagaagcagctccagcccggcaattcgatccaggttctgggccagatccagagcatgcatcagtcgttccgcgatctgggaattggactgctgttcgcggccatcctggtgtatctgctgatggtcgtgaactaccagaacttcggcgatcctttcgtcgtcatccttgcgttgccggcaaccttctgcggcatcgtgacgatgctcttcatcaccggaacgacgctgaacgtgccctctctgatgggggcgatcatggcggtcggcgtggcctcggcgaattccatcctgctggtgacgttcgcgcgcgatgagcaactgaaaggacactctgcattccaggcggcgcttagcgccggccgtaccaggatacgtccggtcctgatgaccgctgccgcgatgatcgtgggcatgatcccaatggcgatcggcggtccgggcgaggagcagaatgcggcacttgcacgagccgtcatcggcgggctgctgttcgcgaccccgacgacattgctgatcgtgccttatctgttcgccatgctgcgcaagcgcaatgatggccagcctcatcacggcgtattcgaggagcaaccgcaatga

SEQ ID NO: 4653 - DNA, 1125 bp, BradyrhizobiumColbertium
atgctcgcgggcggtctcggcgttggcggctggcggcactatcaggccgcgcgtgaagccgcggcgttggcagaacaggtcagaaccgccgttccggatgttcgggtcgcggttgttcggcccagcggcgacatcatgaagatcacgttgccagcgacgacgacggcgttcgaggcggcaaacatctttgcgcggaccagcggctatatcgagaagcgctacgtggatattggcgcgcatgtgaagaagggcgatctcctcgccgacatcaccgctccggagctggaccagcagattgcacaggcacaggcgacgctcgctcagaaccaggcgacgctgcagcagacgcaagcaagccgggaacttgccgacgtcactaatgcgcgggacagcaatctcgtcaagcagggctggctgacggcgcagcagggcgacaatgaccggctcacgctgcgtgcgcagcaggctgctgtgggcgtcgcccaatcgaacatcgcggcgcaggaggctcagattcgggtcctccagcaggagaaggcctaccagcgcgtggtggcgccgttcgacggcgtaatcacgcaacgcaacgtggacaatggcagcctggtgcaggccgggtcgaccttcatgttcacgctgatgcattccaaggtgatccggacccaggtctttgtgccgcaggacgaggcctttggagtcacccccggcatcgatgccgatatccgcgtccccgagattccgggccggacgtttccggggaaggtcacgcggatcgcgaccgcgttgcagccgggcagccgaacgctgctgaccgagatcgacgtgccaaatccggatggcctgctcaaccccggcatctattgcacggtcgagctatcgattccgcgcaagacgccgtcgatgatcatcccgtccgacgcactggtgttcgatgaaaacggtcttcacgtcgtgctcgtgcgcaatggcaccgttcatttgcagcaggtctcgatcgcgcgggatttcggcaccaccgtcgaagtccgtgaaggcgtgcagcccggcgatcaggtcgttctcaatccggcggtgagcctggcagagggcagcaaggtaaccgttcgcaaggtcgtagtgagttag

SEQ ID NO: 4654 - DNA, 378 bp, BradyrhizobiumColbertium
gtggagctgccgctcagtcccatgaccggcaatgtcggagcggcgctgcccggcgtcgacaagcccgggttcgtcgcgatcggcggctccggcatcggagacggcgatggcggagcgcagacaactacggtccccggcgacgtcgggtccgaggcaagcggaacgggcgcgagcgtcgtgtcgggtgcgtttggctcggtcgtggcggaaaaaggaccgggactgttcaacggcgagatcacgatcgcgcccggcaccgtcggcaggcccatcgccgtgctgccggttatggccacctgcgcgttgctcggagagccagcgagcagcaacgaagtgagcaacgttgcgaaaatggttcttaccatcccctcgccctaa

SEQ ID NO: 4655 - DNA, 273 bp, BradyrhizobiumColbertium
gtgccgggcggccaggtgacgtctgccgcatcactgccgctgtcgatcccgcaggtgccgaccagccgggcaccgggcaccatttcggtggatctaatggatgttggcggcaccggccttgatccaaactccatcgtgcccagcccgaacagctctgcctgcatggaaggggtctcgatgaacctggcttcgcctgcgactgtgttgccagccaatgctacaggtgcagcgccgacgccgggcgtgtcgccgatcctgccgccgggatgctga

SEQ ID NO: 4656 - DNA, 2889 bp, BradyrhizobiumColbertium
atgtcgtcttcgccggccaatcgaacctttactttcggaaactggctcattgattgccagcgcagggagctgagacacgacaacgtcgcggtgccgattggcagccgtgcgttcgagcttctcgagaagctggcggactctgccggcctgctggtgaccaaggatgaattgatcgggaccgtctggtcgggccaggtcgtcgaggacaacacgctccaggtccatatttccgccattcgcaaggcgctcggcaaggatcgcgatctcctcagaacggtctcaggccgaggatacaccctcgccggaagctggcgaagcggacatccggatcacggggcggccactacgatatccgctccgtccagctccttctcgagcaaccttccgaatatgcgtgcgcctctgatcggtcgcgaggattgcctgaccgaactggtcgacatcctgtccgcatatcgggcggtgacgctcgtcggccccggcggcatcggaaagacgaagctggccatcgaacttgctcggcacgtcgcgtcatcgttcggcgagtccgtcgcactgatcgagctcgcgtccttgcaggatccggcactcgcgatcgctgcaacggcccgcgccctgaagcttgccttgaacgacaagaacgtctcctctgcaagcattgccgaggccatcggcactcggcgcctgctcctcgtgctcgacaattgcgagcatgtcatcgacgtggccgcacaaatcgccagcgcggtacttcgcaattgtccgaatgtcaccgtccttgcgaccagccgcgaagggctgcgcatcgacggcgaatacgttgcagccatcccgccgctgtcagtccccggaccagatatcctggatcccgatctgcttcttcgggaaagcgcggtgcagctcttcgtcgcacgcacgcgggcgctgcgtgcaagcttcgttcccgacccaagcgatttgcccaagatagccgccgtctgccggcggctcgacggaattccgctcgcgctggagttcgccgcagcccgggtcgcgaatctcggggtggacgccgtgttgacacgcctggaccggcgcttcgagctcctgagcagcggtcgtcgcgaccagctgccccggcaccagaccctgcgagcgacgctggactggagctacgatctgttgtcgtccgaggagcagaggctgctttgccggctcgcggtgtttccggccggcttcacgctggacgcggccattgcagtggcagacgacgaccttacacgatcggacgtcatagagacgctgttcaatttggtcggcaaatcgctggtcgctctggatccctccttcgaggggcggtggcgcctgctcgagacgacgcgtgcttacgccttggagaagctggcgcgagcgggcctcgtcgcgcaagtgacacgacggcaagcgagcttcctgaggcagctcgtgacgccgcttggcgacacttccccaacctctgacgatgtttcccgcctcgcccaggagatcgagaacgtgcatgtcgcgctcgactgggcctttgcgcctgatggcgatgccgcgctcggagtcgagctgacggcgggcttcgttccggtatggatgcagttactgtccttcgtggagtgctccagccggatcgagcacgccctcgcccatctcggccctgagctcacctccgatccaaggctcaaggcgcagctccatgtcgcattgggattcgcccttctcaacactaccggctctgccgaccgcatgaaagcggccctcaacatcggcctcgtgctcgccgaagaaatgtccgatctcgagctgcagctcaaggctgtatggacgctgtggagctacaatctcaactcgggccaatatgacgccgccaagtccgtcggcgagcgatacctcgagatcgccctgcgaacggagaatcccgccaacgagaccgtaggtcgacgcctgatcggcgccgccgcgcatttctacggagcgcaagaggatgcgaggcgggagctcaccctgtccctggatcacgaggctcacggattggaggacggcccgcaccagatgtggttcctgctcaaccagagcgttttggccaaggccatgttggcccgcgtcctgctgctacagggacaggtggtgcagagcagggctcttgccgccgaatgcctccaggaggcggagcgggagaaggacaagcttgcgattgcctacgcgttgcggaacgccgtctgcccgatcgctctcatgacgcatgatctcgccgcggccgatcaggcgatctcggcacttctcgagctcgtgacccgcgagggaatagctttctggacgagctggacgtcgtgcctgaagggacagctgctcgtcctggaaggtcagtacgacaatggaatagcgttgctgcggagcggactgaaggcgcgggccgagaatggatggctgatgcgcaatcccgagtttctgggttcactcgccgaaggcctgcttgcgaccggtgagaccgcgccagccttggccgccgtcgaagaggccttgaacatcgccaggcaaggccggcaattgtggtgccttgcggatctcttgcgcatcaaggctgaaattctgctggtcgatgctccgctcgatctctcccggccggaactgctgtgcgccgaagggttgtccgttgcaagagagcaacaatgccgcttctacgagctgaagatcgctgcggcttgggcaaggatcatggcaggatcggaccgcaagcagaccgcgctcgatctcgtcggcccgatcacggcgatgttcgaccgggaagtcgatcttcccgcgctcgcattcgcgcgcggtctggttgcaagcccggcgacggcacgtggcggcggccgatccgcttcctgcacctgccattag

SEQ ID NO: 4657 - DNA, 294 bp, BradyrhizobiumColbertium
atgagtgtattcaagaccatgatcgccgcggcgctgatctctacggcaacgatatcctcggcctccgcgacctggtccttcgccgaccaggaacccgcggcatttgcatcaatgtatccggatcgcgacgtgctcaaccgaggcgcgctgacgccggcaggacggattggtctggagcggcccggtggcgccgcgccggtgttcggagcacgccatcccacgtctatcaatggcatcgttgatggagcgacagacgggcagcctgcgtacgcagctgaccacgcccatccgtga

SEQ ID NO: 4658 - DNA, 198 bp, BradyrhizobiumColbertium
atgtcgacggcgagaggcggtgctctcggtacgagtgccgcggcgcctggaacgaactcgctcggcattgcacttccctcgtcggagggcgacggtcatgcgatgaaacggcctctgctcggcacggacgcggccatcgacaaggaagatgcccggctcgagaaaatgctggaaggagcgatctgccgcggctgttga

SEQ ID NO: 4659 - DNA, 2859 bp, BradyrhizobiumColbertium
gtgccaatcatggctgagacaggccagcgtcccgtctacacctgctcggagtgggagatcgatcttgccaggcgcgaattgcgctcgctgggagacgtcgttcctctgggcggacgcgcctttgagatactcgcggagttggtccaggcagaaggcgatctggttaccaagaacgatttggtcgagcgcgtctggcggggcgtcttcgtcgaggagagcgcactcagggtgcacattgcggcgatccgaagagcccttggttcgggccgcgacatgctcgcaaccgaggtcggacgcggttatcgcctgcaggggacatggcagatccgccagatgaatgcgcccttgcaatctgtcgcatccgaacaattgcgctcgaccaacattccgagcgcatccttcgatctgatcgggcgggccaccgccatcgcgcatctgtgggagcttctctcggcgtatcgagtggttagccttgtcggccctgggggcattggcaagacggcgcttgtattggaagccgccagaaagccgccgcccggctttgcggcagatcggttgatggtcgagcttgcctcgttgtccaaccccaaaatggtttgctcggccgttgccggcgtgctcggcgtcaagctcgaaggagaggacatctcgccgggggcggtcgcacgtgcgatcggcgcgcggcagctcttgctcatcatcgacaattgcgagcatgtcgtcgaagcggtggcccaactggccgacgcgatcgtcagccgctgtcccgggaccaccatcgttgcgaccagccgtgaagcgctgcgcatcgacggcgagcacgtctatcgcgttcctcctctaggcgtgccgccggaatcccggctcggatgcggcggcgcatttgcctataccgccgtggaattattcgtgaccagggcgagggcgctcggttcgaactttgcgctggatgaggaaaatctcgaagcggttgcctccatttgccggcggctcgacgggattccgcttgcgatcgagttcgcggcggcgcgcacggtgatgctaagtccagcgaagattgctgtgctcctggacgacaggttcaaattcctgacgaccggccgtcggacggcattacccaggcagcaaacccttcgtgcgacgctcgactggagttacgatctgttgccggaggtggaggcgcggatcttgcggccgctcggcgttttcgccggagagttctcgctcgaagccgcgatcgcggtggctggcgaggacatgagcgaggtgacgcgtcggctggcgaatctggtggccaagtcgctcgttcttgtcgacattggcggtgatcatgctcactatagactgctggataccacgcgcgcatacgcattggaaaagctgcgctcccgcggggagcttgccggcgcggcgcagcgtctcgccgaatattaccgcggcttctttgcgcgaaccgaagccgatagcgagcagccgcagtccgagtggcttacgttctatggtcgccatatcgataacgtgcgatccagcctcgattgggccctctcgccggcgggggacgcgcagatcggagcagcgctgaccgttgcggcggtcccgctatggatgcaattgtcactgtttgccgagtgccgcgagcggaccgacctggcgttggctcgtctcgaggggagtgctgcgaatgcgccgcagctgcgcatgcaattgttggctgcgcgcggctggtcgctgatgcatggtattggaagagccggggaggcgggtcttgcctgggccgaaacgctggggctcgccgagcaactcggcgacgacgattatctgctgcgatcgctctgggggctgtgcatcgatcgattcaacaatggcgaatttcgcaaggcactcggtctcgcgcgccgttttgcggatatcgtggcgggatcacgcaactccgtggatcggatgatggcagaacggctcctcgctacttcgatgcactatctcggcgaccagcggctggcgcgccgtcatatcgaccgggcattggcccgtctttacgatctcacgacaaagccgcaggtgtttcgctcccgtttcgacctgcgcgcttcagcgtattgcgtccaggcccgcatcctctggctgctcggctgcgtcgaccaggcgctgagcgtggtcgatcgcaatctcgaggaaggtcgcacgagtggtcatgccctgacgttttgcagcttgctcggagaggacgcctgcccagttgcctttttcgccggtgatctcaccctggcggagcgctactacgcgatgctgatcgagcagaccgaacggcacccggtccggctgtggaacgtctgggcgcgcgccttcagggggatggtgatggcgcgcggtggcgaccttgaaggcggcctgtccttgctacgcaaggcgctaggcatggcgggcgaggcgcgattcctgccgcgttttttgcttcctcttggagaactggcggcatgtcttggagaagccggcgaggtttcgcaagggcttgcaaccgccgaagaggcgcttgcgctatgcgaagcgcgtgaagagggttggtatgtagctgaactctggcgcatcaagggcgaattgctgctgcgctctggcgcgcatcattccgtggccgccgccgagcaggccttcgaccaggctttggtggtggcgcggggccaaggagctctgttctgggaactgcgaacgacgatcagcctggcacgattgcggatcggccagggccggtcggccgaggcgtggcatattctcgattccgtgtacggcaagtttaccgagggcttcgagatctccgatctgcgccgcgcgaggacaatgatggcgcagctgtcggcttggtag

SEQ ID NO: 4660 - DNA, 2634 bp, BradyrhizobiumColbertium
ttgcgcgttcacatcgcggcgcttcgcaaggcgctcggagtcggcaatgccggcgtccgctatctgagcaccgtctccggaaggggctattgttttgtcgggtcgatctccgagcccgacgaggtacaaccggagccgtccagtcttcctgatgtccacaacctgccggcgcgtccccggcagatggtgggacgtgaaagaaccatccgggaaatatccgaacggttgcgagttcagcgtttcgtaaccgtcgtcgggccgggcggcatcggtaagacgacggcggtcgtttcggtcggttacaccctgctcgccgaattcgcaggccaggtccgcttcgtcagtctgggcgagacttgcgatgccgccctcatgccggccgtcgccgcagcttcgcttggcttgccggccagatcgaacgatccctcgacggatcttgcgactctccttcgcggcaagcgcatgctgctcattctggattgttgcgagcatgtcatcgatgcggcggccgcactggcagatcggctctttcaggaggcaccggagttgcacatccttgccaccagccgggagctgttgcgtgtcgagagcgaacatgtctatcgccttctgccactggcaagcccgccggagaaggccattctgactgcggcaagcgcgctggcctatcccgccgtcgagctcttcgtcgagcgtgcgacgtccacagggagcgagttcgcgttgacggatgcgaacgcctcggacgtcggaaacgtctgccgacgtctcgacggcattccgctggcaatcgaactcaccgcgggccatgtcggcgcatacggcgtcggcgcaatgctccgactcctcgataagcaattcaatatgctctgggagggacggcgcactgctttgccacgccaccgcacgctacgcgcgaccatcgaatggagctacaatctcctgcccggagcagagcgcgaggttctcaatcggctgtccgtattcgtcggcagcttcaccttagacgccgcgcaggcgattgccgcgactgcaaaggacgatggcgccattccggcgatcatcgacagtctcgtcaccaaatcgatacttgcgtcgagcgccgatcggcaatcgacccgctatcggcttcctgacgccacccgggcctacgcggaggagcggctcgccgccgacaccgatgccgatgaggtggcgtggcgtcatgccaactactttctcgccctgctcgaggacacggatggcacggcgagcgacggtttctcgaccgccgccgatcagttcggcaacatacgaagtgctctggtatggtgcttttcggaccggggaaaccgtggcatcggcgttgcgctcacggccgcagcgattcctctgttcttcaaattgtcgctcctggccgaatgcgagcattgggctgcccgtgccctcgaggctctcgatgaaaccgccgaaagcgcgaaacacagtcttgtgctctacgccgcactcggatccgcccgaacactcaccgggcaacttgacgatctggccatgatctgcctcaaccgcgcgctcgcgctggcagagaagaacggcgacctctccggccaggtccggctgatcaatcggctgcatctgctccaactgctcaccggaaaattcgacgacggcttgacgacggccagaagaggcgagcgcgttgcactcgagagcggcgatcccggcgccctttcccgcatgcgcgtggcgctcggcatctcctgccattatctcggcaaccttgccgcctcccgcgcgtacatagaggcggcgatgtcgcgtcccgatgcgaatgcggatgtcgatggcgagccgacgctcgactaccccggccgcgcgccaatcaccttggcccgcaacctttggctccagggatatcctgaccgggccatggagacagtgcgaaaggccgtttccgatgcgcgcaccatgaaccaccccaccatgctctgccgggcgctgctctgggcattcgacgtcttctattggaacgaggaactggacagttacgaggattctatcgacacgcttctggccgagagtcgcacgcacaagctcgccacgctccacatcgccgcagaagccatgaaaggaattgcactgctcgcgcgcggagccgattcgggtctcccgttgctggagggctcggtcgagaagctgcaggaccatcgtttcggtgcggtcgcagggttgagcgtaccgcttgctgcggcgctggcggcggcagatcgcggcgacgcggcgctggaaacgatcaaccgggcaattgcccaggcgcgacgttgcagcttcctgctggagatgcccgacatgctgcgggtgaaggccgaggcgctgatacggaaggccacgccggacgtgttgctggcggagcagaccctcgagcattccctcgaattggcccgccaacagggtgcgctcggttacgagctgcgtacggcaatcgcttttgcgaagttgcggcagcggcaaggccgccaccgggacgcagaggaacttcttgcgcctgtgtatgcccgattcaccgagggattcggtgcacgcagtctcaagacagcatcggatctgctcatcgagctgcgtttctcccggtcggacaagcttgcggttcactaa

SEQ ID NO: 4661 - DNA, 882 bp, BradyrhizobiumColbertium
atgagcaaagtgatcgtcgtaacgggagctggaaacaacatcgggcgaagcatctgtgaggaactggcgcaggcggggcacacggtctacgtctcaatgcgggaagcgggcgacctgagcgaacctggctccggcaggacggggccacaggccgctgagcttcgtaccatcgactttgatatctcctcggcagcctccgtgaccgcggccattgcaggcgtcatcgccgaacacgaacgcctcgacgtgatcgtgcacaatgcgcgacaggtcctctatgggccaacggaagcctttacgccggagcaactcgccgaactctacgagatcaacgtgctgagcgcgcagcgcctcaatcgggcggcgttgccgcaattacgcaaacagggccaaggcctgatgatatggatcacatcgagctgtgcctctggcgtcgcggtgccatttcttggcgcctatgcgtcgtcgaaagccgccatcgacacgctagcgcttgcttatgccggcgaactcgcacgatgggggatcgagaccagcatcgtcgttccgagcgctctcggacccggccactacgttcgctccggtcggccaacggacaccgctcgcgccgaggaatacgccgacggcccgaccggcgatgtgacggagaccgcgctcgcgggactggcgcagttttcgcccagggatcgggctccgcaagacgtcgcgagagccatcgtcgatgtcgtgaatatgccattggggcggcggccgctcagggttcatttcgatcccgatgacgatggcgcagccgccatcgacgccatcgccggccgcgcacgcgccgaattgctgcgccgtatcggactggaggacttcttctcgccggtgatcatcggctag

SEQ ID NO: 4662 - DNA, 1005 bp, BradyrhizobiumColbertium
ttgattgcggcggtcgtgggcggtggcgcagctgcgttcgcctacaccgcaggatggctctcgccggggcgtttgacgcccgaacggatgatcgaggcgctgacgccatccggcattacaccactcggacaccggcgaaaccacgccaagggaatttgcttcaccggcacgttcgaggccaacggaaacggcgtagaactctcccgagccaaagtcttcctgcaggggagatatccggctctcggccgcttcaatctcggtacccccaatccgaacgcggtagacgcgaccgtgcgcgtgcgcggtctcggacttcagatcgcggcagatggcgaggtctggcggatggcgatgatcaacccaccgttcttcgcggtctcgaccccccaagcctttcacgacctgctgatcgcgtccggcaagaaggatccggacgcgatgaaggcgttcattcaggcaaatccagagttcggtcgtttctcggcctgggccaaggcggcgccgtggaccgccagctatgcggaggagtcttatcatggtctcaacagcttcattttcacgaatgccaagggcggcaatcacgcggtgcgatggtcgctgctgcccgcggcacaacctgtcccgatctcgcaagccgatctcgagaagcgtgctcccgattatctcgagcaggagatcgcggagcgggtccggacagccggtccgctgcgatggaccatggtcacgaccgtcgcggatcccggtgatccgaccgcagaccccagcaaagcctggccggagacccgtcgcaagattgaagtcggaacgctgatcgtgcagcggatcgaaccggagcgcgatggaccgtgccgcgacatcaacttcgatcccaccgtcctgcccgagggaatccgagtgtccgacgatccgttcccggccgcgcgctcatcggtctatcgcaggtcctatgacttgcgcgccgcggaagccaaggactatccgcgtaccggagccgcaaagccgtga

SEQ ID NO: 4663 - DNA, 564 bp, BradyrhizobiumColbertium
gtgatcaaagcttctcatcgcttcacgctggtccagcggctcctgcactggctgatggcggcctgcatccttgccatgctcttcattggtgccggcatggtctcgacagtcgcaccagagtatcttccgctgattctcatccacaagacgctcggcgtcaccttgctgggcctcgttctgatcaggctggcacttcggctgtattacggcgtcccttcattgccggacgatcttccgagagccgtgaagctcggagcaagatcgtcgcacctactgctgtatggcttcatgatcgtcatgccgctgctcggcctcggcatgctctggacagcgtcctatccggtcgttctctacggcggcattcaaattccagcattgttgccgcagagcgaccatgcgcacacgctgttttggaacgcccatgtttatctgggctttgcgttctttgctctcgtgctgctgcatctggcagcggggttattccacgcatgggttcggcgcgacggcgttttcggcacgatgtcgctggcgcgcgtacgagacagaactacggacggcgaatga

SEQ ID NO: 4664 - DNA, 501 bp, BradyrhizobiumColbertium
atgaccaaagtcgaactccagacaccgaccgatctcggtgccaatgtgaaccgggacgtgccagccgcgttgagagcgctgctcgccgacgtattcgccctttatttgaagaccaggaacttccattggcacgtatccggccgccactttcgcgactaccatctgctgttcgacgagcaggccgagcagatcttctcgatgaccgacgatatcgccgaacgcgcccgcaagatcggcggcaccaccctgcgctcgatcggccacattgcccgcgagcagcgaattctggacaacgacgccgactatgtcgacccgcaggacatgctcgctgagctgcgcagcgacaaccagcagctgacgcgggagatgcgccgaattcacgatctctgcgatgaatacggcgacgtcgccacagcaagcctcctggagaactggatcgacgagaccgagcgacgaatctggttcctgtacgagaccggccgtaccggtccgacttcgtaa

SEQ ID NO: 4665 - DNA, 828 bp, BradyrhizobiumColbertium
atgatgacggcttcgacgttcacccggcatcaggagatcgcctggcgcggcggtcagatacggtcgacttcgcgcctggtcgctgaagagaccgcgcttgcgcttacctataacggatcgacccatgcggtaatgatgggcaccccgggcgatctcgaggatttcggtatcggcttcagcctcaccgaaggcatcgtcgaacgcgcgagcgagatcaaaagcatcgagattctcccgaacgagctgggtgtcgaggttcggatgtggctcgatggcgaccgcgccgcgtccttggcgacgcgtcgccgcgccatcagcgggcccgtcggatgcgggctgtgcggcatcgagagcctcgaacaggcatgccgcccgccatcgcaggtcgcgagccgaaacatcgtctttcatgcgcgggacttgcttggcgccatgcaggcgctgtccccgctccaagtcctgaaccagcagacgcggtctgtccacgcggcggcgttctggcatccgcgcaccggcatcggtctggtgcgcgaggatgtcggccggcacaatgcgctcgacaagctgatcggtgcgatggcacgcgagggacgccccgctgtcgacggcgccgtgctgctgaccagccgcgtatcggtcgagatggtgcagaaggccgcgaggatcggcgcaccggtcgtcgtggccgtatccgctccaaccgcactcgccatccggaccgcggaggaggcgggcatcactctgcttgcgatcgcccgcgacgacggatacggcgttttcacgcatgcacgccgcgttctgctgcccgacgaggccgcagcgcgctga

SEQ ID NO: 4666 - DNA, 117 bp, BradyrhizobiumColbertium
atgtcctggagaaaggccctcatcgtctttccgctggggctgctctacttcgctatcggcttccgcgtcttcaagagcaagttcctttgggaacgacctcgtactggccgcaagtag

SEQ ID NO: 4667 - DNA, 1248 bp, BradyrhizobiumColbertium
atgttttcacgacgagaattgctggctatgtcagcggcgggcgccgcaatggtcggctccggtgcgcaaggcgcgaccttcggtaacccggatgagccgccgcagggggcgataaatgccaagaatgccagcagcctgagcgatcacgggccacagaatccggctctggggaagcaatttccctccgcgcagacgccgccggcgacggatgtcggcggcctgccgatgaattgggcttccttcaacaacgcgcccaggcgcatccagaacggcggctgggcccgccaggtcactgttgccgacttcgcgctctcgaaggagatctccggtgtcaacatgcgactgtccgccggcggcatccgcgaactgcattggcatcaggcggccgaatgggcgatcatgacctacggtggctgtcgcatcaccgtgctcgacgtccagggccgcccttatgtggccgatctcaaggccggcgacctctggtacttcccgtcgggcgcgccccattccctgcaaggacttggtcccgacggctgcgagttcgtgatctgcttcgacgacggccacgccaacgagttcaacacactgctggtgacagattggttcgcccatactccgccggaggtgctgagcaagaacttcggcgtgccggccgaaacctttgccaagattccgttgcacaatctctggatcttccaaggcacgcttcccggcgatctcgccacagatcgtgccttcatcgccgaacatgccgaggcgccgccttatcccttcgtctatccgctggctagttccgcaccgctcaaggagagtgctgcgggaagcatccgagtcgccgacagcagcaacttcaaggtggcaaccacggttgcggcagcgctggtgacgatgccgccgggcgccgtccgcgagatgcattggcacccgaacgcagacgagtggcaatactacatcaagggcaaggcgcgaatgacggtgttcgatacggggcccaacatacgcacgacggatttttccgcgggggacatcggctatatcccgcgcaatctcggacactacgtcgagaacgtcggcgataccgatgtgcagttcatcggtgtcttccgggctccgcgctacgaggaggtatcgctctccaactggctggcgcacaccccgccgaggctggtcgcccaacacctcaacatcgacgagaagttgatcgcgcagtggccggacaacagtccaggcgtcatgccgaagacctga

SEQ ID NO: 4668 - DNA, 2337 bp, BradyrhizobiumColbertium
atgggatcaccatattcagagatatcttcgatgaaaagaaaatcggttcgtccctatcgtgagcctgccggaggctggggagcgctgaaggcactcagtgaggccctgctggtgcagcgcgtgccgattaagggcgcagtgacgctgagccgcatgaaccagccgcaggggttcgattgtcccggctgcgcgtggcctgatccgaagcatacctcgtcattcgaattttgcgagaacggcggcaaggcaatcgcttgggaagcaacgtccaaacgatgcacgcgcgaattcttcgctgcacataccgtctcggagttggcaacctggagcgactatgatctcgaaatggtcgggcggctcacgcatccgatggcctatgatgccgcatccgaccgctatcttccggtggagtggagcgatgccttcgacatgatcggccgtgagctgagggcgttgccggatccgaacatggcggagttctacacgtccggacggacctcgaacgaggcagcattcctctatcagctcttcgtccgtgaatatggtaccaacaattttcccgactgttcgaacatgtgccatgaggcgaccagcgtcggcctgccgcaatcgctcggcgtcggcaagggtacggtgctgctggaggatttcgacaaggccgactgcatcttcatcttcggccagaacccgggcaccaacagcccgcggatgatgacgagcctgcgcaatgcgtcgcgccgcggggcgtcgatcatctccttcaacccgtttcgcgaacgggcgctcgagcgcttccaggcgccgcagagtgccgtcgagatgatcacgctgacgtcgacgaagatcagctcgaagcttttccaagtgcgtgttggcggcgacgtcgcggtcctcaagggtatcatgaagatcttggtcgagctggatgacgcggcccgcgccgccgagcagccggagatcctggactggaatttcatcaaggggcacaccacggggatcgaagcgctgattgacgacctcaagcgaacgcaatggccagacatcgaacgtcagtccggcctgacgcgcgaggacatggcgtgcgcggccgaagcctataggaagtcggagcgcgccattctcgtttatggcatggggatcacccagcatcagcgaggcgtggacaacgtgcagcagatcgccaaccttgcgctcctgcgcggcaatgtgggacgcgagggtgccggcgtttgcccggttcgcggccattccaacgtgcagggcgatcgcaccgtgggcatcacggaggtccccaagccggattttctcgagcggctcgaacaccacttcggcttcaagccgccgtcagagccgggacacaatgtcgtgacggctttggaagccatgatccgcggcgaggtgaaggtcttcttcgccatgggcggcaatttcgccgctgccattcccgaccggcgtgcaacgcaggcggctctgcgcaagctcgatctgacagtccacgtctccaccaagctgaaccgaagccatctgatccatggtcgcgccgccctgatcctgccctgtctcggccgcaccgaaatcgatgtccaggcgacgggacctcaatccatcacggtggaagattccatgtcgatggtccacgcttcgggtggccgcaacacgccggcgtcagagcatctgctcagcgaagtggcgatcgttgccggcgtcgccaaggccaccctcggcgaccgcacggtagttgaatgggatgggtttgttgacgattacgatcgcatccgcgatgccatcgaggcggtcttccccatcttccaggactacaatgcgcggatccgcgtacccggcggcttccatctgacctcgacggcgcgggaacgaatctgggccacctcgtcgggcaaggccaatttcctggtattcgagggatgtggcgaggatccaaagcaatgcgatcccgatttcctatggctcagcacgatccgcagtcatgaccagtacaataccacgctctactcgatgtcggatcgctatcgcggcgtcttcggacagcgcgatgtggtgttcctcagcgaatacgagatgaaaaagcgcggctttgccgagggcgaccgcgtggacctcatcacggaatccaccgatggagtcgagcgggtcgtgcgtaacttccgcgtggtcggtcattcgtttccggccggctgctgtgcagcctattatccggaggccaatccgctggtgccgctctatgcccgcgatcccatgagcttcacgccgtcgttcaagggtgttccgatccgcttggtgcgctcgagcgacgtcgcgactgcaacagagaggctttga

SEQ ID NO: 4669 - DNA, 1410 bp, BradyrhizobiumColbertium
gtgctgccgaccgagaccaagcagaatcgcgttctcctgtgggcctggggcagtgtcgccttggccctgttgtcgctcgcctgcttcttgcttgagtatgatttcacggtgatcgcagtcgcagctttcctggctgcatcgctgacgctcgtcgcagcagccatggacatcgccgcccggaatagggcgatcgccgaactggagcggagcgagcagcgctatcgccagctgttcagccgtatgccgatcgcattccggcaactcgacgccagccggttggttgcactgttccgaaagctgagggccgagggcgtcgaggatctcggtgcctatttcgacagccaccccgactttctcaaaacatgcatggaggcgctctcgttccaggaagccaacgaacgggccattcagatgttcggaagaagctccgatcagtatatcggacggtccatggtcgacacctggaaggagcgcccggacacattccgacgcgccatggaatcccgctttcgcggagagacccacttcgaggaagagacccggatggtcacgtgggacaaccgcatcctcgacgtcctatttacgacggcgcgggtcggtcctatagatgatctcgagctgagcctcgtcggcacgatcgatatctcgcagcgtgtccgcgctgaggagaggctccgacaggtgcaggcggagttcgcgcatgccgcgcgaatctcggtgctcggcgagctcaccgcctcgatagcccatgaggtcaaccagccgttgtcggccatcacgaccaatgccgcagccggcctgcgatggctcgacagacccaatcccgacttggccgagctacgcaaggtgatcgagaacacggccacggatgccagacgcgccgcgagcgtcgtggcgcgcgttcacggcatggcggcacgcaagactccggagcggatcttcctctcgttcgacgatgtcgtccgggaagccctgttgttcctgcgacatgaaatggagtctcgcgacgtcgcggtccagcaccgccccgatccggcagcgccgctggtgcttggcgaccgcacccagctccagcaggtgatcgttaatctggcaatcaacgccgtgcaggccatgacccaggccggcaccgaaaaccgcaggatcgtcatcaccaccatttccctggatacgaaaaccctatgctgctcgatggaagacaacggtccgggcatcgaccccgaacatgtcggtcggctgttcgaaagcttcttcacgaccaaggatagcggcatgggcatgggcctgccgatctgccgctccattgtcgaagcgcatggcggccggatccatgccgaaggtaagggcgctcagggaggcgcacgtttctggtttacgctgccgatctccgagccggtgggctcgacctga

SEQ ID NO: 4670 - DNA, 3144 bp, BradyrhizobiumColbertium
atgaatatctctgcgccgttcatcctgcggccgattgcaacagccctgctgatggcgggcctgctgttgctcgggcttgcggcctatcccttgctgccggtcggcgcgctccccaacgtcaattaccccaccatccagatctccgcgcaattgcccggcgcagacccgggaaccatcgcgtcatcgctggccacgccgctcgaacagcagctcagccagatcccaggcatcacccagctcacctcgtccagcgcgctcggcgtagcgcagttgacggtgcagttcgaactgtcgcgcacggtggacagcgccgccgtcgacgtgctcgccgcgatcaacgccgccagtcccttcctcccgccgaacatcccctacccccctacgattcggaaagtaaatcccgcggaaacgccgatcatgctgatcgcgctgacctcggactcgctgccgctgaccacggtggacgcctatgccgagaacatcctgctgcccaagatctcgcaggtcccgggcgtgggtctcgtgggaattggtggccagcagaagcccgcgatccgcatccgggtcaatccacaggcccttgccgcccgcggcatcggcctcgaagatgtccgcaacgtcatcgccggcgccaatgtcgatctgcctaagggtacgctcaacagcccgcgcgtgacttacacgctcaacaccaacgatcagctgctgaagccttcgacctatgaggatctcatcatcgcctatcgcaacggatctccggtgcggctgcgcgacgttggcacggctatcgaagcgcccgaaaacgatctcctggcaggctggtatggcaaggaccccgccatcattctggccgtccagcgcgttcccggcgccaacgtcatcgaaaccgtcgaccgcgtcaaggcgctgctgccgcaactgcaagcctccgttccgcctgcgatcaaagtgacgatcgcagccgaccgcaccgccacgatccgcgccgcagtctcggacgtgcagttcacgctgatgctcaccgtcgccttggtggtgatggtcatattcctcttccttcggaatttctgggccaccgtcatcccggctatcacggttcccctggcgctgatcggaacgttcgcagtcctctacgtcctcggttatagcctcgacaatctgtcgctgatggcgctgtcgattgcggtcggattcgttgtcgatgacgccgtggtagtgatcgagaacatcgttcgtcatctcgagcagggcatgacgccgatggacgcggccctcaagggctccagcgagatcggcttcacgatcgcctcgatcaccttctcactcatcgcggtgtttatcccgctattcctgatgggcggctatgtcggcaagctgttccaagaattcgccatcacgatcaccgcctcgctgttgctatcgctgatcatctcgctcacgctcacgccgatgatgtgcgcgcgcctcctaaaggacagttcgcgcaagaagcacggccgactttacctccttttcgaacgcggcttcgacgccctgcttgcactctatacgcgcggcctgcgcatcgtgctacgccatcgcttcctgacgctgctcgtgatgctctcgacgattgcgctgaccggctttctctacgtcatcatcccgaaagggttctttccgcagcaggacaccggacagatcgtcggcatcaccgaggccgcccaggatatctcattcccggccatgtccgagcgtcagcaggcgatcgtcggcgtcctcacaaaggacccggccatccaatcggtagccagctacatcggccccggcggcccgacggcgacgctcaatcaaggacgcatcttcatcgtcctgaagccgaagcccgaacgcaaggcgaacgccgaccagatcatcaaccggctgagaccacggctcgcccacatccagggcatcacgctctacatgcaggcggctcaggacatcaccatcggcgcgcgcctgtcgaagacgcaataccagtacacgctgagggacgccgattccaacgagctcagccactggtcggcgatcttcctgaagaagctccgcgcgctcgacatcattaccgacgtcgcgagcgaccaggccaatgccggcccgagactgcaggtcaccgtcaatcgcgagattgcttccagcttcggcatcctgccgacgacgatcgacaatgtcctcgacgacgcctttggccagcgcatcgtctccaccatgttcacctcgttgaaccagtatcacgtcgtgatggaggtcgatccgaagttccagtatgggcctgaggcgctcaaggacatttacctcaactcggccagcggccagcaggtccccctgagcacgctggttcacagcgtcatcgagcccgccccgatcctgatcaaccatcagagcctgtttccctcagtcacgatctcgttcaacctgcggcccggcgctgcacttggcgatgccgtggcggcggtccagaagatcgagaaggagaccggcaagccggcttcgctctcgacctcgttccagggcaatgcgcaggccttccagtcgtccctgtcgggcacgccgctgttgatcggggcggcactgattgtgatctacatcattcttggcgtgctctatgagagcctcatccatccgatcacaattctctcgacactgccgtccgccggcatcggcgcattgctgctgctgctcgcggtccacatggatctcagcgtcatcgccatcatcgggatcattctcctgatcggcattgtcaagaagaacggcatcatgctggtcgacttcgctctcgaggtggaacgccggcagcggctgagccccgaggaggcgatctaccaggcctgcactcttcgctttcgcccgatcctaatgacgacgatggcggcgctgcttggcggcgtgccgctgatgctcggcaccggtaccggcgcggaattacgccagccgctcggctacaccatcgtcggcggcctgatgctctcgcagatcctgacactctacacgacgcccgtggtctatctctatctggacaagctcggcagctggctcaccggacccaagtctgttgcaagtgaagcacccggcacttcccccgccggcggagctaagggattgacccgcgaatccgtttga

SEQ ID NO: 4671 - DNA, 1176 bp, BradyrhizobiumColbertium
gtgaaacgctctttcaccgtcgcgctcatcgttctcgccgcaatcggagccggagcaggcttatggttcttcgcggaccgcaagccggtcgtcgcagccgcgcctgtgccggtgcccgctgccgtgcccgtggtcgccaccacggtcagaggaaaggacgtgccgatctacttgcgcggcatcggcacggttatcgcgtacaacaccgacgtcgtgcgcagccagatccagggccaaatcgtcaagatcgctttcactgaggggcaagccgtgaaggccggcgacttgctcgcccagattgaccctcgcccctataaggcccagatcgagcagctgaccgcaaatcgcgatagggaccaggcgcagctcgcgaatgccgaggccaatctctcccgctacaatcagcttggcgacaagggctatgcgacgccgcaattgattgatacccagacggcgcaggttgcccagctcaaggcggcggtgaaagccgaccaggcgcagatcgatcaggccaacgtccagctcagctacacgcgcctgacctcggccatccccggcatcaccggcgtccgccagattgacgtcggcaacgtgattcatccgaccgatcccaatggcctcgtcgtcgtcgctcagatcgagccgatctcgctgctcttcaccttgccgcagacggacctgccttcgattcaggagcacgccgccaagggaacgctgaaggtcatcgcctacagccaggacaacaagatgaagctggacgaaggcaggctgctgctggtcaacaacgagatcgcgggaacgacgggcaccgtccagctcaaggcggaatttcccaaccacgagcaccggttgtggccggggcagctcgtcaacgcgcgtctgctgctggagatgcggaaagatgcgttgacagtggccggctcggcggtccagcagggtcctcacggcagctatgtctatgtcgtgtctgccgaccagaccgtgaccttgcgtccggtccacgttgcgcagatcagcgatggccaagcactgatcgatcagggactagaatcaggtgacgtcgttgtggtcgacggtcaataccggctcacggaaggaagtcacgtccacgagctgcacggcaaggccgcgcgagaggccgacctgcaaagcgccgtgcaggatgccatcccatga
